United States Patent Application Publication US 2007/0016974 A1 - sequence listing, part 6

SEQ ID NO: 32661 - DNA, 400 bp, Oryza sativa
  Clone ID: uC-osflM202016b07a2
aggaattaaaatttacttatggttttttttttttttcacaggtcacatggaaatcaaaagggaagtagcaaaaggaaaagctgttttacactcgacagggtaacaaactaagaggagcaacacaaggatacaagagggagagatttaggccttttttctgggggtttggaaataaaacttttccccttttggtacccctaaaccccaacccaagggtagtagtaaggcaccccacttaaaggataccgggccattttttacaaaaaatggggggctcctttggatcaatcgaatcagaacattattatcatcatttacaggttggcatgctcggcggcgaagccgcccttgccggcggggccgccacccggggcgcccccgggcctttggtaaacggggg

SEQ ID NO: 32662 - DNA, 233 bp, Oryza sativa
  unsure (1)..(233): unsure at all n locations
  Clone ID: uC-osflM202016b08a2
ccccaaaaaggccctttttttttggggagaaaagaggggcgaagggaaaaaacatggggcccccggaaaaaaacaccaaatattttttttttttttttttttttttgggggcccaaaatattttttattgggccccgggggggaaaaaaaattttataaaaaaaaaaaaccccccttttttgggggcttctaaattttggggggtttttttaaaaagnagggggggcaatttt

SEQ ID NO: 32663 - DNA, 435 bp, Oryza sativa
  Clone ID: uC-osflM202016b09a2
ggcaacaatagatgttatataagaagtccatatggtcctcaacatggtccaaagccttcctcgtattcgggaagggcatacataacagtaagcacgttttactgttttagcattttaattacaagcagtttggtacacgacacactgaaaagatgacgcgttttaagtatcaggcatcatatggttagatggagtggcatcagtcccgcggttccagctctgctccactatctcacgaactttttggttgtattcccgcttgttctcactgaataggcgggcagcttcagagttggccaggtgaatttgggtttggatcgcaaagcagcgactggatggatgtgagtatagcagctacatcatatatggggctccactggttttgtagtatatctaagcatatgctcccatcaacataaatgttaggatgaaaca

SEQ ID NO: 32664 - DNA, 459 bp, Oryza sativa
  Clone ID: uC-osflM202016b10a2
aaatgtgaaatgtgatgtacatgttcttgcacagatctaaagaatgtacaaaaaattcataaggatctcataaaatcgaccaaaacaatacagcagattctagatttagagttttgtactctttcacatgacctacaatacactggactgtttgcttgattctgccaagaaatcaagttggcgctgttgtacttgctgaattcttcagagcagcattgccagcagatggagctatatttgtttgcttgatgctagaggtctgatagttctgaaatactaatttctgatactctccaagagcccatattgggaatatattgcgataagccatataacacaaggggccatttttcaagaaacttccgatcatttcctacagcaaaacaaataaactattagtaaatgagtgtgaacagcactgagtgctaagggtttaggctatttacatgacccgctagc

SEQ ID NO: 32665 - DNA, 457 bp, Oryza sativa
  Clone ID: uC-osflM202016b11a2
agaacagagaagaattgaattagatggggaattctgtttttacatcgttcaattcacatctcttctctgcggatccttatatagcaatgtgccattggatctctctcccttacatgtggcccagtcagtcactattaggtccactcactcccgtgataggccggattgggtccgctcgttcacgacgcgactttctgagcccatcttggtgcgccgaagaagcttcatcgcttgtctaatcaggaacagaaggtgacgatgccgtgacattctccccccgttgagacgaagcttgtccccaagcttcagccaatggaaagcgatgacgtaattcttgagcattctcctaggtgatcacctgaacatctggtccagaccaagcaacctgaacaaactccaccattttggctcccttgcgaatgaagcgccgatccaaaatgcggagaggagttggtga

SEQ ID NO: 32666 - DNA, 462 bp, Oryza sativa
  Clone ID: uC-osflM202016b12a2
atatagattccttttatttcctcatttattcacttgccacatcatttttcattctaggtggcaacttatttaatactatgaacactatcctagtcattgggttggaaatggcctaatgcttactattgcgcatgaatcccgatgcatgtcttagacgtaaaaaatttggctcaaatttatgatatttttggacacctgaaaactaaaaaaattcataataaaatcaagtacttattttgagtaagttcgtttttatactagtatagtacacacggtacaagctgaggttcacaccacaaatgtccaagctagatgcatgcaagtgcccagcatggtagcacgagcatctggtcggtctttgggacggaagaactcaacgagttgctagttctgaattctgatcatccagaaacgggtagtccgtgtagcccaccacagatcagaggtatagaacgtgctcct

SEQ ID NO: 32667 - DNA, 454 bp, Oryza sativa
  Clone ID: uC-osflM202016c01a2
aatctgaatcgcagaagggatttttttttcctttttactattccgctacctagatgaaaaggcacgtagtgcaatacgaattaaaagttccgtaattgcattccctaaaaatgccatgatctaacttattttccttgctattaatatgaaagggcacgagcacatgtgatatgttcagtgtagcctcgcaccagttgaaaacgaaataaagcaaccgcatgtgtgtctgatgttatcaaagtttaggcctcattgaatttgaagacgcaatcataaagcctcccacccaaaaattgcgccacttcaggatgttttaccattccgatcttaatcgagtcacatttcatttgtgcatataggttggtttcaattgctcttcccatgccttctagaacgaccaagtcagcatcatttgccaaataagctagttctggtgacacactggacaaatcaa

SEQ ID NO: 32668 - DNA, 396 bp, Oryza sativa
  Clone ID: uC-osflM202016c02a2
ataattaattcacaacaccatatttcattgatcaggttcagaacctgcacagaaatacacactaccggtacagatctcaccttctctccaatactcgtacatccatccacgcggtccacacgaatacgtacatctatacggtacacgtacgtacatctactgcaccgcgtacacacacgcacactctcctgcagagacgcgcattgtcgtcaacctagctagcttagctgaaggcgatgcgttcgccatggccagcacggcggcggcggcgctcacttgccggggacgaagttggtggcgtaggcccaggcgttgttgttgacggggtcggcgaggtggtcggcgaggttctcgagggggcccttgccggtgacgatggcctggacgaagaagccg

SEQ ID NO: 32669 - DNA, 78 bp, Oryza sativa
  Clone ID: uC-osflM202016c03a2
aaagaaaccccccctgggaaaggggggggaaaatattaagaaaacacgcccccgggggggtcataacaaaactggggg

SEQ ID NO: 32670 - DNA, 444 bp, Oryza sativa
  Clone ID: uC-osflM202016c04a2
agtatcagatacagcaacattaactatacacatctgtcccaagttcattagacatcagtagtagcatattgacatggatcagtttagttcgagtcatgcggcaaaagaaaatcaaaatcattcgtcagatgcaacaggaaaacaaaattattcgtcaggtgcagcagcgctgatcacaattcacaaatgccgcatcaggtgcatccagcgaagcagccagaagactgaagttaccatttcctgctaaacacaaccatttgtacaggattcttgattacatcctcgcgctccatcaattgcttggtagcaccgttaactatggtggagcagcatctgtgtctggcactggagccctagaaatactctgatcagatggttgaactacattgttggcttgatggcaggcaatatccttcatatgatgcaaagcaatctgctgaagtt

SEQ ID NO: 32671 - DNA, 399 bp, Oryza sativa
  unsure (1)..(399): unsure at all n locations
  Clone ID: uC-osflM202016c05a2
cagacaagtagaatatacactggatacaattcttttttcaatggtaatacaagtagtacaaataattgggccaaacaattcaggccttttgtaaagtaaggctcaaggttttaggaaaaaagaggggcaacatatttaaacaaccctttatgacctgcctatgatctatatgatctatccaggcagtggaatcctgacatggtactcaacangtaagtcaataacccagaaacatccatcgacgttcaaatatccatgattggtgacaaccacagtggcaagtaaactcaaaagagaaaacctggacattccgtgtgatcaccggcaatgtacagtgcaagaacagctgtaatccacaacaaagatggcagtacaaatccttaacacatgttaagtcag

SEQ ID NO: 32672 - DNA, 87 bp, Oryza sativa
  Clone ID: uC-osflM202016c06a2
catgaatattttttttggtttgggctttgataccagaaacaacaaagggcaagtttcccaaaaaagaaaaaaaacccggttgcgggg

SEQ ID NO: 32673 - DNA, 448 bp, Oryza sativa
  unsure (1)..(448): unsure at all n locations
  Clone ID: uC-osflM202016c07a2
aatctgaatcgcagaagggatttttttttcctttttactattccgctacctagatgaaaaggcacgtagtgcaatacgaattaaaagttccgtaattgcattccctaaaaatgccatgatctaacttattttccttgctattaatatgaaaggngacgagcacatgtgatatgttcagtgtagtcctcgcaccagttgaaaacgaaataaagcaaccgcatgtgtgtctgatgttatcaaagtttaggcctcattgaatttgaagacgcaatcataaagcctcccacccaaaaattgcgccacttcaggatgttttaccattccgatcttaatcgagtcacatttcatttgtgcatataggttggtttcaattgctcttcccatgccttctagaacgaccaagttagcatcatttgccaaataagctagttctggtgacacactggac

SEQ ID NO: 32674 - DNA, 471 bp, Oryza sativa
  Clone ID: uC-osflM202016c08a2
ataattaattcacaacaccatatttcattgatcaggttcagaacctgcacagaaatacacactaccggtacagatctcaccttctctccaatactcgtacatccatccacgcggtccacacgaatacgtacatctatacggtacacgtacgtacatctactgcaccgcgtacacacacgcacactttttctggaaaggaccccgcaattggtcggtcaaacttaacttaggctaaacttgaaaggcgaatgcgttcgccatgggcagccacggtcggccggcgggcgctcactttgccggggacgaagtttggtgggcgtaggcccaggcgttgttgttgacggggtcggcgagggtggtcggcgaggttctcgagggggcccttgccggtgacgatggcctggacgaagaagccgaacatggagaacatggcgaggcggccgttcttgatctccttcaccttgagctccg

SEQ ID NO: 32675 - DNA, 282 bp, Oryza sativa
  Clone ID: uC-osflM202016c09a2
aaaaaaaccctccctagggaaaatggggggaaaaaataaaaaaccccccaaggggggtctataaaaatatggggaggtgtgcacaaaggataataacccaaatttgtaaaaaaagaaggccaccccgttaaaacattgtaaggggggaaaattattccccccttttgtgaaaaccttttatttttgtcggggggggaaattttcccaattgaaaaaaagcccccctttttttttcccgaaaaagggctcttttccaaaaacgtttacaatgggccggacccc

SEQ ID NO: 32676 - DNA, 448 bp, Oryza sativa
  Clone ID: uC-osflM202016c10a2
agtatcagatacagcaacattaactatacacatctgtcccaagttcattagacatcagtagtagcatattgacatggatcagtttagttcgagtcatgcggcaaaagaaaatcaaaatcattcgtcagatgcaacaggaaaacaaaattattcgtcaggtgcagcagcgctgatcacaattcacaaatgccgcatcaggtgcatccagcgaagcagccagaagactgaagttaccatttcctgctaaacacaaccatttgtacaggattcttgattacatcctcgcgctccatcaattgcttggttagcaccgttaactatggtggagcagcatctgtgtctggcactggagccctagaattactctgatcagatggttgaactacattgttggcttgatggcaggcaatatccttcatatgatgcaaagcaatctgctgaagtttgt

SEQ ID NO: 32677 - DNA, 431 bp, Oryza sativa
  unsure (1)..(431): unsure at all n locations
  Clone ID: uC-osflM202016c11a2
cagacaagtagaatatacactggatacaattcttttttcaatggtaatacaagtagtacaaataattgggccaaacaattcaggccttttgtaaagtaaggctcaaggttttaggaaaaaagaggggcaacatatttaaacaaccctttatgacctgcctatgatctatatgatctatccagcaggggaatcctgacatggtactaaacagtaagtcaataacccagaaacatccatnngacgttcaaatatccatgattggtgacaaccacagtggcaagtaaactcaaaagagaaaacctggacattccgtgtgatcaccggcaatgtccagtgcaagaacagctgtaatccacaacaaagatggcagtacaaatccttaacacatgttaagtcagcacagatgatatatatagtttcatgagtgaacc

SEQ ID NO: 32678 - DNA, 149 bp, Oryza sativa
  Clone ID: uC-osflM202016c12a2
aaatgaatattttttttggtttgggctttgaaaccaaaaacaaaaaagggaaagagttcaaaaaaagaaaaaaaacccaggtgcggggggaagcctttgaaattctgatatggcaaatggtttgacaagcactaaaaactatccggaaa

SEQ ID NO: 32679 - DNA, 412 bp, Oryza sativa
  Clone ID: uC-osflM202016d01a2
agaacaaatcaattcctgatgttcccattcaacaagaaaatataaagccgtgatggtcagaacatgtgcaaaatcttacaaagagggaaagttaaacttgatacaaaactgagagcacacatgcatgcccagaaaggtgagtcgaccatgagtgtgtatataatcccttttgttcgcatcaatggcgcgataggttgaaagcgaggtacggttcgtgaacttccgtccgttagctttgacataacgcgtgatgccaaagcaaaaaccagaccatagtagtgacagcaccaaatggaaaacatcattacgtgctcttctcagtgacattatcaagaatatcacggcagccaaaagcagagcaaaagccaggcggaaggacgcgtgattctctataagtcctttggttggagtt

SEQ ID NO: 32680 - DNA, 370 bp, Oryza sativa
  Clone ID: uC-osflM202016d02a2
ggaaaaaacagctttaactggaacaaaccgaggggtaatttacatatggggcccgaaaaataccggccctggggacatggctcccattgaggagcctttgctggtgggaaaggaaaaggttttcctacaaagggggggttaataagaatgcaaaaaaagaacccgattgtttggggccttttcctttccccaaggatttggcacgctttttcaaaaaatgggaattgggttgtgcaacctgtccaaaaagggcaggaactttgggaagttttgggacctttcagccccaaaaagggggcaaaatgggccccttaatggggcacttgattccctccaatttttttcggttttattggggttttcaaccccc

SEQ ID NO: 32681 - DNA, 119 bp, Oryza sativa
  Clone ID: uC-osflM202016d03a2
ttttttttttttttttttttttttttttttttttttttttttttttttttttttttttttttttttttttttttttttttttttttgggtttttttttttttttatttttttttttttt

SEQ ID NO: 32682 - DNA, 428 bp, Oryza sativa
  Clone ID: uC-osflM202016d04a2
catcctgagctcatgaattagttataatcaaacagtcaacggcacaatagtagcacatgtcacattcaattttattagctctaactcacataaaaatgcaatttatttgaacacgaataatgtccaaaattagctcttgaaacgaagatcactaccatcactttgcaacttcgcattcatcttccatcatcgataatttctctgttaatctctagggcaaggtgtgagaggggaaatgtcttccctctgccccactgagcctcatcggcagtaggacccggagtatgccggtggtgacatggctgctattccttcccctgagctgcaactcaatgatgtagttcggtttcgccaccccatcactcaccggaatgtctccggtgagcattgccaccaaccttgacataggtggtctttggtgtggtgag

SEQ ID NO: 32683 - DNA, 131 bp, Oryza sativa
  Clone ID: uC-osflM202016d05a2
tttttttttttttttttttttttttttttttttttttttttttttttttttttttttttttttttttttttttttttttttttttttttttttttttttttttttttttgtttattttttatttttttttt

SEQ ID NO: 32684 - DNA, 361 bp, Oryza sativa
  Clone ID: uC-osflM202016d06a2
acagcaacgggtgcattgctcaaaaagacccgaagcagcataattgggaacttacaagcttaaagcatttctttcctgctcagaaaaaaaacgaggatcgttcggaatccgaagagggatcgcatttgtgtctaagtaacattcaagggagactcactgtctgccttgctctttttggatttccattacattacagaacaaggcttattctatggaaccttttgtgctagtttcagtttcaatactttacaacaccaccagtccaccacacctgagcagcagcacttatggaggaatttattccaagaaactaatacgggtcctctttctcaagtttgacaggaactattaactgttggtg

SEQ ID NO: 32685 - DNA, 451 bp, Oryza sativa
  Clone ID: uC-osflM202016d07a2
agaacaaatcaattcctgatgttcccattcaacaagaaaatataaagccgtgatggtcagaacatgtgcaaaatcttacaaagagggaaagttaaacttgatacaaaactgagagcacacatgcatgcccagaaaggtgagttcgaccatgagtgtgtatataattcccttttgttcgcatcaatggcgcgataggtgaaagcgaggtacggttcgtgaacttccgtccgttagctttgacataacgcgtgatgccaaagcaaaaaccagaccatagtagtgacagcaccaaatggaaaacatcattacgtgctcttctcagtgacattatcaagaatatcacggcagccaaaagcagagcaaaagcaaggcggaaggacgcgtgattctctataagtcctttggttggagttggcatatcccgactaactgaggatatgtgatgtccttg

SEQ ID NO: 32686 - DNA, 389 bp, Oryza sativa
  Clone ID: uC-osflM202016d08a2
agaaaaatcagttttaactggaacaaaccggtgggaaatttacaaatggggcctgaataaaacagcccccggaacaggactccccttaggagccctttgtgtggtgggagaagggaaaggtttacctacaaagggcgggctaaaagaatggcaaaaaaaggacaaggatggttgggccatttacccataccaccaagacttgccaccgcttttccaaaaaatggagattggcttgggcacacctgtccaagaagggccggagcttcgtggaagttttgggacctttcagccacaaaaagggggcaaaaagggccccttaaaggggcactcggttccctccaattttttccggttttattggggtttccaaccccctggcgtatgggggt

SEQ ID NO: 32687 - DNA, 120 bp, Oryza sativa
  Clone ID: uC-osflM202016d09a2
ttttttttttttttttttttttttttttttttttttttttttttttttttttttttttttttttttttttttttttttttttttttgggtttttttttttttttttttgttttttttttt

SEQ ID NO: 32688 - DNA, 342 bp, Oryza sativa
  Clone ID: uC-osflM202016d10a2
catcctgagctcatgaattagttataatcaaacagtcaacggcacaatagtagcacatgtcacattcaattttattagctctaactcacataaaaatgcaatttatttgaacacgaataatgtccaaaattagctcttgaaacgaagatcactaccatcactttgcaacttcgcattcatcttccatcatcgataatttcttctgttaatctcttagggaaggtgtgagaggggaatgttctccctcttgcccactgaggctcatcggcagttagacccgggagtagccgggtggtgacatggcctgctattccttcccctgagctgcaactcaatgatgta

SEQ ID NO: 32689 - DNA, 130 bp, Oryza sativa
  Clone ID: uC-osflM202016d11a2
ttttttttttttttttttttttttttttttttttttttttttttttttttttttttttttttttttttttttttttttttttttttttttttttttttttttttcttttctttttttttcttttgttttt

SEQ ID NO: 32690 - DNA, 303 bp, Oryza sativa
  Clone ID: uC-osflM202016d12a2
acagcaacgggtgcattgctcaaaaagacgcgaagcagcataattgggaacttacaagcttaaagcatttctttcctgctcagaaaaaaaacgaggatcgttcggaatccgaagaggtgatcgcatttgtgtctaagtaacattcaagggagactcactggctgccttgctctttttggattccattacatttacagaacaaggcttattctatggaaccttttgtgctagttttagtttcaatactttacaacaccaccagtccaccacacctgagcagcagcactcatggaggaatttatt

SEQ ID NO: 32691 - DNA, 444 bp, Oryza sativa
  Clone ID: uC-osflM202016e01a2
ggcacctagagggatgaataggtatttccaaaaatttcttaaacttacaaacagcttagaactaactggatagtccggtaccactgcagacaatctgactatagagcagtcggatagtccgactgcatcagaacaatccaatcagagcatcgccagagaaaaactataagtgacctggaaaatagaaatagaaatgaaaaaataatggtggtggtggcaggatgtagcgtgggttgatcgtttagaagcacgaaagctccttgaggcaacccgtggccagtgcccttggcattcttgcagacggccatggtcttgttgtttgtgccagagtactcgaccttgatgtcattcaaggtgacgccggtgcacggcagcttgtcggagcagaggaggctaacggcctcgtcgtggaggaggtgccggtgatgttcttgaaggtgatgt

SEQ ID NO: 32692 - DNA, 356 bp, Oryza sativa
  Clone ID: uC-osflM202016e02a2
ggactcaaaatggcctaatgcatttttaacatcccggcctcagacagaaaactccaatcacccagcccaattttacaaaccaccaagaacaagaatattggaaagaacaaactagtcaaaatcaaataaatttaaacatggagaggggaaaaatgaaagaaaagggaaaaaaggggtaaaataaaaggaaaagaaaagaaatgcatgcccatggttagtttccttgaccattggggtccgaacaccgttttacaagagggtagccaacaacgggggctaaacccggggaccccccaaccgacggcccttggccttgggggccccgggggctttgggttcttcgggccgggggggcc

SEQ ID NO: 32693 - DNA, 411 bp, Oryza sativa
  Clone ID: uC-osflM202016e03a2
ggctaaaaatttttaggaatatcattttaaaggattcctcacatgcttatccattaaattctttgggcaccacactgggctacaggccatttggctatttggacaaaaagggaaacagatcaaatcctagtccataacagcaaactttaaatggaagaaacaaatggcaaaaaaaagctttgcccaggtgcacacgcattatttggtttaaccggcccccattttgggagcccccccttgggttcccttaagggccctcaaaacattgttttgtccccaaaccatgggcccttattgccaaaagctgtttaacaacttggttttcaaagcttgctcttggccctcttggtcagctttcaccttgggcccatgcttaatggacctggggggcgccattttgggcgcccctgg

SEQ ID NO: 32694 - DNA, 430 bp, Oryza sativa
  unsure (1)..(430): unsure at all n locations
  Clone ID: uC-osflM202016e04a2
ggatcagtgtgtataataacaccgatcaaataatggaaatggaaatagaaacggcttacatctccaaaacaaagagtgtttcaatcaacaacttgcaacaatcttaaaacttatgatgcagtaaccagatcaggtcaatctttgacacttggtttagtgtcaattaattctcagttactggatcttgaacatcgatatatggctgattaggtgctactagtttttcttacccaaactgagatgacaaactccatgcttcgtaggagaaaanaaaaaaagacaatctagactggttaacaagctgctactactactacatagatcgagcacaattaacaagcaatgcttaatgttgatggctgctcgatggttcgcctttcttcaattcatttaagcttaattaagctcgctgcaacagcttagaacccta

SEQ ID NO: 32695 - DNA, 402 bp, Oryza sativa
  unsure (1)..(402): unsure at all n locations
  Clone ID: uC-osflM202016e05a2
ggttcaaatatggattgcaatttgaaaatctcaacaagaatcatcatcgcccgacaacttgggaagtaacgtttctcatcagggcaccactagaacaaagattagccagcacacaaaatctaagatatgtcgtgagtgtcctgtccttaggcagcagtaacaggttccgatccttgcttcgattcagctccagatccagctttctgcgaatcagaagaaaaccgaattagaacagacttgagggnttgtgaaaagtatagagcttcagagtttcgcaattaagatgggacgagctgcttacgccgtcttcggctggctgcttggtcatcttggcgaacatattgctgtagaatttggcatccttcttgttgtactccttgaccttttccttgaggttcttgt

SEQ ID NO: 32696 - DNA, 438 bp, Oryza sativa
  Clone ID: uC-osflM202016e06a2
ctcaaactgtaaagagcatattctgttaactagtcaagttttatttacggaacacgtcagctcaaggcataccgaaacaattcgtgcgatacttcgattgaattaaactcctgaaccatggtaatagctgtggaactaattccagtcctcatttgcacctaccatgtagagtattcaataaacatggttagccacatcggccattgatgcaactcgatgtaaactgcaagatgcaactaaacagatcaaacctacaaaaaaaaaaaggctaagatgaacttccagtcttcctaatgcccattcctggcactacgctcttggcgaataggttagcacagaagttgacgaacagtggagttcttggtgttgctgccttgccgagagcctctgctatgtgctatcacgtcagatgtttaagatgcatgaacagtcacatgc

SEQ ID NO: 32697 - DNA, 459 bp, Oryza sativa
  Clone ID: uC-osflM202016e07a2
gtcacctagagggatgaataggtatttccaaaaatttcttaaacttacaaacagcttagaactaactggatagtccggtaccactgcagacaatctgactatagagcagtcggatagtccgactgcatcagaacaatccaatcagagcatcgccagagaaaaactataagtgacctggaaaatagaaatagaaatgaaaaaataatggtggtggtggcaggatgtagcgtggggttgattcgtttagaagcacgaaagctccttgaggcagccggtgggcagtgcccttggcattcttgcagacggccatggtcttgttgtttgtgccagagtactcgaccttgatgtcattcaaggtgacgccggtgcacggcagcttgtcggagcagaggaggctaacggcctcgggcgtggaggaggtgccggtgatgttcttgaaggtgatgtccttgaggtgac

SEQ ID NO: 32698 - DNA, 416 bp, Oryza sativa
  Clone ID: uC-osflM202016e08a2
ggactcaaaagggcctaaggcatttttaacatcccggccttagacagaaaactccaatcacacagcccaattttacaaaccaccaagaacaggaataagggaaagaacaaactagtcaaaatcaaataaatttaaacatggagaggggaagaatgaaagaaaaggaaaaaaggggaaaaaaaggaaaagaaaagaaatgcatgcccatgggtagcttccttgaccattgggtccgaaccccggtttacaagggggagccaacaacgggggcaagcccggggaccccccagccgacggccctggccctgggggcccccgggggcttggggttctccgcgccgggggggccggaggcggcctccggggggcccccctttttgggcttgggggtcgacccggggggcccggcggcgggg

SEQ ID NO: 32699 - DNA, 323 bp, Oryza sativa
  Clone ID: uC-osflM202016e09a2
gggtaaaaattattagtaatatcattttaaagtattcctcacatgcttatccattaaattttatggggaccacacttggtttcagtacatattgctatttggacaaaaaggaaacagatcaaatccttgtccataacagcaaacttcaaatgaagaaacaaatgcagaaaaaagctttgcacagggcacacgcataatttggttaaccgaccacatttggaagccaccattggttccatcatggcctccatacttttttttccccaaaccatgggccttattgccaaagctgtttaacaacttgggttttaaagcttggtttt

SEQ ID NO: 32700 - DNA, 415 bp, Oryza sativa
  unsure (1)..(415): unsure at all n locations
  Clone ID: uC-osflM202016e10a2
gtatcagtgtgtataataacaccgatcaaataatggaaatggaaatagaaacggcttacatctccaaaacaaagagtgtttcaatcaacaacttgcaacaatcttaaaacttatgatgcagtaaccagatcaggtcaatctttgacacttggtttagtgtcaattaattctcagttactgngatcttgaacatcgatatatgngctgattaggtgctactagagtttttttacccaaacttgagatgacaaacttcatgcttttgtaggggggaaaaaataaagggcaatttagaactggttaacaaagctggtactactactacatatgatcgcgcccacttaacaagcaatgcttaatgttgatggctgctccatggttcgccttttcttaattcatttaagcttaattaagc

SEQ ID NO: 32701 - DNA, 436 bp, Oryza sativa
  Clone ID: uC-osflM202016e11a2
ggttcaaatatggattgcaatttgaaaatctcaacaagaatcatcatcgcccgacaacttgggaagtaacgtttctcatcagtgcaccactagaacaaagattagccagcacacaaaatctaagatatgtcgtgagtgtcctgtccttaggcagcagtaacaggttccgatccttgcttcgattcagctccagatccagctttctgcgaatcagaagaaaaccgaattagaacagactttgagggttgtgaaaagtatagagcttcagagtttcgcaattaagatgggacgagctgcttacgccgtcttcggctggctgcttggtcatcttggcgaacatattgctgtagaatttggcatccttcttgttgtactccttgaccttttccttgaggttcttgtatgtcaacttcacatccctgttatcaggatcaat

SEQ ID NO: 32702 - DNA, 441 bp, Oryza sativa
  unsure (1)..(441): unsure at all n locations
  Clone ID: uC-osflM202016e12a2
ctcaaactgtaaagagcatattctgttaactagtcaagttttatttacggaacacgtcagctcaaggcataccgaaacaattcgtgcgatacttcgattgaattaaactcctgaaccatggtaatagctgtggaactaattccagtcctcatttgcacctaccatgtagagtattcaataaacatgngtagccacatcggccattgatgcaactcgatgtaaactgcaagatgcaactaaacagatcaaacctacnaaaaaaaaaaggctaagatgaacttccagtcttcctaatgcccattcctggcactacgcttttggcgaataggttagcacagaagttgacgaacagtggagttcttggtgttgctgccttgccgagagcctctgctatgtgctatcacgtcagatgtttaagatgcatgaacagtcacatgctac

SEQ ID NO: 32703 - DNA, 421 bp, Oryza sativa
  Clone ID: uC-osflM202016f01a2
acttaaagcatatgttttaattcataaaccagatgcaaaattggcttggtgttctttcaatgtatacacgatataatctgattgtctcatactgtatgatgtatccctcttactacaaactgaagggacagggccaactttcaggttctacaaatttacaacaggtacttattctttcaatcatccatataataataataaatatcggaaccatgttagatgtcaaagaattacaccgacttttaactccaattttctaagcaacggcacgcttcgttctgaaaaactcacgattggattggcatgcaccatggccttacaggcaaatccgactcttgacaccttcacttctacaaagcttgagcgagctttttctgataattctgatggtgtcaccatacgtcacggaggtacctgccgt

SEQ ID NO: 32704 - DNA, 408 bp, Oryza sativa
  Clone ID: uC-osflM202016f02a2
accatatcaaggagatcagtcttgaaagtcttacccaaacgaaatctgagctttacgacaggccactcacctagcagcttagtgagaatgggcagtaaaaccgaaaggaaacaaattccaacagctaaccacagcattcgtggggccaacacggggtattaaacccgtggaaaacgctttagtggttcgccatgtttgcaaaccacataagcttcttcgtaaagggatctgtagtaaagcaagaattcaagatcctcccaccttgctaggatgcatatgaatgcgacggcaagcgaggagcacattgctacggtgtcagagatcaagaatgcttgaaacgctaacttctttgccatgacaggaagtccctcgctttcagaatcgttgctgtatcccccaggcagggtg

SEQ ID NO: 32705 - DNA, 391 bp, Oryza sativa
  Clone ID: uC-osflM202016f03a2
caggcagaacacaattatatcaatatccaaacggcagcttctcacataaataagataaccgatagctcaaggttgagaatcaaaaaccgaaagaaataggttctttgagcagagggcagaacataaacaaaaatgcctgttgcaaattgcaagactacaggtaaacttaaatgccataaggagtttgtttggcagcataagatgaaactacttgggaataaggctactttttcactcgtcatccttttcctcgtcattatcatcagcaccagctgaggagttgagagcattcaatttttcgacgagactggccttcctttggtcgtaggttagctttttgaggttgcatctcttgggggtagccggttcctttttggtcgatttggccatg

SEQ ID NO: 32706 - DNA, 59 bp, Oryza sativa
  Clone ID: uC-osflM202016f04a2
aataaaaaaagaaaaaaaagaggaaaaaaaggggaaaagaataacataagaattaaaaa

SEQ ID NO: 32707 - DNA, 356 bp, Oryza sativa
  Clone ID: uC-osflM202016f05a2
gggggaaaaagaaaatcagtaacattatattttaatccggaatgaaggaagaagtggtaagaaactcatcccctacatacagcacgcgctccatatgacagattttgcataaaggggtaaggggtaggaatgaatcagtacttaatagccagcagtgaacgcaaatgatataattagagcgtggataggtaggccttggctagcaatttgccgagcttgacctgcgccggggtggttgaggtgcctgttagtccttggccatgggggaggcccttggcgtcgacgtacttgagaaaaggaagcctgaccgcctttttgggccttcctgacgggcttgaccaacttgccctgccccg

SEQ ID NO: 32708 - DNA, 256 bp, Oryza sativa
  unsure (1)..(256): unsure at all n locations
  Clone ID: uC-osflM202016f07a2
acttaaagcatatgttttaattcataaaccagatgcaaaattggcttggtgttctttcaatgtatacacgatataatctgattgtctcatactgtatgatgtatccctcttactacaaactgaagggacagggccaactttcaggttctacaaatctacaacagngtacttattctttcaatcatccatataataataataaatatcggaaccatgttagatgttaaagaattacaccgacttttaaatccaattt

SEQ ID NO: 32709 - DNA, 461 bp, Oryza sativa
  Clone ID: uC-osflM202016f08a2
accatatcaaggagatcagtcttgaaagtcttacccaaacgaaatctgagcttcacgacaggccactcacctagcagcttagtgagaatgggcagtaaaaccgaaaggaaacaaattccaacagctaaccacagcattcgtggggtccaacacggtgtataaacccgttgcaaacgctataggtggtcgccatgtatgcaaaccacataagcttctttgtaaaggatcttgtgtaaagcaagaattcaagatcctcccaccttgctaggatgcatatgaatgcgacggcaagcgagggagcacattgctacggtgttagagatcaagaatgcttgaaacgctaacttctttgccatgacaggaagtccctcgcttccagaatcgttgctgtatcccccaggcagggtgaaggctgcggcaaaggttatcgtcgccatgagaatagccacttgcgaagtgtt

SEQ ID NO: 32710 - DNA, 426 bp, Oryza sativa
  Clone ID: uC-osflM202016f09a2
caggcagaacacaattatatcaatatccaaacggcagcttttcacataaataagataaccgatagctcaaggttgagaatcaaaaaccgaaagaaataggttttttgagcagagggcagaacataaacaaaaatgcctgttgcaaattgcaagactacaggtaaacttaaatgccataaggagtttgtttggcagcataagatgaaactactgtgataaggctactctttcactcgtcatcctgttcctcggcatcatcatcagcaccagttgaggagttgagagcattcaatctttcgacgagactggccttcctttgctcgtaggttagcttcttgaggctgcatctcttgggggtagccggttcctttttggtcgatttggccatggtaggatcagcgcggatggcatcatggacctttttgt

SEQ ID NO: 32711 - DNA, 394 bp, Oryza sativa
  Clone ID: uC-osflM202016f11a2
gggggaaaaagaaaatcagtaacattatattttaatccggaatgaaggaagaaggggtaagatactcatcccctacatacagcacgcgctccatatgacagattttgcatagaggggtaagggtgaggaatgaatcagtacttagtagccacgcagggaacgcaaatgatataattagagcgtggataggtaggccttggctagcaatttgccgagcttgacctgcgccggggtggtgaggtgcctgtagtccttggcgatgggggaggcccttggggtcgacgtacttgagaaaaggaagcctgaccgccttttgggcctccctgacgggcttgacgaacttgccctgccccgtcgcgatccccacctggatcaccagcagcttcgggaacgc

SEQ ID NO: 32712 - DNA, 216 bp, Oryza sativa
  Clone ID: uC-osflM202016g01a2
aaaaagatgttactagtttgtgaaaagagaacgtaacgctttttggcctttactacacgataattgtccagtaaagtaaacatcattatcatatcaaggggaaggccatcagtcatacaatacacacacacttaaaaaaggggctgtaccacccatgtatgattttgcacccctgctttgcttttgcttgccctgggaaaacttgccgctactggt

SEQ ID NO: 32713 - DNA, 360 bp, Oryza sativa
  Clone ID: uC-osflM202016g02a2
gtcacaaattaagagatcgattgcattgatgagctcggtacaggtatactcagccgtttatagaaggaagaaaaaaaaaggcacaatcaacctttacgatccaattgaggaccaggcgttcttttgattatatatgtatacacaggtcagttatgcagcaaataccaatgttaggttcgtattggcagatgcttgctttaaaactgagagttggaaatctttccaggcatttatcgacctggattccctgaaccacatcatcatatagagtcctgtagtgatgactgatgaaataaatcattatcccaatttctgttttgagttacgcaaacacaccaagtcctcctagcgtaaccgttc

SEQ ID NO: 32714 - DNA, 143 bp, Oryza sativa
  Clone ID: uC-osflM202016g03a2
ggggggaaattgggaaaagaacaggtgtttttggggtagccccaaaggggttttttgggccccaataaaaaagggagaattactaaaaatcccccctaaacaccaaaattcttaaaccccccggttttaaaaagccaggggtt

SEQ ID NO: 32715 - DNA, 410 bp, Oryza sativa
  Clone ID: uC-osflM202016g04a2
gaagcgcggcaataaaacattgcattgaattctgaacgataaacaccaggaaccggcgtttatttgaggcaagcactgcccaaaatttcgcaaaagtactgaaaccttagacatagtacacatccatggcaaacatggatgccaaatgacaactacagaaaattatcaaattcgaatgcagctgacggcttctcctgctgaagatgcatattttcccctccattacttggatgtgctctttccatcgacagccaatgggacggcgctggccaggctgcggtatttcagagcatagaacatttcaatgtaacggcgagttttgcgccttttaaggttgcttacgtacttccagaatccgtatacaccagtcaaggtcatcagcctttcagagttcagtttccaggggtact

SEQ ID NO: 32716 - DNA, 295 bp, Oryza sativa
  Clone ID: uC-osflM202016g05a2
aaaagttaaaaaaaacggtaaaaaaaaaaaaaaaaggggcccattgtatattcccccaaaaattaaaaaaaattcctcccttttttttttttaaaaaggtaaaaaggggggtgaaaaaaccttttttaaaaaaacggtttccttttaaaaaatttttttgaaacaaaaaacttttcaaaaaaagggggttttttaaacaaaaagaaaaggggccccccgggggttttgtttggcaaaaaaccttttgggttgttttatgcccttgagaaaaacccccttggggggttttcggggg

SEQ ID NO: 32717 - DNA, 157 bp, Oryza sativa
  Clone ID: uC-osflM202016g06a2
gacaggcaacggcagttttacttagctgagcatttatttatacatgcatgcactcttgtctttggaccttgacaagctagcacataactgaactgagcaaagcaacgcagcaagtccatgaggaggcttggcggtggcttgtccgacggcgctgctc

SEQ ID NO: 32718 - DNA, 206 bp, Oryza sativa
  unsure (1)..(206): unsure at all n locations
  Clone ID: uC-osflM202016g07a2
aagaagatgttactagtttgtgaaaagagaacgtaacgctttttgtcctttactacacgataattgtccagtaaaggaaacatcatcattatatcaaggggaaggccatcagtcatacaatacacacacacataaaaaaggggctggnccgccgtgatgattttgcaccccctgttttgctttgccttttctctgggaaaaactgc

SEQ ID NO: 32719 - DNA, 359 bp, Oryza sativa
  Clone ID: uC-osflM202016g08a2
ggcacaaattaagagatcgattgcattgatgagctcggtacaggtatactcagccgtttatagaaggaagaaaaaaaaaggcacaatcaacctttacgatccaattgaggaccaggcgttcttttgattatatatgtatacacaggttcagttatgcagcaaataccaatgttaggtttcgtattggcagatgcttgcttcaaaactgagagttggaaatctttccaggcatttatcgacctggattccctgaaccacatcatcatatagagtcctgtagtgatgactgatgaaataaatcattatcccaatttctgttttgagttacgcaaacacaccaagtcctcctagcgtaaccg

SEQ ID NO: 32720 - DNA, 310 bp, Oryza sativa
  Clone ID: uC-osflM202016g09a2
ggggggaaaatgggaaaagaaccggggtttttgggttagcccaaaggggttttttgggccccaaaaaaaagggaaaatcctaaaatccccctaaaccaaaaatatttaaacccccggttaaaaagcaagggggttccaaaaggccttggatttgaaactaaacccaaagaaaaagggcccccttttttaaaacccaaggccctttttaaaaaatttttcaaaacaatggttttggaggaatttaaaaaagaaaaaacccccctatcctaaagggaattacccttgggcctttaaaaaagggtttttaacc

SEQ ID NO: 32721 - DNA, 420 bp, Oryza sativa
  unsure (1)..(420): unsure at all n locations
  Clone ID: uC-osflM202016g10a2
gaagcgcggcaataaaacattgcattgaattctgaacgataaacaccaggaaccggcgtttatttgaggcaagcactgcccaaaatctcgcaaaagtactgaaaccttagacatagtacacatccatggcaaacatggatgccaaatgacaactacagaaaattatcaaattcgaatgcagctgacggcttctcctgctgaagatgcatattttcccctccattacttggatgggctctttccatcgacagccaatgggacggcgctggccaggctgcggtatttcagagcatagaacatttcaatgtaacggcgagtttcgcgccttttaaggttgcttacgtacttccagaatccgtatacaccagtcaaggtcatcagcctttcagagtacagtttccaggngtacttttcgtaaat

SEQ ID NO: 32722 - DNA, 294 bp, Oryza sativa
  Clone ID: uC-osflM202016g11a2
aaaggtagaaaaagtggggattaaaaggaaacaaaggggccattggtttttgcccccaaaaatttaaaaaaattccccccttttttttttttcaaagggtacaaaggggggttaaacaaccttttttaaaaaaccgttttcctttaaaaaattttttggacaaaaaacctcttccaaaaaagggggtgtttaaacccaaaagaaatagggggcccccggggtttttggttgtgcccaaaacctttgggggggtttggtgcccctcgaaacccccccttggggggcttttggggg

SEQ ID NO: 32723 - DNA, 198 bp, Oryza sativa
  Clone ID: uC-osflM202016g12a2
gacaggcaacggcagttttacttagctgagcatttatttatacatgcatgcactcttgtctttggaccttgacaagctagcacataactgaactgagcaaagcaacgcagcaagtccatgaggaggcttggccggtggcttgcggcggacgctgcatcactcatcgtaattggcatcttcttccctgattaacatatg

SEQ ID NO: 32724 - DNA, 85 bp, Oryza sativa
  Clone ID: uC-osflM202016h01a2
aaaggcaaaaaaggaaaaaaattttaaattaaaaaatgggacttaggaacctctttaaaaaaaacaataaaacccgtgaataaaa

SEQ ID NO: 32725 - DNA, 422 bp, Oryza sativa
  Clone ID: uC-osflM202016h02a2
ggagcacctcgaggagcggcaggcggactgggcctactcccgccccgtcgtggcgctcgacctgctctggaacctcgctttcatcaccgtcgccgccgtcgtgctcgtgctcagccgtggcgaggactcgcccatgccgctccggacctgggtcgccggctacgccctgcagtgcgtcgtccacatggtctgcgtcgccatcgagtaccggatgcgccgggggcagcgtgacagggccccggcgtccgccgacgaggaaagggggaagtgacgggtcgtcttcatctagcgatgatgatgtcacggaggacgatcgccgtggtagctgcaccgattgcgttagtattgcaaagcacctggagtcagctaatacaatgttctccttcatatgggggataattggattttattggatatctgct

SEQ ID NO: 32726 - DNA, 408 bp, Oryza sativa
  Clone ID: uC-osflM202016h03a2
gatgctgatgcctaccttgaattttcatcgatttgtcacgcgtgtaccttgatcttacataccttgattacatggaccataacacaggtattcgtgatgttaccacttgggtctcctgataacacaggtattcgtgatgttaccaaaatatacatataatcttatttgttgaggcgacacacccgtgacatgctaacgagcatccatatattcacaaattcatccttctgatgatcctagaacaatgctgtcatcttcagatggcaaatcagcttagacattagcaacttccggttggttttatactgtttcgcggaagcgactgttgccttcaatcaatttttagaatgtaacttttcacaagatgtcatcaaacatcagggaccataccagcccctgcacgaattg

SEQ ID NO: 32727 - DNA, 385 bp, Oryza sativa
  unsure (1)..(385): unsure at all n locations
  Clone ID: uC-osflM202016h04a2
aaaaaggcagctatattattcacccatagttattaacagagacttaacaaaaggggaataaaccccaggtgatctcatgtctaatactcccagtaacaactaataataataagcactagcacctccagctccaggttcctatgtgctagtgcagtattgcacatccaattacacaaattattgctgcaatgggngattactggtagtgtttctaacttttctttggcgccttcatcaggttgccagcagcggcaacagccatcctcctttttttttacttcctccgagcttaccttccttggcttttcttcggttgctggcgccttctctggctcagcgggagcggcggtttcagttgtttctggtgaagtgcttggggcaacca

SEQ ID NO: 32728 - DNA, 409 bp, Oryza sativa
  Clone ID: uC-osflM202016h05a2
caactatctacgagaaaataatcactaggtgatcaagaaagtgattatatgtcaggcacagcacacaaataaacccaacatgactaacttctactgtccgtgaagttctaaccatttaagcaggggtaccaaatcatcatctgcagggtagcataggcgacatgaatctcctattatacactcaaaaaacataaaagcccaagttctcgaaaaaggaaaaaagcagccgccaaaatggccgcgataagacgtcaaaatcaaaggcttatgttgtgtctcatgtctcccttcgggacctccggcgtggggcagcagctccatccttctcttcctcttccttctcgtcctccttgccaccgctgcttccagctgcttcggactcggtagactttggttttttgacctcggc

SEQ ID NO: 32729 - DNA, 440 bp, Oryza sativa
  Clone ID: uC-osflM202016h07a2
ggtggggttggtgtgtcttgtttctatcttccgccccgttgtggtgtttgacctgctttggaaccttgttttcatttaccgtcttttttttccccggcgaacacgcaaaacattttaccactcccaccgggggctaagggccccttcacccaaccccttgaggcgggaagaacccccccaatttggcgggggaaaaaaaaaaaaaccccccggggggccccccacccgggggggaagcccccaacccctgtccggggggggggggggccccctggacacggggcggaaaacgggggggcccccgggcccggccccaggcacccggaacgggggggggcccgggccccacgggggccgggggggggggccccccaggggggggaaaaccgggtccccccccccggcccggggcctgttccccgggaccccccccggggggc

SEQ ID NO: 32730 - DNA, 444 bp, Oryza sativa
  Clone ID: uC-osflM202016h08a2
ggagcacctcgaggagcggcaggcggactgggcctactcccgccccgtcgtggcgctcgacctgctctggaacctcgctttcatcaccgtcgccgccgtcgtgctcgtgctcagccgtggcgaggactcgcccatgccgctccggacctgggtcgccggctacgccctgcagtgcgtcgtccacatggtctgcgtcgccatcgagtaccggatgcgccgggggcagcgtgacagggccccggcgtccgccgacgaggaaaggggaagtgacgggtcgtcttcatctagcgatgatgatgtcacggaggacgatcgccgtggtagctgcaccgattgcgtcagtattgcaaagcacctggagtcagctaatacaatgttctccttcatatggtggataattggattttattggatatctgctggggtgaggatgtatccctgatg

SEQ ID NO: 32731 - DNA, 424 bp, Oryza sativa
  Clone ID: uC-osflM202016h09a2
gatgctgatgcctaccttgaattttcatcgatttgtcacgcgtgtaccttgatcttacataccttgattacatggaccataacacaggtattcgtgatgttaccacttgggtctcctgataacacaggtattcgtgatgttaccaaaatatacatataatcttatttgttgaggcgacacacccgtgacatgctaacgagcatccatatattcacaaattcatccttctgatgatcctagaacaatgctgtcatcttcagatggcaaatcagcttagacatcagcaacttccgcttggtattatactgtttcgcggaagcgactgttgccttcaatcaatttttagaatgtaactcttcacaagatgtcatcaaacattagggacaataccagcccctgcacgaattggctcctccgagttctc

SEQ ID NO: 32732 - DNA, 446 bp, Oryza sativa
  unsure (1)..(446): unsure at all n locations
  Clone ID: uC-osflM202016h10a2
aaaaaggcagctatattattcacccatagttattaacagagacttaacaaaaggggaataaaccccaggtgatctcatgtctaatactcccagtaacaactaataataataagcacttagcacctccagctccaggtacctatgtgctagttgcagtattggcacatccaattacacaaattattgctgcaatgggngattactggtagttgttctaactttctttggcgccttcatcaggttgcagcagcggcaacagcatcctccttttcttttactttcctccgagcttacctccctcggcttctcttcggttgctggcgccttctctggctcagcggcagcggcggtttcagttgtttctggtgaagtgcttggggcaccatcttcaacagggacggtcttcttgacggtaccgaccttcacgtacttgcccataaacttgt

SEQ ID NO: 32733 - DNA, 411 bp, Oryza sativa
  unsure (1)..(411): unsure at all n locations
  Clone ID: uC-osflM202016h11a2
caactatctacgagaaaataatcactaggtgatcaagaaagtgattatatgtcaggcacagcacacaaataaacccaacatgactaacttctactgtccgtgaagttctaaccatttaagcaggggtaccaaatcatcatctgcagggtagcataggcgacatgaatctcctattatacactcaaaaaacataaaagcccaagttctcgaaaaaggtaaaaaagcagccgccaaaatgngccgcgataagacgtcaaaatcaaaggcttatgttgtgtctcatgtctcccttcgggacctccggcgtggggcagcagctccatccttctcttcctcttccttctcgtcctccttgccaccgctgcttccagctgcttcggactcggtagactttggttttttgacctcggc

SEQ ID NO: 32734 - DNA, 78 bp, Oryza sativa
  Clone ID: uC-osflM202016h12a2
aattacaacccacaactgaattaagttaacctgttatgggtacatacagccccctgaggggccactgaaaaagtccca

SEQ ID NO: 32735 - DNA, 377 bp, Oryza sativa
  Clone ID: uC-osflM202018a02b1
gtcttctttgtctccctcgaacccgacgacgacgctccgtgtcggctctcactgatcgctcggagaagcccccggaaggctacgaccccccgccatgtgacacgcccttccatctccacgcctgtccaggcctacgtataccagagccaggaaggatctgtgacggggctccagatatccagcggcgatgcgcaggtcctgcacgagaaggttaagtcacaggaaaagtcgcccgagaacccaggcacaaggtgctacatgtctggtaatattcaaacggacagcaactacttggctgaaaatgatggaggcgcgcggcagcggactcccgggaaaagcataagccgcagggtccgcctcaaccctgactaggacca

SEQ ID NO: 32736 - DNA, 414 bp, Oryza sativa
  Clone ID: uC-osflM202018a05b1
cactctacctttccatttgtgagctcttctagtttgagtgagagagcagcagaagggagtagtgcaagatgccgatccgcaacatcgccgtgtggagccaccatgatgtgtaccacccgggtgcactcaaggcggcgttggccgagttcatctccaccctcatcttcgtcttcgccggccagggctccggcatggccttcagcaagctgaccggcgaaggagcgactacccccgccgtgctgatcgcggcggcggtggcccacgccttcgtcctgttcgtggcggtgtccgtcggcgccaacatctgcggtggcctcttgaacccggccgtgaccttgggtgccttggtcggtggcaacatcaccctgttccgcggcctgctgtactggatcgcccagctcctgggctccaccg

SEQ ID NO: 32737 - DNA, 443 bp, Oryza sativa
  Clone ID: uC-osflM202018a06b1
gtgttcgttgctttgcgttctctaatcgcctcgtcaagatgcagatattcgttaagaccctcactggcaagaccatcaccttggaggttgagtcctccgatacgattgacaatgcgaaggctaagattcaggacaaggagggcatccctccggaccagcaacgccttatcttcgctggcaagcagcttgaggatgggcgtactctcgcggattataacatccagaaggagtccaccttgctccttgtcctccgccttggtggaggcatgcaaatattcgtgaagaccctcaccggcaagaccattaccctggaggtcgagtcctccgacacgatcgataatgtgaaggccaagatccaggacaaggagggaatcccaccagaccagcagcgtctcatctttgctgggaagcagctcgaggatggtcgaacccttgcagactac

SEQ ID NO: 32738 - DNA, 425 bp, Oryza sativa
  Clone ID: uC-osflM202018b01b1
ctttttccttttctcgcctcctccgccgccgccgccgccaccggcggcgacttcccatatctccggaggcctacccttcccaccgccgcatcctcgatctgcgtgctgccaccgcgacgaacccctgtagcggtcgcctcctactcggtagaaccctagatccccccgataccccgcgcccctctccgccgccgccgccgtcccggctgacggtatgaaagtgaccgacgatctccagtaagatcccggagattaggagtccagcttcgcgatggcgatccgcatcaccatgtcgtactccggctatgtggcgcagagcctggcctcgtcttttggcctgcgctgcaccgccgccgccgccgcctactccggtgcggcgccggaggctggggctcgcttcctccaggacgcgctctcccgcccct

SEQ ID NO: 32739 - DNA, 440 bp, Oryza sativa
  Clone ID: uC-osflM202018b06b1
cagttggcttgttcagcacacgttccggttctattcccagcactggaggacatgggcggcctgtttcattcaagcggcatggcgccgctattacaagaggaagatggccgagcagcatcgcaaggaagaagaggctgcaaaccggcaaagcagcagcagccaccaccctagcctcgcagcaaccatctacgcatctcgctttgcagctaatgcactccgaggagttcacaggctcagaagcagggccagcccgacaattgtgagattgccaaagcctccagaaccagattttgccgtcgatgaagctgactaacaagaagaaacacactgaaattgcatgtattaagttgcggattggaggcatcatgtagattatgtacaaaattcaaaaacagccagcagagtttttgcttgtaaaagccctgtaagtttgcaaccac

SEQ ID NO: 32740 - DNA, 424 bp, Oryza sativa
  Clone ID: uC-osflM202018c01b1
attttccattcctgtgtcgtcgcatgcacctcgatcacattcaccggtatatagacaatctgaaaatagtagttgatagaattgtgtgcactattttatgtttatctttactataaccgtacttccttacataggtggctttgggacatatattcttgcaatgggaaagaaagcagctgtaggggatgtcaatgcccaaaataacgttgaggagccaagctttgccaggatgatcaccttcctcttccttatcagctttgctggcatgttcatcatcatgcccttcaggaaggtcatgatcattaggcaccggttgacattccccagcggcacagcaacggcgcacctcatcaatagcttccatacacctcaaggtgtcaagcaagcaaggtatcatcaattaaactttacatggaaatgtttc

SEQ ID NO: 32741 - DNA, 422 bp, Oryza sativa
  Clone ID: uC-osflM202018c08b1
tttattctattcaggcgcaacgtcttattttatcacttttctacaacatagtggtaaaataagttcattttggtttgtttattcacaatcagttggacctggagctgttctacaaggcccacttgtaaatggaagtagtgatgatgtggccccaaagctgaactgtgaagatgagagttgtcctatggaaatctttcatcctcccgaggattgcaacctgaacacttcattgtcttttaccctacagatatgccgtgttgaagacattgttgtttctggccttgtgcaaggaactgttattaatttcaacagagcaagaaatgtcactgtgagatcatctgggaccattagtgcaacaggattaggctgccgaggtggaattggacgaggaagaatgttaagcagtggccttagtggtgggg

SEQ ID NO: 32742 - DNA, 425 bp, Oryza sativa
  Clone ID: uC-osflM202018c09b1
tcgctgttccagagccaaccatggcggcgactagggtttggctctccgccctcctcctcgccttcctcctcgccgccgcccccgtcgtccaagttgccagagctcagtccgaggaagaagctgctacagctgaagttgttgatggggctgatctaggaatcgtcagtgatgatacacaagtttccagcgatgggcctctaagtccggctcctggcgtggagacagtatgtgtttttcccaaaaacgctggcaaaattgtgctagcaggtgaagaaactgaactactggttggcctgcaaaacgagggtgaatcaactttgaatgttgttgctatccattcaactctccatcttccttttgaccataagatgtatggacaaaaccttactgttcagaacttcttcaatgcatcagttcctgtctct

SEQ ID NO: 32743 - DNA, 428 bp, Oryza sativa
  Clone ID: uC-osflM202018c10b1
ttgtctttgatgtgcatatacatttcggtgctggtgcctacatttgcggtgaagagactgccctactggaaagtctcgaaggcaagcaaggtaaaccaaggttgaagcctcctttccctgccaatgctggcctatatggctgccccacaactgtcacaaatgttgaaacagtggctgtgtctccaacaattctcaggcgtggtccagaatggtttgcaagctttggacgcaagaataactcgggaactaaactattctgtgtctcaggtcatgtgaacaaaccttgcactgtcgaggaggaaatgagcatacctcttaaggaatcgattgaaaagcactgtggaggtgtgagaggaggatgggacaacctgcttgcaattattcctggtggttcatctgttcccttgttaccgaagcatatattgtga

SEQ ID NO: 32744 - DNA, 422 bp, Oryza sativa
  Clone ID: uC-osflM202018c11b1
tttttctgtcaatgatgtttgggaagaagttctaccttcatcaataaatggtgaatctgatgacaaggtgcgcgctgatggattagatacgggatggcacttcactgtcaacatgcctaaacactcagatcctttctctggcaaagagaaggttatccatgccaagtatgctgacaaggaatttgtacaaaagtatagcatggatgagattcagctagctcagcagatgtgggatactgtaactgcaaaagacaagagagctgtatacagtctcatagtgcaatcccgcgccaatgtaaattgagtttatggagagatgccctatagttcgcgatccgactactggaagatcatatgaccaagaacactctttttaagcatctgatggaaaccctgcatttctgattgccattcacatgaaa

SEQ ID NO: 32745 - DNA, 421 bp, Oryza sativa
  Clone ID: uC-osflM202018d02b1
tattttctcttcctcgccccgcctccgtccaacgctgctcccgccggcgctccgcctcctccgccctcttcctcctcgccggaaccgatttcgtccccttccggcgtcgccggcggcttttcccgccggtgctccttctccgccctattcctcctcacattccccgttcgcgccgccggagggtcgtccccttccaccgacaccgccgtactccaccgatgccctcgccggaatcgatttcttccctttccgccgtcgccgcaatccacttcataggttcatcttgcgctgattggttcccgtcagatttgagtaggaactaaaggaaccaacactgttctccctgaaccctaagttgatcctgtgcagcccctatcaatggatttgcagccgtggtgcgaaggcatcgtatcccctcatg

SEQ ID NO: 32746 - DNA, 189 bp, Oryza sativa
  Clone ID: uC-osflM202018d09b1
tttcttttcctgaggagtccgtgcacctcgatcacattcaccggtatatagacaatctgaaaatagcagctgatgagaggcgagggcactcatggatgatcttatttactataacccgcacttccattacattaggaggacttggaacatattcctcttgcgaatgggaagagaatgcaggctgaaagg

SEQ ID NO: 32747 - DNA, 267 bp, Oryza sativa
  Clone ID: uC-osflM202018d11b1
taactccaggctgccgaagtggagtaggacaaggaaagatattaaacagcggcgtaagtggcggcggcggccatggcggcagagggggggatggctttcttcacgaacgccatgctgagggcggacctatgcaccggccagctgatttaccacgttatcttggcagcgtcagcggtcatgtcaccacaacattttcctccgctcgtggtggtattatccttgatgggcccatggtattcctctctacccagtcctttcccttcacgg

SEQ ID NO: 32748 - DNA, 426 bp, Oryza sativa
  Clone ID: uC-osflM202018e01b1
gcttgggattaggaggaggagcttgagcttggagagagacaacaatggcggctcaggctcttctctctgggaggcagctgctggggaggccattgcaatcttcagtctccaggtcttcttcctccaggaaggcacccttcatggtcagggcagaggccactccccctgccaagcaaggtgctgacaggcagctgtggttcgcatccaagcagtccctgagctacctggatggcacgcttccgggagacttcgggttcgacccgctggggctatcggacccggaggggaccggtgggttcatcgagccacggtggctggcctacggcgaggtgttcaacggccggacggcgatgatgggcgtcgtcggcatggtcgccccggagctcctcggcaagctgggcctcgtccccgccgagacggcgatcc

SEQ ID NO: 32749 - DNA, 421 bp, Oryza sativa
  Clone ID: uC-osflM202018e04b1
ctttctccttctcctctcttgccctagagagagagagagagggagggggccgcaagagagagagagatcgatcaccggccgccctccggagctcgcgcgctcgttcgttcgttcgttcgatcattcgtacgtccacaacaatttcggggacgcgaccgtcgccgtacgtttgcggtggcgcggcagcgtcgtcggcggtgaagaagaagaagaagaagatcgaagaagaggaagaggatgggcaactgctgcgtgtgccggccgtccggcgccgactagcggtggcgctgcggcagcttcaccgccccgcacacccgcgggggcaggcgggtgatcggcgccgccaacatgcggtgcctctccacggtctcctccgtgtcggacgcggcgcgcgccgtgatgtccaacgagccggcgaccg

SEQ ID NO: 32750 - DNA, 289 bp, Oryza sativa
  Clone ID: uC-osflM202018e08b1
tggctgtgccggtgccggcgttggtggtggagcgggagcgggaggcggtgctggtggaggcggtggcctagcatgcagagcaacaggaggtggatgcgcatatcttgaaggaggttcacaatgaagagatgctctctgaagttgtgctggtggcagataaagaaaacagcaatggctgacatctggggtactcggatgtccttccttgctgtaagaaatacttgttaataaccaagataataattaaagctctgccagaattacaatgcaacatacagaagctgcataa

SEQ ID NO: 32751 - DNA, 390 bp, Oryza sativa
  Clone ID: uC-osflM202018e12b1
tttggttttcgcacgcgtagcaaggtctctcttacactataaacaccaaggcgaagcatgccgcatgagtcccacccacctctactgccccggcaatcaaagacacaccccaagtactcgatcgcctgagtagcttattccctgatcgtgccatgggctcctacgttcaaggcgaggatgaggttcccgtgtacgaatctggagcagagatcggccaaaagctggacgagaaacggatgtcgacggcggggccgttcccggcgatgtactccagcgtgctcggggaggtgatccttgacccggcgacgatgtccgtcccgctcagacaaccacatggtccaccgcggacacggcatgttctacaccgccatgatcctcgacagccacctc

SEQ ID NO: 32752 - DNA, 426 bp, Oryza sativa
  Clone ID: uC-osflM202018f03b1
gattctttttgcttagcgaccgatcgttgtatgctctggcacatggatgcccccatcttacaaggctcaacatcagtggatgttccaatttcagcgatgctgctttggcctatctcagtagccagtgcaagaacctgaaatgcctgaatctgtgcgggtgtgtgagggcagtttccgacagagcattgcaggccatcgcctgtaactgtggtcagcttcagtctttgaacctaggctggtgtgatagtgtaactgacaagggagtgaccagcttggcatcagggtgccctgaacttcgggctctggacttgtgtggctgtgttctgataacagatgagagcgtggtcgctcttgccaatggctgccctcacctgcggtcgctggggctctactactgccagaacatcaccgaccgggcaatgtact

SEQ ID NO: 32753 - DNA, 256 bp, Oryza sativa
  Clone ID: uC-osflM202018f04b1
ccggaccggaatctgcattcccgagccagagccaccggtctgtgttcccccagcagcagcccaaacaacacttgggcgctctgaagatcggcgacggcgaacgcccggccgctgcctatgtcaataggggaggcatggcggactagagctagcggcggggggaggggctgacgcctcacagtccgggtcgtggccaccctgctaagggcagggctccgcaggcctgatgcttgggctacgacattgacagctcagg

SEQ ID NO: 32754 - DNA, 292 bp, Oryza sativa
  Clone ID: uC-osflM202018f12b1
tcttgatatttggcggagcttgtggtgaagaaaaagcatttggaggacgagtagcagggaatgattccatcgaatgtgggaagcatgtgatttggacttctgctttcagagttattgcaagcaaacttaaccatagcatcacaaatgcctagaccttccatggaaattgagacggtttagtagttgaaagtgcacctataccttatcattggattagacttgcgcaagtaccataactacctgaacaagtggaaaaccctttggccatctagagaaccaacagtgatgtggc

SEQ ID NO: 32755 - DNA, 421 bp, Oryza sativa
  Clone ID: uC-osflM202018g05b1
gctttggtttctgctgctggtgtggtgatacactcgcctagctttggccaccgctcatctctgctctgctttttctcctctgctccactgatcatccaattcttctcctcctgattggccattctgattggctggtgacatgtcgaagaaaattgtggtgaagctggacctgcatgacaacaaggacaagcagaaggccatgaaggccgtctcctcggttgtcggaatcgacgccatttcgatggacatggcgccgcggaagatgacggtgatcggcacggtggatccggtggacgcggtgagcaagctccgcaaggcgtcgtgggcggcctacatcgagtcggtcggaccggccacggagccggagaagaaggaggagaagaaggaggaggccaagatggaccgccgcggcggcggcggc

SEQ ID NO: 32756 - DNA, 424 bp, Oryza sativa
  Clone ID: uC-osflM202018h06b1
gtctcccattttctcgccgtcgcagatccgatccaggaagagctcgccgccgccgctgccatggcgctctccgtggagaagacctcgtcggggagggagtacaaggtgaaggacctctcccaggcggacttcggccgcctcgagatcgagctcgccgaggtcgagatgccggggctcatggcgtgccgcgccgagttcggcccctcccagccgttcaagggcgcccggatctgcgggtccctccacatgaccatccagaccgccgtcctcatcgagaccctcaccgtccttggcgccgaggtccgctggtgctcctgcaacatcttctccacgcaggaccacgccgccgtcgacatcgccagggactccgccgccgtgttcgcctggaagggggagaccctcgaggagtactggtggtgcaccg

SEQ ID NO: 32757 - DNA, 220 bp, Oryza sativa
  Clone ID: uC-osflM202018h07b1
ttcggtctctgtcattctctgcaaccactgcatatgggttggcggtctcctgataatactaccattagcaccatgcacgggggaatgcacgctgtggtcccacatgtcaggcttctgatgtctgttgccgtctgaaggatcgggtgctacaaagccatgtgttggacctgctgtccatcgacgctggaggtcagctttagatggtcatattcaggagagc

SEQ ID NO: 32758 - DNA, 416 bp, Oryza sativa
  Clone ID: uC-osflM202018h10b1
tttgtttatccgccgtcatttgcgctccggttctctcgtctgctgtgcgtgctacgccagcaaacccactccccccgagatagagagagagcgagagagagagatccacaggctgacagcatggaaatcacctccccttcatgccagatccaagccgccgccaccaccccctggccgtcgccgtcgccccctccggccgatctgatgcccgcgcacgcggcggcggtggtcagcgccgatgcggtggaagcttaagtcgtcggcgtacaagcgcgtgccgtccagggacgccgccatggatctcgacgtcgagacgccagcgaaaatggcggacggcggggccccgtcgtggcgcatgtcgctgccgcacgtgtgcgttgccacgctcacctgcttcctcttcggataccactccg

SEQ ID NO: 32759 - DNA, 418 bp, Oryza sativa
  Clone ID: uC-osflM202018h11b1
tctgcttctgcgcgatgcggcagaaggtgccggagatggaggaggagctgaggaaggagaaggacgcggcggagaaggtgcaactcttgcagcgggaggtggagaaggccaaggagtcggagcgcatgatgctcgagtcgctaatataccagacgaagcagctggagcagacgaagatctcgctcgaggaggccaagctggagatcaccactctgcagcaagccaacgcgagcctcgaggcctcggcggcggcggcggtggtgagccggcggggtggcgcggtggagcagaggagcgtcaaggacctcgtgttcggcggcggggacgatgagatcagggccctgcgctgcgagctccggacggcgatgcagggggaggagaagagccggaaggcgctcgacgacctgtccgtcgcgct

SEQ ID NO: 32760 - DNA, 490 bp, Oryza sativa
  Clone ID: uC-osflM202019a04b1
ttcaactttggcgcgcgcagcactgccgtcgacgacggggaggaacaggatcgtctgcggcaaggcgacgacgacgaacaattacccctcctcctgtcgcagtcgcaggagcacgatgatgcacgccgccgcgtggctgctgctgcagcagctgagcccagcagcagcgcgcgtggcgcgggcggctgatgacgattcgtcggtgcaggtgagcaagggcagcgcggcgcccaacttcacgctgagggaccaggacgggagggcggtgtcgctgttcaagttcaaggggaggccggtggtggtgtacttttaccccgccgacgagacccccggatgcaccaagcaggcctgcgccttccgcgactcctacgagaagttcaagaaggccggcgccgaggtcatcggcatcagcggcgacgacgccgtcttcaaaaggagttcaagaagaagtacaagctgccgttcacgctgctgagcgacgaggggaaca

SEQ ID NO: 32761 - DNA, 159 bp, Oryza sativa
  Clone ID: uC-osflM202019a08b1
atcacaccaaattaagaacacaaaaacttatattcaaaccatgttctactggaaatcaacaacgtcacaacaaaaccaaaaggggatgcaagaaaaagggggtccaagcaaacgaacacaggcacgccacgaaggagctccctgataaaggaccctaaa

SEQ ID NO: 32762 - DNA, 305 bp, Oryza sativa
  Clone ID: uC-osflM202019a09b1
tgacgatgccttccctccccgtcgtcgccgccgagccgatggtcgtcgacgagtcggcctccaagaagtcgaagcgcaagctgaaggcggcggaggtggaggtggaggcctcgtccagtaagaaggagaagaaggagaagaagcggaaggcgaaggagccgtcgccatcgtcctcctcctcatccgaggaggaggagaggagcagcacgagctccgacgagccggcgcccgccgcgaagaaggcgaagaaggagaagacgaacgagaaggtggtggtggaggaggaggaggaatgactattctga

SEQ ID NO: 32763 - DNA, 489 bp, Oryza sativa
  Clone ID: uC-osflM202019a10b1
gtgcgtcaacatctccatggctgttcatcaacccagctacactctgtacaggatgttcgacgacctgatacttctagccaagggagggatgacggtgtaccatgggcctgtgaagaaggtggaggagtactttacggggctgggcatcaccgtgccggagcgagtgaatccgccggactactacatcgacattctggagggcatcgtcaagcccaccaatgagcgccggcgtcagcgtcaaggacctgccgctcaggtggatgctgcacaatggctacgacgtcccccgggacatgctgcagagctcctccgactctgagtcctccttccgagggagcacgagcccggcctccggcgatgcctccgtcgcggccgaggtatggggcaccgtcaaggacatcgtcggccagaagaaggacgagtatgactacaacaagagcactgaagatttgtcgaaccgctgcactcctggcattcttaggcagaaca

SEQ ID NO: 32764 - DNA, 332 bp, Oryza sativa
  Clone ID: uC-osflM202019a12b1
tatcccggaggaggaggagaggttcgacttcgacccgctggatgacaccaagacatggccggaggacgaggtgccgctccggcccgtggggcgcctcgttctcaaccgcaacgtcgacaacttcttcaacgagaacgagcagctggcgttcgggccggggctggtggtgccggggatctactactccgacgacaagatgctgcagtgcagggtgttcgcgtacgccgacacgcagcgctacaggctggggccaaactacctgatgctgccggtgaacgcgcccaagtgcggccaccacaacaaccactacgacggcgccatgaacttcatgc

SEQ ID NO: 32765 - DNA, 435 bp, Oryza sativa
  unsure (1)..(435): unsure at all n locations
  Clone ID: uC-osflM202019b05b1
acgtttggactccacctcggcacctcgcgttccccttcccccctcacctcgcctagggtttcgtctcggctcgcgcgccgcggcgccattgctacagctctgctacatctctgggtcgtgcgtcgctgatgatgcccccgaggttttgtgattaagctcttggtctcgtctccgcgagctcagctcagagtgggaggcttttttttgggggggcgttgcttggggtattatgggtggaggcgggcggctgagctgttcctgggcaatgccggggaggcccggtgccgattgctagggttttgctcgtggattcgcgtggggaggcggggatcgcttggaatgcgtgggtttcgtgcaatctactgcttgtnttgaaccccccccccacccccccttcattttccacacctcccagaacgcgcgtttccctcgtgc

SEQ ID NO: 32766 - DNA, 79 bp, Oryza sativa
  Clone ID: uC-osflM202019b07b1
aagggaaagccgctacgcccgcacgaaccggaccggaagaccacgggccgacccacgcttcagttaagagcgacaaaga

SEQ ID NO: 32767 - DNA, 515 bp, Oryza sativa
  Clone ID: uC-osflM202019b08b1
ttcgccggggcgggggaagaggctcggcgaggacgagctggtgacgctctgctccgaggtgatgagcgccggcacggacaccagcgccaccgcgctggagtgggccatgatgcacctcgtcctcgacgccggcgtccaggacaagctctacggcgaggtcgtctccaaggtcggcaccaccgcgcgcatcaccgaggccgacgtcgaggccatgccctacttgcaggcggtggtgaaggagacattccggcgacacccgccgagccacttcgtgctgtcgcacgcggcgacgagggacacggagctcggcgggtaccgcgtgccggcggacgccagcgtggagttctacacggcgtgggtgacggagaacccggcgacgtggccggacccggaggcgtggcgccccgagcggttcctcgagggcggcgagggcttcgacaccgacatcaccgtcacccgcgccctccgcatgatgcctgtcggcgccggccgccgtatatgccccgccgcaccct

SEQ ID NO: 32768 - DNA, 333 bp, Oryza sativa
  Clone ID: uC-osflM202019b12b1
acgtttcagcagaggtctgcagatctcccgtatccttggcgggcacaagaaagaccgatcaacccggaacaaggagtagactgaggggcgagggctccccccaaaccaattgttgtagtagtatgcattatcctagtaggagtatccgcccccatttttgcgtgtgctctgattgtcaccagattcagagaccgggggaggcgtatcagcatgtttcagtgtatctgcagattcacaacattcgcacctctccattatgtaaatctctatcgctcattagcaaatcggagcatctaatttagagaaaaaaaccaaaaacaaacaaaaataaaa

SEQ ID NO: 32769 - DNA, 522 bp, Oryza sativa
  unsure (1)..(522): unsure at all n locations
  Clone ID: uC-osflM202019c02b1
taagaattggacagttgcattgaagacattgatagtggtacataggctcttgagagaaggtgatcctacattcaaagaagagttcctggcctactcatacaagggaagcgttttgcagagagcaaacttcaaggacgattcaagccaattagcttgggattgctctgcgtgggttcgcgcctacgcgctcttcctagaagaacggctcgagtgtttcaggatcttgaaattcgacatcgaaaccgagcgtctgatgagatctcctgagtgttccagcaaggcacacagtagaactagaaccctgccttgcattgaacttctggagcagttgcctgccttgcagcagctacttttcaggctaattggctgccagcctgaaggtgcagcaggcacgaactaccttatccaatatgcattagccctggttttgaaggagagcttcaagatctactgtgcaatcaatgatggtatcatcaatcttgntgatatgttctttgatatgccaaagtatgatgctatcaa

SEQ ID NO: 32770 - DNA, 539 bp, Oryza sativa
  Clone ID: uC-osflM202019c04b1
ttgaggtcagctccgacggaaccatcaagttcgaggagaaggacggaatcgactacgccgccgtcaccgtgcagctgccgggaggcgagcgcgtgccgttcctcttcaccatcaagaatctggtcgccaccggcaagccggagagcttcggcgggcccttcctcgtgcccagctaccgtggttcgtccttcctcgacccaaagggccgcggtggctctaccggctacgacaacgctgtggcgctccccgccggaggcagaggagacgaggaggagctcgctaaggagaacgtcaagaacgcctcgtcgtcgacgggcaacatcacgttgagcgtcaccaagagcaagccagagaccggcgaggtgattggcgtcttcgagagcgtgcagccgtcggacacagacctcggcgccaaggtgcccaaggatgtcaagatccaaggggtgtggtacgcgcagctcgagtagggaatgaacaaatgttttgtgcgtggccgggttgatatatcgatacatggagagagtgagggaggctgcaat

SEQ ID NO: 32771 - DNA, 459 bp, Oryza sativa
  Clone ID: uC-osflM202019c07b1
ttacgcagcgcccgtaacctaacgtatcatttacttccattgcactgcacatcctgtgagttcgttgtctgagtgagagctggacgtgctgcaccgagctcctggccgagatgcttgccgtgtcgccggcgatgtgccccgacattgaggaccgcgccgcggtggccggcgatgctggcatggaggtcgtcgggatgtcgtcggacgacatggatcagttcgacttctccgtcgatgacatagacttcggggacttcttcctgaggctggaggacggtgatgtgctcccggacctcgaggtcgacccggccgagatcttcaccgacttcgaggcaatcgcgacgagtggaggcgaaggtgtgcaggaccaggaggtgcccaccgtcgagctcttggcgcctgcggacgacgtcggtgtgctggatccgtgcggcgatgtcgtctgcggggaggagaacg

SEQ ID NO: 32772 - DNA, 512 bp, Oryza sativa
  Clone ID: uC-osflM202019c08b1
ttatcgttcaatttccttcctaccgaccgagcatgggggctaaaggacgagctacggaccgagccatggaggaatacaaggctcgctcattcgtcgcctagtctccctcggttgaaatttcatcattataggaaaatggattataccattagtttttgcacacgccgatgaaaattgactaggagaggcaccatggataaagtcgaggtcgatgggaacttcattggcacgggtaattggaagctgcatggagcactatgtaagcaactttacaaagtagctcttgaagtattggatgttattcctgtcctcgaagctacgaggtctggcaacagtactggacttctcgcattgagctccttgcgcatagttgctgagaaggccaagaatctactttagtattgcttacagtgcaacaagctttacttggcctttacagcaaataatgtttctgctaaaatttgagaaagcaagatatgctgttctggaaagtctttcccaattggataaac

SEQ ID NO: 32773 - DNA, 431 bp, Oryza sativa
  Clone ID: uC-osflM202019c12b1
aaagggagagctgctgcgcgtgccggtaccggaccgccgggtcggggcaggccgacgtgtacgtgctgccgatgctaacacgttgtacgtgcaggcactggtcctcctcgccgccgccgccgtcacggacgccacattgccgaccaccgagaacgcctacacccccgacaccgataatgcggacgccgggacggcgtatggagagggggtcggagacaacaccgagtagaacatcgtcgccggcgccatgaagggcatggtcgtggacgccgtggacactgtggtggcgaaacattggcgcctatatgccggaggccgagaacaaccaggcgaagacgtgcgacaacgcggcggcgaagggctcgagcgtggaggtgctcacgaggattcccggtacgctgacggcgccggactatggagcgctcgtggtg

SEQ ID NO: 32774 - DNA, 527 bp, Oryza sativa
  unsure (1)..(527): unsure at all n locations
  Clone ID: uC-osflM202019d08b1
taggaggcttgttccatactagtttgctaggtcatggaaaagagcgagattttcgtaggagcacactcatatgcagctatatgtgcttttacactcatcataggatggttagctcactgggtatacagatggataaatcctccatgcaatgggaggcttcctccgggctcaatgggcttccctattgttggtgagaccttccaatttttcagaacaagtccatcaatagacatgccaatttactacaagcgaagactggagaggtatggacctatattcaaaactaacataggaggccagcacgtggtcatatcccttgatcccgaggtgaaccagttcatatttcaacaagaggggaagttgttccaatcctggtttccagaaaccacactaaacatctttggaaagaagacactcaccacgtataatagaactgctcacaagttgatcccgagcttcgtatgcaagctttatggccctgaaaacgtgaaaaaatcacttctgccagactagagaactncatgagg

SEQ ID NO: 32775 - DNA, 528 bp, Oryza sativa
  Clone ID: uC-osflM202019d09b1
tacggacacggccacaccacccaccaactgagagctgagcaggcgagcgagcggacatggcagcatcgctccaagccgcggccaccctgatgcagccggccaagctcggcggccgggcctcctccgccgcgctgccatcgcgcccgtcttcgcacgtcgccagggcgttcggcgtcgacaccggtgccgccggcaggatcacgtgctccctgcagtccgacatccgggaggtcgccaacaagtgcgccgatgccgccaagctcgccggcttcgccctcgccacctcagctctgctcgtctcgggcgccagcgcggagggcgtgccgaggaggcttaccttcgacgagattcagagtaagacgtacatggaggtgaagggaaccggcacggcgaaccagtgcccgacggtggagggcggcgtcgactccttcgccttaaggcccggcagtacaacatgaagaggttctgcctggagccgacgtccttcaccgttaaggctgagggcgtggccaagacgcgccacccgag

SEQ ID NO: 32776 - DNA, 471 bp, Oryza sativa
  Clone ID: uC-osflM202019d11b1
taaaaggaaaaaaaaacaaaacacaccaagccaaataaaagcgacaatgggatcgctcaccaccaacatcgtcctcgccgtcgccgtggtggcagcgctggtcggcggcgggtcgtgcggcccgcccaaggtgccacccggcccgaacatcacgaccaactacaacgccccgtggctccccgccagggccacctggtacggccagccctacggctccggctccaccgacaatggtggcgcgtgcgggatcaagaacgtcaacctgcctccctacaacggcatgatctcctgcggcaacgtcccaatcttcaaggacggcaggggatgcggctcatgctacgaggtgaagtgtgagcagccggcggtgtgctgaagcagccggtacggtgttcatcacggacatgaactacgagcccatttcggcggaccacttcgacttctccgggcaggcgttcggcgccatggcttgcc

SEQ ID NO: 32777 - DNA, 517 bp, Oryza sativa
  Clone ID: uC-osflM202019e03b1
ttttgagcaaacgctataaacgaaaatcaaccttcaaatataatatgtataagctttaaatgttaatggccacttatgcaaaatgcactaggtaatgttgttcttcattttcaggagcgatttgtaaattaggttaatgaaacaaaatattccacgttttgcccaatttctataaatttgagtacctgaattcactcacaccaaatggattgccacatcttttaaaggtcaaatttaattgtcttgtcatattgctgcgcaatctcgacccgcacaacgggttgtgcaatggaactaggcttatgattagagcatttcagaattattccattagtgctgagattgtcagtggtgcacatgctgggaagagggtcttcataccacggattccattatacccctcggaggatctttcattgccttttaagttcaagcggaagcagttttccatccgtcttagttttgcaatgactatcaacaaagctcaaggacagacaatcccaaatgtggcaatcta

SEQ ID NO: 32778 - DNA, 455 bp, Oryza sativa
  Clone ID: uC-osflM202019e04b1
ttgacgcgtgggttgtggcttacttgcgaaaaccaaaagatggtaaaaagaagagcttgctgggagattcaagtgaatctaatgaacaaccaccacctaaggagaataaagattctgtagacaaagatgagggcccagttgaatatatttcttattggaaaccaaatgtaacaataaatcttgttgacgacttcacacggtatccacacaataatgttccacccaatgttgctccatatttgaatgttgatccatcttcaaacaactactacccaactgtattcttcaatgagttttggctactgagagataaattgatagcactcaatgagactgtggaggaactgcctttgaacctttgaagttggtcctattagcatgaccaagtggcaaatatttctttagatggagcagtccttccaagttcatcgcagttatggaaagattgtttgaag

SEQ ID NO: 32779 - DNA, 497 bp, Oryza sativa
  Clone ID: uC-osflM202019e05b1
taaaatcttctcttcccgtacgtgagaagcgccaggtcgtcgtcgccgccatgggcgtggaggtgtgcgtcaaggccgccgtcggccacccggacacgctcggcgactgtccattctcgcagagggtgctgctgactctggaggagaagaaggtgccctacgagatgaagctcatcgacgtccagaacaagcccgactggtttctgaagatcagcccagaggggaaggtgcctgtgtttaacggtggtgatggcaaatggattcctgattctgatgtgatcactcaagtcattgaggagaagtacccaaccccgtctcttgtcacccctcctgagtatgcatcagtgggatcaaaaattttctcatgcttcacaacgttcttgaagagcaaggatccaaatgatggttcagagaaggcactttttactgaactgcaggcactcgaggagcatctgaaagctcatggcccctttatcaacgggcagaacatttcagct

SEQ ID NO: 32780 - DNA, 163 bp, Oryza sativa
  Clone ID: uC-osflM202019e11b1
tttaagtacgtgcttaattactagctacagcatatatgaacaaagtaattaaaataacagctgcggcagacatgcagcgctccattctctctctgtatcagctgtatactttatgttgcacgctccctgtgtgcatgttctatcttaattttcttcagtatgt

SEQ ID NO: 32781 - DNA, 538 bp, Oryza sativa
  Clone ID: uC-osflM202019f04b1
taaaagtactggaattggaggtcaggttggaggaagctgatcagtctaacattctcaagggcgagtccttagaatcagcaatgaaagaattggatgcaaaaatgactctgctccaagaaaaagaatctgaaatcgaagcacttcaggataaggtcaggtctttggaggatgaagtagccaagcagaaagaagattttcatactgctgataaggaagctgatgaattaaggttggagatagaagaccttaggttgaagctcgaagcggcggaagaagaccttaacaatgacaagattgccagttcagaaatggaaaccctgattgaacagaagaacatgctagccaaggaacttgaagctagcaaagctgaagttgagaagattaagaaggccatggagggtcaagcctctgctttgcacgaaatgtcagctcaactgagagtggcgcaggagaagtacctagataaacaagaggagattgatcgtgctcgtgcacaggtagaggagctcaatgtaagtctgcagaatacaaaggagag

SEQ ID NO: 32782 - DNA, 520 bp, Oryza sativa
  Clone ID: uC-osflM202019f06b1
tccacgcgtccggagagagagacagtttcacggagccaacgaagcgaagatcctctcgtctcgtgttctagggtttctcgcggcgatggaggcggcggctagggctccatccagggcggcggcgaggttcgtgcagcgcaggctcttttcctccggcggcaaggtgctcggcgaggaggagaaggccgccgagaacgtctacatcaagaaaatggaacacgagaagctggagaagttggcccacaagggccccaacccaggagagcaagcttcaaccgcaggtgctgcggctaacgctgtgaagactggaagcggctcaacggagtcaagatctgctggtgtgtcaactgacaaaaacaggaactatgctgtcctggcaggcactgttgctgctttgagtggccttgggtggtatctctttcaaagcctaagaagtctgaagatatagtggactgaaggtggttaatgagatcctagacggcctgtcattgagcttcaccctggtttacttgtttagaaa

SEQ ID NO: 32783 - DNA, 537 bp, Oryza sativa
  Clone ID: uC-osflM202019f10b1
gagcgctgcagccgccacctattctcgccttggccatgggaggatcacgattcacgagctggagctggagctcgagcagtcaacagaagaagggaggaaaggaatcctccctcaccccacccgagcaggtattgggctcggaatcggaaggggaattggaagcggaagcggaagcggagccgattctgatgatctgatctgatcgaggccaggggactaatatcttgttgtaaggaacctagtggagtagtatttgatttgcctgctgcatcgacaccaatcaatctccccactactatggcttcttcgcgcgctatcgtaagtcgcagcttagattagattggatatttcgtttgcaatctccttaattaggttttcccttaatttgtttttggtgcatctatccatcttcgctttttggttaaaaacaataaatttccttcatgtacttcctccgtttcatcacaatataagtcattatattatttcccacattcatattgattctaataaatctatatatatatatatatatat

SEQ ID NO: 32784 - DNA, 533 bp, Oryza sativa
  Clone ID: uC-osflM202019f11b1
ggagctgccctccggcgccggcaggatctccgggatcaacgccgtcgtcctcggcgagtcactcgccgccgaggagcacgacctcgtctacccctccgccgagttctccgccgacgccctcgtcccctcccccaagaagtaccaaaagatgtatgagaggtcaatcaacgacccggccgggttctggtcggagatcgccgacgccttctactggaaggagaagtggaaccccagtgaggtctgctccgagaacctcgacgtcaccaaggggcctgtccagatcagttggttcaaaggtggcaaaacaaacatatgttacaatgctgttgatcgcaacatcgaggctgggaacggagacaagatcgcgatgtattgggagggcaatgagcctggtcaggatgggaagctcacctattcagagctcttggacagggtttgccagcttgccaattacttgaagagtgttggtgttggcaagggtgatgctgtgatcatctacttaccaaagatgctggagcttcccattgcatgct

SEQ ID NO: 32785 - DNA, 395 bp, Oryza sativa
  Clone ID: uC-osflM202019g03b1
tataaatgcaaagcttggtggcttgaactccctgcttcaaattgaaacatccccttccattcctcttgtatccaaggtcccgacaataatattgggaatggatgtttcccatggatcacctggacagtctgatataccttcaattgctgcggtcgttagttctcgtgaatggcctcttgtatcaaaatacagggcttcagtccgttctcagtcacctaagttagaaatgattgatggactatttaagccacaaggagctcaggaagatgatggcctcattcgggagttattagttgacttctataccagtactggtaaacgtaagcctgatcaagtcattatcttcagggatggggtcagtgagagccaatttacccaggtgctgaacattgagc

SEQ ID NO: 32786 - DNA, 503 bp, Oryza sativa
  Clone ID: uC-osflM202019g04b1
tattatttctcgcaaccgtgatggtgatgaaacaaagcttaccgtacaattttcaggaaccagtgattccttagttgttgatgcttggaatcttcgcccatcacttgtttggaacgatgggcagtggatagagtggtcccgagggaagacggttgattgtaataagggtgattctcctcatgagaaacggcaaagaacaaaaggtaatgatcatgtacctattggtggagcagcagcaggcccttctatggatacgagcacaaatgctgcagcaaaaccagaggagccaaagccattggctttatctgatagggacatggttttcaacatcggaaagagggtagttgagagtaaaactgatggtgttgctttcaagcgacctggacttcggaaagaaggatcacgggtagttggtgttccaaaacctggaaagaagaaaaagtttatggaaagtagcaaacactatgatgcagatcaagctgataaaatttttgagggtaatg

SEQ ID NO: 32787 - DNA, 523 bp, Oryza sativa
  Clone ID: uC-osflM202019g10b1
taagatcaagagatcgatcatatcgtattttgtagtaatttagcagctagctagtgcagctgcaagctattagcgactgcatgctttgatcgatccatctagctaattgttgaatccatctaagcttaatggctctgcagcagagcatggcgatgccgatgatggtagtgtctgaccttggcaccgctcctcggtcatcgccgatggttcagctgcagaggatgaagaagcatctggtggtggtggcggcgttcaagagcagaaccaaggcttcccccaaggtggacaagtcgaacaagaacaagtcgatcgtggaggacggcatcttcggcacctccggcggcatcgggttcaccaaggagaacgagctgttcgtggggagggtggccatgctggggttcgcggcgtccctcctcggcgaggcggtcaccggcaagggcatcctggcgcagctcaacctggagacgggcatcctcatctacgaggccgagccgctgctcctcttcttcatcctcttcacgct

SEQ ID NO: 32788 - DNA, 532 bp, Oryza sativa
  Clone ID: uC-osflM202019g12b1
ttcacgcgtccggaaatatatatgaaggttttcacagggaagttggtctttttcttggccattatcctcttcgaaggatgcttggtcagatctcaaagtgttccatatgactactcagcaaacattgagtgcgtgaaggagccggagaagcctctgtacggcggcggtatcctgaaggagaccgaggctaaggggtatgccagcggcaagaagcttctgtcggagaatagcaagagcgccgctccggtgaagggctccgccctcaaggtcgacctcaagaaggaccaccactacgccttgtccgtgtggctgcagctctccaagggggaaggcgacatcagggccgtgctggtgacccccgacggcaagttcaacaccgtcggcatgatcgcggccaagtgcggctgctggaccatgctcaagggcggcgccacctcctacgacgactggcagggcgacatcttcttcgagaccaacgtgacggcggaggtgatggcggaagggatggcgctgcagcccttcagcttcgacg

SEQ ID NO: 32789 - DNA, 503 bp, Oryza sativa
  Clone ID: uC-osflM202019h02b1
acgttgggtatggcatgttggcaccattcacagctggttggcagagcaccgatgctcatccgttagtcattgaaagatctgagggaacgtatgtatatgatagacacggtaagaagtatctagattctcttgcgggactatggtgtacagctataggtggaagtgaacctcgattagtcaaagctgcaactgagcaattacacaagttgcccttcttatcactccttttggaacccgacgaccaaaccatctttggatcttgcaaaggaactgcttaccatgttcactgcaagggaaatgggaaaagtgttcttcacaaatagtggttcagaagcaaatgaatctcaggtaaaactggtctggtatataacaatgcactgggaaggccagacaagaagaaatttattgcacgatcaaaatcataccatggatcaacactaatatcagctagtctatccgggtttcctgcactgcattagaaagttgatctgcctgcacctttt

SEQ ID NO: 32790 - DNA, 528 bp, Oryza sativa
  Clone ID: uC-osflM202019h07b1
ttattgttgatctgcgccttgaccgcatcaggaagcttgccgacaactgcactggtctccagggcttgcttgtgttcaacgctgttggaggaggaacgggctccggactctgttcccttcttcttgagcgtctctctgtggactatggcaagaagtccacgctcgggttcaccgggtacccgtgccctcaggtctccacctgtgtggttgagccatacaacagagtcctctccacccactccctccttgagcacaccgatgtcgctgtcctgctcgacaatgaggccatctatgacatctgccgccgctccctcgacattgagcgcccaacctacaccaacctcaacaggcttgtgtcccaggtcatctcctcactgactgcctccctgaggttcgatggtgctctgaatgtggatgtcaacgagttccagaccaacctggtgccctacccgaggatccactttatgctttcctcctacgccccggtgatctcggtcgagaaggcctaccacgagcagctttccgtgg

SEQ ID NO: 32791 - DNA, 362 bp, Oryza sativa
  Clone ID: uC-osflM202019h09b1
tttacattctatgctttaaaccctgagcttaaagtggtggcaccttggagggagtgggatatcacaggacgtgaagatgctattgagtatgcaaagaaacacaatgtgccaattcctgttacaaagaaattaatatacagccgtgatcgaaatttgtggcaccttagccatgagggtgacattttggaagatccagcaaatgagccaaaggaagatatgtatatgatgtcagttgcaccagaaaatgcaccttcaaaacctgagtatttggagattggtattattggaggtgttcctggtttcaataatggaaaagaactcttaccagcatctcttcttgccaagcttaatgaaattcgggg

SEQ ID NO: 32792 - DNA, 531 bp, Oryza sativa
  Clone ID: uC-osflM202019h12b1
tttcgtaaacaccgcgaccaggagaaatttcagcaggagcaggcgatggcgagcccgcagtgctgcgcgaacccaccgacgctgaacccggccggcggggaggggaaggtggtggagagcttcggcgggatcaaggcgtacgtcgccggcgccgcggagtccaaggccgccgtcgtcctcatctccgatgtcttcgggtttgaagcgccgaacctgaggaagatagccgacaaagttgcctcgcctggatactttgttgtggtgccagatttcttacatggggatcctttagtacctgaaagtactgagaaaccgtttcaaatgtggataaaagaacatggcccggacaaagcatttgaagaggcgaaaccaattattgccgctctgaaggagaaaggagtgtctagtattgtggctgtacgatattgctggggtgcaaaggtggtggtagagttagtgaaagctcatgagatccaggctgctgtgatgtgtcacccctcttttgtgacttgtgatgaaatgaaagaggtc

SEQ ID NO: 32793 - DNA, 128 bp, Oryza sativa
  Clone ID: uC-osflM202020a01a1
ttttgggggtttttttttattaacaaaaacaatatgccctgttcatgacgttcaccttacaccaagttggtgaaacaatttccaaaggttttggaaaacttgaaataccacaactgccctgcctatta

SEQ ID NO: 32794 - DNA, 166 bp, Oryza sativa
  Clone ID: uC-osflM202020a06a1
tttttgttgtgaatttaggcaccggaggcctttccattaaaaaccaaactgaaacacgcacgattttttaacaccccacgaaaaacaatgtgatagctagctcctttggtggtggaacctaaagagcttaatactttccaaaacataccacatcattgttctgtca

SEQ ID NO: 32795 - DNA, 134 bp, Oryza sativa
  Clone ID: uC-osflM202020a07a1
ttgttgtttttttttttagcggaagaaaaggttcagtttttaataacagaaacagattacagttttcaatagcagtagaacaagcgaatgccacaagccaaaattatagacattggaatttatgcaatgtaaat

SEQ ID NO: 32796 - DNA, 60 bp, Oryza sativa
  Clone ID: uC-osflM202020b02a1
aatttataggggggtttttttttatttttccttttttatatatttataattatatttttt

SEQ ID NO: 32797 - DNA, 107 bp, Oryza sativa
  Clone ID: uC-osflM202020b03a1
tttttgtggcacataaaagatcatacatagaccaactgaactgaactgtttaatccgagggctttttatttttcgtgagccatggttgccatggcaggcataccatt

SEQ ID NO: 32798 - DNA, 280 bp, Oryza sativa
  Clone ID: uC-osflM202020b05a1
tttttgggggacaacagcagaaaaggatatacctctgcttccccggttaccatatggaaagatttttacgttacagacatacaagttacagcacaagcagttttcatatgcttgaacatttaatgtcagcggtagcacattaaccaaaagttaacagtaaaaaatcacatttttgggtagccaagcccctgtattcatgctttgggtaaccattagctaattatcaggtctttaaaatcacatttttaggtaaacctgtaccggtaaagtaaatcccttt

SEQ ID NO: 32799 - DNA, 141 bp, Oryza sativa
  Clone ID: uC-osflM202020b06a1
aggtggtatgaacttatgggatttatttattatcatggtgtacacactgataaggagctgggatatattacaaggaagcactgatgttacaaggcaaatctcacaccatagaaggttggacattggaatacactaataatg

SEQ ID NO: 32800 - DNA, 419 bp, Oryza sativa
  Clone ID: uC-osflM202020b07a1
ttgttttttttttgaagagcaaaaaagcgaactcgtctgaatatatttcacttgaatcaaatattcgtattacaattaggagctagatgaaaatttgaaaccaataacagctcctgatatacaaacctatacttctcacaagacttactaagattcacaattgtggacaaattaattaactaattctgtgtctgttctcaccaagattacaaaaaaatcaagtaatttctacaacatttattcgtgtatgcagtaaataacgttgtactgcgtgatccagcaggtgaagtgcttctgactatatttgcagcatcatatagaatccagatgagtaaacacacattgttttgattactcatccaaaattctttgacggaagtccttcaccatttaagggaagacctttcctgagagagacc

SEQ ID NO: 32801 - DNA, 117 bp, Oryza sativa
  Clone ID: uC-osflM202020b08a1
ttgttggttttttttttttttttttttttttttttttggacaaacggaatttggaactaattagcatgggaaaccaaaataccacgataattcatatgcaattttactttagcaagg

SEQ ID NO: 32802 - DNA, 67 bp, Oryza sativa
  Clone ID: uC-osflM202020b09a1
atataattggggggtttttttttttatttcttttttattttttatttaaatttaattatatttttta

SEQ ID NO: 32803 - DNA, 200 bp, Oryza sativa
  Clone ID: uC-osflM202020b10a1
ttgtggggaagtgataatttaaatacttaatagtaatagactctttgatggagtattacaacatgcagcagtggcattaatacgccagtacattaattaagttacacatatgcaggctccatttttggttttctttttaattttattcgtattacaagaattttcttgtagccctttgcttgattgaatcaactttggaa

SEQ ID NO: 32804 - DNA, 92 bp, Oryza sativa
  Clone ID: uC-osflM202020c02a1
tgttgttggccgtcctttttttatttatgggtgggcacattagaacagatcttaatttccatcataagtaaaactcatttcaatcattataa

SEQ ID NO: 32805 - DNA, 111 bp, Oryza sativa
  Clone ID: uC-osflM202020c03a1
aggcaaatcggcaggtataaacgagtgtattacataaggcgttacataagatcacatggactaatacatcatagtttagttactctgtaaccttttaactttattttcaaa

SEQ ID NO: 32806 - DNA, 367 bp, Oryza sativa
  Clone ID: uC-osflM202020c05a1
gatcaaattgtctctttgaacaccctgaagttacaagaaatgggttatatctctactaatgcactcagatgaagcaaaaaaaaagaacaaaaaaaatgtaagttctagttcttcctgaaaagaaatacagaaaacgtcaaacagtgttagatggcacacgcagtggtaaaattgatttaatctatccatctcatttcgccagttttggccactcaaaaagagttttactgagacatcaaagcactcccccaggcccaacgctatgatattgtctttttttacatgtaaacgagtttttgatcaactaatgtgcaatatcgtcaattttgatggccttagcaaaaccttccagcaaagcaacgtcttc

SEQ ID NO: 32807 - DNA, 433 bp, Oryza sativa
  Clone ID: uC-osflM202020c06a1
aactgagtataataccattgatgattcatttgattctggaagagaaacaattatcaaattacaacagtaaccaacatttattctacagatgccatcgctttctttgcttttttggcaacgcaagtaaaccattttaccgtcacaccacccaccatatattgccacccaaataaaaatcaagaacccaaacaattcccctttaattaattcccgcttaattaataaacaccagccttaataataaagtaataaattaactaatggctcgttctttccagtcattttgccttagctgtggaggatggccgggctacagtacgggccgttgagccagccgtcagtgatctgcttgtaagctgcctcggtgaggtggatgccgtcccagctaagatgcgacgccgggttggaagcacgctgatgcgcctgacattcc

SEQ ID NO: 32808 - DNA, 239 bp, Oryza sativa
  Clone ID: uC-osflM202020c07a1
cattattgcaaaaacatcatcttcttcttcatcttcttagtgtacacaacaccaactcgatcatcatctcggcgcactaaacccatcttccccaacccaaagacatcgtaacttcgctggccacaaatcccatccaaccacaatctaacccacttgcttaagcttacggatcccccacattcaactttgccggggtaccgaagattggtgagcgtacagcccaggacgttttgttgttt

SEQ ID NO: 32809 - DNA, 420 bp, Oryza sativa
  Clone ID: uC-osflM202020c08a1
acagaaagtagccatggccagtctttgatcaaaggagatgatgaacaatgttttaaaaaccatggcagatgaaattactcagatactatatctcttcttgccaacagaacatctctctttctgatacggtgaccacatagcataattccagctaaaacttattctgatactttgcaactgaattattcaaccttgagcaactgggcagaacccatgcataattgcagcatgaccaaactttgtccatatcaagcacattgtcaccacattcatgctcattccatccctccaacgcatgaagaattcccgcgattcgccatgcgctcataacccttcttggcagccaattctcgcatgaatgcacattctgcagcgtttttggtacagccattgcaggagttgtcgagtagctgcagctgt

SEQ ID NO: 32810 - DNA, 409 bp, Oryza sativa
  Clone ID: uC-osflM202020c09a1
gacagtaagctgcttggcgttcacattgccaatacaaaaaacaaaattctccacgcaggaaggtaacaagcaatccaactcaaccgttgacttgtctttgtacttcggtgcagtttttattacaaaaagcaagaataacattcattggtatgcttacagcgccggctgtcactggaaaagaaaaccattatggagtgtccgagcatttcaaaatgccttgagagatttatggcctacaggaagttttctgatgtccaactttttgacatcaggcatttcctcgtctttgaactcctccctttttagttgaaccttcattgctttaacacattcctttttaagctccgttaggtcacttttggcaatttccaatttcaagctctttcttaattttgggaagatcctcctt

SEQ ID NO: 32811 - DNA, 461 bp, Oryza sativa
  Clone ID: uC-osflM202020c10a1
ggaaacacaactcattttttattgatatatgttggatgaatccaataaaaccgatacaagtcacgaaaaatcagactagatgaatccttcgagatcacattgagcaaaagctttcgacgaaagcttgtcctatagatcgtggaatgcaattaacaccttgattaaagtatagggaatttcagtactacgagaggtttgccagactattaagtatgtctatcaaaatccttcctttgaaacgccgttgaatgagaatcaaccgttgattgtaagtcgttttgtcccacaagaactaaacccaaagaagttatgctctttctggacccttgttcttagtatcttccctaggatgagtcgccctcaggggaacaggcatagcccaaccctttgaccaaattttcgaaagctttcttcttttcaaaccataaagctgggctgagttaactacagttggctggact

SEQ ID NO: 32812 - DNA, 205 bp, Oryza sativa
  Clone ID: uC-osflM202020c11a1
ccagaaagttaagttgagatggtgtctttagaaaaaatggcgacaataattccaggctcatggaaattatacaagtagatagcctccgtacagcaactccctgtacactcccttttattcttaccaacacccaaaagtaaatggtgtcaaaaatttcattaattacattgaacaactatgaatacttaatttaccaggttaacaa

SEQ ID NO: 32813 - DNA, 114 bp, Oryza sativa
  Clone ID: uC-osflM202020c12a1
atatgggttgtttttaacgatactggcacagaacaccatcattacttaaaaaacgtggtaatgatcctaacaggcattcagatactgccaccaactaagtaatgtgcactacca

SEQ ID NO: 32814 - DNA, 83 bp, Oryza sativa
  Clone ID: uC-osflM202020d01a1
ttttgggggtttttatttattgtctgtttaacaagttaagttttggtcatgatacggttcatcctaaaaattcaaacactcaa

SEQ ID NO: 32815 - DNA, 109 bp, Oryza sativa
  Clone ID: uC-osflM202020d02a1
tttttgtgatcaaacgaatgtgttttgtgcttgtgtgtaacataatatacatatgcataccaagttctacatatacagaaagttatataaaacgcgcactttaaaatta

SEQ ID NO: 32816 - DNA, 254 bp, Oryza sativa
  Clone ID: uC-osflM202020d03a1
gaacaaaagccatattatttttcctcgcctatattatgtaacttgttcttacagccataggagcgtactatgcgtaagaaacagcaataagcttctgttccgtcctctattagctactccacatagcaagtaagttaagtttgtaaggtagtacttccagtttactaggtacttattaaatttaacaaggggcgaatggaatggaatgggtgtggttacaggtaggtttaatttgagaatggaaagaggttagg

SEQ ID NO: 32817 - DNA, 443 bp, Oryza sativa
  Clone ID: uC-osflM202020d04a1
ctggacactaggtaaatagctcaaaattttctactgaggtatctgggcatattcttaaagcccatgtaaaacacctaaacatcaaaatggagctgcttatcatgcataagaatacgtaggttgtgcagatcatggcagcaacctccacagtaagcagccgaccgtatgaacaattttgttcaaaacagtatacagcattgggagcaaaatgaagtttcgaggcctcaagcgaccttttggtccgaagccactggaatcagcaattccttttttccttttccttcagcaagtttcacccttgttccttttttccttttcctggttaaattctcaattgctttgaagaaggcgctctctgcttgcgagacataaggggcttggaaatgtcagcagcatccttctcggcttgtttatgagagtcctccatatgatcgtcagctttt

SEQ ID NO: 32818 - DNA, 343 bp, Oryza sativa
  Clone ID: uC-osflM202020d05a1
ggaccgaaaccagcaattggtatattaacttgggcaaacttaaaatgctcgaaaaagttgtttagcaacgaacaaaaaaaaagctctaagcaaaataaaactaatcacattgttgcccaatggcagataaactttgggcataccaactgacgacggttacaaaatcctaccagctgagagcatcttcctcttgtttattggcccgggggaaaaaagggtaaaaagcggataactctttcgagtttatgctcagttattagcatcaaagatgctcaaaggggtaaaaaatgaaaaaaaaaacgcaaccgtgtaggcttgtgtagctttaagcagaaaccttttt

SEQ ID NO: 32819 - DNA, 139 bp, Oryza sativa
  Clone ID: uC-osflM202020d06a1
gtattactagaaacataatgcaaacataaattaatgaagcatatatggaacatgggtagatgatgtgtgcctagatataatcgtagcacacgcaagtacatccttgaagaacaggaacaactggatggtgcggccagcg

SEQ ID NO: 32820 - DNA, 431 bp, Oryza sativa
  Clone ID: uC-osflM202020d07a1
agatgtataatcttgaacattttcttccgaaaaggagcaatcacgcaggcaaagtctcaagcttgaatttgaagcctgacaacagcggttagatgaattgcagaaaaggaaaagaagcaaaaacaaatatggggcgaattcttcctgacgcatcttctatacaggattcatttttgcaacaaaagaatggcagtaaatgcctgaggaccttcttcaaccaatgctttatttcttccaggcctatcattatcattattaggaagaaataattgcccccatccttctcggttgtcaggcctatggaagagtagcttttcaaattcttcctgtcttgccccaattgacttcccacccaaacccttgacatatactttcgtaaagagctcagaagtattaggcataggactttcctttgctttcgcaatggcatc

SEQ ID NO: 32821 - DNA, 419 bp, Oryza sativa
  Clone ID: uC-osflM202020d08a1
gaagacaattacaggcttagatacataagaacagttatgcaatcaaccggtataatacaggcccaagttcaggctatctgataaggaatacaaatgttggttctttagacaggccttaagaaaaattgtcactataacaataatccatgctcattcgcccaacaagtgggcataaaattaatagatgcacaaagcaaggggatttggcttttctagagctaccgatctttagatgccagcattgataaattgctctgagctcttagtagggaggatccggattaaatgccaaggattcccttcagatgagttcttttatatggactttagtaaaggatgggtggttaaaatcaaagctgaaaggtgctgggcaggagggttcttcattgatgtcatgaagagaagcccagtatgggtga

SEQ ID NO: 32822 - DNA, 388 bp, Oryza sativa
  Clone ID: uC-osflM202020d09a1
caacttataaaatataaactctgcagtgaatacctgcatggttcaaccaccttgcctatgcaatcacctctatatctggatcaccttctttgccatgattgctcaagactggttcccggattgagtatgccgactgtattccttctggcgaactttgttggagccagaagttttcaggttagtcatctgtaagtttctgggttcacttgacaaagctcttcaaggcatgttccttcaatacctctcattcttaaccattaaggcctgtgcagcagttttcgaggaccctgcacccgaagaatattccctgggggagttcatgtttgctcaatgtgttcacgagcttggtgtagatcaatctgagaatttccattttctgaagcatcat

SEQ ID NO: 32823 - DNA, 438 bp, Oryza sativa
  Clone ID: uC-osflM202020d10a1
gaagaaaaacactgaaaatgcaggttgcttagcctgctacatctgcatccttctcaatcaccgtctgcttagcgacaacaaaagagcaagggcacagacgcagcgagctggcatagatacacacaaaacacacacgagtgtttacaggtacaaggcctattttagtaaatttttacatgttactctgctctttatttgattccaaaaggggttcgtttcattttatcttcctttcttgtaccgcttacccttaatgcttgctgttcagccttcttttcttctttcttctttcttcttcagctaacttggtgaccgattgagccagcccgaatcgccgttgaccacgtatgggtcgacggtcacccccgaaccggaggtggcctccagaaggagaggttgtagcccaagaacctgagcttttctagcctgctcgcagac

SEQ ID NO: 32824 - DNA, 187 bp, Oryza sativa
  Clone ID: uC-osflM202020d11a1
aagagcacacgcgatgcacctacgaagctgcacctattagcggcgactcgctccgaggtttgggtcgtgagcgactgcacgcaggctaaccccgtccaagctcacggaggcgacgaaccgcacggcgaggagcctgcccccacggcgataacccacggagccaagaagacgacggtgctaggtcccg

SEQ ID NO: 32825 - DNA, 312 bp, Oryza sativa
  Clone ID: uC-osflM202020d12a1
ttttggtttttttttgcatataacccaaagaacattgtatataaataaccataaagactgtaaaactactggttcaaaatagcattacatatagcaaaggtacattccaaatcattcggtataaaccgcaagatggaacaacggccccatattgtcttctttaacttacgcttcaaattcaaaagttttatataataaatctcaaggaccagcttccaaactttaagggcgaaccagtacagggtagcccaaaacacggttaacaagggtatttctagattttttgggggccaaatattccttcaagagcgc

SEQ ID NO: 32826 - DNA, 412 bp, Oryza sativa
  Clone ID: uC-osflM202020e01a1
ttttggtttttttttttttttttcttggaacgaagaccctcataagtcatattaacacaataacacaagtggtgctttgagacatcaaccctttgaagattagttacggatctgtgttcacttgttcagcaacaaatgggcttcatatactcactggaagttttaaagttccaaggcaaataaattttaaaaggtgccactgtttttagacttaaaccccaaaaaaaaaatgtgctgcaaaaagcctaaccacaattatgtttgggaaatatttttttttcctgcttccaaccatttttttgcctgcctttgaagtagaactttgtttttacacccttgttgtattgccacgtttttgttgaataggcaaccgggtgtaaacaacttgcaaagggctttgccccatgaaagc

SEQ ID NO: 32827 - DNA, 416 bp, Oryza sativa
  Clone ID: uC-osflM202020e03a1
atatgagatcaaacaagagcaattagattatgtccccttctttattacgaagagaaaatacagagcaaaaaaatcttggttctcaacatcaattaagggggaaaagaatctgacagaacaggaatggaaattgcctgtgcctcacatttccctgttagtctgctactgccatccaacgttttatgccattagaaaacctgcaaactcattggcgctatactagctatatcccgctgcagaggcacttatgtttgccctcagaatagccaaaaaaagatggtaagatttcaaggggggagccaggagtattatgtggattttgaagggggaaatgagaacctacaaacggagtttgattcattattcattaagatcatccttaaagctagtcgatcttggcatactgggagtgcgag

SEQ ID NO: 32828 - DNA, 418 bp, Oryza sativa
  unsure (1)..(418): unsure at all n locations
  Clone ID: uC-osflM202020e04a1
attagcaacgtgtgtttaagtgaaaatgttaatgttcacatagcgtcatttagcgccgcatttcccgtggcagcgtacaactgcaagtgtagtagctcacaaaatttctgagttcttcgcggatatctcagaaggttatttgaaaggtattcctaaaaaatggggtttgcgctaatcaagctgttttacaacaattacgattcgcctcatcgcaantcttcttgagcgttcatcctactgctcggcgatctttctgatgacatacggtaaaatgccaccattgtcgtagtatgcaagctccacctcagtgtcaaatcgaagtgtgcaagtgaaggacttcccattatcagtcgttacagtaacatctttgcccaggcttgatctcacttacattggccgggaggtgaaccgtgaaacg

SEQ ID NO: 32829 - DNA, 412 bp, Oryza sativa
  Clone ID: uC-osflM202020e05a1
aagagcaaaaggcaaaatatggaattgcatacgagctttgaaaacgcgtatggttgttacaactttatatatatacccacactgccctgcaacaacgggggaaggaacccctagtaattaactattcgacactaacaacaacaaagattaacacaaaacatcaatcaatcaaatggaacaaattagtgaactcagtacaaaatgataaacgtaaaaggcccttttcttccacgttaaaagacctacacaacaaacgcaggtcgggtcgtgataattaacaaatttagacactgtcaagaaaataaaacacaaaattagtaaatgaatttctgtaaaagaaggaaaaaccaaacccaggtcctccccaaatccgtggacattctgatcgaatgacgtgacatctcatattctc

SEQ ID NO: 32830 - DNA, 84 bp, Oryza sativa
  Clone ID: uC-osflM202020e06a1
aacccaaaattcaaataattttcgggaagacccccctgttaagcaaattggaggcccgcggattgaacccccaaccacaaataa

SEQ ID NO: 32831 - DNA, 419 bp, Oryza sativa
  unsure (1)..(419): unsure at all n locations
  Clone ID: uC-osflM202020e07a1
cagaactagaaacaaacattaacattattgcgtaattacgttacaaacttacagatgtagtttattctaacaatacgatctttctttgttttgttttacaccaacaacagcacacattccctcagagagaaaggcaacactctaacactgacaatttctgaaacaaaatggactcaagctgggaacagcgcaaatagtntgtctgaattatgcttcagccatgatgcaatcaatggcttgcttgcagattccagtcattgttgcctctggtccatatacctaaattggaacaccaagttctgcacctagtgtacgcattttggcaaggccagtttggtagtttggaccacctcttcgaacgtaaatgttcattcgtgcagccttcaattgggattccttctctcttaaagctcgaatga

SEQ ID NO: 32832 - DNA, 436 bp, Oryza sativa
  unsure (1)..(436): unsure at all n locations
  Clone ID: uC-osflM202020e08a1
ccaccacacaaaaacatttgtgtgtacttctttttcagttaatacattatattcgtgatttttttccaagacattttacactcgtcagcttcgactcactacatcctctccattaccaaagtgttacaaaaacatgtgtaacaatgtactcgtatgttgtagaggcagaaaagttcccattaatctcatgantcttcttgtttgggagaatactgcttgtcccttttctgcacacgttagggcagaaacctggtcatcatcatgtccatcctttttatctttgcagctttccagatgggcaggcgttcctgactcctgagcttccaagaaggccacctccatcatctaatctatacatcctgtatcttctgttctgcatctaatgctaccaaatcgttttaatttctgagcttgcatattctaacttctaaaagaa

SEQ ID NO: 32833 - DNA, 377 bp, Oryza sativa
  Clone ID: uC-osflM202020e09a1
aaccaaaacataggaggtttcatttcttcttctcaaagtagtgtagcatctttccttctttcaccattacataagcttaagcaataacagataacaaatcctcctcctcctttagggaaaatattcaaacacaatacccttataagtactttttattaggaaagtagcgggcatgggcataaatggcagcggggggcaggttaagaatcacaatgctgagcagcggggaaacaaaaccccattatgggacagagcaaaagccttcgaaagggagcttttaggcagaaggcttcttccacttgaggggctttaccacctcccggtgaagtctgggtcgtcccttcccaagggaccgtaagccgccctcttgaggtagc

SEQ ID NO: 32834 - DNA, 436 bp, Oryza sativa
  Clone ID: uC-osflM202020e10a1
ataaatatatatagccggagctttcatagatttcattcacatatgcctcacccaacaacatatagtcgtagcagataccactcttacatcaagtcagagagagatcaggtgaaacaaaaacaaaagcagagcacggtccggtaaaatcaaaatgacgattgaacaaatctgggaacacactgaaacaagggtgggagacatcattcgaattcaagagatgaacaatttaaacgaggctatatattgacgaatgacgggcttagtttgccaccagacttcctcgcagccccgggggtcttgtaggcgatgaagctgatgagctgcacctgcctaacgttgtcgaagccgatgatacggacgaatgcatcagggtacgccttcttggcctcctcgagctccttgagcacctgggtggcgtcggtgcacccgaacatgg

SEQ ID NO: 32835 - DNA, 464 bp, Oryza sativa
  Clone ID: uC-osflM202020e11a1
tttttgtttatcgtacagtggacggtgcaataacagagaggttgatgacacaaacagatacactggacataattacagaaacttcatgctagcaagtaagaaccaaaatcaactacttagggaggggcactttttcggctgcttgtacagcgctgttttcacagctcatgtttacacgctttgttgctgcaaccaagttgaaactgggttgttaggcttgcagggatacacgtcttgcacaacgacaagtccgaaacgcgcccctttacacgaatggcccttgagttggcaacctttgtgattaacgctgacccttttgattgattgagcaacaaggcgttttttcactaagccatggtatttctgggtttttgggggttttgtattactagcgttctgcacatttgaaccattctgctgttaaaaatatgctgttatggctttaagctttccattgaggaaat

SEQ ID NO: 32836 - DNA, 62 bp, Oryza sativa
  Clone ID: uC-osflM202020e12a1
tgggggggtttttttttttttgtgctcaaaaatcatattttattattttctataatttatta

SEQ ID NO: 32837 - DNA, 201 bp, Oryza sativa
  Clone ID: uC-osflM202020f03a1
tttttggttgtttttttttagatcaacacatagttatatatagtatcaaatgatcttgttatacattagtgcattacagccttttttttaatactcattacaaacttaggatacaagcttaaaagtatcatttgtatccacctggggaatgtacaagtgtgttgcattctttttattgggtacttacccattattagtatt

SEQ ID NO: 32838 - DNA, 342 bp, Oryza sativa
  Clone ID: uC-osflM202020f04a1
gcacaaaaaggggaaatttgttttatattgaattcgggtgaattaaaaaagggcataatcgaaatcatttttttgatatgccatatgctttacgaaactgctttccaccattaagaaattgaaaattggaatacattgcataataacaatctcccgggttggtgggtttttttataaaaaggggccctttggtaaaaccacacaagaaccaagtttccccatactgtctaagacctggcttccgtggattttttgaaccattaaattttttttatcaaattgcattacccgtcctttagttatagacccctttgattgttttggggcaaacccccaagaaaa

SEQ ID NO: 32839 - DNA, 319 bp, Oryza sativa
  unsure (1)..(319): unsure at all n locations
  Clone ID: uC-osflM202020f05a1
ggccctatgaaattttgatagataacttatattatcgcatcatgctataacacaattattctgtccaatgtatccacttagtctagcactcgagattgttgagaaatgagaatgaaattcgtgtgccaaattcatttgctggaaatcctgaatacctgatgttttgcaatttgacagccgtttctacaaaaatgttataaagtacgggttgggccttatttatgttcagaactacccactccatttgtcttcatacttggtcgtttcagcctgccatccctttcttggccctttggcctncatggcaacgcgtttcacc

SEQ ID NO: 32840 - DNA, 391 bp, Oryza sativa
  Clone ID: uC-osflM202020f06a1
agctctgaaaaacaggatttcttaatggtgccaggcagggctgacagaccggcacattagctacaaaactcatttgctcatatggcccaaataaataagacatcaacaggctatgctacaacattattccgacacacactatgatggtcattggcctccttggcaagcatggggtttcaaccaaccatttaaaagtgtgcgcacttgcgcctaacatcacaactacagcattttttatcttggctacaacccctagttaaaaccgctacatgcccaatcaggtggcattccaataggtcaccccaccgaagagttaccaccccccagggggcaatgttttaacaccttttggggctaagcgaaccttttgaggtctgagagcgaatccatg

SEQ ID NO: 32841 - DNA, 367 bp, Oryza sativa
  Clone ID: uC-osflM202020f07a1
ttgttttttttttttttgaaccaaccataatgctaatattgcaatcacaaacactcaacatgagtttcgaagatatgttacattttcaacaaacattagaattttacaattgcgcactaatataaattacactactttccccttttatttatgacacaagatggctacaaacgaagcactagaagccccctattaacacagcaccactaaatcatcaggatccacagttcctaaatacacagcacggtaggaacatataagttacttgccagttgaaattaaaaaagggccaacgaagggaatggttgggggttttaaaggatgaactggattacagccagttgcgatcagaggtgcttgccccggt

SEQ ID NO: 32842 - DNA, 384 bp, Oryza sativa
  Clone ID: uC-osflM202020f08a1
gaaaagagaacggcggaaatcatgccaacacccaaaaatataacatgtacagaatctctattgacaaatgagactgaacatgtacattggcattaccatcttagtcaatcatcagaatgtacagaatctactcagtgaatataaaagccactaggttaacaaaacatcccgtgcacacttgtgtgcaatgcaactaatcgccaaatctgcatgcgggcagtgaaatccctattacacccgtcagccaggcttcagatttccttctaatgcacttcaactggatgtgatcattaatgagaacaccattagaagtgacacccatgttgcaagaattaatgctcgctgcatgctttacttttcttatttaattcaggagcaaatgga

SEQ ID NO: 32843 - DNA, 456 bp, Oryza sativa
  Clone ID: uC-osflM202020f09a1
ttgttttttttttccagccatcaaggacgcagatttttcgtttccagcgtccctgtacgtgggggctcaaaagcctttcagtttcagttctgaacacaataaaacctcgatggatatacagctagccacggaaggaattaaaagtcccttcatacttaagttacgccgatgagcttagcagcactgcaaaccgctgctttctccagtcagtagtaagcaagctttcagttcatgtgccgtgtgccttgccctttgtttcaccagattgcccagaagcaatttgcaccgtacatggaaattggcccccctcatcatcattcatcttctttctttttcgtcttttctttcacatttgaaacccatcctgagatggcctgatgcttaggtcctgagaacccagggacgggtactccatttggtaaacttcactgaattgatccattaatgagtggggca

SEQ ID NO: 32844 - DNA, 253 bp, Oryza sativa
  Clone ID: uC-osflM202020f10a1
attataaaatgacttgtattatattcccaacattaaagtttgatattcggatacattttgctcactgtggcagacaaagcagaccacctagagcccttttattcagaatatatgcaagataactaaagaacattggttcatagccatatactagtaactatattgaatagttctggcttggctgccttcacaaagtaaccagagttgattcgcttactggaagtttttgagtattttcttttaattcttcagt

SEQ ID NO: 32845 - DNA, 91 bp, Oryza sativa
  Clone ID: uC-osflM202020f11a1
ttgtgggttttttttatccccttttttgaccagggttaaacatttagctaatttaatagcgttataaaacacgggttactcgggaacatgt

SEQ ID NO: 32846 - DNA, 324 bp, Oryza sativa
  Clone ID: uC-osflM202020g01a1
ttttgtgggtttttttttttatcccgaataaaattatataagacagcacacttggaacacgattattacactggagggtaattacacaggaccacgataacagggaatcagaatcacccacttgcctggagcttaatgtgccaacatactaacaattcaagaaactgccttattggctcacttgtaattaaacaaactgcattggaaaaacaacactcaaaggagtcgatgtactaaaacaggaaggcaaataaaaggaggaactgcgaactggaacatatatttggaattctggtcttctgcaatggttcgaagtaaccttca

SEQ ID NO: 32847 - DNA, 118 bp, Oryza sativa
  Clone ID: uC-osflM202020g02a1
actttttggccgcagaggcaaacacgggggggatggttaaacgccgggattgttaccaatcccagaacagctacatatgcggcaccgacctcaagggcgttggccctactactgtacg

SEQ ID NO: 32848 - DNA, 63 bp, Oryza sativa
  Clone ID: uC-osflM202020g03a1
attttggtggtttttttattattttttttttttaatttatagggtttcataatgtatgttcta

SEQ ID NO: 32849 - DNA, 179 bp, Oryza sativa
  Clone ID: uC-osflM202020g04a1
atggaagttgcaatagttattgaaaataatcgagttacatatcattctcccttaaagagcatcggcaacagataagaattctactacaatctgaattgctcactatggcagacgcagcaaaccatctagagccccttattttgggccagacagattttaaaagaaacaatgaaccaagt

SEQ ID NO: 32850 - DNA, 108 bp, Oryza sativa
  Clone ID: uC-osflM202020g05a1
ttttgggggtttttttttttttttttttttttttttttttttttttttttttttccaaattaaaaaaccccgatttataaggggccggggatgaagtccccaaattaa

SEQ ID NO: 32851 - DNA, 119 bp, Oryza sativa
  Clone ID: uC-osflM202020g06a1
ttttttttggttttttttttttttttttttttttttttttttttttttttttttttttttttttttttttttttttttttttttttttttttttttttttttatttttattaatttttt

SEQ ID NO: 32852 - DNA, 361 bp, Oryza sativa
  Clone ID: uC-osflM202020g07a1
tggttgttttttttttttttttttttttttacaagataaaagctaacaatttttatgtaggaggtagatcacaacatatgctacaacttctggaaatacaagattctcggattccatcattaagatcctttaaaatccctttgaaccttgactacagataaatgcatttgacatttcagacagccaacttcagaaattgatacctcctaaaccacttgatataaaaatatgccatttgggcaggagatagatctacacgttttttacaacttttggtttaagactttttgaagggaaatctttttttttggcccaaaagggcttcaaaaccaaacttggcaagggggaaattaacgaaaac

SEQ ID NO: 32853 - DNA, 278 bp, Oryza sativa
  Clone ID: uC-osflM202020g08a1
aaatatatatagccggagctttcatagatttcattcacatatgcctcacccaacaacatatagtcgtagcagataccactcttacatcaagtcagagagagatcaggtgaaacaaaaacaaaagcagagcacggccggtaaaatcaaaagacgatgaacaaactgggaacacacgaaacaaggtgggagacatcatcgaatcagagatgaacaattaaacgaggctatatatgacgatgacggcttaattgccaccagacttcttgcagcccgggggc

SEQ ID NO: 32854 - DNA, 55 bp, Oryza sativa
  Clone ID: uC-osflM202020g09a1
tggggggtttttttgtcagcgtcattaccaaaacaactaaaataggaaagagaaa

SEQ ID NO: 32855 - DNA, 198 bp, Oryza sativa
  Clone ID: uC-osflM202020h01a1
tttttgttttttttttttttaccattttccaattttatacaagaaatttcatatttgatcaatgtacacgtaatatgtatagttcccctagcccccgactgttttattgggagattcttccaggaagacagtcagataagacatgtaaaaaattagtgaaagaggaaaattccccttaaacccctggcttgttgtgct

SEQ ID NO: 32856 - DNA, 74 bp, Oryza sativa
  Clone ID: uC-osflM202020h05a1
ttttggttgtagattaaacatacgtccttttgcccgattaattcaatagtttcttaactaatatgaaccaccac

SEQ ID NO: 32857 - DNA, 105 bp, Oryza sativa
  Clone ID: uC-osflM202020h06a1
ttttggttgggtttaaatccaacttattcataaagcatactgctgtcccacaggaaactgtttcataaaactaacatatcatacggacttgatggtccattaaac

SEQ ID NO: 32858 - DNA, 60 bp, Oryza sativa
  Clone ID: uC-osflM202020h07a1
tgggggggtatgttcgaaaacagcctcatctataaagcaaactgctgagcgaccagaaaa

SEQ ID NO: 32859 - DNA, 70 bp, Oryza sativa
  Clone ID: uC-osflM202020h12a1
ttaaaaacaggcggactccactctaaccttggcaaaaagaagaggcagatcagaacaggaagccctacag

SEQ ID NO: 32860 - DNA, 407 bp, Oryza sativa
  Clone ID: uC-osflM202022a03b1
tagaatcctacctgactagtactaccactactagctagtagcgagctactctctctggtcatcaagctttgagtggttggagtggtggcagctatggctttttccatctccaagaaggctgcagttgctgcactcttctccttccttgttgtcacctgcgtcgccggcgccaggccggggaacttcagcgcctccgacttcaccgccgatcccaactgggaagtcgccagggccacctggtacggcgctcccaccggcgccggccctgacgactatggcggtgcttgcgggttcaagaacaccaaccagtacccgttctcgtcgatgacctcctgcggcaacgagcctatcttcaaggacgggaagggctgtggcttatgctaccagataagaagcgtcaaccaccc

SEQ ID NO: 32861 - DNA, 417 bp, Oryza sativa
  Clone ID: uC-osflM202022a05b1
taaatttctccccaatctcgcgaggctctcgtcgtcgaatcgaatcctctcgcgtcctcaagatgcagatctttgtgaagacattgaccggcaagactatcaccctcgaggtggagtcctctgacaccatcgataatgtcaaggctaagatccaagataaggagggcatccccccggaccagcagcgtctcatcttcgctggcaagcagctggaggatggcaggacccttgctgactacaacatccagaaggagtcgacccttcaccttgtcctccgcctccgtggtggcatgcagatctttgtcaagactctgaccggcaagactatcacccttgaggtggagtcttttgacaccatcgacaacgtcaaggccaagatccaggacaaagagggcatccccccagaccagcagcggt

SEQ ID NO: 32862 - DNA, 462 bp, Oryza sativa
  Clone ID: uC-osflM202022a06b1
tttaactggtctaaatatgacaaagtattctcaaacaacaaccagccccacggtgctgcatttcagcattcccattcataccaagatcacaaaagtgaacatatgagttcaagtcctgggactttaacagggcctgagtttctatggggtagtccaaagccttattctgaacatgctcaatcccctatttggcgtccaccagcaattggtcatgcaataccatctaatacccgttctcaggggcagggattattgtatggtggccgtcaggcttcactttttgggtctcaagatcagcttcatcatcatcatgttggctctgccccttcaggtgctccatttgagagccactttggatttttacctgaatcaccagagacgtcttatatgaatcaagttaggtttgggaacattgggaatattggtagtggccgaaacagaactggtcttatgctgaacatg

SEQ ID NO: 32863 - DNA, 470 bp, Oryza sativa
  Clone ID: uC-osflM202022a09b1
tgtgatgggaaaggatgctggtctccatacctctgggcatgcctatcacgatgaacttgaggaagtcctacagattgtcaaaccacagcatttcttgcctgttcatggagaactcctgtttcttaaagaacatgaattacttggaagatctactggcataaggcacaccactgtaattaaaaatggagagatgcttggcgtgtcacatttaagaaacagaagagttttgtctaatgggtttgttgcattagggaaggaagatttgcggctaatgtatagtgatggcgataaagcttttggaacatccactgatctttgcattgatgagagattaaggattgcatctgatggcgttatttttgtcagcatggaaatctttcgacctcagaaggaacttgcttcatcacagtcaggattgaaagggaagttcaaaataaccacaagatgcctattgcttgataatgaaagac

SEQ ID NO: 32864 - DNA, 419 bp, Oryza sativa
  Clone ID: uC-osflM202022a12b1
ttaactggtctaaatatgacaaagtattctcaaacaacaaccagccccacggtgctgcatttcagcattcccattcataccaagatcacaaaagggaacatatacagtgtaagctgctgttactatcgcaggcggctggagctggtggtgttccgggctaggctgattctgaagatgggcagtcgggcacacgcacgcacgcgtcgtcattggcggcgagcagcgcgttcccacctttgctggtccgcgcgtttgtcgacgcgatggaagcggcgggctactacaactgcaagatgaacgacggcggcatttgcgggggcgtctgcggcggcagcgagcatggttcaaaggcaattctgagcatgtcaaggttgaaatgtgcgctttgggggtttgatttgagggcacttttgatcctt

SEQ ID NO: 32865 - DNA, 371 bp, Oryza sativa
  Clone ID: uC-osflM202022b01b1
tagactcccgacgcgaccaagcgccgccgtcgccgacgcttccccgccgtcggagatggacttccaggtcgtcgtcctcgccgggggcacctccgagaagctctcgcccctcgtctccaaggatgtccccaaggcgctcctccccgtcgccaaccgccccgtgctctcctacgtgctcgacctcctcgaggccagcgacctcaaggacatcatcgtggtggtggaggggcaggaggccgcgcgactcgtcggagcttgggcctcgagcgcctacctagaccgccttctcgtggaggttggggcagttccagaggacattggaacagctggtgcactacgagctatttcaaaagcgactgactgcaaatgat

SEQ ID NO: 32866 - DNA, 358 bp, Oryza sativa
  Clone ID: uC-osflM202022b06b1
ctctcgccgccgccgccgcctctgctttcccctcgcgcggtcgcgccaccacctccgcttcgcgccgccgccatcgtcgtccgcatcgcctcgcgcctccgccgccgccgccacctccgccttcgcctccgtcttcccctagcgccgccgcctccacctccgccgccatcgacgtcgccgtcgccgtctctgagcgcctccacctccttctcccccctcgcgtcgccgtcgtcgccgagtgcggacttcgaggcggacgcggagaaagcgacgaggcgaacgctcctctcctcttccactctcgtctctcctttgcctgcgaggagctgtgcctcgccgccatcgtcatcgtcgtcaa

SEQ ID NO: 32867 - DNA, 355 bp, Oryza sativa
  Clone ID: uC-osflM202022b09b1
tctccactactaataccaccaccgccgcgccggaggtggaagacggacggggtagagttggggtctcgcggtgagccgattcctctctagtggtcgcgcctggtgtgttcgccgacgacgccggcgtcgcgtcagccatgggtgggctcgaggagatcaagaatgaggccgttgatctggagaacataccgatcgaggaggtgttcgagcagctgaaatgtacgcgcgaggggctctcctccgaggaggggaaccggcgtatcgagatgttcggccccaacaagctcgaggagaagaaggagagcaagatactcaagttcttggggttcatgtggaacccgctgtcgtgggtcat

SEQ ID NO: 32868 - DNA, 426 bp, Oryza sativa
  Clone ID: uC-osflM202022b11b1
tttagagggaaggaaggagggagggaagggacgcaccttggggggtgggaaggagaagggagagccatgggcgacgacggtggtggtgatggcggcgcctcctccgcgggattctcctacttcgccgtcttccacaactacccccttgttgccgacttgctgggcttcgccgtcgcggcaatcattaagttcttcgtcacccggtataaggagaacaaatgggatcctaagcagcttatcggttctggggggattgcatcgtcacattttgccacagttacagcactagctgtagcgattggcttccaagatggttttggctgtgccctatttgcgacagcagcaatattcgcaagtgtgggttttgacgaagctttttgtattagattacatgcttgaaaagcagccaaagggtttgaataaaat

SEQ ID NO: 32869 - DNA, 459 bp, Oryza sativa
  Clone ID: uC-osflM202022c01b1
ttgcgctctccaccacacactcccacccaggtaaggagagggaggaggaagggaacctcgaaggcggcggcggcggcggcggagatggtttccctcaagctgcagaagcggctcgccgccagcgtgctcaagtgcggcaagggcaaggtctggctcgaccccaatgaggtcaacgagatctccatggccaactcccgtcagaacatccgtaagttggtcaaggatggattcatcatcaagaagccccagaagattcactccaggtcccgagcacggagagcccatgaggctaagcagaagggacgtcactctggctatggtaagcgtaggggtacaagggaggctaggctccccaccaagatcctgtggatgaagaggatgcctgtgctcaagcgtttgctgcgcaagtatcgtgaggcccagaagattgacaagcacatgtatcatgacatgtacatg

SEQ ID NO: 32870 - DNA, 202 bp, Oryza sativa
  Clone ID: uC-osflM202022c03b1
ggagcaccgaatccaaggtcgaggggaagaaaaaaagagaaaattccacgaataaaaattcaaaaaaaggaggaggaaaaaaactgaatccccttgcggctcgtgctccttctccccgacctcgaggcaaggcaaacccatccttccccctggcctcccttctccgcttcgccggctcacgccttccctctctcgcgaggcg

SEQ ID NO: 32871 - DNA, 343 bp, Oryza sativa
  Clone ID: uC-osflM202022c05b1
ttctcttcttcctccttatctcctcttctctccctgttccttctccttctgttcgatcaatcggggtgatcatcgagatcgtgttgagggatagatagtttaatctaacaatggcgaagatcctgctccatgggacgatgcacgtcaccatcttcgaggcggaatcgctctccaaccctagcaggccaagctcccaagcgccccagttcctccgcaagctggtggaggggatcgaggacacggtgggcgtgggcaaggggacgagcaaggtgtacgccaccatcggcctcgacaaggcccgcgttggtcggacccgcacgctcgtcgacgacaccgccgcgcc

SEQ ID NO: 32872 - DNA, 472 bp, Oryza sativa
  Clone ID: uC-osflM202022c08b1
gggttttattcctttcctcacaaacacaccctctcccccctcactacgtctctctcctctctctctccgccgccgccgccgccgccgactcttgcctttcccacgccctcgatcttggcggctggagagccatggcgatgcagtccggcaggcgagcctcgtagccaggaggggtcagttccccagtcacccaccccacacacgaagatagcgagcttgtagcgtgattttttttgtaggccgtcgaactcgcacctatggcgaccgcgaacccctttgacctcctcggcggcgacgacaacgacgaccccgcgcagctgctggccaaggcggccgtcgcggcgcagaaggccgaggcgaagaaggccgcgcggcgctgggtcggtttccgcccgcggaagggcggcgcgcaagccgccgacttcaagtttcccaccaagccgggtcccccttcacaggccgtgagggagtc

SEQ ID NO: 32873 - DNA, 386 bp, Oryza sativa
  Clone ID: uC-osflM202022c11b1
tctcactcccagatacctgctgctgccactagcccactaccatggatccttgcaagttccggccgtcgagctcgttcgacacgaagacgacgacgacgaacgcgggagctccggtgtggaacgacaacgaggcgctgacagtggggcccagggggccgatcctcctcgaggactaccacctgatcgagaaggtggcgcacttcgcccgggagcgcatcccggagcgcgtggtccacgcccgcggcgccttccgccaagggcttcttcgagtgcacccacgacgtcaccgacatcacctgcgccgactttctccgggtccccgggcgcccagacccccgtcatcgtccggttcttcaccgtcattcacgagcgcggcagcccggaga

SEQ ID NO: 32874 - DNA, 447 bp, Oryza sativa
  Clone ID: uC-osflM202022d01b1
ttgattggcaaagagaaagcaaagcacatcgcgacgccgacctctataaatacctccactattctcccccacccccctcgcctccggcctcctcctcgtccccaacttcgccgccgccgtctctcgcctccgcgccaatgcgccaccattccccgccgccgccgccggacctctcctccgccgtgggcgagatccacccgccgctcgcctccgccgcgcgctcttcctccaacggtggaggcagcgggggctccttcaccgcgctgctggggctcccgacctcccaggcgatggagcttctttttcccaccggcggcggcttcgggccggcggccccggccggggttcccggcgacccgcaccttgttgaccgggcagcccggttctccgcgtttggcttccctttggccggccttcccggcggcttcttcttccccttcccctttc

SEQ ID NO: 32875 - DNA, 445 bp, Oryza sativa
  unsure (1)..(445): unsure at all n locations
  Clone ID: uC-osflM202022d05b1
cagcagtggtaataacaagagcaagagtcagtcaacagagccagctaatgttgtaaattcccacgagaaatctatccgggtattttctgccactcgcaagaatgatgctcttgaacggtcacctgaaatgtacaagcaaccagaccaagaaaccccgccatacttgtcactacggctctttggtagcaccgaggaggatgttccttgtaagatggacactgcaaataagtacttatcttccgagagtagcaatcctctggatgagagatctccatcatcatctccgcctgtaacacataagtttttccccatccgttcggtagacgaagatgctcgtattgcagactancgggaagatattgcgacagttgaggttagcacaagtcgggcttggcgtgcaccaccacttgagctgtttaagggattcaaaacggccaattgaaaa

SEQ ID NO: 32876 - DNA, 384 bp, Oryza sativa
  Clone ID: uC-osflM202022d06b1
tagcgactcgtcacagctcaaacaagtcaagagcgaatagttcttgctgatctgttgtttgattactttagttctcgagaggctttagctgaatccatcgatcgatcatggaggatgagaggaacacggagagccaccagggtggcgaggctgcagagcaggtggaggtgaaggacaggggcctcttcgacaacctccttggcaggaagaaggacgatcagccggaggagaagaagcatgaggaggagcttgtcacccgcattgagaaagtctccgtggaagagccaaagaaggaggagcaccacgccgagggcgagaagaaggagagcctcctctccaagctgcaccgatccagcttcagctccagctcgtcgagtgatgaag

SEQ ID NO: 32877 - DNA, 195 bp, Oryza sativa
  Clone ID: uC-osflM202022d07b1
aaagcaaacagaattaaactaaactgagaagagcagaatacaccgccaaatggccaatacaacccagccagcccgtctgaaggttgagctatttacaggagctccccccgggagcacaaccaagcaagcagcctggttgaccaattttttaagggaccgcctcctatgaaaaaaggtttttaacccaccccccaa

SEQ ID NO: 32878 - DNA, 367 bp, Oryza sativa
  Clone ID: uC-osflM202022d08b1
ttctaagaaagatgaagttgaatacctgaaaagtctaatataagaggttgaagagaaaaacaatgccatgaaggctcgaattgaactcttgaagaaagatgatgatttggctgcaggaaaacaagtccttgagaaggttctcttacaatcctatccatctgtatcacacttttctcctactgtcactctcattttggcttgacttctgcaaatctttttgcagctgatgcaatgcaattctgcactctacaatggcctttgagttttagattttttagccgatccgatgattatttacttgctggagtgaaaagacatctgttggatagctgtgtaggtttagataggatgttgatccaagaatcga

SEQ ID NO: 32879 - DNA, 209 bp, Oryza sativa
  Clone ID: uC-osflM202022d09b1
tcttcctatatgctggttgggtacgtgagggagctggataagagggtgcatcaccatgtccactcttatttacaattatttaattattactattcattttattctctattttttttcttttatattcttttttaatctttttttctcttatattggattatattttttatttcttaaattcttttaaatacaatatttttattctttct

SEQ ID NO: 32880 - DNA, 376 bp, Oryza sativa
  Clone ID: uC-osflM202022e08b1
gtgtgaacttactctggccccttttgccatagaactggcagagtgttaggtgcctttacttgacgagcaccatggcgaaaccaatcacggggttgtaagttggtgtgtcccacctagaattgtattggatcagttgaaaccaaacttctgctgttcaaatagacccttcactatgcaaccggattttgcgtttcagctcgtgataatatttaagagaagtatgcggaccttattttagactctggcctatttgagcgtcactcattatgcggaagcttctgatgccgtcgacaatgtcaaggccaagatccaagacaaggagggcattcccccggacccgcaacgccttatctttgctgggaagcagctggaggat

SEQ ID NO: 32881 - DNA, 373 bp, Oryza sativa
  Clone ID: uC-osflM202022e11b1
ttttgtcacttccatctcattctcctaattgtcatcactagcttctagctagcttaattaattaattagccatggcggaggagaagcaccaccaccacctgttccaccacaagaaggacgacgagccggccaccggagtagactcctacggcgagggcgtctacacgtcggagacggtgaccaccgaggtggtcgccggcggccaggacgagtacgagaggtacaagaaggaggagaagcagcacaagcacaagcagcacctcggcgaggccggcgccctcgccgccggcgccttcgtccttgggaattaactaattaattaaccactaattaattgtcatcactagcttctagctagcttaattaattaatt

SEQ ID NO: 32882 - DNA, 484 bp, Oryza sativa
  unsure (1)..(484): unsure at all n locations
  Clone ID: uC-osflM202022f01b1
tgccttccgaatgacaggggatgagctaactaggtttgtctcagagaagcgatctctctcggttctcaaattagatggttgcagtaatctcaattttcttaatataagctcttcaagcctttcaacgctttggctatcagatctttcttccctttcgaaatcggtcataaactgtcctaatttgaatgaactctcactgggatttacccaacaaaataatgattctacggatctgattagtctgatggatagtctgggtcgtacctgctcaaatttgagaaacctgcacatatcctcaattcatttatgcaatgaagctgtgctttctctagagagtgctaatcttcagggccctttccatcctatccttgattcttgggtcaaaaataacagatgcagctgntgcatctattgntcgctcttacacaagcttggatttgcttgaattaagcgggtctagcattactgataatgggcttgggat

SEQ ID NO: 32883 - DNA, 502 bp, Oryza sativa
  Clone ID: uC-osflM202022f05b1
ccggtgtcgcccggccccgcggcggcggcggccgacggccccgcgccgacgaacgtgacggcagtgctggagaagtccggcaagtacaccaccttcctccggctcctccacgagagccgggtggacacccagatcaacagccagctgatggacagctacaacgggctgaccatgttcgcgcccacggacgccgcgttcgcggcgctcaagccgggcacgctcaactcgctgtcgtcgcaggaccagatccagctgatgctctactgcgtgctcccgcggttctacagcctcgccatgctcaccaccctcggcggtcccgtgaacacgcaagcgtccggcgccgacggcccgtacaagtacaagatcaagccgtcgaacaacaaacgtaacatctccaccggcgtcaactgggcgctgctctccaccgtcggcagcaaggacctcccccttgccgtctactccgtcgacaaggtggccgcttccctacgagctgttcggcccc

SEQ ID NO: 32884 - DNA, 332 bp, Oryza sativa
  Clone ID: uC-osflM202022f07b1
tgtttgtgcatttccttaagaatcccaagaagtatgaagagttaggagctaagataccaaaaggtgccttgcttgtgggtcctcctggaacaggcaagactctgcttgccaaagctacagcaggagagtctggtgtgcccttcctgtctatttctggatcagatttcatggaaatgtttgttggggttggaccatccagggtacggaacttattccaagaagctcggcaatgtgctcccagtattatatttattgatgagatcgatgcgattggtcgtgcaagaggccgtggagggttttctggttcaaatgatgagcgtgaaagtactttg

SEQ ID NO: 32885 - DNA, 312 bp, Oryza sativa
  Clone ID: uC-osflM202022f09b1
tacagaagagagcagaacagagcaaagggaatggaatggatcattaagagagagatgatgatgagtgagcagtgagcagctgccgacggaaagaagccatcattaggcaccaaatgcagcatgcacatgcttagcagcatcagctgctgccggccaggggagacaagaaaacagaggagaagaagaagaagaagaggaaagccattgtcatcatcgtgtcgtgattagaatccggccatgtcgacagcagaagcagccgtgtggaggggccatggcagcagcaacatcacgcggcaaatcctcaagtgcacg

SEQ ID NO: 32886 - DNA, 359 bp, Oryza sativa
  Clone ID: uC-osflM202022g01b1
tagggaaagacgcctgcgcctgcaggtacccggatcggcaggttcgaggtcgacccacgtttctttttcctggcgccggcgacctttctgtcactccaccggacggcgacacgccaaggtgggtgagcctctctgtgccgcctccgatgttttctcttggcacccgtggccctccaccattatcggcgggtcggagctgccttccccatctactgggttccccccttggcaaaggggatccattacacaaagggctttggaaggtttgaagggcaattcaaccgtggtttgggcttgagcaagaagttatagagccatacagctccgacaaaaggattcacctattccagaatgtctgc

SEQ ID NO: 32887 - DNA, 243 bp, Oryza sativa
  Clone ID: uC-osflM202022g04b1
ttttcatccaactatacaagttcaagagtttacaagagacccagacgatcaagatgtcgtgcggtggaagttgcaactgcggttcctgcggatgcggcggtggctgcggaaagatgtaccctgacctggctgagaagatcaccaccaccaccactactgcaaccactgtcctaggtgttgcacctgaaaaaggggcactctgagggggttggcaaggcagctgaatctggcgaggctgcccat

SEQ ID NO: 32888 - DNA, 277 bp, Oryza sativa
  Clone ID: uC-osflM202022g06b1
ttcgcggagtccgtacggccgcagcgaggcgacgtggtggcgtcgagtcggcggcgatgataagggttgtgtctccgccgcctccgtccaccgtgcagctgcgcggcggcggcggcaccccggggccctcctcctcctccgcggtctgccgtttctggggttcccgaagaggaagtagagttgcggcgacgagtagttggggttgggggaagagtaggaggagggaggctcgccgccatctcatgctgctctgctgaggaaggggaggggcctccgg

SEQ ID NO: 32889 - DNA, 288 bp, Oryza sativa
  Clone ID: uC-osflM202022g08b1
ttttctttcagctggagccaaggccgaaaaagaagccgaagctggtggcaatgtcagcggtaagcagagcacagcaggggaggggaggggcgccgtggtcctgctgcatcccgtgcgtgcctcggaactagggtcaactactatgtcgactgttgctcgcacctccattgacatcaatctcatatccaaggtttgacacctttggatcgcataccagaattttccatgttcagctcgcaataattcatctttagcaaccatgcggtcggtggtaaacaattataggtg

SEQ ID NO: 32890 - DNA, 381 bp, Oryza sativa
  Clone ID: uC-osflM202022g12b1
tttcctttcacccatcaagattgcagtaataatccaagctcaataaacgagccaatccgtcgaagaaggaagcagcggcgatggcggcgaggtccggcgaggtgcgggcgacggtgctgggcatggcggagctggcgctgcttctgctgctcggccaccacgcggcggccatcgaggccaacgtcggcgtcacccgccaggccagctttagcctgaacggcggcgccggcgccggcgccggtgctcgcgctggcgctggtgctggcgctggcgcttggcgtggcgctggcattggaactaacgtccgcgttggcgcttgcgcccgcgtcggtgctggcgtctgcgctggcgtaagtgcgaaggtcggtgcttggcgtcgtg

SEQ ID NO: 32891 - DNA, 254 bp, Oryza sativa
  Clone ID: uC-osflM202022h01b1
tctttccgttcccggcggaggcacggccggaaaacttccgccgcctcgcctcgctccggcgcacgtcgccggcgactgaggggccgggggcaaaccggtggtcggtcggcctgctcctctcctccccgcccgtgcgccttctcccctgctgtccgcgagcaggtgcgaatcgaatcgaatcgaagggggaatttaagattgattaagattgccttccactttctgagagcagatttaaggatgccatcagagag

SEQ ID NO: 32892 - DNA, 300 bp, Oryza sativa
  Clone ID: uC-osflM202022h02b1
cccaggccactcttgcgtttcgccaccggtgagcagggctaccccggcgtggcccactccaccgcctgcgagtccgggttgaagaagttcagccaccggttggactctacccagcccatgagcagcagctgcgttccgaggagggagccgaaggagaagggcgcgatggcctccggctgcgcgccggcctcgaaccacggtacgccgatccacccctgccgacgaagaaccccagcaccgtcggcatcggccaccgtccgtggatcagctccgtcttcctgtaccacttgaggaacgccg

SEQ ID NO: 32893 - DNA, 441 bp, Oryza sativa
  Clone ID: uC-osflM202022h03b1
ttttcgtataattacgatacttatcgcacgccgccgccgtcgccggccgccgcacgtatcaccgtcgcgcgccggcccagggaggaggaggcgagagtgcgagatccaccacccgatgacctcccaggcggcgacgacgacgaccacggcggcggcggcggcggcgtggaccagggaggacgacaaggcgttcgagaacccgctcgcggggtgcgcggtgccaccacccgtgggcagaggggcccccccgataccgaatgttttctccccacttcttccccagaggggtccccggtgcaaaggtccgcggagtgaggtgctgaggcactacgaggcgcttgtggaggacgtcgcggtcatcgacgcgggccgcggtcccgctcccgtcttcgacggggagggaatccccggtgccccccaacgaaccgggacccccccccc

SEQ ID NO: 32894 - DNA, 455 bp, Oryza sativa
  Clone ID: uC-osflM202022h05b1
tgttcagttcaacctgctgccattccagcacaggctggtgctgactggactgctgctccagctcctgcagccggaggatgggacacggctgctgcccctgcccctggatgggaacaaggcagtgcaccagtcccagcggcagcacccacccctaactggggggagtgagtgaaagagtaactgatccagttcatgggtcagaggctgagtttgttgtcgggagcagctggtagacactatttaagtagctttaatctttttacagtactgagttatttagatgcaaatcaaattttgtgttcttgacaatgctgggactgcgaactagccagccttttttttgttacaatctcatggatagctttatttcaagagcaattctgctttgcgaaccaagagtatgtgtttgcaacaacaaattgatggggttttctcctcatagttcttattggtca

SEQ ID NO: 32895 - DNA, 352 bp, Oryza sativa
  Clone ID: uC-osflM202022h07b1
gctcgccggcgccatctcctccggcttctaacccgcgccgcgcgcttcctcctcctcctactccagagcaactacctcctcccccgcctctcccctctctaaaaccctagtccttctcgcccgccatggggtacgcgcagctcgtcatcggccccggcgggagcggcaagtcgacatattgctccagtttgtatcaacattgtgagactgtgggtaggacaattcatatggtcaatctcgatcctgctgcagagcacttcagctatcctggatctacggatattagggagctcatatcattggaaggagtcaatgaagaacttgggatgggaccaaatggcgggcttatcta

SEQ ID NO: 32896 - DNA, 293 bp, Oryza sativa
  Clone ID: uC-osflM202022h08b1
tttgagatcccaggacttctggaggagattctggtccatgctgtcttatgcttgcagcgagctttgcttgatcatcctgctccatgtggccgcaagagcatcctacctggcgacgaggttggcgcgcatccacaagctcaagatgccatgcatcctgtgcacaaggatggatcatgcccttcatgggaagccatggttctcttcggatttggtctgcgccgcgcataggtcggagatatcatctctggcatactgcagtagccacaacaatcttgcacaaatgtgatgatctc

SEQ ID NO: 32897 - DNA, 495 bp, Oryza sativa
  Clone ID: uC-osflM202022h10b1
gttcctcctctccacgactccacccctcccgactccgcctccgccgccgcttccgatccgcggcggcagccggagctcggagagagacaggccacccgccgcccccccctcctcgccttccctgtgcggcctcgttcgccggtgcgacgcgccatcccggtccgcatcgggctcaaaggcaaaggttactgatggatcatgatagatctagaaggcataaatcaaatacttccagaaaaaggccacatttcaattctgatgacggaaagaggaaacggctaaactcaaggcacgatgatggaaccatatcttctgagccaatagaaaccatttacaggatactgtgtccggttaaaaagattggcagtgtcttgggaagaggcggtgatattgttaggcactaagagacacaactaaagcaaagataagggttgctgattccattcctggtgcagatgagagagtaattattatctttaactactcaagtcagac

SEQ ID NO: 32898 - DNA, 461 bp, Oryza sativa
  Clone ID: uC-osflM202022h12b1
tttctctctcctctcctctcttctccggcacaccacaccccaatccttccccgatctccccaatccgagagctccggaggagcagcgcggaggcggagatggcgctgcggcgagcgctgctcagatctgccgagatctcccccgatcgcaaggctgcacttgagtacctccattatctatcgagagcacagcctactcgttctctaacaggtgctggcctttattctgctggcaaatcattcagcactcaggctgctactacatcaagcacaccacaaccttcaccaccaccttcaccttcggagaagactcactttggtgaccccaaagatgaggaccgcatttttaccaacctctatggtcaacatgacccttttctgaaaggggcaatgaagaggggtgactggcattgaacccaggaattggtggtttaaggggcagactggatagtgaatgaaatg

SEQ ID NO: 32899 - DNA, 457 bp, Oryza sativa
  Clone ID: uC-osflM202023a02b1
catatcattcacgctcacgctccactacaacgcactggggacagttgattattagctggtggggtttctggcccggccgccggcgagatgggcaaggacaagcaccaccgcgactggatcctccggcggtgctgcggctccatcgccgcctgcatcctcacgctcgccgtcctcgtcggcttcatcgtgctcgtcatctacctcgcgattcacccctccaagccttctttctacctccaggacgtccagctccgcaacatcgacctctccgaccctgccatctccctcaacctccaggtgacgatcgcgtcgaggaacccgaacgacagggtgggggtgtactacaagacgctgcacgtgttcacgacgtacagggaggagccgatcacggtgcccgtggagctgccggcgatctaccaggggcacaaggacgtgttggtgtggtcgccggtgatgt

SEQ ID NO: 32900 - DNA, 335 bp, Oryza sativa
  Clone ID: uC-osflM202023a06b1
gtttgttatgctagcacgcacccatggcgtctttttgcacctcgagctcgctcgacgggggaacgatcaggaggcgagcgatatgggaggggttggccagagccacgtgcacccaggctgcttgaactcctcgacgaagaactccccaccgacgccatcccggcgagactcggtgtccccggagtgccggcggtcggacccgggatcccggtgatccccggcgtgcccggagtgccggtggttggacatgggatcccgttcgtgccggtgatccccggcgtgccggtgatcgtgccgatgattcgcggcgtggcgatgatcgccggcatgacaac

SEQ ID NO: 32901 - DNA, 259 bp, Oryza sativa
  Clone ID: uC-osflM202023a07b1
tcgttttacacaagatgttaatatggatgagtgggctcatgatgaagacctttatgatgttagttactcggagatgccctttcggtttcactggtgcccatttggtcgtttggctcaacttccatccttctttgaggaaggagaatcatcacccccagttacttttcatgacttcatgggacaacatatgtttacggagcatgtagctgctgtattttctgcacctggggcagctcatccatgcccatatgtggcatac

SEQ ID NO: 32902 - DNA, 510 bp, Oryza sativa
  unsure (1)..(510): unsure at all n locations
  Clone ID: uC-osflM202023b05b1
ttcagctcgcgagacgccggggatggagcacgacgcgcacgccccgccgcctgccgcgcaggagctcggcgacgcctccgcctccgcctccgtcgtcgacgactgggcgcgcgacgaggacaccgagccgatggccgtggatccccaccacgccgtcgccgccgccgccaccgccactgaggacggcgagggcgtggcggatgccgctcctcccgcggccccggctgaagatgttacagaaattcaatcatcactacagtccttggagttgaagacgaatgctgctgcacatgaggatgctcaagaggtagtagaggaggaaaaggaaacaaagcggcatttgaatgtggttttcattggtcatgttgatgctggaaaatcaactgccggagggcaaatacttttcttgagtggtcaagtcgatgacaggaccatncagaagtatgaaaaagaagcacaagataaaagccgagaaagctggtacatggcttacattatggacacaaatga

SEQ ID NO: 32903 - DNA, 466 bp, Oryza sativa
  Clone ID: uC-osflM202023b06b1
tgtttttttgcataagaactcccccccctcctcgctgcgcgccgccgacgtcgttttcttggagaggagaaatccgtaggctcagaggatttttggtagtcttgtttcgtgatattcgtgaagagggggggagctaaggggggattcgtaagatcagaattggatcacgcgggggcgcgctcgggatcgggggttccaaacacagcttcttcgttgaatttaagtggatgtactaatggagtcaaagggtggcaaaaagaagtctagcagtagtcggtccttgatgtatgaagctccccttggctacagcattgaggacgttcgacctgccggaggcgtgaagaaggttcagtctgctgcttacttcaactgcgcgaagaaccatcctgatagcccttttggttctacattctagtaggtaggatttcttgcattccatttggcacttttttgtgacctatttttt

SEQ ID NO: 32904 - DNA, 217 bp, Oryza sativa
  Clone ID: uC-osflM202023b08b1
tatataaaaaaaaaaaaaaaaaaaaaaaaaaggagaatttatttaaaaatttaaaaaaaaaaagaaaaaaaatataaaaaaaaaaaggatttttttttttttatttgggggtttcctttttgggggggggggttgtttttccgttccttggtccgcgtttctttctcatttggggctctttttttttttgtgcttgcccctgttttttgccctgggg

SEQ ID NO: 32905 - DNA, 442 bp, Oryza sativa
  Clone ID: uC-osflM202023b10b1
ttgttttggggatgtttgagttgcacgcacgctagtggaaaaatcacactcaaaacggctggaaggttagcagccatggcaatggaggcggaggctctcctgccggagccggagccggagtcaccgccaatgctcgccgtaaaccacctcggcggtccgggctgccgcggtagctccggccggaggaccggcgcgttttttctcatcggagcggaggtaggcgaatggatggcatactctgccatcatggggaacctggggagctacctgactgggccgttccggcagccaacggtggtgactgcggctgtggagaaccagtagatggccacctggatgtttctgccgatgctcggctcggtcgtcaccgactgatggctcggacgataccgtaccatcctttgggcctccctgctttaaatcttggcacgcggcccatgac

SEQ ID NO: 32906 - DNA, 501 bp, Oryza sativa
  Clone ID: uC-osflM202023c01b1
gtgtattcgtaacgaagggaaagtttgggatgcgcgttgttgcgacgacgcggtccgcctcctcctccgccgccgctccgctccccctcttcctcctcctcgccgtcgccgccgccgccgccgccctgttcctcgtcggctccgcgtccctcgccatggccggccacgtcctcggcggcgcgcacgacgccccctccgccgccaacagcgtcgagaccgacgcgctcgcccgcttcgccgtcgacgagcacaacaagcgcgagaacgcgctgctggagttcgtgcgggtggtggaggcgaaggagcaggtggtggccggcacgctgcaccacctcacgctcgaggccctcgaggcggggaggaagaaggtgtacgaggccaaggtctgggtcaagccgtggctcgttttcaaggagcttcaggagttccgcaacactggggatgcaacccaccttaccaacgccggccttggcgcctagaaaggtggacatgagcctgggg

SEQ ID NO: 32907 - DNA, 242 bp, Oryza sativa
  Clone ID: uC-osflM202023c02b1
gttgtgcaccaaacccccccgcccccaaccccgacctcctcccgtgctccgcgctccgatccgtcgccgccgccgtgcgcgcgccgccgggggagtgcgccggcgtgtggtggtgggtgtgtaagggtaggtggaggggtcaatgatgcgagatcggtcgcggcggtggttgagggggtgtgtgtgctcgtctactccggtggatcgggtctgtgaggggtgcgcttggcgatcgtgtgatt

SEQ ID NO: 32908 - DNA, 498 bp, Oryza sativa
  Clone ID: uC-osflM202023c09b1
gtttccttcctctcgccagtgccaccacagctcaagcgtgatccagcgtcgggccgcgcgtgcgagcgagcgagcgtgcgagatgtcggccgccggggaggaggacaagaagccggcggggggagagggcggcggcgcccacatcaacctcaaggtcaagggacaggtctgcctctcttcttgctctcaaactcgtagccttattatccagtagtacataggagtaagtttgttccatagtggatgtatggattgtagaattgagatttgagggttaggttcgattggtaagcccgcaagcgatatagtggcggttgttatgttcggcgatggattcggattgctttgcggagctattagcgtggctgcgaccaagcacttggttcgatggtttgactttgcttgattcgtccagatagggaacgctttggtttatgttgtgctgatgcttgtgtgaagttcaatttatgcatgaatcgatcttttgttaggttgctg

SEQ ID NO: 32909 - DNA, 531 bp, Oryza sativa
  Clone ID: uC-osflM202023c11b1
gttttcgtggaccccggtcgccgtcgccgatcgcgtcaagggcatcgttgttctgttacatggactaaatgagcatagtgggaggtacaaccattttgcaaagctgttaaatgatcatgggcttaaagtttatgcaatggactggattggacatggtggaagtgatggggtgcatggctatgtttcatcgcttgatcatgctgttggtgacctgaaagaatttctagaggatgttgtactggaggaaaactatggtttgccatgtttcttatttggccactccacaggtggagctattgttttgaaggcagtcctggatccttgtgttgaagttcatgttgaaggtgtgatcttgacatctccggctattcatgttcaaccatctcatccaattatcaaagttgttgcacctatcttctctgtgttagctccaaaataccgagttgctgctttgcacaggagaggaccttcctgttcccgtgatcctgaggctctgaagatcaagtttgcagatccacttgtgtatactgg

SEQ ID NO: 32910 - DNA, 409 bp, Oryza sativa
  Clone ID: uC-osflM202023d08b1
gtttcggcagctgctgctggtgtggtgatacactcgcctagctttggccaccgctcatctctgctctgctttttctcctctgctccactgatcatccaattcttctcctcctgattggccattctgattggctggtgacatgtcgaagaaaattgtggtgaagctggacctgcatgacaacaaggacaagcagaaggccatgaaggccgtctcctcggttgtcggaatcgacgccatttcgatggacatggcgtcgcggaagatgacggtgatcggcacggtggatccggtggacgtggtgagcaagctccgcaaggcgtcgtgggcggcctacatcgagtcggtcggaccggccaaggagccggagaagaaggaggagaagaaggaggaggccaagaaggacccccgc

SEQ ID NO: 32911 - DNA, 474 bp, Oryza sativa
  Clone ID: uC-osflM202023d11b1
cttcttcctcctcctctcccccacctgcaatagactagaagcaaaggagatcaaatcgaaacctcatcccggaaatttttcaatcgaagcttccactcgaagggacgggagcctccgttaagatgattcgttgcgttgtaaagtgcggcgggcagcagcagcacgtcgtcgtcgctgcgcgcggtgatcggaagtcgccggcgatcgcggcgccaccaccagcgaccgtgcggatgccgggccgcgtgctctgctgcggcatgaggtcgcgcggggcggatctcgccggcgtcgagatggcggcggggccgcagccgcagggcggcgtctcggggctcttccgcggcccgcgctcgagcccgcgctactcccgcgtgcgcgccaccgccacagttgatcctgaggatattccattggagaaggttcaagctaaatcttctggaagtgttctgccatatgtgggcgttgcttggt

SEQ ID NO: 32912 - DNA, 528 bp, Oryza sativa
  Clone ID: uC-osflM202023d12b1
tttgttagtagttcttctgggtttctttggccaactgataagacgacgagctgcttgtctgcgctggaagcaagccggccgagcatcttaccgctgcagctagcaccttgacaatttctcagttctacagctttgtttatatatgttaatgcatgaaatacatgaggatgaacgcccagttgttgcaaggcctgtgttctgatggcatatggaagtatgttcttctatggtcattccaaggcaatagacatcatgggatattgacttggggcgatgtttatgtcgataaagtgatcacagaaatcaaaggagatctttatgatagccccattgatagcaagaaccagatagtaatgtctactttgtacaacaatgaccagtaccaaagctatccactgtgccccattgaggcagcattactgagcatgtccagccatacatactctctaggagaagagcttattggtaaagtagcgcttaccggacaacattgctggattcttcctatgagttctcttcaacatttat

SEQ ID NO: 32913 - DNA, 130 bp, Oryza sativa
  Clone ID: uC-osflM202023e01b1
acccgttttattctaccacatctgactgctttaaaaaggggggatctttataagagcgctagtgtactacatactccgaaccctgcatatcaccaggtgcgcggttgctcctttaacccaggaatgagct

SEQ ID NO: 32914 - DNA, 346 bp, Oryza sativa
  Clone ID: uC-osflM202023e10b1
tctttcatttgcaagaatgcgtcgttgagcttagcgggtgaggtggtcggaggcatgggagaagaggcggcgacggcggcggcggcggagcgagatgagcaggggagtgtcacggcggcgctcgacgccattaccggtttggtgtctgcctccttggccgcttcgctcttcccgtacaagtggcagctcatcagggacaggctcaaccggctccacgccggcctcgccgacatagccaccggcggcggtgaaggcggcgaggggcatggggcgttggcgggggttcttggggcggtggtggagaccgtcagggaggtccctctctctttcgcctaggagcctgggc

SEQ ID NO: 32915 - DNA, 393 bp, Oryza sativa
  Clone ID: uC-osflM202023f02b1
gcagctgtagagtgctctgaagaagccaggaggaagggaaatactgaaaagcgcttcttttgcaccctcagccagcacacctcactcggtttttccaggacagacttctacaataaaccctggaattcagcttcctcttaaaaaagctgtttcttttcaagatgataacaggcatacagttggtccatccaagtctcttccattgccacagggtccaaaacactcgagtccaatacttcaggtttcttcagataaccctacatctcatgatcggaagataatgtcaagtggacaaaaggccttcacagggtctattattgaacatgatgataatatttcaacccttcaaccttcaaagagtgctgctttgcagaatcctgctagttcatcttc

SEQ ID NO: 32916 - DNA, 438 bp, Oryza sativa
  Clone ID: uC-osflM202023f06b1
tttttcccccttccctttccctcccggcgtgtggtggtcggaggttgccattcattggccgcccccaccaccgcacccgccggtgaggagggacaccgccatcacattcttgctatatccaacgacctccattgattaactacgtgcgtgtgagaaactaatcaaccggccggcgtgctggctttcctcatcttcaagatgcaccggtggttcattgccagctgcggagacatacgtgcggcggcggcgcgctcatcccgccgccgaggaggcgatgcgattgcgcccaagtcggcgccgccgtcgccgtcgccgccgtcgaggctgaggaagacggtgtcggagacggcggcggtgatgctggccgtgcccaaggacgtggaggagttccggaccaatgccgcgtacgggaccaacctcgagctgttcacctacgac

SEQ ID NO: 32917 - DNA, 462 bp, Oryza sativa
  Clone ID: uC-osflM202023f07b1
cgttgtggtagttgcatactagtcgtcctttcttcccttgtcacctttggcggcctcggcttgcttaaaaggatacatatgcttttgtaactagaacatttgttgttgaatttggattatttgatcccatggcgaattctcgggctagccgtttcaagatgtctaatctatcagagccctcaaaagaagctgcatcagctgatgattcaagtgctgtccagaaaactggagcatggagtaacacgttgaacattcttctgcaacaagcttcagtctatggtgtggctgctggttattgcctgtcagcatccctgctctccattatcaacaaatgggcagtcatgaaatttccataccctggagcattgacagctttacagtacttcactagtgttgttggagttctcttatgtggacaactaaagcttattgagcatgatggccttaatttgaggaccatgt

SEQ ID NO: 32918 - DNA, 382 bp, Oryza sativa
  Clone ID: uC-osflM202023f08b1
ttttcttcctcaagcgcgccggcgggcctcgccggcgcgcgacattgagctcaacccccccgtcgtagtcgcacgtcgagcgccaccaccaccgccagcgcgtcgcatcgtacgtcctccacgcgcggcgccgtgctaggcaacctcctctgctgatcgcccgcctcctcatgagcgtgtgacctgctgtcgaatggtgcggcggcacctgctgcgcggacacagcctggacaggttcctgccgatcaggagcctcatcatgtcgtccagctcttccttctcgtcgtcgtctccgtcgccgccgccgtcgtcgtcgtcgtcgtcacggggaagcagcatcggcaggtggtgcggcgtcagcgtggccgaggaggacgaggac

SEQ ID NO: 32919 - DNA, 499 bp, Oryza sativa
  Clone ID: uC-osflM202023f11b1
tgtatcattcctgtgtcagcccatggtacaaatcctgcaagtgctgctatgtgtggaatgaagattgttgctgttggaactgattccaaaggtaacattaacatcgaggagttgaggaaagctgctgaagcaaacaaggacaacttggctgctcttatggttacctatccttcgacccatggagtctatgaagaaggcattgatgagatatgcatgataattcatgagaacggtgggcaggtctacatggatggagctaacatgaatgctcaggtcggattgacaagccctggctatattggagcagatgtttgccaccttaaccttcacaagacattctgcattccacaaggtggggggtggtcctggaatgggtcctattggtgttaagaagcacttagcaccaattttaccatctcatccagtgatcaccaccggtggcttccctctgcctgagaaaaccgacccctttggtaccatttctgctgccccatgggga

SEQ ID NO: 32920 - DNA, 502 bp, Oryza sativa
  Clone ID: uC-osflM202023f12b1
tttttaagtccggagttggaagcgatcgatggcgggtactactacgggacgagttgttgcactcggcgcggtggccgtggtggtggcgctgacattcctcgccggcggcgcggacgccgactgctacgacttctgcttcaaggactgcatggccagggagaacaacatggtcgactactgcagctacgcctgcgacaagacgggccagccggacaagcccacgctgtactcgtcgtcggcgtcgtaccgcctcgccggagacatggagtgccaactctcctgcgccttgggctcctgccaccgcctacttccggacggtaagggcgccgtggaggcctgcttcgggcagtgctacgacggttgcaagaccacggcggcggccagactgtcgaggcctctccgcgccggccactacgtgctctctagtgcccctgatgacgtagaccatgatccggaccaccgttacgtggtctctagcccccatgatgacgtagaccatgat

SEQ ID NO: 32921 - DNA, 369 bp, Oryza sativa
  Clone ID: uC-osflM202023g03b1
gtgaggcttcatgtaggatctgtcaggaaaacttcagcaccactgtcaatgcactgactgaaccaatcgacatatatagcgaatggattgatgagtgcgagcgtgtcaacaatgtcgaagacgacgacggagcatgagcaacgcaaaatgcctgatgttgccgtacctgcactggtgctattgactgccaccttcagccacgtttgtaatagtgtaatggctgattggtttgttagtaggcagttcatttccgcacctaaataaacacctgaagacgtgatgttataccggcttcccatcaaaaactcataaacagttatatgcgtgtgaaattgtatgggcctagtgccctacctgggaaattggaac

SEQ ID NO: 32922 - DNA, 472 bp, Oryza sativa
  Clone ID: uC-osflM202023g05b1
gtttttgcgacgatgggttcttgcacattgtcctccggcggcgtctgcgtcgtcgtcgtcctcctgtgtttggctgcttgctgcctaacgtgcgcgcgcggcgctgtcccggcgatctacgtgctcggagactcgcaggcagacgtagggaacaacaactacctgctgcactcgctgctcaaggccaacttccctcacaatggcatcgactacccggggggaaagcccaccggcaggttcagcaatggctacaacttcgtcgatttaatcgctatcagtctcggggtgcccagccctcctccatacctctctataagcagcaaaccaatgaacagctccgtatatctgaagggtgtcaattttgcttcaggaggagcaggggtgtctaatcttacaaacctggtccagtgcatcagcttcgacgagcagatagagggggactaccacagagtccacgaggcgctggggaagc

SEQ ID NO: 32923 - DNA, 487 bp, Oryza sativa
  Clone ID: uC-osflM202023g06b1
cttttcttgagctcaatcagcaacaacatctatctccttcttgcttagttaagtccttcgccctcccaagaagaagaagatgtcttgctgcggcggcaactgcggctgcggcagcggctgccagtgcggcggcggctgcggcggatgcaagatgttccctgatgtggaggccacagccaccaccaagaccttcgtcctcgctgctccatccaacaaggcgagctctggaggaatggagatggcggtggagagcggcgagaacggcggctgcggctgcaacacctgcaagtgtggcaccagctgccgcggctgctcctgctgctcctgcaactgaatctatcgtcgtcgtcgcccggctgcatgaggatttatcgtatggatgctgctactgtcgatcagagctttgatcgaggccctaatttgcttgcattagtacccagcttatatgtaggcaggccctgccttttgctctgacgcctaaataaaa

SEQ ID NO: 32924 - DNA, 484 bp, Oryza sativa
  Clone ID: uC-osflM202023g07b1
ctttcccacccaccccagcgtcgccccacccccagcgccgccgcacgcccacctcccctacctctgccggcccgcatccgcctgctgccaccggcccccttcacgtggccgtgcctcctcggtctcgtcgtctccgccttcctcctccctctccctctccctctcggcatctcccgaggcagcagcggcgcaggggcgggtcaacggctcccagcgcagaggctgctcagtggctccctggcgcagcggctgcccggcggcgccgcggctcgggattcggctccgagctcgggacctccacagcggcgaggataaggtaaataataatccacctaagaccaaccgattatgagctctctatgcccgtttgccaaactcgcctctgctggcgccacatgccccgtaaaatcagacaacaaaaccacctcatgtcctgtcacagccaacaatcacaccgacgacgacgataatgaaaaaactggca

SEQ ID NO: 32925 - DNA, 447 bp, Oryza sativa
  Clone ID: uC-osflM202023g11b1
ttgtttcagtaagtatcacgaattgtgcattttattctaaaatgtactatatttatatagcgtttgtcacacattgactagaatggatctgtttagttaatttgtctgctctgctgctgatttttaaagtttagtgtatagagttaataaaaacgtgtgtgagctgatagtttgcaggagtgataaaattcccatgtgagcaactttgttgtttttatatcagtgcagtgtttagtaggaggaaatgaatcaaaggacaattcaggggttgggttggttgggtcagtgaagaaatcagcaaaactgcagttcacaagatacaatgaattatgcttacaaggtgtttgtgttaatgactgcaagttgacacttcacaggatgtcctttgcattttaactacacaaggtcgtgttctatgcatgctaactcgggctcatcacttagttg

SEQ ID NO: 32926 - DNA, 441 bp, Oryza sativa
  Clone ID: uC-osflM202023h04b1
gttaatcgaaacgaaagcttcttcttcctcctcccatggagtcgcttgcgtcgcaggcgaagccggcggccgtgctctggctcgccggcttcctccaggccgcgcgcctccaccgcgtcgtctccttctgcgccagctcgaggcctctgtcggccaggatcgcgcagtgcttcctgctcaacgggttcatcttcctggggagcttgttaaccctaaaatcggtggtcattccaatcctttcgtggatactgcctggggattgcagtcagttgcaagggcagcatctgtgtgatcacacagtagctgtagcgacctattcatttctacgctctgttcttattcaaatattctatgtattatggctttatccactttacatcttcagcttcgtgttgagtacactttggtatggactattgttttaccatactcaagattccc

SEQ ID NO: 32927 - DNA, 82 bp, Oryza sativa
  Clone ID: uC-osflM202023h06b1
tattttttgagctcaatcagcaacaacatctagggccttcttgcttagctaagtggttcgccctcccaagaagaagaagatg

SEQ ID NO: 32928 - DNA, 505 bp, Oryza sativa
  Clone ID: uC-osflM202023h10b1
gttatgatgcatgtagtatctgccttgaggcggggtgtgtgagtgacccttccacattgactggttgcaaacacgagttccacctccaatgcattcttgaatggtgtcagagaagttctcagtgtcctatgtgttggcagcctatcagtttgaaggatcctaccagtcaagagctgctcgaggcagtggagcgtgaaaggaatgtaaggaccaatcaaactcgaaatacaactatatttcatcatcctgctcttggagattttgagggtcagcatttacctgttgttggtaatgatgctgaacttgaagagcgtatattacagcacctagcagcagccgctgcaatgggaaggtcacaccaccttggtagaagagaaggacacaggggtcgttccggctcttatggtcgtccacagttcttagttttttctttgcatccaaacatgccttctgctgggtcagattcttcatcgtccgctcaaggggaagtggataatgaatcaag

SEQ ID NO: 32929 - DNA, 305 bp, Oryza sativa
  Clone ID: uC-osflM202024a02b1
attgatctgacttgacacccaagggaatgcgcgtgcccggggctagcatagtgcattggaagtttgccttcaaatgcagagaggtctatagggcgcgatgtaactttattagagttggagttaggaggttgataggacagagtggtagctgtaccagagttagcataggattagatagaaaacgtagcataaatagggaaagtatttgtgacgcaggggatccaagaggggttttgtacatcattggtttgaggtatacttatataggcaatcaatccaagcttcagtcattaaaaaataaaaac

SEQ ID NO: 32930 - DNA, 492 bp, Oryza sativa
  Clone ID: uC-osflM202024a04b1
gaacacagcaccaccccttctgctgcatctgccacctccctctgaattgtgggcctgaggcgatggcggcgctcgccccgtccaagatgctcggcacccggctcaacttcgccggctcctcccgctacgccaccgcggcaccgaccaccggagcgcagaagatcgtctccctcttcagcaagaagcccgccccgaagcccaagcccgccgccgtcacctcctcgagccccgacatcggcgatgagctcgccaagtggtacggccctgacaggaggatcttcttgccggagggtctcctggaccgctcagaggtgccggactacctcaacggagaggtccccggagactacggctacgacccttttggcctcagcaagaagccagaggacttcttcaagtaccaggcctatgagctgatccatgccaggtgggcgatgctcggcgccgctgggttcatcatccccgaggcctgcaacaagtttggcgcaaact

SEQ ID NO: 32931 - DNA, 543 bp, Oryza sativa
  Clone ID: uC-osflM202024a11b1
tcttttctccaccgctcccaatctcgatcgaaacgcgagggtttcgcatctccgccgacgcctagaggaagaagggatccgccgccggtagccaagccatgccgaagaacaagggtaagggagggaagaaccgcaagaggggtaagaacgaggccgacgacgacaagcgcgagctggtgttcaaggaggacgggcaggagtacgcccaggtgacgcggatgctcggcaacggccgctgcgaggccatctgcgtcgacggcaccaagcgcctctgccacatccgcggcaagatgcacaagaaggtgttggatcgccgccggggacatcatcctcgtcggcctccgcgactaccaggacgacaaggccgacgtcatcctcaagtacatgaacgacgaggcccgccttctaaggcctacggcgagctccccgacaccctcaagctcaacgaggggcgtcgacgtcgacgggcccgaggacgggggtgaccacgacgactacattcagttcgaggacgaggacatcgacaagatctaagcttttttt

SEQ ID NO: 32932 - DNA, 453 bp, Oryza sativa
  Clone ID: uC-osflM202024a12b1
ttgctggctattcagaaggggaagattggcatccttctcgattttgtatggtatgagccactcaccgacaaagaagaggatcacgcagctgcacatagagccagggagtttacccttggctggtacctgcacccgattacatatggtcattacccagaaactatgcagaatgctgttaaggaaaggctgcccaatttcacacgtgagcagtctgagatgataaaaggatcagcggattatattgcgatcaaccattacacaacttattatgtcagtcaccacgtcaacaagacatccatcagctatctcaatgattgggatgtgaaaatttcatatgagcgtaacggtgtgccaatttggaaacaggcgtactcgaacctgctttatgttgttccttgggggatctacaaagctggcatgcatgtaaaggaaaatacaaggaccccattttat

SEQ ID NO: 32933 - DNA, 480 bp, Oryza sativa
  Clone ID: uC-osflM202024b03b1
ctcttcatcatctcgctatatacgtgcaatggcggtggcgcaggtgagcaggacggccgtggtggcgctggtcctcgtcgccgtggtggtggcggcggcgtacgtgccggcggcgaccgcgtacggctgcttcgacgactgctacgagcgctgcgccaacgggaagacggacgacgcctgcaactccatgtgcaagcaggcttgcagcggcgccggcggcggccccgccgaggcgcccgacgaggcttgatcgccgacgacgagcgccgccgcgccgccgtccatcgatctccatatccgcccgtagccgccggctatatatacactcgattatttgtttgtttgttgttaattcaagtttgattgatttaaccgtcgagtatctaaattagtttgttttgtttgtttaatttatgcaagctggtgtactctctcagcgatttgtaattcttgtgtgataattaagtgaatttgttccct

SEQ ID NO: 32934 - DNA, 530 bp, Oryza sativa
  Clone ID: uC-osflM202024b04b1
tttgttctcaaggtatctcaaggcagcacaagaactgcttgatgaggtcgtgagtgtttggaagagcataaaacaaaaggctcagaaagagaaggttgaatcaggaaaagcagatggcaaagagactgatggagggccaaaaagtgagggtgtatcttctaatccacaagaatctggcgctaatgcagcacctgagctttccactgctgagaagcaagagcttcagaacaaaatggcaaaactgatggcaatgttggatgaggtggaccggaaatacaagcattattaccaccaaatgcaaaccgtggtttcatcgtttgatgtggtagctggaccaggatctgcgaagccttacacagcagttgctcttcagacaatctcacggcactttcggtgcctgaaggatgctatcaatgatcagatcaatgttatcaggaaaaagcttggcgaggaagagaactcatctggcaaggagggaaaattaacccgccttcggtacattgatcagcagctaaggcatcaacgtgctt

SEQ ID NO: 32935 - DNA, 450 bp, Oryza sativa
  Clone ID: uC-osflM202024b06b1
ttcgttgccgccgccgccgacgatctcgtctcgcaccgcctctctctcggtatctgagatttggatcgggcgcgaggccggcggctccagtcggcatggcgcttgtgttgcattgcggaagtggcaacaaaaatgcctttaaggcacttattgctgcagagtacactggagtcaaggtcgagctgaccaagaattttgagatgggtgtctcaaacaagacccctgagtttctcaagatgaacccccttgggaagattcctgttctggagactcctgaaggtgctgtttttgagagcaatgctatcgcgcgctatgttgctcgcttgaaggacaacagctctctttgtggttcttctcttatcgactattctcacattgaacaatggatggacttcttaagcacagaggttgatgccaatattggaaggtggttgtacccaaagcttggtt

SEQ ID NO: 32936 - DNA, 523 bp, Oryza sativa
  unsure (1)..(523): unsure at all n locations
  Clone ID: uC-osflM202024b07b1
tttgtcttctctctcagctctcacagctcactgcatcaatggccgcggccaccatggcgctctcctccccggtgatggcccgcgcggcgccgtcgacctcctccgcgctcttcggcgaggcgcggatcaccatgcgcaagaccgccgcgaagcccaagccggcggcgtcgtcggggagcccgtggtacggcgccgaccgcgtcctctacctcggcccgctctccggcgagccgccgagctacctcaccggcgagttcccgggcgactacgggtgggacaccgcggggctctccgccgacccggagacgttcgccaagaaccgggagctggaggtgatccactcccggtgggcgatgctgggcgcgctcggctgcgtcttcccggagctcctcgcccggaacggcgtcaagttcggcgaggccgtgtggttcaaggcgggctcgcagatcttcagcgagggcgggctcgactacctcggcaacccgagcctgatccacgcgcagagcatnctcgccatctgggc

SEQ ID NO: 32937 - DNA, 479 bp, Oryza sativa
  Clone ID: uC-osflM202024b10b1
ttcttttcggggaccgcgcggcggccagcgggcgcattcatggcggcggggggaaccatacacgagctcaaggcgaagaacacggcgctggtcgctgtcacagctgaggaccctgaaggacacctgcttcactcgtccgcttggccaagggcatcgagctggtcacccacaggctgtcgacaacactgatggagcgcactgtgaacgcgcgcgcgctgacggcgatctcgaagaaccagaaagcggcgctgaggaaggctttcatgaagaaaagcctgctgccgttcgacctccgccccgagaagacccgcgccatccgcaggcgcctcaccaagcaccagatctctttgaagaccgagagggagaagaagcgtgagaagcatttccccatgaagaagtatgctgttaaagcccaggttagtaggaacataaatgatttaccggacaagttttggccagatgcctaaatttgatgtttt

SEQ ID NO: 32938 - DNA, 457 bp, Oryza sativa
  unsure (1)..(457): unsure at all n locations
  Clone ID: uC-osflM202024c05b1
ttgtctccatcttctccttccagctcctcccatggcgtccctcgtcgccatcgccatcgccatggctctcatggtggttcaacctggccggcagatgactgcctttgctgctcggacgtcgccggcggcggcggcggaggcgttctggcgtgccgccatgcccggcgctcccatgccggacgccatcgtcgagctcctccaccatgagcacggcgttgctagcgccggcggcaaggccaacgcgtcggcgacggtccaccgccgccgatgaacttcaactacgacgactacagggccctgcctcggagcgacgccccttccccggatgcattgaaccgcgtcgtcgccgtacagaacgccgacgagaacgtgcgtgtnttcgctcgtcgacgccgccgcgaccggtgttcttcttcgaggacgccgtgcgcgtctgcgagagcctgcccctaccgtg

SEQ ID NO: 32939 - DNA, 528 bp, Oryza sativa
  Clone ID: uC-osflM202024c07b1
ttcgttagccatgacgaacgggtacctgttccgggagtacatcggcgcgcagttcaccggagtccgcttctccgacgtgcccatcaacccaaacctcagcttcaacttcatcctctccttcgccatcgactacacgagcccggccggcggcgccacgccggcgccgaccaacggcgtgttctcgccgtactgggacacggccaacctgtccccggccgacgtcgccgccgtcaaggcggcgcaccccaacgtcagcgtcatggtcggcctcggcggcgacagcgtgcaggacaccgccaaggtcttcttctccccgacctccgtcgactcgtgggtggccaacgccgtcgcctccgtctccggcatcatcgacgcctacggcctcgacggcgtcgacgtcgactacgagcacttcaacgacgacggcggcgccggcgtcgacacgttcgtggagtgcatcggccgcctcctcaccgagctcaaggcgcggcacccgaacatcaccacctccatcgcgccgttcgagga

SEQ ID NO: 32940 - DNA, 524 bp, Oryza sativa
  unsure (1)..(524): unsure at all n locations
  Clone ID: uC-osflM202024c10b1
cccacgcgtctgtttaactctaatccacccacacaccacactggccggcactcacgctcgtctagaatagcacccccatagtggaggatcatcacgaccaccttacctcctgctacgcccattgctacgtctcgcgccggatcgatccaggtgccgtcgcgttccgatcccctctgctctggcttgctgatcgatcgatcgatggatgaagcccgccggcgggaggagcatggacggcggcggcggcggggcggcattgctcggcggcggcggcgtgcacctgcttcgacgtcaagtccttcgtcggctccctcgcgctcctcaccctcatcatggcgctctggcagctccacccgtaccagcccctgcngctcctccccgccgtcctgtcctgctccccatgccccctcctcccccgctcacccacctgtggtattgcgcgttccttcctctgcaccgccgctgccaccaactcgactgacacagccaggttcccaaacaccaccgccgccatgagggtggcc

SEQ ID NO: 32941 - DNA, 420 bp, Oryza sativa
  Clone ID: uC-osflM202024c12b1
ctgtttctcaaggtatctcaaggcagcacaagaactgcttgatgaggtcgtgtgtgtttggaagagcataaaacaaaaggctcagaaagagaaggttgaatcaggaaaagcagatggcaaagatactgatggagggccaaaaagtgagggtgtatcttctaatccacaagaatctggcgctaatgcagcacctgagctttccactgctgagaagcaagagcttcagaacataatggcaaaactgatggcaatgttggatgaggtggaccggaaatacaagcattattaccaccaaatgcaaaccgtggtttcatcgtttgatgcggtagctggaccaggatctgcgaatccttacacagcagttgctttttagacaatctcacggcacttttcgtgcctgaaggatgctatcaatgatca

SEQ ID NO: 32942 - DNA, 513 bp, Oryza sativa
  Clone ID: uC-osflM202024d01b1
tttgttgaacgcgtacttacccacaagttaggtgcatgccatggcaccattcatggcgtgcgcctcgccaccggtactcacgctggccctgctcgcgtcgtgcggtgcccttctcgccacctccatgctcccggcgcgtgcgacggcgggcagttgcttggacgtcggcgacatggcgatgatggacaggttccgcgcttggcagggagctcacaaccggtcgtacccgagcgcagaagaggcgctgcagcggttcgatgtgtaccgccgcaacgcggagttcatcgacgccgtcaacctgcgcggcgacctcacttaccagctcgccgagaacgagttcgcagacctcaccgaggaggagttcctggccacgtacaccgggtactacgccggcgatggccccgtggacgactccgttatcacgacgggtgccggagacgtcgacgccagcttctcctaccgcgtggacgttccggccagtgtcgactggagggcccaggcgccgttgtgcct

SEQ ID NO: 32943 - DNA, 446 bp, Oryza sativa
  Clone ID: uC-osflM202024d02b1
ttttatatgcgtttgagatcgcaaagtgttctttgcacagcataaatttctggcttgttgcaatgtcccaagctggaaaagttgatgtttgcaagaattatactacacctggcggctaatggtgtatgcatgcttctgagctgccatgcagagacattgctttctcttgaatttatccattgccagctttctccagctgtcatggataaaatttgcagtattgtattgcagaaaggatcagcaaaccatgggatccagacctccagtattaaaccatcacgtatttgtgaaagcaatccttctaaacatctctgccggcttatttagatttcctgtccatgggaaaagtcattacaatctgctactcatcttaaccgattactaagcatgccactcatttttttgctaaaaccaattgtgcatactccttcctgtgactttcaagt

SEQ ID NO: 32944 - DNA, 506 bp, Oryza sativa
  Clone ID: uC-osflM202024d03b1
gttgcttccatccaccccgccgcacgtgccgctcacccgcgccgcccacctcccctcccctcccctcctctcctagacccggtccaccgccgcccctctcagatccgccgttgccgcggcggcctcggcagctcggtctccccccgctagggtttcgccgtctccgatcggaggggcgcagcgatggatcagagcaggcgggcggtggagtcgtactggaggtcgcggatggtggacggcgtcacggcggacgacgacaaggtggcccccgtctacaagctcgaggagatctgcgagctcctccgcgcctccgacgccagcgtcgtcaaggaggtcgctgacttcgtcctcaagcgactcgacaacaagagccccgtcgtcaagcagaaggctttgcggctgattaaatatgctgctgggaagtctggtactgatttcaagcgggaaatgcaacggcactcagcagctatgcgccagcttgttcactacacgggacaccctgaccc

SEQ ID NO: 32945 - DNA, 536 bp, Oryza sativa
  Clone ID: uC-osflM202024e01b1
tggcgatactacattgatgcaccccctaccgtgggagatggagtctcctgctagcaggtcaaggctttaaggtcgagccgacagctgttccttcagttggagccctgatgttactgatgcaaagggtcctgcaactgatgatgacgatgatgacgatgttgacctttttggcgaggagactgaagaggagaagaaggcagctgaggagcgtgctgctgctgtcaaggcttctggcaagaagaaggaatctgggaagtcctcagtgttgcttgatgtcaaaccatgggacgatgagactgacatgaccaaattggaagaagctgcgaggaatgttaagatggaaggcctcctttggggcgcatccaagcttgtcccggttggttacggtatcaagaaattgcaaatcatgatgaccattgtcgatgatcttgtgtcggttgatagtcttgatgaggactacttttacaccgaaccagcgaatgagtacatcccgagcttcgacattgttgcgtttaaaagatctagatcttccttga

SEQ ID NO: 32946 - DNA, 582 bp, Oryza sativa
  Clone ID: uC-osflM202024e02b1
gctggcccgcctgcacgcgccgggccggcctggccggacccacgcgcgcgtttggttctcgatctccgcacgcaccaaggcgaagccaattccactaccaccgctcttccttcttctcactccttctcgcgactgcggcgagggtgagtctcctgtcgtgagaatttcggtctaccggcggcggcggcggcgttgggtgctcttcgcgtcgacagacgtcgggatctgaattactagacttccaataagaaggaaacaccttagggaatgcagaaagatgcgcttgcatgctagagagctaccttgtgagggaattggcagggcagcaagccatatttgtccttccacaactcttcatgacattggaacacaagagtatatacagcgcttgctccatgtgctctcgcactatggggttcgacgtggcaactcaaccatcttcttagatcaccatcttggtggagacggctgaagtcacctatcatttctaggctcctggttaccacactttgagctgtgggattactggtttctttggcgtgatggcggagcagaacggaaatatgttgatgaaaaagcatg

SEQ ID NO: 32947 - DNA, 492 bp, Oryza sativa
  Clone ID: uC-osflM202024e03b1
ttcggtgctgcagtgcggcgccatctgggcagcggttgaggccccggcggcgctggcggtgacgggcgaggaggacctcgacatcctggggatcctgccgacggtggccgccatcgccttcgtttacctgttcgtcttcccgccgattatcatgaactggatgaggctgaggtggttcaagcgcaagttcgtcgagacgtacctgcagttcatgttcacgtacctcttcttccccgggatgatgttgtgggcaccattcgtcaacttcaggaagttcccaagggatccaaccatgaagtacccttggttcaagccaaaggaaggcacaccgttgttcaaggacagatacccacctatagaaacctacaagtgatcagaagtactagaccgtattcttttcgaaacaaaatagcatttctttgcatggatttgtaaaacatgcatggtgccacaatcttcttggatgtatcgagagcaaagtgagatctcaca

SEQ ID NO: 32948 - DNA, 528 bp, Oryza sativa
  Clone ID: uC-osflM202024e05b1
ctcctcattattccacgtacccaaagaaaaacatcccccacccaaaaaaaaaaaaatccgcgcagctgcaaaggcgagcggagctctcaatcgagcagcggttccacttctagaagcttcttaatcacgcgggaggaaggagaggggaagccggcggcggcggcggcggtggggttcgcctgcgcgcggcgatgtcgtccgccaagtcgacgaggtcgcgcccagccgggcactccggcgtgctgccggtgaacgctacggccggaggcggcgacggcggggtgcctctcgccgacaagatgaagatcttcaagaccgacaacttcgaccccgacgcgtacgtgcagtccaagtgccacgccatgaacgagaaggaaataagacacctctgttcttatctgcaagacctaaagaaggcttcttctgaagagatgcgtagaagtgtttatgcgaattatgctgcattcataagaacatcaaaggagatatcagaccttggaagggagctgctatctgtcagaaatctgc

SEQ ID NO: 32949 - DNA, 455 bp, Oryza sativa
  Clone ID: uC-osflM202024e10b1
tttgttgcggcgcgtgcgcgagggtcgccgccggcggacggaggcggtccggcgtggtggtgcggtgcgacgccggcgtggaggcgcaggcccaggcgcaggcggtggccaaggccgtcagcgtcgccgcgctcgagcagttcaagatctccgccgaccggtacatgaaggaaagaagtagcatagcggtaataggcctcagtgtacacactgcaccagtggagatgcgtgagaaacttgctgttgcagaggaactatggccccgtgctatctcagaactcaccagtctgaatcatattgaagaggctgctgttattagtacctgcaatagaatggaaatctatgtggtagctttatcgtggaaccgcgggatatgagaaggagaacattggtattatatgaaaagctaaagaagggtttttctgaagagatggcatctatttatgttgcgagac

SEQ ID NO: 32950 - DNA, 538 bp, Oryza sativa
  Clone ID: uC-osflM202024f03b1
agtgcgtgttctttctccagcagcagcagcagcagcagctgagcttgacgcagcccagcgaggtagacatggccgccgccaccatggccctctcgtccccggcgctggccggcaaggccgccgcgaaggtgttcggcgaggggcgcatcaccatgcgcaagtcgggggagaagcccaagcccgccgcgtcggggagcccgtggtacggcgccgaccgcgtgctctacctcggcccgctctccggcgagccgccgagctacctgaccggcgagttccccggcgactacgggtgggacaccgcggggctctccgccgacccggagacgttcgccaagaaccgggagctggaggtgatccactccaggtgggcgatgctcggcgcgctgggctgcgtgttcccggagctcctcgcccgcaacggcgtcaagttcggcgaggcggtgtggttcaaggcggagtcgcagatcttcagcgagggcgggctcgactacctcggcaacccgagcctgatccacgcgcagagcattctcgccatctg

SEQ ID NO: 32951 - DNA, 348 bp, Oryza sativa
  Clone ID: uC-osflM202024f04b1
gtggaggaggtggaggagagacggggcagaggacggtggaggtggctagggccaccttcgccgccaccaccaagcacatcgcctggctgaccggggggaaacatacgctgaaggacctacccgcccaggctgatcaggagcggcgccaccgccggcccggacgacaagctactgcaactaggtctacttttgtcgggcgacgccgtgtctccggcggtgtccgggcaatcttggcactgatggatgggccgctctccttgacgagatcaggggctccctcccgagctaagtgctgcacgtggccatgcccgccatgactagcgagggggacaagaaacgcgacatgct

SEQ ID NO: 32952 - DNA, 509 bp, Oryza sativa
  Clone ID: uC-osflM202024f10b1
ctcgggatgagagccccctcctctccatggcctcctccctcctcctgcctcgcgccaccttcgccgccaccaccaagcacatcgccgtcctccacccgcccgtcgcatccgcctgcaggccccacccgcccaggctgatcaggtgcggcgccgccgccgacccggacgacgagctcctccgctcgctctacctcgtgcaggccgacgccgcgtcgccggtggtgtccgcggacacgggcaatgatggatgggccgctctccttgacgagatcaggggctccctccaggcggaggactcgtcgtcgtccatcccggcggcgacgagcggtggcgtcgtcgtccccgacgagctcctgaccgcgccgccgtccgtcgtcatcccggacgagatcctcggcgcggacccgtcgtcaaccctgcaggcgcccggccccggcggcggcgccatcccggaggaccttctcgcggcgctgcacctggacgcgtcgaacccgggggtgcgggcggcg

SEQ ID NO: 32953 - DNA, 525 bp, Oryza sativa
  unsure (1)..(525): unsure at all n locations
  Clone ID: uC-osflM202024f12b1
taaagatctaacaatagatggtcaaaagtggactgcagtggggattttttccgtccaaggcaccgacatgctgctgctgcagtagatcgcaaagtatatgtctttggtggactaagtgatgatggcttatgttcttgcatgaacataatggacacagcaagtatccaatggaatgtgatttctcctgatgacaaatggccatgtgctcgccactcgcattctctagtgtcctatggttcaaaattgtttctgtttggaggtcatgatggtcagagggcactgaatgatttctatagttttgatacaacaacacttaagtggaacaaagaaaacactaatgggaaagctccatccnctagattttcacattgcatgttcatctacaaagactatctcggcatacttggaggttgtcctattagagaaagcagtcaagaaattgcattgctaaatttaaagcataaaatctggttttatgtatccattccatcattgagccaatgcctttgtgtccgtagctcatca

SEQ ID NO: 32954 - DNA, 503 bp, Oryza sativa
  Clone ID: uC-osflM202024g03b1
attttatctccccaatctcgcgaggctctcgtcgtcgaatcgaatcctctcgcgtcctcaagatgcagatctttgtgaagacattgaccggcaagactatcaccctcgaggtggagccctctgacaccatcgataatgtcaaggctaagatccaagataaggagggcatccccccggaccagcagcgtctcatcttcgctggcaagcagctggaggatggcaggacccttgctgactacaacattcagaaggagtcgacccttcaccttgtcctccgcctccgtggtggcatgcagatctttgtcaagactctgaccggcaagactatcacccttgaggtggagtcttctgacaccattgacaacgtcaaggccaagatccaggacaaagagggcattcccccagaccagcagcgtctcatctttcgcggcaagcagctggaggatggcaggacctttgctgactacaacatccagaaggagtccaccctccaccttgtcctc

SEQ ID NO: 32955 - DNA, 68 bp, Oryza sativa
  Clone ID: uC-osflM202024g04b1
ccacggttcgtgggccacggaagaggggaggacgagggagagggagagggggccaagaagagggggaa

SEQ ID NO: 32956 - DNA, 445 bp, Oryza sativa
  Clone ID: uC-osflM202024g12b1
taatcatacaacaccacgccgcctaggggggggggcgcgttgaaacccccatgcggttcccgccgccagcgacaagaggccacagccgcagccagggatgggccacgccggcgccgcccacgcaggcggaggcacgcggagaaggcggagcgccgccgcactggggcgccaacccacccccggggccgcagcagcagcacgggccgaccccgcatcagcataaggcgccgacaccgacgcagatgtggggccaggctcccaccgccgacgcagcccgcgtacggccagccgaacgacggcccagacgggggactacggggcgcggtcgcaggcggacacggccgaacacgcggggcccaccgagagcaggacgctccggaccagagaactccagacctgggcggatgagaacaacacccacgcctgcatagcgcccaccggcgag

SEQ ID NO: 32957 - DNA, 396 bp, Oryza sativa
  Clone ID: uC-osflM202024h01b1
gtctcttccgatacctcacctcaccatacagctgctttctctctctctctccatccacccgaagcagaatccccaaaacaacagcgagagaaaaaaaattcacgcggcgaagccaaaattttttgttgatttcgatttggacataaaccctagctccaatctccccatcgccgcgtcggccccgaacccgtgcgcccccccatcgctcgctgaatcgaagggcgcctaccagtcgattcccccaagacgaggtaatccgctcgaccccctcgagagagagagagcctgggagagaaatcggtggtgtcttctgctgaatcgaccgggttggcgggcgatttagggttttgggaaggggcggctcgccccccctctccgaaggggactagcctgggc

SEQ ID NO: 32958 - DNA, 392 bp, Oryza sativa
  Clone ID: uC-osflM202024h05b1
tcgtttccttatctattcctcccctctctaagccggggaggctaatttatggcgtccgtcaccgcccgcaccccggtcgcagccctccgctcgtcggcgtcgctcaagtctaccttcctagggcaatcctccacccgcctcgcccgcgcaccgactacgaggcgtaatgttcgggcggaggccaagggagagtggctccccggcctcccttctcccacctacctcaacggcagcttgccaggcgataacgggttcgacccgttgggtctggcggaggacccggagaacctgcggtggttcgtgcaggcggagctggtgaacgggcggtgggcgatgctgggggtggccgggatgctgctgcctgaggtgcttgcgaagatcgggttgatcga

SEQ ID NO: 32959 - DNA, 509 bp, Oryza sativa
  Clone ID: uC-osflM202024h06b1
gttatttagcaaaaaaaatcaaacaaaaagaaaaaatattccctatctgtgaaattcgcaaaaccctagcgcggcggcgatgtcgaacacgagggtgttcttcgacatgaccgtcggcggagctccggcggggcggatcgtgatggagctgtacgcgaaggacgtgccgcggacggcggagaacttccgcgcgctctgcaccggcgagaagggcgtgggcaagagcggcaagccgctgcactacaaggggagcaccttccaccgcgtgatcccggagttcatgtgccagggcggcgacttcacccgcggcaacggcacgggaggggagtcgatctacggcgagaagttcgccgacgaggtgttcaagttcaagcacgacagccccggcattctgtccatggcgaacgccgggcccaacactaacgggtcccagttcttcatctgcaccgtgccctgcagctggctggacgggaagcacgtctgtgttccgcccgcgtcgtcgagggcat

SEQ ID NO: 32960 - DNA, 367 bp, Oryza sativa
  Clone ID: uC-osflM202024h12b1
tggtggcggcgatctgtatctaccccaatctggtgtgtccttaggggtaatgcgggttgcatccgacctccgcggagcattccgaagatagaaggtggatcgggttaaccttagagcgagaggactctgtcgccggatgcaatggcgagagagctggtgctggacacagcgatccgggactgggggctcgcaccgctatcggaggagatggtaggtattgacgtgccaccgctagttggctctccaagttgatgaggctgcccggcgaggtcatcctggctggaccccaagctggtgaaggcggggaaggtgcaaaataaggccaggaccctgaggaccaattgagagtacatgcccaggcaaggtg

SEQ ID NO: 32961 - DNA, 374 bp, Oryza sativa
  Clone ID: uC-osflM202025a04b1
ggtttattatggctacggtgacggcttgttcccccctggcagatgcaccggctgccaacccggtgggaattccgccaccgagccttacatcgcagcccataaccttttcctttcacatgccggtgctgtcaggacatatcgtgacaagtaccaggctattcagaaggggaagattggcatccttctcgattttgtatggtatgagccactcaccgccagagaagaggatcacgcgagtgttcatagagccagggagtttacccttggctggtacctgcacccgattacatatggtcattacccagaaactatgcagaatgctggtaaagaaaggctgcccaatttcacacgtgaagccgttgagatgattaaag

SEQ ID NO: 32962 - DNA, 297 bp, Oryza sativa
  unsure (1)..(297): unsure at all n locations
  Clone ID: uC-osflM202025a12b1
tcgcgtgttcgccggacacgcacgcacgcggccacgacggcggcgatggagggcgccctgctctgcgccggcaaccacgctccgctcacgcccatcaccttcctagaccgcgccgncctcgtctaccccgaccgacccgccatcggcgactcctcctccggcctcacccgcacctggtgggagacgcgtgaccgatgcctccgtctcaccgacgccctcgacagcctaggagtgcaccgacaccacgtggttgcggtattcgcgcagaatattccggcgatgtgcgagctccacttc

SEQ ID NO: 32963 - DNA, 456 bp, Oryza sativa
  Clone ID: uC-osflM202025b02b1
gttttatttgctgcaaagttaggacaagagttcagagatcagttacagaaggttcaacagagattcccgcaaatcataagggaagtacgtgggaggggtttgcttaatgcagtggatctaagcaacgaagctttatcccctgcttctgcttacgacatctgcatcaagctgaaggagagaggcgttctggcaaagcccacacatgacaccataatcagattagcgcctccgctgtcaatcagtcctgaggagcttgcataagcatcgaaggcgttcagcgatgtgcttgagcatgacctgccacagctgcagaagcagatcaagaagacagaatccgcggcagaaaaacaattctgtgacagatgcggcagagacttgtactgatgagtgatagacgagacaatgaaacgttttcagaggcacccgtttcgcccaaataaaatagcagaacacacc

SEQ ID NO: 32964 - DNA, 487 bp, Oryza sativa
  Clone ID: uC-osflM202025b07b1
tttccttcatctcgctcgccgctcgcgccgcctccctcgccgccgccgccatccccatctccgccgcaaccaaggcttgaggctactggccgtggagggggaacccaagagcgagccgcgggcggggaagagaggagggatctaggcgagagagatggggtggaaggctgccgagaagctcatcaggcactggaagatcctccgcggtgacaacgtgatgattataagaggcaaggacaagggggagagcgggctcatcaagcgggtcatccggtcgcagaaccgtgtcatcgtcgagggaaagaatttggttaagaaacatatcaagcaaggagaaggacatacaggtgggattttctcaattgaagcttcacttcatgtttcaaatggtcaagtccttgatccagtcactgggaaaccatgtaagattggatacaagtatttggaaagatgggactaaagtcaggtttgctagaggaatgaatgc

SEQ ID NO: 32965 - DNA, 438 bp, Oryza sativa
  Clone ID: uC-osflM202025b10b1
tcgcctttaccatctctctcctcgcctagggtttcacgctctccgatcccgcggcggcggcggcgagaagcttccactcgcctcggcggcggcgccggccagaaagatggctggtggttttcgagtactgcatcttgtcaggccctttctggctttcctgccagaagtacagagtgctgataggaaaataccattcagagaaaaagtgatctataccgttatctctctcttcattttcctggtgtgcagtcagctcccactctatggaattcattcaactactggagcagatcctttctactggatgcgtgttattcttgcatcaaaccgtggcactgttatggagctgggtattaccccaattgtgacatctggaatggtaatgcaccttctagtgggatcaaagattattgaagttgaccacagtgtgagagagga

SEQ ID NO: 32966 - DNA, 285 bp, Oryza sativa
  Clone ID: uC-osflM202025b11b1
tcgatcttaacatctccttcgtcttccctacgcgtccacccgaaaaagaaaaaaaaaaagaacaggagaattatccccacttccagagtccaaacctccccgtccatggcgacggcgagctcgatccggccgccacgcgcggcgctagtcctcctcctgctcgcgctgtccttctccctcaccctcgccgcccacttcgagggctttggctccgacgacctccactccgcccacgccgacgcggcctcggcagacgacgaagacgacgaggggctcgacgtcgag

SEQ ID NO: 32967 - DNA, 435 bp, Oryza sativa
  Clone ID: uC-osflM202025c08b1
ttaatatctcccgtctcgtcgtctccgctccttgcgagttcgcccaccgccgccggcgcgccgatttccatctcccgagcaaagcggggggagggccaccgccgtcgccgccgccgtcgccgtcgtcctgctgctcccgccacatcccgagatggagtcagtgccactaactgctgaagctattgcttttaccgagaaaaagatggacatgactttagatgatattattaagatgtcaaagaaaaagaatcctggaggcaagaaacctgctagacaacctatcaagaaacgtccattccagaatgacaacactaatcaagggaatgcaaaggttcagcgatttatggaaactagatcgtccttaagacaaggggttcttgcacaaaggaggacaaatctgggtggaaatcagttccgcagctacaaagcatgctg

SEQ ID NO: 32968 - DNA, 508 bp, Oryza sativa
  Clone ID: uC-osflM202025c09b1
ttgacttctgccgctattgcctatggtcttgacaagaaggccaccagcgttggtgagaagaatgtcctcatctttgaccttggaggtggtacctttgatgtttccctccttaccattgaggagggtatctttgaggtcaaggccacagctggtgacacccatcttggtggtgaagattttgacaaccgcatggtcaaccactttgtgcaagaattcaagaggaagaacaagaaggatatcactggcaaccccagggctctcaggaggttgaggacagcttgtgagagggcgaagaggaccctgtcctccactgcccagaccaccattgagatcgattccttgtatgagggcatcgatttctactcaaccatcacccgtgccaggtttgaggagctcaacatggatctcttaggaagtgtatggagcctgtggagaagtgcctcagggatgctaagatggacaagagctctgttcatgatgttgttcttggtggtggcttcactaggat

SEQ ID NO: 32969 - DNA, 354 bp, Oryza sativa
  Clone ID: uC-osflM202025c11b1
tcgcctccaccaccacgagaggaggaagccgcgggtctcctcgtcttctcctctctctctctcctcaaccagctgtctcgcggtcgccggcggcggtgaggggaggaagcggggctgcctcgcgcggcgggaggtctccggagagggaggggtgtcgtgctgatttggggggctgcggcggtgtcggcggcgatggggtgggcttcctgctgcaagggggtggacggggttctacctggccggaggaagaagaagaaggagacgacatggcggatcttctcgctgaaggagctacagtcagcgacgaacaatttcaactatgacaacaagcttggtgagggtgggtttggcagc

SEQ ID NO: 32970 - DNA, 523 bp, Oryza sativa
  Clone ID: uC-osflM202025d03b1
cacctcactaactgagagctgagcaggcgagcgagcggacatggcagcatcgctccaagccgcggccaccctgatgcagccggccaagctcggcggccgggcctcctccgccgcgctgccatcgcgcccgtcttcgcacgtcgccagggcgttcggcgtcgacaccggtgccgccggcaggatcacgtgctccctgcagtccgacatccgggaggtcgccaacaagtgcgccgatgccgccaagctcgccggcttcgccctcgccacctcagctctgctcgtctcgggcgccagcgcggagggcgtgccgaggaggcttaccttcgacgagattcagagtaagacgtacatggaggtgaagggaaccggcacggcgaaccagtgcccgacggtggagggcggcgtcgactccttcgccttcaaggccggcaggtacaacatgaagaagttctgcctggagccgacgtccttcaccgttaaggcggagggcgtggccaagacgcgccacccgaggtccagaaga

SEQ ID NO: 32971 - DNA, 457 bp, Oryza sativa
  Clone ID: uC-osflM202025d04b1
ggttgcgtgttacgggagcggctagtggtttcgtcggcggaggcggaggcggggccaagatgttcgggcgcgcgccgaagaagagcgacaacaccaagtactacgagatcctgggggtccccaagaccgcctcccaggacgacctcaagaaggcgtaccgcaaggccgccatcaagaaccaccccgacaagggcggcgaccccgagaagttcaaggagcttgcacaagcttatgaggtattgagtgacccggagaaacgtgaaatctatgaccaatatggtgaagatgccctcaaggaaggaatgggtggaggcggatcccatgttgatccatttgacatcttttcatcattctttggaccttcttttggtggtggtggcagcagcaggggcagaaggcaaaggaagggagaggatgtgatccatccgcttagggttctctagaagaacttacaatg

SEQ ID NO: 32972 - DNA, 485 bp, Oryza sativa
  Clone ID: uC-osflM202025d06b1
ctttcacgtcgagccccacgggttttgtaatgaatatgcaaccctcagaagcagaagttggttttgattttcgacttcctccaactgaagacgtggaacatatcataagaagaatcaaagaggaatgggcaccagctcataaaaacttaacctacaagctgatgcagaaaggaccaacacgggatttggcaggacgccccatggtcacaccaaccaatgcatcaaatccttggtggtctgtatttgaacaggctatcatatctgcaggtggaaagctagctaagcctgagattttatcttcaaccacggattcacgcttcatcaggcagttgggcattccggcccttgggttttctccgatgacaaacactcctatattacttcatgacaataatgagtttctggaggataaagtattcctaaggggcatcaaagtgtatgaacatattattagagcactgagctccttcaaaggtgattcataa

SEQ ID NO: 32973 - DNA, 536 bp, Oryza sativa
  unsure (1)..(536): unsure at all n locations
  Clone ID: uC-osflM202025d08b1
tcgatttataatggcgaattgtgatctatgcgtttaagttgtaagtttcattgcactccagttggatattatgtgaatgcaatacacaagacctattggcttttacagtgttagttgcagtatttgattatatttggatcgaatatttctttaaaagttccacttatctttggtttaggacaaaactaacttcacctgcttccaacatgagcagattttgagattctagcatttccctgcaatcagttcttgcgacaagagccaggatctgaccagcaaataaaggattttgcttgcacaagatttaaagctgaatatcccgtttttcagaaggtaagaactatccgatgaacctgcttgcttgctggaagcttccaattatttattaattagtgaatcctcagtttgagtccctcattattggtacttagagcttaaaacactatctgtatcctttttttttaacaggaaacagtagagagaaccctacttgaactaattttaantaaataatacatatgaatctacaagatcaa

SEQ ID NO: 32974 - DNA, 444 bp, Oryza sativa
  Clone ID: uC-osflM202025e01b1
gtttgaccagtagtttcgccctttccccccttcttccaccatccactaacccccatctcaacgcaaaccaccctctccgccgcgcgcgcgaggcagatctcgacggggagcgcagccgccgccgccagatcccgccccgatcgcccccgcctcgtccccacggtcccgtggatacctctctctctctctctctctctctctctctctcggatcggtgcgattgcctttctttttgcgcggcggggatcgggtgtgttttggggacggtgaaggagaggagtgaagtgtggaggcgaatctaatcgatctgattaggagacctgccatttctgtgcttgattttgtttcgatctgctccttgggctgtagatctggaagggcttcgtgggaactggtgcttgagctttgtgagttgcacaagaaagtcttgggctttttgcgctc

SEQ ID NO: 32975 - DNA, 519 bp, Oryza sativa
  Clone ID: uC-osflM202025e02b1
attagtttcctcgcctcctccttcatcctcctcgtcgtcgccgcgggggtcgcctgagatcacattaacaatggtgaaggctgttgttgtgcttggtagcagtgagattgttaagggcactatccactttgtccaagagggagatggtcccaccactgtgactggaagtgtctctggcctcaagcctggtctccatgggttccatattcatgcacttggtgacaccaccaatggttgcatgtcaactgggccacactacaatcctgccggaaaggagcatggagcaccagaagatgagacccgccatgctggtgatcttggaaatgtcaccgctggagaagatggtgttgctaatatccatgttgttgacagtcagattccacttactggaccaaattcaatcattggcagagccgtcgttgtgcatgccgatcctgatgatcttggaaagggtgggcacgagctgagcaagaccaccggaaacgcttgtggccgtgttgcttgcgggatcatcggact

SEQ ID NO: 32976 - DNA, 477 bp, Oryza sativa
  Clone ID: uC-osflM202025e03b1
attcttttttctcttcttcttcttcttcttcttcttcacatcgtcgtcgtcatcatccatggcgtgtgtaatgtgaaatcagcgagctcgatatatactccattaagctaagctggttgatctctcgtgtgttccaaattaatccgcgtggttaattagctctagctagagatcggtagctctcgactagttggacatggccgccacgggcgtgctcgtcgtcgttgtggcgctcgtgttcgccgtgacggtggctggcggcggcggcgccggagtaggaggtgatggcgggttcatcacgtgggaggacctgagcatgccggccggggcggcgcggagcagcacgtgggacgacacggccggtggaggcggcggcaagaggagcggcggcggcggctgtagctagcaacggacgacgatcgtggtgtcgcccgacgggacggggcactcgcgcaccgtgcagggcgccgtcgacat

SEQ ID NO: 32977 - DNA, 280 bp, Oryza sativa
  Clone ID: uC-osflM202025e07b1
tcgcttctcccccccacctcccctcctccgatccctttcgcccgctcaaccacccgtcggccggcgatgctccggccgccgacgccgacgcggcgcctcctccagagcgtcggcggtgggagcaaccccaaccgcatccctggcatcccgcccgccgatcccccctccggcggcgtcagctccgatgtcgtcgtcatcctcgccgccctcctctgcgccctcatctgcgtcgtcggcctcgccgccgtcgcccgctgcgcccgtaaccgccgcaacagcg

SEQ ID NO: 32978 - DNA, 449 bp, Oryza sativa
  Clone ID: uC-osflM202025e08b1
ttgttttcagagaatataattctgttcacatttacatcacagccatgacatttacagccagagcatactgcttcgcactaataaccaccattcatggtaagtgtacactgaaaaaagaaatctaaccaaagttcgtgcagatggttggcatgatatatttaccaacaaccatcagatattctcatatacagatcaatgatcgcttctctaactagtacaatgctgcaagactgcaagcaagtatcaatatttcacaagctatactttagcattccagagctgacttagctctcctcttttcgcacctagcgtgacaatagttcctagtgttgatgggactaggtagaggagagctggctgtccactcttcattaggtacaggccaacatatgtgcatgacaaaccgaaagcgtaaccgatcattaagcagaagaaatagccgtcagtca

SEQ ID NO: 32979 - DNA, 490 bp, Oryza sativa
  Clone ID: uC-osflM202025e09b1
tctgatggtggctgcctcttcatcgtccccaggttcttcgtcgtctccaagatcgccgacgacaccggcatggagtggttctccatcatcaccactcccaaccccatcttctcccacctcgccgggaggacctccgtctggaaggccatctcccccgccgtgctccaggcctccttcaacaccaccccggagatggagaacctcttccgctccaagaggctcgactccgagatcttcttcgcccccaattcgaattcgatttgatggacaatatccatcctccatctccagcacctgcccacctagcagcatcagcagattcagcttccttccttttatttagatcatgtcagtcgttagatttaattcggttctttgggtgttagcatcacctacctcttttatttgatataacaataagctcgagatggagtggaatttgatagtcctattcatgcctatgtcctctttattttttaaaaccttgttt

SEQ ID NO: 32980 - DNA, 363 bp, Oryza sativa
  Clone ID: uC-osflM202025e10b1
tcgggctattctttcctccttttttttttggtaaatctggagagcgactgacaaaggggggacgcggccccgactcggcgactccgaccgacgagatcgccgtcgctccatcccccatgggtgcctcctccgtcccaccttcccctacccgccgcctcctggctctcaccatggcgctcgccgccgccgtcgtatccgccgtcttcgccgcgagggccccggcctccgtcacgcccatcttccgcaccctctaccactccagtgattcccttttgagtgatctcaaggacttagctgcccggaatccagacaagttggtgtatcgataccacaacagcaaggtacaaagggtatttcacagac

SEQ ID NO: 32981 - DNA, 395 bp, Oryza sativa
  Clone ID: uC-osflM202025e11b1
ttcgtttttctcaagtctctgtctcgtcgtcctggcatctccactcgccatgcgccatagtcacagcgggctccacggtttcggacggatcgggaggctcgtggccagggtggccctccatagcgaggatgtcgagctcgtcgccgtcaacgaccccttcatcaccaccgactacatgacctacatgttcaagtacgataccgtgcacggccaatggaagcacagctacatcaagatcaaggactccaagactctgctcttgggcgagaagccggtcaccgttttcggcatcaggaaccctgacgagattcccgtggctgaggctggtgctgagtatgtcctggagtccaccggtgtttttactgacaaggagaaggctgctgcttacttgaagg

SEQ ID NO: 32982 - DNA, 500 bp, Oryza sativa
  Clone ID: uC-osflM202025f03b1
aatttacttatcttttatgatctagaaggaccaaaaaatcacttaatatatctatggaggtcctgaaaccatcttattgtgcatatgcattacgaaaccatcttattcgtgcgtatgtattcttattggcgaactttaggcttgtaatcctttcctatacataaatattttctgcatgtgaattgtcaggttgatgtggacatagcaacccacatagacatatatgatgatggccctgacagaagcttacttgtagtggaaacagctgaccgaccaggtttgttggttgaccttgttaagatcattgatgacatcaacatcaccgtccaatctggagaatttgacactgagggcctactggctaaagcaaaattccatgtcagttataggggtaaaccattgatcaaagccttgcagaagttcttgctaatagcttgcgctatttcttgaggaggccgactacagaggagggcagttactaggcagataaatacaggaag

SEQ ID NO: 32983 - DNA, 494 bp, Oryza sativa
  Clone ID: uC-osflM202025f04b1
gtttcgttttgcttctcccgctgctcgcctcgcctcctcgacgatctgagatcatcgagatcgattgagtggagctaggcggcggctagggcgagatggcgctcgtattgcatgctggcagtggaaacaagaatgcattcaaggcactcattgctgccgagtactctggtgtcaaggttgagttggtgaagaactttcagatgggtgtctccaacaagacacctgagtttctcaagatgaatcctattgggaaggtttgaacaaaaaccatccctgtattttggtacattcgcacagaatcttatttggacacgttttctttcagattcctgttctagagactcctgatggtcctgtttttgagagcaatgcgattgcacgatatgttacccgctcgaaggctgacaacccactctatgggtcttcactgattgaatatgcccacttcgagcagtggaatgacttttccggcacagaggttgatgcttatattg

SEQ ID NO: 32984 - DNA, 429 bp, Oryza sativa
  Clone ID: uC-osflM202025f05b1
gtctcagtttgatgcaggaattggcacaagcattgactcattctatgagtatcttctaaaggcgtatttattatttggagatgaagaatatttgtatatatttcaggaggcttacaaggctgccatgcattatctccatcatgatccctggtatgtggaggtaaatatgaattctggtgctactgtttggccactattcaacagtctccaggcattctggccaggacttcaggtgttagctggagatgttgatcctgccattcgaactcatgctgccttcttcagtgtatggaaaaaatatggcttcaccccagaagggtttaattttgctacatccactgttcagaatggacaaaggagctacccgctgcggcctgaattgattgaaagcacatattggctgttcaaggctactagagattataggta

SEQ ID NO: 32985 - DNA, 550 bp, Oryza sativa
  Clone ID: uC-osflM202025f08b1
tctggttagaggcagaacgggagatgttagaagatgagagcgaagatgaggaagaagctaaggaaagcaaaggtgggaaaaaatattaagaaaagctgaaatggaagctacaaaggcagaaaatatgatagctcataaggatgagatatactcaagaccaaagagaacctggtttgctactgagaaggaaaagaaacttttggcaaaggctgctaaagaatccacgagtcaaggtaagagtaattctggagttattagcgctcagcaagctgaagatcttcgtctgaaggagaaaaagagaagggagcgtgagaaaaatctacctaagaagaaacggagacggttagaggcagaacgggagatgttagaagatgagagcgaagatgaggaagaagctaaggaaagcaaaagtgggaaaaaagaaaagaaaggtcaatcgctagtcgatgtggcttatcgtagagcaaaatcaatgaatgccaacggtaaaaggggtgcttgcacttgcaaaggaaagaatgataaaaggcaaaacacattctggaagggc

SEQ ID NO: 32986 - DNA, 502 bp, Oryza sativa
  Clone ID: uC-osflM202025f09b1
tcgtttcctcctcctttctttttgttcttgttgtccatctccatctcgtcatacacctcccaagcacgggagtatgcctcaatgtccacagagagggaaagactcgatgagatcggcaagaagatcaagcgagagccggacaccgccggcgtcgtagtcgccgccgtcgcaggcaccggcaccggtacagccacaccgatcgagcaccgcgtcccccatcgcctcggcctcggcggcgccgtgaacaccgtgaccccgtgcgccgcgtgcaagctcctccgccggcgctgcgcgcaggagtgccccttcgccccctacttctcgccgcacgagccccacaagttcgccgccgtccacaaggtcttcggcgccagcaacgtctccaagatgctcctggaggtcggcgaggcggaaagagccgacgcggcgagcagcctggtgtacgaggcgaatctgccgctgcgcgaccccgtgtacggctgcatgggcgccatttcgatgc

SEQ ID NO: 32987 - DNA, 398 bp, Oryza sativa
  Clone ID: uC-osflM202025f10b1
ttcgtttcaccctgcctctctccgcaccggtctcgcacccacctgagaccggtcgccgggtctcggtgtctctctctctctatctctgcccgctccggcgagagggggtgtcacacacacgtacgtacgggaggatcagggcaacaagtgaccgcgcgcgtgcgtgctctccccccgaccgatgacaacgatgcgcgcctccgccgcgctgctgctggtggcggcggcggtcctcgccgccgtgcgcgccgaggacccgtaccacttcttcgattggaaggtgacgtacgggaccaggacgattatggacgtggcccaaaaggtgatgctcatcaaccacatgttccccggcccaaccattaacttgcagcttcaacaacaacattggtcgtaaacgt

SEQ ID NO: 32988 - DNA, 478 bp, Oryza sativa
  Clone ID: uC-osflM202025g04b1
ctttcttcttcggttgccgtgccgtctcgtactctctcgtgcaggctaacgttggaatcttgggaggggagatggcggtcgtggcatcgaggtgtacggggctgctcctccccgacctcggcgcgagcctcgccggcttccgccgccgccgctcgacgccggcttcttctctcagcttccgcccgcggcgggcccgtcgacggctcgggtccctctcctgcatcgcgccgcccgattcggcggagccgcagacggatgagccggccgccaaagatgactcgactgaagataaggctgaggcaaagagtgcatcccaggatgctggaaatccaacttttcccaataaagatctcaacagaaggatagcactggccttcactattggagctgtgggcctctttgcatattaaaaacttgactttggaggcgtttctctaaaagaacttgcagcaaatgcttcaccgtatgaagaggcttt

SEQ ID NO: 32989 - DNA, 525 bp, Oryza sativa
  Clone ID: uC-osflM202025g05b1
tcttttcctcccatacaacagggccgggtcgccgccgacgaacaacacggcgagcggcgccggtagcgagctacctaccctccatctctccagatcccttccagggacagtacaagacaagtcgcacaaaacagaaaatcttgtgatagtttaaatggcttcaaagcttcaagccttttggaaccatcctgctggccccaaaaccattcatttctgggctccgacatttaaatggggtattagtattgccaatgttgcagactttgctaagccacctgaaaagatatcctatccacagcaagttgctgttgcttgcactggagtcatttggtcacgctacagtatggttataacaccaaaaaactggaatctatttcgtgttaacgttgcaatggccggcacaagcttgaatcagctttcccgaaaataaggaaagattacttttctgatcagaaggatgatgttgcatcattggaaggataatgatgactgacatgatgaaaaccccggcccaaacctttgagc

SEQ ID NO: 32990 - DNA, 436 bp, Oryza sativa
  Clone ID: uC-osflM202025g07b1
tcggtttagatcgcgagcgccgccctttttttgtttgttttttttttttttttccttttttctttttcctttttaatttttttttttttgtgcaaggctgcaattggttcttcacttggccatgagtcaatcccaaaaaaaaagggcctaaaaataggttgggcgatgcccccaatccaaaacaaatttaaaccccggacccctacaacaggagtcccttacatggcaggcccaccccccttggttttaaaaacccttttttttttggcaaaaataaagccccaagctactagcccaacttctattgctaccaggcccacttttgtcatttaaagtggggcccaattgtttgtgaaaagaacaactttttttttcttttacccagggaaaaaggttttgtggaacccaccttctgcccactacaagggggcccaaa

SEQ ID NO: 32991 - DNA, 273 bp, Oryza sativa
  Clone ID: uC-osflM202025g08b1
tcgtgtagagcgccggcgtggaggggatcatggtggacgtgtggtggggcatcgtggagagcgagggccccggccggtacaacttcgacggctacgtggagctcatggagatggcccgcaagaccggcctcaaggtccaggccgtcatgtccttccaccagtgcggcggcaacgtcggcgactccgtcaacatcccgctcccgaggtgggtggtggaggagatggagaaggacaatgacctttgttacaccgagcaatggggtactcctaact

SEQ ID NO: 32992 - DNA, 434 bp, Oryza sativa
  Clone ID: uC-osflM202025g10b1
tcggtctatctacaagcagccattgccatcagatgagaagaaaagcaggagctgccagtcatgtcacaagtcaccatgttcttgcaggagcgaagtattccattcagatttgtacccgacacttcctgcgaagatgatgatactggaattcctcatcagaagcctgaggcacccaagaagaacccacaatgtgagtgatcttgatgacatgatcagcaatggagctagcacagggagtgtagttcttggtccttcggagaaaatgatgttggattctttgcattcacttgttgatgcgaaaacgaggccaaaaagtccttcattcttccactcaggaaccaagatgagaaaagctcggtcaaaatcccacatcataacacagtcagagatactgaagctgatatcttctgagacatgggagatcttcttccctg

SEQ ID NO: 32993 - DNA, 361 bp, Oryza sativa
  Clone ID: uC-osflM202025h01b1
gtttgagttagatgcctgcccaatcagagcaatgaaggtctcagtgtcccctgttgtgcgtgttgctgttcagtgcaaggttgcctctgatctgcccaagcttgttgagggtttaaagcgtctggcgaaatctgatcctatggtgctctgtactattgaggagtctggtgagcatatcattgctggtgctggagagcttcaccttgaaatttgcttgaaggatctgcaggaagaatttatgggtggtgctgaaatcattgttttcccacctgtcgttttttttcgtggaactgttcttgagaagtcctgccgcactgttatgagcaagtcctctaacaagcacaaccctcttttcatggaa

SEQ ID NO: 32994 - DNA, 441 bp, Oryza sativa
  unsure (1)..(441): unsure at all n locations
  Clone ID: uC-osflM202025h06b1
attcctgtttcgattcactcgttcgtttttctttataggaaaggaattcgggttcgccaggatctttttattgtggggaaggtgacctttcattatgggctgcccagacattatggtgtactgggtgtttatcaagttcaatacccaatggtttttattcaattattcctgataagaaactgaaggagcgttttgacaccatcccgtctncagatgatctttattcccttggaatagagggattcaaagctgagataattcttgtggatttagagaaggataaaaaactatctgctataaagcagctatgtgcagcattgggaaaaaggattgaaatcgaaccctgttgcaatgataaaaaagatttgcagggttgggttttgacttctataaacgggcaaattcgcaactcagtcctgcatgaacttcctctgagaaaat

SEQ ID NO: 32995 - DNA, 337 bp, Oryza sativa
  Clone ID: uC-osflM202025h07b1
gttctttttgagtctgtgagttctgacttatcttaagctatgataggtgctgtccaatttatcgctccgaaggcaccaaaaaaatgttaacctgattcagacaagaccgaataccaatgaactattctaggggggggggccaatccccattttttctttgggcctaccccttaccccaaactttggatgaaaaaacctggaccactcctgcccttttatataacaccatccaccccacaaatgttcccaaaagttcaaaaggggtcaaaatatttacctcaaaaaaaattcaacaaacttttttttgggcccccccaatctcaaacaaggttccttt

SEQ ID NO: 32996 - DNA, 527 bp, Oryza sativa
  unsure (1)..(527): unsure at all n locations
  Clone ID: uC-osflM202025h08b1
ttgttttcacgcattgcagaggagaggcgacaatggaggggaaggaggaggacgtgcggctgggggcgaacaggtactcggagaggcagccgatagggacggcggcgcagggcgccggggacgacaaggactacaaggagccgccgccggcgccgctgttcgagccaggggagctcaagtcgtggtctttctaccgggccgggatcgccgagttcgtcgccaccttcctcttcctctacatcaccatcctcaccgtcatgggggtctccaagtcctcctccaagtgcgccaccgtcggcatccagggcatcgcctggtccttcggaggcatgatcttcgcgctcgtctactgcaccgnctggatttacggaggacacatcaacccagcagttacttttgggctgttcttgccaggaagctgtccctgacccgggtcatcttctacatagtgatgcaatgcctaggggccatttgcggagcttgagttgtgaaaggcttccagcagggtctgtacatgggcaatggcg

SEQ ID NO: 32997 - DNA, 370 bp, Oryza sativa
  unsure (1)..(370): unsure at all n locations
  Clone ID: uC-osflM202025h09b1
tcgcttttaccctgcctgtatccgcaccgacctngnacccaccagagaccggccgccgcttatcagtgcctctgtatctctctgtgtgcccgctacggcgagagggggtgccacacacacgtacgcacgggaggatcagggcaacaagtgaccgcgcgcgtgcgtgctgttcccccgaccgatgacaacgatgcgcgcctccgacgcgctgctgttggtggccgcggctgtcctcgccgtcgtgcgcgccgaggaccagtaccacttcttagattggaaggagacgtacgggacccggacaattattgacgaggccaaaaaggtgatgcttatcaactaaatgttcccacggaccaccattaactgcagg

SEQ ID NO: 32998 - DNA, 348 bp, Oryza sativa
  Clone ID: uC-osflM202026a04b1
ttcttatcatggactcctccaccctctcgtccggggccgtacatgtacctgtgacgccgccgaccggcactcctcctccctgtcgtacacccgacgcctatacctcgcgccgacacaggcgcgtgctcgtcggatacatctccgcccacaaaccacatattttcttgggggatatggggatcttgggcgaggagaggagatgaaagacatggaggatggataagaggatcacgcacctgtggagagggggagggcaggataccctcaggtgctacctgagaggaagaacaaatacggataagacagaaactacgcataaggacaacaaggaaagggaggacaaggaaa

SEQ ID NO: 32999 - DNA, 538 bp, Oryza sativa
  Clone ID: uC-osflM202026a07b1
attctaactctccctctccctcgccgccggcgcgcgagcttcaccagccatggccgccaccgccgccgcctccgtagccgcgatttcgcctctccccggggcatccctcccgcgccccgtctccgcgagggttcctcttctccctagggcttcccctcccacatggcgcctcagcgtcggctcggcgcgcgcgcggtcgacgcggtgccttgcggcggcggggggtggcgggctggcgccggagatgagggcgacgctggacaaggtggtggggtcgcacaaggtggtgctgttcatgaaggggaccaaggacttcccgcagtgcggattcttccacacggtggtgcagatactccggtcgctggacgtgcccttcgagacgctcgacgtgctcgccaacgaggcgctccgacaggggctcaaggagtactccagctggcccaccttcccgcagctctacatcgacggcgagttctttggaggatgcgacatcacccgtgatgcatacataagtggagagctgcaggaaacactagag

SEQ ID NO: 33000 - DNA, 479 bp, Oryza sativa
  Clone ID: uC-osflM202026a11b1
tctctctccactccgccgccgccaccgctgggggtcgcctccccccccaaatcaaaaatcaaaatcaaaacccccccatctcttcttctagtttcttctagaagccgggacgaacaccgcgtcgtcttcgccttcgccttcgtcgtctcccgctcgcttcctccctcctgggttaggctgtgcactgaagtactgaacgttcttttgtagactgttaagcttatcctgcatcatggagaatggagacaaggatgagaaaaatgttgctgtcacggaaggatctaccaattctgaagaaaaggatcaagatgaggatttgttgaggagaacagaaatgctgaatgcaaaagaagcaataaattcttcaaatgagaattcaggcaatgattcagaagcacagatccatgtgagagatgattcacaaaaagaattcaatgagaagatgaataaagaaggatgctcagaatccatggaaccta

SEQ ID NO: 33001 - DNA, 514 bp, Oryza sativa
  Clone ID: uC-osflM202026b10b1
ttaaacagcaaaaaaaatcaaacaaaaagaaaaaatattccccatctgtgaaattcgcaaaaccctagcgcggcggcgatgtcgaacacgagggtgttcttcgacatgaccgtcggcggagctccggcggggcggatcgtgatggagctgtacgcgaaggacgtgccgcggacggcggagaacttccgcgcgctctgcaccggcgagaagggcgtgggcaagagcggcaagccgctgcactacaaggggagcaccttccaccgcgtgatcccggagttcatgtgccagggcggcgacttcacccgcggcaacggcacgggaggggagtcgatctacggcgagaagttcgccgacgaggtgttcaagttcaagcacgacagccccggcatcctgtccatggcgaacgccgggcccaacactaacgggtcccagttcttcatctgcaccgtgccctgcagctggctggacgggaagcacgtcgtgttcggccgcgtcgtcgagggcatggacgtcg

SEQ ID NO: 33002 - DNA, 468 bp, Oryza sativa
  Clone ID: uC-osflM202026c03b1
ggtcgctgccgcctcctctccacgcagatcgagatttggctggtaatatactgctcacgcgaatcttgcccttccgtgtttagattagattgaagagtgggagaccatacaattcaattcttagacgtaggatttcctacggaatcaaacctagctaggaactaggaccaatacataaatggaacatattattttagcctgcaatatctcataagctttgtcaatcgtcttggtctcctgactctccatgtttcgggttggaagttgccttgcagtcaccttgcagcgcaacagggtatttacctccacccgtaattgattgatgaaattgttcttcgtatggacctgtccaataacaaagaaaaacatatgcatggttgtctacaagtgcccatgttgttgcagctacccttgagtataaattgcactcccatcgggtagacacttctttccaatactgtgaataca

SEQ ID NO: 33003 - DNA, 140 bp, Oryza sativa
  Clone ID: uC-osflM202026c08b1
gtcattataccatccctgaagaaatggacgatgtctgcaagtggctcagttcaaggctgggacttgaccgatcccgcggctaattcgaaaatatgaacccggttcagtggctttggtagtgaggctcgatagcattagtc

SEQ ID NO: 33004 - DNA, 359 bp, Oryza sativa
  Clone ID: uC-osflM202026d01b1
atgtttctctgacccagcacgcaagagcgtgggggcaccttaaccacgaactggaatacggtgctctgctgctgctggtgcaacagctgcgcttcgagcgtgactacagcgtttgctactcctactactctgctctgccatgacctggccgacatgaagtggcgccgagggagagtgtgaggagccagcagagggagagcgactggggtgcacctcctgatgggtgaagagcttccccagttgcgggccgtctagaacgtcctccttatcactaccatgacacaggatgtgtcaggtcaagaagcacattacgtggccaaggatgtcagggatgatcaggacaccgcatgtaccgcatt

SEQ ID NO: 33005 - DNA, 324 bp, Oryza sativa
  Clone ID: uC-osflM202026d06b1
ctctcacactccagtacccccacgctttcggcacattctcctcgcgcgagaggggggtggagaggggaggggggaggagcgagagcggagcgatgggctcgcctgggcatggggatgcggcggaaagggacatcgacgatctcccacggaacgacgccaactacacggcgctgacgccgctctggttcctggagcgcgccgtcgtggtccacccggacagggccgccgtcgtgcacggtccggtgaggtacacctgggcggagacctaccgtcgcttgcgtcgcctcgcctccgtccttgcgcagcgatccgtcgctcctggct

SEQ ID NO: 33006 - DNA, 224 bp, Oryza sativa
  Clone ID: uC-osflM202026e01b1
gacggcccaacccacgtctcaccagacgacttcgtccggtggtgcggaccttacattgagcacgcctccgatatccatgaacacagggatgatcgggtggaggaccgctctacctggctggaccagggcaggaccagatcatctaggctcggcgctctagcacagtaccggacgaaggtacagcggattcgaacaaggcggcctacgtgttcttgggacggacg

SEQ ID NO: 33007 - DNA, 415 bp, Oryza sativa
  Clone ID: uC-osflM202026e03b1
gttctccgccatatacaactctctctctctctctccaaccactgcgtcgtctcgcatcggtcggtgtcgcgaccacccggtcgccgccggtggaggtttcgggtcggccacctgactaagccgcggccacgcaggtcgccggcgccggtgcgcgcggcagggatggcgccgacggtggggatcaagcggtcggcggcggcggtggcgacgcagaccatcagcgtgccgccgcccgacgcgcggttcgcggtgcgggaggccgtgcgggccaccatcgcgtcgccgccggtcgaggcgccccccgccgccgccgggaaggcggcggcgccggcgcccgcggtgtaggggttcctgtgcctggaggaggtggacgggaggcggtggagctacgtggtggatgggggacaggtgaagg

SEQ ID NO: 33008 - DNA, 263 bp, Oryza sativa
  Clone ID: uC-osflM202026e04b1
gttattataccatgcctgaagaaatggacgatgtttgcaagtggttcagctcagggctgggactagaccgatcctgtggctaattcgaaaatatgaacccggttcagcggctttggtagtgaggctcgatagcattgggtgagcacggaggacaaggagcacatcaatggagctgcagagacaaatcatgtaggggcgatcgctgttgaggatccaggctgacctcccggtgcatgacaggacgatgatgttgtatggggcgg

SEQ ID NO: 33009 - DNA, 516 bp, Oryza sativa
  Clone ID: uC-osflM202026e08b1
ttctgctgccccaccagcaaaaaaggatgaagttgaagctgccacgtggaagcggagaatcttcgccataactgctctcgggatggcccaaggagatgagaagaaagttgctgcaacttcacttgcctacaagaaagcagctaaagctgtcctcgatgccgccccagctgacaagtttaagttgatggatgaatccttcaaagtggctgttatgcaggtaatcgcatcatgagccacacgccaaccatcaataaaggtctactactacatcgccgacattggtagacgatcggacacgtaccgagtatcaacggttatttatgtaataaatgtcgtgcaactcattccattctctccatttgtaagagcaccaggggaaaaaaaaataatccggtgccatctaacatttctagttcaaaatgtcgatccttggcacttggcggaacttttcttttccatgaaatcctttgaatgattctttaaacaaaagtatggagtaaaaatatcttatgtaag

SEQ ID NO: 33010 - DNA, 532 bp, Oryza sativa
  unsure (1)..(532): unsure at all n locations
  Clone ID: uC-osflM202026e09b1
tttctactccaccactccactccccaatccaaccaccccccgaacaaccggagaagagaggctgcactccactcgccgccggcgaccgatgctccgcgccgccctcctccgctcaggctccggcctccgccggcctcccatggccgcgccgctctccaccgccgccgccgcctcgtggctctccgacagcgcctcgtctccgcctagggtgcgcctcctcatcggcggggagttcgtcgagtcgcgggccgacgagcacgtcgacgtcaccaatccggcgacgcaggaagtggtgtcgcggatcccgctcaccaccgccgacgagttcagggccgccgtggacgccgccaggaccgccttccccgggtggcggaacacgccggtgaccacgcggcagcgcatcatgctcaagtaccaggagctcatccgggccaacatggataaactggcagagaacattacaaccgaacaggggaagacactgaaggatgctggnngcgatgtattccgtgggctagaggtggtggaacat

SEQ ID NO: 33011 - DNA, 482 bp, Oryza sativa
  Clone ID: uC-osflM202026f07b1
ttatggcaaggacgaagagctccgtaaggccggcatcatcgacacgcagttccgccgcgtcaagtgcaagtatcctgccgacaccaagatcaccttccacatcgagaaggcctccaaccccaactaccttgcgctgctagtcaagtacgtcgctggtgatggtgacgtcgtggaggtggaaatcaaggagaagggctccgaggagtggaaggcgctcaaggagtcatggggtgccatttggaggatagacacccccaagccgctcaagggccccttctccgtccgcgtcaccaccgagggtggcgagaagatcatcgccgaggacgccatccctgatggctggaaggccgacagcgtgtacaagtccaacgtccaggccaagtgagcattttaagcaaggaagaaaccagcgtacgtactatccggcgcgggtgcctatatatatataaggtactatatatggggtggtggatgcttgcatg

SEQ ID NO: 33012 - DNA, 531 bp, Oryza sativa
  Clone ID: uC-osflM202026f08b1
ttattccaaatccgccatcgcatccttctctccatccaccgaggcggcgccaccacctctcgtccggcggcggcgcggcgcgacgctccatccccggcgaaaaggccgccggattccctgtgggggcggcggagaggcgtcggaggaggctggcgccggcgcggcgacaagcttaattaagcaaattggattcggatcacaaaggaggcggtgcctgtagaaaagccatggcttcttcggtgttcaaggcgatggcagagaaggcagggccgtctgtccgaaagcaggcccttacgctgaccgatgcagcggcgtcgagggtgcgccagctgcttggcgtacggcagcgtgcttatctccgtcttggcgtcaaggcccgtggttgcaatgggttgtcgtacacaatgaattatgctgatgagaagggaaaattcgatgaacttgtggaagataaaggagttaagatactaattgatccgaaggctcttatgcacgtgattggaaccaaaatggatttcattgatgatccac

SEQ ID NO: 33013 - DNA, 535 bp, Oryza sativa
  Clone ID: uC-osflM202026f12b1
tctttacgccagagcgcgaggagacgcacacagggacttggcatttgtagagtttttagatttatagatagcaaagatgtcggcacaggcggagctttcccgtgaggagaatgtgtacatggccaagctcgctgagcaagccgagaggtacgaggagatggtcgaattcatggagaaggtggccaagacggttgactctgaggagctcaccgtggaggagcgcaacctcctgtctgttgcatacaagaatgtgattggagcccgccgtgcgtcatggcgcattatctcctccattgagcagaaggaggaaagccgtggtaacgaggaccgtgtcacactcatcaaggactaccgtggcaagatcgagactgagctcaccaagatttgcgacggcattctcaagctgcttgaatcccaccttgtcccctcttccactgcccctgagtccaaggtcttctacctcaaaatgaagggtgactactacaggtaccttgccgaatttaagaccggggctgagaggaaggatgctgctgag

SEQ ID NO: 33014 - DNA, 529 bp, Oryza sativa
  Clone ID: uC-osflM202026g05b1
cggtcgcgtgggcggccggccatcatcagtgatcctctacaatcatcgactttcagcaaattaagatggctgctgccttctcctccaccgttggagctccggcgtccactccgaccaacttcctggggaagaagctgaagaagcaggtgacatcggcggtgaactaccatggcaagagctccaacatcaacaggttcaaggtgatggccaaggagctggacgagggcaagcagaccgaccaggacaggtggaagggtctcgcctacgacatctccgatgaccagcaggacatcaccagggggaagggtttcgtcgactcccttttccaggctcccacgggtgatggcacccacgaggccgtcctcagctcctacgagtacctcagccagggtctcagaacgtacgacttcgacaacaccatgggaggcttctacatcgcccctgctttcatggacaagctcgtcgtccacatctccaagaacttcatgaccctccccaacatcaaggtcccactcatcctgggtatctg

SEQ ID NO: 33015 - DNA, 470 bp, Oryza sativa
  Clone ID: uC-osflM202026h02b1
ctgcgtgtcctggccgaacgctaatatacagcatcggggtgggaggaaggatgagaagagtaacaatggcggcgaaagaccacgacctgtaggtgctcggcttgttggtgagcccgatcgcgatccgtgtgcgcatccagctcaacatcaagggcgtgagctacgagttcgtttaggaggacatcttcaacaagagtgaggtgcttgtcacctgcaacggggttcacaataaggtgcccgtgctcatccactgaggcaagcccatctcacggtcgctctgtcatcgtgcagtacgtggactaggtctgggcacgggggccatcacgtgctcccgtcgacccctactaccgggccgttggacggttgtgggccgcctacgtgaacaacaacatgttacgtggaatggcttgcgttcttttcgcctctacggacgaggagagggcggcaaacgccgaggagacactggctgc

SEQ ID NO: 33016 - DNA, 537 bp, Oryza sativa
  Clone ID: uC-osflM202026h05b1
gtactctcagtctcagcttacaaaaaggacttcagggaacttgtagtaacatataatgattcaaggaattttagggggaagggacagaaagctcttagtgagatcaaccctgattctgaaagcagttcatatgagtctccggatgatgctatgtcagatgatgaagatgcaaatgttgattccatgagccatgaagataatagttttggaaaaactaaagtcggcatgcccttgataaatgaaaatgctgaaaatgagttggatgtatatccaggagtagatgattttgatgttacatgcggagagttccttgagtgctcgtggcctgagaactctgcatcttcttctcaatgcaacaaaactggttccagttcctcagaaattgctgatcaaggtcctaccattatttacgtacccaccaggaaacaaactgtggagttagcaaactatttgtgcaaaactggtctcaaagctgcagcatataatgcgaagatgcctaaatcacatttgagacaggtgcatcaacagtttcattgc

SEQ ID NO: 33017 - DNA, 465 bp, Oryza sativa
  Clone ID: uC-osflM202026h07b1
tttcccgcccgcgcggcaccaaccccaaccccagcaagaaccccccctggcgcacgtttccccaaccacgcgcagccgcagccgctgcagcttcgactcctctccaatctccaccaccacaatctcctcagatccaaacccacacgcactctcccccgcttctgctggttttccgccatgccgccgccgaggctgccgtgcctggcggcgttcctggcgctggcgctggtggtggtggtgtgcgcggctgagccggacgcggacagggcggcgctgctcgacttcctcgcggggctgggcggcggcagggggcgcatcaactgggcgtcgtccccgcgggtctgcggcaactggacgggggtcacctgcagcggcgacgggtcgcgcgtcgtggcgctccgcctcccgggcctcggcctctccggccccgtgccggcgggcacgctcggcaggctcaccgcgctg

SEQ ID NO: 33018 - DNA, 540 bp, Oryza sativa
  unsure (1)..(540): unsure at all n locations
  Clone ID: uC-osflM202026h08b1
ttttcttaaaccacccaccaccaccaccaccgagcaagcaaacaccaaaggcaggctgggcaagaggcgaccgaatccgaaggagccaatggcgaaatccctactggcggcgtccgcgctgctgctggcgctgctcctggcggtggccgggggagcggcggcggcgggggaggtgccgctcgcctgggagctcggggtcggcggcggcggcggcggcggcgaggaggacagcttcgggttctcctccgaggatgcggcggccgacggcgccgcggtggtgaggcgggtgctgcaggggcaggggtacatcagctacggcgcgctgcggcgcgacaccacgccgtgctccgtccgcggcgcctcctactacaactgccgccctggcggccaggccaacccctactcccgcggctgctccgccatcacccgctgccgcggctaacccacctccgccaccacccgctgctctgctcaaaccgggattattcaaagttcgtttgcctcggcttctactttntctttttctttttcccccccttt

SEQ ID NO: 33019 - DNA, 551 bp, Oryza sativa
  unsure (1)..(551): unsure at all n locations
  Clone ID: uC-osflM202027a10b1
tttccgtttggaatgagctacttacactcgcaaggcatacttcacagagacttgaagtcagagaatatacttctcgatggagatatgtcagtaaaggtggcagattttggaatttcgtgcttagaatcgcagtgcggaagtggtaagggttttactggaacgtataggtggatggctccagaaatgatcaaagagaaacaccatacgaggaaggttgatgtatacagctttggaattgtcttgtgggagattttgactgctttggtaccattcagtgagatgacacccgagcaagctgctgttgctgttgccttgaagaatgctaggccaccactgcctccttcatgccctgtggcaataagccatctgataactcagtgctgggcgaccaacccagacagaaggcctcagttcgacgacatcgtcgccatacttgagagctacatagaagctcttgagaggatccatccttcttgcagtcatatataccgnctncgcatccgttgcaccatcaccatcaccagcatcataatcatcatcatcaacagagc

SEQ ID NO: 33020 - DNA, 499 bp, Oryza sativa
  unsure (1)..(499): unsure at all n locations
  Clone ID: uC-osflM202027a11b1
ttgtgtccctgtctcccctccttcctcctctcctttcccctcctctcttcccccctctcacaagagagagagagcgccagactctccccaggattcagccatgaagggggccaaatccaagggcgccgccaagccctgacgccaagttggctgtgaagagtaagggcgcggagaagcccgccgccaagggcaggaaggggaaggccggcaaggaccccaacaagcccaagagggctccctccgctttcttcgtttttatggaggagttccgtaaggagttcaaggagaagaaccccaagaataaatctgtcgctgctgtaggaaaagcagccggtgataggtggaaatccctgaccgaagcggacaaggctccctatgtagccaaggccaacaagctcaaggccgagtacaacaaggccattgctgnctacaacaagggcgagagcactgccaagaagcacccgccaggaggangaggaggacgacgaggaggaatctg

SEQ ID NO: 33021 - DNA, 498 bp, Oryza sativa
  Clone ID: uC-osflM202027a12b1
tttccgtgctgttcacggagctgtggagcgcgtgcgcggtgccgctggtgacggtgccgagggttggggagaaggtgttctacttcccgcaggggcacatcgagcaggtggaggcctcgaccaaccaggtaggcgagcagcggatgcagttgtacaatctcccatggaagatcctgtgtgaggttatgaacgttgagctgaaggccgagccagacaccgacgaggtttatgctcagctcattctgcttcctgaatcgaagcaacaagaagataacggctctactgaggaggaggtgccttctgctccagcagctgggcatgttaggccacgggtgcactcattctgcaagacattgaccgcctcggacacgagcacacatggcggcttctcggtgctgcgacgccacgcggacgaatgccttccaccactggatatgaagccgtcagcctccaacacaagagctggtggacaaggatctgcacggtgtggaatggcgc

SEQ ID NO: 33022 - DNA, 346 bp, Oryza sativa
  Clone ID: uC-osflM202027b01b1
tagcgaggacgccaacgagaccaccattcttcgtactgctgagtatctgtgcgagctgcctcgccaccacagggactggtgttgtactctcgctctagattcgtgcgcgaggacaaggacgacctactcctcctggtgtcggagcatccgccataagctggttgctagcggagggtttgcagagggtgcactcgggatcggctacggcttcggctcggatcgaattcaaagaagaggcaggaaacctaggcggcgtagatagtgccagcgcccctgtatgaaggggcatgtaggtttcgcaaggatttgtaaacaaaccatgaaatcgcgaagatacgaaggcatc

SEQ ID NO: 33023 - DNA, 348 bp, Oryza sativa
  Clone ID: uC-osflM202027b02b1
acgtttccttgagaggatcccaacccaccacgtgtgctttgcgactgctgtctgtccgagctgcctccccgccgccgcggaagctctgagcctctggccaagactggagcgcgcgacacagccgacctgctcactcctcctctacgagcccccgcctaccctggctgcgggcggggggatacgagggggtggacgcggcctccgtgtcgggttcggctcggatcgaattcaaagaagaggctggaaacctaggaggggtagttagtgccaccgaccatgtttggagtggcatgaagttttcgcaaggctgtgcttatgattttgccgatggcgaggagatgaaggcat

SEQ ID NO: 33024 - DNA, 403 bp, Oryza sativa
  unsure (1)..(403): unsure at all n locations
  Clone ID: uC-osflM202027b07b1
tagagaggatcccaaccccaccacctctcctcctcctcctctctctctctccgatctgcctcgccgccgccgcggctgctcttctcctctcgcctcgcctcgtgcgcgcggcgagttcgacctcctcctcctcctctccgagcccccgcctcccctggctgcgggcggggggtttcgagggggtggacgcggcctccgtgtcggcttcggctcggatcgaattcaaagaagaggttggaaaccttggtggtgtaggttagtgccaccgcccctgtctggagtggcatgtagttttcgcaaggctttgtttatgattttgtcgatggcgaggagatgaaggcatcgcaaggtgtggcaaccggggcagcaaggacatgacagncatgccccctccgcgccaacg

SEQ ID NO: 33025 - DNA, 414 bp, Oryza sativa
  Clone ID: uC-osflM202027c02b1
ccgggcggagagctaactcatgatgagactacaatgatagggggtgccttggacttgactgactagactgctacggaggctatgacacctatggagcgaactttctcattagatgacgactacaagttggatggtcaagcaatcggcaaagtgcttgctcgggggcatagcctggagcgctgatactctggaaacactaagaacattatttgcctcatggtgctaaaaggctttcgacagatcgtgatgagacagagacaccaattagagctgtttacattacaaggattgcaagggttcctggacatatgcctttatatgacatactgaatgtgtttcagaaaggaagtagctatatggctgctgatgtgaggctaagcccaaaaatgtaccacttcctgacaaaactgaacc

SEQ ID NO: 33026 - DNA, 413 bp, Oryza sativa
  Clone ID: uC-osflM202027c04b1
ttttgtgataggaaacttgtttaatactatctccgtttcaagttataaaatgttttgactttggtcaaagtcaaactgcttcaaatttaactaagtttgtagaaaaaataatagcattttcaacccaagaaaaacttattatgacaatatattcaattattgattttatcaaactaattcgatattataaatattactatatttatctataaacttagttaaatttgaagtagtttaactttgaccaaagtcaaaaacgtcctataacttgaaacgaagggagtatttagatttgattttttgcataccttagttattacctaaataatgagtgtgcagcaagatatagcaagtatatataagtaccttccgtttcaaattacttactgttttaaaaggtaactttttgttgt

SEQ ID NO: 33027 - DNA, 391 bp, Oryza sativa
  unsure (1)..(391): unsure at all n locations
  Clone ID: uC-osflM202027c05b1
tataatctaattaagagaaggccctcgtgccgctcagccccagggcggcacgggcggcgaccagacgagcgcgccgccgccaacctcttcctcttgtcccctccaccttgccgccgctcgagcgcccgccggcaaagccggggggacgcaatgacagcggcggcgaggctccctacctcctctcgcaggcgcggcggctggggcgatgccatgaccggagagaggtctcgcgggtgcagcggtcgccggcggccagatccggcgtcggtaggaccggatccggtccccacacggctggatcgggcgtctaagccggtggcgacaggaaggaggcgcacgctcaacgaggagcgcggaagaagccgcngaagtgcctacttgcgaggaggac

SEQ ID NO: 33028 - DNA, 378 bp, Oryza sativa
  Clone ID: uC-osflM202027d01b1
tgtgtgcgtcgcgaacggttataattaggacggtgcaaaacgcgcctccacgctgtggcgcccacgaccccccgcgactccgcggatgattacacaactggccaccaccgtaacgggcaacgcccacaagcgtgcgcctccccctacctccgagggcgagatcggaacaaggcccccacccaaccaccgccgccgccggcacctgaaatcgccggagaccgccgggccacgggaggcgccctgccctcctggccattgaagaggaccttgtctcctgctcgcattaggaggatatcgggaggaggagtagcttctaactgaaaaggggtgctgtttgccaaggccgaccctcccgacgcctgacgcggggactacggc

SEQ ID NO: 33029 - DNA, 414 bp, Oryza sativa
  unsure (1)..(414): unsure at all n locations
  Clone ID: uC-osflM202027d03b1
aaggagcagctttctaatttccaggctgtggtctttactgatatcagcttagagaaagcagttgagtttgacagttactgtcacaaccatcagccaccaattgctttcattaagtcagaaattcgtggcctttttggcagtgtcttttgtgactttggtcctgagtttactgtattggatgttgatggagaggagccacatacaggaatagtaccatcgatcagcaatgacaaccctgcgcttgcttcctgtgttgatgatgagcgtctggagttccaggatggcgatttacgatgtgttcttcagaagccatggaatgagtgaactaaatgatggtaaaccaaaatagattaaaaacgctaggccttattcttntactctagaagaagacactacctcatatgggacatatgt

SEQ ID NO: 33030 - DNA, 203 bp, Oryza sativa
  Clone ID: uC-osflM202027d10b1
tgtacgtggaaaaaaaccacaaaacgacgccctactagtaatatttacttggccctgctgcatcgcctccactagccatgggagactgcccacccccgtaatgcgagaccctgtgccccaccgccgatatctgccgcccgatcacgtatttcccagagatatcgatatgtccaaagccgaaaccgttgatggggaggaggagg

SEQ ID NO: 33031 - DNA, 442 bp, Oryza sativa
  Clone ID: uC-osflM202027d11b1
tttctagggttttgttggcccccattcctcccccaccccggtgtcctcccctccgccgctcgcgtcgccgcctttttcccctatggcgctgccgaatcaggggaccgtggattaccccagcttcaagctggtcatcgtcggcgatggcgggactggtaaaactacatttgtgaagaggcatctcactggagagtttgaaaagaaatatgagccaaccattggtgtcgaagttcaccctctagattttaccaccaactgtggtaagatccgcttctactgctgggacactgctggacaagagaagtttggtggacttagggatggatactatatccatggtcaatgtgcgataattatgtttgatgtcacttcaaggctgacttacaagaatgttccaacatggcatagggacttgtgcagggtgtgtgaaaacatccccatt

SEQ ID NO: 33032 - DNA, 282 bp, Oryza sativa
  Clone ID: uC-osflM202027e01b1
tttttccgtgtcactggctctggatatgggcagtatgagtaagggctaaatatggataaatgggcaaagcattggacggtactggacagcatatgcggaaagagactgcagaggatcacattacactgggtgatacagggcacccaagtgttaaggaggttgtggtcagactacacagcgctgtgtataatgggccaagatccttgttagaagcaactagaaatcggttaatggtttttgaggaacttggacggtgatcttcaaagattgcccttgtgaaac

SEQ ID NO: 33033 - DNA, 488 bp, Oryza sativa
  Clone ID: uC-osflM202027e02b1
acgttctcctcgccgaccgccatggccgccgccgccgaggtcgacgcggcccccgacctccccaacggatcctccgacaccgccacaaccgacaagaagaagtcgcgggagagcgagcgccgacgccgccgccgcaagcagaagaagaacaaggccgcgtccaacgccgcagacgcggatgcggccggggacgccggggccgacgacgacgccgacgaggagaagcctgatgtcaaaccccaggtggaggtggagagtggagatacgtcccggagcaggcggacctggacgacggcctcctcgccgacttcaagagcattttcgacaagttcaccttcaaggattcctctgccgacgccgaggatgacgagaagaaagatgaggctggcactgatgccgcaagaaggcttgagggtctgattcggacgacgacgagccggggacacagcaaaagaaggaagggggcttgcccacaagcaaagaaacta

SEQ ID NO: 33034 - DNA, 518 bp, Oryza sativa
  Clone ID: uC-osflM202027e03b1
atcagctgcgcccccccccccccccaaccccctcgggcgcccgcttcgctccggcgactccacccggccgcgccgccgggatccgaccccccgcaggccgcccttggacgtggacctcgatggttccccgccggccccggcgcctttaacttctgatccagccagccgagtcccgcgcggcgccggggggcatcgaattcgaatccgcgccctcgccgtagtcgtcgccgccgccgccgccggacaatccggcgcctgccccgtccgtgctccccccggccagagggattgcgggactgatacggcccgggatcttgctggaaagtggggggttaccgagtacgcgaccaatggttatcatcggggaatggagggatgactatgaagacgagtactacagtgaaagatccatatgatgaggaaggggaacggtggctggtaaagagtatgccgaggtggatgaccagccggcggagggacagaaagaagtcctttaaattagagaacgattaaaggag

SEQ ID NO: 33035 - DNA, 442 bp, Oryza sativa
  Clone ID: uC-osflM202027e04b1
ttcctacctacctacctacctactctaggcgggagagatggtggggaagagcggggtggcggaggagggcggagcggcggcggcggcggcggtgaggaggtggctggaggccggcggcgggaggctggtgatggacggcggactggcgacggagctggaggccaacggcgccgacctgaacgacccgctctggagcgccaagtgcctactctcctccccgcacctcgtgcgcaaggtccatttagactacctagaagcaggtgcaaatatcataatcacagcgttgtaccaggctacaattcaaggctttgaatccaagggattttcaaaagaacaaagtgaagacttgctcgaaagagtgttgagattgcacgtgaagcgcgtgacatgtttttgaggaacattcagatcgtaccatacaacatcctatcctggttgcagc

SEQ ID NO: 33036 - DNA, 467 bp, Oryza sativa
  unsure (1)..(467): unsure at all n locations
  Clone ID: uC-osflM202027e06b1
tgacgatcatggcgcctctccctctcctaaccacgacgtctctgctgctcttcttcttcctcgcgtcgccgttcgccgccgacttcgtcgtcgcgggcggcggcggcggcggcggctacaacgacggcggcgacagcgaaggcggcggcggcggcggagccaagatgccgcacgtgaaccacggcaggtacaagtgcgggccgtgggtggacgggcacgcgacgttctacggcgggcgcgacgcgtcgggcacgacggagggcggcgcgtgcgggtacaaggacgccgacgggtacggcgcgatgacggcgggcggtgagccccgccctgttcgacaacggcgccgggtgcggcgcgtgctacgagctcaaggnggattccgggaagaccgtccgtggtgacggccaccaaccaggcgnccgcgncagtgaacgggatgaagggcgagcacttcgacctcaccatgc

SEQ ID NO: 33037 - DNA, 363 bp, Oryza sativa
  Clone ID: uC-osflM202027e08b1
ttgggagtcgcatcgggccacagagtacttctgccagttctgctccggtgagagagaacacgccgttgaccgcgccgccgccgccgccatgatggttatcgccgtggacgatgagcagctcatcttgcgtgtggtgaacacgaacgtggatcggaagcagatgaacatgaacgagctcacattgataaagggtgaaattcgccacttctacaacatcttgtgcttgatggccaacatccacatgtacaagagcactgtccatcttactcgtgaggagcttgagtgcctcatgactgtagctgcaaaccgttttgagatgaaggggactgactgttttttgaactgtatgaaagactacacgga

SEQ ID NO: 33038 - DNA, 497 bp, Oryza sativa
  Clone ID: uC-osflM202027e12b1
tttccgttccaaccagttagagatgaagggttgttactatgaattgatatacatagctcatctttgaggtgaacatgttaactcgaacaattacatattgcatggtttctgtgacacaccgtatacatcatcctagtattatgaacaagctgtttagcacagcttggatcttgcgtcatgttttgcgttggttcaaaggtgtgcatcatgtcataaatatgccatccaaagtgtaaaattgtttgtggaatgctagacctcagttattttctttcatattaccagtgaaaatggatggaaatgctaaaggcggtgggcattctgaggcactgaagaactacaatcttggaagaactttaggtattggctcatttggaaaagtgaagattgcagagcataagcttacaggacacagagttgctataaagatcctgaaccgccgccaaatgagaaatatggaaatggaggagaaagcaaagagagaaatcaagatactg

SEQ ID NO: 33039 - DNA, 438 bp, Oryza sativa
  Clone ID: uC-osflM202027f02b1
tgtggatttggatccgtttgtgactggagctggtgataatcctcctctttacttcttgtatgccgtggttgtacacgtggatacagaaaatgcatcattctctggacattacatatcatatgtcaaagatatgcagggcacatggttgagaattgatgattcataggtccaggctgtttcactgaatcaagttatgtcagaaggtgcatatatgctgttctacatgagatcttttcctcgcccaccgaagatttacattgagaagggcctatcatcagttcctacatgttcaaagcgccattcatcaaaatcctccaagggttctaagcaagacctgaatcatactgagtcactctttgcttccagtgatcaaacctatggaatatacgatttcagaccagacaacggctatatacaagatcagcatgctgctttgag

SEQ ID NO: 33040 - DNA, 533 bp, Oryza sativa
  Clone ID: uC-osflM202027f04b1
acgtgcgcttccggctcctccgaaccgccgccgccctctccccgttctcgtcctccgcgccgccgcggcacagcccccgcatcctccgcgctatccctgtcggtgcgcctcacccgccgcgcgtctccgcagtcgtctcgccgctggtccgtccggtcgccgccgggttcgcgctgctcagcatggccaccgacgtctactccgccgcatccgtccacgacttcaccgtcaaggatgcaagtggcaaagatgtggacctgagcaccttcaaggggaaagtcctccttatcggcaatgttgcatctcagtgtggcttgaccaattccaactacacggagctgagccagttgtatgagaagtacaaggaccagggttttgagatccttgctttcccatgcaaccagcttggtggacaggaacctggcactaatgaggagattgtccaatttgcttgcacccgcttaaggccgagtatcaatttttgatagggtgatgttatggtgacaacactgccacatctacaagttttgagt

SEQ ID NO: 33041 - DNA, 488 bp, Oryza sativa
  Clone ID: uC-osflM202027f05b1
tcgccgtgcgccagctcccgctggtgttcccgggcctgaacggcgactccgactcacgagactgcagcacgctggtcgaagaggaggtgagcggcaaggtggtgctctgcgagagccgcagcattgtcgagcacgtcgagcagggacagaccgtgtccgcgtacggcggcgccggcatgatcctgatgaacaagccggtcgaagggtacaccacattcgccgacgcgcacgtgctgccggcgtcgcatgtgagctacgccgccgggtcaaagatcctgtcctacatcaagtccactcccaagccgacggcgagcgtcacattcaaggggacggtgagggggtcgtcgccggcgccgtccgtcgcgttcttctcgtcccgggggccgaacaaggccagcccggggcgttctgaagcctgacatcaccgggcccggcatgaacatcctcgccgcgtgggcccctggcgagatgcacaccgagttcgccga

SEQ ID NO: 33042 - DNA, 502 bp, Oryza sativa
  Clone ID: uC-osflM202027f06b1
tggacattgggcggctgaacccggagacgtaccagctgttcgacaaggtggagaagcactacgggatccggatcgagtacatgttcccggacgccggcgaggtgcaggcgctggtgcgcgccaagggcctcttctccttctacgaggacggccaccaggagtgctgccgcgcccgcaaggtgcgcccgctccgccgcgcgctccgcggcctcagggcctggatcaccggccagcgcaaggaccagtccccgggcacccgcgccgccatccccgtcgtccaggtcgacccctccttcgagggcctcgctggcggcgccggcagcctcgtcaagtggaaccccgtcgccaacgtcgacggcaaggacgtgtggaccttcctccgcgccatggatgtccccgtcaacgccctgcacgcccaggggtacgtctcgatcgggtgcgagccgtgcaccaggcccgtgctttccgccagcacgagcgggaagggcggtggtggtggaag

SEQ ID NO: 33043 - DNA, 525 bp, Oryza sativa
  Clone ID: uC-osflM202027f10b1
tttccgtccccactcatctcacttcactctctttctcttctcttcacttcaccaccgccacctctctcatcggatccctgcagaggaggagagggcagtggcggcgaaaggcgacatgggctcgctgtcctctctcgccgccgcggcggtgtttctctccctcctcgccgtcggccactgcgccgccgccgacttcaacgccaccgacgccgacgccgacttcgccggcaacggcgtggacttcaactccagcgacgccgccgtctactggggcccctggaccaaggccagggccacctggtacggccagcccaacggcgccggccccgacgacaacggcggcgcgtgcgggttcaagcacaccaaccagtacccgttcatgtcgatgacctcctgcggcaaccagccattgttcaaggacggcaagggatgcggctcttgctacaagatcagatgcaccaaggaccagtcgtgctccggcaggtcggagacggtgatcatcaccgacatgaactactacccggg

SEQ ID NO: 33044 - DNA, 506 bp, Oryza sativa
  Clone ID: uC-osflM202027f12b1
ctgccgcaccggtaccgaatccagtttcgagcgccacgcccacgtgtccatttgactgcctacctactctatgagcaagatattgttccaggtatcaaggtcgacaagggatcttgagccccttgctggctccaacaacgagtcatggtgccaaggcctcgacgggcttgcctcgtgcgaggcgtcatactaccagcagggcgctacgctttgccaagtggcgcactgttgccagcatccccaacggcccatctgaactagccgcgaaagaagctgcctggggccttgcccgttacgccgccatttctcaggacaacgggctggtgacgattgtcgagccttagatcctcctcgacggtgagcatggcatctacaggaccttaaaggtggcgcataaggtgtgggcggagaccttgttctacattgccgagaacaatgtgatgttcgagggcattctactcaagccaagcatggtgacacccggtgccgaatgaaagacagggcca

SEQ ID NO: 33045 - DNA, 403 bp, Oryza sativa
  Clone ID: uC-osflM202027g02b1
ggaggagggagcagccatggcgttcatcatcaatgggggaagttcctgcagcaaccatgggaccaggcctcggggacgctgatgaccaagctggtctgcacgctttggttggaattgggtttcttccccatgctctagaagttgtccctgccccatgacccgcgggtgttgaactttttccacggcacccactagtaccaccaggagacccttgacaacctacgccaggccatgcacaacacgcggtgtgctttgcgccgttatgctagataccaagggtcctgagattcgtactggatttttgaaggatggaaagccattccaactaacaaagggtcaagaacttactgtttccaccgatttttagatcaagggtgatgagaacatgattaccatgagttac

SEQ ID NO: 33046 - DNA, 383 bp, Oryza sativa
  Clone ID: uC-osflM202027g03b1
cgacgcgcacgcgccacttgctctttttttctgtgcccctggacacatctattcattcttccattgccggcgaggtgagacacacaccacatcgtcgcggcggcgagtaaacttccagtcccggttattgattagacgctatgaggtctcgtgcatgaactgcgagacctgtcagctgatcgagctgcaactggagcctctggagatcatggatgagctactatgcatttatgcacaccatattctttcacggagccttgagccttgttcggcccaaagatgttgattgagatttctttgagattacctatgtacaatgtgtacttcctgaattagaagaggaagttgatgaaaagattaaccagctttgtgcgtgtgtagag

SEQ ID NO: 33047 - DNA, 548 bp, Oryza sativa
  Clone ID: uC-osflM202027g04b1
tacttgtcaagttcatccatcctccccttcccccctccgatcccctcccatcccctccccgccgcctcgtgcgatcgatcgatcgatcgatccgcaccacccacgcgcccgattcgccctcctacccaggccacctctaaccctagcgccggcggctcttctcccccgccgccaccgccgctccaaccctccccaacagtgggtttctctcccccccaatcccctcccctctaccgccgtcgatcgacgcgccaccaggaggggagcaggacgaaagccggtgctgcctaccgcctccgcaggtacctcatcgagcatcggtcggagtgcaaccggagtgccaaggtgtatttcatggattcttttcaacatggcatggatgctgataaacaccacatttttggggagcgtggcaatatgattcagttaaatatgtgtgcatctgatggtcgttctgttgttggacaacgatgccagagacttgggtgtaacaatgttgttgaaggccagacattgctcttgaaaagtcacagtatagggcaacgatg

SEQ ID NO: 33048 - DNA, 487 bp, Oryza sativa
  Clone ID: uC-osflM202027g05b1
tattctttaagaaggagaagaaggagaggagcagccatggcgtcgtcggtggcagcggcggcgagcacgttcctggggacgaggctggcggacccggcgccgcagagcgggaggatcgtggcgaggttcgggttcggcggcgggaagaaggcggcggcgaagaaggcggcgaggccgtcggcgccgacgacggacaggccgctgtggttccccggcgcggtggcgccggactacctggacgggtcgctcgtcggcgactacggcttcgacccgttcggcctcgggaagccggcggagtacctgcagttcgagctggactcgctggaccagaacctggccaagaacaacgccggcgagatcatcggcatccggttcgagaccggcgaggtgaagtccaccccgttccagccctacaccgaggtgttcggcctccagcgcttccgcgagtgcgagctcatccacggccgctgggccatgctcgccaccc

SEQ ID NO: 33049 - DNA, 428 bp, Oryza sativa
  unsure (1)..(428): unsure at all n locations
  Clone ID: uC-osflM202027g06b1
gaaaattattttggttcccttcacagaagcttcacacaaagaagctgagacatatattacaacattacactatatactagtccaatcacatctccaaattcactcccccatcccatggttgctcattgcagaagaaattaattgatgtgtagcctcgccgatgcgcaagcaccgggaggcaatatgcatagatcctacgtcgagaaggtcaggaactacacactgatgtggtcagatcaatggagctgtacatatgcagcttcttcttcttcttctgatgtttctcggncatgtccatgaggagagaggggaaggtngacggcagccgccggccggccggcattagagcggcctccggtgcgccgacgacgccatgaggatgaccatggcgacgacgaacatgaacagcatgctccccaggagagtgt

SEQ ID NO: 33050 - DNA, 362 bp, Oryza sativa
  Clone ID: uC-osflM202027h04b1
acgttatctttgtgtcgttttaggccatctgagggcctttgaatggctctcgggctccttcatttctcatagcatttgtgtagtgtgtgcaaatccatcatctgatcttcatatctcaagaattgaaggcgaccactcagctaaagcccatgcactcctcgttgacagccaccgacgccgaccaggctgcccctgaacacgagcggcacgtatcgcacctcatcggatgccagctaaaacgtctcttgccgccagaaccatagatcgacgcgcttttgtggacctgctggtgctaggcgccgagactcgtgcggcacgtgtatccaggtgacaaaccgtggaacaggtgcgacaataattgc

SEQ ID NO: 33051 - DNA, 403 bp, Oryza sativa
  Clone ID: uC-osflM202027h09b1
ttgtccttttggttctacgcatccgaggtgttgcttgcgctggagtacctgcacatgctaggcattgcgtacagggacctcaagcccgagaacgtccttgtccgggacgacggccacatcatgctctccgacttcgacctgtcgctgcggtgctccgtgtgcccgatgctggtgaagtcgtcgtcggtgcacgcgggcgccaacggcgtcgtgaagggcctcgccgccggtggcggcggcgacggcgagggcgtcggcgtcggctgcatgcagccgtcggcgttcttgccgcggatcctcccaaagaggagccgcaagacgtccaagtcggacctcgggctcctccacggctcgccgttggagttcaacgcggagccgacggacgcgcggtccatgtcgttcg

SEQ ID NO: 33052 - DNA, 488 bp, Oryza sativa
  Clone ID: uC-osflM202028a01b1
ttcttgcagaggaggacgaagcagcaggcggtggttgcagagcacggcgacctagcccgacctcgcaaccatggcaaggggtttgaagaagcatctgaagaggctcaatgcgcccaagcattggatgctcgacaagcttggtggagcttttgcccccaagccatcttctggtcctcacaagtccagggagtgcctgcctctgatcctcattatcaggaacaggctcaagtatgctctgacataccgtgaggctatttttatccttatgcaacgccatgtcttggttgatggcaaggtcaggactgacaagacctacccagctggtttcatggatgtcatttccatccccaagactggtgagaactaacaggctttgtacgacaccaagggaacgttatcgccttcaattttgtaaggatgaagatgctaagttcaagctttgcaggttcgggctgggcagtttgggcagaaggaatccctacctgaac

SEQ ID NO: 33053 - DNA, 408 bp, Oryza sativa
  Clone ID: uC-osflM202028a03b1
ttctttatgatgataagctgcgactgcgagatggtggtggaagagcactgggaatcaacctaaccagcagcagcagcagccacagcagtgagcttctttcaggccacagaaagagagagagagaggggaccaactgaaaagagagagaagctagaaggagaggagtccaaacttccaagacacccactactgctgctactgtgttcgtgttcctctcttggcctctctcttggatcgagttccttccttctttctttgcgagaaagaaagatgggattctgggagcgctaggttttcctgctcatctgattcttggttctacatccagttcttgggtggtgttttttttttccttttctccatgcgcttcttgtgtttgagaagaggccgggaatctcgagggaagta

SEQ ID NO: 33054 - DNA, 304 bp, Oryza sativa
  Clone ID: uC-osflM202028a04b1
ttcgttgtcgcagatccgatccaggaagagctcgtcgccgtcgctgccatggcgctctccgtggagaagacctcgtcggggagggagtacaaggtgaaggacctctcccaggcggacttcggccgcctcgagatcgagctcgccgaggtcgagatgccggggctcatggcgtgccgcgccgagttcggcccctgccagccgttcaagggcgcccggatctccgggtccctccacatgaccatccagaccgccgtcctcatcgagaccctcaccgcccttggcgccgagggccgctggtgctcct

SEQ ID NO: 33055 - DNA, 481 bp, Oryza sativa
  Clone ID: uC-osflM202028a05b1
ttagtacggcggacggcgacgagggcggcaagtaccagctgatcacggtcaccgtcaacgacggcaagctgtacatatgcaaggcgcaggccggcgacaagaggtggttcaagggcgccaggaagttcgtcgagagcgcagccagctccttcagcgtcgcatgatcgtcgaaatctcaatttcagcttctgtttaatccctagcgaattaaaatcaaatcaatcgagttcgttgctcatagagatgcagggcacgcaggtgtggggccggtgtgtgtttcttggagtgcccgtgagaattaagaacaagttagggagaggaggccgatccatcgatttcccctgcatgcaaggattgattttctgagcaccgtcgtgttaagcaatcctagtgattaatcatgtataattgtggatctatgaaataaaaaccatgctagacatgccactcatataatatggaggagctgctttatttaatt

SEQ ID NO: 33056 - DNA, 373 bp, Oryza sativa
  Clone ID: uC-osflM202028a08b1
tcgtttcgtcaccctcacgcagcgcgacggcgacgcgcaggcggcggcggcgttcgtcctgtcggtgtcgatcgccgacggcgcgctaacgatgcaggagtcccccgtcgccgggagcgacgcgtgcgtgcacgccactttccgggcctaccactccccctccggcgccagcgccatcgacgccgccaccggcaggcttcagggccgcgacgtggcgctcgagccgttcgaccggccgggcatggccgtcaccgacgcgctcagcgtcggccggccggggccggccacgcggttcaacgccgtcgccgggctggacggcctccccggcacggtggccctggagctcgccaccaggccgggatgcttcgtggca

SEQ ID NO: 33057 - DNA, 444 bp, Oryza sativa
  unsure (1)..(444): unsure at all n locations
  Clone ID: uC-osflM202028a09b1
tcgttaacgcgtacttacccacaagttaggtgcatgccatggcaccattcatggcgtgcgcctcgccaccggtactcacgctggccctgctcgcgtcgtgcggtgcccttctcgccacctccatgctcccggcgcgtgcgacggcgggcagttgcttggacgtcggcgacatggtgatgatggacaggttccgcgcttggcagggagctcacaaccggtcgtacccgagcgcagaagaggcgctgcagcggttcgatgtgtaccgccgcaacgcggagttcatcgacgccgtcaacctgcgcggcgacctcacttaccagctcgccgagaacgagttcgcagacctcaccgaggaggagttcctggncacgtacaccgggtactacgccggcgatggccccgtggacgactccgttatcacgacgggtgccggaaacgtcgacg

SEQ ID NO: 33058 - DNA, 432 bp, Oryza sativa
  unsure (1)..(432): unsure at all n locations
  Clone ID: uC-osflM202028a10b1
tcgttcgaggacctcgccgcgctggagaaggactacgaggaggtcggctccgagttcgacgatggtgacgagggtgatgagggtgacgagtactagagaggttcagggttcttgcctggtgccttggcaatgcttgattactgctgctatcctatgatctgtccgtgtgggcttctatctatcagtttgtgtgtctggttttgaaaaacatttgcttttcgattatgcagggtttgcttgtagctttcgctgctgtgacctgtgttgtttatgtgaaccttctttgtggcatctttaatatccaagttccgtggttttgtcgtnnnaaaaaannnnncttncnaaatacttttttaaattttantcccttnttccctttctcctttttattcgtccccccttttatttggncccaaatttttccctcccctt

SEQ ID NO: 33059 - DNA, 364 bp, Oryza sativa
  Clone ID: uC-osflM202028a12b1
ttcgccgcacttagccatgctcgcctcgccggtgctcgccggcgcgcgcgccttcgcggcgaccgtgtccgggagcctcggcatccccattccggccatctccgcgccctcgccctcgaaggcgcggcggggggcctttttcgtcgtcgttgcaaaggtcaaggtgtccactccccaggccgaccgcatcgcccgccatgtccgcctccgcaagaaggttagtggcaccacggagaggccaagactcagtgttttccgctcaaacaaacatttatatgctcaagtgattgacgatacaaagtcatgcactctggtttcagcttccacattgcacaaagtctctttcaaaggacttggaatactc

SEQ ID NO: 33060 - DNA, 285 bp, Oryza sativa
  unsure (1)..(285): unsure at all n locations
  Clone ID: uC-osflM202028b02b1
gtcgtacggcgcaaaaaggcaagcaaaggcgaacgcgccgcccgtgcgcctcccctcccatccacacgtttcgctctcctcctcttccgatccgtagcggcggcagcggcagcggcagcagcagcagccgccgacacgcggggggcggagcagagctcgcggaaccctacctcttgaggcttcttatctgcttcagccgagagggggggcgaggcggcgatggcggcggccgtgcgggacggagcggcggtggccggngtacaatggcggaggatgaccctgacg

SEQ ID NO: 33061 - DNA, 527 bp, Oryza sativa
  unsure (1)..(527): unsure at all n locations
  Clone ID: uC-osflM202028b04b1
tttgcttctactacatgaaaactgggcaatgtaaatttggaactacatgtaaattccatcatccggaattcggtggtgttccgatgacccctggaatatacccaccattacagtctccatctatagcttcccctcatccatatgcttctcttgcaaattggcaaatggggagaccacctgtagttcctggatcatatataccaggctcatacaccccaatgatgctctcatctggaatgatcccattgcaaggatggagcccttatccggcttcggtaaaccctgtagtgtcaggtggagctcaacaaaatgttcaagctggacctgtgtacggcatggggcaccatggatcttcctctacaattgctatgngtggtcctctacgttccatatgcttnctcaactggacaatcaagcaacaatcaacaagaacatggattccctgagcggccagggcagcctgattgtcaatattatatgagaacaggagattgcaattttgagctacatgtaaatatcataacccc

SEQ ID NO: 33062 - DNA, 356 bp, Oryza sativa
  Clone ID: uC-osflM202028b05b1
ttcattaaaccattttctcattgcagacatctctgcctgctgcctcctcttcttggtgttctgggtcagacagagaaagctgagttgttctttaggaattgggtattattttttttgaaagcgcggaattgggtattatgggtaactgctggtttaaagggaatccatactttaacagggtttcttccaatgcaacaaaatcagaatcacctaaaatgcagagcccatctgagagaaaagaaaaggatgacagcatgctgccgtcgaacgcgaaagaggtggaggaactgaaaaagggagtcggctcggaaccctctgatagcattcacatttgaggagctcaagaggataacaaa

SEQ ID NO: 33063 - DNA, 498 bp, Oryza sativa
  unsure (1)..(498): unsure at all n locations
  Clone ID: uC-osflM202028b06b1
tcgttgaacacacacacaaacacaaacagaaaaacacatcacattaagctagctagaagaggagagaaattaaagaagctaggagctaacgatcaggatggctgctggcatggtggcgacaatggtgctactgacgtgccttgctgcaggagggctggtcgtcggagctgaggaagacggtggcggcggcggtcttggccggatggggtcgccggactacggcgacgcgctggcgaaggccatcctgttcttcgagggacagcggtcggggcggctgccggcgaaccagcaagcgacgtggcgcggngactcggcgctcaccgatggccgtgaagaaaacgtgaacctgaccggcggctactacgacngccgcgacaacgntcaagttcgggtacccgatggcggtcacggtgaccctgctgggctggagcgccgtcgagtacggcgccgccgtcgcggcggcgggggagctcggcaccttcggcggcgatccggggg

SEQ ID NO: 33064 - DNA, 516 bp, Oryza sativa
  Clone ID: uC-osflM202028b09b1
tcgttggccgccgccaccatggccctctcgtccccggcgctggccggcaaggccgccgcgaaggtgttcggcgaggggcgcatcaccatgcgcaagtcggcggcgaagcccaagcccgccgcgtcggggagcccgtggtacggcgccgaccgcgtgctctacctcggcccgctctccggcgagccgccgagctacctgaccggcgagttccccggcgactacgggtgggacaccgcggggctctccgccgacccggagacgttcgccaagaaccgggagctggaaggtgatccactccaggtgggcgatgctcggcgcgctgggctgcgtgttcccggagctcctcgcccgcatcggcgtcaagttcggcgaggcggtgtggttcaaggcggtgtcgcagatcttcagcgagggcgggctcgactacctcggcaacccgagcctgatccacgcgcagagcatcctcgccatttgggcggtccaggtggtgctcatgggcgccggcgaggggtaccg

SEQ ID NO: 33065 - DNA, 511 bp, Oryza sativa
  unsure (1)..(511): unsure at all n locations
  Clone ID: uC-osflM202028b10b1
tcgtatagaacacaagtacaagaagctatcagaaatcagaaacgctagctagcagtaggaacaaacaatgaggtcgtccccgatcatcttcctgctcctggccgccgccgccgccatcgccgctccgtggcaggttgcgcacgccgcgggcaagtgcggcaagacgccggcggagaaggtggcgctgaagctggcgccgtgcgcgaaggcggcgcaggaccccggggcccggccgccggccgcgtgctgcgcggccgtgcgcgacatcggcacgcaccagagccacgcgtgcctgtgcgccgtgctgctgtcagcaccgtgaggcgctccggcgtaagccggaggtggccatcaccatccccaagcgctgcaaactcgccaaccgccccgtcggctacaagtgcggcgcttacacgctgcccagcctgcagggctgatgacgacgtacgacggnccttgttaggctctggcgccactaaaagctacctacagatcgcttacagcatactac

SEQ ID NO: 33066 - DNA, 301 bp, Oryza sativa
  unsure (1)..(301): unsure at all n locations
  Clone ID: uC-osflM202028c05b1
taggtcggcggacggcgacgagggcggcaagcaccagctgatcacggccaccgtcaacgacggcaagctgtacatctgcaaggcgcaggccggcgacaagaggtggttcaagggcgccaggaagttcgtcgagagcgcagccagctccttcagcgtcgcatgagcagcagaaaactctatctcagcttctctttaatccctagcgaattaaaatcaaatcaatcgagttcgttgctcagagagaagcagtgcacgcatgtgggtgtgcgaggtgnggttctttgattggacatgagaaatt

SEQ ID NO: 33067 - DNA, 454 bp, Oryza sativa
  unsure (1)..(454): unsure at all n locations
  Clone ID: uC-osflM202028c07b1
tcgttgaaacaaacccctctcactcccagatacctgctgctgccactagcccactaccatggatccttgcaagttccggccgtcgagctcgttcgacacgaagacgacgacgacgaacgcgggagctccggtgtggaacgacaacgaggcgctgacagtggggcccagggggccgatcctcctcgaggactaccacctgatcgagaaggtggcgcacttcgcccgggagcgcatcccggagcgcgtggtccacgcccgcggcgcctccgccaagggcttcttcgagtgcacccacgacgtcaccgacatacnctgccgccgacttcctccggtccccgggcgcccagacccccgtcatcgtccgcttctccaccgtcatccacgagcgccgcagcccggagacgatccgcgacccgcgcggttcgccgtcaagttctacacccgcgagggcaac

SEQ ID NO: 33068 - DNA, 345 bp, Oryza sativa
  unsure (1)..(345): unsure at all n locations
  Clone ID: uC-osflM202028c11b1
tgtacaaagtgcagtactttctggagcatcataatgggtttttctacatccttactaatgcacccttagaaggtactgaaacagcaaatggtggttactacctggccaggtgcagagctgaaaagtcagaaatggataaatggcaggttgttgcactccctggatcatattatacctttcaggatatggacatttttcatgaacaattagttctatttattcgaaaaagcggtcttcctcttatttgctccatcaatttgccaattgatgttgactttcaggagcanaaggaacttgatgatcttgatccatgggtttttccctgtaccgtcagacttatgcagc

SEQ ID NO: 33069 - DNA, 403 bp, Oryza sativa
  Clone ID: uC-osflM202028d02b1
tttagtctcaagagaaagcgggacaacccagctgcacgttgcgctgatgccggcaacacctctaaattgcataagcatgccgccgataactgtgatgttaggttgtatgatgatgaaggtcacaaggcacagatcaagtgccatttcaaaatgcagattatacagagttatcagaatttcatgactagtgctttacctaagcgaattctgcttcgtcaaggtggtgaatggaaagactttccaaagcaaattgtcaagcttgcccacagtgattttaggactaagaagacaatcacaggaaggtgaacaccagacccatctttttttgctggattttgcgcacatgacattcatagactcaaagacaggccttcagaggccaatagcttggattgatgagaat

SEQ ID NO: 33070 - DNA, 507 bp, Oryza sativa
  Clone ID: uC-osflM202028d04b1
tattcttcgcattcgtccccactccccagcggcaccgtatccgagccagcgcgacctcctcctcgagccagtggtcgcccgcccgcccgccgtcgctacctcctcctcgagccagcggctggcatagatccggttgtcgatgtggttgcagatcacggacgacgtcggccaccaggtggatgaggtcgagggaggcctggcggcgctgagcaacgatgtccaggtatggtgcttcttctccacctctctccctcatctcaggtcagtgccctctctccctcatctcgcttcttatcctgcttcttcaccttgacctttgacgacgaccaccactgcgatggggaccgggaggcttaaaagggggttttcggggccggaatcttcttttttggggcctcggtgtcgtcgacggaagcgtgaggaggccacggggcacaggatggagcacgcatgggctagcgagaccgcgaggtcgtcttaggtcgtcgtccccgtctcccccgagct

SEQ ID NO: 33071 - DNA, 537 bp, Oryza sativa
  Clone ID: uC-osflM202028d07b1
tcgtgagaagcctacctggaggatactgaatgttcctggccgccctccgcgatttgcctggggccacagtacctgtgttgtgggaggtacaaaggcgatagttcttggaggacaaactggagaggagtggacactaactgaactgcatgagctttctctggtaagctctttagtctgaggatggaagtcaagtccccagcaggcttccagcttcattgaagtgatgatgtatacagagagaagctattgttttcatttgaccgaagcctggacattttcaccgttgaagccacacagaaacacaattgaaatgtgcaagcaaaatgtttcctacactcaaccaaaaggatctggaattgtatagttggaagctctgatgcaatgcaacaagcatgctcttcaaaggccaaaatgatagtgatgatgctgtactgatccaatatttctgataaaatgttcgatcttttgttgaacatgcaaaactgttcgattagttgtacaccattttttttcttggcaatacattagtgtcattac

SEQ ID NO: 33072 - DNA, 390 bp, Oryza sativa
  unsure (1)..(390): unsure at all n locations
  Clone ID: uC-osflM202028d11b1
tagctttctctttttttttcccacgatgtggcgccatggcgagagatgtgtgatccttgctgtcgccgccgtggctcttgtcgcggcggcgacggcaacggcggcggcggccgttgggggtgagaggaggacgtacatcgtgcacatgtcgcggtcggcgaagccgaacgatttcgtggagcacggcgagtggtacgcggcgtcgctgcagtcggtgtccgacgcggccaccgtgctgtacacctacgacaccatcgtncatggctactcggcgcggctgacgcgcgcggaggccgaggcgctggagtcgcagccccgggtgctcctcgtaacccggaggtgcggtacgagctgcacacgacgcggacgcccggagttctggggctggac

SEQ ID NO: 33073 - DNA, 494 bp, Oryza sativa
  unsure (1)..(494): unsure at all n locations
  Clone ID: uC-osflM202028e04b1
tatgttgctggagcagtcttactaatgagacgtgacattgctatgcaaaagggtcttccaatagctggcgtcttcaggagctttgcagcagttggagttgatccagctataatgggtgttggtcctgctgttgccatccctgcggcagtgaaagctgctggtcttcaaatagatgatgttgaccttttcgagattaatgaggcctttgcatcacagtacgtatactgctgcaagaagttgggacttgatcctgcaaaagttaacgttaacggaggtgcaatggctcttgggcatccattgggtgctacaggtgcacggtctgtcagtacccttctcaacgaaatgaagcgacggggcaaagactgtcgatttggtgtgatttccatgtgcataggttctggcatggnggctgctgctgtctttgagcgtggggatgcaacggatgagctcactaatgctcggtgcatcccgacccataaccggctttcgaagga

SEQ ID NO: 33074 - DNA, 531 bp, Oryza sativa
  Clone ID: uC-osflM202028e06b1
tacattccaccaagaaaagtccactttacctcattcctaaccccaacccccgcctcgcccgcccgattccccgccgccgccgccgccgccgccgcggagctcgccggagaagcggcactcgcagaggagtggcccgccatggggccgccgcagcaggccaggggcggcggcatcgacatcgaggcgtgcgcgcgcccgatcgccgtcgaccaccgcatcaagctcccctactacttccgcatcgccgggaacctcctccgccaggctaagatatatcgagacgagaataatctcgtcgacctgtatgtcatcctcctgcgttactcgagcttggtttgcgagacgattccaaagcaccgtgactaccatacattcaagttgagagaagtggatttcttcaggcttgctccacataatcaatctaaactaatttgaagtgctcagtgggcttgagtcactgaagccaggtgtgcagcggcaaatcactgagcataacagagcaggaggagtgccatcgaatccatagtataa

SEQ ID NO: 33075 - DNA, 233 bp, Oryza sativa
  unsure (1)..(233): unsure at all n locations
  Clone ID: uC-osflM202028e07b1
anggagaaccaggaaacgacttaaataacagaacagtaaggtagaacaaagctccagactgaaacggccttcacatgggagggtccatatgagcacaactgggcacaacagccctcaaaagaccattcatacttatttggggggagaatgctgactgcaagcaactataagtgagaacgtggttgttgaggaacatggcgaccattattgatagatttgacctagcgaagtac

SEQ ID NO: 33076 - DNA, 446 bp, Oryza sativa
  unsure (1)..(446): unsure at all n locations
  Clone ID: uC-osflM202028e11b1
ttccccgtcacgagcaaggcgcgagcccggccgcgagcgtcgagcaagcagcgctccaccatcgtctcccctccgcccgccgttgtctcgatcccctctgctcgtcgcatgccgctgtaccaaacaaaccaccatctgtcaccgtctcttctcctccccgcttcaccaatcaatccaaaccctagagcaataccccttgctggaatcgctcgcaccctagagctccagttcccaccccagccacggcggatcaggggcagtctggtctgctgccgcagcgatatcgtgcgccccggatttgagagttccaatgccgatttcgtacgtggtcgtggtccctgggtggattattgnacagtgagattcttctctactgactttgatttggtttctttgattntgcttcccgatgatgtggatgtggttcgtgttcaggaacctttgcg

SEQ ID NO: 33077 - DNA, 360 bp, Oryza sativa
  Clone ID: uC-osflM202028f02b1
tcgtttcgctctcgtctccgctctgctctggtctgctctgctgcgagggtgggtgttgcttgtaccgggcggggatggaggcggcgacgatggcgtggacggcggcgggggtggggatggcgctggtgtactggttcgtgtgggtgatgggagcggcggaggtgaaggggaagcgggcggtggatctcaagatgggatccatcacgaacgacaaggtgaaggacaagtacacgcagtactggtcgttcttccgccgccccaaggagacggcgaccaccgaggcctccgccgagaaggtgccggccttcgtcgacaccttctacaacctcgtcaccgacatctacgagtggggttgggggt

SEQ ID NO: 33078 - DNA, 572 bp, Oryza sativa
  Clone ID: uC-osflM202028f09b1
tcgtcacttcctcaaatcctccaacacctcgatccattcgcagtagctgcgaggtgtctgacatggcgtcggggcagaaggtggtgaagccgatggaggtgtcggtggaggccgggaacgccggggaggcggcgtggctggacgacgacgggcgggcgcggcggacgggcacgttctggacggcgagcgcgcacatcatcaccgccgtcatcggctccggcgtgctgtcgctggcgtgggcgatcgcgcagctgggctgggtggccggccccgccgtgatgctcctcttcgccttcgtcatctactacacctgcaccctcctcgccgagtgctaccgcaccggcgaccctgccaccggcaagcgcaactacacctacatggacgccgtgcgcgccaacctcggcggcgccaaggtcaccttctgcggcgtcatccagtacgccaacctcgtcggcgtcgccatcggctacaccatcgcgtcgtccatcagcatgcgcgccataggagggccggcttgtttcaccacaacggccatggtgacccgtgccgcagcttcagcaacccttacatgg

SEQ ID NO: 33079 - DNA, 371 bp, Oryza sativa
  Clone ID: uC-osflM202028g06b1
tcctgtatcgggagggagggagagagtacgtgcgggcgtccggaggtctcagcgcacgcccgcggccgggccgtcgcgccgatcgcgatggggtcgtggcggcgcaaggcctacggcgccctcaaggactccaccaaggtcggcctcgccaaggtcaacagcgacttcaaggagttggatattgcaattgtgaaggccaccaaccatgtagaatgccctcccaaggacaggcacgttagaaaaatattcgtggcgacctccattaaccgccctcgagcggacgttcaatactgcatctatgccttgtcaaggagattgtccaagacaaagaattggacagttgcattgaagacattgataggtggtacata

SEQ ID NO: 33080 - DNA, 440 bp, Oryza sativa
  Clone ID: uC-osflM202028g08b1
tcgttcctcttcttcctccgccttcgccgccgccgccgccgccgccgattactcgcttccgcctccgcctcaaccccgttcgtccccaaccaaccaaccgcagtccaatccaagcgaatactaagctcacttgaattcggttggtgcctcgtcgtcattctgccaccacttgagagttccttcatacacacaccactcgcagtctcagcagcagcagcagcagcgcagtcatccctgctgaaaatggccagcaagcatggacatatctagaagatatgcaaaacagcattgatcttgttttgacagaggttgttatgcctggtgtatctggaatttctctattgagtaggatcatgaaccacaatatttgcaagaatattccagtgattatgatgtcttcaaatgatgctatgggtacagtttttaagtgtttgtcaaag

SEQ ID NO: 33081 - DNA, 456 bp, Oryza sativa
  Clone ID: uC-osflM202028g11b1
ttccagatctggacagtagtctatgtaaaacaatggaggaccagtttaactctgaagaaaacacaccatttgcttggtgtcaattattggaggaggatttgaaaaatgcaactattgatcctagtgaaatctccgagacatttgatagctgtgcatattatctaagtgagaacaccaaatctgctctccagtcatcagcatatgtaaatttgcactgcaaggactatatcaagttcacaaaagatatttcttctcttagtcagcgagtactgctgtctggtccggcaggaaccgatatctaccaacaatatctggttaaggcacttgcaaaacactttggtgctaggttgctcaccatagactcttacatgctatttggtgggaagactaccaaggaatcagattcatacaaaagggtgatagagtgcggacattgattcgttacagcaacaggta

SEQ ID NO: 33082 - DNA, 303 bp, Oryza sativa
  unsure (1)..(303): unsure at all n locations
  Clone ID: uC-osflM202028h05b1
gtggtgtcactggcgactcacacagtcacacacacacacactctctcgtccttgctgctagctatctatcgctgcttgccccggcccatgcatgtgagctcacttattatagatcgatcgccatagcctagcttggtggtggtggtggtgatggaggcggngacgtggcnggtggctcgtggcggtcgcggccgcatacattgcgtggatctggaggaagaagggcgggctgagccggcacaggacgctgccgaaggaggtgagcctgccggggctggcgcttctcgctgaggacagcacgag

SEQ ID NO: 33083 - DNA, 472 bp, Oryza sativa
  Clone ID: uC-osflM202028h06b1
ttgtttcctatctccgatatgcatctggtgccacacgaaagactgttcaaacgatgtgcagaaactgtcatcaaatcactaggtttagatgtaaagaaggttgacaagtgcatgggagatccaaatgctgattcggaccaccccttgcttaaaatggagcaggatgcacagattgggaaaggatcaagaggagatgttactatattgcctactcttgttgtgaacaatcggcaataccgaggaaagcttgaaaggaaagctgtcctcaaagctatatgtgctggctttgaagaaactaccgagccaaatgtttgtcttagtgatgaaatggaaactaatgagtgcctgaatgacaacgggggttgctggcaagacaaagctgctaatgtaacagcttgcagggacactttccgtggtagagtgtgtgaatgccctacattcaatggtgtgcagtttaaaggcgatggctaca

SEQ ID NO: 33084 - DNA, 304 bp, Oryza sativa
  Clone ID: uC-osflM202028h09b1
tcgttgcaccccaagaccaggaagatcttgcagcttctgcggttgaggcagatcttcaatggtgtattcctcaaggttaacaaggcaaccattaacatgctgcgcagggttgagccatatgttgcatatgggtacccaaacctgaagagtgtcagggaattgatctacaagaggggttacggaaagctcaacaagcagaggattcctcttcagaacaacaaagtcattgaggagggcttggggaagcatgacatcatctgcattgaggatctcgtccacgagatcatgactgtcggtccacact

SEQ ID NO: 33085 - DNA, 198 bp, Oryza sativa
  Clone ID: uC-osflM202028h12b1
tcgtgtagactcaatggggctgaagagaacggacttttcgttgtcgatataggaatgctaggcgccgcagaaccacgcatgacagtttatgctgatctgcctatgacggtcgataatggtgtgaacgcaccaaaggttatgctgaggcacataggttcatagaagaacgaggccactagatgctacatggcaacacac

SEQ ID NO: 33086 - DNA, 57 bp, Oryza sativa
  Clone ID: uC-osflM202035a02a1
ataattatatatatttttaaaaaaatataaaaaatgaataacataaaagatgaaaaa

SEQ ID NO: 33087 - DNA, 486 bp, Oryza sativa
  Clone ID: uC-osflM202035a03a1
aaaagtgaattgatgccattttatttgttggagaattgagacttgagagtactattacattcagtagaacagttacaaaattactgaattgcatacagcctgacagaagattattcttcctagttggaactgtaggattaatacgttgtggtagaggaaaatgtgcagtacctgagccaaatgaacaggactggcttgctctatgtacaaaccaggatggaagggtaactggttagttaatttaaacaattaaaagaaaacgaactccaataatgaaaggcgttgatggtgaagtaggtcagccgcctgaatgacatgctggtaatgttgtaaattgcccatttttgaaagcatgaatgaactgctggggtaaggaatgctcggcccaatcgccgtcgctgtttgcatctggaacaagagcattgatttcactagatttagcagttggtatagatgtctttaaagattccttgcttaaataaagtt

SEQ ID NO: 33088 - DNA, 520 bp, Oryza sativa
  Clone ID: uC-osflM202035a04a1
cgacgatgcatcggcctacgtcagcttgtatcctcctttgttggccgccctccttttttttttttgttgtatcaatcatatttatcacgaatacgaccgatttaatgaaaccaaattcactatttataccggaaaaaactctggcttgattttcttgccttcttacatgggcgaagcagaacaaatcggcatcctagggtaatacctggggctgagcccttttatcaaaccaatacatcaaatttgtcattccgatcttctggaggtgatttatgcaatgctgaggatgacaacatgacgttgcttttggtcacctgcccatgcctggcaatggcaatcctttgatggagaagaatgggaatgtgcaggccttttttcggaacctataacatgctaatttgaaccggttgttgtaacacaaggggcataatacgcataagtgtttgccactacttgtcgctgcagtagttggattggttttctgaaactctctcattgcttgattctgtactgggaataa

SEQ ID NO: 33089 - DNA, 149 bp, Oryza sativa
  Clone ID: uC-osflM202035a05a1
aataagctggctgtatagtggtagtatcattcaacgaagatacggtggtgaaccgaagcaaacgttgtttgtacatgaattttcaactccagtgcactctgaatttcaggaaatcgttacagagagataatcacgttcggttgaaattc

SEQ ID NO: 33090 - DNA, 312 bp, Oryza sativa
  Clone ID: uC-osflM202035a06a1
aggtccaaaatatcagtacattaccaaatcatttggtacatccatcaagatcgtagtactgatccacatgcacgcgcgcttaactccacgcatctcgctcagcgaatccatcaaaccatctagtaccaccactattcagcaattaacctggagatgtacaggattaaacgccacattgcattgagcatatgaatctggggagacctgcacaaatcccagcatttaacacaagaagccgtagcatataccgtaagccaatcaaaaacgacgggctgcaagtcccaaagacacatcacaggtgaaacagcattc

SEQ ID NO: 33091 - DNA, 280 bp, Oryza sativa
  Clone ID: uC-osflM202035a07a1
aaacagggctaaaagcccaaacccccgggggtttatttaatcatcaatggaaatttttttacatatgccccccgtaattttgggaagaacgccttaccaaataaatccctggggagttttaaacttcaacaaaggggacccccttaaaggggaaaagggataaacatgaccttgtattgccgggctggccgttgggggagaccccttaataatggcggcgcttgggcttgatgaaggacccggtggggggggcccccaaaaaataaacacgcttgtttcg

SEQ ID NO: 33092 - DNA, 72 bp, Oryza sativa
  Clone ID: uC-osflM202035a08a1
tttttttttttttttttatgtttttttttctagagagatgtgaatcacactctgctgctcactgggggggtc

SEQ ID NO: 33093 - DNA, 364 bp, Oryza sativa
  Clone ID: uC-osflM202035a09a1
agcaagggatccccgcattccacaacaggcgaaggggaataataaggtttaacatccaaggttaaaccgaaccgaaaatagagttttaaatgaccgacatagggcccaaagcgggcaaattttaacgggcaatgcaacaaccgaaatgaccggggccaaaacttaacgaggaccaaaagggccagatttctcaaatgcaaatttggaaagccccccttgaacgagggttatttctttttggggggagccttgggcaccttggccccggggggggccctcttttccacgttcttgatgaccccaacaaccaccggttggcttatggcccccccgggaaaaccacccaaagggggggccccaaaaa

SEQ ID NO: 33094 - DNA, 380 bp, Oryza sativa
  Clone ID: uC-osflM202035a10a1
aatactcccaactcaatcaactcataataacactccatagaggaaaattaacttgcttctagtacaggaaaactaacttgggccgcctgcctcttcgatgtagctaggattaattgaagttacaagtaattgatgatgtatacaatatagtacgatcgagtttttatacatatatatagggaattaatatatggaagaaataattagcagcaagattatttgagaagaaacaagataagtaataatgaagtggatcgagtagctagctagctagctagcgtgccatgtcgggcttgggggagtagatgcttccggcgtgctgctccgatacggtggacatctcccaggtgagcttcagggcggtggcgtcctgcggcggc

SEQ ID NO: 33095 - DNA, 490 bp, Oryza sativa
  Clone ID: uC-osflM202035b01a1
acgacaaaccacgaacttggatattaaagatgccacaaagaaggttcacataaacaacacaggtcacagcagcgaaagctacaagcaaaccctgcataatcgaaaagcaaatgtttttcaaaaccagacacacaaactgatagatagaagcccacacggacagatcataggatagcagcagtaatcaagcattgccaaggcaccaggcaagaaccctgaacctctctagtactcgtcaccctcatcaccctcgtcaccatcgtcgaactcggagccgacctcctggtagtccttctccagcgcggcgaggtcctcgcgggcctcggagaactccccctcctccatgccctcgccgacgtaccagtggacgaaggcgcgcttggagtacatgaggtcgaacttgatgtcgatgcgggagaacaccttgacgacgctggtggagttggagatcatgcacacggccctctgcaccttggccaggtctcccccg

SEQ ID NO: 33096 - DNA, 479 bp, Oryza sativa
  Clone ID: uC-osflM202035b02a1
aagggaattataacattttgttttcttgctgattgttgaacagatatgtaaccaaatatgttcatatgatattttgccgggacatgacttgtttgcccactcacaaggagaaaatagaacaagaagcaaagtcaagtaggtaaaagacatgtactaattttgttattccttatgccgaagcaatattggatcaaaaatattctccacaatgtcggggagcttgattgattatatggaatggggatatgacctctctttgggaactttgcatcctttcgttcaaaggtcctcggggccattgatatccttgttctcgatcactgctccatctgggatttccagtttgacaccaggttgggctgtgatggtcaccttgcccttcaatgtgatgctagagccaaaccaaacattaccggaaacctttaaggtgtcaagctcaacaatgctggggattgacttgaagcgaccaaggaaacacc

SEQ ID NO: 33097 - DNA, 232 bp, Oryza sativa
  Clone ID: uC-osflM202035b03a1
ccacccaacgaggcccattgtccttttttaaaaaaccaaccagataacatggtttcccccaattggaacgaaccaatgaaaatttgggccccgcggaagggggaaaacgccccggtgttacacccagcctgatagaaagcaagggccctcacccccgtggttcggcggaaacccacccttttctggcgggggacaaattgcggggggctagccccattccctttgaccggcg

SEQ ID NO: 33098 - DNA, 326 bp, Oryza sativa
  Clone ID: uC-osflM202035b04a1
gggaacacccatattataatgggggggggggccaaaaaaaccacaaagggggcggggaattaaaaaaaaccgcgggaacccgggggagggattttttatttcccggtcccccggtaaaaaaaagggggggaaattaactttatagggcaaaaaaaatttgcggcactttttaaggggggcccccccaaaaagggccggccctttggcacccttaaaaccccctttcggcccgggggggaaaaaactcggatggggtggggggggtatttttccccggagaacccccccccctagggggccttttacgggaaaaaaaaaggggattt

SEQ ID NO: 33099 - DNA, 411 bp, Oryza sativa
  Clone ID: uC-osflM202035b05a1
acaaaactgtactgtatttttcctcttgaggaaataattaagtaggcaatattgtacactggataacatatcatagagcattaagtttgtctctctaagacggatcatgcttcgagcatctactacttctgcacaatgtgcttgtgacgaacttattgtttaaccatggaccatggagatgaaacgtactagctggggagctgaagtgaccgtgctctctacgccgagaggatctgctcacggcgagccttgttgagcgcgacgagcttgtccctcggcggcaggaccgccttcacggcgtcgacggcgaggacccggtcgaaccaggccttcatcaggggcagcgccttgtcggtgacgacttcgacgccgcaggccttcttgatgaccggcagccagtaggcgaaccac

SEQ ID NO: 33100 - DNA, 381 bp, Oryza sativa
  Clone ID: uC-osflM202035b06a1
gccgcccttcttttttttttttagcggcgtcaaaggaattttgtcagggaaatcacatttgttgttacattaccaaactccaatggaattcgaccagaccacgttggaaagaaatacaaacagttattagccaaaaacggcatgaagaaatgggatcaaacaaaatatggcagaacgtacacgaggtgatccagaacatgcttgcggcggcggtccaggaaagaggagaggaaaattaaaccacaatccccatgcatgcatgcacggtggctagaaaaatgcatagcatagagatctactatgtactgcgtgtgtctcttattcgtctccgtttaatttgttgctgactaattgaactgtggcatcgacgacgatgatggc

SEQ ID NO: 33101 - DNA, 477 bp, Oryza sativa
  Clone ID: uC-osflM202035b07a1
gtccatcaagagctcagatttttctttcatttatgtaactagcgccagtgtgtactgtgaaccaatcaccataagctgcataattctcgcatacacaccaaaaaaaaagagggaaatttgggtcaccaccaacgaacgcagtgatgcaactgcagctaaaagaataggtgggggtcatggaaatatcttgcaaaattagctcgctttgagtttgggcaattgttggacaccattatgaatcatatgttggccggacgggaaaagaaagatgatgtaaaagaggtctctcctatcaggcagttgctgccatgggcaccgctctgtagcacgcacgctttgctgtacggacaatatcgtcaacctgtgggacagccatcctttcaagattggcagcatagggcatgggtacatcaggtccagcaattctttcaactggtgcatcaagatattcaaagctttcctcaacaacagacatgc

SEQ ID NO: 33102 - DNA, 521 bp, Oryza sativa
  Clone ID: uC-osflM202035b08a1
catacatccaaacttttatgttactttattatactatatatatatatatgagttttctcgagcaaattgaataatcagcgagacttgtagtgcagtgcaggttaccaccatccattccattcatctcatctcacaaattaagaaacaaagaaagaaaccgagcataggaggtctaactaacaaacaatcaagccatcaatgaccatggtctgaatctttgtttctttcttggaagcttgacaagtaaaaggcaagcccttttttctttttcttcagttcttgaggtcagggagcagcaggccactggcgttcatgcttgtacatccactgccagttctccggcctcacctccccgcccagagccctcaccactgacccaccgttgcacgcccctaccttgcagcactcctccaatgccagccctttcaccaacccgtacaggaacccgctcgcaaacagatcccccgcccccgtcgcgtccaccgcattactctccccggttgccgccacttgaaccacct

SEQ ID NO: 33103 - DNA, 293 bp, Oryza sativa
  Clone ID: uC-osflM202035b09a1
gacgccgacgtcctcccgccaccgaagatcgatcgcgccgtcttcaatgagagcgccggctcccgtaagcagaccttctcccgccaccgcgtcgccaccaacctctcccacagcctgaccccggccaccgcttccgccgccgccgcccccgcccccgcccccgccgacgaggactccgagaaccgcctcatcgcgttccaccttcagcgcctcttcgcgggtcgaggacccctcattcgcatccccgccccagattgcaccggcaacccccagccgcaaaaccctaatcacgc

SEQ ID NO: 33104 - DNA, 405 bp, Oryza sativa
  Clone ID: uC-osflM202035b10a1
gccagaattctatgtttatctgcattgaaggataatgggtcattacatctcacatctaattccacttccgatgccaatagcatggttgcttctacgttgttctcaacacaattttgaaaaaataacaaaatatctcaacaaggtaaaacagatgcctggacacaaagaagtaaatatctacagaactcaatcacaggtattggccaaactctgtttgtagcaacaacattcatatgtatcatcctgtatctcacgaagttcaagcatttcacctacttcatcacggttgctatgaagttctccactgcatctctatctgaatctgaccatttttggaatcaatgaggtggtacttctcattgatccgcttgttgctgatcacatctgcgaggcttatatcaatgt

SEQ ID NO: 33105 - DNA, 331 bp, Oryza sativa
  Clone ID: uC-osflM202035b11a1
ttttttgtttttttttttttttttttttttttttttacatttgttagttacattttttttttttttttggtattggactgaccacgtaagaacgagtagcaaaaaggaatccgcaaaaagctttttgaagaaaaaccaacaatcaaaatctgaaaacccccacattaaggaatagggaaaaaagcacatgcccatttccgtgggggtgacaagaaaacgaaaaagaccaaacccccacaaggtagtttggcagctggggggggggaaaaccgggattggccctgagccacccagacggggcggaaagaacgcccccccagaggggggaagc

SEQ ID NO: 33106 - DNA, 355 bp, Oryza sativa
  Clone ID: uC-osflM202035b12a1
gacagggaaaacgaagcatttttatttttatttttctcacagggccttcaaccaatgtacactggtcaagttaaaggactgatctgatcagtctgctagttcaagttgtgtcctattcctccccaacaagcggaggttacattctgattctgggtggtgttttgccacccatcccagactgttcatcttcactgtaaaatggtcaaatacaatgaccagctgtgatagcatacacatggccaacgcgcgaatctaagtcacaaatccttgtttccgtttgataaatggcgaaccatatatccccacatccctgcctggcagtgctcagaaagttaacatctctcctaagttctcc

SEQ ID NO: 33107 - DNA, 369 bp, Oryza sativa
  Clone ID: uC-osflM202035c01a1
ggggatggcaacactttatttaatattaccacacattctgcgtgcaatgcacaagcttatgaaacggcgcttcactcaagtaagttttacgcgcaaattaaacatcacgaaagcatatgacacaacacgctacgcatagatcgacaggtcagctcattccaaatacacgcgatgtagaagaacaggagcaagcaacgcgtctgatgaaacacttctgatgaaatcttgggcaacgctcttccattttgaaccagctattttgaaccaggaactgtatttgaacagacgaaaacgatttactcggatttccaagacgacaagggaggggtctcagagtcctgccaagtagtgttagccctcattagagga

SEQ ID NO: 33108 - DNA, 199 bp, Oryza sativa
  Clone ID: uC-osflM202035c02a1
ttttttttttttttttttttttttttttattttttttttttttttttaatgttaatttattttttctttttattctttttttttatttttttttttttttttttttttttttttttttttttttttttttttttttttattaataaataattaagttaagaaaacaacaattgaaaaaaaaaagcaaaataataagaat

SEQ ID NO: 33109 - DNA, 500 bp, Oryza sativa
  Clone ID: uC-osflM202035c03a1
agcataacagtaacttcattgcaaaaactgcaaaagtagcagattacaccatatagtcacgagcgcgtccagcgtgctcaatttcaagcagacactagaattcagaacttgcgaatatagttgcaaaaagcagacaatagacaaccagtacgaccttggcaacagcatgccttttaagttcgataacttcttgacacattactatcatgatgatgtgactcagtaatcctttcgccttaatcccttccagcataggatgaggctggcccacgcccatcaatttctggatagctgctttcgaagtgttcctgcgtaagtagagcgaatcagactcgttgcagctgcggcgtccttccctgggccagcacagtcatgtgattggctgattgctaatcagagttttcatacaatcccttattgtcagaaagctcattaaatgaccggatatctagctggtaacgcaagataccaccaatgccaccgaattctctacaaaactg

SEQ ID NO: 33110 - DNA, 529 bp, Oryza sativa
  Clone ID: uC-osflM202035c04a1
gagtataaaagttttgctcgtaattagttgtttcgtctattttatttctacagctttttattcgtaacaagacagtaataactcatcaaccaataaaacaccaagtatatactccctccatactcgtaaagaaagtcgttttggacagagatatggtctccaacacacaactttaacttattatttctataaaaatatttattgaaaagtgatatatgtatacttttacgaaagtatttctcaagacaaatctattcatatatttttttacattttcaaagtcaacaacttgagagttattcataatttatatttttaaggtttgacttaaacattatcctaaacgtctttctttacgagtacgggggagtataatactatatccagcaaccaatctgagaaagtaaaaagaagaagctagtactaaaacactagaatagctagttggattaatatccatcatcagctgcattatttatttatttggctcagatcttataaatcatcccgacctgaaggtcttggcatg

SEQ ID NO: 33111 - DNA, 382 bp, Oryza sativa
  Clone ID: uC-osflM202035c05a1
aaaataaatagaagaaaataattaaaaaaatccgaagagggagagagaggaaaataattagatgaagaatacaagtgaggggaatgtagcggagggaacgatgattaacttacaactatataatcagacgacaattactccccctatctccatttcatattataagttgtttgactttttctagtcaatttttatttagtttaaacaaatttataaaaaaaatatagcaacatataaaatattaaattagtctaattaaatccaatatgaaatatattctgataatatgttcttttcaatattgaaaatactactatattttttaaaaaactttggtcaaactttgaaaaaattggctttaaaaaaaaacaaatgacttttg

SEQ ID NO: 33112 - DNA, 409 bp, Oryza sativa
  Clone ID: uC-osflM202035c07a1
ggcagaaagtaaatattttaacttaataacatccagagtacataacccattctcatgtcatcatgctaaagttgtttaatcataaaaaaacagctatgcgtctgcaaacataacataggagctctcagggaacaaaaaagggtagttctttcagtgtagaaccagcaacaaagaaagacttgctctaagctgaggcacccttgcccttcttcctctggagcttcttcatgtagaattccagctccttgccctcaaggatatagccatctgctcggccacactgcccagggcgggaagaaatgcaggccagcaacctcccactgccaaactgttcttcgatgtgggcgtcaagtgtgcgtccctgttggcgcttctcaagcttcctgacaacatggttgctttttttcgc

SEQ ID NO: 33113 - DNA, 502 bp, Oryza sativa
  Clone ID: uC-osflM202035c08a1
gtgtgaaggatcaaccagccggggttggtggtatcagacggtcacgcgctgttcatgctgaagctgttctgcctgttcgcgcgcacgcccacgccggcgccgacgttggcgccgacgttggcaccgacgttggcgccgatgcccgcaccagcgccagcgccggcgccagcgccgacgttggcaccgacgttggcaccgatgccggcgcgagcgccgactcccgcaccagcgccagcaccagcaccagcaccagcgccgacgccggcgccgacgttggcaccgacgttagctccgatgccagcgcgagctccagcgccgactcccgcaccagcgccagcgccagcaccagcaccagcgccgacgccagcgccgacgttcgcaccgacgttagcaccgatgccggcgcgagcgccagcgccgactcctgcgccagcgccagcgccagcaccagcgccgacgcccgtaccagcgccagcaccgacgttagcaccgatgccaacgc

SEQ ID NO: 33114 - DNA, 503 bp, Oryza sativa
  Clone ID: uC-osflM202035c09a1
acagaaagtagccatggccagtctttgatcaaaggagatgatgaacaatgttttaaaaaccatggcagatgaaattactcagatactatatctcttcttgccaacagaacatctctctttctgatacggtgaccacatagcataatccagctaaaacttattctgatactttgcaactgaatcatcaaccttgagcaactgggcagaacccatgcataattgcagcagaccaaactttgtccatatcaagcaccttgtcaccacattcatgctcattccatccctccaacgcatgaagaattcccgcgattcgccatgcgctcataaccctccttggcagccaattctcgcatgaatgcacattctgcagcgtttttggtacagccattgcaggagttgtcgagtagctgcagctgtccttgcgtaccatctttggaggaaattgtgagtttgggataaacagagttcctttctgtgcttctgattgttcagcagaatctaga

SEQ ID NO: 33115 - DNA, 407 bp, Oryza sativa
  Clone ID: uC-osflM202035c10a1
cacagcaaatgaatgccaatgatgcaaggatccagctacagctgacctttggtcttgactaaccaggttgttgctaatacatgaaacaaattctaatggaagttacacaggcatagataaaccaccaggctataaaccatctgcctgcagtgcgtctgttcaaacatcaaagtgaaagtacaacctggcagcaaaacgttttgaagctaattcaagaaagaaaaaagatagttcaagtttaacctaaacatgactaatcgtcctgctcaaccttcaggctctgaagcttcgagtccagctcaccgtcatcctcttcctcctcttcctcttcctcatcatcttcagcctccccctcagggtcgttctcatctagtggaccaagcaccttcacagagttctcaccactc

SEQ ID NO: 33116 - DNA, 372 bp, Oryza sativa
  Clone ID: uC-osflM202035c11a1
atatgaatagtttgtactttcatacttgttgtaaggtaccgaattttacaggaaatatgggaagtttgaaaccaatcaagaatagtaacctgaatagtgtcaaaccaaggaaaccagaacagaaacccaactagctatattaacctataatacatcttaagagcaagtggaaaatcagacaatctaaacaatctgaactctgaagaagactaaagaacaagattaatcaacaaataccgtgggcaagactgaagaactgccttccataggtccataggcaaaaggcgccgtcgagctccaaaactctggacagcacctccaaaagaaaaatgctgtattgaagctcaaggagcaaatttaccgtctcctcac

SEQ ID NO: 33117 - DNA, 507 bp, Oryza sativa
  Clone ID: uC-osflM202035c12a1
tgtagtgccaccggatgaggccctgctggaactccagccccgacgcgcgcgcgaacccgagcgcggcgtagaaccccgagtcgggaaccgggatgaccacgtcggcgcccgcggcgggggactcctccgcgagcgcgcggccgaaggcggtgcggcgctcgtggacggcgtgcgagaagacgacggagtttgggagggcgaagtagatgtgctcgaagacgcaggagcggcgggggcggtgcgggacgaggcacgctgaggagacggacatgtcgcggcggtcgacgacgaccacctccccgggctccacctcgcgctcgtaggtcgcctcgatgaggtccagcgcgcaagtctccgacgcgaacgcgacggtgccgttgcggcggcggccgagcaccagcgggcggaacccgtgcggttcgcgcacggcgaacatcttatcggccgtcaggttcagcagcgagtaggcccccgcgaggcgctcgcacgcgtcgcagatgcgggaca

SEQ ID NO: 33118 - DNA, 473 bp, Oryza sativa
  Clone ID: uC-osflM202035d01a1
actagaaagacatacttgtacatgcaagcagagcaaggcgaccatatgctcttgcagatcgacagtgcaaacaaaaacaggcaccacaaaggcaaaaatataacagaaccgggtgagccctgtggctctttcttactagccttctgctattttaactggacaagtaattaaccatcaagcacgctccaagcttcaccagcggtatagctcttttccttgtcacacgctctcaggatctgcctcttgttgaagcaatggttctgtgaattccctggtatcgctgaccaagaccattcgcatctgatgtcctcatgatcctcaacctcttcacagagctgacaaacatttcccaaggaacatcttcaacgagcattcagtcaccatccctgtcctcgtaggtgagctggtattcggcagagttggctagtagtttcagcgagtttgtattatgagaagcgcaaaggccaattgac

SEQ ID NO: 33119 - DNA, 496 bp, Oryza sativa
  Clone ID: uC-osflM202035d02a1
caaggggtattttgaccttttcccatgtaaatacgatgataattccaaatctgacaatgatcatttatatggacaagtgattttcattgcaccggaaggccataatacaaaatctggggcaactctaatgtaattaattgggtgaggttccgaaaagctctataccagattgatgttataacgccaaaacttgagatttgtgatcaatcccgttgaatataaatgttcccagcaaaggcacaaactgtttggtgaccagcttaattacttcttgggatgctactccgccaatgaaggcagccacgggatgaatctctgcacccccaaaccggcacatttcagtaatcaggtcttcagacaaaggtgccccgttcatacccatctcactcattactgaaacagcagctgtcttcagcctaggcacatcctcatcaatctcactttcaaagattccagggcatctgttatagttggctgcaagtcgatcaacagcacg

SEQ ID NO: 33120 - DNA, 514 bp, Oryza sativa
  Clone ID: uC-osflM202035d03a1
aatgcaactccctctcggagggacctcatttgatatccatttctgtcgttcgcttgcacaatgattcaggcagcccaccaaaaatacacagatttagcatagaactcagcagtatccttcctatgtagtacagtactcctatgtgccaacaaattcagcatagaattcagagaaccatatggatgtagtaatcacactaagcggttcatgtggtatgatgttctccaaatgtcaaaatgccaaggacatctgcatcgctctctcttgagtgttttaccagtatcataatatgtcgtaccaatgatggaacaatgtaggcatctgcaatctagtcaaagagaaacctgggaaatctcaccaacgtaaagggctcccccttgctgcaatattttttaccgtgactttggggaacactgtaatatggaacagatatctttaacgataaccctgtcatgtagaatacaaaggcctttggaaggttggatttactctgcagaatcagagcctttttcag

SEQ ID NO: 33121 - DNA, 253 bp, Oryza sativa
  Clone ID: uC-osflM202035d04a1
ggaccccaaaggttccaattgatggaaagggaattctaaaaagcggcgacccgaattaaaattaaaaaccacccccaagagggatcgaaattccaactccaccgaatggaacccaagaactggggctattccacccaaaccttgggggagcttaatgttaccaacacggcccgaacctcctaaaagggtcttaaaccccccccacctgagtgtttttttagggctcctaacatactaaaaacaccggttcctg

SEQ ID NO: 33122 - DNA, 73 bp, Oryza sativa
  Clone ID: uC-osflM202035d05a1
tttttggttgttttttcttttttcttcccttttttttctctccaccctccttgttgtgaaacccacttttcat

SEQ ID NO: 33123 - DNA, 391 bp, Oryza sativa
  Clone ID: uC-osflM202035d06a1
gacttgcaacaaaaaaaatagggtagcattgattcaaggtatgtatgcttttaaggaacacaaagatgtgagtattcctcagtacaggtgatgccaaaacctgagctctaacagccttgctgtccaaaaatttattatgtatcaagcatcaaactttcccgggggcaaaaaagacctacttcacctgattaatgagttcctctcatcaaaaggatgacacaagaatcatccactaaaattaagatttaggtgctaaactcaagtaattgatacaattccagccacaacaaagatggatcttcaggaatacatcgccattatctctgcataagaatcaagcactggcttgcaatgctttctttgctgcaccgggcgcgggcgtaacaccacc

SEQ ID NO: 33124 - DNA, 405 bp, Oryza sativa
  Clone ID: uC-osflM202035d07a1
agggtaaccgggagacgggattctgaaatgccgtaaattaaattggagctaacaatgtaatttacatttgatctttctggtctacaggtacaacaacatgcagaggcacaggctgcagcagtcacatacaatgctgtagacttgatacatgttcagttaacgcccgtttacagaagcaatctgtgcatccgggccttacagtaagtttcacaattgtgtcccaagctaccaaattttgtcaccccatgttccaatcctttgggtatacaacttgagtggaggagatgggtggcgttttcgttaggtttcagaatacagaatgagcaattggagaggatcaatttggcaacttgatgaataacaacaggggaataataatctctggccttgctacccaagaatgtc

SEQ ID NO: 33125 - DNA, 463 bp, Oryza sativa
  Clone ID: uC-osflM202035d08a1
cacagaaaatcaatccttgcatgcaggggaaatcgatggatcgacctctctccttaacttgttcttaattctcatgtacaatcaaagaaacacacacgcacacacacatgcgtgcactgcatctctctgagcaacgaactcgattgatttgattttaattcgctagggattaaagagaagctgacatagagatttcgacgatcatgcgacgctgaaggagctggctgcgctctcgacgaacttcctggcgcccttgaaccacctcttgtcgccggcctgcgccttgcagatgtacagcttgccgtcgttgacggtggccgtgatcagctggtgcttgccgccctcgtcgccgttcgccgtcctcgtcagcaccgttacgctgtagtactgcttccctcccaccaccggcgccgagctctccaggatgttcgccgtagccaccgtgtccgacttaaacccaccc

SEQ ID NO: 33126 - DNA, 457 bp, Oryza sativa
  Clone ID: uC-osflM202035d09a1
gtggtggtctcgcgggaggaggatggtggtcatcacgcagtgcgcctcgcttggtgggaagtcaccttttgatgatgcatcagttggttctgttcttgctgtcattaagaaagtggaacacttgggcgatctgttcataactgaaataagcagggttcttaaagctggaggcatggtgcttatacagagttccccctctgatcaggatcccaataactctattcagcgcatgctactgttaggaggatttgttgacgtgcaagcttctgctgcaagctcccaggatagcgagcattctgttactattaaggcaaagaaggcctcttggagcatgggctcttccttccccctcaagaaagccacaaagggtctcgcaaagattcagattgatgatgatcctgaactgattgatgaagacagcctcttgactgaagactacttgaagaaaccagaactt

SEQ ID NO: 33127 - DNA, 291 bp, Oryza sativa
  Clone ID: uC-osflM202035d10a1
ctaaataaaaaaaaaaaaaaaaaaaaaaaaaaaaaaaaaaaaaaggaaagccaaaacaaaaaaaaagggggggggggcaaaaaaaaaacacaccatggctcaaaaagggggaggaaaaaaaggaaaaagggcccccacccaagggggggaaaaaaaaaaaaaaaaggggggggcctcttcaacacttggggaaacaaaaaaaggggcaaaagcaaaaaggcggctatgccggagggggaaggttaaaacccaaaaaaccccctcggggaaaacccaaaaaaagaggaaaaa

SEQ ID NO: 33128 - DNA, 345 bp, Oryza sativa
  Clone ID: uC-osflM202035d11a1
ccccgccccaaagcacaagccggggccggccaaaaaagccccgccccccagggaatccccaattcccccttaagttccaggcccagggggacaaaaaaccccccaactctggaaggacaaaaaagacccacccgggcgcaggggccagttcacgggacccccttgggccacccagggacccccccacggggcaaacgggccggaccaagcccccagagattaaagagggcgccggaaaaaccctttgggggcccgggttgaaaaagttggtgaaccccaagacgccgacgagaaccccatcccttcccgattccggggccggccccccacacatgcggggcccgg

SEQ ID NO: 33129 - DNA, 435 bp, Oryza sativa
  Clone ID: uC-osflM202035d12a1
aaagacaatagcataatatattcatatagaggtattataccgtcaaacatttgcaaatatatccttttcctttacaccctcagattgctaaaggcctaaatctatattgattttccctgctccaattttctcaaccgtttccaggaccacctcaaaacatactaggcatttcaaaatgccttctaacatcgttaagtacacacgacatttgtatctatacaaattatgcaaattaactctatctatttcattcacctgcaagaatgacaaacaagtgaaaagcagattgatatgacaacagaccgaccctacagcaactccagctgatcaacatacatcaaatttctacaaaattattcagaggtttgaagtaaaggaccggttaaatctgcacaaaatagggcggaaaaaaaaagaaaaagcaattcgagagag

SEQ ID NO: 33130 - DNA, 416 bp, Oryza sativa
  Clone ID: uC-osflM202035e01a1
ccgacaacagaagcagcatcatttagccccttggaaacattagcatctgattcatcgttttctctcggagcaaataattccaactaattttgagatatacacaaacaacgaggaagataacctttacaagaatggcggcatcctctgaggatgcatggaatgatatccactatctgggtggctctgcggcattcgctccccggtgggtcttcgagtaaagcctccatgtgtatggttctgcatgggattgaaggtgccccaccagtgagattcaccgtctgctgggatccagggaaatggggcaaggcccttccggccccacccatatggccgatcaacaggtgtagaaacagccttaccatccgaggaattgctcctgttcacaggaggagcaaagccatggtgtcccccggacg

SEQ ID NO: 33131 - DNA, 301 bp, Oryza sativa
  Clone ID: uC-osflM202035e02a1
accaggaaattgcttgccttttaaaataatttttcacaaaaaaaaaagagaaccaagattcattttgccaaaaacaaaacgtacccgtttatccccccccaccaatgggaactcacggtaagagctagacaggaacaaaaccatatacattttacagtttaaatgtaaactgccctacaaactgtgacacggagaggccccccgccaccgggggggggcgtttccaacaaatgctaaacccccagcaaaaaaattttgttaggggcccaaacagcgggacaaggttgtgccctcaaattgg

SEQ ID NO: 33132 - DNA, 394 bp, Oryza sativa
  Clone ID: uC-osflM202035e03a1
actaaaaaacgctggtactgtatagatgctggctaaaattcaacagtttaaaatggggcgtcaccccatggaagggcacagatgcttttattcgggtgccccacgccacgggacgcagggatagacaagttacaatgggtgcaaaacttcctcagtattttctgaacgggaactagtttcagtacaacttgccaaaacatggcccaatacaggcgctgcgaaaaggaattggggcggaattaaattcacaacaattcattctgggcatttttgacttcaacccttttaaaccttaaaccaaaacatagtttcacatgatttgatcactgcccttcaaaccaactggaccgaacgacaaggcacttggttattttttggaaatggatggaggccc

SEQ ID NO: 33133 - DNA, 353 bp, Oryza sativa
  Clone ID: uC-osflM202035e04a1
aggagtacaacactcttgcaacagcacccaacaatttggagactgcagagaaaagggtgttcttactagctaaggaattttcaacatggcagttacagcttgaaccacctttaattccagggcagcttacttctactattaacatgattcagaagtcggccgagttaacccgccggagctgattctttggctcctggtgcgggacatactgtactaccggttcaggtgccttgagcatcctgagccgcttgttctcctcctcaagccgggagatcttgttctccagctcgttcgtgtacgcctgtttcctggcgcgcgaccttgctgtcgactcggggtttttgatcattccg

SEQ ID NO: 33134 - DNA, 401 bp, Oryza sativa
  Clone ID: uC-osflM202035e05a1
ggcataatagtacatctctgctacagtaccacttcacatcctggccttccattctagatcatgtgatgcacatgtaactggttaagttacagttacaataacaactgcacaggatcttgatcctcaaagacaaaccaatgccacttcaaaggatgcatattgatcgaactagacacatggctgataaatgataaagccgggtactcattaaaaggtctgaaactccgaacatttgaagaacaagctgcaaggccaaacgccttcgagatagttcacggaaacgacaccttttctttcacccccattttgtcacaaaagcaggactcgagaaaacgacttaaagcattacacacggacacagacacaagaccattaccactgatcatcgtacacgactttta

SEQ ID NO: 33135 - DNA, 483 bp, Oryza sativa
  Clone ID: uC-osflM202035e06a1
gaatgaaattttgtgttccagcaccagtacagtaaaacaaataaaaggaaatctcctttatattaagcgacagtcacacagggacacaaaagtgatcgagtcatatacataaaaagctatatacattatagactcgtatacaattacactgccacggtaatatctgaacaagaaaacatagccaggtagaccctggctccctggatctcaatgctgtcgtcgaaggattggccggttgaattgttgtacagggtgaaaaagacccacagatccgtgccaagctgcgtaaccgcaacggtgactgcgacctttttacgtggactcgtccctgcagtgtggaatatcacacgatctttttccccgtaaagcagctcaatgtccctacatgttggctaaggccaacaagctgatgtgcacgagatccaaaagtctagcaatttaacctaagtggccagaatctggagattcacaaagcaacacacg

SEQ ID NO: 33136 - DNA, 178 bp, Oryza sativa
  Clone ID: uC-osflM202035e07a1
catacttactagataaaacagcatggacgttaattaacttggacccagacccaacttagcaggcaaccggacaacatgaggaggtttggccgtttggaacaacctacaagggacactgaaggacttaaaacgggcacgcccacccgggggaagaaagatatccaaaagatcgccccca

SEQ ID NO: 33137 - DNA, 370 bp, Oryza sativa
  Clone ID: uC-osflM202035e08a1
ggacaagcaagaagtctttatattcatccatttctgaaacttctacaagaggtcgtgaggaacacataatcaggagggattgcgacaatttacagcatcaggagtctggtgatcgaggcaagaccatgacaggcaggagcagacctaccctcttcatttacactgaatttttacacatttggaatccatggaaaccgtgccttccctcccgtcggcggggggtcaccggagcccgaggagaaccatgggcatggcgtgctcataattcggatcgctcgccggcgttggtgaaggaggcggagcgattgttcagccggctgttgaggagtgggtttcagagccttgacgacgatgctcatgttgggcctga

SEQ ID NO: 33138 - DNA, 306 bp, Oryza sativa
  Clone ID: uC-osflM202035e09a1
ggtcaaacaagaactatctatattaagcccttattgaagttcattcacactctcctgagggacaaagaaacaacaggaatcgggacaataaccctactaagctatttcgtgatcgaggcttaaccattatcagcaggcaaagacatacacatgttcacttaaagtaaaccccgccacagtattaaccgaggtcaaccggaccctcactcaagtacgtatgcggtcactggagacagtggatgcctcctgtcgagcggttcgcatgcagcatgcagagcgaccacattggtaaaggagaagatgcga

SEQ ID NO: 33139 - DNA, 434 bp, Oryza sativa
  Clone ID: uC-osflM202035e10a1
atcgctcatccatacttgctgttatcatttgacaaatcgacgtacaaaactgttttggaaagtcacatattcacaatctagataaatatagaatctgacattatagggtactccgtgaggggaatttagatggggagaaaagaaaaaggaaacaagctacgattatatacatttcatctgccgcccccgtttatttgagttcaatgtataaaggaacaagctgaatgtatggactgaaaaatagtttcagtgctcaatctgttaattgtatcccctcagaagaaattgacctgccggatgggtgttgcgaacgaacggttctcaaacagttttggttgtaagggggacaaaccgaatggagaaccagagaatccaacagctggaagtgtggcttggccgtcaaccacatatgcctgtggccaggatgacatggc

SEQ ID NO: 33140 - DNA, 251 bp, Oryza sativa
  Clone ID: uC-osflM202035e11a1
tttttttttttttttttttttttttttttttttttttttttaaatggatccggaacgattcagatgcagatgaaacactggtgagatcccactcagattacacacaatacaaatacctccgacaaactggctcaaaaaccaccaaattggttcaaaaggaaaacgggtatttagggtatcttcccaccggagactggcataaaccctaaaccccagaacaaattgggatccactgggacccagatttattc

SEQ ID NO: 33141 - DNA, 431 bp, Oryza sativa
  Clone ID: uC-osflM202035e12a1
aacacaagaacaccatcatatataatttattatctaagattcgtaacaagctccgtttaagaaaaactcccgagatttctacctaaatcctaggcattattagtaagttctataacaagcccaataatatagttccataaactatgaaataaagagcatctatctaattagcatctctaaaacacaaatacataatttatttagcacggtcaaaagcttggattggcattgaattcttagttggcgtttacaccagcagagtctaggaggaaaccagggtgcagggcctcttgatcttcaggtttgggttttacctcttggagcagtttgacacactcctttattttggcagacaacatgtttgatgagtaaagtagcatgaccactttagaattacctagctcaagtaacattccagtgattttactggc

SEQ ID NO: 33142 - DNA, 117 bp, Oryza sativa
  Clone ID: uC-osflM202035f01a1
gccggccagttaatgaccgagctacgccttcgcccgcgtgataaattgctcgaggggggcctgggccggtttttgtgctctaaccacaatggcgggcagaattccttgctgtagaag

SEQ ID NO: 33143 - DNA, 352 bp, Oryza sativa
  Clone ID: uC-osflM202035f02a1
aaaaaaaaaacgaggggcttatccttttgggataacatgtagccgccatgctgtttacacgacccaaattacaggcatttaccttcggattggcctcaagaaaacaaaccttccgcagcagagacggaactgttttccagaacctccatggggctcaactttcaccgaagaaatttttaatggtccatctggcaattagtccaaacaagggtggccccccaaactttaaaggtgcaacagtttaatccagcttaccggaaaggcggtccaacaataaccatgaaaattggtgagcaccaacatttaccaacattagacaaggcattcctgaagcaccctgttatgagcccag

SEQ ID NO: 33144 - DNA, 455 bp, Oryza sativa
  Clone ID: uC-osflM202035f03a1
aatatcaatccattggatctccttttatgtatcatctcaaaagacataaacaaaaccaaaatttaaaaaacaaggaaataatcttccatctaaaactcaatcctggaacctaatctccaactcatcctcctcaaccatgaggaaatgcgatcctctgtcgatcaccttctcgccgtccaccctcgccctgctcaggtgctcgcatgggctgatctccatcttcaacttcttcttctcccctaccttgagatgctggttcctgaacccgatcagctgcctcaccggccggccgccatccgtgctcgaccaccggacgaacatcagcacggtgtgcttgccatccatggggccatggttctgcacctccaccatgaccgggaacctgagccgctcgcaccggtcgtcgccgatctcgtcgacgcggtagacggcgtcgccttctggtgtggttgctg

SEQ ID NO: 33145 - DNA, 466 bp, Oryza sativa
  Clone ID: uC-osflM202035f04a1
gatccgcaacgattcagatgcagatgaaacactgctgattcccactcagattacacacaatacaaatacaccgacaaactgcctcaaaaaccaccaaattgattcaaaagtaaaacgggtatgagggatcttcccaccgagactgactaaacctaaccacagacaattggatccactggacccagattattcaaaaacagatggctatgacggcatcgtcctcgcaaccgaagggaacttgcagctatggatatcctcacttcgcgctggcgagctgggtgcggatgagcttggcggccgaaaccatgttggtaagggcgggcttgacctcgttgtacttgcgggtcttgagaccgcagtcagggttcacccagagaatgttagtgtcgagcaccgcgagcatcttgttgacgcggtccgcaatctcctctgtggacgggatccttggggaagggatgtcataaga

SEQ ID NO: 33146 - DNA, 226 bp, Oryza sativa
  Clone ID: uC-osflM202035f05a1
gaggcataactagacgggcatttatatatatgtacaatgtagaaccgtacagggacatatattttcggaaatgttgaggaaattttttcatcatgtgtacaagggatcttttgcttgcgctatgagttgcactataaagcttaacgtagaaaatatatgtagttgtatgtgactgtactaaaggatggttagagatgctcctatgagcaatttcaccactcttgac

SEQ ID NO: 33147 - DNA, 256 bp, Oryza sativa
  Clone ID: uC-osflM202035f06a1
atggcgaatacagtaaccaatctgacgaaaggagctgtcttgagttaagactttcaagaaatgggataactgaaagttggaacaatctaactgtcaatatcaccacaacaaaatgaaaattaatggacctctttcaatagaagcaacatacagtccgtacacgctagtggaaaaaatcaacaagaaaatgcatctctactctaaatttgagcaacaagccaatttctcttcaagcgcagacacggggaatctttca

SEQ ID NO: 33148 - DNA, 288 bp, Oryza sativa
  Clone ID: uC-osflM202035f07a1
aggagtagaggaaagatttagcatttatgatccgaccgaaacggcaaatggcttgctcctccttagactcgacaaagtgtccaagcggatctctgcaagggaactggaggtgacaaataaccattgaatctaagttgttaccgattgccatattaaaaccaaaggcgtgggccactccatagaacaaatttcatctggagccaggcacacaaaataatcatatgggttctactcattgagcactccaatgtggggatcgacgagctgccttcagctttggactgaatt

SEQ ID NO: 33149 - DNA, 279 bp, Oryza sativa
  Clone ID: uC-osflM202035f08a1
gtacgaggaatcatccattctttcttgacatttgtgcgatatcttcacgaacgacgctggctatcaacacacaacccaagcgcgcccgttaattaattaagctagccgggggagcgaacaatgccacggacaatagaccgacacacacgcacaacacgaaagttattcggcgcccccgtggtgaacgttggtactactagccgccgtcaccgtcgccggcgctcacgccagcctgaggccgcgcctgagcgcggagttccagacggcgacgatccgggc

SEQ ID NO: 33150 - DNA, 369 bp, Oryza sativa
  Clone ID: uC-osflM202035f09a1
gctcaaaaaagcccttttattatgaagaacatggcgctatatattaaatatctaggttggtaaaaaacaaagaaactatgctggggaattgatcaaggaaactaaatggggcagcagcctttgtccttgttattatacaaacacacgtacagaatacttagattcagcatcaccatggcgaaaacagtcgtgtcatgtcatctcactttgctttggatgcgctccagcgaagcaggggctgcctgaactcgagcagctcgacggcgtgatccggcacgactcccttggccgagtcggcggcgcggaaccgctcctcccacgcgagcagagccggcgtacttgccgggtcaattagcctgcgaccgatca

SEQ ID NO: 33151 - DNA, 447 bp, Oryza sativa
  Clone ID: uC-osflM202035f10a1
ccaaccaaaatgaggccgtgaaatatgcatactgatttcatctcaactgagatgagcagattacaccgccaaatcgccaatacaacccatccagcctctctgaagtttgagctatttacaggtgctccccccggtagcacaaccaagcatgcagctgtctgaccattttttcaggctacagctacctatgagaaaagcttttcaacccaccccccaaattatcaactttctcaatgtgcaaaagtttctttgtgaccatgcggtggactttcctcagcctcgcgcctttgtcctcgtgttcttgctcttgccagtgaatagagttgttggtcacttgtgaattggcatctatgctgttcacagtctcctcttcctccagtgcattgtcaatgatctcggggatgtcaactagactgggccttctccttgatttcgtgcgctttgggt

SEQ ID NO: 33152 - DNA, 460 bp, Oryza sativa
  Clone ID: uC-osflM202035f11a1
tttttttttttttttttttttttttttttttttttttttttttttttttttttttttttttttttttttttttttttttttttttttttttttttttttttttttttttttttttttttttttttttttggggaaaaaaaaaaaaaacacaaaaaaaccccccccaaaaaaaaaaaaaatttaacaggggggacccccccggaattctttttagaaaaaaaaaaaaaggggggggggtcaaaaaaaatggggaaaaaaaaattcaaaaccctttataaaaaaaaccgttggggccaaagggggggaaaaaatataccccccggggggggaaaaaaacaaaaaaaaagggggaaaaaagtggggcccccccggggggggtttaagggggccccctaccaaaaaaaaaaaacccccaaaaaaattggaaaaaggcgaaaaaaaccccccccccaattttttt

SEQ ID NO: 33153 - DNA, 493 bp, Oryza sativa
  Clone ID: uC-osflM202035f12a1
actggcacgtcatagctcattaattttcagcgtcaagacaaaagtttatcatcacattacaacaatttcaaattataaaagaacatcacatatagatttgcatttcgtcattttagctgttatatgcactagttctcactttcccccaccactgggctttgcgaacagcttctttggtagcttctccagaggtgttgttttcagaaggaaaagcctggcagcacgctcttgtaaggtgccaccacattttagtccacgattctgcaactctagcttgagtctctccatgccaagtacctccaattctgcagctgaactgtaaattgtcaggtccagtggttcctgtgaaagaggagatatatttccattggcaggttcttctactggaggcgcctttaggtcatttagatgtgaagtggctgaagcagaagcagtgttatcctgtgcttttacatctgggttaacacttcttttgaaagagcactaacaccat

SEQ ID NO: 33154 - DNA, 365 bp, Oryza sativa
  Clone ID: uC-osflM202035g01a1
ggccgccacttccaggaataatttattctccatcaaataccaggttaataaacaactaaattagtacccccaaaccctaaatacaatgatggtacacccaaaacattcacatgtatttgtcttgcatccagggtccagggatgaccccacctctattccttatatccagtaaaagtcaaaacaaaaaaaatgtacaaactggtccagtcgccacattaagcctcgatacccagttagaaaattttctataccaaccattagatgtcctctatgcagatcccttctggatcaaatagaacacttgaaagcttgtaaaccattgaggcaacaaagcatcaatgctggtgtttttttttacatcaacc

SEQ ID NO: 33155 - DNA, 254 bp, Oryza sativa
  Clone ID: uC-osflM202035g02a1
aatagtagtagtaattatatattgcacttccttgatttgttttgacagagaaacagaaagcttactgcctcattaatccttacatagttggagtacatgatgatgatgatgcatgcagaaggcttaacttaaccatcacttgatttaccaattacacaagataattaggccattaattagccctagcagctagcttagcttcgttaggtgcagtgcttagttgcttacccccagtggcaagaactgaaattttc

SEQ ID NO: 33156 - DNA, 380 bp, Oryza sativa
  Clone ID: uC-osflM202035g03a1
aaggtgcaaaccccaacttttttcagtttctgaattctggatggatcatatcagattcatcacagcatcgtacaatctgtgcaagcattggtacatcgagcgatggagagagagagtcgcctacaatggcggctgggccattcacgagcccggcgtgaacttggtggcgtagacccaggcgttgttggcgacggggtcggcgaggtggtcgagcaggttctccaaggggcccttgccggtgacgatggcctggacgaagaagccgaacatggagaacatggcgaggcggcccttcttggtctccctgaccctgagctcggcgaaggtgacggggtcgtcggcgaggcccagcgggtcgaagtactggccgccggggtaga

SEQ ID NO: 33157 - DNA, 371 bp, Oryza sativa
  Clone ID: uC-osflM202035g04a1
agggccaactggatgtctgcagataaattattccattggtttactggtacagacgccgggagaaatacaaagcttgaacacactgttttcaattcacaagcaccggattacacgacttttattggagaaaaaaaaagggggtccatgtctcacgcttttggaggggttatgctggaacaggaatacaagcttctctcttggttcataaggtaacaaatccatcacactgcatgatggctggcggcccaggggaacggaaaaaaaaaagaaaaccttgtaagggcgatattgccggccatgactccctttaccaccttggttgccaccattcctccggtcaccgggtttcattggtgggggagggggaattc

SEQ ID NO: 33158 - DNA, 525 bp, Oryza sativa
  Clone ID: uC-osflM202035g05a1
aagattatggtcacaggccagaaagagcacttagatgttcatggtggtgtcattttttcttacattgaggtcacatgtcagaagagaacacacatatgctacacaaagtaggaaaattcagcatagaaataatacaacatgcaacttaaacaatacgatactgaacaagtcagtatggttttataaaatcacaacacacaacttaccttttttattgcagatgtcttcccttgtgaacctgagccggataggggcagatgacgctccaacatatgcaaacagcgataaagtaaatgcggtaattacactgaacttcaaacaaacaaacaaatgatatttgcacctaaccgggatcaatctttgccatgaatcttgatgtttctctagttagctctggaagaaagaaacaatttttttctggtaatcttgatgtttccatacttcttgattaaaatcacagctcaatatcaagaatacatggttcaatttgctgcatgcatttgtaaggacttaataataggattg

SEQ ID NO: 33159 - DNA, 382 bp, Oryza sativa
  Clone ID: uC-osflM202035g06a1
aaaggcaagaacattattcataaatgacgcatgatttttatcaaaacgcttgcaaatgatatcagataagtagagtcaacaagacaaaactgtatctgccaaagcacacctccccaactccacccaattacgccattatttctgggcaaaagcaaacggcttcccattcctccccttcaccaagtctcaaaccataaaccccacaacaaatcctcctaagtgacggcatataagatgatgaaaacaaagcaggatactccagagctcgtcatggcggaacttcaagctgacacttctcatgccacagccgctagctcgtgctgggcagcctagtaccggtagtgcgcgggcttgcagggaccctcaactggaacgctgatgt

SEQ ID NO: 33160 - DNA, 201 bp, Oryza sativa
  Clone ID: uC-osflM202035g07a1
gaaaaacctagtctattattaaaaatttggccttgattgacctacaaaagcttgaaattgctagcaactcatttgcctcaacaaaatattcaagttacccgcataagcgaaccctgaagttacaaatacaccagccaatattaaccgcaccaaggtgacatattaaccagtaaaggcgggaaccaattcaaatgtccaaac

SEQ ID NO: 33161 - DNA, 158 bp, Oryza sativa
  Clone ID: uC-osflM202035g08a1
ggttcgggggatcattccttttattctgaaattactggcagagcttaaccaacggcgctgggtacgaacacacaacacaagcgcgaccgcaaattaagcaagctagccgggctagcgaacgatggaacggaccattgaccggcacagacacaccacac

SEQ ID NO: 33162 - DNA, 255 bp, Oryza sativa
  Clone ID: uC-osflM202035g09a1
cccacatgaggaaccctattattacaaacatacccactgaacgcacaaaaccgggttctaaaagagcccacaaatttactgcaacaccaaatgataccacacaccctaagttgacctcctaggactcagcctttaaaagaacacattccacaacaacgttaagaatggcctgatctggagtaacaagaacttttatgatgagacattttacaacaccagcctgaccgacgatcttctgtactcgctcagaaagct

SEQ ID NO: 33163 - DNA, 522 bp, Oryza sativa
  Clone ID: uC-osflM202035g10a1
accagctcgatgatacaaatagtttaagcataaccatagaagtaacacagcagtgttaaaaaagagccaacaaattcatggcagcaacatgtaacaccacacatcaaaagttttcaacccatcaggcacgcaggaaacgtccacattccacagacaagctaacactagcatgcattggcctaattcagactcttatgaagagactcaggctgaagcatgatagactcatgatcctctctactcgatcagatcgtcatcgtcatctgggagaggttgtgctgctgcagccgcaagctcagcctcatgctgttgctgcattgccaggtcaatgggaacttccggaggtttaagagcaacagcttcaacgaaatgcaggttcgggtcaccagcaagcttccttgcaagataaaggaagggcttctcaaagttgtagttgctcttggcagaaatttcatagtactggagattcttctcctgtggaatgtgacctgcttggcttaacctgcctgtttttacataacc

SEQ ID NO: 33164 - DNA, 506 bp, Oryza sativa
  Clone ID: uC-osflM202035g11a1
gctaacaggaactgaaagctgcactatctggcaaattattctcttacattttatcaatagacatggaaaattggaaccaacaccaaaccccattatacgattctcccactgctccaaggctaacagaaacgggagaagcaaataaagcaatcagtcacggctataattctgtatacatgcccctaccaaaatctttttcttatgtaccagctttgctctacacaaataaagcaacatctaccttatcctagcggggccatcacactcgacacaattgttttgcccggaaacaagatggaaagccttgaaaaaaaatccctgacgcccactacatcacgagtaagctgcaccaacggcgtcaaccagcgggaagcaatataggcctcagcgtaatggccatatgttttgttgccatgtttcttctgttgaggttgtcttactttgtgatctctctttggcatggcatgctatccagacgaggcctttgttcagggcttcaagcccag

SEQ ID NO: 33165 - DNA, 417 bp, Oryza sativa
  Clone ID: uC-osflM202035g12a1
gttattataaaaagactcgtattatattcccaacattaaagtttgatattcggatacattttgctcactgtggcagacaaagcagaccacctagagcccttttattcagaatatatgcaagataataaagaacattggtcatagcatatactagtactatatgaatagtctggctggctgcttcacaaagtaacagagtgatcgctactggagttttgagtattctttaatcttcagtgcgcttccctcatcagcagctactcatcttcttaccctttgtgccatctatctcctcgacagcatcgtcttcccagtagagagcctccattttaccagctttctccgtgttttcatcagcaaagcaatgcagaacagatcgtggcgacccgggggcgatttcagcagtagcagtgaagc

SEQ ID NO: 33166 - DNA, 476 bp, Oryza sativa
  Clone ID: uC-osflM202035h02a1
cgccgatgcacggcgcgcgtcagctggtttgcctccatgtgtggccgccctccttttttttttttttggtttttttttattcaaacatatatagccggagctttcatagatttcattcacatatgcctcacccaacaacatatagtcgtagcagataccacttttacatcaaggcagagagagatcaggggaaacaaaaacaaaagcagagcacggccggtaaaatcaaaagacgatgaacaaactgggaacacacgaaacaaggggggagacatcatcgaatcagagatgaacaattaaacgaggctttatatgacgatgacggcttagttgccaccagactcctcgcagcccgggggcttgtaggcgatgaagctgatgagctgcacctgcctaacgttgtcgaagccgatgatacggacgaatgcatcagggtacgccttcttggcctcctcgagctccttgagcacctgggt

SEQ ID NO: 33167 - DNA, 297 bp, Oryza sativa
  Clone ID: uC-osflM202035h03a1
cttcatgaggtaaaatttttaccagacctactaaagcaccagttaattcaaaaaagacactccataaaaaataagagccttttctatatcagggacatgtccctacgttcttacacgaagcaggacagtttatagcataacagcagaattatgtttttcacgcggttagattgttaccaggcttttggggacaaaagcactttttttcagcattatcccctttttggaatgtaggagatttaccacgccccattgtaaagccccttgtcccattcgggattcttggtccaggaatag

SEQ ID NO: 33168 - DNA, 387 bp, Oryza sativa
  Clone ID: uC-osflM202035h04a1
gaactaacaaccctcagctatatatttgctcaaaattcatcatacggcatgacatattggcatcttcattgttccatccatccacatggcgtgcgtgacaacttgcaatggtccattatattgtctcttgctactgctccattctatatttctattgcacatacatgaacacatgatacaaaattacaaatgcaaccaatacacgcttgccttagatacacatgaactcaagaattcaaatcttgatgcctaatccgatagctcacggagccaaatctgttgccgactgacgtgcaccaggctgatcgccagacaacgttggcctgagcttcaccggaaagaaaatgcaatttcctcaagagctcttgctttaatctccggcaccca

SEQ ID NO: 33169 - DNA, 382 bp, Oryza sativa
  Clone ID: uC-osflM202035h05a1
atgcaggaacagggggcaaggatggacatctcaatcacaaacctggcgaccttacaatacaagcatttcacacgtaagaaataatagtcatgcccatgagcatttcgcacgtactccagacacgaacatgcaacatattgctaatagattgctaatgctaccgaataaaacacaataccaatagccagtttgaacatgaacacaaggtttatgtaggagcattcattacacaactcaattcaggcgctgctcaatttagtacatatttctgaattttcatccatcaaattaaattggatcaaaagggaatccagagtcagggttgccctcctcgtagccaccgtctgaaggatgcttaagaccaattcccgagttttggcat

SEQ ID NO: 33170 - DNA, 385 bp, Oryza sativa
  Clone ID: uC-osflM202035h06a1
aaaaaatgtgataccattgctactgtttcagtgcaaaaggaagcgttgcgtttctaagattgttacacgtatggggaacaccagggctacaaaatttgtgacaattaactgtattgaaacttgctatgtgaatccgagaaaaagaatggacatactgtagttgacgtacccaatatgccagcgaaaggcccagcagatctcctatctcagggtaggtagccttcaaggtgatggcttctgacttttagctgtaaaatctgcacaaaatctgcttgcccactttgctatgatgatgttacaacaatcatatggcagttgagccgccaaaaggtatacatctttaatcatgtgaagaatgtgacaacatcttttttgtatcccctaa

SEQ ID NO: 33171 - DNA, 484 bp, Oryza sativa
  Clone ID: uC-osflM202035h07a1
cagaagcaacttttattagcagacttgtgtttttgcatttgctacagccgcttaaacatcgggcagacagtttttacatttgcgactttttgatacaagtggtcttcccactcgcgaggaagcaaagacacagcctgtgtattcccatgttgaactaaatgggggccttccaggatgcgcctgacttgatggtaaaagcgacccccttttggatactctcggccagctccttcttagccttctccagtccagctctttcaaattcattcaatggaccaagtgataagatctcctcgatgccacagcgacctaaccgcactttggatgcaaagaaaggcagctttatcacctgagaagctacaaaagagcacttcactatcccagagtctccgagcaatcctcttaagcaggcatctgcaaaatttgcagctgcatacgccattgaaagagttgcagaccctgctccagctttagcctcgactac

SEQ ID NO: 33172 - DNA, 380 bp, Oryza sativa
  Clone ID: uC-osflM202035h08a1
aggaagaacacatcctttattcataaaggtaatgcagagcattcccatcgtttcattgttcatatgacaaaatgttatccatacgaagaatttccaacacgacgcgaataaacaaagaggaagaaatctcgagtctagctttttaaacacaagaaaccggtgttctgcatatgagctataacgcccggaagaacggtctgttgttagccctgaaagggtgcaagattgccaagaagaatttagtcttgtgagccatatgtagcggaagaaaggtatgggcacgaacaaactgagaggagctgattgatcttgatggtgccgcagctttgaaatcactccttggcatcggcagcacggagggagcccagctgaaccggtgc

SEQ ID NO: 33173 - DNA, 145 bp, Oryza sativa
  Clone ID: uC-osflM202035h09a1
ggaggaagaggacaacttggaggactcaataaaccacagaaggttcccttgggcgtattgaatgagggaagaaatgtaaacccgtaacataatttgccacacagccgatacaaaacaaggtgtgggcatgcattgaacggccagg

SEQ ID NO: 33174 - DNA, 380 bp, Oryza sativa
  Clone ID: uC-osflM202035h10a1
aagacaatgaggataataagattgccttattacacaacataataaggctttgtgcatatgcaaggcggcgagaataacttacttgcaagttgagctgcccaggaactgttacaaaacggtgttccaggattgtatgaaagccaagcgcgtttgcaccctaactaggatctggcaacctgctaaagctaaacagattaacgacgaatctaacatacttagggagagagaacaatctatgctagcagattcagagcttagagccaccaacaaaatttttttgatgagcaaaggctagagatttgacttaccattacctgcgcgcatccggaccagatggtcgagcctgactttgaacacgacttagtggctgaccagaaatg

SEQ ID NO: 33175 - DNA, 394 bp, Oryza sativa
  Clone ID: uC-osflM202035h12a1
cgacttaattaacatctgattgattaactatgtattatatatatcattcacgatcttgatcgatcgatcgatctcgctatatatatatatttgttcttcatcgatcgatggatcatatcatcatcatcatcagtattaacaaataattattaatttgatcatgaggagacgctgaatggcttgtaatgtgcgacggatttgatgaggccctggatggagccggcggcggcgaggagggagacgacgaggcaggcgaggctgagcacgttcatccacgtccacgtcggcgagaatcgccggaccttggcctgagacatgtacatctggacggggaagtagacggtgagcggccagaaggagacggcgccgatgagggccgcggaagtcgttgaag

SEQ ID NO: 33176 - DNA, 359 bp, Oryza sativa
  Clone ID: uC-osflM202036a01b1
ctattataaacttcaaagttctcactgctgcgcggtgtgctttgaagactcgagttgggactaccctacttcgagggtacaccgttcttgagtttgagatgggcaaggaggttgtgaacgtattctgaaccttacctgagatagtgaacggaatattcaggggaaaggtagttttgggctgcatatacagtttgagaatttcctacaggctcttgcgaaaaccacaacattcattagtgaaaaattgattgtagctttttatctatattatagatcgaacaattgattctatggttcatttatacgaatgaatgactatagattttgttaacatgagcattggattagacctttaaagt

SEQ ID NO: 33177 - DNA, 389 bp, Oryza sativa
  Clone ID: uC-osflM202036a06b1
cgcttattgaggcggagcgggacgtgctaaccggggggggccttcgcgccgtgtgggggccgcaagggaggatcctcgccgccggcgaggtgtgccgcaacccggcgctcgcggacactcttgaggccgtcgccagcggcggcgtcgaggcgttctacggcggcgccatcggcgagaggttcgtcgccgacgtgcggcgcgcctggggcatcgcgacggcggacgacctgagggcgtacaaagtcgaggtgagcgacgccatgcgcgccgacgccatgggatacaccttcctcggcatgccggcaccttcctgcggcacagtcgggatggctctggttttgaacatcttggatggatacaaatcgctcgagtttttgaaagggtttctt

SEQ ID NO: 33178 - DNA, 281 bp, Oryza sativa
  Clone ID: uC-osflM202036a11b1
gtctacacacattcggctgggtggtggtcttggtgttctgttgctgctgccgcggctgccgcttgttggagtgaggagagtgggtgagtgatggggagggggagcctggcttgactgttcggaggctcggaggcggaggctcgtgctggacggcgacgcgcactgtgctgtgaccgtacgacacgaaggcggtactcgtcaacggtcacaggaggattgttttatccggatgcatacattacccgaagagtacacctcaaatgtggcaccgtctaatagat

SEQ ID NO: 33179 - DNA, 255 bp, Oryza sativa
  Clone ID: uC-osflM202036b02b1
ttataatttccaaaaatgcttttaattaatacaactgtttttatatgaagaacctgggggatcacattgaccagaaccatggcgatcacatatcaggatatcttgaataagtacttatgggtataaaaaaaaataatctcacacatctacaatatatgaatcatttccagtttcccgttgattcaataggggccgatcaataggttataacatacaatatttgaatgtgcttgctatgtaattaaataattatgc

SEQ ID NO: 33180 - DNA, 441 bp, Oryza sativa
  Clone ID: uC-osflM202036b03b1
gtttttcaaatcacagtgtatcaatcatgggaggggttgtgcaccagacccagagggggatttcagccagggatatgatggaaaagatgttgtggttcaaaatctacatcaaatttgtgtattcaaggctgctaatgagagtgggaagccatggttgtggtgggactatgtgcatgacttctcaattaggtgccctatgaaggagaagaaatacacacctgaatgtgctgttcatgttattaagtcactcgggttggatgttgagaagataaagaagtgtgttggagatcctgaagctgatgatgaaaaccctgttcttaatgcaaaacaagatgcccaaattggtcatgatatacgaggagaatgtacaatactgccaacccttgtcatcaacaacaggcaatttcgaggtaagttggacaaatttgcccggctcaaagc

SEQ ID NO: 33181 - DNA, 413 bp, Oryza sativa
  Clone ID: uC-osflM202036b05b1
tattagattaatattatttataaattagaatgcagcggacactatcccatattttggaaactttatgctgacaatgaggcatccataacaaatcactgaaccgatcattggtggccatcttatctagctgtatttgataaacacaatagactgggttgcattctaatttataaataatattaatctagtatttctgcattacaatatggaatcaaatagcaacaggggcaggagcagtcaagggcaccggagatgcaaggccttgcagaaagggattggagggcggcggcggcggcggcagcagcaagggaaggggtcttcgattatacctgtgcggcggcagtagcagagggaatcggaagctaggattcacctagggaccaggctggaaccatgcacagaaacggataggg

SEQ ID NO: 33182 - DNA, 466 bp, Oryza sativa
  Clone ID: uC-osflM202036b07b1
tttagagagataaataatatacagaaatgagcgggtcgagctcgagcatggccaccgtcctcgtggtgttgatggtcgtcagcgccggcggcttatccccaccatgtgcgaccgctgcgaaggaggagaagccagtggtggtgctgccaccagcggcggcgccaggggaggcgccctccgcggacgcggcagcgtttgtccgctcctgctgcgacaccgccctgcaggccgaccgcgacggctccagcttctgctacgaccatctcctcccctacgctgccttcttcgagggcaaccaggtgaaggtcgccgaggtggccgccaccatcctgagcaccaacctctgggtctacgtcgaccaattgcgcaaggtccagggaggggccggcaagggggacccgaacctgaacgcctgcgtcgatgacttcagcgtagccgccggcgagaacatcaccagggaggcgct

SEQ ID NO: 33183 - DNA, 525 bp, Oryza sativa
  unsure (1)..(525): unsure at all n locations
  Clone ID: uC-osflM202036b08b1
ttttgctcgctctctcctctctctccctcttccggcgccgcgcttggggaagggaggagaaagcaagccatcggcccccgcctccgcctccgaagggacattgttgctagttggtgatggctgagcaggctaatcaaccgactgtccttcagaagttcggtggccagttccaccttggctccagcttttctgaaggtgtacgggctcgcaacatctgcccatctgtctcatcctatgacaggcgctttaccacaaggagctacatgacccagggccttgtcaatggtggcatcaacgtcccaatgatgtcgtcctctccaatttttgctaatgctccagctgagaaaggtggcaaaaacttcatgattgatttcctcatgggtggagtgtcagccgcagtttcaaagactgctgctgctccgattgagcgtgtgaagctgcttatccagaaccaggatgaaatgatcaaggctggtaggctctcagagccatacaagggtattggngactgcttcggacgcacta

SEQ ID NO: 33184 - DNA, 518 bp, Oryza sativa
  Clone ID: uC-osflM202036b11b1
ttattaaaaccttggcccttgaatagttgtgttctgctctgaaacctttttagagaggtgagtgcttgttcatcagaagcagagagacaagatgtataacgctccaatggcacaggacatgtcctactatgaacatgtgcagaggcgccatgaggagaagggttgcctctatgcatgcatcttcactgcactgtgctgcttctgctgctacgagacctgcgagtgctgcctcgactgcctctgctgctgctgcaactaggctgccatatcaagccatagcaagaacatgatcaagatgaggatggagatcgcctccatctctcttacccctgagatttcataatttatcagcccgttgtcatcatgtaaaattaataaacatgtagtagatggaaactttgtcagaatcgagcatttgtgttctgaaaaagaggactattgtaagaaacccagaatactgttatctgaagtgctttctatgcgtgtgaaattatctcttgcacgggtggtatttggta

SEQ ID NO: 33185 - DNA, 490 bp, Oryza sativa
  unsure (1)..(490): unsure at all n locations
  Clone ID: uC-osflM202036c04b1
ctttttctccttgcactcagcttgcagcttagcgggctgcacacactgtcctcccacgagacaccccaccaaacaccttttcttcctccctttcttgtgtgtgcccccactcagatcagccagcagctggtagtaccctctctagcttattgcagggccatatcctctgctagcttagcttctctcacaaaccccttaattccatctcatagacagccaaaagggtcaagaggaaattgggtttgtgctctccccaaaatcctccatatatagtgcacaggaggcatcattctgttcatacatatctctcccttgcttgctttgctcctggatatatagctagcttctttctttcttcctctctccctgtgtggcacgcgcctccaatcgatctcttcggtgagtagacgcatcgagatcggngggaaatgtcggtccagtttacatcggagcatgtttgctatgtcaactgcaactattgcaacactat

SEQ ID NO: 33186 - DNA, 524 bp, Oryza sativa
  Clone ID: uC-osflM202036c08b1
tcaggcgttgccgcagagacagcgagcgagcgagagagcgcgaggcggaggtgagtgacgaccatgcaggcggtggtggcgaacggcggcggcggggacgtggtgcagaagccgcagcaggtggtggcggcgccgccgccgccccaggcggcgctgccgccgccgcctcattgggtggccatgccgttcgcgcccccgggggcggcggccatggtaatgcagcaccagatggcgccggcgccgccccagttcgccccgcacttcgtgccgttccacgcggtcggcccgccgccgccgtcgcagccgcgggcggcgccgccgcccgtggccgtggcgatgggctccccggcgccgcacgcgcagggcggtggctgcgggcaggaggagaacaagaccatctgggtcggcgacctccactactggatggacgagaactacctccacagctgcttcggctacaccggcgaggttgtagcaataaaggttattttgtaataagcaaactggacaattcgagggttatg

SEQ ID NO: 33187 - DNA, 434 bp, Oryza sativa
  Clone ID: uC-osflM202036c12b1
tgtttggtggtgcaccggccgtcggggccgtgcgcggcttctgagttcgagcactggttcatcccggccaccgagaagaagctcttcaacctcaagagctttctgaccgaccgtgacgcctgggcgggcaccttcgacgtcgacctcacgcgcgacgcgccgcgcaccgactgccccgccaccctgccggagccggtgaagatgaagccggcgacggaggcggcggagcaggcggcgctgaccgagttccaggaggagctggtgcacctgggggcggtgctcaacggcgaccacgccgacgaggacgtgtacccgcgcaagctggtggaggggatgactgttgcggacgcggccagctactgcaacgccttcttcaaggcatggatggaccagtgctaccggtgcaagaagtgcggctaggaccggtcccacat

SEQ ID NO: 33188 - DNA, 268 bp, Oryza sativa
  Clone ID: uC-osflM202036d06b1
gttatgttcacttcctccaccggcggctcccccctggcggcgcccatcgcccccatcgccgccgcacggccacgcctcgcgtcgtcatagtcgtcttcctcgatcaatccgctccgctccgtcttccttcgatccataggattcgatagcaattggcgaagatgctgggcggattgtacggcgacctcccgccgccgtcgtcctccgccgacgatgacaagccctccgccgccggctggtccagcgccgcagttgggccgccccccca

SEQ ID NO: 33189 - DNA, 513 bp, Oryza sativa
  Clone ID: uC-osflM202036d08b1
ttcggggcgaaaccctagccgcccgcgccggcggcttccccacccgctctagccgccctcgccgccgccggagcccgccgccggaaaccgcgcggccggccaggaaggcggcggcggggaaaaccagccggcgacgatcctccccctcggcgtgggaggtggagtggcgagcgtcaggcggaagacggcgtccgaagaggtccacagggcgaatccggccacgccggaggcggattcggccccctcggcggctgatctggcctccccgtggccggatcgggagctggcgactccggtggcggcggaactcgcggggcggtgcgtcgactggcagaggaggctgacgtcatcgccaagcacgtctctgaccggcggagctcgcagcgacggagatggtagcagctggctggcggcgggaggcgcgggagaaggcagcaagtggccggcacggctggcggcggcggagggcggcatggcgcgcgcgaggaggcacgtgctgtgagaggtgacacg

SEQ ID NO: 33190 - DNA, 481 bp, Oryza sativa
  Clone ID: uC-osflM202036d09b1
tttaggtattgttgttttcgatgatacatggggggttaatggacttttggcagtgtcccgtgcatttggcaaccgtgcattgaagcactatgtgaaagcagaaccagatattcaggaaaaagtggtcgatgaaagcttggaatacctgattcttgctactgatggcctttgggatgttatgcgaaatgaggatgctgtttctcttttgaaagcgcaagatggacccaaagcagcagccatgaagctgacagaagtcgcccactctcggcttaccttagacaacatcacatgcatcgtgctgcagtttcaccatggaaaatcaaccaacagcaactgatgttaacaaagttttgtcaccagatatcttgaaacgagagttggtcccctgatccgcggttctacaagattattactagattggttgagtcgtttttttcgtcatgtaggaagcttttaaatctgacgtgcacagtttactagc

SEQ ID NO: 33191 - DNA, 482 bp, Oryza sativa
  Clone ID: uC-osflM202036e02b1
ccatccatccgttccgtttagtttgctgcaagcgcaagcgcaagcggcggagaggaagccatagccacctcccaccacgccttggcctttccattacctacgccttcccttcccttcccttcccttcgcgcgctacttggaattggattagccatagccatggacgccacgctgctccgctccgccgatgccgccgtcgccgtccgctccaccaccactgcgcctccgcctcgccctcgcctccaccgccccagtaccctccccctcccgtcctcctgcgcctgcgggcccctccgcgcctacgccgctcccgctgcccccgcgcccgccgcgcacaacaacggagtctacacagttggtgacttcatgaccaaaaggcctaatctccatgtccgtacacctgcaacctcggttgatgaagctctcgagacgctggtgcaacacaagatctctggtttccctgttggtgatgacacccgaaa

SEQ ID NO: 33192 - DNA, 507 bp, Oryza sativa
  unsure (1)..(507): unsure at all n locations
  Clone ID: uC-osflM202036e03b1
atttataacacccccaaaaaagatcaaaaaacccgggcctccgatcgaatcatcggcaccctccgccgccgccgccgcccgccgtctccggccatgtccccgtcaatcgccgcctcccaggatcgcgtctcccggtgattactcccccgcgccctcgtctccattttcttgtgctggtatgagggccgccgccgcccccgatccgtccccggcgccggcgaggtcgatgctgaagcggctgttcgatcgccagctgctgcgcgtctcccccgccgagcggattgtggcggtgggcgggggggagaaggtggnggttgaaccgagctccgtgtgcctggatggcatggtgcgcagcttcttggaggacgggagccgcgtgggcgcggctgtcgagcgggctggcgggcatggcgcgcggcgctgcaactgcttacatggcggcgggagcttcgacgacgacgacgactaggacgacgccgccgcgttcttcgacgtcgccgagacgat

SEQ ID NO: 33193 - DNA, 394 bp, Oryza sativa
  Clone ID: uC-osflM202036e04b1
cccacacgtgcggtttttcggagcagaggaggacgaagcatcagggggtggctgcagagcacggggacgtatcacgacctcataaccatggtaaggggtttcaacaactatctaacgagggtcaatgcgcccaagcattggatgctcgacaagcttggtagaacttttgcccccaagccatcttctggttctaacaagtccagggagagcctgactatggtcctcattatcacgaacacgctcaagtatgctctgacataccgtgaggttatttctatcctgatgcagcaccatgtctaggttgatggctagggcaagactgacaagacctaccagcttttaatggatgagatgtccatccgcaagattggggagaactacaaggttgtgtacc

SEQ ID NO: 33194 - DNA, 480 bp, Oryza sativa
  Clone ID: uC-osflM202036e05b1
ctttatggctgatgctctggttattgcccatgctgggggttctgctctatgggaaagcacaagaaaccagtatcttaagaatactgtatcaccctatctaaaggttgtttctgctatggttggcaatgatttgatgagttttgtgagtacatggccattgaatgcttggaaggaaacacttgcgctactgtgcacatttgccaggaaagaggaatggaatgttctatgcgatacccttgcatctagactgttgggagttggagatacactagctgcgactctctgttatatttgtgctggaaatatcgacaaagctgtggaaatatggtctcgcgacttgaagtctgaagatggtgggaagacttatgttgatcttctccaggatttgatggagaagaccattactcttgcccttgctacaaggcataagagctttaccgcgtcactgtctaagcttgtggaaaactatgcagaactttt

SEQ ID NO: 33195 - DNA, 408 bp, Oryza sativa
  unsure (1)..(408): unsure at all n locations
  Clone ID: uC-osflM202036e06b1
catctcgatcgatcgacaaagctataggtggcccattcatggccgggtcgcccgcaatggcgacactcctcctcctcctcctccatgctggcctcgtcgcggcagccgatgccggcgccgccgataaggaggcctatgcggcaacaggatcaaccgctggcaaggagaccgctgcggcggccgacaaggagacctctgcagagggcggatcaaccgcgggcgccgtccctgaccccaacatcttcaacaaggaggccgtgtgccccaagacaacagacgagaaggcgtgccancaactggggaaagtcctgccgcccgagtttgcaaagacaaaagacgccaagggcctcagcaagctgtgcatctccagcgtagggttctcgggggagcagttcaccaaggacgcca

SEQ ID NO: 33196 - DNA, 503 bp, Oryza sativa
  Clone ID: uC-osflM202036e07b1
ttttccaccaccaccaccaccactccaccgggcggcgagagcgcggggagatcgttcgacggcggcaagatgcagatcttcgtgaagacgctgacggggaagacgatcacgctggaggtggagagcagcgacaccatcgacaacgtcaaggccaagatccaggacaaggaaggtatcccgccggaccagcagcgcctcatcttcgccgggaagcagctggatgacggccgcaccctggccgactacaacatccagaaggagtcgacgctgcacctggtgctccgcctccgcggcggcagcaggggcggctacaccatccaggagcccaccctccgggctcttgcgctcaagtacagagagaagaagaaggtctgccgcaagtgctatgcacgccttcccatcaggtctcaccactgccgcaagaagaagtgtggccacagcaaggagctgaggttgaagaagaagttcatcaactcgctttcgatagcgtgaggcacttgaaa

SEQ ID NO: 33197 - DNA, 510 bp, Oryza sativa
  unsure (1)..(510): unsure at all n locations
  Clone ID: uC-osflM202036e12b1
tttttgatcgggatgcgctacatcgagccggcgggcatcatcctccgcaaggggcggatcgctggcgtcgagtacccgctgctcgccgagcacatggcggattacatggccaagacgctcttcttcacctcccttctctacaactccaccactgatcacaagaaaggagttgctcagtactgcgataatgtggagatgtgtaggctcacagagcaagtcgtgttctcagacccatacatgctcgccaaatacaatcgttgcacatcacccttcctagataatgatgctgcagcggttcgagaggatgctgagcttaaattggagattgctgaattgaaatcaatgtttattgagagagcacaggctcttcttatggagatctccacactggttccatcatggtgacaccagattctactcaagtgattgatccagaatttgctttctatggcccaatgggttacgacattggggccttcctggggaacttgattttggcatattnttcac

SEQ ID NO: 33198 - DNA, 209 bp, Oryza sativa
  Clone ID: uC-osflM202036f01b1
cgggagccggtccgacttccccctggacccaccatcgtaatcgttctttcccgggaggattatcggggggggtggagacccatatcgggggcgtggaccgttccacggcctcggtcttgaatggtgcggtggggtgcccggcctctgcggtggggtgcccgatgacctctgagcgccccgtgcccgtgttggccggcccagcacaccaa

SEQ ID NO: 33199 - DNA, 518 bp, Oryza sativa
  Clone ID: uC-osflM202036f05b1
agtttatataccatgtgcagatgtgtctaagaccgttgatgaacatcctggaaaaagtgagaacttatcagggaaggtgtctgatgaagatttaggtgatgctataccttctgacaaggatggaaacaaagatggtcaaccagaaggtggtgacatgcccacagttgttgatggcgtttctaattctgttcaaccagaagtcagcaataccatttatgccaaagatgacgttgatgtccataacaagatggttgatgcacaaaaggatacagggaatcttgctacttctggtcttgacaaagtcgataaggaagcatgttctaatttgaaaaaaaataataaatgttctcctgattctaatattgctgataagttggattctgttactgtggcgtctggtttgctcatgaaggacgtgcctagttctgtgtcattaatgaaccctgacaatgatgttaataaaactggtgaaaatattccaatgatggaaaagaaggaatgcgaagattctactgttg

SEQ ID NO: 33200 - DNA, 407 bp, Oryza sativa
  unsure (1)..(407): unsure at all n locations
  Clone ID: uC-osflM202036f06b1
aatttgtngagctgaaaaagaaatcgatcgctcccgtctccatccgcagctggggcgggcgaccgattgatccactccattcccctcccgatctccatcctcaagcaagctacaagcgcggctactctcctcctcgcgtcgcctgctcatcccgcgtcggagaaatcggtttcgttttttcttttccgctgtggtgtgtttttctccccgttcttggtgggcgcgtctgctgcgtgagagatttttttgggtttctgctggttgggttggttagctgctgcgcttgctgaggtttctagttgttctttggccggattgtgtgactgcgtccccatttcgtgttcttgacttcttgttgggggagggggagcatttcgtcgagcacctttcgtgccgctcgagcttgt

SEQ ID NO: 33201 - DNA, 409 bp, Oryza sativa
  Clone ID: uC-osflM202036f08b1
ttttcttgctcgcttgcttcttctccgctcggggggcttgcttgcttgcttcggtggaaccctactctgtgctgcgagtgtcgctgcttcgtcttccttcctcaagttcgatctgattgtgtgtgtgggggggcgcaggtagggcgaggagggagccaaatccaaatcagcagccatggcgcagatgctgctccatgggacgctgcacgccaccatcttcgaggcggcgtcgctctccaacccgcaccgcgccagcggaagcgcccccaagttcatccgcaagtttgtggaggggattgaggacactgtgggtgtcggcaaaggcgccaccaaggtgtattctaccattgatctggagaaagctcgtgtagggcgaactaggatgataaccaatgagcccatcaaccct

SEQ ID NO: 33202 - DNA, 395 bp, Oryza sativa
  Clone ID: uC-osflM202036f09b1
cggcggaattgccgggacgaacgacgcggcttgttagcggacatgggaagatcgatccaagggggggccaccctgaggcagccgggcaatctcgccaacctggcctgttctggcgggctggaatcgcttccttgttcatacgtggccatggaatgcggcgttgacacagatgccggcggccggaacacgtgctatcagcatgaccacagacgtgaggtacgcaacaagtacggcgatgcccctaaggtcatcgtctgcgcacacgccaccttacctgtggtggtattgggcgccagagtacaggggggacacaggagggttatcttcgaccagatgaagagtcagaaggacacaggaggctaagggaaacggcacggcgaaccagtgacctacgg

SEQ ID NO: 33203 - DNA, 473 bp, Oryza sativa
  Clone ID: uC-osflM202036g01b1
cttatttcacaacccagctggtgaaagacaggaagtggggagttagctagcatggcgggggcattgtcgttcccgatcatcgacatgagtctgctcgacggggcacagaggcccgcggcgatggggctgctccgcgacgcatgcgagagctggggcttctttgagatcctgaaccacggcatctcgacggagctgatggacgaggtggagaagatgaccaatgaccactacaagcgtgtgcgcgagcagaggttcctcgagttcgcgagcaagacgctcaaagaaggctgcgacgacgtgaataaggcggagaagctggactgggagagcaccttcttcgtccgccacctcccggagtccaacatcgccgacatacccgacctcgacgacgactacaggcgccttatgaagcgcttcgcggcggagctggagacgctggcggagcggctactggacctgctctgcgagaacct

SEQ ID NO: 33204 - DNA, 500 bp, Oryza sativa
  Clone ID: uC-osflM202036g02b1
ctctcctcctctaatctcaagtctcggggtcgtcggcctcgcatctgcagctcgccatgggcaagattaagatcggaatcaacggtttcggaaggatcgggaggctcgtggccagggtggccctccagagcgaggatgtcgagctcgtcgccgtcaacgaccccttcatcaccaccgactacatgacctacatgttcaagtacgataccgtgcacggccaatggaagcacagcgacatcaaaatcaaggactccaagactctgctcttgggcgagaagccggtcaccgttttcggcatcaggaaccctgacgagattccgtgggctgaggctggtgctgagtatgtcgtggagtccaccggtgtcttcactgacaaggagaaggctgctgctcacttgaagggtggtgccaagaaggttgccatctcagccccgagcaaagatgctccgatgtttgtctgcggtgtcaacgaggacaagtacacttcagatattgatatt

SEQ ID NO: 33205 - DNA, 480 bp, Oryza sativa
  Clone ID: uC-osflM202036g03b1
ggttttgctccacccaggtggcccattcgacccggtggggctggcgagcgacccggaccaggcggcgctgctgaaggtgaaggagatcaagaacgggcggctggccatgttctccatgctggggttcttcatccaggcctacgtcaccggcgagggccccgtcgagaacctctccaagcacctcagcgaccccttcggcaacaacctgctcaccgtcatctccggcgccgccgagaggacgcccagcctgtaaacatctcgccgccggcgacgctggctggcctcaagttaattttaatcttacccgggaagaagaagggaggagtttgagaagggtggaagaatgtgttaaatgtacgtgtaaattatcgtcgagttgggagatgaatttgaaaacctgttcattctgatcttctgataggaaggaccaagtgtttggatttgtggctgagaaaaagaaaccaccgtcaagaggggctt

SEQ ID NO: 33206 - DNA, 238 bp, Oryza sativa
  unsure (1)..(238): unsure at all n locations
  Clone ID: uC-osflM202036h02b1
atgaagatgtgttcacaactacataggtggtgacggttgctgatttcgggaatcaaattcctcaggctggcanaaatggagagctttcatgctaaaccttaatattcttcaacaagcagattaaagggaacaagagggagatcattcaggttggcctcccactatttcagcccaccacagaggaatctaattgctacatagaagcactccccctagacctccaggctgccattgaaca

SEQ ID NO: 33207 - DNA, 414 bp, Oryza sativa
  Clone ID: uC-osflM202036h07b1
tttttccaaggtcatggcaaaggagaaataacaggtagcgggcttggggaagggaaaacagcaagtgggagatcggcagggagaggtgaattactacttgagtagaagtggtacaagaagagtcgtcgtctacctgtgagcgaattatttcgaggttgtgcgttgcgatgatgggaggtggtctggtgatggaccagggcatgatgttccccggcgtgcacaacttcgtggatctactgcagcagaacggcggcgacaagaacctcggcttcggcgcgctcgtgccgcagacgtcgtcgggggagcagtgcgtgatgggggagggcgacctcgtggacccgccgcctgagagcttcctgacgccggtgaggacgacagcgacgaccacgtggaggacatcgaggagctggagcg

SEQ ID NO: 33208 - DNA, 476 bp, Oryza sativa
  Clone ID: uC-osflM202037a02a1
acatacatactactagtataatgttatatatacaggatgcaacaccaacgttgctacaaccaaaataccagtacatcggggaggaaatactgtatactaactccaggatttgtgcacatagcacaacacaaactaacaagaaggtgaaaagcacatttaaccatgatgaaatggttaatcctatatggaaatttgacgctactgagcaacccaacctggttcgagctactgcagggaccatgacctgacctctaccttggccatccatgggtttgctcctcttatccctctcctatgtatccccatactaatgttgcagcatccaaattggatcgattcgcatgatgcttgagagtttcctgtttccgtctttgtcatgcagaagtagttcgatcagttgacagaagctttgcagagcatttgttgttgctaccagactaggggagatcatgaatgtgcattcactgaaactgcca

SEQ ID NO: 33209 - DNA, 458 bp, Oryza sativa
  Clone ID: uC-osflM202037a03a1
caaaaaaatcatgctgaatcaaactgattgattattagttagtcaggacgtaatttcccaaattatgcctgaataaaacagatacagctggtggctcatcctaccactactgggaggttggaactctagaagtcatctctcccattctgcatcaattagaaatatacacatctttagcctagatcatttaacccaattttgtatatcctatcatcagatcatccttcttgcacacaaaatactggctcttgtcataggagaaaaaaaatctcaaatggtaaatggtaagctacgaacaaggagttcttgttccaacaaagccaaaccccatcacagtgaatgcaacagcttggaggtagatgtagatgtagtatttatgatttccaagaacgaaatcattcgatgcacatataaggagatagaagcgcagtaagagcttaggaatgagaatcctttta

SEQ ID NO: 33210 - DNA, 453 bp, Oryza sativa
  Clone ID: uC-osflM202037a04a1
tgtcaggatcagattttgaaggccttctcgacgctgtcgcggcgcgcgccgacggtcttgtagatgcgcatgaactcgcggaacgtgacggtgcgatactgcggctggccgccgtctccgacgagctccttcgccggtccgacgaggcagtccatcggcggcatcatgaacgtcgccaccgacgtcctcgccaccgccgagttcgtcatcgccctgtgctcgatgctcttcagcactccgttcgtcgcaatctcgaggaggtggccaaagttgacgacgaaggcgtcggggacggggtcgacgttgatccagtcgccattgtaggagacctggaggccgaagacgtcgccctggaggagcaaggtgatgaggttgcggtcgcagtgcggcggcaagcccagcgtcaggctcggatccgggcatggagggtagtggttgacgttgatgatgaca

SEQ ID NO: 33211 - DNA, 505 bp, Oryza sativa
  Clone ID: uC-osflM202037a05a1
acgtaataccatccattttttttattgtcgacgaatttatcagatatgctctagatacatatcttgtgtgtatatagccggagctttgttttcacatatcctcacccaacgataattgtagtactcttacaataaaaccggtcggagagggagggaagagattattacatatgtgttaagagcagaggccattgagatggtacataaccaaactgtaaaataaaaagatatagcatattatatattgatatatcatcaacatagcccaaaacaaagctgcatactattattataggcagcaatccaccagcgcgatgcttgatcttagcttagttgccaccagactcctcgcaacctgggggcttgtaggcgatgaagctaatcaactgcacctgcctgacgttgtcgaagccgatgatacggacaaaggcatcagggtaggccttcttggcctcctcgagctccttgagcacctgggtggcatcggtgcagccgaacatgggca

SEQ ID NO: 33212 - DNA, 465 bp, Oryza sativa
  Clone ID: uC-osflM202037a06a1
gcgcgccgttgagcatgaggcacatcggcgccctgaacgcctgcgagttgttgacgtagtggtcgccgtcgaagttgatgacgaacggcgcgttcgacagcagcgcggacacgcggagcatcacgttcatggcgccggccttcttctggtggttgtatccgggcctcttctcgcgcgagatgtacaccagcatggggagccgcacgtagacaccgatgaaatcaaccggattctgagcactcgccgacaatccaagcctcggtttacagcttggatggttcagtaaaacctgaacaattccagcatgtttccctctctggtggttgtcagccggctgaaaccatgtgccgggccaatgtgtgccatcagccatccatgtcgcatttttcgccgcatgtttggcgttgtacacatctgatcgctggcgaatggtgctcgagagggagtcgatcctgaccttgaact

SEQ ID NO: 33213 - DNA, 470 bp, Oryza sativa
  unsure (1)..(470): unsure at all n locations
  Clone ID: uC-osflM202037a07a1
aaacgctaatacagcgatactaataatgtgctgcaaatacaggaagtggttgaaagttgctaattaactagtaaataagtcacggaagcaatgtagggcacataaactgtgtccactgggtacttcagctcgacacattttgacatacgcagccctaattttatgattccacatagcaattgatcctagtacatcttatgatccagtaatacagcaggtagctgggtaaatggactcaaaaattgacttcaggacagattagtggccctattcttaaggcttcgctgcttgcttgatctagaaaccaccatcctccgcattgtaagaggtccagagagtcagattgtcacgaagaagttgcatagatcaaggtgctgtccttgtaagactcctagccaagagtgtccagttcagtaatagcattgttgaacgcctgctttgcaaggntgcaagcacggtctggtgagttc

SEQ ID NO: 33214 - DNA, 367 bp, Oryza sativa
  Clone ID: uC-osflM202037a08a1
aaaaacaagggaattttcatttacattaaaaatctttaacacgaaggcacgaacacagggggatataaaggattccggggggaacccacaaacaactgggtttctctccaatcaggctttaacaaaaatggaaaatccaaaagcttaaaagccttaaagggaaccatttaatttgggaccacaagggcccacagatgataagggtttaggaaaatacataacatacagcaacgggggacaaccctgggtttggggtggcgcctggttttgcacgcagaatctaaccacaatccagttcaggaggatttattttaccaaaatccacttgagggggattccttttaaccacaatccacttaaggaggtt

SEQ ID NO: 33215 - DNA, 370 bp, Oryza sativa
  Clone ID: uC-osflM202037a10a1
catgaagaaacttatatatatgttgaactccgttaattaaaaattaaaggagtatttaaaccggttccgcaaatattttagggcgagacatccagacgccaaatgggtgtccagtcctcgaaattccaaagattatcccagtttaattaatcgttgggattaagagcatgaacgacccatttacgaggggggcacggagtacgtgtgttgcttgcgcgcgtgtggatcgacgagattcttttgcaaaaattacctaattaattaatcggggtgctctctggcgtcggcgatattgtttattgcttggctagagttccccggcggcggctgccgcaaggtccttacaacctgggaaaggggcggtcaagga

SEQ ID NO: 33216 - DNA, 464 bp, Oryza sativa
  Clone ID: uC-osflM202037a11a1
tttgttttttttttacggcagtactaatgttttgccagagctagtttagtcatagcagtttatcagctacataattatagccgcaaaatgcgaaatccaatacgcagaacgattgattgctgaaaacacatctgtacataaaagggttctctggacaaagtttcacgttatgaagctcagaagtaaaaaattatctgaaaagatccggttgatgggcagtgaaaggaggaaagcactttatttcagcactgtccaggagagcttcaagacgatgtgttcttcctagctgcatagactcggtaagcagctattcccacaactgcaacggcagctccaactgagacaaccataagggaacggttcagaagttgacggtattgtctgcgtgttttcccagcttcagtctttggaatgctcagatgaggctggtgcgcagcatggactattctacagaaaatattgtt

SEQ ID NO: 33217 - DNA, 203 bp, Oryza sativa
  Clone ID: uC-osflM202037a12a1
catgtaaccctactcgcaattttgttgcagagctcgggtcgctctagaaggttaatgaccaatggagacctggtcagcaatgcgcactcgcaaagcatcaaccagagattgctgaacacactattgaacttaaacccgtctcttagaccaggcgagacgttcaccaacttagatagctgcacgtaaccacaaagactcggttc

SEQ ID NO: 33218 - DNA, 446 bp, Oryza sativa
  Clone ID: uC-osflM202037b01a1
aattataatacaagttcatatattgctcaaatattcaactgcaagaattaacgagcgagtttttttttcctcactcgatggatggatggatgcaacagcgggtgtcaattaatcatcatatcaggatttatggctagcttaaccaatcaaatcaaatcaatttcaatttctccttcttggcatggatacggcgttgccgtcgaagagctcgtcgatgatggcctcgaggccctcggcggagagcttgatgtacttctccgcctgcctcccggcgctgaagctctgcgagaacctccccaggaacgacctgtacgccggcacaacgacgggggggatcgacaccctgagctccgactgcaggtgctcgtggatcaccacccacgcgccctgcgtcctctggatctcgtccatggctgcgttgaattgcttgaacctcttcttgagca

SEQ ID NO: 33219 - DNA, 365 bp, Oryza sativa
  Clone ID: uC-osflM202037b02a1
cttgcgctctaatattcaaatgttataaacaccggatgaaacatcaacgctgcaccaacggaaacccctgtgcctacgggaggaaatactgagtcctaactccaggatgggtgccgccgcttaccccacaaactaagaagaaggtgaaatgcaccttgttccccgaagaaaggggtaaccctataagccaatcgtgacgcttaggctcaaccgaaccggtaaaaagctactgttgggtccatgacctggacctttagcttgaacattcaggggaacgctcctataagccctctcctaggccggacacatactaagggtgtatcaacaaactgggatcgatctgcatgatgcttgagagtaccact

SEQ ID NO: 33220 - DNA, 399 bp, Oryza sativa
  Clone ID: uC-osflM202037b03a1
agtattattccatgttgatcccttcaacaacacatgaaaaacctgggcccacaggacgttgtaatcggaattggggcaaaagcacaagagggagcccagtcaacgctgagcgccccccttttcggaaattcaaaagatggaaaaggtgctagataagtaaatgagagaaccacggaatgaaacaagcccttgaaggggcgcccgcacccgtaaaactacatagatacagggcgtcacctgtttaggggagacgtgtcgattcaagggagcaacagcccgccgcaggtttgggggagggaaaccgcgccggcggaaaaaaaccttaagggcgtggggaaaaacggggggttaaaattcctcctaaagctttatgggggcgcccaatatggagggccccgg

SEQ ID NO: 33221 - DNA, 479 bp, Oryza sativa
  Clone ID: uC-osflM202037b04a1
gggtcaccaagtgaacttattccttgttaacaaatccgtgtagtactaccttacaattaacgattaatccatgatgcgtggaccatcttattacaactgggcctccaccaaatcccttttgaccaatcgtgtcggcccacacacacaaaacaaaagcaaaaaaaagcccattgagcaacgagcccatagaagtagtaacaataacaaagttcacatttcacaagcattttacttgtcgaaggccttgatctccttcttgaacgccggcaggtggtcgtcctcgacgcactgcgtcatgatccgggcgccggtcttgggcaccggcggcgcgccgatgatggcgacggccatgaacgggtagtacgcgaagggtatgacgtgcgacggcggcccccacccgtagtccggctacaggaaccccagccgcgtccagttggagacgaacagggaatcgtacgtgaagctcagctcgtacggat

SEQ ID NO: 33222 - DNA, 407 bp, Oryza sativa
  Clone ID: uC-osflM202037b05a1
gagagtaggtaaacatgcttgtggttaaattttattttacataattagacataacaggcaccaaactgtttacaaaccacacaggtttaataaaggaaacgcgaatagcttgtctagcggattaaactttaaaatatgtacagaaaccacgagatataaagatgccggcctctcaggagtgccatttcagaactccattgacatattgcaagcccaggcccagcgctggctgcaatacagataatgcaatctctgagggtgaaatcaagcattaaccaaaaagaaaaatactgttctcaccattgctccaatcaatgcggtcaaagtaatataattaccttcagctctcagaagagtgtggtgcattatcatcagaagaggatgaggatgaggatgatggatttgag

SEQ ID NO: 33223 - DNA, 453 bp, Oryza sativa
  Clone ID: uC-osflM202037b06a1
cagccaagcaagatgacactacgatcgatatacagagaaactggatatagtaacagactacacagaagcttcacagagatgagaaaaccactaccaatacatgtcagaacttacaggtgatttagctcaaggagggcactcaaaacacttttcaagccttcagctactgaccaccagagacgtcttacaaaacgggactgcagcctgctacgcagcacaggtgacaaaacgaagcacggacgcaaacctcacccatacatccatcacgcacgtcagagaaagaaaaaagagcacagcatcacaaagacacaaaactgttcactggcaaaacaacctgtgaagggcaaatggggctcaatgctattcggcctcagcttcttcctcttcgtcttcgtactcttcatcggctgaggcgtcctggtactgctggtactccgcgacgagatcgttcat

SEQ ID NO: 33224 - DNA, 403 bp, Oryza sativa
  Clone ID: uC-osflM202037b07a1
gcaaaaacttgcaagaattgcccctccggtattggttcacaaaaaacagagctcccaacttcacttcacaagatctacttcgacgggggctacaaagtatataatggtataagacaactcaggcccaaaacaatttccagctttttacgacacggataggttcaaaacttaaggtttgactacaaaaagacagtttcaaacaatttttaacattttgggctttggcacccaaatcatttgtagggggtgctcaacagtttgttaaattcttttgggaccaaagaggaaattatcaccgccattctgcacgggtgcatttgcccgaggaacataaggtatttctccaacttaatttataaaaccttccttttgggcccccctgggtttaccatgaaggggggga

SEQ ID NO: 33225 - DNA, 500 bp, Oryza sativa
  unsure (1)..(500): unsure at all n locations
  Clone ID: uC-osflM202037b08a1
aacttctaaagctgagattgctatccatgagaaattacttaagcacacggtaataagtttccaggtggcagaaaggtaaactcatgtacaaatcgaccctattaagcaaactctctcggattgaggctgactatatttctttctgaggtttgataaaaactatctagaccaggtgagtaatatgtttgcacattaagcctaagcagcagaatccagtaggctcaggtactctgatatagcctgcccttcgttgctaacatcaatatcatagtcatccaaggcatcccccgtcatttcatgggcaagctcgttttccatcgccacatccctgactggaggaggatttgcttcttcttcaccctcagctgactcctcgctcatatcttcctccttatggttcacagtttcgtcatcgatcacagtctctacgttgtttgcagcttcttcattgatcacaggcaacacatgactgttcttcatagcgcttncatatggaacat

SEQ ID NO: 33226 - DNA, 512 bp, Oryza sativa
  Clone ID: uC-osflM202037b09a1
cacaaaaagaaacgagtatattatatctgatcacgatcatccttacaacctttctttgaaaatgtcaagacaacagaagtatatattgattacaattaccaaccaaaaatagggcgcctttacaacactggatgcactacattactaacactaaatgatccatttggttctagataagtaaaaaagagaaacaaggaatgaacaagcccttcaatgggcacccacacacgtttcactacataaatactgtgcatcacctttctactccatagcagatccattcctgcctgccttattgagacacaagtttgtacatgaacagcaatgccaacaccttctgttcagctcacccaattaaatttaccaccaaagcagtaataaagaatgctggacaatcaaacgcagtttggctgtacttggtggccgaagttcacaaggttgccggagcttccggtttgcccaaatattgcagatatgaggctgagctaccaccatgggacaaaagcaacgca

SEQ ID NO: 33227 - DNA, 472 bp, Oryza sativa
  Clone ID: uC-osflM202037b10a1
aaaagcccaaacacctctggatttatttaatcatcaattgaaatattattacatatgtctcccgtaatattgggaagaacgacataccaaatcaatcactcggaagttataaacttcaacaaaaggaaacaacttaaaaggtaaaaggaataaacatgacaatgtaatgcagggctggccgttgggtgagaaccattaataatgtcgtcgctcggtcatgatgaaggaacagatggggaggtactacataatataatcatgcttgtttcgttgtttgaatataagcgacgactttatcaaggaatacctcggcctccttagcatcagcttcgcaactttctgcacacttcttgcttgtggcgggatcctccttatatactgcattacactcattgttgcaaaaatctatgaatctatccgcctttagatccttcactcccttatgggcctcaaatatagacttggtcttgat

SEQ ID NO: 33228 - DNA, 291 bp, Oryza sativa
  Clone ID: uC-osflM202037b11a1
gggccaaaaaaacagaccaaacagccaaagaaaaatgaaaaaacttccccaccccaaaccttcttttaggcgggaccaacgaccttgcaattgccaagggggggggacccatgaagaaccggcagacccccggaccctggccaaaggcgttttggtccctcactgggggggcccccttgaccaccccgggaatttccacccgtgaccggcagggcaaccaactttcccaagaaggggcacgatagcaacccgggagacaacacagaaaggaacggactccagagataaagg

SEQ ID NO: 33229 - DNA, 526 bp, Oryza sativa
  Clone ID: uC-osflM202037b12a1
caggaaacgctactctcacttttattgcatcgcaggagtagcttcagtacatcaataacctatccagatctcgtccacgtataacatgtatcaagaaacaaatcagccatctggagagaactactgcaactacaccacactctcatccatgtggcacccatcacgcattcagcatgttgcctgcagatcccagaactcgcatcttcatttatgctgcggccataacgcattcaattgcttgcttgcagattccagtcatcggcgcttctggcccatacacctcaatcgggacgccgagttctgcgccaagcttgcgcattttagccagcccagtttggtaatttggaccaccacgtgggacatagaggtgcatccttgcagccttcaacttggattccttctctcttaaggcccgaatgatgccgctaaatggggccccgacgtgggagaagttagctatacccccttcaatgagaagagcttttttggcgccatcaggatcagcaggcgcacaatcaagtactac

SEQ ID NO: 33230 - DNA, 338 bp, Oryza sativa
  Clone ID: uC-osflM202037c01a1
gaattaactagcgagttttttttgcaaaaataaagggatggaccgccgccaaagcgggggggaacaaaacattataacgcgaaggatgtgtttgaataacaagaaccggaaatcaaccacaagggctccaagatgttttgggggccgcgtttccctttaaaacctcgctaaagatggcgggaaggaccaaaggccgagacccagaagttcttgggcacctgactgcaaaccctccaggtgtgaaagatcctacgaagaaaccacctgtacgccggaacttcaacgggggagaccgacacccttagcaactactgcagatgcccttaggtgaccaccca

SEQ ID NO: 33231 - DNA, 414 bp, Oryza sativa
  Clone ID: uC-osflM202037c02a1
gggcatataagtacgtaacatgttaacttcctctagcacgggaatgcttttcaacagttgacctttttgcataaagcaacacatacattgggtatagctgcccatgggcttgcccaatcgttctgagctcacgacattcattattgccctatagttttccaaagatagggggaaaacagcataccctcggcagcactaaatttcattagacaggtaagacaggtttattctgtgggtaattgttgcataggaatgcattaagaagccttcagatcatcaagtccaacactggccagaaaatcatgattctctttgagaaaagggtaaaaggtcgggcaaaatttctcgatatcagcttttatgggacccgttccactaatgacctccataaatttttctttattaggagcaagc

SEQ ID NO: 33232 - DNA, 243 bp, Oryza sativa
  Clone ID: uC-osflM202037c03a1
catatgcaaaaactgtgcgcacaggaaagtgtaaaaggaaaagaggcaaaaacacggggtataaacaagtaacaggggagcagatcccaaaaaagaaagaaaaagctgggggaaggggacaaaaaaaaaagtattcacaccaaaaagctaaagaaaaaagcgaaagagaaggaacgggacatacaacgagatgaacagtgacacatgctcaggggggaacctgcacggggctaagggagaaaa

SEQ ID NO: 33233 - DNA, 311 bp, Oryza sativa
  Clone ID: uC-osflM202037c04a1
acctatcaattaacgattaaaccatgatgaatggaccattttaacacaacagggactccaccccatctttaaggaccaatcgaggcggaccacacacacaaaacaaaagcaaaaaaaagcccattgagcaacgagccaatagaagtgggaacaataacaaagatcacatttcacaagcattttactagacgaaggccttgatatactcgttgaacacgggcaggaggaagttcttgacgcaatggggggtgaaccaggcgccgggcttgcacaccgcgaggggcaccgatgacggcgacggtcatgaacgg

SEQ ID NO: 33234 - DNA, 460 bp, Oryza sativa
  Clone ID: uC-osflM202037c05a1
cttcttctcaaagtagtgtagcatctttccttctttcaccattacataagcttaagcaataacagataacaaatcctcctcctcctctaggtaaaatattcaaacacaatacccttataagtacttattattaggaaagtagcgtgcatgggcataaatggcagcggggggcaggttaagaatcacaatgctgagcagcgaggaaacaaaacaccataatgggacagagcaaaagcctccgaaagggagcttttaggcagaaggcttctcccacttgaggggcttcaccacctcccaggtgaagtctgggtctgcccttccgaagtgaccgtaagccgccgtcttgaggtagcgtccgttgccgcctttcttgaggtcaaggttgatgatgatcatgccaggcctgaagtcgaagttctccttcacaatcttgaggatctccttgtcagggatcctgcca

SEQ ID NO: 33235 - DNA, 395 bp, Oryza sativa
  Clone ID: uC-osflM202037c06a1
aatagcatcaagcagtacaatatatgtttgatacagtacaggcgttaatcaataataatacgcagttacacatacgtacatagacatacacggggcttaactgcttatttaagcaggggccaagcgagggcacccgttaacatgatcacatatttacttactcgggacaggaaaaaatgcaaaagcccccaagttgccacctgtggccacttggcccaaattacgtgctgttacttagcttagctaaacctacttgaatccgacgagctgttgctgctgctgctgctgttcataatagctgggggaagacgaactcctcgatcgccgggatgtggccgatgtgctcgagggtttccttgtggggctcctcgttgacgccgatggccatgatggcc

SEQ ID NO: 33236 - DNA, 383 bp, Oryza sativa
  Clone ID: uC-osflM202037c07a1
aaaggggaagaaaccaccacattagatttggcggaagaaaccaccacacttttaaggcttaaccacgggaccacaggtgaaaaaatcggggggtttttttaacataaaccaggggataataaaccttgggacggactggcaattaagtaacaaaacacagggcacatgttaaaagaagttcatttataagcacgagaattcgaacagagacgggcccgggaaatttgggccaagaaaaaaaagacgggggccatttaaggcttgggaaaaaaaaaacaggtttgggggaaggcaaaaaaacacacatggcgggaaaaaaacgctggtaaaaagctacgggttttttttttggggggaggggtccacttgggatatgggaaggg

SEQ ID NO: 33237 - DNA, 403 bp, Oryza sativa
  Clone ID: uC-osflM202037c08a1
ggaaaggtacacttcctttacaaagcatgacactgtcacagttagaacgttcgttctaactgtaaagtcttgtcctaaaaaatgttttcactggtacagcaaaagtcttgtcctcaaaaaataaacttgcccttttctagcttaccagccattttatttcacatcatatcggactacaattttatttcaccatttgacccattttgcggtcggtaaaaaggtactgaaaatgatgataggaatgtctccaacactctcactttgtcttggtaacctcatgaatagcattagccagataggcaacattttctgttgttactccagccatgcttatccgcccgttacgagtcatgtagatatggaactcttttgtcaagcgatcgacttgttcaggtgttatacc

SEQ ID NO: 33238 - DNA, 375 bp, Oryza sativa
  Clone ID: uC-osflM202037c09a1
gacatgcaatgcctggcctgtattctcaatcataaccagcccatggaaaacgctaatacagcgatactaataatgggctgcaaatacaggaaggggttgaaagttgctaattaactagtaaataagtcacggaagcaatgtagggcacataaactgggtccactgggtacttcagctcgacacattttgacatacgcagccctaatcttatgattccacatagcaatggatcctagtacattttatgatccagtaatacagcaggtagctgagtaaatggactcaaaaatagacttcaggacagattaggggccctttccttaaggcttcgctgtttccttgatctcgtcaccaccatcctccgcattgtcagag

SEQ ID NO: 33239 - DNA, 388 bp, Oryza sativa
  Clone ID: uC-osflM202037c10a1
aatcataaaaacatcttatcggaggtaaatgtttattattgctcaacactacatggaattattccaatctttccgagtatcattcatgatcccgtctatatatcatatcgtgtatgaatacatgacaccttcaaaacatacaatttgaacaaacacaacttacgacaaaacacgtacactttaattgcacataattaacagcgattaaaaatagggcaaaagaaaggacggagaggagggtctcaaggtcatttgattcattcattcattgatagcatggctccaatgctccatgcttccatcgatcagctccagaaccaggcggtccagctgccgagctgcgcctcctcgccgtcggcggcgtcgtggtgcacaactccggcggcgc

SEQ ID NO: 33240 - DNA, 380 bp, Oryza sativa
  Clone ID: uC-osflM202037c11a1
gcaaatcataaatcagtttcgtttttataaaaaccctcgtaggttccagcagactgctcataaaaacggagtattcaacatcgcagagaccatttctctgacccatagcaaaatcacagcgacaaaatccgctgtttacatttaatttatttgtcaactacttcaattagggttggctcgtagtcagcaggggcctcaaacccggggaggttcatcacgggggcggcgacgttggcgaggccaggggtctgcacgtcgttgcggaatctcaccccagaatgtaggccagggcctccaatggcaactggcactggctgaagagtgtgtgaggtaagaatctggatttcgcctttcttgtcaagctgtggctggccggattt

SEQ ID NO: 33241 - DNA, 369 bp, Oryza sativa
  Clone ID: uC-osflM202037c12a1
agaagcaaacctgttgcaggtaattttcattagagaaatacttaaattgttaccccagaaaacattgaacacttaccaaagtaccagatatatactgggtttattattctatgataaataatcttacagtgtgtcatgttgtacaaccaatgaaagaatcggtagtatgcacaagatcctactgacaagtaagatacactcctttctgtaaacaacaaacatggctacctttttagcaacctaaatgatggcatctcctgaacacaagaaatgcttccgatagtaagttcttgttctaactgaatacgcatggactttagaacctcattgaattccatataactagcttgtcttgtgagccactggagc

SEQ ID NO: 33242 - DNA, 447 bp, Oryza sativa
  Clone ID: uC-osflM202037d01a1
aaaatattgaagactatcagattcgtgttaactgctattgtcatgcacagggcaagctacacatcgatcaaactggactggcctgagcagtgtgcttcacattttaggtagcaagacgtatacatgagaaacttggaaaacattcagagccgcgttgctggtaggcagacagcagacagtgttcagagcaaacatatttcctgcagcctctgtgttcttctgtgcagcttccaaattacgacagtccagtcatcttgatctcctcaaattaagcgcgagaagcggcgagcccgtgattgttccatcagaaagctgaaaaatcttcagctaaatgggtatgcgcaattatctcctttctaatgttcagctgcttcgtgttcagtgatcctattattcagagtcgctgtccatgttgtgcattgctttcaaccccctggggcgcttttt

SEQ ID NO: 33243 - DNA, 494 bp, Oryza sativa
  Clone ID: uC-osflM202037d02a1
aaatacttaatagtaatagactctttgatggagtattacaacatgcagcagtggcattaatacgccagtacattaattaagttacacatatgcaggctccattttggtttcttttaatttatcgtattacagaatttctgtagccttgctgatgatcacttggatatcatgtactagtaattaacaataggatgcatacaaaagatggcccaacgacaacagaagatgcgtgcatctgacattgtctggccttatttggttggtggtactccaattaattaacaagagatgatgcattcttgtgccttagtttcttcacatgcttggcttaacgttgagcctattcgcaatcttcacccccaacgactcatcacactgggagaggtagttgacccagatggcgcggagcttaggggagaccttggggtgcgcgagctcgccggcaaagcggcggatgaacctcttctgtttatccggcgcccacgacctgtacc

SEQ ID NO: 33244 - DNA, 474 bp, Oryza sativa
  Clone ID: uC-osflM202037d03a1
catcctgaattacccaacttttattgctaacacaataatgcaatcgttataacttacttagaggcttcacctatttgcatacaccactttaggtacagtttttaactttagtccacagctgccaaacacaattgtacagggaaaaacccaattatctgcagtccatcaaaatgagcgtctaacctcgtcacaggcacacatgaccattttgttactcccgtggcctagcaagccacagcgaactcaaagcacgcaagcgtgaaaagtaatcgtgtatggcaagaagagcacgcgaggcttgccggatcgtcagaattcgttgcatttgatgcaatgtctgctgtcgcaggttgtccgcctggcaaaggaaattctcgagcgttcctagtttacccatggccattgccatctgacccatgtagtttcgccacattcccagaagaccctgatgaaccgagagatccagccaaagta

SEQ ID NO: 33245 - DNA, 413 bp, Oryza sativa
  Clone ID: uC-osflM202037d04a1
actagggagttctgggcatgtcggatgtaaacaaaaagaacaaatacaacagtgtacattacactccgagccaaatatatgggaggcaaataagacagcagatgcgcagggaaaagagaacaaaattacacctcgggatacacttcttttttgttctattttacactccaatagcacaggcatacaacaacatgcaatccggctttgccaatgaaaggaataattgagtggtaatacactactgaccttggggtttacaagccagccgggtgatgctgcgaaaactgtgctgacgctggaaaatttgtatgaccatacgaaccatggtcgtagtcccgctctgatgatcacgacatgttgccaggcagatccaaaatggcaccatgaaatgcacatttgaacagagcggctta

SEQ ID NO: 33246 - DNA, 404 bp, Oryza sativa
  unsure (1)..(404): unsure at all n locations
  Clone ID: uC-osflM202037d05a1
actcacaataattaactaagaatgcatcgccatatccaaaagctgttcagatgaaagttccaaaccacaggtaaaccacagcgttcctcccccacaactctcacttaatttctaccagaagcaacgacgatacgacagatcaagccacagccaaaagagacgatggcagaaagaacatcgtgagcggcaaccatggagcagtttagtcgacctcctcgatcttggggcctgcgccgttgccgcccgccggcgcgtcctcgtccatgcctccggccatgtcggcgccggggccctggtacatcttggcgatgatcgggttgcagatgccctccagctccttcatcttgtcctcgaactcgtcggcctcggcgagctggttggtgtcgagccagctgatggcncca

SEQ ID NO: 33247 - DNA, 382 bp, Oryza sativa
  Clone ID: uC-osflM202037d06a1
caacaacctgacttaggctcacatgggccatgattaaggaagttagaccaccaacgcgggcccggtgcaggttatgctttcgcaaaaggcacttggtactggtccatgcttccatcagacgacaaacgggctcaatggtgtcagtaaatgttctgcgaattaccaggcaaaaaaaagggagcgtagtacaaagcctgaatacacactggagtaaaaccagccacggcatctgcgctccacatgtcgcgatgtgcagcggtctgagataaacagtttctatgtgatggaacttaaaagtctcttttattcaaaaacacgggagcgggcaatggctcactatctgtccctctgggtattgctttagtttaagtgaggcatgagt

SEQ ID NO: 33248 - DNA, 437 bp, Oryza sativa
  Clone ID: uC-osflM202037d07a1
gatacaacagcagaaaaggatatacctctgcttccccggttaccatatggaaagatttttacgttacagacatacaagttacagcacaagcagttttcatatgcttgaacatctaatgtcagcggtagcacattaaccaaaagtaaagtaaaaatcacatcttgggagcaagccccgtatcatgcttgggaacatcagctaatatcagtcttaaatcacatctcaggaaactgaccggcaagtcatcctttcctactcgctgatcctacagcagctgcttgcagtgacagtcatggtgtggccttgtcagcaagtgagtgggcagccgagctccttcgccgccgcggtgaggaaggcgagcgtcagcccggtggcgcggcggctgtgggcttcccactctatgcatctctccacatcggcttgccagttgatgatgc

SEQ ID NO: 33249 - DNA, 388 bp, Oryza sativa
  Clone ID: uC-osflM202037d08a1
agcaatgtaaatactcgcattccaaaacagccgatggacaataatcggactcagagcatcagttttaaccgaacagaaataaacgagtattaaacgactgacatagtgcacattgcgagcagatattaacggtccatgaaacgagagccatggccgggggcaaaacttaacaaatactagaactagatatctcaactgcagacatgcaaaccaccatttgaacgaggctcacttcttcttggcggcagccttggtcaccttggcaccggttgggtccttcttctccacgttcttgatgacgccaacagccaccgtttgcctcatgtcacgcaccgcaaaacgaccaagaggagggtactcagagaaggtcttcacaaccatgggcttg

SEQ ID NO: 33250 - DNA, 453 bp, Oryza sativa
  Clone ID: uC-osflM202037d09a1
agtaaaaagagtttgttttttgttttttaatgcaaggaaatgtggggggggtggataatggacacaagggaggtgggggaagaactgtaacaaggagcaccgtaccgagactggaaatacgttcaataagcacaatgcatataaagaaacggtgggggctaaggaacctaaataggatataacttatttatctagtgaagaatctgtgataatcacacggcggatgactggtggatggtttaaaaatccacgcccttttaatggaccacccacttcatacggcagtttacgggggcaaggtatcttaagcttgggattccggctttgctactggccttttctgtacgctgacagagatggttgtggtttggaatgcccaccccagacagcccatccggggggtgcgtggaggccatggatggtacagtgagcagacacccacttgagatggtt

SEQ ID NO: 33251 - DNA, 511 bp, Oryza sativa
  unsure (1)..(511): unsure at all n locations
  Clone ID: uC-osflM202037d10a1
gtgctgagatgatatttttttgttacgggttttgagaaaaacaaattacaggactttgtgactacaacttgtacagcatggttaatccaaataatacaattttcagtagagacattgtgacaacaaattgaacaatgtggttcttttgtgtaaacgaccaaatcgaacagcacactaataacttcgtgaaactgaaagctgaaggaatcacatacacgcaggagcaggcatggaacgaattcagttatctgcaattggaaatgctgacccaattttgctgtttcccattcggtagcacttgatgtttactccgtacgggccaatctcaacgcggttatcttcccctcccataaagaagcagagcgtgtagagtgcaacctcaaactcagggctgacaccaatcagagtgctggataccgntttcagaacaccgtgccactcaaactgaatagtcaatagctgtgtctctgaatcaggcgattccccacgcctccttgggatatgtaacctt

SEQ ID NO: 33252 - DNA, 389 bp, Oryza sativa
  Clone ID: uC-osflM202037d11a1
ggacagtaaacactatcaccccataagctacacatacgtaaacaccaagaaaattgcatcgaggaaacttactttttataccatggcccctaaatcactctactcctttgatttctaaaatgtactttcagaggaaggaacacactgaaaaaactccagatctcctcagtggaagctggttggagcagacagtttgctatctttctctttgccatcctcaacagaagaaacagaactgtccttctccttcacagctaagaacaccaagagtgcaagcaaggggtagctcacggtagtaagcgcccaattcacaatcagttgcgaaattaggcttgccttgtgggtaccaacttgccatgccacagctgctccagcactttgcactccct

SEQ ID NO: 33253 - DNA, 439 bp, Oryza sativa
  Clone ID: uC-osflM202037d12a1
gggaatacagaactttcacagcaagaggctttacaccaaggatgtttgacaagacaagtcacctctacgcattttgtgcttcctctggacatacggcacatatgatccgttactttgaggaaggtgataacctactacttcgaaactacagatacttgttcattgtcccaaagtaaaatccactcgctggaatgcgctaacatgtgggtagactacaatgacatgtggaggaaaagattacaaccaacggcaattttgaatcagccactctagaactggatcttgaagaattgcttcagagttagcctgagaactgggtaaagcattccaaggattctgacctcctgttgtgggactacaagcataagataccaccgttaactgaacccgacaattggtttgaatcctttgaggaatcagtgtgtcatgtctgagatgc

SEQ ID NO: 33254 - DNA, 415 bp, Oryza sativa
  Clone ID: uC-osflM202037e02a1
gcagtaaacgacaatccgatcgagggctttcaaattgcgtgcagggccaaaagattacaagttacgatttataaacacgaaaaattccgcaatcatgcgaattattcacagaatacaccaaagtatgtgtaactgcttgtccaagaagatagtgaaggttaatatagcattagcataacatcttacagtaggtgtctacgataagaactattgacaaagtttccacacgctgtaaaatgccaggggtcccttttacataagatggcactccatggatatatgtttacaccgacttgttcttgcaagaattccaacagtcactctcaggaattcagcttgatgccttttcttttacccttgctgttccattcaaagtttcttagttctttgacttcatggtttctttttcaaaccc

SEQ ID NO: 33255 - DNA, 428 bp, Oryza sativa
  Clone ID: uC-osflM202037e03a1
gacagccaaagggagaccaaatctcaagaacaacaggcccagaaacacccgctccaaaacataatcccccacaaaataccaagagaagacacccccgcctagagccgtggggacccgcctgacaaaatccgactctgctggggaccccgacaaactaagcctggagctagcccaaaaacccctatttctcgccaggggcccggaaccccccgcgcccaaaccgggaccaggggcccatcaaccctgcgctggcacccccccgagcgcaaaacgagaggccccctcaaccacggccagggagaagggggaattaaattattttttgggggttttatataagttatattttttgtttttttggggtcccccaaagacaaaattataaaacccacccccccccccccccggcgaggaaaaagaattatatg

SEQ ID NO: 33256 - DNA, 462 bp, Oryza sativa
  unsure (1)..(462): unsure at all n locations
  Clone ID: uC-osflM202037e04a1
gctggccccaaactggagataaataaacgctcatttcctctatttgtatgtacgacagcatcatgtctgtaataggtaatctgtacatgtgaaattgatgctaccttcttttttacaaatggtatgcaaccacagataataaagaaaattgcagaaaagcagatctgccaaaaaaaatcccaccttttctgtgggagaaaaggataattgagccaagaaatatagaactgactttagatgggtactgcagagtcgggattcgcacgatttaggcgaactgtgccaagaatgtattcaggcagctctttctcttcctttgcctcaattagaatagcaagatcaacaacaaggcctgtgacatatcccaggactagaccaataatgctccgtgcaacggatgaagaaccgatgtcaacatctatctttagaaagttatcctggcnaagggaattgcatgttact

SEQ ID NO: 33257 - DNA, 495 bp, Oryza sativa
  unsure (1)..(495): unsure at all n locations
  Clone ID: uC-osflM202037e05a1
aacctactaaattcgtatatccattaagcctcctcaagcagccttggtatgtatttacatgtacctgattttcactcatagctagctccgatcgaactcgatcttcctcgcccactagagtaaatcccaaccaacaacatagccgaaagatcagatgtctcactatacatgcttcagctaaggccccacccccatatccgatgtacacatgatatcaggaactggaattgattcaatgccagtaatttcatctaagcaaattcaattccctgaggatcctactctagtgtacacgattgagccgcacaaacttactgagcatggaagcaagaaccttcatccattgcagatggcattgaggagcacatgccccagcatgaggtccacgaaatactggtgcccgaccttgccattcngncatancancttcgccggtgcacgcccatagggaacaccatnattgnaacgattgtcatagtgccagggaaggtcata

SEQ ID NO: 33258 - DNA, 450 bp, Oryza sativa
  Clone ID: uC-osflM202037e07a1
aatgctcaacaagatagtacaccacaaatgcaataattggtcttacattgttcaaacaaacatgacgaatttccaacagaattccggcaatagagatgacaaaaagggttctctaatacaaaaaagaaaacaataattaaccggcttatctccatgcactactttattggacaaaagggctagtcgcataagagaacatctgatagtgccaagaatctgctttagcgtctggcaaataccaaatacagaattcatttgaattctgacatttcacaggcgtgtggcatgttgctccacgaggaagaattgaacatgataccgtcgccaagaacaggtctgcaatcgatactcaagtcattgcccagaagcattgctatggcattgttgaaaactgatggatcagctgtattcccagaaaacaatgcatctggcctgaagtttttaggatga

SEQ ID NO: 33259 - DNA, 461 bp, Oryza sativa
  Clone ID: uC-osflM202037e08a1
acacaatgtattatttatttgcccctttaaaattaaaagttacaacctgggggccatggcgacgcttacatctgccaccatggtctgtgacaacttatagcaggatttattatcaattgtgtacaggcatcaccattgcccgttggcatggcgatacagatgttcttcattcaccctcccactccctaaattggtgtagttccccatttgctgtgaaaatccatttgggttaactccaaggttcactgttggatttgagaagttatgtagccaaggttttgaagtaatcgagtccatcctttcattggaataagcatccaatgtggaattttgccctttttttaacctataaagagcattcagcctgtcataagccatcgggtagccctcgtcatagtaatgatcggccaagttaaccggccagaactacttatggaagtcactttagagtctactaagtt

SEQ ID NO: 33260 - DNA, 566 bp, Oryza sativa
  Clone ID: uC-osflM202037e09a1
ttggtttttttttttttttttttttttttattttttataaattttaatttaaaaatatataaaaaaaaaaaaaaaaacaaaaaaaaaaaaaaacaaaaagaaaaaaaaccacaacgaaagaaaaacaaaaaaaaaaaaaaaaaaaaaaaaaaaaaaaaaaaaaaaaaaaaaaaaaaaaaaaaaaaaaaaaaaaaaaaaaaacgacaaaaaaaaggaaagaaagaaaaaaagaaacagaaaaaccaacaaaaaaaaaaaaaaaccaaaaaaccaaaaaaaacaaaaaaaacaaaaaaaccaagaaaacaaacaaaaaaaaataaaaaaaaacaaatacaaaaacaaacacaaaccaaaaaaacaacaaaaaaaaaaaacaaaaaaaaaaacaaacaacacacacaaaaaacaaaaacagaacaaaagaaaaaaaaaaaaaacacaaaaaacaacaaaacacactcaaaaaacacacataaaacaacacacgcaaaacaacaaaaaaacaaaacaaataaacggaaaagaaaaaaaagagaaaacaaaataaaaaaaaaatataagag

SEQ ID NO: 33261 - DNA, 465 bp, Oryza sativa
  unsure (1)..(465): unsure at all n locations
  Clone ID: uC-osflM202037e10a1
ttttgtttgaacaagttctctttcatctgttataaaccaaaatcagcatctgcctcatagattgacaggtgctcgagatatgagatcatatgtagttccacaaaattcgtcaacggatcatatctccaagaatgtgtcagacaaaaaactagatacagatcaattgcacagtatcatccatcataacctctctctctaactgtctacccctctgtacttctatcccgactgttgacaacatgcctacaatttgtttttttgtccaaccaaaagctatatttccttcctatctgtgggagaacaacaacacgatatgtaatgaggtatacaccaatgctagaagcttaattagtttttgcaggtcgtatcacatgatagaaatcaagcagccaatgagtgttttttttcagcttctcactccctcnacttctcttcgnatggcctgtagcaacatctaattccatg

SEQ ID NO: 33262 - DNA, 525 bp, Oryza sativa
  unsure (1)..(525): unsure at all n locations
  Clone ID: uC-osflM202037e11a1
aggcatgaagcagccaaacttgtaatttcattatacgagacaaaacctgtgaatatgtactgatgagttgaaagttcagtatttccccctccatttttcccctttccccatctgcatcaggttctaggaaccaaacatattacagtcaccagagagataggatgcaggttcaacacaagatctgtctcaacatgttacacgaactcctggtcctggtcatctggtcttcgagaaccctcttcgccgtcgatcattctcctagtcatgttggccctctgaacaaggcggaccagcgcttgcaccacctcagacatcggcggtctgaactccggctcaggctggacacacagcgcaatgacgtctgcgaaacgggacagggatttggcagggtacaggcccttgagcgctgggncgaccatncnnnccaacccatcnatgtcatgcagctggggccgtgcccaccggacaagggactgttctgtccggagtctagcgctgtcaaaaggtttgcggcctgtcaagagc

SEQ ID NO: 33263 - DNA, 486 bp, Oryza sativa
  unsure (1)..(486): unsure at all n locations
  Clone ID: uC-osflM202037e12a1
aaagaacaagataagtgttcctcttgctgttcattttaacttcctcaatttgtataaacttacaagttacaacaatgttatgtacggctcgtataatacaagactactcaatcaactaaagaatagaagagaactagttgccacttgactcatcaaatgactgaaagaaaccatattgaagatcacatactcaatttgccaaaaacctgcatcctgaattgtcaaatgatacaaacaagacagccttcaaaactagaatggtgctgctaacgttgctcggcaaaatgaaattgtttctttttgtgacagatgctgatgatgtactcccagtaaccgcattgttcaatttagctgtatcaaaaaatctggcagcactgcagcttggatgcacacttnantccttggtaccatcacataagagataagaaagtgccatggtattgaaatccaaaacaaatttgtctgancaggaagncaggaaangct

SEQ ID NO: 33264 - DNA, 323 bp, Oryza sativa
  Clone ID: uC-osflM202037f01a1
agtaggaaccagacacaaaggccatatatgcaaccggaataacagaattacaactgcactggacggattatattgttcacaagcgaaaaagtaaactaaggcccagatcatcagggtcgttacaacttacaacggggtagattgggaaacaaaatgcaactgattatcccaactagcattagcagagggggcgggtcctgaagaacaccgcccacgttttatgctcaagctggacaaagaaggccggtatcgccggcccggcggacggggaataccatgggaagcaaggggatagtactgccgctcggcccggtggcgggtca

SEQ ID NO: 33265 - DNA, 357 bp, Oryza sativa
  unsure (1)..(357): unsure at all n locations
  Clone ID: uC-osflM202037f03a1
agaccataaaacttttacctgagccaattatgcacctgatatgtaatacactctctcttactgaaatttcagaagagaacataacatcaaattcctttactaattacttctgctcgtacataatattgcaagcacgaagtttccagtgtcttgcggtgagcatataatctcaaaactttcttcatctgtttaatctgtttctttagggggagaatcctctccatttttttttattcaagccacagttaagaagcattctagtgattactctttatatgtttcatgcggttaattaaatgatttttttgaantttttttatatatttntttggtggtaaagaaacgaagagccccccc

SEQ ID NO: 33266 - DNA, 490 bp, Oryza sativa
  unsure (1)..(490): unsure at all n locations
  Clone ID: uC-osflM202037f04a1
gaattgaagccgcaattctgatcattaggtatctaggttattatagtctagaaaggcaccggtaaatacaatacagaactactaccaaaaaaagatacttataatatatcatctgcagaagatcctctgccatattttacaggtatgagctagatcgagcaccagaaactaaagtcctcctgcaaacatgaatgcctgcaggaggaataactaagaaaaacaaaataagactcgtgattattttctgctgccttcatattcccttcacccataataacgataagcatatgctatttgcactagatatccagtcttgtagtgattccggaaaacaaacaattggtcaggaattcccttctgtggtggtggacaatatctgaaaaccgtccatctaaatttgtagcaggcacccatagcatagataaaaaactngagttacttttgccctagtatagaagctgccaatctaagaggagccaaacccaccgga

SEQ ID NO: 33267 - DNA, 337 bp, Oryza sativa
  Clone ID: uC-osflM202037f06a1
gagggtaaaacatataatcataataataaacaaatcgacctgtaagtaatccccccccccccaaaaaaaaaaggaaaaaagaaatagacaagagtaccagtatatttcttggcgccactgaacagtatgtgatagaagggtcaagttgctgaattgaactcctccgttcaaatcaatcgcctcagataaggcaaactccgcagtggtagctttacaatggaagtgtttctcaaaggaggatgtgacaaaatcattccaaatcctgacttcctcagtgggttccatgattttgtttccagaaaatgtacactgagtttatcaaaacttcttgggaaga

SEQ ID NO: 33268 - DNA, 123 bp, Oryza sativa
  Clone ID: uC-osflM202037f07a1
ttggggtttttttttttttttttcttttttttttttttttttagttttttaattttttttttaaatcatgcaataattgaacaggaagaaaaagggaaaaaaagaaaacagggggcagagagg

SEQ ID NO: 33269 - DNA, 304 bp, Oryza sativa
  Clone ID: uC-osflM202037f08a1
ggaagctagaaatctccttgatcgatcacacacacacacacaattaagggacatacatacatgcactggtgcaactgcaactgcaggggcggggcgtggctactacaagtgtacacatggtacgttggttggcaccatctcgatcgggtcgttgggctcacttgccggggaccaagttgggggcgtatgcccaggcgttgttggcgacggggtcggcgacgtggtccaagaggttcttgatggggcccttgccggggacaatggcctggacaaaaaagcccaacatggagaacatggcgggggg

SEQ ID NO: 33270 - DNA, 355 bp, Oryza sativa
  Clone ID: uC-osflM202037f09a1
agccaaaaaaacaattttttcgccatatactgcattaaacaaaggaatacgtcccaaaacattgcttattttaggtccaagggtagactagccctactttagttccacaacaaaaggtgctccacaaagaaaaacaaaaacagaatttcatagagcgaatccatttaggagcctaggggtttccccggcacatggccgaaagccctaaggaacccgtcatacacatgatgggatggggttttcccagaaaaagagcatcttttcccttcaatccccgcaacaactaaacataatctccccttttcaaacacccttgggggctctgaatcacccccccccacccccccgcatttta

SEQ ID NO: 33271 - DNA, 268 bp, Oryza sativa
  Clone ID: uC-osflM202037f10a1
gctcatgttgaagctcacctcctccgccatgttcgtcgcctcgtttcccttgtgctcgtcttcgttgaactcgacgtccggcgaggggctccgggaccacatgtcctcggggtacttggcggggttactttctttgagaccattacacggtcagcatctctccattgaccattacatcagaccccattaactctcattacattacacagtaccagtcttctactcctcgctatcccaaaacctgcttgccataatctacacctcctac

SEQ ID NO: 33272 - DNA, 450 bp, Oryza sativa
  unsure (1)..(450): unsure at all n locations
  Clone ID: uC-osflM202037f11a1
ataagaaaagtcaataccgatataatccacacaatccaaaccatcctagctccacaaattccacgtgaaaataaggaccagaactttaaatgacctttacaagttcaacgcaaaacttgtgctatgcataaacatagtctaaaactaaatttcaatagtgtgcaataataaagtgtagtccaagggtgctactcccgccccatgccgatcaatgtcattaggtacctgcactgtctcaagatatctacaaagtaggcatctctagtacacagtctcatctcgccactcccatgacctgatgtcaccaatgcagtgcacctcgatgacgaagaagatagatgacagtacagtccgcctgctggttgcactcaagctttnacatggaaggctctgcctctatatgatcagancaatacctttgcttttgccccttgttcaatttgggaattt

SEQ ID NO: 33273 - DNA, 369 bp, Oryza sativa
  Clone ID: uC-osflM202037f12a1
cagaagaaacttctttcctacaaagggcaacgcacctgacatgctcatttaacacttttaccctgggggccacagaaggagagcggcccactgttccaacaccacagggaaaaaacgctctcaggaaaatggtaaaaacagtttaaactcaaaagcctacccagatcttaaaaacaatgccccaggctactaaaactactcccccaaagaccagggggggccccccgctaaaattatggcacatgccttcagatttacataaccaaacggggaaaaggatacggcccaaaacggcaattacaaggatggcctgataggctaagttgggcagtaagggatgttttcacccaatgggggcccacgtgcccc

SEQ ID NO: 33274 - DNA, 370 bp, Oryza sativa
  Clone ID: uC-osflM202037g01a1
acaaaaggcacatctttattatatcgataatatatacattattacaaaggcactttaagcctgacaaacaaaaataaacagcagcggacttgcgggcctacggctccatcttcacaggcgctcaactggggtataagccaggactccacctaagacttcttctccaaagcttctcttacttgctcagagataacggccttccgaaccttcggcgacgaccgcaaaccacgcttcgggaacctccggaacgacgaagactacgcgaagcacacaagcaaagctacaagccaccacgcgacgaggcgtgggaaagacaacgacgaacgggcgcggcggagacggacggcgagggaacgacttcggcggcgat

SEQ ID NO: 33275 - DNA, 280 bp, Oryza sativa
  Clone ID: uC-osflM202037g02a1
gaaacagtgcaaataatgaagcattgcaaaatagtaacaccaacaaaagacagcaactgaataatctttcgatattttaccgagggtaatgtatggtaggaaaatcgccagacataacagagccggccagactcaactcaaactcaaccctatgatggtaaactgtatgggattaacgccttcgcctatgacaatgtttggagatacactcttccaccaaaaaacgaatgtcggggagagctttcccctacacgaattcttcttgttttcaatgttaaaa

SEQ ID NO: 33276 - DNA, 425 bp, Oryza sativa
  Clone ID: uC-osflM202037g03a1
gaatgctgaaaggtaaaatcttattcactcggacacttcaaagctacagtagaattgtgcgacaactcttgaatcatatgcatggctcctgggcacaagctgtacacaacctatgaagagaaacggtaagcactatatatccctttgcctcgtatgcagcctatgcttcatgacttataaacagagagcaacaatgtgctgggatgctgctgctacgacaaatgcttcgcctaaagttggcacttcatagcagggaatgcagctcccgggggggagggatcacaccggatacagatcagggtttgtgaagaagctcatggacagtctgagcaagcttagcttcacccctgatgccttcgatccacctggcgttgatcagcaccctctcgaggctttgcttcagtgtcctctcgtaccccggctta

SEQ ID NO: 33277 - DNA, 472 bp, Oryza sativa
  unsure (1)..(472): unsure at all n locations
  Clone ID: uC-osflM202037g04a1
gaaggctcaatgggctcccagtaaagtaaaagaaatggtgacacttgatggttcaaaatgtccgagaatgcatacctgaatttcatgcgtgcaatttcaccaaggttttttacaaaactgtcatggaaaagcacatggcagggtaaacaacggaatgggttgtatacatgttattgtcgggcaggctagtgctagggtgctacccatcaaatagaatgtagtcgaatacaaatggctggactgtgatattgcccgcctgcctgtactcatgtaatttcagctgctaggccatctgggcacctgtgttacttctcatgctgtttcaggttgagaggtaagcttctccaaattcacagaaatatcaaggcgcanctttgacatggaactgatcatttgagggatatctgnnncaaagctgtctccagcgcctnccnaacannnnnnttntgcctttttttaacctttgttggcc

SEQ ID NO: 33278 - DNA, 518 bp, Oryza sativa
  unsure (1)..(518): unsure at all n locations
  Clone ID: uC-osflM202037g05a1
aaaaaaaaagtagcacaacgcatcattcattccttattatcaactttttgggacaattatctgtaccatgttcaattatagacatataatacaaagaatttgaaagaaatttgcaatctatttgtgaaccatatctctttattgtgctataaataaaaagcaaactttacattccatcggtaggcaatgagttggcacaaggcttcattttatctgtacgagtagaaccaaagtaactcagcaaaattttcacaccagctgtctttgacactagattcatggtctaatgtactcaataatgcagttctccttgagccattcgagcaccttcgctgcctctagaacatcctgaacctgctgcttgatgctcccctcatcatagtcttgattatagtgtttgaactcttctatagagttctcaacttcctttaccagttgctcggncgaaaactgcagattttcagccttgaatatttcaccaacagccaacattnngttaatgattctattaatatttt

SEQ ID NO: 33279 - DNA, 432 bp, Oryza sativa
  unsure (1)..(432): unsure at all n locations
  Clone ID: uC-osflM202037g06a1
aggatcaaaacatttctattaccacaactttttaaggatggaatcgagtagcaatactttcaccccaaaatacagtttagcgacaatatcttaaaaaagccgcttgctttgccgccatggctggcaagctgagcagagcagctaacacaaagaacacgagatcactataaaccaaacggcaacgaacgaagaaaatacagggtcttttttgtctgaagatacacgaagcgggtcggtttcttttatttttaggctcctctcctcctcgatgatgggtgtatggcaatggcaatggcgatgggatcttggcttagttgatgggaaggggctcgccgttccactccttgaggcagtcgagcatggggtcgatgagcttgccctggcttatgccnnggaacaccttgttggacttctngncgggggacttgagct

SEQ ID NO: 33280 - DNA, 188 bp, Oryza sativa
  Clone ID: uC-osflM202037g07a1
tttgggttttataaacgctatcccccctaactccagcttaatgaccatttcttagaaaagccgttagctatgccaaaatggctacagcgccggacgcagagttcttcacaaaaaacaccacatgccccataaaccaagcgtgtaccaacgatgcacctacaggttcatcttttagcagtaacacacac

SEQ ID NO: 33281 - DNA, 71 bp, Oryza sativa
  Clone ID: uC-osflM202037g08a1
ttttggttttttttattttttttcattctcctattttttttttattaacacatcaatccccaacaacagcc

SEQ ID NO: 33282 - DNA, 59 bp, Oryza sativa
  Clone ID: uC-osflM202037g09a1
ttgttgttatttttttttttcttctcttttttctttttcaacccttcaaagctacagac

SEQ ID NO: 33283 - DNA, 429 bp, Oryza sativa
  Clone ID: uC-osflM202037g10a1
agctgatgccaaattactcattagcttccccacattgtggtctcagcgaacacaacaaacactggggcaccacaagtcatggcaatcaataccatggccccggagcatcctgcatgccgttccatttcattttttatctacctaccccaactttcttccatcaagacgagagttgacaccacttgacgatctcacgctgctaccaccaggacagccattgctcctgccactgccgcttgtgaccatctacacggacccgcggaatccggcgatgccgccgagatgtcgtagtagccgctgttaactccgttgttgtcgtaaccgccgctgacattgccgccaccacctccggggaatctccaaccggagttgccggcgccaccgaacgtggagttgtcgcgcgggagcttgtaggagagctcgtacacc

SEQ ID NO: 33284 - DNA, 380 bp, Oryza sativa
  Clone ID: uC-osflM202037g11a1
accaacattctcttttcaaccaataacaatcctttaccattcaattttcccaccaacctttatttcttaaccaattacaacctttcttcgtttaattttaaatactttcttaatacccatcactactagaaaaagcatttttgcagatgttgggagattaattttacaaggggattggacccttagagctaaatggccgcctaggaaaatgtaaaccggggggggggctcaacgttcgcctgtgaaaatcaattttttcagggggcccacttaagaggcctctcttcctctttcctcacattttccactctcctagttccccccatccttactccctctttcgtacaatccatcctttttctgtttattttttatttttt

SEQ ID NO: 33285 - DNA, 373 bp, Oryza sativa
  Clone ID: uC-osflM202037g12a1
tttttgttttttttttttttttttttttttttttcttttttttttttttttttactgaatgcgcaaaaatataaatatatatcctaattataaaaaaaaaaagaacaaccttttatgcatggagaaagggttccatttaacgcaaaaaaaaagaaagaaataaaaatggccaggcataaataaaatgcccaataatcgggtgcatgtacaactagagggcgcatggttataaaaaaggcgaaaacaccacatgaaaataacaaaggtttccgtttataaatatgctagggcgctgttgaattaaatgttgggggacggcccaggtggccggcccataaaaagcagaagcatggttgggggcgggggcggatta

SEQ ID NO: 33286 - DNA, 358 bp, Oryza sativa
  Clone ID: uC-osflM202037h01a1
gaagtgcaaagcagcattaaggcaaatgcaaggtttttaagatacaacacgaatacactctgaacatcaactgcccttatttagggcattatgatgcattacagtatccccccattttggggttcccttctgggtgtactctaccaaaatacataaatagcaaaacatacacattttcaagattacggacggcacaatacagacaggcacacgtattaaaggccttcaagtaccaggtccttgccagggggcaaccaacagcttgtgcttaacgaacatgagaacatagtgaaccacctttcacaccatacaagagcgatatgtactaagccttcaaagaacccactttttaacagtt

SEQ ID NO: 33287 - DNA, 384 bp, Oryza sativa
  Clone ID: uC-osflM202037h02a1
gctatagaaactaaataggaccaaagccatgtttttttttacacatcaaaaacacatacagatacagaccattcccaacccgttgggatcttcattgtaaatgatttgcctcgcaagctgctgcaacaggaacagttgtatatagttcggaattctgaattaaatcgttcgttaggggcaattctgaattctgatactatatatatatatggctttgaaatataaagttctccaaggaaggtgacacatatttcctgttgtacgagcataaggtgatttgacgctcagactgataacaactgaactagggctcagtctgctttaggcctttgaaggcagtttgttcatcacaggggtttttttgtgctctgggagccctttttt

SEQ ID NO: 33288 - DNA, 404 bp, Oryza sativa
  Clone ID: uC-osflM202037h03a1
gcaaaaacatcatcttcttcttcatcttcttagggtacacaacaccaactcgatcatcatctcgtcgcactaaacccatcttccccaacccaaagacaacgaactcgctggccacaaatccatccaaccacaattaaccactgctaagctacggtcccccacttcacttgccggggacgaagttggtggcgtacgcccaggcgttgttgttgacggggtcggcgaggtggtcggcgaggttctcgagggggcccttgccggtgacgatggcctggacgaagaagccgaacatggagaacatggcgaggcggccgttcttgatctcctttacctttgagctccgggaacgcctcggggtcatcggcgaggcccagcgggtcgaaggcgccgccggggtagagcgg

SEQ ID NO: 33289 - DNA, 409 bp, Oryza sativa
  unsure (1)..(409): unsure at all n locations
  Clone ID: uC-osflM202037h04a1
acaaaaccggaacaagattatacattcaaatgctacaacagcgtatgatcaagccacgtggggaaaaaaatgtgtaacaattacacaagagatattagacctcttcacactttttttttaatactccatttgattgtttctcattaagccttgttctgctttgttttggcaatgctaagaagatctccaaacagtttgtcctcaggcttcgatggttgccccatggaagatgatgatgaaggtgttgtagagtagggcgagctgttcatccccatgtaagagctgtcttgcatggagaggccatacatttgtgtgggagaggtcattcataccaaggtagtatgttggcctcccttggctgttgctgtagtattgtgccgtttgttgttgcacaaganggtattgggac

SEQ ID NO: 33290 - DNA, 457 bp, Oryza sativa
  unsure (1)..(457): unsure at all n locations
  Clone ID: uC-osflM202037h05a1
agctagaacactgctgctaccatgagatagtttatccccctgtagtactgtacatcagaaattcaccactcaactcaccccctcacccatgcatccagatccatgcatgcaggaaacaattaccacaacacacacagtaagtctgaatctcatcacatccatctctctctctctcctccccccaattcattaacatcttatacatgcatactccacaaaaaaaaaaaaagggacgaaacaagaagagaacatcttccatcgcccaatcatcggtttcaccagcctgaactcatcaagctccttgagatgccctggccctgatgaaatcgatcacacgctcagcctgacagcgtctggatgatggtgttgtgccacgggtcagacaggtgctgnagcaggttgtcgaagggccccttctgcgtcacgttgtgctgcaccaggaacnnaaagaacgcca

SEQ ID NO: 33291 - DNA, 406 bp, Oryza sativa
  Clone ID: uC-osflM202037h06a1
ttttgtgtttttttttttttctcgtttaaaaccaatttttcaacctacaacaaggctggaacaccaagacaaaagagaatacccactttttaaacgatgccacacacaccgtaataacttttaacaaatgctatcaaactcgcaaatagtgatgcaataacgccagcggatgggagaagcctaggtcccggatgaaccaccaaaggctttgccctttcctggaaaagggtaaacgcctcaaccaaattgagctggcgtggcgccatgtcccatggtagctgccagtccgatgcatgcaccagtgtgggcgatgtcatggggaccatccgaaggccccaactgaggccggtgcatatcctttggcctgcaccgaatggcaacagtccaaaacaatattctttgaatt

SEQ ID NO: 33292 - DNA, 394 bp, Oryza sativa
  Clone ID: uC-osflM202037h07a1
gacccagagattccacaagctctttctccttttcgcttgcagattccatcacagcttcaagactagctgcttttgtctggtatgcttctagttcatcggaaagctgagaaaccttgctcctgtactgttctaggtctgcttcaacctccttgaacttttcatttgcagggttcagctcattttcaagatcctgtgtccgggtgtgtgcaacttcagcatcagacttcgatgtatgaagcaggctctccagttcaagacttctttcgtgaaccgaatgagcttgttcttgatgctctgtaaacttgtcagacaggtccttgacttcttgttcaagcagctgatttttagacgtcgtggaatccagagatgcttgcaactcattgatcttttcttt

SEQ ID NO: 33293 - DNA, 333 bp, Oryza sativa
  Clone ID: uC-osflM202037h08a1
ggacagaccaataaaaccgaagataatttccttgaactaagcaacagggcagagggttaataaaaaactgttttacacccatgggttaataatacagattctgattgggggcattaggtttgacattccacacaatacacataagatgacgcccgggtatgggatatatggtctctttaggttgcaatagctgagtgatcaaatggattagcatacaccagactgaaagattacggtaggggccataagaacattaccagcacaaacacaaaaaagcgttttcgtgtgctttgggaagcttcgatagtgtcaggtatatggccggacagatcc

SEQ ID NO: 33294 - DNA, 422 bp, Oryza sativa
  Clone ID: uC-osflM202037h09a1
ataagtaaaatacaaacacaggcgctcacaatgcgctcacactcattcctatgaatacacacgcacactctacctttatgaagtcctcatagaatcatttgtgactctggtacaactaagatagtctctggtttctgtttctgtaactgtagttctgttccatatggttttactgaaatcaaccaacatgttatgttagtgaaggctgtatttgtatcaattagagatcggccagagattaattggcatgaaaaatattcttgcaaaaccaggacacatatatgcaatatgtagaacattaatgtttgccaacacatacatatttgtatactaaaatctggatatatacaaacacaaccatgggcgttatcatcagagggaaaaaaggttacgttcagtttataccaacgaaggttaaattt

SEQ ID NO: 33295 - DNA, 399 bp, Oryza sativa
  Clone ID: uC-osflM202037h10a1
cggttcagtacctctcaaaatattaacttaaaaatagtacactgtttccccgtatgttacatatgataaagtttaccaaagcgaaatagacatactgaacaaaagcacggaggttaaatataaatagcacagcgatctaactatataaatcatcatcgtcagctgcggcggcagcggatgcgaaggggtcagcggcggcgccggcgccagacgctggctggtcagcgaacctaaactcggtgccgaacccacgagactgctgcagagtctgggcgaaggcctggtacttgcggatgtcggcgtcactcacactccggcgtgcgtacttcatcgactcctcgaagtgagccgccttgatctcagcaatatcatcaacctcgtcctcctccatggcttcag

SEQ ID NO: 33296 - DNA, 457 bp, Oryza sativa
  unsure (1)..(457): unsure at all n locations
  Clone ID: uC-osflM202037h11a1
gataaagaaaaatggcattttgcaacacatttaacttgttcagtgttcaagctaacgttgaacctggtacaagtacaacatgctggcacgcatgtccacatctcgcgggtcgagggttcaagccgaatacaacacacggcatgttgcatttcatcataatttaaagtacttagcatcactttgaacaaggttttggtggtcacatgtatattcgcaaccttcttaaggtgtccgcaaaagacgtgcgcagcataatactttgcagacctatggttatcaacagcaacatgccactaggcacctttttgctcatgtctttagcaccttcgtgagcattctgaatgcagcagtactgtaccttctcgattcatgagtaccactcagttgctgaattcttcccaagaaactaatattatggttcanactcgaagactcgntactcactactgaattacgg

SEQ ID NO: 33297 - DNA, 494 bp, Oryza sativa
  unsure (1)..(494): unsure at all n locations
  Clone ID: uC-osflM202037h12a1
gcctcgaacaaaaatttcgcagcattagaactagatataaactgtacaatccacaatgcactgaactgaatgcatgcagatataggcgaccacatactttttacttcagacaagactctgactagaagctgcaaaaacaactaaaacaggcaagcaccaaggattcacaactctcctcttctttacagggccctctaagagcctacactactcatttcaacagatctatatctgatcatatgatatatgattgttcacttaaaccagcctcgcatttgcgggcttccccttcaatgacggtttcgatccattgctgcctgcgttcttgctgctggacttcttctgcagctgaggatttgcccctgtctccttggaatcctggagctgttctaatacagcaacaacctgctccatgntaggcctgttntttggttttacagagatgcattgaagngccnnngnngcnnccttctgggcccnggccagggagtact

SEQ ID NO: 33298 - DNA, 381 bp, Oryza sativa
  Clone ID: uC-osflM202038a02b1
gccgtagttacagctacatggcctccaagaagaagtacgtcttcaccatcgacgacgactgcttcgctgccaaggacccatctgacaaggacatcaatgctcttgagcagcacatcaagaacctcctcagcccgtccaccccgttcttcttcaacaccttgtatgatccctaccgcgaaggcgctgactttgtccgtggttaccccttcagcctcagggagggagccaagactgctgtctctcacggcctgtggcttaacatccctgactatgatgctcctactcagatggccaagcctcgcgagaggaactccaggtatgttgatgctgtcatgactgagcccaagggaaccctgttccccatgtgtggcatgtaccttg

SEQ ID NO: 33299 - DNA, 171 bp, Oryza sativa
  Clone ID: uC-osflM202038a06b1
cacgcgtgacggtagaggagagtagatcatgaagaggatgcgcttccttctggacggggcttgggacgcttatcatgctgatacgggtggaggacagtgagcatagcacagagattgaggcgcagaagcattcgcattgagcccaaaggtgtagagagctccagggatgga

SEQ ID NO: 33300 - DNA, 438 bp, Oryza sativa
  Clone ID: uC-osflM202038a07b1
acctgctccaaactgtgcattgaattcacttggtcttccactacgcccggtaaggttttttttttatgttgaaatttctcaagccaaattttgtgaggaccattccatttatagtggccatcatgcaattttttctgcatgtgttgtcttgtttcctgttcttttaaggtactgaccgtgtaggtgaaaagcatttctgggaaagctatcgtgggaggaactattatgtgaaacggttataacctgaaaattggttgtattcatacggtgtaaagtgagttaaaagtgctaatactgaagtaaaaacaaaacacaggttttcctttcttatgatcaccacagtagcagcactgagcaacatgtctgtgcatgagactttgtaattcatttactggtgatagtggtgaactggtgacataggacatgggcagagctaca

SEQ ID NO: 33301 - DNA, 453 bp, Oryza sativa
  Clone ID: uC-osflM202038a09b1
ctggtcgggaccaaggccgtggacggggaggccccgcccaggatactccacttcagccccaggatccgcggcgactactccggcaagccggtcatcgagatgaacagctgctaccggatgcagcgggggcagtcgcagcgctgcgagggctacacctcccgccctgccgacgagacagttgatggccaacttaagtgcgagaaatggattcgtgacgacgacaagaagtctgaggaatcgaagatgaagtggtgggtaaagcgtctaattggtaggccaaaggatgtgcacatcaggtggccataccccttcgcagaaggcaagctgtttgttttgactctaaccagcggattggaagggtaccatggcaatgtatatggtctgcaatggttcttccttttcttattgcattggatacactttagaggatggcaccccgtttttatcttactg

SEQ ID NO: 33302 - DNA, 251 bp, Oryza sativa
  Clone ID: uC-osflM202038a12b1
gtataggagaggagatcagggggaggatgggtttccttctcaccagatcttgtctggtcttatttagtgctgcagctggatatccgttattctcgctgatcgatgtggagtgctacgtcatctcactgtgctcatctctcaaggactgcatcatctgcgttctactgtccgtttatgacctcaaggaccttcacatggtcaggatctattactatatacgagtctctgcataccttaatatcactaagctc

SEQ ID NO: 33303 - DNA, 228 bp, Oryza sativa
  unsure (1)..(228): unsure at all n locations
  Clone ID: uC-osflM202038b03b1
tgcctgnttacatcaataacaccaccacctagggggggcactttatggcggccagccaggataagccggaatacggtctagccttactgcaaaagtataggaaagaggaaactgctacggtagacctatatggcgaaagggccgcgaaccagggccagcactttgaggcccttaatatatcagatatttggaagctaccagctctataggccttcaaatacatccttt

SEQ ID NO: 33304 - DNA, 473 bp, Oryza sativa
  Clone ID: uC-osflM202038b07b1
cattatcgcagagaaaaaaaaatctcccctcgaagcgaagcgtcgaatcgccttctcaagatgcagatctttgtgaagaccctcaccggcaagaccatcaccctcgaggttgagtcctcggacaccattgacaatgtcaaggccaagatccaggacaaggagggcatccccccggaccagcagcgtctcatctttgctggcaagcagcttgaggatggccgcaccctggccgactacaacatccagaaggagtccaccctccaccttgtgctcaggctcaggggaggcatgcagatcttcgtcaagaccttgactggcaagaccatcacccttgaggtcgagtcgtctgacaccattgacaatgtcaaggccaagatccaggacatggagggcatccccccggaccagcagcgtctcatcttcgctggcaagcagcttgaggatggccgcaccctggccgactacaacatcca

SEQ ID NO: 33305 - DNA, 527 bp, Oryza sativa
  Clone ID: uC-osflM202038b10b1
gtacgaatacgtattttgtgggggcgccaacgaaattgtgatgagaacacatacccaatccagaggagggtggagcgccgtcgccgccgccagcgctcatgcgtgaggttgccggagccgtcgtctccgatgctgctcgtgttctccaccctcctctctcttctgtggtttcttgtgggtggctctgtcctcttgatcgctggtcctctgttgcggtcccgcctgtctcagggggcggttctctgactgttcatctccaggagaggcgtgtcttctccagctgcggcgccagggacttttggggtgttggattttctctctgttgcatcctcttattttttttctccttttatttactctcgctttttatttttggtcttttatctcgcctaggtgtcctctagttccccctcctttttttttcttttctcttctttattctcttttttttgtctgtttctttttcttcttgacctttttgttaccttttttcattattctttatttttatttttctcttctttccc

SEQ ID NO: 33306 - DNA, 167 bp, Oryza sativa
  Clone ID: uC-osflM202038b11b1
ctccgttaaccccgttcgttttatttgcgtttacttcgtttcttgggaaggcacttacttcctcttcctaggaaggcttgaggagccaagaggaagaggagagcaatgggggaagctgccggcgaccgcgtcctgagccgactccacagcgtcagggagcgcatcgg

SEQ ID NO: 33307 - DNA, 458 bp, Oryza sativa
  Clone ID: uC-osflM202038b12b1
cttctcctgcgttccattgcatcgcaggatcctcttagtatttcggttgctgtattacaacagttcaatattccaccagaaatgtatcaagttggctatacaaaattgtttcttcgtacaggacaggttgctgcactggaaaatgctaagaatcggatgctccatggagcccttcggattcagaagaacttccgtgggttgtgtactagacaagaataccagggactgaagaaaggagcaatgactttgcaatcatttataagaggtgaaaaggcaagagttcactttgatcatcttgcaaagagatggaaggcatctgttctcatacagaagtatgctaggcgtcgaattgcagctaccatgtttattgatcagctcataatgttgctcttctacaatcagtgatgcggggtgcttggccaggaggaaatataagtgcctggaggaagagaaggact

SEQ ID NO: 33308 - DNA, 406 bp, Oryza sativa
  Clone ID: uC-osflM202038c05b1
aagtttccctagccgctttccccatctcctcctcccagaactagaatttcgccaccccgaatcccttccatggtaggacttccgtttgattccgggtcgaatccgtcgcctccgatgccggaacggtgaggttttccctccctttatatggacaacacgcgtttgttttttctgttgcgcaggtttcagatcttggatggacttgctcatccttcggcggccatggatctatcggcggaagctgctgctgctgctcgtcctcgcgttcggcgagtcagatctggagccgatctgacctcttagaggtccggttggggcatgctccgtacgagctggcgtggatgaagcggcggcgcgagggaggaggctggtcgtcgcctggatcccttccatcggggcctcgcgc

SEQ ID NO: 33309 - DNA, 276 bp, Oryza sativa
  unsure (1)..(276): unsure at all n locations
  Clone ID: uC-osflM202038c09b1
aatggctggatgaggaaggtgctgcgatagctgaagcagttgctcttcatgtcctcattggtgaggactccgatgaaccctgccatttgatgctaaacaagcacagaagatgcaaccattgggatcactcagctggttttgatttcgccgcggatgcacaaggcgctgatatttatcctcctgatggactgatacagtgcgctgatcatgtttatgctcccaaagggaggtgtattgattgggnggattgtccngccattgccatcttggggtgag

SEQ ID NO: 33310 - DNA, 512 bp, Oryza sativa
  unsure (1)..(512): unsure at all n locations
  Clone ID: uC-osflM202038c10b1
tataatatcagttcatccacaacaatgtcggcctactgcggcaagtacaaagatgagctcataaaaaatgctgcctacattggcaccccgggcaagggtatcctcgccgcggacgagtccactggcaccatcggcaagcgcttcgccagcatcaatgttgagaacgtcgaggataaccgccgtgccctccgcgagctcctcttctgcacccctggcgccctccagtacatcagcgtgcgtgatcctcttcgacgagaccctgtaccagaagaccaaggatggcaagcccttcgcngatgtcctcagggaggcncggtgccctccccggcatcaaggtggacaagggcaccatggaggtcgccggcaccgacaaggagaccaccacccagggccacgatgacctcggcaagcaatgcgccaagtactacgaggccggtgcccgcttcgccaagtggcgtgccgtcctcagatcggccccaccagccctcccagctcgnattgatctgaacgcc

SEQ ID NO: 33311 - DNA, 545 bp, Oryza sativa
  Clone ID: uC-osflM202038c12b1
gtcgccgtcgccggagctgctgcggagagggatggacgacttctacagcgggatcctgttggagcctgcacctcccccgccacccccgcctcccccgtcgccgtcgccgtcgcttcggcggcttctgtcggcttcgcggtcattttttatcttgtttttttttcttttcttttttttgctttttgtttattgtacgtttctccttcttttttttcttttttttttcttttttcttctgtttcctcttccttttttttgttcttttttctcatctcttttttttacatctgtttttattttcactctctttctttttattttcttcttccttttttttcgtgtttttttttcatctttattcctatccttctggttttttctttttttactctcttcttattcttattttttttctctttatcctttttcttttctcttctcttcttgttctttcttttctctttcatatattttttttcataattccttttatttttttccttctttctctttttctatttttctctatttatttctttttactc

SEQ ID NO: 33312 - DNA, 219 bp, Oryza sativa
  Clone ID: uC-osflM202038d01b1
agatggtgttataacggatctcgctcacactgtgataaagagctgtctgcgtgtcggcagatgccaactgaaaacgtcgtgcgactatgggtggcctttctggctgaacaacagaggccacatggaaggaagggggcttctggtacccggaccgcactgacctttcatatcagcaggcggagaaagacggtgccggcatcatcgcattgcgcggtccgg

SEQ ID NO: 33313 - DNA, 390 bp, Oryza sativa
  Clone ID: uC-osflM202038d02b1
gctttgaggcaccagcccaccggccggcaatggcgtccacctcctgcttcctccaccagtccacggcccgcgtcgtcgcgcgcgtcgcctccccgtccccggcgacacggacccacctcctcgtctgccgcgcccagaagcaggacgacgccgacgtctcccgccgcgcggcgctcgcgctgctggccggagcgacggcggcgctgggggctgaaggtggtgcccgccgccgcgggccacggcgaggcgacgaacgtgtgcgggaagccctagacgaacacggagttcatcgcctacagcggcgaggggctcaagctgttgatcccggccaggtggaaccctagcatggagcgcgagcttcccggacaggtccttcattacgaggacaac

SEQ ID NO: 33314 - DNA, 291 bp, Oryza sativa
  Clone ID: uC-osflM202038d08b1
ctaagaaagaaatatgtatgaccagtactggctcgccaaacatttgaaggaatcatatccttttatgctctttttatcttctacctggtactttttctagtatgcagaaacttaattggactaccgtactttcttgctttcctgtaaataacctagagcccactttgtgctgtccttttgtttttgcattataactaaagtttagtacccactatacttgcttgtctccaatatggtgcccaagaacttgctctgcagtttgtctgccttggctcactaatatgcttaata

SEQ ID NO: 33315 - DNA, 502 bp, Oryza sativa
  Clone ID: uC-osflM202038d09b1
aaaaaaaaaaaaaaatataaaacaaaaattgttatgaaaaaaataaaaaataatatataaaaaaaataaaaataccataaaaaaaaatttaaaataaaaaaaaaaaataaaatatagagcaaaaaataaaaaaaattaaaaaataattataaaaaaaaaataaatataataaaaaaaaatgaaaaaaaaattttaaaaaatattaaaaaaaaaaaaaaaaataatataaaataataaattaaaaaaaaaaagatataaaaaatatagatataaaataaaaaaataaattaaaataaaaaatatcaatatatcaataaaatttataaaaaaataaaaaaaacaattattataaagctaaaaatattaaaaaatataaaaaataaataattaaaataaaaaaataaaataaaaatataataaaaatatataaataaaaaaatatttaaattaaatataatttaaaaaattattaaaaaataattaaataaaatttaattataaa

SEQ ID NO: 33316 - DNA, 99 bp, Oryza sativa
  Clone ID: uC-osflM202038d11b1
ctactcggtccatgtcggtgccggtgcccgcggggggcggcgcggcgacggtgccgctcgccctgctgctgcagcggcaggtggtcagcgagaagaccg

SEQ ID NO: 33317 - DNA, 241 bp, Oryza sativa
  Clone ID: uC-osflM202038e08b1
gtgcaccgccgccgccgccgccgccggcgtcccgccacatccccgcctcgctgcccgattatatcattattacaccttgctgcggcttttattgattcgtgaatcgtgatggcgtgccggggcttcttcgaatgcctactgaagctgctcaactttgtcctcacggtcgccggcctcgccatggtcggatatgggatttacctgctcgtcgagtggatgaggacttccggctgccttctct

SEQ ID NO: 33318 - DNA, 56 bp, Oryza sativa
  Clone ID: uC-osflM202038e09b1
ttctgctgctgcagctgagcctccgttcttggaagcgagagagagggagggaggag

SEQ ID NO: 33319 - DNA, 477 bp, Oryza sativa
  Clone ID: uC-osflM202038e10b1
aatggacaggcggcggtactgctcctcttccattccactggggacgtacgagctgcgcgcatcccttccattccattactgaccttggctgctgcggctgcagtgcagagggggtttggcgcctctgttctgcccattgttttccggttttgctttctctgcggtgcatgttttcttgtgctatcttgccgagcaggctgagcgttaccaggaaatggtctaattcatggagaatgtggcaaacaccactgatgttggtgagctcaccgctgaggagcggaacccgctttctgtggcttacaagaacgtgattggtgctcggagggcattcttaaggaacatcccctttattgagcacaacgaggagagccgcgggaatgaggcatatgttgcatcaacttaggagtccccgagcaggattgaaactgagctcaacaagatctgtgatggtatccctaagcctttggttcccacctt

SEQ ID NO: 33320 - DNA, 359 bp, Oryza sativa
  Clone ID: uC-osflM202038e11b1
ctcattgaataattatttttaataattttagttttttttttttggctttagatatattcccaatccccaacctcccaataatccgatctctcccagttctgttcggatcaaggctgtgtcgatcgcaaaaaagaaaaaaaaaaaaacaatttccttttggggtggttcatctgttgatcacttctttgtttcccgcgctctgttggggattcgattttcgggttaagattttctacacgatggccttgaacttggctcagagcgccgcggtggcagcgtgcttcgcgaccgccggtgatgcgcggcgagctgcttcggtggtcgccacgccgtcttctttcgctggccccttgaccagc

SEQ ID NO: 33321 - DNA, 254 bp, Oryza sativa
  Clone ID: uC-osflM202038e12b1
gtcaactcctgcgctgctgcctcccactctggggctcacctcggcggctactacgcttctccccgccgacgacgaggtcacagaccgtggagcctgccgcggcggcggcggcggcggcggctgcggtcgtcatggatgcgccgcggagggagcaaatgcaccaacaccaccaccggaaggcaggggctcaaggagaggccgcacctgctatagccgctgcgggggtgggagcggaaggcatctccagaaagata

SEQ ID NO: 33322 - DNA, 350 bp, Oryza sativa
  Clone ID: uC-osflM202038f01b1
agtctcttgccgtgttgagactgcacaaacgagagctagctagccagaggctgcaagaagattctgcacccatagatcgtctaccatggccacaaacccaggactcttcacggagtggccatggaagaagcttggcagcttcaagtacgtgctgctggcgccgtgggtagcgcacgggtggtatgaggcggcagaccacaggagcagcgcgaggggcgttctccctgcgccgccttgccaagttcatggaaggcatggaggagaacaacattgctgcgattgttggtacagccatctgctgacaagaggttccacgtgattacaaatttgaattgttcttccctgtggct

SEQ ID NO: 33323 - DNA, 320 bp, Oryza sativa
  Clone ID: uC-osflM202038f02b1
ccattatcgaggaggaggtgaggagaggaccaagaagagctagattacggcggctaggagtatgcccatggatagtagtaatgcgccggctacggtgtaaggactgctcatgttgtctctactgcagatacaagaccacatagggaggacgaggcaggtgatccccttgatcgtggtcaggagaactgagtccgcggacagggtccacgccggagctgtatcaagatcgcgattaggcacagcaagataagcgtcggcgacgactgcctttgcatgggacgcgggaccaagatggtgcgagacagcggcgcacgatgtgg

SEQ ID NO: 33324 - DNA, 249 bp, Oryza sativa
  Clone ID: uC-osflM202038f06b1
ccttttcagatttcttggcgatctgtctggttctggctgctcttgctggtttcagatccgggaggggactgagcctccgaagttatcaggagagtgaaagacataatggggatcagcagcgaatcgccgaatgggagccagcagattgtacaaaaggaaacacgagatgagacaacaccacttctgccggtcaaggtggaggaggaggggctatcagcttcaactgaaagcatggcttacagttgccgt

SEQ ID NO: 33325 - DNA, 374 bp, Oryza sativa
  Clone ID: uC-osflM202038f07b1
ttaggaagggcagcgtcgcggttgcttgcttcctcccgaatcctcgcctcgatctcgctcgcgggcgggcggagggatcgtgatcgggatcgggatcgggggcgcgcgaagatgagcgtgatcgacatcctcacgcgggtggactccatctgcaagaagtacgacaagtacgacgtcgagaggctcaacggcgccaacgtcgccggcgaggaccccttcgcccgcctctacggctccatcgacgccgacatcaacgaatgcgtcgagaaagcggaggcggcgaagcaggagaagaaccgcgccacggtggtcgcgctcaacgcggagatccggcgaaccaaggccaagctcgtcgaggaggaactgtccaagct

SEQ ID NO: 33326 - DNA, 318 bp, Oryza sativa
  Clone ID: uC-osflM202038f08b1
tgatgtccctaaactatctcctcgcgaatccatcagcgagtcgccgaagcggaggaagaagcagcagcttgcggcggcggcggcgaggcggagatgtcgtaccttctgccgcatctgcactcggggtgggcggtggaccaggccatcctcgcggaggaggagcgcctcgtcatcatccgcttcggccacgactgggacgagacgcgcatgcagatggatgaggtgctagcggcagtagctgagaccataaagaactttgcggtcatctacctggtcgacatcaccgtgtgttccagacttcaacaccttgcacgatct

SEQ ID NO: 33327 - DNA, 300 bp, Oryza sativa
  Clone ID: uC-osflM202038f09b1
catttttcatctgctaatcttgcaaacgtccgaggagatagcaacagacgactctatccctgagttacatataatgtacctggcactgattccaactctccaagatgcctgcctgatgacaaatgcaaaccgcattttcttaaaagcagtcaccttcatttcaaaagacagaaagcatgctgaccaggttattcaattaatgaggattattcaaagaggagtaacagaaagagctaagagagctagttcggtcagtcaggaaaggcttcaactatgcgatagaatgactagggacaggat

SEQ ID NO: 33328 - DNA, 198 bp, Oryza sativa
  Clone ID: uC-osflM202038g08b1
cccctacaacgaggacaagaagccgaaggctggcaatctgtggaccggggccttccagtccatggacgccgcaattgcttagcggcttccggaccggcccgaggttactcctcatatactcgaaaggatcgaacgggggacccctcggaaaaaggttattggggtgaaccttttgggctctagagaagttttttttaa

SEQ ID NO: 33329 - DNA, 335 bp, Oryza sativa
  Clone ID: uC-osflM202038g09b1
tataggagtacttgtacccttccatgtttgctctgtaaaactagcagaaatccgtggggatagcaacagaggagtctatgtctgtattacatttaatgtccctggcactgcttccaatctccaagatccctgcctgaagacaaatgcaaaccgcattttcttaaaagcagtcaccttcatttcaaaagacagaaagcatgctgacgaggttattcaattaatgaggattattcaaagaggagtaacagaaagagctaagagagctagtttggtcagtcaggactggcttcaactatgtgacagaatgactagggacaggactcagtttatggact

SEQ ID NO: 33330 - DNA, 190 bp, Oryza sativa
  Clone ID: uC-osflM202038g12b1
ctcgactgcatcgtctctatcgctctcccctacgcacgacactaccgaggctacgcctcctcgcgccctgggtgggagaacgccgatgcccgccctcctcgcagcgccggcgacgccacccgctctcctcgctgcgtagacgtcgcctgctcctctcacacccagccggatcgccgtgccttcttctcgc

SEQ ID NO: 33331 - DNA, 236 bp, Oryza sativa
  unsure (1)..(236): unsure at all n locations
  Clone ID: uC-osflM202038h01b1
ccgatangcaaggcccaatcaccagctgccactgtgaagaacctgactttggatcgctatcccttttgcttcttattagtgctcagggaaagaaagctatagcagtagctcaataagccagagagaggctaagagagagagaggtgaggggagagaagcaacacgaagaagaggagcccccgaaccgagtgagatcgatcgccttgtgtcctctttccaagggacacatctacccc

SEQ ID NO: 33332 - DNA, 418 bp, Oryza sativa
  Clone ID: uC-osflM202038h02b1
aaacaacacacctcctctgcacttgctggttctcttcttctgtccatcgaatcgacaagaagaaatttacaagcaagaatggccgccaaggtgcatcctaacgtcgccgccgcgccacagccaccctgcattagcagcatcgtctcccaacaacaagaagaagaggagcccccggtggtgctcacggtgtggcgcatgtctctcctcttcaactgccacggcttcaccgtcttcgacgccaagggcaacctcgccttccgcctcgactgctacgactccaccagctcaaggcgcgccgacctcgtcctcatggacgccgccggcaagccgctcctcaccatccgccgcaagaagatgagcctctccgacagctggatcatctaccgacggcgactgggccggcaccttcaccggcacg

SEQ ID NO: 33333 - DNA, 281 bp, Oryza sativa
  Clone ID: uC-osflM202038h04b1
tctaccgaatccgaggaggagaagccacagaaacgatgacctcgctgtcgtcctccgccgccgcggcgcgcgccaccttcgtcatgccgtcgtcggttcgtgggggcatgagccgcggcaggaggatggcgaggctggtgacgcgcgcggcggcgtcgagcccgaagctcccgagcgggcggcggctgcgggtggcggtggccggaggctgacccgcggccggcgcggcggcggaggcgctggccaagggcggggtgtagactgcgctcattgtacggcag

SEQ ID NO: 33334 - DNA, 341 bp, Oryza sativa
  Clone ID: uC-osflM202038h05b1
ccggtcctgatttccctgttcgtccctcgcgtccggtgttctctgctgccgcggcggtggctccaggcggtgtcacgtctgattaggaggtggatggctactccacacaatatgggcggactggttggtgatcctcgtggcggttgccatttagcttctcttatcctcttatttttcctcttctccactccctctttttttttatctttcctctttccttctttctctctcttcctttcttccttcctcttcaattaatttttttctctctatttttttcttttttttttccttctcttctcttcttcctatattatctttcttctctcttttttttctac

SEQ ID NO: 33335 - DNA, 375 bp, Oryza sativa
  Clone ID: uC-osflM202038h06b1
aaattaagttgtgatcatccgagcaggagcaatgcaatgagaacggtagctagctagttgacacaatgagggcgggcaggttggtgatcctcctgctggtttttttttctttttttttttctcttcttctcttttttttctttcttttttctcttttctttttttctttttttttctttctccttttttttctttttctttttttttccctcttcctttttttttctctcctctcttttcccctctctcttttcctctctttttttctctcttctttttttattttttttctttctttctttccttttcttccttctcttttttctctctacttttttctcttctttcttcttttatttttccttcttttttatt

SEQ ID NO: 33336 - DNA, 170 bp, Oryza sativa
  Clone ID: uC-osflM202038h07b1
caagaagggcccccaagtgcattctaacaataacccaccagccacaatcaccctgaaatagcagcatcgtactccaacaaaccagaagaagaggagcccccggtggtgctcacagagtggcgcaaagtttctcctcttcaactgccacagttttaccgacttcgactcca

SEQ ID NO: 33337 - DNA, 173 bp, Oryza sativa
  Clone ID: uC-osflM202038h09b1
tgaatcgttgttctagatcactgccacgttaggtttgctattataacataaatccggggcttcaccaacagcccaatctatgtatttatgtaaaccaatgttgaagcaattattttccaatactcaagaccaatgtcttttgacaattgcggaccggattttcttaaaataaa

SEQ ID NO: 33338 - DNA, 84 bp, Oryza sativa
  Clone ID: uC-osflM202038h10b1
tatcgaactactcccataacgtcaccaaaaccctgctgtgcgaacctccgtcgtcgccgacatggccgtcggacaccgtcttct

SEQ ID NO: 33339 - DNA, 484 bp, Oryza sativa
  Clone ID: uC-osflM202038h11b1
ctcgtcatgctgcaactagcttagctagctggttacttgtgatcatgcacgagcgtggccaccatcgcgaggcgtctccatgcttgctttcttctcctgctgtctctgctgttgctgcaacttcttctctcttcggtgtcctctctttcttcctttttttcttttctgttctctctcctttttttacctcccttctttctttcttttttttcctttccctcctcttttttttttcttttcttcttcctctctttttctctttctttactcctctctctttttctttcttttctttttctccttctccttctttcctcccttttcttttcttcttttttttttcttccctctcctttttttcccttttttatttcttcttcctcttcccctttctctcttttttttttttatccctttttcttctcttttcccttttcttatttcttttttcctttctcttcccttcttattctctctattcttt

SEQ ID NO: 33340 - DNA, 470 bp, Oryza sativa
  Clone ID: uC-osflM202039a02a1
ttttaagaattttgcgattgcagattacatactgaacaaattacaagacttcagatgttagtttactctaaaatgggctacacatttgccttaagatctttgaaccgtttgaaaccccgataacaagcaaagatatcctaaaagaccacatttttacacacgtcagggtatgtgcatacatttttggtcccttcagaccctgaatattaaggccccagggtgtaatgaaattgtgaaacagaggctttatcagctggacccagaaaagggcaacatatgtgcactttgaaacgctgttactggcaccgaacaatgtggttaaagtttcttcaggcaaaacctttggctttgcagtaatgccatcggactagcgaactggtagtatttgtgtagcacgaaggagaaactaattttccttatgaataacccatcctgagagggactccaaattatttcatccaagagatcac

SEQ ID NO: 33341 - DNA, 417 bp, Oryza sativa
  Clone ID: uC-osflM202039a03a1
gaagtaaaagcttgagatatcaagtatcatgatgtctatgtacaaagccatgtttaagatctatcaattacataatactagcacactttgccgtacaccaacctacctatgttttcttagcacattgtacgagttctcatcaaccaaaagctgacgcggcgcaaatcatgatgcagaattgtggataaatctgagaacaatccatcagagttcagatgataaatcagaggacggtgaggctctgctggagagtgcaggcctcatggtgaccaaagcagattcatttgcaccagctcttagagcaatcctgccagcttccaaaaatttagcaacaggatcctctgcatagcggattgcttcacccacagtcatagtcctgccaatatctgggtaggtgttgagtacatggtgaccatt

SEQ ID NO: 33342 - DNA, 120 bp, Oryza sativa
  Clone ID: uC-osflM202039a04a1
gttgtgttatatattatgaatattaaatattgttttgttgaaaaaacaaaaaaggggaacggaggagtgcataaaaacaaaaagccaatggggaaaaaaacatgaggcagaacaagggca

SEQ ID NO: 33343 - DNA, 471 bp, Oryza sativa
  Clone ID: uC-osflM202039a05a1
aatgaaagcttcagactattccattctgctcttctgattgtaatgccacagaagagcatcagtgtttaagtcatgtgcaaaattatgacaaacaaatttgccgtccaccttttgatctaacaaaagggctggtcactcccaaaactccagatggatatatacacatcatttcgtttattaactatcacacgagattcctaaaacacattcatatgcgaacatccgcaaaactttttaccagttgataagcttgttgcatgaattctgcatcttcagagtgaagttgacgctgtcattgtcctttgagcatttccaaggatgataacaatgatggtaacatcatcgtggtactttttcctgctcccaacaggtatcctcatcaattctttaggtgttaaagctgctttctttcgtgtttaagtaaaagtgctcatgagaaactttgaggatcaccaattggatattatgcat

SEQ ID NO: 33344 - DNA, 152 bp, Oryza sativa
  Clone ID: uC-osflM202039a06a1
ctccgtgccatctattgcgtgcggattgcgatggatcaaaacaggctgggcgatcaccttaagcgaagcgggctgaaaaaaaggttacatctccgccttggaaccccccactctgggccggatggatggaggggcttcggatgcgccgaaaa

SEQ ID NO: 33345 - DNA, 280 bp, Oryza sativa
  Clone ID: uC-osflM202039a07a1
ctcatataatctatttagagaacattatgttacacagtacaaagttggatacgaggagagaaaaacgcagagaaaacatctgttagtacaatgccatccatcaagatcgtcgttaatggaagccatgagatggcagcagtatcagaaacagggaagcgacggtggcggtcagcacacggtagccaccggcgccggcgctggatcttgccgcctgaccgccgagcttgcctgcagtccggtggtgcttcgcccgtcgttcgacggacttttttcggttggg

SEQ ID NO: 33346 - DNA, 431 bp, Oryza sativa
  Clone ID: uC-osflM202039a08a1
attgctacaaactcaaatggaactttgattcaaaagcaatgtgatacaggagaaatcaatccagagaaaggggaaaaagaaacagcttgtacaaataaacaacacgcacgcacatagagagtgacctccagttctcgtacgagcagaaattaaattactgaatcgaacaggaaactcgagtactcgacacaaatctagcttattcacgaatgttaacaaaccaacgatgaaaaataagtcacgcacgcaaaacaaaaaaatacaaatacaaaaacgaacgaaaaacaatcgatttagcgaatcacttaattatgatatgacgatcatatcgtcctcgtaaaccgggcgcgcgcgagcgggcgatcgatcgatcgatcgatggatcggatcagatcagatcagatcatcacttgggcatgggcccgtggttg

SEQ ID NO: 33347 - DNA, 269 bp, Oryza sativa
  Clone ID: uC-osflM202039a09a1
tttttgtgttgcccaataggagtgcaccgaatatatactaacaaacagtaaaactcataaaatccttttaatacacaaaacatgccgccggcataccacagacgtcaccaccaccaccaccagcctcaaaaattcctaggtcaaataaatttgacgcgagtataaatatcaacacggcgaaagaatccccaagaagggaagaacatcattgatcaggtgctcagaaatcaagcagccttgaaaacggagaccgaccgagccaacaagaa

SEQ ID NO: 33348 - DNA, 399 bp, Oryza sativa
  Clone ID: uC-osflM202039a10a1
agaaaacgtcaggtccaattgctcttaattcataaatgggtcactagtctacaacatgaataacgtgtgttatacacactgcagataaaacatgtacagtttgcttaaccaaccattcaaaccagagaggcctagaaaccctcagctgcaattgctcttgattcctaaatgggttactagtctacaacatgaataacgtgtaatatccacgctacacagaggcgctcctttttcacatagccggtgaatgatctgtgaagagggaaccactcaatctctcctgtgcaatataaacgcaaagctttggttttcacggacaaaaggtagcaggtcattctctgtcgtctcctcaatggtttggcatcgacttcgcaatgtcttcaagtgaaaaggtatgct

SEQ ID NO: 33349 - DNA, 316 bp, Oryza sativa
  Clone ID: uC-osflM202039a11a1
ggggcaccgcagaaaaaaggtttacctataaaaagggtaaaacgggtatggccccgcaaaggggggggccgggggcccgcaaaataaaacgggccgggggggcccccaacgggacaaaaaaaggtttcacgggggaaagggcgacccggggaaaccgggccgggggaaatcccaaaaagaaggggtacgggcccccccggggggggggcacccggggggggggaaaccccttttaaaaggggaaggcgggggggggaccgcaatttttcagggggggggcgggaaaaaaaaagggcctttgggttgggggaaaacc

SEQ ID NO: 33350 - DNA, 204 bp, Oryza sativa
  Clone ID: uC-osflM202039a12a1
gggctgatctcataaatatttaactttttctgctctcattttccatgaaactagcttgaaaaaaaaaaacacatcctcctctggaaacactcacttatgagaggttttcatattagcttgcattgcaaataaactgcaaagagatgaacatttagacgcagcttttgttaaaatataaaagcctagaggggaagaggagccaca

SEQ ID NO: 33351 - DNA, 466 bp, Oryza sativa
  unsure (1)..(466): unsure at all n locations
  Clone ID: uC-osflM202039b01a1
gcaaaggtagacccatattctatgcggtaagatccgataatttcatatgtatgtacatcaacccaaatagtcaaatacaacacggtaaaaacaaaggcatgacgaccatgtatggaaaagttaatggtgggggtgggatttctttgctttattttctcctgagactgtagacagacgctgcgtttgaacttggaggggctaaaaaaccttttgcaaaagagcggagtttggtgacgttattgggcagcgttctggtacgctttagctactggccaagattgccaagaagacgctccaccgcancattcacattcccagcagttgcgactagcgcctggatgttctttgcagtgtcgatgaaacccatcttttggagctgagtgagctgtgttgcaatacagttcttccggtggaccattggatgtattgggtacacctatgccaactccagcaccaagcccactaa

SEQ ID NO: 33352 - DNA, 78 bp, Oryza sativa
  Clone ID: uC-osflM202039b02a1
gaaacccaaaacagtcaacaactttgagataaaaagaataaaaggacagaccaacctacacaaaaagtgaaaaatccc

SEQ ID NO: 33353 - DNA, 161 bp, Oryza sativa
  Clone ID: uC-osflM202039b03a1
ggggcaatgcaaacaacaaataacacataacataccggatccttagttaacagaggccaaatttggcgcagcaccaggtttgacaaaactggcgcagggattagtccattaaatttcgtccgttaaaggaaaaaggaatccggcggggttccccagggaac

SEQ ID NO: 33354 - DNA, 268 bp, Oryza sativa
  Clone ID: uC-osflM202039b04a1
gaaaatattccgattgagcaacaaaacaatgttatgcacacagtgccttctgtaagcaccggccttatagcgatatactatacagttagagaacttatcatcatcagttttacattggataaacagaagcaagtctgtatcccccatctctggttgcagcaagggccatagaacgatagcccaatgttcaccagggtgcaaagcttattggtgccgtgtgagatgatatatgaaccgcagagagggagccctactgctcgtttctcaa

SEQ ID NO: 33355 - DNA, 356 bp, Oryza sativa
  Clone ID: uC-osflM202039b05a1
gagatcgagtttgatcgatattacgaggcctaattcacgttctagaacatgaactggaagccactgaaacattcacaagttcttgctgtaagcagaaataggggtcttcacttgaatgggccacaaaaaaaactcggtttgcgggtgcttgtgaaacgcaactccttatattagatccaagtggaacaattggtatcttacggcctgagaatgccggtttcgtatcactgtgatgaaggtcccctgttttaaccatagaatcggcaaaacggagggaggtctggttctaactgctgcatttgctgatgattgtggagaagtagctgtgggatcagtggaaaaggcttgctcacaat

SEQ ID NO: 33356 - DNA, 351 bp, Oryza sativa
  Clone ID: uC-osflM202039b06a1
atataaattgtgatttgaataatatcgattaatgttatgcaaccataactctactaccataccagtgcttttccaaatatggcattttgcatgtacacgaacaatacctatgaggcaatacaatgaattggggatcataacttcatttcccaattacttaatacagaactccgaaaggataagttccggaaaactgtactttgagaagaatccctctgtttctccaacttgacgaacacactaccatcggatatacctctgacactatccttgggaaaatatcccgtcttataaattcgaagaccataaaatagcccccactcctttaaagcctgcaccccatgattgggg

SEQ ID NO: 33357 - DNA, 440 bp, Oryza sativa
  unsure (1)..(440): unsure at all n locations
  Clone ID: uC-osflM202039b07a1
aagttgtaacttcgacaagaaaattatgataagttagcaagaacagcagcagcaaagctacatgactcatcagtgttagactgcacaacaagagtatagccatcagtgtttgatcaaacctagtgatccttatgcaacagatggcttcaacttccatcattcctttgaatttagtgatctattaacaggtacatagcagcaaccagaaatacatctacttgtacaatgtacacccccagcctttggctacccaaaagaaaaatgtagactctatttggcagaagagtgctaaactgtnccaaagacacttgctaaaaaacttcaaattccaggtcctcagagttactcctgaactccaggcacttgccttctttcttcttcttcgctgtcgtgagggtcacaacgtcacagggtcgcgtctctggaggagcggcagatcg

SEQ ID NO: 33358 - DNA, 382 bp, Oryza sativa
  Clone ID: uC-osflM202039b08a1
ccaaaaaggttggggaagccgctaaaaggcacaaaatggggatgggggcccccccaaaggggggcccaagcacggggggtgggcaaacccgggaaacggggggcccccccaagcgcaggaaccccctgcctgcgggggcccccccaacaggtcgaccgggaccctccaattcttgggtcccggctgtaaacaaaggggggtcgggggaaagggcagccgcgaaccgggaccgggcagccccccctttccaagccccggccccggaaaaactggaatgagccgcctggggggcccactcggggagggagaccccccgggggaaaagggggtgggggggggggaccccttatgcccaccccctggcccgggggttgccccgggg

SEQ ID NO: 33359 - DNA, 89 bp, Oryza sativa
  Clone ID: uC-osflM202039b09a1
acgaaaataattctgtatattttttttgatatcgtttgtttttttaagctgtctttgaaaaagaaacgcccccttttccatttatagca

SEQ ID NO: 33360 - DNA, 419 bp, Oryza sativa
  Clone ID: uC-osflM202039b10a1
caaactatagtactaatcaagactgaagattaaaaacttgacctattcatatgtctgtttagaaattgaggtggaaggtctgacactggcagtttccaaaggacattttcagcagcgcaatgacaatttatttacaaaggcaaacattcctaaccttaatcagctaaaatccttcagccttctcttcagaacatccatggacctcttgcgagcatcctgcttgttgcggtttgaaaggcttccaaacaacccatctgcaaaatccttgtacttgtcacaaacgatggcaaccttcttgtagtctaatgacccatagttcctcccccttatcactggattcatgaaattctctggctggctgctaaggaggagattgactagctgccttatttcaaccaaacaatcggcgaatgttgttt

SEQ ID NO: 33361 - DNA, 375 bp, Oryza sativa
  Clone ID: uC-osflM202039b11a1
gaatacagtacaccactgcagcctgttgacaggcttataactggattaaatgcaaatttaacaacacagagaccaagcatatagtgttttatctaattaaccaaaacaggtgagagtgagtgaacaagagcacccttccgttcgctagtaaggaaatactcactaaactagcttgatttacaacatgccatcaggaattctggaccctatatcaattgtatgtcctttctgatacaatgagcacaattactctcctgcatccataagaactgtgaacaactcgcatgagtgaatcacctcacttgcagtatcggtcggccttcttgcgcacgcggtcgtcgagggcctcctccacggtgcggctgcgggaggcct

SEQ ID NO: 33362 - DNA, 293 bp, Oryza sativa
  Clone ID: uC-osflM202039c01a1
ggggcatcggcattctcatgctatcgctggccagtttaggtaccaaagggacccaacaaaattttactggccagcacttactattggggtcttagggaaacaaaagaaacaaaacaatccaaattacaacagataatttaaaggaaataatcaggggttctccgggtcacatctggttcacctctcctaggagctgggtaaaactgaaaaaatgggggattcctgcaaacataaacccccaggatggaagccatgttgccacagggaaaacaaaaattaggggccccgaatat

SEQ ID NO: 33363 - DNA, 457 bp, Oryza sativa
  Clone ID: uC-osflM202039c02a1
cgatgcttatcgtcgctaaattaaatgggagtacaggctaaacacatgagacatccctcgatttaaaaacagattacaaacacatggatgttcacttcacacacacgacaagcaggaggaggagcagctgctgaaacaaaacgaccagcggcgaacttaatttttttgaaaaagggagaatcataacacggtagaactcatcatcatggccaattgcttcatcaacgccttccagccattatcccccaacaatggctgctcgaactcctttgatatcacgcgttgctcctgaaggagccgagggctttgatggcgccggcccggaggatgtactggtggtagaacgccgcgatggcggcgccgacgaacgggccgacccagaagatccaatggttgtgccacgccttctcgttgttgaagatgacggccgctccgatgctcctggccgggttgatgc

SEQ ID NO: 33364 - DNA, 418 bp, Oryza sativa
  Clone ID: uC-osflM202039c03a1
tttttcatatctcatcacactgctctagcagagaaccaaactaaacaactaaacaacgaaacatacaaacacgtaggcagaaaaggaacaaacgcacacagagagaacaaaaacggagaagtccacgcttgatcctgaccgtccatctcttttgcaggaacagctgcaccgcgataccaccaagactagacaggagacaaaaccgaaacctgggtggctgtccacagaattttcacaattgcagacctacgagagctgccaaaaacggcctttttttgggatgctgccactgcgacatttaagtgccgaaaccttcgagcggttcaggtttcatgacccggggggagccccttctggacagccaaaaaacacagtatgtatggccaaatcaaaccaacttgcctccccacaaatatta

SEQ ID NO: 33365 - DNA, 326 bp, Oryza sativa
  Clone ID: uC-osflM202039c04a1
tttttgttgtttttttttcttttttttttttttttttttttttttttttttttttttttttttttaaatttagggcgctcaattcttttttatatttgcccaccgcttgaggccggaggtttcacacccgaacaaaaaaagggcggggcgcgtcaacaacaccataaacgggggcatcccaaaataagcggggaccccccagcggcgccgctaaaagagacctccccccaaaaaaaaaagcccgaacaaaaatgggacggaaagtggtcaaggggccacaattggttcgggcaacgggaaaattttccacttaaacgggcctcact

SEQ ID NO: 33366 - DNA, 488 bp, Oryza sativa
  Clone ID: uC-osflM202039c05a1
aaagcgaacgaatttaaaaaccgactcatacacagatgacgtaccaaagtaccagcaaaaacatcttcaatttttataagagtagagagaagagaagagatagagataggataccagcaaagttacttgggtttactttttagttcacgggtttactagatcacgaaccaaattttaacgggcctaattgggcattagtgtccatatgaaaagcgggctcagttgggccaacaactatatttgctgtttaatttccaagggtccgaaacgaataatgtgaccgcggatcaaacagctgggacctccttccaaagcagggagcgaaatccgctcttgattcgtctgataaattacagcggcaacggcaatgcagcacaatggtagacaatggacacatatatactcatacacagtgaagcactccatgtagaatacaatagcgaagactttcaatgatcaggttggccattaggagaagatgtagacca

SEQ ID NO: 33367 - DNA, 317 bp, Oryza sativa
  Clone ID: uC-osflM202039c07a1
ggaaacaatatattttcaaatttaattcgggtgggggcagctgcccttgaacagggagaaagttatgatggttaaaaccccctcccccaaagattttgtcattgggggggaccaataggggctttttcagggctggaagggcccaatcctttttgcccactcaacagggggggcccatgactgggccagttctccctggaagcattccctttacaaggggggatataccccctgggcggcattctcaaagaaattttgggggcatcttcatttccatgcccggttgggactagggtatgggaatcatcacacccttg

SEQ ID NO: 33368 - DNA, 406 bp, Oryza sativa
  Clone ID: uC-osflM202039c08a1
agatacaacagcagaaaaggatatacctttgcttccccggttaccatatggaaagatttttacgttacagacatacaagttacagcacaagcagttttcatatgcttgaacatctaatgtcagcggtagcacattaaccaaaagtaaagtaaaaatcacattttgggagcaagccccgtatcatgcttgggaacatcagctaatatcagtcttaaatcacatctcaggaaactgaccggcaagtcatcctttcctactcgctgatcctacagcagctgcttgcagtgacagtcatggtgtggccttgtcagcaagtgagtgggcagccgagctccttcgccgccgcggtgaggaaggcgagcgtcagcccggtggcgcggcggctgtgggcttcccactctatgca

SEQ ID NO: 33369 - DNA, 475 bp, Oryza sativa
  Clone ID: uC-osflM202039c09a1
attaacactattgctttaagccatttaataatgttttcatttgtaattttgattacaagggaagaaagcctcccaaaagacactcttatgctacagctaaccacagcagttcaacgactatcaagggcaaaatgcaaggtgaaatgttcgccttagaaaacgcatagccaagttccccaatgacaagtgtgctcccaagacaccgcaaaggagcaactcaaaccacgattcgggaaagtgaagtggttcaggggtttccagcaacttgacgttaattagcagacctgattatggcgagcacccctgccacgccttatatacagagcactctatagggacaggcaccaagctaccagagaacacgtacatttacaggggcatgaggccagctttggtcattagcaacatccactgacacgctaacaataccggggagtgagattaatgaagcatggaaaatgcccaaagcagggca

SEQ ID NO: 33370 - DNA, 374 bp, Oryza sativa
  Clone ID: uC-osflM202039c10a1
aaaaattagggggcccaactaatcttgaaattgggcaacgtttggggacgggggctgtcaaaacagaacaaaaaaaggggggggggggaaaacatagccatagacgggggcatggggatttggggaattcccccccaggggggcagttaaaggaaaatggccccaaaaaaaatagggctgaacaaaaatgggactgatagttgttcaggggctacatttggttcgggcaacggcagatttttcacttcatcgggcttcacttatcggtcacgggggggctggaaaaaggggaccacattttccgggccacaaaggcgactgggtccgcctaaatcatgcttttgggggccctagggtttacaaaacagggcccc

SEQ ID NO: 33371 - DNA, 484 bp, Oryza sativa
  Clone ID: uC-osflM202039c11a1
gaaacattatacagaaaggttgatttatcaatgagaaggattcccccttctccaaatgaataatcaatgagagagcacggtgttagatactgaccctacaagcctagacaaaaaaatgctctactctttcacctacatattaataattttacaacagctgtgaaaagatgattaagcccagatcggaagagaaacgttagcagatatagcctggccacacccagtattcactgagggggtctgagcctgctgtacagctcacaacccgggcggccaaaaaagtattccatcgaccaatttggcgccttagcaggatcaattgctcgagtgcttcacttctcactagctgtataggtcacataagtaggacgtgcagatggctaattgcttcaactttcaggtgagggaggcctacggctgtacggtacataataggaggtttcctgcccaattggtgtttggagaagagggttccatcgatcaa

SEQ ID NO: 33372 - DNA, 441 bp, Oryza sativa
  Clone ID: uC-osflM202039c12a1
gccacagaaaatgcggcactgtacaccacactacacataagcatcccacaatggcgaggaagcgcaatatttacaattttgttccttcccgtcaccccttggaggggcccccggagggaaggaaaaacaagtaattttttcagtacttgaaaacgaaaagatcccgataaacggagcaggaaggacctagtaaatgctggtgagaatagtcccacattgaaagtttagggggagtggcaccaacttaaaaggggaggggtccctcacctcatgagctagcttttggggtgtagaaaggctttcttccggttgggccaacgtctcccggttttaggccaacaaatgctaccatagactttacttattaatctgggtttaatccaggcccttgaaagctttctacatgaagccctcccgatgattatttacaggtgatcatgt

SEQ ID NO: 33373 - DNA, 346 bp, Oryza sativa
  Clone ID: uC-osflM202039d01a1
tacgtgccccgcgccgtgctcatggacctcgagcccggcaccatggactccgtccgctccggcccctatggccagatcttccgccccgacaacttcgtcttcggccagtccggcgccggcaacaactgggccaagggccactacaccgagggcgccgagctcatcgactccgtcctcgacgtcgtccgcaaggaggccgagaactgcgactgcctccaagggttccaggtttgccactcgctgggaggaggaactggctccgggatgggaaccctgctcatctccaagatcagggaggagtaccctgaccggatgatgcttacgttctcgggcttcccatcgccca

SEQ ID NO: 33374 - DNA, 261 bp, Oryza sativa
  Clone ID: uC-osflM202039d02a1
gggaaggaaaccggcccatggatgaaccattgggccatttagttggggggagggccaagggtacaaacccaaacagcccttatttgatccaaaaaatataagggccccatgcaaagttccaaaccaaatgaaacaaggaagggcccccaaaaatttggcaaaaaaaaaaaagctgatgccttggggaaaaaccaaacgggggggttcgggaccacggacccccccaaggggagccccaaggggagaatttccaatttcaca

SEQ ID NO: 33375 - DNA, 372 bp, Oryza sativa
  Clone ID: uC-osflM202039d03a1
ggcagaaaatttttcatccattatttctccatcttgcattccgcaagaagaccgctagttagggggaaaagagtaaaaaaagaccaaaaacgatcacaacacgtcgtcgtactccaacacgtacgtacggtactccactagaacgtaaaacctctctagaagagggaaaccggaccatatatttggtagcactttacaactagggctgttacagatcagccatgtttttttggtttttggtattccaatcattcattcgaaaattttctttaaccagagcgcccgttgcaattcccgttccagcgctgatgacgaactctcgttgaatgccgagggggttcctgaaactgtgtagttctgtggaacgtgtcg

SEQ ID NO: 33376 - DNA, 468 bp, Oryza sativa
  Clone ID: uC-osflM202039d04a1
ccacagtaaagcttagattttgattctaaattggatagaaagccattgcctacattgaagatggatgataaaaggctctaaagtaccgaaactcgctacggaatcctacattgcagcaccaaaggaaacaaactggtaacaggacaacccaccaaactggaatatgtacagcacagaacacctaaaaacttaccaagacctaaatccatacctagataagtttccgatactgaagcttgcgaactttgcaacaaaaggttgacagcaattttagacttggttactcatatgctgatgagatcaggaggtgtagttgactctgaatttgtttgctgctgctgttgatctttcgcatcaccagttagtgcttctgcagacccagaaggaactggagctggaggattggatgcaaaaccatcgacagcgtgtgaaagcacttctccttgcctgggagctagctttggaagc

SEQ ID NO: 33377 - DNA, 372 bp, Oryza sativa
  Clone ID: uC-osflM202039d05a1
aacagtgccaagtgtcacaatcttgccattcttgaaagaattatgattcacaggctggttctcagacaataatggggggcaggaaaaaataattcgcacagcaggttaccgaccacttggagtaccacagaaagatttcaacggatgaagtcaagttaatcgataacatcaaaaatgatttctgaacttgttgcacaaaaaaatgatctgttgagaaaacagtaaaagtttccaagcaggggaatcctctaaaaaatttcggggagccttgaagaaaaccattttagaacaccccggatacacttttccccataagtgctttttcagggtccaaagcatctcaccgttctgcccaaattctttctttcaaaa

SEQ ID NO: 33378 - DNA, 458 bp, Oryza sativa
  Clone ID: uC-osflM202039d06a1
gcatccaactgaaatttcgctattgccaatctcctgaaatgtacaatctggaaaacccgtaagacctacattcttattggctgctacaacaatggaactacaagctatatatggtacaatgtttcagtatggcgggaagcaccaccccttttgttggatgttttttccccaaaagaacagaatggatatagcaaaagtcagactaatctagcgacttaactactccaggagaatcccgaactatacaagggagcaggaataaacattagcatcacgaatgccagacacctgcaattccatgtagccaaccaaattaggctactacattctgcttatatgtttggttgtacaagctagtacttgtcatatcttcaactcgcatggtcatctaaccatatgaccaagtaatgaccatcaaagtagcttgatctagatgcctgcgataccattttgaaatt

SEQ ID NO: 33379 - DNA, 278 bp, Oryza sativa
  Clone ID: uC-osflM202039d07a1
gggggcccgaaaaatttttatttccccaacctttttattaattccccccaaaggggggggccccggggagtttttttgccctttaagggggaggggggcccacccccccggggggggggagaagggtttaaaaaaaaaactttaaaaaaaacccccggggtaaaaaaaaaagggggggaaaacaaaaacccaaaaaaaaaaacaagggggaaaggcccaaatttttttttttcccccacccctccggggaaccccccccttttggggggtttttttac

SEQ ID NO: 33380 - DNA, 400 bp, Oryza sativa
  Clone ID: uC-osflM202039d08a1
ataattaattcacaacaccctattttattgatcagggtcaaaacctgcacaaaaatacacacttccgggacagatctcaccttttttccaaaacttgtacatccatccacgcgggccacacgaatacctacatttatacgggacacgtacgtacatttactggaccgggtacacacacgcacatttttctggaaagacccccattgtcgaaaacctaacttggttaactgaaggcgatgcgtcgccatggaaacacgggggcgggggcgctcacttgccggggacaaaattgggggcgtaggcccaggcgttgttgttgacggggtcggccagggggtcggcgaggtttttgagggggcccttgccggtgacgatggcctggacaaaaaaacccaacatg

SEQ ID NO: 33381 - DNA, 465 bp, Oryza sativa
  Clone ID: uC-osflM202039d09a1
caaagaagttcgccgttggactttaaacttttaattaaatcgagccatacaagtacaggagctatcccaactagtagttgtatacaccactatgatgaggctactggcaatggaacatggaccacaggaacaagtaaaaggtcatggagccgtcgggcactaaccaccatctcctccgtcatgtctagatccgcagtatccatcccatctggcaattgccagttgaaatggtataggaggcttgcgagcataagctctacatttgccagaccaaatgcgatgccagggcacattcttcgtcctgccccgaatggtgtgtactcaaagtttgtccccttgaaatcaatgttgctatcctcaaacctctcagggataaattcctcgggttcatcccaatactgagggtccctgctaatcgcccacgcgttcacaagcaccattgctcctttgggcacatcgaatcct

SEQ ID NO: 33382 - DNA, 180 bp, Oryza sativa
  Clone ID: uC-osflM202039d10a1
acagggaacagggaaaaaaatttttttggccccaataaaaaaggggtaaaaaatttaaaaaaataacccccccggtcaaaggaaaaaccaagggaaaaacaataaaaaaaaagcggaaaataataaggcccctttttaaaaaaaaaaaggtttttgtggggcaaaaaattttaaccaaaa

SEQ ID NO: 33383 - DNA, 413 bp, Oryza sativa
  Clone ID: uC-osflM202039d11a1
gggtaatattgtactaatgctgacccaaaatatagcaacttaatacaatgtgagatatttcctagtacgatgaattcgtacctgagaactacccgaatttcgtcctatttatactagtttgctatattttggtacagagatagtaagaaataatttaacgagcacacgtgcccctcacgttccaatcatccgttgaacggtctgtacaccttgagagcgtcgatgacgtcagcaatggagcccgcagcggcggcgatggagactacgaggcagcacgcgctgagcgtcttgagcgagacccacctcgcgctgccacgtggcacgccgcgctgggcgatgtacatctcgacggggaagtagacggtgagtggccgaaggagacggtgccgaggagacccaccacgtttcccaaa

SEQ ID NO: 33384 - DNA, 139 bp, Oryza sativa
  Clone ID: uC-osflM202039e01a1
gaatattattaatttattacttattgagtacagacagattttatatacaatttaatattagtgtacatattcatgactaacctttgtatgttaattattttaaaaccttgctattttttataccattttactctgttgt

SEQ ID NO: 33385 - DNA, 267 bp, Oryza sativa
  Clone ID: uC-osflM202039e02a1
gtggttctgaaaggcatactcaaatttttcgagttaatttcagttctttgaaatctggccttacagtaggaaatcaaggactacaggttcatgtttcataatcagtggaaggaatataactcacgatctaaacactgggaatgtaatgtatctatgaacgttgtacagtggattcccctttctttgtccaacatgcttaaggaaacatttaaaattctcaaaacaggaaatgacctatatcttgaaagccattatctggggcttttc

SEQ ID NO: 33386 - DNA, 442 bp, Oryza sativa
  Clone ID: uC-osflM202039e03a1
aaaccaaaacattccctagatattccatatttgccttagcttgacactgtaattcctcaactacatatatttcagaactcgtttaaatcccaacacaactcaaggttcactcaaggttcaacaataaatttgcctcgttagccttcaaaagaaaaaccatgataacgcttaaacatcctcctcctcgctactctcaacacaaataacatcctccttgtctttcttttgcctcttcgatgcacaggcctttcctccggctacttctgaatcaatatgtaacagcatgagctcaatgatcgcgctcccgtacttacctgtcttaacctttcctataagcttttcaagctcagcaacagtggttggtttttggcggttcaggagggaaatttgctgggcagaaagaacagcatgtgggaatacgcctccattactggaagagagc

SEQ ID NO: 33387 - DNA, 463 bp, Oryza sativa
  Clone ID: uC-osflM202039e04a1
acgcaaaaaagttgtcattccattcgacgtttagttattccgccatgaacaccacaagcgttttacaacagcaagcaacggacggagccaactcaatgacagacaaaccgcacaagacacgtcgtccacacggacgccgaccatgacaacacctaaaccgaacaatggcggagggaaaaaaacgatggaaataacacgacagggaccaaggctgcgacaccggagctcagcagctgacacatacatagactacaaatccacaggcatgacacacgcctgatccgcctactttgcacttgatggcaactctagcaatggcactgcaatagccttcctctgtgcccaagtgccctctcctatctaaagagactaaccatagatagatgcatggatagatagacgattgttcatgggttggatggatggatggatacttggtacgacgatttccgaagacactatc

SEQ ID NO: 33388 - DNA, 446 bp, Oryza sativa
  Clone ID: uC-osflM202039e05a1
agataaccaatacattaatgatattataacaatatatgaaaagtgatacaatgcacggtttggcggctagttcatcaaattcgaggaaaatcatatgagactttaatggaagtatggaacaatatatggaaattcaaacttgcacacacacacacataagaggaccatatgatgaaaatattgaagtacatgtacgaatagctccgtaggatccattgacacttggttttttatagatgaatatcccataggtatgttacgtctgaggaactagttgaatatgatactcttgagcgaccaaaacctcggagatacgctttacattccctccgtcgatatccttccatctatactcggtcaccacgatgtggagaaagagtgtgataaaaagcttgttaaactctgccgcaggacacatcctgattcctcctccaaatggcatgaaa

SEQ ID NO: 33389 - DNA, 472 bp, Oryza sativa
  Clone ID: uC-osflM202039e06a1
ggaaaaaaaggtatgatcttgagtcaatacttcaaagaagtagctccaatgcatctgtacaggctctgaggctcatcattttcgccttgcaaaaaaaaaggtgattttttttcctttgaacttccttgacaacttagtactacaatactcgagatgcttatatttatctcggctttgcttgttgacaacctcaggttgatcaaactcaaccatactacagtaagttcttctccaatcagaccaggttctcatggggtgctccactgcccatgaccattcccggcttctgcgagtgcatcacgaagtcgcactccgccaccgcctcgcccaccgtggggaagatccactcatggccgatcgcctcaagcaccttggagctgtccaacttcttcatgatctcgctccccgggttcgccaacacaatctgaaggcccctcctgtccagggtcttcctgagttcatccagcatgct

SEQ ID NO: 33390 - DNA, 457 bp, Oryza sativa
  Clone ID: uC-osflM202039e07a1
aaatcacacaaacacgacagtagtaggaacacagtgaactacacatggacgagtacagacagattttagaaacacaatacatatagagaacatatccatgacagacatggctatgttaattattttaaacggtgcaaactaaataccatttacctgttgtaaacttcatctgcaatggtatcacggagtgtattcattgccgccgctctgttaggtacatcgttccagccacgtagggtggagcatctgaaacgatggggtatccattgtacaatgggttctgtgtaaggaaatacatgtcggagctgtcaatcctgaagttatgtagaactaatgcacaatgtatgatcttggtatggtcgtcactcctaaggaaataaggtatttccctcaggattctcactggcttttgataactccaaatgtcctttccactatgttacgctacgaactgtgc

SEQ ID NO: 33391 - DNA, 314 bp, Oryza sativa
  Clone ID: uC-osflM202039e08a1
gggaaggcccaacaaatgggtgggggaaaaaaaaaagggggggggggtgcctacaaaaaccggaaaaagggtacctgggggaacccttaaaaatttttattttaagggttttttttgaaggggaaattggggggggaaaaaaaaccctttcccgggggggggggaacttccatttatggggggggcaaagggtaaagccatccgtttaaacaggggggtaacaaaaaaaaaagtttaaaacaatccaaagaaaaaaggggaccgggaaaaataagcccaaggttaaaaaggggaaaaaggggggaagggggcat

SEQ ID NO: 33392 - DNA, 423 bp, Oryza sativa
  Clone ID: uC-osflM202039e09a1
gtgttaaacattattggttggttgtttgtcggtcgtttaagtgcaaacagatggttacacttgaccgttccatccaggtaacaaaatacataatataaatctcttcgacagacatcaaagccacacgctaagaacatagagactgaaaggcacgctaacaaataaaaggctaaaacccacgtagacctaaggagggcaggcctacatggtcaaccgacagagaaccttacctcacagggactatatcaaaaatcttgaggagcattctaacacactcaaaagctagggtgatggcgctagagctcaccagcaaagggagcacaacgttctcctccaggagggttgtaaatcagacccttcctcacattgatgcctgcattcttctcacccttggcatgacgattccgaagctcagccccaata

SEQ ID NO: 33393 - DNA, 469 bp, Oryza sativa
  Clone ID: uC-osflM202039e10a1
ggggaaaggatcatcatcaatcaccaaaaggcaaacaaattagtcgcaaatgaagatgtgttttcacgtttcgatcaacgcgaccaccattacagaaagatccgtgtcatgtagcatgctagtatttgcaaagctactacgacgacaaacctgagaagattcacaccgtatcaacaaaatgcaaaagaacttgtattcaccataaaacccagttgaagtgcggctctgtcataatacgtagaggcaatagccgcggtggttttttcttatgtgcaaagcgggaagagaagctctcaagacctcttcttcctcttcttctcctccgacttgtcagacgcgttcttgagcatgatgacgaggatccggacaaggacggccactaagtcagtgaagagggtgagtgcgtgcttgatgtagtccatgtcaccgggtgagccctctcgatgatctcctgcgtgtcatacaccat

SEQ ID NO: 33394 - DNA, 458 bp, Oryza sativa
  Clone ID: uC-osflM202039e11a1
gatgggcgggaggcccttgaagtccaggctgccgtcgttgtagacgtcccaccacttcttgaccagcatcttgatgtcctccctgtccatgttcgcctccttgcccgtgtacctccacggcttcgatcccgctgcgcagtagtgcacgaccttgaccttctcgagctggacgttctctggatgcctccagagcatggccaggacaaggttgtagatcagtgggatcggcttgtactgctccctgaagaacatgttcaggaaatcctgctccgcgaagggagtgggcgtggtgacgcgcagagtgtcgagcagggacttggcggtggccatgctgggctcgtgcacgaacatgccggcgttgaagtagagcgccggcggcgggccgagctcgggggtcggccacgcccccttgtcggggcactgctggcagtagccgatctggtactgcggggtgtggc

SEQ ID NO: 33395 - DNA, 140 bp, Oryza sativa
  Clone ID: uC-osflM202039e12a1
gttctaaacggttaaaataaaaaaaaaatccccgaacagccccagaaaaggccccccccaatgggcggctttcttagaaggccaaaaaaaggattttttttgaagaaaacaaaatcaatttgagcgaaatctatacccag

SEQ ID NO: 33396 - DNA, 235 bp, Oryza sativa
  Clone ID: uC-osflM202039f01a1
agcgtaagaacaaggcctttgctacaaggattacatgattacatcatctggatgtgtgtaaaaccatccctaaaacaatgcacgttgtacactcccggcacaacaaaaaaacaagcttgaatgtaatctgagccaccaatctggacccaatcactaccaacctacactacttacaaaaatcacactatatttgttagcttcccatctctgtataataattacaaagtttagagca

SEQ ID NO: 33397 - DNA, 293 bp, Oryza sativa
  Clone ID: uC-osflM202039f02a1
aggtgaactgtgaacaattttattccgtatggtgtgttgcactatgaatctaaagctgtgcattacaaaatttaccacgaagttgattctctatgcaaaaacaccacaagtttcaattgtcagactgccaagtttcaagctgtagaagctaagagcctgctcatactagactgctcgatttcgatattctctgtgcctctcctaagtcatcaagaaatctctttgaatttagaaccactgaaccaccaagaaagaaccgaactccaggatttgctgcattgtaaagggctact

SEQ ID NO: 33398 - DNA, 442 bp, Oryza sativa
  Clone ID: uC-osflM202039f03a1
acaggaaacattaaagaatgttcaatggttttttcttaccaaggtttacagactacagaaaactcctgatggcgcaggaaattaagagcttgcaagaagcaaacacactataattgcttgcaagttgacagagaaaaatttactgaaccgcactcgctatgaatttcagaatctataacgctcacctactactttccaatagagaaaaataattcaaagaacttatgtactatgaggaaaagctatctccgcggccacaagtgttaataagcatccactcatctttacaagccaccagccttattagctgcagttttgctaggctttgttttagcaatgctaacaagatcaccaaagagggaatcctcgggtctggatggcctcattggctgctggaaggaagaggatgcagaagttccatacaaactgttatcttgcactg

SEQ ID NO: 33399 - DNA, 331 bp, Oryza sativa
  Clone ID: uC-osflM202039f04a1
cacaattcggttgtatttttttttgttgtcatttcaacttttggttggggggaaccacacaataaagggttgggggggaacaaatccacttgtagggggcacaaaacaccggccccgggggaaaccaacaaggggggcccctgagaagaccccctgaaaaacccgaagaaaaaaatcgtaccaaaccccgaaggggtaaaaaaaaagggggacgagggaaaattttaccacccccgggggggggacaaaaaaaaggaaaccccaaacccgggtttacaaaggggcgccaaggggccgcaccgggggagggaaagcacccccctttggaggc

SEQ ID NO: 33400 - DNA, 311 bp, Oryza sativa
  Clone ID: uC-osflM202039f05a1
ataatgaacacacaaccccatatttcattgatcaggttcaaaacctgctcagacatccaccgtgccgggtccgatcttacctttttttcaaaactcggacattcatccacccgggccaaacgaattcttacatttatacgggacacgtacgtacatttactggaccgtgttcacaaaggcacacttttctgaagagacccgcattgtcgtaaacctagttagcttaggtgaagggtatgccctcgccatggcagcacggcggggggggggctcactttccggggaccaaaaaggtggcgtaggcccaggcg

SEQ ID NO: 33401 - DNA, 431 bp, Oryza sativa
  Clone ID: uC-osflM202039f06a1
gcagaaaagtatgtactatttgacttgaaaataatgtctcgcaatgaatagttgaaccctcactgatgtcagctcgatgtagtagtagagtaaagatttagcattcatgatccgatagaaacgtcagatggtttgctcctccttagactcgacaaagtgtccaagtggatctcttcaagggaactggaggtcacaaataaccatcgcatctaagttgttaccgattgccatattaaaattaaatgcgtggtccactccatagcacaaatttcatctggagtcaggcacagaaaataatcatatgggttttatttattgagcactccaatggggggatagatgagctgctttcagctttggaatgaattgcgtagctttccaactgtcaaagcagatgccatgttggatatgtaggtggttcttagttatct

SEQ ID NO: 33402 - DNA, 399 bp, Oryza sativa
  Clone ID: uC-osflM202039f07a1
aagaaaagaacaccttttcaacaacaaaagaaattaagagagagaaaaaaaacaacagaaaaaattatggaaggcgcgtacaatacagggatctcgctcaaacttgtcatcaacctcatcgtcacagccccaaccagacgcttgccaaggcaagaaccaccccgacaccagcaccggccgtaacccttgccgccgggagagacggggtcgtcgcgtccggcgtcgcgtcggcggcctcgggcgcgtcggcgaccgacgtggccggcgtcttccccttttttttcgtcgccggcgacagcggcgcgggcgcgggcgccggcgtgccgtaaatggccatcgggagcagcaccttgtccacctggtacacgacgaggttgtcgccggtgtagagcgcgttgc

SEQ ID NO: 33403 - DNA, 90 bp, Oryza sativa
  Clone ID: uC-osflM202039f08a1
ttttgttgttttattattttttttttttaatataattacttcttttcaacgccaaaaaaacttgaaactgcctaaaagacaaagaaagta

SEQ ID NO: 33404 - DNA, 422 bp, Oryza sativa
  Clone ID: uC-osflM202039f09a1
gctgaaaacctgttatcagacatttatacataaggatattattgatgaaactgctatgattatgacatgacttcagaatttatacataaacaaccttgccatgaggcaccaaaagcattttaaggctaaacctactttccaatttatatccctacaatcctgcctaaactgaaattacatcaatagggtaggatgcctttttgcgtcgcacaaaaaggggcaataaggataaggattatgtattatctttctgcaaaactagaaaaaaattatgtactgccaggaaaagtttttgcagctgcaaatgaccagaaaatatgaatttagtcactcaatcacttatccttacaagccaccaaccttgccagctgaaggtttgttctgtttaattttggcaatgttgacaggatccccaaagaggg

SEQ ID NO: 33405 - DNA, 474 bp, Oryza sativa
  Clone ID: uC-osflM202039f10a1
catgtagctggcagagccagtgctgttattcctctttaaacagtaaaaaaaacgtatccacggttcaaactatggccatcagtaaccacacttcccgtctttttttctccatactgacagtgtacaaatgacaaatgatgaagacaacacagattaccagatacatctagcagaagaccaactatacagatgcaacctcactacatggatggtttatgcacgagctaggtcgcccttactggtcacaggtgcatgtctgggtacttccctggtccagtgtagggcgctgcctgtccgtggtatgttggcttggttcagtgatcaactttcacggtagactttcccagcaggtattcagcaacaagtatagtgtcagatgctaatcatgtaggttgttgttgcctcaaactcgctgatgaaatctttattgtgtttgtagaagcgaaacttctatctcttgcaaagtctttccct

SEQ ID NO: 33406 - DNA, 457 bp, Oryza sativa
  Clone ID: uC-osflM202039f11a1
gagtaccaactttaatttttttactgagtcaaaggatgctagaaacagaaccgttcaatttgctgttgaggattcgcctaaaatctagtacatctaatgtgaaaagttttgttgtatgtaaactagagtacacgatctctcttctacctgtagacaagagaatatctcattcattcagttacatttgtccaccaataattttccatgcttttcaaggttgaaaagccaatccttctccttccttcagcattaatagtcatcttttgacggtaatattacagagaagggtggcactctcagttaatcctcgagcttatcctttaggttaattcttcatgaagatattcagggttccaagttgtatggcttgttcagaaatcagaaggttggtgctgccgatatcaggtagtgctatgataaatctgatgtatcgtcggactgaagtaaattctggtga

SEQ ID NO: 33407 - DNA, 365 bp, Oryza sativa
  Clone ID: uC-osflM202039f12a1
gaataatgtcttggaccaaagaccctgagacaggttcaaccaaacacttccaagacggtcatacaaacatactgaaaatgtcttgtcaaacatggttaatataacagcattctaacagtgcagaatagtagggtttttcctgtggctggcatcgtggaacaagaaaaccaggatccagccatcatttatcaactgaacaaaagcgtgacccagaactacttaagtaatttaagaacatcatcgtctcctccgcgatggtgcgacgacagttcgtgtactagaagatagctactgaaagccgaagacatcaatgtccattgccccaacaacaacagatggtgcatcagactggcgtccgaattcat

SEQ ID NO: 33408 - DNA, 353 bp, Oryza sativa
  Clone ID: uC-osflM202039g01a1
gggtcgacgcacaaattggcatcgttttagctggcttcgttgtagatcctataataacgatacatcattaattcgatcatcccttggatgcggcctgcggcttacattaaatctcgatccaaagaagcaaagatgatgacagacagaaattaattaagctagaaatctcctcgagcgatcacacacacacacacaattaaggtacatacataccatgcactgctgcaacttgcaactgcaagggtcggtgcgtggctactacaagtgtacacatggtaccgttgggttggcaccattttgatcgggtcggtgggctcacttgccggggaccaagttggtggcgtatgcccagg

SEQ ID NO: 33409 - DNA, 324 bp, Oryza sativa
  Clone ID: uC-osflM202039g02a1
aggttcaaatccaacttattcataaagcatactgctgtcccacaggaaactgtttcataaaactaacatatcatacggactcgatggtccattaaaccagacacaagtagacatcagcaccacaaatacttgacgaacagaggctcgggacgaccaggcacatcggcagctccaccaaactggctgattactgaccaccacggaggcggagcaccaggtggagggtggactccttctggatgttgtaagtcggcgagggtgcgtccatcctccagctgcttgccagcgaagatcagacgctgctggtctgggggaaacccctcc

SEQ ID NO: 33410 - DNA, 403 bp, Oryza sativa
  Clone ID: uC-osflM202039g03a1
gccgaaaactatcaactttatttgtaataacacactcgtccatatccatggacaaacgtttgtgctgaacttccattattcagctcataaactaagaagcccggaagctggtggaaggcttagccaagtggtgaaaaaaaacatcgatcttgcagagtgcacacacttttcatgatccaaagtactaaaagcacaaataactggccaattctgctttgtaataggcacagataattcgcttatggtaaacagatgaaaacttttgtctcctcaatcagaaaggttcgcgtagatggttggcattatcagtcccggtcaaacgattgtacatgcacaatcacttgcccgatgctttcaaactggcgttttccctttaggagtgcctttgcacaattaagggcac

SEQ ID NO: 33411 - DNA, 454 bp, Oryza sativa
  Clone ID: uC-osflM202039g04a1
aatcagatagctcaaaatccaaacactagcagaaagtgcaccattggatacatctctttattaagctaatgttaccaaatgagccatggagtgaatgttctaggtattatggggacttgttaccatcgaaattacatatagaccacagcaagcatacagtcttagttacagtgaatacacaggatgaatcaacacctgagtgtatgcaaatccttcaagatctttatatccatatatcagaggtgcaatctccaccaggatatctcatctcatgggccaaggagggaccctctggctcagcaccaaaatctacaaagaagttagggttgatcgatagtcctcctttctcagtgtcgacgtcgatctgcaacatgtgggagcccttcttgacaagatcttggccatagaactgctcgtcccatcggctgaaaagagagttggtcacatattatcc

SEQ ID NO: 33412 - DNA, 475 bp, Oryza sativa
  Clone ID: uC-osflM202039g05a1
agggaaatatgaagtgggacagctcccttctcttccttttatcatgtgcatatggttcataacgtaataatcatacaatcataaaccgggttccagggggtaaaactaggaaccatcatcttcccttttacactccacacatgacaccaagaactcaaccaaaactcatcgccaaaataggcggtctttttccctaggcggttctcctgagttttcagttttctagacagaagacagacataacaacatgaatctcaaaacgacaacgacaacaacaacagcaagtacgcaaacaaccaccgacaaactttgacgcgacaaaaccatgacattaaaaacattacaacaacaaaccaatgaatagacagaccagcatgggactccaccaaaaacccagttgctatttgatgtttataagttgtgccaatactcttctgacatgttaatacagcacatagagacttgacaaaaactg

SEQ ID NO: 33413 - DNA, 461 bp, Oryza sativa
  Clone ID: uC-osflM202039g06a1
gtacttcttgttttctcctaatactaaaactacactacatattgctgtctccatttcgcgtaatacatactcttctcactccccaaaatactcgagattccccaaaaaaaagtgttaaaatcgaagaaatttaactttgcatttaggccctcctgaaggttgaaaattccaagcggcacctcttgtttacgcggcggcgggggcttcctctccggcgacctcggccgcggcggcggaggcggaggcctcgtcgggcggcgctggctcgcggtcgtagggggacagccacttggcgcgcatgtactcgggcttgcgccatggcgggagggggaggccgcgcttcctgaggctggcgcgcgcggcgtctgcggaggcggcgaccaggaggcggaggcggccgttcttgccgacgaacaccgcggggaggcgcttgagcagcgcgcggtaggccttggtggggc

SEQ ID NO: 33414 - DNA, 333 bp, Oryza sativa
  Clone ID: uC-osflM202039g07a1
accaaacaaaaacatccgtgctaaccaaaacaaataatacaccacgatgccgtcccctgctttaagagggaagggaaacaaacaaaacaaagacccaaactgtggaaattataagagttctagttaagatgccgtgaggcatgtccgcatgatgacacgccaggctaccccatggccgtatacccaagccccaagttcttcgctattcattcaaccatttacctctcaattttgtttggaacaaccacaggtattattcggacagctcaattctttaatcaagccgacgatgagctgctgacccccaagttcgcggtgagccatttgcagact

SEQ ID NO: 33415 - DNA, 97 bp, Oryza sativa
  Clone ID: uC-osflM202039g08a1
tttgttgtttttatttttttcttctttttttttttttaacaattattcacttaaacaacaaacccggcaaccaaagggaagggaaacacggccaaga

SEQ ID NO: 33416 - DNA, 346 bp, Oryza sativa
  Clone ID: uC-osflM202039g09a1
gatggaggctgatcggttcagcgttttcattactagctcctgaatgagaaaggaagaaattaagacgggaacagagcaacacagcaagtgtagtcaggattccgaaagaaatttgctgtagctgtactgcttaatagacttgctgtggtagtagccagggcgactcatgagcgtagtcacaaaagcccagcccaaacacggtgtttccagcggaaaacggcccaaaatcaatttgtctccggttgcacgagcgaccaacacgtagaagaatccaccaattcccgccgattccgagcagaatcactcgcattacatgcatgttttccatgatcattttaggagggtc

SEQ ID NO: 33417 - DNA, 172 bp, Oryza sativa
  Clone ID: uC-osflM202039g10a1
gaacaacatagtgtatatatattgtataagttagatgtcaggtacaaccaagcaaaaaatcagacatgatttcatcatcgagacggcttctgctatagactgaagtgaagtagcatggtcaggaacaatttcatttgcaagggctatacatgaattgcgacggacgcgtggg

SEQ ID NO: 33418 - DNA, 118 bp, Oryza sativa
  Clone ID: uC-osflM202039g11a1
ttttgggtttttttatttttttttattgtataaatttttctagtaacaaactaatacatagagccaagaaaaaacgtgtcccaataagaaaaataactcgtccttaaaatgggaagca

SEQ ID NO: 33419 - DNA, 475 bp, Oryza sativa
  Clone ID: uC-osflM202039g12a1
aagcaaagggaaccaagtttgcattaaggtttagtactcaatcaaagttaacaaccgaccacaaatacagtgttccaatgactgaagcagtacgaggaaaccattacacagatggattgctgatatatgaaaagcttgactaaaacctacacggtaactaggactcatcacacaaaagtccagtttaaactaaggatgctcctgtcctaatcttcactctttggaggacttgttgatcagggacttgtggatgtgaggaatgacacctccaccagcgatggtacccttgatgagagtgtcgagctcctcatttccacggatggcaagctgcagatggcgaggggtgatacgcttgaccttcagatccttgctagcgttcccagccagttccagaacctcagctgttaagtactccagaatagcagcagagtaaactgcggcagtagcaccaacacgtccatttgcctgagtcctt

SEQ ID NO: 33420 - DNA, 353 bp, Oryza sativa
  Clone ID: uC-osflM202039h01a1
cagcggtgccaaaagattcagataaacaggtgaagctttgagccgacaaaatgcagcaacagataggagtagttaccaacttaccatagttcaactaaaatttatagcccgaatatgggacaaaactgttagaacactttatctaaccaaagcaaaagaacaaaacaaaaaaactttagcactgaaaatgacaggagcaagtacttttgtcaaagaagcaccagactgcgatcaaattttgcttcctacacaatactaattcctgaaagctaactttttactttggatggaagcaacattgcttcattatttcagcgggaacagaagttcctatttaaggtgaattcaaaaac

SEQ ID NO: 33421 - DNA, 333 bp, Oryza sativa
  Clone ID: uC-osflM202039h02a1
gatatgaaaatggtactatggaactgagccttacatagatgttctgcaaaattgtatagcttacatgcttcatcagagctcagtctacaggatgacttttttctccacaatcaccatcaaggtgatacactctacttctctcgtcaaacaatgcagtacaaaaccatgatagtaaaagagcaacaaatggggaacagaaattcaatgcttcttgcgagaaaagtggttgtcattcggattccgtttcccactgaacattgcaagggccttcctcactggaggtttcagggggactttcttttcaccgctgtgcgaaaatatgtcctcgacacc

SEQ ID NO: 33422 - DNA, 340 bp, Oryza sativa
  Clone ID: uC-osflM202039h03a1
aaacaagctaattttataattaattcacaacaccatatttcattgatcaggttcagaacctgcacagaaatacacactaccggtacagatcttaccttctttccaatacttgtacatccatccacgcggtccacacgaatacgtacatttatacggtacacggacgtacatttactgcaccgggtacacacacgcacacttttctgcagagacccgcatcgtcgtcaacctagctagcttagctgaaggggatgcgttgccatggcagcacggggggggcggccctcacttgccggggaccaagttggtggcgtaggcccaggcgttgttgttgacgggg

SEQ ID NO: 33423 - DNA, 144 bp, Oryza sativa
  Clone ID: uC-osflM202039h04a1
aaaaaaaaatttaatgtcataatgtttaaaaaaaaaagggaaaaaaaggttttttttgtaaaaagaaaaaaacgggggggaataaaaaacaaaaaatggaacatagaaaaagacggccaggaaaagacacaagggggtaataaa

SEQ ID NO: 33424 - DNA, 430 bp, Oryza sativa
  Clone ID: uC-osflM202039h05a1
ggtgcaaggggccgcaggcatacaacagagggcacacaaactatatagagatgttgatttacatatgaaggtcgatagatacggtcaaagttccctgaagacaaaatcggaactcctctgcacacaacttaaaagaggagacctcaactcaaaatggaacatagatgaagacgccagaaaaggttccaaaagaaaatgcagggaaagacttcctttccacaccaccactaaaaactcatgtaaattgtctccttgctctcctctctttctctctctcccctcagcacagttactggaaactgctatacaacatggggttaatacattcttaaaaagtgaccaaaatctggaagctctcgctgcgcctttcacctttcttggcctttagttaatatgataatgggaggttcaggggaaactggaagcaccc

SEQ ID NO: 33425 - DNA, 89 bp, Oryza sativa
  Clone ID: uC-osflM202039h06a1
attaatagggctttttatctataattttgtttatccatttggagactgagcactaaaaatcacataggattcggattaagcggaccagc

SEQ ID NO: 33426 - DNA, 108 bp, Oryza sativa
  Clone ID: uC-osflM202039h07a1
gacagaaattaattaagctagaaatctcctcgatcgatcacacacacacacacaattatggtacatacatacatgcactgctgcaactgaaactgcagggttggtgcg

SEQ ID NO: 33427 - DNA, 481 bp, Oryza sativa
  Clone ID: uC-osflM202039h08a1
aaaaagtgcaacgaaggtccctcaacttgtcatcgagttacaaaatcatcccccaaccacaaaaccagatatatgacatccctcaagttacaaaaccgttcaatttaggtccttcggtggttttgaccctggtattgtccgacgtggcggttgagtcagcgtgggacccgcgtgggacccacatgtcagactgtccatgtcaccagggcgtggccggcgaagagcagccagggcggcgcggcaggacggtgcggcgggcgcgggcgcgggcgcgatcgccggtgcagaggagcacgccgcggtcgggcgtcgccatggcctctcttgtccccgtcgaagtcaccccgctcgatgaggtcggcggcagcgagcacggtgtcccgtcgcggcgtgccccgttgaagtcaccccggtcgacgaggtcggcgcacgcgagcggggaggggtgtcggtggcaggaccacaggggcagagcgaaggg

SEQ ID NO: 33428 - DNA, 353 bp, Oryza sativa
  Clone ID: uC-osflM202039h09a1
aaaaaaaaaggcgaatttgcggggtttaatcggaaggggcgaaaaaatttccgggggggcccaaccccattcccggggccttttttggggtggggccccaaattcccgggccaaacccaattttttaacccccccccaaaaaattttaaaccccttccggggggtcaacccccgttttggggctaaccgggaaaaggaatttgttcccaagggaccttgcccctttttttttgggaagcttgggggggttaaaacccggggaacccagggggaaacaacccccgggcggggccccaaaggggccccaaggggaaccacccaggggaccctttaaaatgggaaaaaagggggga

SEQ ID NO: 33429 - DNA, 444 bp, Oryza sativa
  unsure (1)..(444): unsure at all n locations
  Clone ID: uC-osflM202039h10a1
ccaacaaaacaaacgtaaatggaaaagcagtgcttattacaggcctaaaataccactcacgctccaatgcaggcatccctctcccttaattattccaagctttgggcacaagaccttcatggcttcatgtatactgttccttggcatcaacgatgacaaaaactcaaaacgcgcggtttgaatcttacaggctctttgctgttgcgatgacgttctccgcggggatgccatactcctggtagatctttccagcaggagcacttgcaccgaatttgtcgatgccaatagccttgcctttgtttccgacgtacttctgccatccaagantaaaccctgcttcaaggctgactcttgcagtaacagccttagggagaacactctccttgtactcagccgcctgttcattcgaaaagctcccagcaaacaaatggcacgacacggaca

SEQ ID NO: 33430 - DNA, 465 bp, Oryza sativa
  Clone ID: uC-osflM202039h11a1
ggaagagataagtatctttcatcttcgtattttaatagcatcacagattacagatatccaaaaacctcaatacatccaagagctcaggacaggattaaaatgcagagaatttcagcagattgcaaatatgtaggatctttttaaggttaagtctagagaattgcataagcgaaaaactaagcaatcccaacaagtctaggaagacggtccagggcctagcagcaatggtggatccttcttggcgctctcagactctgaatcttctttgggaggtggccttgatgctgcccaagcgcgaagcggcggctcaaacatgctgccaacgacatccggtggtggctgttgaggtgcatcctgtccaggaagcacaacaagacccttctccctgagagacgacggctcgatgtaacactccttccaaagggagtccacaagctgtcgctcctcacgatgtgcggagagatc

SEQ ID NO: 33431 - DNA, 434 bp, Oryza sativa
  Clone ID: uC-osflM202039h12a1
aggttcaaatccaacttattcataaagcatactgctgtcccacaggaaactgtttcataaaactaacatatcatacggactcgatggtccattaaaccagacacaagtagacatcagcaccacaaatacttgacgaacagaggctcgggacgaccaggcacatcggcagctccaccaaactggctgattactgaccaccacggaggcggagcaccaggtggagggtggactccttctggatgttgtagtcggcgagggtgcgtccatcctccagctgcttgccagcgaagatcagacgctgctggtctgggggaatcccctccttgtcctggatcttggccttcacattatcaatggtgtcggagctctcaacctccaaagtgatggtcttcccagtcaagggcttcacgaagatctgcataccaccacggaga

SEQ ID NO: 33432 - DNA, 368 bp, Oryza sativa
  Clone ID: uC-osflM202040a02a1
ctggaaataggtgtgaaaatttccacataaagacgcgcgtttggatcacaaacccttttcatggtttggacagtaaaaaagaatgagcccccaaagaagggggctatagctatatctggctactgatttcctgagctaaagcaccccggatttcttggatggcagattgcaggagatccacccaggggtttcttcttgggtatcctgcacaggattatgggaagatggtgagtcctgtcaaaggggggccagagccgtttgtgaccttcacagaggcaggccttaccaggctatgccttaaaaggagcccgggtttgaccacatgcgggacattcccagcgttgagctaatgggattcctggggggcg

SEQ ID NO: 33433 - DNA, 420 bp, Oryza sativa
  unsure (1)..(420): unsure at all n locations
  Clone ID: uC-osflM202040a03a1
accaaaaaaggggaacataaactttcacagaagaaagaaaagcagcaaagaaggtttcaacacatcatatcgatcaggctttagaacattagaacacagatgtgcataagcgtcagaagggatttaattaattattagcaagccattttgtcactgggccacatactagagtcccaaatcataaaggaagggtgggagcagcaactgagcaaagctccatcctgcttagatacattcgagaggctttttttagggttttaaccagccaagcgcaagcactttagttaaagcctaaacagagttccagcatgatcagatcatgcgcattacttccactttttgaacttgccaccaccgaacatgccgtgcccatgcttgccatgcttgaacttgccatgggggccgngcttgccatgcttg

SEQ ID NO: 33434 - DNA, 395 bp, Oryza sativa
  Clone ID: uC-osflM202040a04a1
ggggaaaaaagacttgggaagcaaaaatatttttgcacacaaaaaccggacgaggttcggccgcaacacaattaaccaacagcagtttggatgcaagggcccgagatgcatcacaaggaacagtttgacacccccccagacgggacatgttcaaattcgtcccggggccaaattttatgggtcaacaacaaacattccaaacaatgggacgggtggaattttacaggggggggccaaacaaaacaaaacccttagcttgggccaggggaggaaccaaacctggcgggccctaaaaagaggagagggcccttttattattccataaaccccccccacccatttgtggagatagacagaaagattggatttggccaccagggaacaattttccaggg

SEQ ID NO: 33435 - DNA, 433 bp, Oryza sativa
  Clone ID: uC-osflM202040a05a1
tttttgttttttttttttttttttttttttttttttttttttttttttttttttttttttttttttttttttttattttttttgtttgtaaatttttttttttgtttcctttccgcccaaaggaaaagggggacccccacctggggacggaaaatccaagggggggggcaaaaaaaaacgggggccccccaaaccggggggggaacgcccccccccaaaaaatccccaaaaaagccggggggggaaaaaacccccccccaaaaaaaaacaatgggtgggggggggcgctccgcgggggaaaaaagggggggcaggcccccccccgccttgaaagggaaagcccctccaacccccccggggggaagggggaaaaggggcccccccaaaaaggggccccccccaaaaaacccaagggtgccccccgggagggccc

SEQ ID NO: 33436 - DNA, 400 bp, Oryza sativa
  Clone ID: uC-osflM202040a06a1
ctgaagcacaaacttctttaccgtgcatgaaacctcctgatgtcatttcttctgattcagctaatgcaggagtctgaatgcccaagctgacatttgattcctcgacgatcactgccccaaactgacaggcaggttctgattggttcttcaattctaccttgagctctgatggtgcaactggcattgacacttcatcagatacatgactttcaggatccacatgcacttcactgccagcagtagtatcattcatacccttgacaatttctaccaggttgcgcacttcatcattggaatgggtggacaagccactgtgaccttcgacacagccatcaaggtcatcaacagtagtttctttccttagcaataaatcttcacaatcagctatttgggcagaact

SEQ ID NO: 33437 - DNA, 465 bp, Oryza sativa
  Clone ID: uC-osflM202040a07a1
ggtgtaaacatcatctctgaggccaaaattagagaacacggcacatgtacatccacggaggcgcctaatcatgaccaccaaaccaaacactgggttctgtccattttcaacttataaaatataaactctgcagtgaatacctgcatggttcaaccaccttgcctatgcaatcacctctatatctggatcaccttctttgccatgattgctcaagactggttcccggattgagatgccgactgtatcctctggcgaacttgttggagcagaagtttcaggtagtcatctgtaagttctgggtcactgacaagctcttcaagcatgtcctcaatactctcatcttcaccataagcctgtgcagcagtttcgaggaccgcaccgaagatatccctgggggagtcatgttgctcaatgtgttcacgagcttggtgtagatcaatctgagaatttccataatctgaagca

SEQ ID NO: 33438 - DNA, 497 bp, Oryza sativa
  Clone ID: uC-osflM202040a08a1
ggcagacaatctggtacagtaatgcaaaaaacgtttaacttgtttgcaaaagcacaaaactgtcaaagtacaaactgcctaacatcaatatcctttgttccagcgcagcatttatcaagcaaaaagaacaaaaacatccagcatttcttttctttccagatatacagcatgagaactctttttacccacttctgccccccttggcttacagaaaagggtagggacgaacacgcaaaccacaatctcacaccttcaatgagattcagcccggttccttcaaaaacccaccgaacgagcaccatccttcgcacagtccggatcgagcacaagaacatttttttttcctcgagcgaccaaagattaacgaggccagccacgacaaaactgatgcaattcaatagaaacagcaaaaagggaatgggtaaatccttaggccacctactgaagaactaggcatgcacgccatttccattgggataatatgttccattggaaag

SEQ ID NO: 33439 - DNA, 433 bp, Oryza sativa
  Clone ID: uC-osflM202040a09a1
gtcatactaacacactttttaagcgacggttaatcaaaacacgttgtctttaagttaatcagaaattgcctgatctgtttaactcttatcagcaaagaggtattgctcctacgtttcagcatactcttaaaaaccagaattagaattacccagaatgagaactacagccagtaggggatattatccacatggtggcacactggcacagtttcgcctattgcagggaacaagatgccatcccgcaaaatatacacgtggcttaaatggcgacacacgtttggcaacccatattcagcttgacttatggtcaaaccggtgaggtcagagctctctccattaaggatcttcaaactctgccattggattaggcaaatactctacaatattctgatgctcaagaatgtcatgcagattcagggtaaagttccagtcc

SEQ ID NO: 33440 - DNA, 410 bp, Oryza sativa
  Clone ID: uC-osflM202040a10a1
atgcgtactgatttcatcccaactgggaagagcaaattacaccggcaaattgccaatacaacccatccagcctttttgaaggttgagctatttacaggtgctccccccggtaggacaaccaagcatgcagctggcggaccattttttgagggtacagttacctatgagaaaaggttttgaacccaccccccaaattgtcaactttttgaatgggcaaaagtttttttgcgaccatgcgggggactttccttagccttgcgcctttggcctagggttcttgctcttgccagagaataaagttgatggtcacttgtgaatgggcatctatgctggtcacaggtttcttttcctccagtgcattgtcaatgatctcggggatggcaactagactgggccttttgcttgatttc

SEQ ID NO: 33441 - DNA, 396 bp, Oryza sativa
  unsure (1)..(396): unsure at all n locations
  Clone ID: uC-osflM202040a11a1
ttgttttttttttttttttttttttttttttttttttttttttttgagccaaaatgccaaacgggaattaccaaccatatcgataccacgggaataaaaccaatctttttttgattaacggacaaaaagaaagaaaaatttaaacttaaaaaaaaacctttacaaaatagctagactatcaccactggggccactagatgaactttataaaaaaaaggaggcagagcttttgcctttgtttcaacaaaggggggtgcaaatatgagcaaattgcatgtccaacattttaagccctatacctgggagtggggcccatctggacacaaaggggggcttgaggncaattaaataaaaaaagggaaatgttcctagaaaggacagatttacttccattag

SEQ ID NO: 33442 - DNA, 453 bp, Oryza sativa
  Clone ID: uC-osflM202040a12a1
gatatagaaagaattagcgaaaggaggaagaaaacaagtgaccagatgatatcttctgttatgttacaccgaaatggcaaaactccgatgccatcatcacagctctgaaaacaatcgggggttcagacttcttcagtcttcagagaggtagccgagcctgtgttctgtgctgtgtgcagtgtgctagtgctgctctgattcatcagcagtccagtatgtcttgaccgccacaaggaccttctccgggttgaagggcccgtcctcatggtccaagatgcggctctcccaccgcatccgcttcgctatcgcctggaccttggtgaggacgtcgaccgtgtcgcggatgatcgccgtgccctcgggcctcaggatcctgtccatctccaagaggatgttggttatgtcacacctgtcctgatagatgctaaacaaattgtcagcatgcaacaggtc

SEQ ID NO: 33443 - DNA, 526 bp, Oryza sativa
  Clone ID: uC-osflM202040b01a1
gatgaacagccttctgccgaaatttaaagcatatgtctgcagtacatccaattgccttggttaaaagaagaagaagaacagcttaacgttaagggagtcctttggtcatcaaagatgaaaacaaaaggaattcagttctataaatattccagacacacaaattgtagcatggctggtcatgaatgtttgccaaaccaataaatgaaccgaagcctaatagttcaaaatgttttgactccaacagggcttcagatcacatcccagtattatcttgtggatagatggtgatcaagtcttgttatatggggaatccagggcactggggagaaccaaagagtagataatcctatcccaatacgccttagagttagcagttgttaaaaagcatagtcggaaatagcctgtgcgactccatcttcatgattagtggcaccaattatatttgccactgctttggttttctcagacccatttgcaaggcgcaacacccaatgatgctagctgtagcatttctatggcatttttc

SEQ ID NO: 33444 - DNA, 459 bp, Oryza sativa
  Clone ID: uC-osflM202040b02a1
acgggcacaaccaaaatgcataattaacgataccattgttggatacattcttgtctagtagaaaattaatatgctaaagattaaaaacaaacttcgatgttcagaacttgaaacaaaactttcaactttgcagcgatatggcaagaggcttagtcgaagaggctcatgcccaggtcaccatcggactcctcctcgggctcttccttcttctcttcctccttggcagccgatggagcagcagcaccactgtcgggggcaactggggcagcaacagcgaacttgctggggtccttcaaatactccttgatcttatcagcatgtgggtacgagtattcggtccccacagcaacagcaagcacattcttgtacccattgaggaacatgtgtggtgcagcagcaatagttgggtacgagattgccagggagactgaggcaaccatagaaacaccagaagcaaac

SEQ ID NO: 33445 - DNA, 359 bp, Oryza sativa
  Clone ID: uC-osflM202040b03a1
gaatgtaaatattgaaaggtcaacaaatgaatcgaatacaattaattgggcaccccccccactctgaatttttcccccctatccaaaaagaatatttagattttcactggcccatggaaaatggcttatccggttaggcggaggaaggtttcaccttggaaaaaatttgcgggctttcaatttttatttccgggcggcccaaccgggggccaaaccaaacaactgaaggaaggaacgacccccaccgcggggttgtttaaatccccacatgccttcgaataattatgagagggaatttattacccgcgggccggttacaatgctttgcccttgccaatattttgcgggaccagtaacat

SEQ ID NO: 33446 - DNA, 503 bp, Oryza sativa
  Clone ID: uC-osflM202040b04a1
gttcaacagaccgcgctctactccatttcattttaccaccaaaagcgtagctgaactgagaatcccactagagctactgcactggcagcatttcagggtcagggcactgacaagagtcaactagcaccattgcgacctcgtaaggtataaaccctggatcatggaacggagaagaaaagctcaaaagctaacaggtctaaggcttaaccgattttggaaacctatgtataactacaacagaagggtcaggattgctggatagccagagaggaagatggtacgcatgactcgactaaattcatggggatatccatgtacttgcagaaggacatgacccaatataacgccattggcgcctcagaggaatgagcagatcccttgcttgtaacaggcgtgggattaaacgctgcttctgccatccggaactattgaatcataaactcagtatactgggttatatgggaaggaccaaactgctggagaagtgttccaagccctatgac

SEQ ID NO: 33447 - DNA, 476 bp, Oryza sativa
  Clone ID: uC-osflM202040b05a1
acgtgaacggccgagaaaacctaaatgtgccaggggcccagggcccagggggcaggggttgatcatagaagccagggcaactgttccatctggcaatagacaaatttgtctggtttcaacaagtaccacgttcatcttttactagtatcttcaacgaagaaaagatactggggttttcccagacaaaccgaacaacataaataggtagttttacataataatcatcgaaacagtaaattttgtcagcttcatacccagtggcaagatgtatttcggtctcaactggaggtcttcagcctagaggactcggcctctgaaggaagggcgctggcctcacatagctgaatcccacgaagttgctatctgcagcgacagggctggccactggagagtcgagcacgggcatgctggtccagcactcgtcaaagttggcgatgcaggttttgccagcaacatttgggcggaagcttggctga

SEQ ID NO: 33448 - DNA, 327 bp, Oryza sativa
  Clone ID: uC-osflM202040b06a1
aaaaaaaagggggccctagaaaggcctcccattcataatggctgggggggcgtttagggtggcccctccggttaaggtgatcaaccaaaccccttgggacagaccttgcaccacgtataaccttttcttttcacaacaaaacaccaaacgggcgcagctccaaaggataaccatgcaacgggcgcacacccgttcatttaccagaggcccccccaaaaccaaaaaaacgggcctagcaatactccccattttaggccccaactttgggggggccaaccgcccccaagtttaaccgcgccctggattcaaatattcaaagaagggggg

SEQ ID NO: 33449 - DNA, 514 bp, Oryza sativa
  Clone ID: uC-osflM202040b07a1
cttagaattattgcaggcaattgcatcacattaccagtcagtagcttttcccatgtattacaggtaccaacgaaatagcggtaaatactgatgagcgtcgctcaaggccaagttagggctgaaatattttggttcaattgatgaccaaatggagttgcttttacttgtatattagagcatccctcccaggtccaacaccaatgtagtggactggaacaccaacaagctcttctatcctctcgacatagcgttgggcagctaggggaagttcactgtaactccggacagacgaaatgtcactttgccacccaggcaacacctcatatttgacctgtacttgctccagagtatcaagatcccctgggaaggattgtagcttctgcccatcaggttggttataagaaacccccagcttaacttctggtaatccagacagaacatcaagtttggtcagattaagagatgaaaacccatttatctcgcagcagtactttagtgcaacaatgtaaagcca

SEQ ID NO: 33450 - DNA, 436 bp, Oryza sativa
  Clone ID: uC-osflM202040b08a1
actgaaaatgaacagttcttcaaagaggaatggatcactgtctcagcagttcttcaaagaggaatggaccacagtctcactgataaactgtttcatataccattacaaaaaaagcatggatatgactagatctcactggaaaatgaacatgcccacatgatgcacaagctggctgcttgctattcattcctccatggacagatggactaatctagtgttacatcagagggataatacattaatccatgcaggggtcctgtagtgacagacagcacaatggcaagaagaatatgtgaacatggatgagcataagaagatgccaatcatctcgggctggctgttgcatacttgcattgtccaaagtccaaacttgcagtgcagcattctgcttggaaattatcagcatctggtgcgcctcacagaatcttgcactgat

SEQ ID NO: 33451 - DNA, 420 bp, Oryza sativa
  Clone ID: uC-osflM202040b09a1
atgcaaacataccacatcttcatagcaccatcaatatgatttggctgaatccaagtaacatatagcaatatgtagaagcatattattacacaagaaccttttaacaaatgacccagcaacaccatccagccaccggacaccgcgttaatatactagaggtgaatccattcatgcgaaagcctctcggggcgggataaatacagtagtccaccagagaccactaggcagacgcattgaccaaaagcctccgcgaggtatacagaaggacactaaagagcagatatctcctttatgacctgctctttggctgcctcgaactggccatcctctttgtgaatcttgaatccggccaaaaatcggagaagcttgcttcggtttgggactagtatgtttacaacctgaggtggcttgtttttattt

SEQ ID NO: 33452 - DNA, 479 bp, Oryza sativa
  Clone ID: uC-osflM202040b10a1
gaggataaactttaactatacaaatacataagctgatgaatttctggtgaactgtaactatacaaacacataagttgatgaattatacaaaacataagttgataaatttctggtgtttcttttcctcaaatgcgttatatagtatagtagactagtagtacagaagaatagcatatatgaagcccctccatacttcagataagaggccaccatatgatgatatgcttggattgttcaggtcccagtagctcaacaatgataacaattgagatcaccttgtagagaattaattcggcccagtaactcaacaattataacaattgcgatcaccttgtagagatttgagcagcagcatactttgagtttgcagctgccaacagcgcagcgccgatccctgatccgtctttcgtgtgctcgatggcgatacgattcgatcgctcgggtcccagtagctcagccacagcctccttcatgtacct

SEQ ID NO: 33453 - DNA, 393 bp, Oryza sativa
  Clone ID: uC-osflM202040b11a1
atcattgataaaactttttctttccatgaaaattatctgcaaagtaagaaagtaacactcccaagatacaacagcacaccatccatatatacatgcaggcagcctgtttgagcccttgtgcagatgcatttaatttatacaagtagaaggcactcaaatgagtcaccacatgaacacacacatgttccatcatcgatcgatctacacatgcatcacccggtcatgcacttacaaacaaaagatctacttgaagaagtacgggaggttgagcacgtagaggaggaagtaggcccagaggacgccggcgatgccgtcgaagaagaagccgccggtgaacttggaccagccgtcggtggactgcagcttgtcggcctcgttcttgcggtcggagag

SEQ ID NO: 33454 - DNA, 468 bp, Oryza sativa
  Clone ID: uC-osflM202040b12a1
aaggcattaaatacatggcaacaaaatttatttgattgcaaaaagaattaaacaattttgcaacaaattaaccccaatagggccgagggaaaacaaaatttatccccctttcgacaaagagagccccaagaatgcaccggggggaaaacaggaatgggaccaccaaaaaaaacttgttgaaacaaacaccgaaacattaattggttatgcccagggctagaaggggaggccccggggggggaacacggggcttttccaccccttcgggcaagccagggccatttgctcctgggggacagtttcaccagcgaggggggccaagtaaaggggccccgtgggtacccccccggaaatttccggcccggtccctgagggggaaccagttttctttaagtgggtgtaattagaggttggggacccaaggaaaagaggggggttgggaaaatgttttacccccaaatttaaaaa

SEQ ID NO: 33455 - DNA, 510 bp, Oryza sativa
  Clone ID: uC-osflM202040c01a1
gcctaaaataagagagctgtcacaatcttgagttgcaaatcgacaagcaccacacttccatgttcataatttatacaacagtagataagccacacataacagttgatggcagaaacgggcgtataagttttttcattgtttgaacagctattgctgaatgggaggctcactctggtacacaatttcagctgatatttgacaacgaaacatccataaatttagcagcagaaggtctggagtaatgtatagatctcagtggtgcactttaagcagcaacaggtgcggttacggccagaccttgggcttttgccggagcaaccaactgactgatgttctccacggcacgaatcctgccactcgccagcccagcagtcaggtcctccactttcactttcagcacatctcgccggttgccaatgtcagctgcgtacctgctggcgcaatacaccccaactgccattaccgccattccatagatattcggggttactaggcggaatggggttgaaa

SEQ ID NO: 33456 - DNA, 458 bp, Oryza sativa
  Clone ID: uC-osflM202040c02a1
atgtaatctgttatatatatgtatatgtctttgccttatacaaaatgataagagaaaaacatatataatttggcgtgtctcattacaattacatgctctagttaattagaacagtaagagaggaagtgaagaaaaaaaaaaggaaaaagaaaaaaaaaagaaaatgctcggtgaaggagagctttgacctctccaatggaggagagtgtaaacaagctactctacctctcctcaactactacttctcccggccggcctggcctgctagccggcggcggcggcggcggcgcgtggcgttcacatgacgctgcaggcgttggggttctcgtcgtcgaacatgcggtactcgtcctgcagcggcggcgcgtgcgccgtccccggcgggctgtagtagtcgcggtagtaggtgtccggcgacgagtgcgggtacggcatgtacaggtacgacggcgaccact

SEQ ID NO: 33457 - DNA, 545 bp, Oryza sativa
  Clone ID: uC-osflM202040c03a1
agttggaagaccataacatcaagaactctccttgaaaattttgtaatttgatccgcaacgattcagatgcagatgaaacactgctgattcccactcagattacacacaatacaaatacaccgacaaactgcctcaaaaaccaccaaattgattcaaaagtaaaacgggtatgagggatcttcccaccgagactgactaaacctaaccacagacaattggatccactggacccagattattcaaaaacagatggctatgacggcatcgtcctcgcaaccgaagggaacttgcagctatggatatcctcacttcgcgctggcgagctgggtgcggatgagcttggcggccgaaaccatgttggtaagggcgggcttgacctcgttgtacttgcgggtcttgagaccgcagtcagggttcacccagagaatgttagtgtcgagcaccgcgagcatcttgttgacgcggtccgcaatctcctctgtggcgggatcctttgggaagtgatgtcatagacaccagggccaatgccagcaccatactttaca

SEQ ID NO: 33458 - DNA, 482 bp, Oryza sativa
  Clone ID: uC-osflM202040c04a1
gaagacgaacactctttgttgaaaaatgaacagaacattaattgattacaatgttgcaactatgtagtatgcatgtgaagataagtacaattattatatattctagtagtaattacaagattgtagcaattgcttaattatcccctctctatatgcgaattattactacaagtagctgtacacctgaaccatgcagttagccacaagcatggcactgtacgtagtaccaaaaaaaacacaggcatgaaaattaagtaagaaaaaggtcaaattaattcgtactgtaaatacataaaaccactggtggcaggcatatatgcaagattactccgatcctcactcgatcagttgagctgagcttttaattatatagcttcttcatcagggctgtgcttgtagaatgtagatcgatcaattaagcaagcaattatatatggaaggaggagaattaattaaggatgatatgatttgctggatgcatg

SEQ ID NO: 33459 - DNA, 432 bp, Oryza sativa
  Clone ID: uC-osflM202040c05a1
cagtcacaaaacacagtgcacatgttatcagaagttcacttatcagtacgagaattcgaacagagactggtccgagatattcttgccaagctaaaatagacgggcgccatctcaggccttggaaaacataaacatgttatgtagcatgcatatatacacacatcgccggataaatacgctagttaaaagctacggtcttcttctctcggcgtatgcgtccacctcggcattaggaacgtgacaacaacacgtttaggccgacttcgcgaagccaaccctcatcttgccgtagtcgaacacggtatgggaggcacccatgaaaacgtcacccaggatccagagaggaccacggggaggaggaatgtccatggctgggaaaccactgatgcactgggcaagaggttctttaccaacctttaagaattacttttt

SEQ ID NO: 33460 - DNA, 444 bp, Oryza sativa
  Clone ID: uC-osflM202040c06a1
gattaactgcattaattgcaagaacaatatttttgctctagagggttaactgaatgactgaaagaggacaaaaaatagaaaagatcagtggggtaattaagtctcattatcccccacagacctataattcgtctgacagaaaagaaagaagaagataatacagtctcattgcagttatccctgatccagtacaattaacccaattacatttagcaagacctattttttcaaatgaaatttagcaataagatctatcaggaacagaatagtatattgcagtaataacgcctaacttcagctcaagtctcatgattcctgttgatttagcttcatcatgcattagtaggagtctaggagaagctcttttgctcaccatgtctctcgctaagattgtatcatcatcaaagctggctttatccttttgcatggatgcatgcaaaaaca

SEQ ID NO: 33461 - DNA, 455 bp, Oryza sativa
  Clone ID: uC-osflM202040c07a1
gtcatacaaaccaaaactgtacattcaaatctacattgttcatgagatctccaattaagaatcaaaaactttggttctcctgctggaatcgctgcatgcatgcactcgcacgcgtcaaactgaatgtttcttgctgtaaatgcataaaaagatggaacaagcgtccatagaaaaccgggatcagtaagcccagatggaagaatatggtctgctatactttcctggcaacgcatgaaggatttggctcaatatttactggagcaacaaccgtctaataactggtgtttcgaagagaccatttgttcactgaaccagcgtgatactgacccaattccctggacatgttttgattcgcccaaccaggaaaatattttttcatggcccgcatacaataatctcctcttagcctctacactctccatagcattgctttcccatgatgaagagcgagcttc

SEQ ID NO: 33462 - DNA, 424 bp, Oryza sativa
  Clone ID: uC-osflM202040c09a1
aaatagcaagtagcaggatttcagcaaattgaaacccactcgcttcagtttcaaatagcagaagaaacggttcagcttttaataacagaaacagattacagttttcaatagcagtagaacaagcgaatgccacaagccaaaataaagacataggaattagcaatgtaaatacccgcattccacaacagccgaagggcaataatcaggctcagaacaagtttaaaccgaccagaaaatagagagttttaaacgacacagtgcacacagcgagcatatgataataacgggcaatgcaacgagtgccatggccgtgcacaaaactaccacttgaacgaggatcattccttcttggcgggagccttggtcaccttggcaccggttgggtccttcttctgcacgttcttgatgacgccaacagccaccg

SEQ ID NO: 33463 - DNA, 291 bp, Oryza sativa
  Clone ID: uC-osflM202040c10a1
atattaaatttttaattttttaaaattataaataaataactgtttttattttttttttttcttgggagggggaaacaacaaaaaaaaaaaaaaaaaaaaaaaaaggggggggaaaaaaaaaaaaaaaaaaaaaaaagaaaaaaaaaaaaccaaaaagttaaaaccaaaaacacgaggggggggaccaaacaacataaaaaaaaaaacgagggggaaaaaacaaggggcgctgacccccgcgccgggcaaaaggaaaaaaaaaaaacccgatgaaagaggcccccccttttg

SEQ ID NO: 33464 - DNA, 518 bp, Oryza sativa
  unsure (1)..(518): unsure at all n locations
  Clone ID: uC-osflM202040c11a1
atttgtttttaatgcacaacaccatatttcattgatcaggttcagaacctgcacagaaatacacactaccggtacagatctcaccttctctccaatactcgtacatccatccacgcggtccacacgaatacgtacatctatacggtacacgtacgtacatctactgcaccgcgtacacacacgcacactctcctgcagagacgcgcatcgacgtcaacctagctagcttagctgaaggcgatgcgtcgccatggcagcacgggggcggcggcgctcacttgccggggacgaagttggtggcgtaggcccaggcgttgttgttgacggggtcggcgaggtggtcggcgaggttcttgggggggcccttgccggtgacgatggcctggacgaagaagccgaacatggagaacatggcgaggcggccgttcttgatctccttcaccttgagctccgcgaaggtctncgggtcgtcggcgaggccgagcggttcgaagttgccgccggggagagcgggtcga

SEQ ID NO: 33465 - DNA, 423 bp, Oryza sativa
  Clone ID: uC-osflM202040c12a1
gaagaataaatcggctataagaattcatgtcatcatacaagattgagggtggcactcaaacggtagaggcctgaagatttcagatctacaatggtgcaacacaagaaaaacttgaacaaagatactaacagaaatcaactttctgtttgacaaaatggtagcctctcctgtatgtaaagatgaacaacgagctataaaaaatgatggtcaaccaaattccttttcgacgcagactcttttcagcaccagcagagtgtagagagctatgaggttcaggtgtggaatatggaaaattattatgcaaccgtgggcatgtccttgagccaggcatcaagcggcttgccgatggagtagacgatgaacccaatctccctgagcttttcggcatcgaccacattgcgcccatcaaagacgaatgcaggc

SEQ ID NO: 33466 - DNA, 441 bp, Oryza sativa
  Clone ID: uC-osflM202040d01a1
tttttgtaaatttacagaaggcagcagagatgaatttattgacgcttgtacactcagaacgacgaaacacgggctgatagcaatagctacaacaaacgaaaatgccaagaaaacgtgcatcaggaggcaggaggatcaaacatacattatccatgttctcaaaacgatactaccagatcaccagataccaaatcaccgtacaagacatgtacacaagaacgaacagcgatcggagctggatggtgtagagaagcgctgtagcgggggcgcctacagaaagttcagcaccagggcccagacagggtagatgaagagcaagaggatgccaatgctgatggacactccgttgccctttctgaaggcgttcctgaatccacctgacgccctgatgtgattttgaagcaggtagcatccaatgatgaggcatatgaagatgcctac

SEQ ID NO: 33467 - DNA, 426 bp, Oryza sativa
  Clone ID: uC-osflM202040d02a1
tttttgttttttttttttttctgcagctcatctttcatcattttccacaaattgagaggttctccacaaaaaaaaaggcactacaccaattctgtcaggggtcatgcaaaggcccgctaagatttattactcaacagcgttctcacaattgagcattcaagtttcttccttgttccccaattctcagggaggatgttaaccgttgcttcttgtgtaagagaagattaagaaaaaaaaaatgtccgcatcctttttttccacgatggcaaaaaccatgtgttataatcttcaactaccaggtttcctcacaaacagcttctggacctgctccagtgtcaagaacattatcacattccatgatcccagtttagaaaagtttgggaggaagcctttgtaaaatgccagaggtccatcatttttcagcgt

SEQ ID NO: 33468 - DNA, 495 bp, Oryza sativa
  Clone ID: uC-osflM202040d03a1
gcaaaacgtcatatatttttttaccaaagggagttatatacaaagttccatttcgattggcataacaccacatgattcgatcagatggatctgagctccaaggctgcaaaacaccatattacagaacatgcatttcagatcctgaaaatagctgcacttcaggatcaactaccgttttcgatgtttattgacatgaaaattccagtggttctcactcccagcaacgaacagaaatgaaaatgaaagtggatgaagctaccaaataccagtagcccaatacgccagtctctcccggtgtgttacaaaactggaccttattctctacaacgctcagttgaaatggtagagcggcagctcggcgttgagcgggtgcgacatcaccgtcagcacgttggtcaccgacagcatcgagctaatcgccgcctttagaacctcccgcgagcatccaggctttaccatcgtcctcaccttgctgagacagtctttcagtatctc

SEQ ID NO: 33469 - DNA, 436 bp, Oryza sativa
  Clone ID: uC-osflM202040d04a1
agaataaccaaaacataggaggctccatttcttcttctcaaagtagtggagcatctttccttctttcaccattacataagcttaagcaataacagataacagatcctcctcctcctctaggtaaaatattcaaacacaatacccttataagtacttattattaggaaagtagcgtgcatgggcataaatggcagcggggggcaggttaagaatcacaatgctgagcagcgaggaaacaaaacaccataatgggacagagcaaaagcctccgaaagggagcttttaggcagaaggcttctcccacttgaggggcttcaccacctcccaggtgaagtctgggtcgtcccttccgaagtgaccgtaagccgccgtcttgaggtagcgtccgatgccgcctttcttgaggtcaaggttgatgatgatcatgccaggcctg

SEQ ID NO: 33470 - DNA, 411 bp, Oryza sativa
  Clone ID: uC-osflM202040d05a1
cacaaaactttggcttgtctctgtttggacgagcgatactttttattctctatcggtaactttttttttcccaatccctgtattacaatacaacaaccaaaacacacaccaaccttccaagcattattagccacagccttgataccatagcaacgaagcatagtgactcaatacagacggtaccgtaagagatacttcctccgttttacaggtcattctagcatttctaacgttaatgagaaatgctagaataacttacattgtgaaacggagggagtactacttatcttttcctaggcactaaacctttctctgtcgtgtggagcgtggaaatcgaggccagggcctgcagggctgatcccgtagggattaatggacggatggcttccatagtagggctttcttatgggc

SEQ ID NO: 33471 - DNA, 539 bp, Oryza sativa
  Clone ID: uC-osflM202040d06a1
aaagcacaagcgcttcacagcatggcaattattattgttctcttaaaaagaataacgttagcttctcacaaaaaccacgagatataattgttggatgcaagcagccaacaaaaaaaaaaaaaactaagtggtaagtttcatacccaaaattttagccccaaaaatctaagaaaatattcctttcagtctaacaaaattgaacaaaaaatcggtttgtcaagtattgttgctaacacttcgataccctctatctgttctgactctcccaaaactctctgcaaatcttctgaattctacacagaattgccaacaccttattgaactgaaaacatatgcatttgacctttcagaatgtcggatggaggaatgtcgtatgtgctaaacaccaaaacctgaaacactgaagacacaaggctctgctttcgaaaagctcagacaattgaaattctatcatgtttcagttggagatccataaaaattttcttttgggtaataaatggaaagtcaatattatgctttggctaaacttgcaatactta

SEQ ID NO: 33472 - DNA, 472 bp, Oryza sativa
  Clone ID: uC-osflM202040d07a1
agaaacggagggagcagtaaataccccatttactcctgatatgatatgatggagtatattacaattacatacatgcaacccaaaaccaaaaccaaaaccagcacaacattcactaatcttgtgcatgtttgcaacgaatccaatgttaacgcacgcaccggctgtcatatcatataactataactgtatatataaacaaataaattcaatgttcatgaaccccggttgtcatctactccaaaccaaattaaaatgcagcttaattccctgctcgtctaacaaaaagccatcacttcatttcctacggagtagtgcccacacgccaggaacccccctctgccaacttcactagttctagtaactccgattggttgatgatgcagactcaacccttgctactttgccggctcaacaggatcccacgttacttgctttaacctttagggcacaggacaagcttgacatgatctgc

SEQ ID NO: 33473 - DNA, 427 bp, Oryza sativa
  Clone ID: uC-osflM202040d08a1
gtgacacaagagatttgtgtagattgcaaatcaataggcaaacttagctcctttataaaattcccaacaaacataaggttaggggtccaccaaaaagcaaaatctgccgacgttgaccctaaacacaaccggggggtaattacttgtgccataaacttaacttaatctccctctaggctctagtagtttcagtttcaatagtactgtagttttttcaccagctgaatttgacccacaggagcaacgaaccagagcgcaagaacacaacgcatttctgcgttttttttttggctggaaatggatatattccccaagcgggacaacaacttttgagggccagtgtgcgtgtgttcccctcccctccctgcttaattacatcatctctaacgtaaatgaatggtgatctttaacgggaggaaaatgacgc

SEQ ID NO: 33474 - DNA, 457 bp, Oryza sativa
  Clone ID: uC-osflM202040d09a1
gcccaaaaagagaatgtccaagagttttatctttgccgaaagacgaatacaaatctttttaccactgccgcctcatgtcagctgacaaaataacatatcgtcattatcaatgtaccatttctctgatggtgcaaaaggagagaaaaaagatgcgggcagaggtaaacaaaacaagatcaaaatacaaacaacacatcgccttgctttgttccagtttccacaccatataatcatagtgtggcccaacttatttgtgtgcctgtaattcaaagcaaacctagcaagcatctagatccctgcacggaggaggtttcggctcaccgtgcaaggtggtattccctccagcagggccacagtttttccgctctgggtgttgtgtgccgcgaggaggggtttctcctcttttcagcatctcgacgatctcaacaactcgtttaggagtgagggcctcataata

SEQ ID NO: 33475 - DNA, 445 bp, Oryza sativa
  Clone ID: uC-osflM202040d10a1
ttttgttttttttttttttttttttttggcaacagctagagttgacaatcatcacttcatacgggaggagttccatatacacatcacaagcaacagaaatcgctcatagccaagatgcaatcctggggctggagagagcaccttgctcctcaggtgtaaaaaaaaaagggaatttgggaggggtttgctcttcctgccacacctctcaagtctccattttcaggctttttcgcttgtaaaatttctcagcatttcaccagggacacaatttccaaagtgtctaatggagcctaagattgttccatggaggacactggcagatcactagcagcagcgtcaggcctccgggactccatcttcggggagatctccgccatgaccagcctcgacaggagcagccccgcgacgaaagcggacgccatgagcattgtgaacacgcccgttc

SEQ ID NO: 33476 - DNA, 409 bp, Oryza sativa
  Clone ID: uC-osflM202040d11a1
ccaccacccatccaaccacaacaataagatcacgtaaattaacaagacctgttgttgtacataagcatatcggaaaaggaagttttagtaaacatatagccggcaacatttaaacgtttcgttaaaagggcaagacaggagatattggaagccctaatctgcatgagaatggttgtaacatattggaagatgatgctaacgagatgctgcaccctcaaaacctccacggttggatggccctaccataaaccaatactcagtgcccaaaaccagcaaataagagtcctagcaattttctaagcagaatatgttttgcccaaaaaactatgccatactgaattttcgccttcaaatttatgtgtccagggaatcaaccatatcagggtccactgcaacatttttagacaca

SEQ ID NO: 33477 - DNA, 555 bp, Oryza sativa
  Clone ID: uC-osflM202040d12a1
aacactagatcacagttctcttttcttctctttcagaattcacagctttgctggaataaaaacatctgtgccaatatgcacccgttgcaaaattcaaatgcttgctacatcaggccaagcccatttattttttttttcaacaaatacaaaatcagcgactgcatttctgcctatgttgcttgacagatggaacatgggctaagcaagtacaacaaagaacaatttctgtagcctcacaatgctagctagtgtatgtaataatcctggggttgacgagaccacagaaaaatcaccttcttgcaaaatgaagcttctcgccatttcaagactgtagactacttcagtggagaacaaattgcttgagatctccatgtgaacatccttttttttttatctcccaactttctataacagcaaatggaacatccaaagagaggcttccacaggaggtcaattgctgctatgaacatgagaaaaaaagcactaactaagcattttgaatgcttatacttcagtgaacactgcgagctagtaccatgatttaaacatgctcat

SEQ ID NO: 33478 - DNA, 552 bp, Oryza sativa
  Clone ID: uC-osflM202040e02a1
tttttgttttttttttttttttcttttttttttttttttttttttttttttttttttttttttttttttttaaacaaacaaaaaacacccttggggactttcattccggtataaccggaaggaaacccccccgaatcccaaccaaattgccaagggggaaaaccctggaagacccaaaagcattggccccccccaaaggttaccaacccccccgggttggccccaaaaaggggtcataagggcaaacccctttaaaaagactttattaaacccaacttttgaaaaaaaaaacggggccccccctatataactaaataggaccggggttatcaccccccggaatcccaacaaaattgccacccaggggggaaaccccaagaaacctattagcccgttccccccaagggagcacccccccctggtccccccccaaaaggggttataaggttaaaaaaaatttaaaggggcgtgatttaaacaaaattttaaaaaaaaaaaaagggccccccccaataactattattgggccgcccccccccccccccccccccc

SEQ ID NO: 33479 - DNA, 408 bp, Oryza sativa
  Clone ID: uC-osflM202040e03a1
ctcggaaacaatatgtaatttaccaacttcttgaaaaacaacaataaatcgtaaacaatggatagaagccatgagtgacactagtcggctgggcgaatacggagtactccgattgataggaggctgtgactcgctagttcttttccttctccttgttcttggaagggacgcggccgtcggtcccggcgagtatgctgtacttctccttgcgcgttatggcggtgcactcgaagccgagctggccgctgagcgtcttctggatgtagttggccacctcgatgggcgacttgccgccgctgcaagtgagctccttgggcagctggttcaggaaggtgatctcgtacgtcggccgcgggttaatgaagaagaagtaggggtccatgagcttgaagcccccgacggtggagc

SEQ ID NO: 33480 - DNA, 544 bp, Oryza sativa
  Clone ID: uC-osflM202040e04a1
acagtcagagctggacatcatgtatgtactatttaatcaagcattgcattttttagttcagatccaaccaagatgattattaacgcatatgtaaaccggaatacagatctgatcgctccataggagcggaatacaggaggtaagaaaaggaaacagaaacaattacaagttcgaacacccaccaggattcagctagatggtactacttattaccgcacgagaatcaactgagaagcggctcgcgtcaccccctggctcctaatatacgttgccattaaatataatggtgatgctgccgccactagtatgtacaagagtgccatgaagggcttcttttttgttgttgtttctgaatctaagctagaatcacccgcgtccatggaaggggccgcacggatgcaaactattgtctcaataactctcctcgaaataatcgcagcctcaaattatgtgataaggcttgtttggatgcgcttgaggcttggacaaaccacacgcagtctgctaagtccagcacatttatctttggacaagagtgcacatt

SEQ ID NO: 33481 - DNA, 208 bp, Oryza sativa
  Clone ID: uC-osflM202040e06a1
tttttggggttttttttttttttttttttttttttttttttttatttttttatattttttttattatttttttaataaaattgattcaagggaaagaaaaagactgaaaaaaaaaaggagataggacaaagcaaaaggagaccaaggggaggataaaaaacaaaagggggcaactaaatcggaaaagaaccaaaagaggggggggggg

SEQ ID NO: 33482 - DNA, 445 bp, Oryza sativa
  Clone ID: uC-osflM202040e07a1
tttgggtttttttttttttttttttttttttttttttttttttttttaaatttttttttttttttttttttttttttgtttttttttttttaacgacaaaccacgaaccggggaattaaaggggccccaaagaggggtcacaaaaacaacacagggcacaggagggaaaggtacaaggaaacccgggaaaaacgaaaaggaaagggttttcaaaacccgacccacaaacgggtagaaagaagcccacccgggcagaacaaagggaaggcgcaggaaaaaagcatgggcaagggaccagggaagaaccccgaacccctttaggacttgggaccctaaaaaaccttgggaccaatggggaacctggaggcgaccccccgggagcccctttccaggggggggggggccccggggggcccggggaaaatccccctattccaaggccttg

SEQ ID NO: 33483 - DNA, 520 bp, Oryza sativa
  Clone ID: uC-osflM202040e08a1
cgaagctcttactttacttctgcactaaatgtggtataaatattacattccacccagagatcaccattggcctttgcatgcccagacatcatttcttctgcttctatttttaactatattagtaatggccactcaagttcctccaagatttgccattcactggtaaaaaaaaatcaataagtttttgcagcaagactaaggtccataccatgatccttttgcccactaggctgtaatatcataagcttaaaagggccaagaatctagggagttcatatacttgaacagggcagtgaatgtcgtccagaaaacagcattagaaggccatttcctgaagaatcttcagtgttgtttgatgtacccattctagatgttgtgctgtaatgccagatgtgttgtttgcatatataccacctagaaccttagaaaccgtctcaaggaacattcctggacggactggccgtggcttgaggcctgtcacacttccctttccagatatcccaattagatgataagctta

SEQ ID NO: 33484 - DNA, 334 bp, Oryza sativa
  Clone ID: uC-osflM202040e09a1
ttttgttttttacacactgcaactgaactcacatatataggcacttgagctcatattgaaccttaatccatgccccaggttttcctagcagctaacctaaacaccccaaaatcaatcattagaccgtaatagggcctaaccatgaggattggacggggaggacgccgctgcggcacccccagccgccgagagccttaacgatacgcactcgccatgactaactcccaaggcaggtttatgggaaagcctagcactcaagctgggactcgcacccaccgttataggccacggactggacatgcgcaacaccaaagctggaggacgccaaggccga

SEQ ID NO: 33485 - DNA, 491 bp, Oryza sativa
  Clone ID: uC-osflM202040e10a1
ttttgttttaatcaattaatttcactttgtatgtacagcaagaataacattagcagagtgtgtacagggtgcccatctaaatattgttttgttcctcattagtcagcaatgaattattcaacacaatcaccatttgtcttccaatgtaatactactcaacaccatttaggaaaacatatcatacgaactgctgctgcagctgaaactcagcatattgtttgagctttatttaccaacaaattaaaagaaaacaggagagagcattggcagtctgaaaaacttattactgagcctttctctcgatctgaacatccccggcaccgccatattccatcagtctaggccctgaagctgccaccgccatgctttggccccttggattcttcagaaaagagctcgaggcatgcccagaaacgcgcatgccgtgaactctgtgccttgtaagaggatgtgctagccaccaaccttgaggatttacgatccgatctacc

SEQ ID NO: 33486 - DNA, 377 bp, Oryza sativa
  Clone ID: uC-osflM202040e11a1
ttttggtttttattatttttcatttttattttttttttatcaatattattaatccaagtacatatactaaacactttgttataaaggaaagaacccaacaattcatccccatattcataaacacaaccaacagggggggtatgatggttcttcaggggatatgataaaaaagaccctaaggagccaacaggtcaaacaattgaaaccaaacagaaaaatagagctattggaaaccaacagaagaaggcgcaaagccactagttccttctgcagcccgaaaagctaaggccgataaaaaaaatggggcgcctcaacgtccgcaccaggaaataagagaagtgtaggatccaaaaagatgaagacccctggggcccccc

SEQ ID NO: 33487 - DNA, 240 bp, Oryza sativa
  Clone ID: uC-osflM202040e12a1
ttttgttttttattttttttcagtttttttttttttttttttagaaataacagttttgttggttttaaaacatctgtgtcaatatgcccccggggcaaaagaccaaaccttgcaacagaaagccaagcccagggcccgttttttttctcacccacgggaccattaacagaagggcgggctgtgttggttggccaattgtacatggactaagcaagcacaacaactaacaatttctgtagg

SEQ ID NO: 33488 - DNA, 362 bp, Oryza sativa
  Clone ID: uC-osflM202040f01a1
gctaataaacattaatcctttttaatacatatgctttcgacaataacttgactgtcctgcaagtggcgagaaaaaagagaaatgttgaaatataaactacaagaggggaggttcactgaacgcactttctggtttcgagaatgacaacaattggtactatagactggttaggtggaaaacaaaccatattgaattaccaatatgcctgctttaccaacatgcatatacgcggtgcgggatgggaagaacatgcaaccatatcgagaaaggaggtgatatcaaatccaagctcacggatgatgaccatggatctgtatcttaaagtccagccccaaaaccttgggtagttggcaaagcacaaa

SEQ ID NO: 33489 - DNA, 397 bp, Oryza sativa
  Clone ID: uC-osflM202040f02a1
actaggaaacaatggtatgtaggattctttatacttttgccaataactaaactgcccagttggtggcttcagaaaaaaagaaggggcaaatttactttgcaggagggttgctcaatgaaaagcaactcctgtttacatgaattacaacaaattgagctatagacttgcttgtcagaaaacaagcaaaaataaattacagaaaaaaatggtaagagaacaagcggctgtgatgtgagtgagggggagaccatgttacatgttgaatgaagttggtcaaattaattacaagctaacaaatcttgacatcatatatgcatcttcaagttcacccgccaaaccctcgttagcttccatggaattcttcatgttagtgtttgatatgtactggtccaatgca

SEQ ID NO: 33490 - DNA, 328 bp, Oryza sativa
  Clone ID: uC-osflM202040f03a1
ggaaataatgttttttgttttttttcttgtcatagtgtgaatagcttgtcttggtgggtagaaagaacgactgaacaatagggatatgggagggtcttaaaccgggtcacatagataggaggggaatggctggctacccgaatcacacaagatgggcggttgaatggttatgtaaactgaaggaggaaatgaactacagcaaaaaatgggaagcgaacaaaatccgggggggagaaagctgaggagaccaaccatggaacacaagggaggtgggggaactccatacccgatgacggtgcacaacgaggtatttgtggggggaagttca

SEQ ID NO: 33491 - DNA, 402 bp, Oryza sativa
  Clone ID: uC-osflM202040f04a1
aacactagatcacagttctcttttcttctctttcagaattcacagctttgctggaataaaaacatctgtgccaatatgcacccgttgcaaaattcaaatgcttgctacatcaggccaagcccatttattttttttttcaacaaatacaaaatcagggactgcatttctgcctatgttgcttgccagatggaacatgggctaagcaagtacaacaaagaacaatttctgtagcctcacaatgctagctagtgtatgtaataatcctggggttgacgagaccacagaaaaatcaccttcttgcaaaatgaagcttctggccatttcaagactgtagactacttgaatggagaacaaattgcttgagatctccatgtgaacatccttttttttttatctcccaac

SEQ ID NO: 33492 - DNA, 364 bp, Oryza sativa
  Clone ID: uC-osflM202040f05a1
atattattgtttttttttttttttttttatattttatagtttttttgaaattaaaacattttttgtagaattctctcttttgggagaacaaaaaaaagatacgcccgggggggacaaacgaggggccaataagcaaaaacaaaaaaagtgaaggggtgtccccctaaaaagcttgagggggggaacttgggccaagaacggaaaaaaaaggagaagggggggagggtaaagtgcaacgaggcctaaaaaacccggaatggggatgaaaagaccacatcaaggggaggtaaaaaatagctgggaaaaatacaaaaattagggggggggaccaccccagggcggaagaaaacggaaacgaagtcca

SEQ ID NO: 33493 - DNA, 452 bp, Oryza sativa
  Clone ID: uC-osflM202040f06a1
gcattgggcagccgagtttatttccagactttcagaaggaaaaaagaggaacagaaacgtatataaattaaaaagaatcaaaagaatatcgcgaggaaagaatatagagcatacgtttctcttcttgagatccgacccagcctaaactaaaaacagccacaggccatcactttcacaagaaacaattgaatatctatagttaactaatttaatcacaatcatgaaagtgatcgcatgcatcacaacttcacaagccaaacccccaagtacatgcacttgattccgtttcgtctccctgctagtcctcttgatcatggcacagttcctttctgagcctttgcgagaagagcttgcaggcgtccatgcagaggtcgacggcggtggcgagcgcgacgaacagcgccacgtcgcccatgcacgtggcgtgctgtacgccgacctgcacggtgggc

SEQ ID NO: 33494 - DNA, 466 bp, Oryza sativa
  Clone ID: uC-osflM202040f07a1
acaaacagaatgctagtccaagtccagtatattatatataatgtacactacactgctcaaacctgataaaatgtctaaattaacagcaacaaaaacaccagctcccttctgataaaaggaataacaaattctgtatggacagatctatgctgaatttgcactgctgaagtccatgagcaaccacacctaggtgcattattacccacattttctatgttacaggaaggggctaggttaagcaacacaagggcttcacacctttactgtacaaaacattcataacaataagagcctttggcgctgagactatccccagcactcaatgagacaaactgttgcgacaaaattctctaacctggccactaaattcccccaacagacttgtctgctcatgatgcagttgagccagcagaaagaggaccatctctcagctgctgaagacagagctgaagttgcttttggatca

SEQ ID NO: 33495 - DNA, 75 bp, Oryza sativa
  Clone ID: uC-osflM202040f08a1
tttttggtttgaaacaatttctttttttatgttctatatatgagataaaagctacactgcactggtggcacctca

SEQ ID NO: 33496 - DNA, 474 bp, Oryza sativa
  Clone ID: uC-osflM202040f09a1
tggagaataggaaaaaacccgactggttttgtgtcggtcaagatcgtaagcgcttgccaagaggggtggtatagcgactgtacaatatcaatatggcagggtcttaatctctctcacatgttatgatggaatcgctctcacatgaagtagctcagtgctttcttcttcctcgaaccgccctcgccatataggtcgttccattgaagaagttcattcatgtttgctgaatcagatgaaacgcttgcacaaacctgctcatgggcagatttgaaatcatctaaggtcagaggacgaatgtactcactaccatacaatgcaggctcaggcctgccttctgcttttgccacatttttctccttcttttccttgtcaaggatttctcgaatggggtaatgagctgcggtcacgcatagattcttcaggtcacttcctgaatatccatcggtcatagtggcaagagaattcatatcaata

SEQ ID NO: 33497 - DNA, 378 bp, Oryza sativa
  Clone ID: uC-osflM202040f10a1
aaaagatggaacactataactatattgtcactataatgacacagagaagtacagagtgcaaagtcaaataatctacggaaagaggggagaagggtcacacgagcaagctaatagagctagatagcacgcactacagggagaccaaatgaatgatctaacacagaccgtcacaaccctctatctagctagatacgacctcgtccgtacaatttgcaatttaatatcaacacaatcccaactcacagcatgcgtgccacgagctatacatcatgcttaggtcgaccgatcagctggtcaccctacaatttggcctgatggcgccggagatgtcgtggagcacgccgatggagacctatttgaccatggatgcgtcgaaga

SEQ ID NO: 33498 - DNA, 366 bp, Oryza sativa
  Clone ID: uC-osflM202040f11a1
gctccatgcttattttattgtcaccaagattttgatcccaataacatctactcaacacttggctcgacaagaaagagcacaccattgtctccccaaaaacatatactgtccgaacagcgcccgctggagagttattaagtcactgtgctatcagagaccttaaggtgccaccatttcagatgattgcccccaagccggaccatgtccagactggaaaacactgaagacggggcaacgcccttgttactctgcttattgcaacgaccaaggcagatcatggggaagctcaccttacaagtctggatcatgaatcacgacaggtggtgctccacgatggacaggagcctttgtgccttggctagccct

SEQ ID NO: 33499 - DNA, 501 bp, Oryza sativa
  Clone ID: uC-osflM202040f12a1
aaagtccaggagttttgccttgctgtatcaaggacaaaagcgtcaggcccgcttctaagaagcgctatgtgcaaggtaaaaaagaaaaagaccaaacccggtaacggtttcccccctccgttgcaagtgtagatacttactaacggtacagtaaaaagaaggccgagcagataaaacaaaagacatatatcgtaacttctctttcatatatgtctatctctatatataagcagtgccatcagcacctcctgtacctacaacacctagtgcatcagctggcgaggtgcacggggacgcacgggagtctttgaggggctcacccttattggcaaggaacccagtatgacaccactgcagttgagagcagcagtggcactttcagccatcacaaactccacaaaggcaatgcgagtagaatgatggtagtcaccaagcaacctcagccgatatacctgtccacatatcgactcgaagaacaattttacatctgcctgagagacc

SEQ ID NO: 33500 - DNA, 428 bp, Oryza sativa
  Clone ID: uC-osflM202040g01a1
gaaaaaaatgatgaaaactttagaatacagatggagcccagtataacatggaaattttacaagtagagagaatcaggggatataatgatatataaacaacaagaggagaggatcactgagctagctataaagcattgaaattgttgtcacttgtcagtagtcacagataatttgccacctttaccattttgcataaacaatctgccacctctaccatcttgcataaacacgggcctgaattgaattgatctgcaaccatattgcgaaatgaagtgctaacagaacaaagatcatggatgattagcattgccctttatcttaatctcaagttctagctccttgggtcttaggtcaagctcaaaccgcttattctgaagcatcatttgttcattctacaacgccaacttttccaattccaaggccttggt

SEQ ID NO: 33501 - DNA, 377 bp, Oryza sativa
  Clone ID: uC-osflM202040g02a1
gctattataagagacgaggcgggattacatatgatacggcccacaggttacaacaccgagggttggaagcacattaacccccaaacattatctccccaccagcaggtgtgttgaagacacacgcacacgggatcaggataactccacactggcggagcatggaacagcatggggtatcattcacgccttgacacacacaacattaagccctcagacaacaagaactcctctagcactcgaggccatgatcagccatcctcattctagggggactgagcgccaacctcctagctgaccttttacaacgcgggaagatcctgatggacctcagagaactcaccctggttcatgcccttagccacgttccagtggacgaa

SEQ ID NO: 33502 - DNA, 461 bp, Oryza sativa
  unsure (1)..(461): unsure at all n locations
  Clone ID: uC-osflM202040g03a1
cagtactctgatattggaactgtattgctgagaaatagaaaatagcatcatataatgagaattgagaagttgagaacatgcagcaacagactactgttcaactgttcaagtatctagttacacatgaatcatttcccagtaacctcatagacatccacctgttcccaaatcgagactatgtggctctattcaaaagactactatgcctgtactgacttaaaatcggcgctaaattctttccctttttaagttttggaagagaagtgtattcacgtagaaccagtttctttgcctacttacaatgaacaatcacaacgaaccatgccggatgcagtcacgaagaaatggcaggtgaaactgctcccgagtggctggcgacaatctcactgcatttactgataccttngaacgcctgcacgcatactccggaaaaccccatcagagcatggaacacatttgga

SEQ ID NO: 33503 - DNA, 317 bp, Oryza sativa
  Clone ID: uC-osflM202040g04a1
aaactactaaaaaaaggtatccattaagcctactcaagcagcataggtttgcattaacatgaacctgaggaccaatcaaagctagctccgaccgccctcgacctgcttcggcaactagagtcaaatcaatccatcaacataacccaaagagaaaatcacctactatacatgctacacttcagggcccaccccaaaagactacttacacttgattgaaggaacaggaatggaaacatacgcagctatttcaggtatgcaaaataaattgcctgaggaagctcccgtagtgtacacgattgacccggacgaacctcctg

SEQ ID NO: 33504 - DNA, 478 bp, Oryza sativa
  Clone ID: uC-osflM202040g05a1
agtaaaaaggtaaactcttcataataatattattaagacattatagctgatgtcttttgatcacactgcgatcaaattatgcatcataggcagtacaactccgcgtcaggaaaaagtagaggagatatatttcttgttattacttaatacagcattcacatatatcgaaccatccggtacgtacgtagtagtactccacgcgttcacatcgatgatcggggacgatatcctcaggtagtacttatgcaaaagcgttggcgtaaactgacgaactgaacggacggacggtcggatttagggctcccataagtccaagttgccggagacgaagtcgtagtggccgccgacgagcttgagggtgccgttggcgatcccctccttgacgaacgggtaggtcttgaggttcttcagggattggttcacggcctccttcttcaagatggcgcattggtcattcgaaggcagcgaggcgtgctcg

SEQ ID NO: 33505 - DNA, 467 bp, Oryza sativa
  unsure (1)..(467): unsure at all n locations
  Clone ID: uC-osflM202040g06a1
agagaaaggatatctcgattctccataggggggcatgagcatgatcatacgactacatttgttgtcatagaaatattccactaaatttgctgtcatctacatttataccacaacccggcagcaaggggctgatattcttactagcttcttcctagcagtagcaaaatttccatgcacacgtataataaccgtgtgcaggagcaaaaagaaaagcttgtactgcggcatcaccagcagtatagctgcagcctgcaaaaattagaaatcaagcattcgcccacccagatagcttataaagatctatatactatgtaagtctgtaacaaccaacattttggtgcttaacacaacactagtcactcaaacaacaacctttgctgtctaaggactgggaagaaagtcacagctgcctatttacatggngtcctttattcattattgcagngaaaaaccgcacatgataaaac

SEQ ID NO: 33506 - DNA, 135 bp, Oryza sativa
  Clone ID: uC-osflM202040g07a1
tttgtgtttttttttttttttcttgaaaatgaccaatgttggataactgaagctgtttaatctgctcaaaaaaaaaaaaaggcgttttaactcagtattaacctcaggcgctgcgttttagctgaattaccctca

SEQ ID NO: 33507 - DNA, 317 bp, Oryza sativa
  Clone ID: uC-osflM202040g08a1
aattcattgttttctatccaggctatgctcgacacaaggtccacgcaaccattcaaaagtgccttatgaccccatccatcgaactaaaccctacaccttacgtgaagaaatcacatgggcggccatcaccacaggactttgatgacaccttgcccacccacctaggagcccgctgcgatgaacagagctaaacccacggagtcaacttaccgctgtcctaacccgtagtagcccatatgggcaactccttaaggtgttgaccaatcaagtacttgaaatgccaccctgcatggagaaaggagggggcctcaatttta

SEQ ID NO: 33508 - DNA, 330 bp, Oryza sativa
  Clone ID: uC-osflM202040g09a1
ggagcttaaaacatcacttgttttcgatgctgatgtggatcgatcgacttgactggctacaatccaaacgtgctgtttaaattatgaacgctcctaaaccatataacctgacatgcagacaccaacttcacaggcagtaaaccagctattcaatgttgaactgaccgccttcagcaaagccggccctggagaatactccttcaccatggaatccaccatcggaatggaatgtggattgctgcccaccttggccaaaaggaaagaaaccatacagctactactcctaccatattcatttcaatacgatcctgtcctagggctgattttaca

SEQ ID NO: 33509 - DNA, 255 bp, Oryza sativa
  Clone ID: uC-osflM202040g10a1
acattaaaattatattgttactataaggtgccattgaaggacaaagcggcaaggaaaagacacagtggaaacaggaaaggatggccccccgaacaacctaacagagatggatcgcacccacatgcaagttagcccaaaaaaatgatgaatcactaaaaggctgcagaaaaactatagctggggacaagttcttccgcacggcatacaaaatcaggggagcagaagccctactggcccaatactgcaaaaaggtag

SEQ ID NO: 33510 - DNA, 452 bp, Oryza sativa
  Clone ID: uC-osflM202040g11a1
gcgcaaattatgatctgagaaccaaaggctgctcatcacccacttggcatcttgggcatgtcacattacatacagaaatgcattgccttaatctttcctttacatggtttaattttctcctcttaatcatctacatgctaatgattaatcacccaaactatggtgcgccattaagtaacatcatcagctcagctgcagtccacacagagcgaaggcagcagcagcagtgccttttaatcatttatacattgcagctgcaggtgcagcagccatggaggatggaggcagcagagactctgatcatggcgtggagacgtcgtcgccgccaaagctgcagggagcggagctgcagcaggtggtgctggtgctgctgaccttggaggcgtaaaactcctggctgaggcagcgcatcccgttgagctccggcaagatctccttcccgaggtccggcc

SEQ ID NO: 33511 - DNA, 378 bp, Oryza sativa
  Clone ID: uC-osflM202040g12a1
gaatgaaaaaatcataccatatggtataaaccgggggaaaattttaagcacccttttttgctaaactacagaggctttatatttatacccatacatgctatttacaaaattagggacataacacatacccccgtaccacaggtaccaagaacactgtttctacctaaaaaaaaataacagaaactgggtttgctgattgtttttctacctaaaactaccacaccctttgtttatgtttggaaggtgaaagttccctgaagtaaaggccccctcctttgagaaagttttctaggtctcatttccctggagcaagggcacactcttttaaattggcgacccagggcctaaggggaccaatcttgggcccccaaacaccgg

SEQ ID NO: 33512 - DNA, 364 bp, Oryza sativa
  Clone ID: uC-osflM202040h01a1
gaagagaacagagaaacattttaattcatgttcttgctgagaagaaacatttgcacatacaagtagtgggatcgacgggcaccaaatctgaacctactacaattggacagatgcactggtgtctcaattacaggttgacaactaaatgcattcatcgggaacttgtttcgattgagggttgtacaaggtacaaattccaagctgcaaattgaatgaggaagatttacctaagggtgaccagggacggatgcgctgccacatctactttattgaaccacgcggaacatctgaaatggcaaaaagaaaggcacatatttcccattatgcgaatctgggttttatggcattgggggaagccaatatc

SEQ ID NO: 33513 - DNA, 370 bp, Oryza sativa
  Clone ID: uC-osflM202040h02a1
acttatgcagggaaaagggttttatgctctttcatacagagagacagtgtgtgcacatataattgggaaaaacaaagggaacatggatttacagcaccgcttctgagatgcagcggacttatagctacaagctgatgacacatgtgaactttgctgctgatgatgatatggatcatgttgttacagcttacgcccaccacggtttgacgccggtcctgaagtatgtcttcacccacggcacgaatagaaccttgccgtcgtctacgctggcgtgccccaatgccaatgacaggggagcaagtccacggacgaccctgccctggttgaagaactcggagccgtggcatgggcagaacaacttgtccttggt

SEQ ID NO: 33514 - DNA, 429 bp, Oryza sativa
  Clone ID: uC-osflM202040h03a1
gccggtcgttctggggctgttcggggaaagcgccggacaccgccgaggaggccggcatgagggagacgctgcgcacgtgcgagtggccgaccctcgccggcgagtacaagttctgcgccacgtagctggaggccctggcggagggcgccatggcggcgctcgggacacgcgacattgccgcgctggcgtaaacgctgacccgtggcggcgcgccggtgaaggcgtacgccgtccaagccgtgctccccgttgagggcgccggatacgtggcgagccacaaccaggcgtacccgaacaccgtgtaccgctgacacaccaccggcccggccagagcttacatggtggagatggaacgcgacaatggcagagatagctgctaggcggtgaccgtggacaccgtgagccacaccaaacacgtcgcggtggaac

SEQ ID NO: 33515 - DNA, 552 bp, Oryza sativa
  Clone ID: uC-osflM202040h04a1
tgtcaggatcagattgggaaggccttctcgacgctgtcgcggcgcgcgccgacggtcttgtagatgcgcatgaactcgcggaacgtgacggtgcgatactgcggctggccgccgtctccgacgagctccttcgccggtccgacgaggcagtccatcggcggcatcatgaacgtcgccaccgacgtcctcgccaccgccgagttcgtcatcgccctgtgctcgatgctcttcagcactccgttcgtcgcaatctcgaggaggtggccaaagttgacgacgaaggcggtggggacggggtcgacgttgatccagtcgccattgtaggagacctggaggccgaagacgtcgccctggaggagcagggtgatgaggttgcggtcgcagtgcggcggcaagcccagcgtcaggctcggatccgggcatggaggggagtggttgacgttgatgatgacatccccggcggtgaggccgcgctcgaagtagtcccgggctgagccccatcccttcgacagaagccgcaagaattcgatccccaatccccttgtgggcacc

SEQ ID NO: 33516 - DNA, 498 bp, Oryza sativa
  Clone ID: uC-osflM202040h05a1
acttcaaatcatagaccacaccatacagcaaacatagtataaacattgtcatagagagtacagctgatagcagcttgtaatattctagcattactttggtagcatccctctacaaaacatagcagacatcaccagctcttcatcttggccatacacattcaacctgacaagaaaaccatatcccattttacaacatatgtaatctgtacatgaaaatgtatctacaagaaatcaaaatagtaggtagtgtggagtgccttacatggtttgctagtgacagaccacactgaccagaacatttcgtctcctcagtaggcaccagctgccatgagcagctcatcaaggctccagatgccctcgttgcttgccccgtcttgtgtagcatcattttgcagaaggttgtccattgattcatctgagctgctctcaacataaggtaatggcaaatacttcatctcgggatcgaaggtgggcatgttttgtgcgagattaggcatg

SEQ ID NO: 33517 - DNA, 414 bp, Oryza sativa
  Clone ID: uC-osflM202040h06a1
tttttggtactttaaatttttttccattccattcattattcattgtttaatcattgttttatatagttcagttgttagcagtttgttttataaaagaaaaaacctgggagcatccgtctacaaaagggagcaaaaaaaaccagctttggaaaccgcccatacacattgaaggggacaagaaaacaaaataccaccccacttctacgaaataaaggacccgaaaatgtacccaaaagaaataggattttagagaaccgagggggggcctctgcagcgccccttggcaaaaaaaaaactggcgggaaaattttgggcccttagggggcaaaaacggccatgagcaaattacctcggctggagaagaccataatggtaggggccgcttgtgttgggtaaaaatttaaaaaggagaaa

SEQ ID NO: 33518 - DNA, 331 bp, Oryza sativa
  Clone ID: uC-osflM202040h07a1
tttgtgttttttttttttttacctttttttttttttttttgcaagacagccgctttttttcctcttttctttttctcaaacggcatcaaatttatatcccaactcaggggcgccaaggggcctaatcagctggtagggggcctgccatttttcgaaagatggggggcctaatcaattggccttgggatcggcggcggaggccgagacccggccgttattgccggaaagctccaaggacttgccctttctggggagcgtggagcattggaaccctagctccttggggaaacaccctttgtacgaggtttgccaccttcaccgggcttctccc

SEQ ID NO: 33519 - DNA, 401 bp, Oryza sativa
  Clone ID: uC-osflM202040h08a1
gtagaaatatatttatttgctattgtcattgagtaagcagtacacaagatgtacaaaacgggcggatggggtggacatggacacatgtacgtgcagatacatatatcacaaggaacttgttgaaaagtttccttctcttttttaaactagagtggtagctagctaatcaaccttttaacccgatctgataataatcggtgaagacttaactaactaagcccctgtccaagcactgcatatatcacacatgcatgtcgatcactacgtacaaaagctaatactgaatattcctatatgtatcgatcaacaaggccctgcagatcagatcagatcagagatcgtttcatgctcttccagggctcttaggatcatggcggttgttggcgccggagccagggtag

SEQ ID NO: 33520 - DNA, 362 bp, Oryza sativa
  Clone ID: uC-osflM202040h09a1
tttttgttttcagttaataatgttatttttttttgtggcacacgaggggccacggaaagaaataccaacagcccgtaagccccgatgtaaccaacaacaaatggacaccgttagatctacctgaccgaccacaaaagcacggagagcaaacgggatcaacaatgtaaactcgcatggggtcatcggagccggatttaaaaaataaaggttcaaccttccccaaatgattcaagggggctgtacctagaatgccattgcctcaacaggggaaggacatgactttgacgcctcatactgattcgggcagaaaggatgctcttgtcacaaccgtgaatcacgtatgtcaaagctcacagggcagg

SEQ ID NO: 33521 - DNA, 607 bp, Oryza sativa
  Clone ID: uC-osflM202040h10a1
tttttgttttttttttttttttttttaattcagtaggttttgctagcaacagttacaagaaacataggatgattcaacacaagcataaaatgtcatgcgatacgaccccgcaggatttgcaaaataacaggagcagcctcacaaattaacaaaaaaaaagcttaatctcccaaaaggctctcataatacacgagtttggcagaagctctagctccttcctcaaacaagcaagggagctggttcactagtggcccaatatttcaaaacaaaagaagatgttaagcaagttgggcaggagcttgttcagagacaagcttactggaaagactgacactttttggtgcaaatgctttcaggcagcgtaagggaattcactggctccaaaggttaagttacagattaatccactggaattttcagattgctcttcattgttttcagcgccccaaccgttaaacgcagctttatttctcttgctaaaaagaaggttttaaatcagctttttcttttttgtttaaacaagagctttttttttcggccccattagacttagcagaatggctttctttttgggcgttaaaaactttaccgtttattaagaaatttt

SEQ ID NO: 33522 - DNA, 141 bp, Oryza sativa
  Clone ID: uC-osflM202040h11a1
ttttggtttttttttttttttctttttattttttgggaaccaaatgcaaccctttatagaatcagaatatggggcatgacacgcttcaaacgggaacgcattccatccaccaggctttgaaaacaaacaggggggggccca

SEQ ID NO: 33523 - DNA, 404 bp, Oryza sativa
  Clone ID: uC-osflM202040h12a1
tttgggggttttttttttttttctttttttttttgcaagcaaaacttcatcctttaatggctcaaaaaaactggtatgaccatggggccaacagaacatgctctatgtcctaacccaaaaatacaaacaggatttcgccgaaagattcacttgggggaaacaaacaggatgcgaccacagccttaacaacgaaattacgaggataaactctataaacccccttatgaaacccccagaccacattaatcgttttttcccctatattcatcccggcctttagtttctataagggcggggaaagtccccccacctacaaaaaaatgggtaaaaggaaagttgtcctttaaccttttacgtgacccgaggggcttgttgtagccccgtggccaccctcacgccccttg

SEQ ID NO: 33524 - DNA, 255 bp, Oryza sativa
  Clone ID: uC-osflM202041a02b1
gggatgtgtgggctcgggttgaaattgaaatgaattgcggtcaagataaaaggaaacgaagagataagaggaacactatcgaggactcctcctcatggagccgcgcggctggatctaggattccagcctgctgattttagagacgagtgccactgattcagcttcaaagttagcatgagtactgtcagcggcgctcgacgtgccccaaggaggcaatcacaagatggacctggtgataaagacgttgtgaacctg

SEQ ID NO: 33525 - DNA, 450 bp, Oryza sativa
  Clone ID: uC-osflM202041a03b1
acccgtccgcttgttgattactgacaggttctactatgtttgacggtatggagatggatgattgcactccactaaatagaagtttggtggagttcccaggaagacctgtggaatctcatagaagaggatctgcactgcactatgatgcagagaccgacacactttcaagggcaggatccatgagttctgagatcagcacttttaaggatgcaaagacaaatgggtctgttgcatgcgatacagaattcactggtattggtgaatttgttgctgaactcaaagagatggcccaggttcattatcagaagcagttaggtgaccagaatgcaaatggaaagagcatcggattggacccgatcgagggtgtttctcagtcaccttctcgatggcctttggaattcgagaagaagcagcaagagatcatcgagctttggcaagcttgcagcattt

SEQ ID NO: 33526 - DNA, 455 bp, Oryza sativa
  Clone ID: uC-osflM202041a04b1
gtattatcggcgtggatttgaaccctgagaaacaggaccttggaaagaagttcggggtgacgcactacatcaatccacaggaactcggggacaaacctgtcagtcaagcgatcatcgagatgactgacggtggcacggactactgcttggagtgcatcgggctggcgtcggtgatgagcgatgcatttcggagctcccgagagggatggggcaagacgatcattcttggcgtcgaaatgcacggagcccctttgtacattccttcgttggagatcctcaacggcaaatgcgtaatgggatcactcttcggaggggtgaaacccaagcaggacattcccatcctggccgacaagtatctgaacaaggagctggagttggacaagttcataactcacgagggtcccctgaaggacatcaacacggcatttgaccttctgttgcaggggaagagtctc

SEQ ID NO: 33527 - DNA, 108 bp, Oryza sativa
  unsure (1)..(108): unsure at all n locations
  Clone ID: uC-osflM202041a06b1
ccttgccaatccgagcgctccggcggcggaggcggcggcgtccgaacctactcgctgccgtggctgggggctgggagggaacctncagatgcatctactcgccctcta

SEQ ID NO: 33528 - DNA, 406 bp, Oryza sativa
  unsure (1)..(406): unsure at all n locations
  Clone ID: uC-osflM202041a07b1
anctactacacggcgacccttcgcaagcgacgaagagagcagtcggactaccattcctgcctgtccaagaatgaatatgatgcacctatgagggaccctcaaccccaagtcttggcagcttcagaaggaggttgacctaggaaagaaccatcgggtgccggactttgtgttcctggtgcacgtggtggacgtggtgtcgtcgatgcacgtgccattcgcgttccgagcgtgcagctcgctgtcgttagcgacacacctcgtccttttaccgctctggcccatcgtcttcggcttaatgctcctccagtggtttctgatccaagaccttcactgtcagcttatattaggctccgaggattactccaacaaacctggagcgtgccctcgctccggttttcaaaatttc

SEQ ID NO: 33529 - DNA, 396 bp, Oryza sativa
  Clone ID: uC-osflM202041a08b1
tattcccaagacaaaatattatatgtggatgatgggtggacagcagtgcctcatgacaaccaggaagctgaacgcagggaggaggaagctcgcaaagctagggagatgactttcagaggcgatgatgagtcaagttccggagatcatgatgcccaagtgacaaaacctttcccagaggagcaagtgaagagcatggatagcatatttgaaggcaccacaaatttatcaaacggaataacattcctaggcccaggagtgaatgaatcaactgctgcttgggagcttggggctattccagctgatgcattttcccatccaaacactagcacttgtttagaaagcaatactgaaccaggtccggaaaattggatggaaccattcttgatcagatcaagc

SEQ ID NO: 33530 - DNA, 521 bp, Oryza sativa
  Clone ID: uC-osflM202041b02b1
cggtccggcgcgtgagcggcagcaggtggttcactgcgttcttcttctcgatttatctttcttggtttcttgatctgtagcttattagcggccatgtgcggcggagcaatcatctccgggttcatcccgccgtcggccgctgcggcggcggcggctgcggcggccaagaagcagcagggcaggagggtcacggccgacgtgctgtggccggggatgctgcggaaggggaaggcggcggcggcggaggaggactttgaggccgacttccgcgagttcgagcgtggcatgagcgacgacgaggcggaggggggcggctgcgaggaggaggaggaccaccacgacgcggtctgggtgggcccccctcccgcggatgttaagtttgtctgccttgcctgggccaaagattcgctcctcatccgcagatgggatgttacttacactcttccccatatatgagcgtccaactgctataattttaattcacctctgtagaatctttttattcgcttcctcctttatac

SEQ ID NO: 33531 - DNA, 505 bp, Oryza sativa
  Clone ID: uC-osflM202041b07b1
agataacataaggtcataacaagggtctgaggatcttagctagcacaagatctcaactcggcatttcattggagtttttcacgcctaatggatagcagcagtggtagccagggaaagaattccaaaaccagtgatggttgtgaaacaaaagaagttaataacactgcacagaattttgttcatttcacggaagaagaggaagatctcgttttcgaatgcacaggcttgttgggaacaggtatcctaatacacatattacatatctgtaatgtgcatcaagtgaaaatgaagacaaattgtatttttacattattagcttgtactatgattgtttcagaagtttggcaaattcatgaaacccatatgtctgtttcaaaaaaatacattatttgcagttccctaactttgctccttgtatggagttatgcaggtgggaacttatagctggaagaacccttgaagaacaagaaaagaggtagaaatgttctgggcagttaagcaccag

SEQ ID NO: 33532 - DNA, 404 bp, Oryza sativa
  Clone ID: uC-osflM202041b08b1
cgatactatggagtactcacccaggtacataacggggctactgcaggggctcatgaggcggatcccgcgaagaccacgagagcacaggcgcacaccaggagagaaaggattatggcgggcgacgatgcgcatggcgaagcacataaggaaggcgcttcgacagctaccgaggacagccgagcaaggagaggggaatggatggggaaagtctggatgcgaggtgcaacaagatggacatgagccaattgttacaaggagcgaagcattatatagaaggacgctgagttatgcgggacgctgaccagctgaatccagcaagatgcataaataatacaacgaaaaggtacacactgacacgtgaagtgcacccaggctagcaattgccctactacaacgatggaaaa

SEQ ID NO: 33533 - DNA, 450 bp, Oryza sativa
  Clone ID: uC-osflM202041b11b1
tttaaccctgaaagtttgttatttgaaagatccaaacccaaggaaagagaagatatattgacgagttcaattggtatggatccatcaaggttgttcactgataagtttagcattgctagccttatgcactgccctatatttgccggtattttaccagataagttattattatcaagataaagctggccaagttgtgaaaggttaccaattgtagatgggatttgtcctgacaattcattcatggataggttcaagataaacaattttttcaagttcccaattgtcatgggaatttgccctgactgcttgtttgtgttgatctcaagcagagagagatttataagcttccctatctcgtctggtattattcctgttatttgattgccgccaaatttcaacttttgtagatgtgttgaaaggttgccaattgattttggcaggctacccgtc

SEQ ID NO: 33534 - DNA, 348 bp, Oryza sativa
  unsure (1)..(348): unsure at all n locations
  Clone ID: uC-osflM202041c01b1
tggtgccctgacccctcactagggtttttggctgtgcttcctttgacgacgatcgcgcgaagatcggagtgggggagaacaccccaccgtctaatcatgcatgtgggttacctcgnngcatgcggttggggtcttgttttctcaattctatcttagtagatacagtacggtattgtattttattattttttgttatatatttttgatggtttttccttctctcttctctataattcataatttttgcttttattgtcctttttcttatcatttctctatttttattttctcttttttcttttttttttttttctattttcttatttttattttttttctatttttatt

SEQ ID NO: 33535 - DNA, 320 bp, Oryza sativa
  Clone ID: uC-osflM202041c02b1
ctctcctcttctcttcttcctcctctcctctcctctcctcgctctccatccatctcgtcttcttcttcctcctcctcagcttcgagatttcagcttctccaaacccccattcttcccgccacaagctctgctctgtgctttgctcgctcgcctttcccgccattggtgtgcttcgctttcttggcttcaaagatccgacgagctctgtgatagctggggagaagaagaggaggagaggaggatgctgggagcgagccctaaggccaagaaaggcgcgacggtgaagttcgggtcgatgaagaatcctcctcctcccccgg

SEQ ID NO: 33536 - DNA, 420 bp, Oryza sativa
  unsure (1)..(420): unsure at all n locations
  Clone ID: uC-osflM202041c04b1
aaggaaccggcccgaaattccgggttgaaccaagccttccgaaataggaaaaaaaggttacnnnnncnanaantggggcnattgaaaggacgagtctggccgctcgccgccgcgaaaattnttcgacctactactcctcctcctcctcgccgacccnggcggcagcggagatccgggagacggtgatccggagcgacccgcggagcatcatctcgctcgacgagatcgggttctcccactcggacggttctcgaactcaacgtttccggcatcgacttcgacccgccggcctnctacgagctcgacctctaccagctgggattcttcctctccacgctcgacgcctgggtgcacgtactacgacagctgcaggatctcgacgtcacctgcgcgctccaggccgacctcgcaagctcgcct

SEQ ID NO: 33537 - DNA, 402 bp, Oryza sativa
  unsure (1)..(402): unsure at all n locations
  Clone ID: uC-osflM202041c06b1
gaattccggggtggaccaaggggtcgggnctaagatggggaggggcccccttttttttttttggttaatttttatatggtaagaggtttgaaagttaancgaagatgatcaaccgaaaaagagcggcgaaggaagggagtcaacaaaaaaaagaaaggggactagaataaataaagggtagatgatagaaagattatttagctagaagacaggggagggaaaaagtgaagaaggtagagaaaaggaaataataaaaaaaaaaaggagtaaataggggaaaaaggaaaaataggagaattaaactaaaaaagaggagggcaaaattaaaaaaaattagaagaaaaaaaataggagtaggaataaagtaagaaaagaatttaggaaaaagaatagaagtaattt

SEQ ID NO: 33538 - DNA, 292 bp, Oryza sativa
  unsure (1)..(292): unsure at all n locations
  Clone ID: uC-osflM202041d02b1
cggtccggtccatgntccagtctcccaccgtccagtcccagacagagtcctacaggcgcacgattcctcacctcctcatcggccggcgccgccgcggggccaagccgtcgtcgcctcctcgctgcggggccaagccgccaccgccgccgggaccaatcgcctcctcgcacagtcggcacatcggcgtcgacggagcaacccacgccggatctgacaagacggataagggctgcagtcgcgggaaaatgacatagagcgctgcggttgccgccgacgccagctggtttgtgcg

SEQ ID NO: 33539 - DNA, 223 bp, Oryza sativa
  unsure (1)..(223): unsure at all n locations
  Clone ID: uC-osflM202041d05b1
cgcatttccatcatctccccatcctcctctctactcgtgtcttccattcctccatccctcgcgcgcatctccgacgagctctctactccctcctccgccgccgacgatgattcacctccactccccgccgacggcgcccgccgcattcggcggcgccggctcggcggactggcggcggcggcggcggnggtcatggtcgncgncnnnccgcgctccggcggct

SEQ ID NO: 33540 - DNA, 378 bp, Oryza sativa
  Clone ID: uC-osflM202041d09b1
ctgtcgcgtggacaaagaaggacaaaaatcgtagtaatagaacagatgaggaacgcgaacaggtcgaagtgagactctagcatctacgctccaatggcggacaaggtctacgtcgtgtattactctatgtttggtcatgtcgtcaaactagctgaggagatccagaacggtgcttgatgtgtcgaccgcgagcaagtggatatgatgtatgtctttgataccctgtcagaggaggcgcttgccaggatgggagcgatggatcatcatcattttctttagaatttgattctgaagttgacgaattgagaaaagacaatggttatatgtagtcctttttgtttttgaagaactaattgccctatttctaataatatcttt

SEQ ID NO: 33541 - DNA, 506 bp, Oryza sativa
  Clone ID: uC-osflM202041e03b1
agcgttccggctatgccttagccgccggccgattcgaccagcgccggaaggcggagcacccgccgccgccgccttggccatggtgggtttcacccctcatcggcaacctagtgcaggttgttttctgaagatggctgacgatttgggccctcccactgtgctccagaagatacatgggcagtccatgatgttcagcaagatctcaccttattctttgatgaagaatcccgcactctacaatgccaacacttcttacagtgtgcctctgaagtcatacaatgggatggatgggaacaatgggttctcatctgtcacatctgtatccccagtctttgcttctgccccaaaggagaaaggtctttctgggtttatgattgacttcatgatgggtggagtttcagctgctgtctccaagactgctgctgctcccattgagcgaatcaagcttctcattcaaaaccaggatgaaatgatcaagagtggtaggctctcttacccatacaaag

SEQ ID NO: 33542 - DNA, 499 bp, Oryza sativa
  Clone ID: uC-osflM202041e04b1
aattttccccttctaactcccagatccctgttgctggcactagcccactaccatggatccttgcaagttccggccgtcgagctcgttcgacacgaagacgacgacgacgaacgcgggagctccggtgtggaacgacaacgaggcgctgacagtggggcccagggggccgatcctcctcgaggactaccacctgatcgagaaggtggcgcacttcgcccgggagcgcatcccggagcgcgtggtccacgcccgcggcgcctccgccaagggcttcttcgagtgcacccacgacgtcaccgacatcacctgcgccgacttcctccggtccccgggcgcccagacccccgtcatcgtccgcttctccaccgtcatccacgagcgcggcagcccggagacgatccgcgacccgcgcgggttcgccgtcaagttctacacccgcgagggcaactgggacctcctcggcaacaacttccccgtcttcttcatccgcgacggcatc

SEQ ID NO: 33543 - DNA, 402 bp, Oryza sativa
  unsure (1)..(402): unsure at all n locations
  Clone ID: uC-osflM202041f03b1
ctctttatctgtctacgagaggtagccgcaggccggtgactaagttgcgtgcgcgcgtgcacgccgagctgccgaaagtatgggcacgcacatcgaccccactggcggcggtccaacggagacagcctgagaagccgaagctgcagattgatgatcgacaacacaggggcgcaagtcctacaaaggcgacagagtgggcgctctcggcacgcagaaagcgagggggacgccacactgcacatgctcattaacatgggccacaactnctctgacagagaagtgagaggaaagccatggccaatcatgtgcgacataagtactccaacaccatgctgctggcccagatgaaaaagggcactgtcatgctatgaacgacgctgtacaacaccgacaagaagctag

SEQ ID NO: 33544 - DNA, 186 bp, Oryza sativa
  Clone ID: uC-osflM202041f04b1
gtgttatcattccgccgcgcggttgctgtatctcggtgtctaaaaccctagcaggggaggcacggtgaggagaggagaggagggggaaggacgctgagactactacctccctccaaagtggtgagcatgtacaaaactaccatactgttatgatggagcccatggtggcgatgctactcacggaac

SEQ ID NO: 33545 - DNA, 150 bp, Oryza sativa
  Clone ID: uC-osflM202041f08b1
tgataccttacgtgggaaagaaccacatgactaaggacaagtttatgctactaggagctgataccacgttgacgagaacaacatctgtgagaagtcttagataatgcagaatatcaagggctgattctgcttcataagactcagctcact

SEQ ID NO: 33546 - DNA, 442 bp, Oryza sativa
  Clone ID: uC-osflM202041f12b1
atttataggtgctgctccacgcgaccacgccgccggtgtcggccacgccggcgccgggccgaccccgccgtcgtcctcgccgtccccaccgtccaagccgacaagccgggggccgagacgctgcgacagcgattgctccagtcctcctcgccggctctccggttgcgggttgcccgcttggtggcttggcgcgggttgcccacccggcttctccagttctcttgattggctgctccacgtctccactgatccggcgctccaccattgagcccaggattggtgaaacatgaagaggagcggagatattgcgtcattatttgggaaccatgaagcaaaaacaatggagattacagaatcttctagttcttcgaatgtattcattggtgatgaagctcctgtacctgaagaagaaccacgacacgttctacagatgcttttccac

SEQ ID NO: 33547 - DNA, 381 bp, Oryza sativa
  Clone ID: uC-osflM202041g06b1
gcgttattggttcttgagtccttgcagggactgggggagggtaactatagggtaagcagagtaggaaccaacccgatcattgagcgcgctactttgaggcagacgtatagtgttgccagggtacttccagagatggtgaagcaacttcacgtgccgtgtggtatgactagatctgccgccacaagcgctcatgcactggatcttctctctgagctaactggaacatttgatcaaaattgcccatcaagattcgaaaattaccatggattgtgatgagcgattggggatataactgctggctgattaaaagagacttatatgtctgctgaattagtgcagtgatctattgaggctatcggaaaagtcgtctcatgctttttc

SEQ ID NO: 33548 - DNA, 190 bp, Oryza sativa
  Clone ID: uC-osflM202041g07b1
agccatcgttccagggaaggaggaaccagttcactggtcgcattcttggacaagaattgatggcataaaggaacattgtgttgatgttctaatggagccaaaaggtggcaaaaagaagtctagcagaagtagatacatgtactaagctcccctaggctacaagattgaggacgtttgtccagccgaatga

SEQ ID NO: 33549 - DNA, 362 bp, Oryza sativa
  Clone ID: uC-osflM202041g09b1
tgttcatctaattgcttagctaggaccagaatttgcatttactctcgtaattgtcattattaagagtgtaggcacacatggaaccctgaatggtctgttagaagggcaaaacgccttcccagatgctgggctgcatttctcgaaacagggagttgcagttactcaagaaaattctctgttagacaacactgccagaatagagggatggttagctagatttcccatgtttgactgggttggtggaagaacatcagaaatgtcagctgtgggattgcttccagctgcattacagggtatcgctatcaaagaaatgatagttgacgcagctctaatggatgaggaaaccaggaatactgtggtta

SEQ ID NO: 33550 - DNA, 411 bp, Oryza sativa
  unsure (1)..(411): unsure at all n locations
  Clone ID: uC-osflM202041g11b1
gtttactcccgttgcatttgcatgcggccatggcgagtgaaggcgccggcgtcgtccaactcctacctcctcctcgccccgctcgcgctgctcctcctcgccgccgtcgtcttcctgctcccttctctcaacggcgcccgcgtcggctccgatggcggcctcggcgtcctctgcgcccgccgcagcgctggcgccgaggactacaccgncgcggaggctgccgggcatgaggaggaggcgtacttcgggctgagggtgataggttaacagctggctaggtcgaatgcattcgagcgcatatctggtgtggatctggaggacgacctaataacactggatgatcaagcgcgagaacgccctgagcgctttgtctgtcccacagcccgaatcagttcaaaactgacaccttcg

SEQ ID NO: 33551 - DNA, 410 bp, Oryza sativa
  Clone ID: uC-osflM202041g12b1
aactctaggcgctgctccacgcgaccacgccggcgttgttgttcacgccggcgccgggccgtccccgtcgtcgttcgcgccgtgcgcaccgtccaagccgccaagccgggggccgggacgctgctacagcgattgctccagtcctcctcgacggcttgccggttgtgggttgccagcttggtggcttggcgcgggttgctcgccacgtctttacaggtctcttggttggatgctgcaggtttccactggtccggggctccaccattcaacccaggattggtgaaacatgatgaggagctgttatattgcgttattatttgggaaccattgagcatgaactattgagtttcagactcttttagtcttttttgatgcattcattggtgattaatgcttcttacctttacttg

SEQ ID NO: 33552 - DNA, 430 bp, Oryza sativa
  unsure (1)..(430): unsure at all n locations
  Clone ID: uC-osflM202041h05b1
cggtccgggccgtcntcatacttgtatctatccaagcactgcggggccgcctatcgacgtagtttgtatccatcctaaccggagccttcatgagggagagtatttgcatccacatcgggctagacggtatccccgtcgtgaacgcatgctgggagctttattgccttgagcatggcatccagcctgatggacagatgcccggtgacaagaccggtgggggagagttgaccttcgggaaagactggcccgtgaagaacaactcatgggtagcgttaatgaatgtgtatagcccttttaaatcacattaacgatcttgataaggatgcagctcctcactttcagaaagctgtcaaattttacgatggccttgccaaacaattggtcaatcaaggccatgtcttaaatgtttttgcatctgctcttgatcaag

SEQ ID NO: 33553 - DNA, 385 bp, Oryza sativa
  Clone ID: uC-osflM202041h06b1
gctgtcttggtttttgcctccaagcagtaactcggggagcgaaaccaccgtcaagctaggtgaatatcaaccccacatgtgatgcggcaacgtctaggcatacgtatgagctggagagctacatccagggatagggcaaccacctggccgcactgtatccgaactagagttgccgctataagaggaacatcccgtggatattctaactgagcgaagtggagccattgataaatcttgcacatgacgattcatttactactctggattatgatgcacgattggcaatctaactgcagcctgactaatcaaaacttatcagtctgatgattactgcgacatgtctagtgagccatcctgatattcctttacatgcctatccccgtag

SEQ ID NO: 33554 - DNA, 424 bp, Oryza sativa
  Clone ID: uC-osflM202041h08b1
ctttctctcgcttggctcagcacagaagatatgaggtcatctgtaggccaagagcagtacagagagactggcgataccaagatcacttatactgctggcgctgtggataaaatgcgacaccttgtgcaccaacgctaaaggcaattctgtgagcactgtctgcaagcgagagtacgctcaatacgaccaagagcagcctagcgacccttggggaagcacgatctgcattaatgaaggcaaagaacaagacactgacccttgcacaagcaaggtgacatacactgcagatgctgatgatcacaataatgtctggaacactagcgcaagtgatactgactgtgggagcgagagcaagtggggcaacgctggggcacatgaaaaggcagatgcctggaaaagtaaagtggggagtggaaatagtgga

SEQ ID NO: 33555 - DNA, 388 bp, Oryza sativa
  Clone ID: uC-osflM202042a02b1
gtccgttgcgaaatttatgcgagctcgcgacgcgggccccctacgccagaggcggaggcttgctctacatatactacgcctgcagacctccacgcgagcgtgccccggagtggaagcggaggcggcggcgggtcgagcgcaatctggaggcgtggcggcgcgaaacgatggcgatgaccctggctaggcagaagggaaggctgatggcgagcatgtctgggtcataatagaactggactctttgattcctgtgtgtttctggcagatccaagtagctggctgggtgcagcatatgctttttctaacgttggggcgatgatgcaccccacaatctgtggactattcctagtcactcagatcaacggggcaatatgtctcttccaatctg

SEQ ID NO: 33556 - DNA, 62 bp, Oryza sativa
  Clone ID: uC-osflM202042a04b1
gcggtctgtcattccatctcccaacatccagagtcctagggaccgatagcctgagagtgacg

SEQ ID NO: 33557 - DNA, 295 bp, Oryza sativa
  Clone ID: uC-osflM202042a05b1
ccttcgcctccgctgccacctggcagctcatcatggagcggatcctcgcgcagtcggaagtggcgccgctgacatccggcaggctctcgcacagcagcggccctctcaccgggcgcggctccatcaccgacagcccgccggtctcgccggagatcgatgacgcaaagtactgcagagcagcaagcactccgaagcctcagatgtaccgaggcggcgacaagactgttggacggtggctcaaggacaggaaggagaagaagaaagaggagacacgggcacacaatgcgcaggtcca

SEQ ID NO: 33558 - DNA, 185 bp, Oryza sativa
  Clone ID: uC-osflM202042a12b1
gctgtgtgcccgagctggagaagaagagaagaaaaggcggccacggaatcgtcggccgccgccacctccgccgccggcgcagagctccgccggtatcggccaggtggctcttctcctctctcggaatcgaaggcgagcgcgcgctctaatttgttgatctacctccatcttcttcattggcggcg

SEQ ID NO: 33559 - DNA, 352 bp, Oryza sativa
  Clone ID: uC-osflM202042b01b1
gcatattatgaaattagttttttcattcgtgtctgaaaacccccttccgacatggatatgacacctaaaaattttcttttcgtgaactaaacaggccttatattattttcttagggctgttttggattagtgccaaaaacgtgccctaccaatactttggtagtttgaacagtgtatctggtgattttggtttgaagccaaatcattggcattgccaatgcccaatttgatattttctatattctactcaatgcttggttctaaattggcctcaaaccaaatacaactctaccctaccaaaaaatttggtagtaccaaaaacttgcctaggttttggcactaccaacatttt

SEQ ID NO: 33560 - DNA, 337 bp, Oryza sativa
  Clone ID: uC-osflM202042b02b1
ggagagtcccaagcgagaggagaggagaggggaggcgatggggagcgggagcaagaagaagagcggaggaggggatgaccagaggccgctcctctggaggctcccggaggtcacctgcaccgagctcggcacgatcggtcccgccttctgcctcggagatagctgcggcgtccgtgccgacggactcttcttgggaggcacatgattaggatatggctttcccggactcacattgggcttgggagctattacgcaagctttttgaagatccgcatatcatatagaatgttgctccacctaacctttgagaagcaccgcgcatgattactacttacgc

SEQ ID NO: 33561 - DNA, 329 bp, Oryza sativa
  Clone ID: uC-osflM202042b04b1
gtacttactcagcgtgcttgctcttgctgttcctggcgagccaccgacgatggactgcgccctagaagctcatgcgtgtgtcgcgggatccattgctgtggccgtgtccgggaggaggttttcctgcaaggggcgcgctgctgcagattctgcatccatcatggattggaaccacattagcatggtacagcactgaccttaaatgaaagcataataacatgattttttgcatgtgcgatgaacaagcaaggcaacaagcaatgttgctgtaaaaccttttggaattggataatgcgaatgagccaccccctgtaattattcaaaccatg

SEQ ID NO: 33562 - DNA, 332 bp, Oryza sativa
  Clone ID: uC-osflM202042b07b1
tgtacctctgcccctgcccatagctaacccgaaacccccaaatcgaatcccccgccttgcccgcagatctcccaaccccccccctcacctctggccgccgtccgtcgaagccgatccggcgcctagatatgatggtgaactggtctaggcaacacaactatctctggtcaaggatcttgggagggcttgaaataggggcgtaatggaggctggagatcaagggcagacacccatggggactaacatggggtatgaaccatggccttctggaattatgcatccttatcaggctgggaatcctgatatggtccatgcatggctgcctgctgact

SEQ ID NO: 33563 - DNA, 384 bp, Oryza sativa
  Clone ID: uC-osflM202042b11b1
ttcataggaggacgaagcagcaggcggcggcggcagagcacggcgacctagcccgacctcgcaaccatggcaaggggtttgaagaagcatctgaagaggctcaatgcgcccaagcattggatgctcgacaagcttggtggagcttttgcccccaagccatcttctggtcctcacaagtccagggagtgcctgcctctgatcctcattatcaggaacaggctcaagtatgctctgacataccgtgagggttatttctatcctcatgcagcgccatgtctttgtttgatggcaaggtcaggactgacaagacctacccagctggttatttggatgtcatttccatccccaagactgggtgagaactacaggcttttgtacgacacc

SEQ ID NO: 33564 - DNA, 335 bp, Oryza sativa
  Clone ID: uC-osflM202042c03b1
taatgatccacatgtttcccccagagtacatcagcatagggcaaatccgtttgcaaactcaagcatccaaccctcagctggttcctatggtcaagcaacagtaggatgtgcgcctagacccagcatcagtgatcagtcaaagaatacaattttctcaaatgctttatcaagcccggtccgtcggagccttcagagctatcatttaacccaaggatctggtaatggaggccggaatgcagaaacaaactctgcaggacagaatagggagaccaactctggaggctccaatgacacctcaatggacatggtttcggacagcgctggtaacgaatact

SEQ ID NO: 33565 - DNA, 252 bp, Oryza sativa
  Clone ID: uC-osflM202042d01b1
tccttccttccccttctctctctctctctccccctccctccgatctcgccgcgtccgtgtcccctcgccgccgcagccagcgtcgagggctcggcgaccggaggaggagaggccggaacccgccgtcgccgccgccgcctccgcctgtagcgagatcgctcgatccggttcgcctcccgcgcgccagtccgccagcccagttcgatccgttgaggggggaggggacgctctagtgtggggattgggggggaa

SEQ ID NO: 33566 - DNA, 358 bp, Oryza sativa
  Clone ID: uC-osflM202042d05b1
atttgatgtatatattctccacatgttgtaaacctgacacttattgatcttcctggattgacgaaggttgctgtagaggggcaacaagaatctattgtccaagatattgaaaacatggttcggtcttatgctgataagacaaatactatcatactgtccatatctccagctaaccaagatataggctcatacgatgctatcaagcttccatagggatgtcgatctacgctcgtacattttctctacgccataaacacgaccttttaacccctggtcagaacgctcaacttgtgttactcgtgcaagtcgcccttatttcttccgggttaattatttccaaacccacaacctcattaaa

SEQ ID NO: 33567 - DNA, 389 bp, Oryza sativa
  Clone ID: uC-osflM202042d06b1
cggactcttgggggcgggatcctgacgaaggagttgacaatattggaaaggtaggtggaaaccatgctgtattgttggagaggaaaaatgctgaatttaggaagcagattaatgaactaacaatgaagcttcaattagctgggcaaggaaaagacgaggttctatataaggctggtccttttggtactgtcaaggctattagaaaaaattcaacagttattcctgatgaatccataaatcctacattggtcaagatattgcaacaggttgctataaagaaagaactaattgttgcgttggcaaactccaatgtgagagagatgcttgagatgttggtttactaacattaaacgattgggatttcaaattatttattgttgtattggatg

SEQ ID NO: 33568 - DNA, 500 bp, Oryza sativa
  unsure (1)..(500): unsure at all n locations
  Clone ID: uC-osflM202042e02b1
cccaaatcctcctccctccctcccctaaacctcgccggaatccaacccctccgccgccgccatgagggagatcctgcacatccagggggggcaatgcgggaaccagatcggngccaagttctgggaggtgatctgcgacgagcacgggatcgaccacaccggcaagtactcgggcgactccgacctccagctcgagcggatcaacgtctactacaacgaggccagcggcggcaggttcgttccgcgcgccgtgctcatggacctcgagccgggcaccatggactcggtgcgctccggtcccttcggccagatcttgcgccccgacaacttcgtcttcggccagtccggcgccggcaacaactgggccaaggggcactacaccgagggcgccgaggtcatcgactccgtctcggacgtcgtccgcaaggaggccgagaactgcgactgcctncaaggatttcaagtctgccactctttaggaggaggaactggttctggat

SEQ ID NO: 33569 - DNA, 531 bp, Oryza sativa
  Clone ID: uC-osflM202042e09b1
tagtaataaggctattttcaaacctccaaaagctatacgtggagggataccaatctgctttcctcagttttccaacttcggaaatctggacccacatggctttgcaaggaacaggacctggagtgttgaaaatgatccaccaccatttccagtaccaacttctaataaagcttacgtcgatttaatccttacgcatactgaagaagatctaaagatctggccacatagttacgagttccgtctgagagttgcacttggacctggtggagatctgatgctgacttcacgtataagaaataccaatgcagatggaaagccattctcatttacatttgcatatcacacatacttttcaatatctgatataggcgaggtgcgagtagaaggcctggaaactctggattacctagacaacttacaagagagaaatcgatacactgaacaaggggatgcaattgtttttgaatctgaatggacagaaatatctgggccaccgtcaaaattgccatattgatcatgagagaaaagaca

SEQ ID NO: 33570 - DNA, 169 bp, Oryza sativa
  Clone ID: uC-osflM202042e10b1
tgttgaggagaggataaggatgcctactccgtgggggtctattacacatggggcgaaggcctgctaggtgctaccgacagaacatgaacaagctcgaccccaagtcaaggaactgccgtggtgtccctagaccccatgatcaggatctatgatgttggcatgatgaaga

SEQ ID NO: 33571 - DNA, 497 bp, Oryza sativa
  Clone ID: uC-osflM202042e11b1
cgataaaccaaagctccagcaatcggcggcggcggcgacgcgggagaggcggtccggcgacgatggttcacgtcagcttctaccgcaactatggtaagacattcaagaagccacgtcgcccttacgagaaggagcgtcttgatgcagagctgaagctagtgggtgagtatggactgaggtgcaagcgtgagctgtggcgtgttcagtatgctttgagccgtatccgtaacaatgcaaggcacctgctcacacttgatgagaagaatccacgccgcatcttcgaggggtgaggcactgcttcgccgcatgaaccgttatgggctccttgctgatgggcagaacaagcttgattatgtccttgccctcactgttgagaactttctccaaggcgtcttagactcttgtcttaaggctggcatggccaagtccatccacatgctcgtgtcctgatcaggcaacgccacatcagggtgcggaggcaaattgcaacatcccat

SEQ ID NO: 33572 - DNA, 338 bp, Oryza sativa
  Clone ID: uC-osflM202042f01b1
aaaaataaaaatgcaaaaagataagaaaaaaaaaaaaaaaataaaaaaataaaaattaaaaaaaccaaaagaaaaaaaaaatgaaaaaaaacgaaagaaaaaaaataaaatcaaaaaacaaagaaataaaaaaaaaaaaaaacatgaaataaaaaaacaaaaaaaaaacaaaaaaaaaaaaatataatcataataaaaaaatttagactaaaaaatataaaaaaaaaaaaaaaaaactaaattaaacaaaacaaaaaaaaacaactaacgtaataaaaataaacagaattaaaaaaataaaattaataacaaaaataatacaaattatgaaatataaa

SEQ ID NO: 33573 - DNA, 491 bp, Oryza sativa
  Clone ID: uC-osflM202042f02b1
gccactctagagctttctctttctgtgtgtagtgtgtgcaactaggaggcttgttccatactagtttgctaggtcatggaaaagagcgagattttcgtaggagcacactcatatgcagctatatgtgcttttacactcatcataggatggttagctcactgggtatacagatggataaatcctccatgcaatgggaggcttcctccgggctcaatgggcttccctattgttggtgagaccttccaatttttcagaacaagtccatcaatagacatgccaatttactacaagcgaagactggagaggtatggacctatattcaaaactaacataggaggccagcacgtggtcatatcccttgatcccgaggtgaaccagttcatatttcaacaagagggaaggttgttccaatcctggtttccagaaaccacactaaacaatttttggaagaagacactcaccacgtataatagaactggtcacaagttgat

SEQ ID NO: 33574 - DNA, 510 bp, Oryza sativa
  Clone ID: uC-osflM202042f04b1
ctgattcttgcatatcacaagttagttgggcccatacctccagaaattggaaggttaaatcagttgcaagctctatcactgcaagggaatagcttgtatggctcactccctccagaattgggaaattgtaccaagttacaacaactgtatctacaaggaaattatttaagtgggcatatcccttcagagtttggtgatctggtggaacttggtacactggacttatccagcaatacgttgagcggatcgattccaccctctcttgataagctggccaagcttacatcattcaatgtttccatgaatttcctgacaggagcaataccatctgatggttcacttgtgaattttaatgaaacttccttcatcgggacccgtggtttatgtgggaaggcagatatcttccggtgtgcaaagatgcccttcagtcaccatcaaatggccctctgccaccttcgaaaccgacttatcatagaagaacgggaagaatctacccgacttgttatagtg

SEQ ID NO: 33575 - DNA, 536 bp, Oryza sativa
  Clone ID: uC-osflM202042f05b1
gccgttttaagcaaatttccccacgcttcgcgaaccctcgtcgggtcgatcccgccgccgccgccgacgtgcccaaatccaatccgcccatcgcaaggaggcagcatcagttttgctgcaatctgacaaagtggagggtctaaaagttgaagcttcttttatgattgaacaagactggctttactcgagatcagttggattatttggctaatttcctggggtccataactaatgccttttgttttctgtttggttttgtcttgtttacatttattagctggtcttgtttaactttatgattacttttttttcctcttatatgtggttttttttttcctctttaaactttatttttttatcactttctttcctttttcttttttattttattaatgtttttctatttcttattctttattttttttgattttctttaacttatttctttttttttattttatccttctttttttctttctcttatctatttttttactactttatttttttttcattttctctttttctcctttttc

SEQ ID NO: 33576 - DNA, 339 bp, Oryza sativa
  Clone ID: uC-osflM202042f08b1
tgttctactattatggaaggagggtaactgactacagaagtatagcccataccgggatggactgcgcgagcacctggggggtttcattacaagtgctgaagtgcacctgcggtctacccaggaggcgccgctacaccaactcgggcttcggcaacgtcagcaatggcggaaggatcaagtgcatgcaggtgtggccaattgagggcatcacagaagtccgagaccctatcgtacctgccaccactcaccgtggaggatcttttgaagctcatcttgttcctggctccatccaagagggagtcttgtctcgaggtcagcaaggttggcttctccctaccg

SEQ ID NO: 33577 - DNA, 451 bp, Oryza sativa
  Clone ID: uC-osflM202042f12b1
ctacctctcgccgccgttttccccccaaaacccgcgacgacgaaaaccctagccgtcgccggaatgtcgaaggccgaggccgccgccgccggcgacgccgccaagcccgacccggagatgggagtcgcgggggagaaggaggtggttgcggagaaggcaccggcgaggaggaaggtagcggcggaggaggaggacccgcggctgcggtgggcgttcgtgcggaaggtgtactgtatcctggcgctgcagttcgccgtcacggcggcgatcgccgtcgtgtcgtgggccgatcgccccatcccgcgcttgttcgcggcgggctccctcgcctcgtggctcgtctacctcgccatcctgctctgccccttgatcgggctgtggccgatgctcaagtacagggagaagcaccccgtgaacctgctgctgctgggcctcttcacgctctgcgaga

SEQ ID NO: 33578 - DNA, 276 bp, Oryza sativa
  Clone ID: uC-osflM202042g02b1
gcgttacatgaggcaaacggtggctgttggcgtcatcaagaacgtggagaagaaggacccaaccggtgccaaggtgaccaaggctgccgccaagaagaaatgagcatcgttgaagtggtggttatgctggctgcatttgagatatcttagcgttcgttaagttttgcccacggtcatggcactcgttgcatggaccgttaatatctgctcgcaatgtgcactatgttagtcgattaaaactcgtttatttctatctggttaaaaacttggatgctc

SEQ ID NO: 33579 - DNA, 381 bp, Oryza sativa
  Clone ID: uC-osflM202042g05b1
gcgctttctatgctgtgccattcaatttctagggcacgtgtattggatgagagacctgacataaagtcccagtacagtgctctcctttaccaacttgttgtggacccaagtgacagggtctgttttgaggccatactctgtgtgttgggaaaagttgacaacacagaaagcacggaggagagagctggtggatggattaggttaacaagagaaattcttaaattgcctgaggccccttctgtagcatcaaagggtattctgtcaaaatctgaaaaatcttctaaagcaaggcgttctcagccccttattaaacttgtaatgagaagactggagagctctttttcgtagcttttctcgtcctgttcttcatgctgctgcaag

SEQ ID NO: 33580 - DNA, 226 bp, Oryza sativa
  unsure (1)..(226): unsure at all n locations
  Clone ID: uC-osflM202042g10b1
cttctccttctcagccagcttcgcctcgctcgctagctatccatctcttcctcctcttcttctcccttcccttgtttgcttggaaggagagggggaagaaaagtaggaggancgcggtgcgggnnggtccagagctagggcaaggcggagggcaacgcaagaggcgcggccgacagagccgacataaaggataggctaacaagacaacttgactccatagcctgag

SEQ ID NO: 33581 - DNA, 421 bp, Oryza sativa
  Clone ID: uC-osflM202042g12b1
aaatcatttccttgtccctcgccttcctcgcctggcctcgcctcggctctcacacgacgcctcttcctctcgctactactagctcaagctaagctagcaagagcattccttgggctttttttcttgttcggggttgagaggcaatggcggtgatgactgatgtgtcgaccaccgggacggcactccggaccccggcggcgggggcggtgaaggagggcgacgtcgagaagctccggttcatcgacgagatgaccaccaacgtcgacgccgtgcaggagcgcgtctggggggagatcctcggccgcaacgccagcacggagtacctgaccaagtgcggctccgacggcgccaccgaccgcggcctcttccgggccaagttccgggtggtgtcggacgacgacctgtagccggacattcagcg

SEQ ID NO: 33582 - DNA, 264 bp, Oryza sativa
  Clone ID: uC-osflM202042h02b1
gcggactctttctctctccccctttccttcccctcgggggggactcccccgtctctccgcgccagctcgatccccgccggcgccgaccagcgccgatctccgtcccgggggccagagcgggcgccagcgacctgctgcttacgcccgcatcctcggcgacggtgagcacccgaagggcccggctctgaagtaagcaggattctgaatctgagaaccaggaggtggattgggggactatggctcagaaccccaatttcgacaatg

SEQ ID NO: 33583 - DNA, 471 bp, Oryza sativa
  unsure (1)..(471): unsure at all n locations
  Clone ID: uC-osflM202042h03b1
ggcctatgtgcaatgggccgccattcatgtcttatggccagactgcttccaatagaaatgttctttatcagaatctgacgccatactccttcaatgcatgggctagcaataacatgccgaggaaccctgtctacactagttaccaccctactgcaattgaggatccccatgctactccattccacatcaacaatcatgacacagaccaaggtttcttcaccgtttctactagcttcaggggtggatcaatcatttgtacatgctccttcacccttgtcaccagtgtcttcatcatccncgcagtttctcttcagctcaaatttcaaatggaccgatagacgctaagaaagccaagaaatcagatataaagatcaccaattgttttaaaagaagtgatacgagagtgaaaaaatgatgactagatcaactccgctagtgagccttcagcatgagtcataacaggcaattcac

SEQ ID NO: 33584 - DNA, 480 bp, Oryza sativa
  unsure (1)..(480): unsure at all n locations
  Clone ID: uC-osflM202042h11b1
acatgagaagtttggtggacttagggatggatactatatccatggtcaatgtgcgataattatgtttgatgtcacttcaaggctgacttacaagaatgttccaacatggcatagggacttgtgcagggtgtgtgaaaacatccccattgtcctgtgtggtaacaaggttgatgtgaagaacaggcaggttaaagccaagcaggtcacattccacaggaagaagaatctccagtactatgaaatttctgccaagagcaactacaactttgagaagcccttcctttatcttgcaanggaagcttgctggtgacccgaacctcattttcgtgaaagctgttgctcttaaacccgggggagttcccattgacctggcaatgcagcaacagcatgaggctgaacttgcggctgcagcagcacaacctctcccagatgacgatgacgatctgatcgagtgagaggatcatgagtctatcatgcttc

SEQ ID NO: 33585 - DNA, 67 bp, Oryza sativa
  Clone ID: uC-osflM202043a01a1
tttggggggttttaaaaatattcgcgttttcttattatctaggcgactgtggcgtatccgccaaatc

SEQ ID NO: 33586 - DNA, 455 bp, Oryza sativa
  Clone ID: uC-osflM202043a02a1
cgtccaactcataatatacctttccagaacagagaactaaacgcttgattccctcctcaaggtccttatggttgttctgatctttaattagacgcttaaaccgggttccttgcttgccaaatccagggtgaccagcagggtcatcaaattcagaaagattcgatttgcagtccttgtgtcgaaggagattctttggagacataacaatcaaaggctttttgaagtcccggtgaatctggcgacgcaggacatggaaatagtttgcaggagttgggacattcacaacttgccagttgcactgctggatttgcttcctcagagttggatccatctcaggaataacataagggttgtcatcactcatctgaaggaaacgctccaaccttgcactggaatgttcaggcccctgaccatcatatccgtgaggaaggcaaacgacaagaccggtctggcgg

SEQ ID NO: 33587 - DNA, 445 bp, Oryza sativa
  Clone ID: uC-osflM202043a03a1
aatctaacatacgcaaactgatattatcacaatgttagccgatgacaatggaaagagtaatctaggtacaagcggatcattgacggtggagacaagacattggctgcaccacaacacccaccagtggcgccaacaaggagcgctatccgttataggacgagagaaaaagtaaaacatcacgatgtgaagtgaaactgaataattctagtagacgatgatgatgatgatggataggctccttaggacgcccgccgcccttagcgtcttgctgctcccatcttgtccactggaaggctcactcgtcatcgtcttcatcctcttcgctgccctcgtcgtcatcctcatcattgacctcggacttggacttgtcagattcctccttcgcgacctccttttcctccttggcgggtgccttcttggcagtgctctcgcccttgttgtaagc

SEQ ID NO: 33588 - DNA, 447 bp, Oryza sativa
  Clone ID: uC-osflM202043a04a1
aatagaaatcgattcaatttagtaatttcttttagattaagtcttagatctcgtttgacctgtgaaagacctcctttgttgaaatgttcccaaaattcctaaaataaaaggaaaaatactttccactgccctaaacaaagggcgggaagcaagacggcgaacatatcctctaaattgatcatcctcaaatcagctattcctggggtggggtattgtctgtccccataaatagaaaactctaggagtaataaattaggagtaaagtattgatataattggaattgcagaagcaaataccaatttactaaaaaaagaagaaagtatctaatctaaaggactcgttttcttttttaggattaaacaaaagggttcgcaaataaaagcgccagtgccacaactagtccattaattgttaaagcttccataaaagctagactaagcaataaa

SEQ ID NO: 33589 - DNA, 336 bp, Oryza sativa
  Clone ID: uC-osflM202043a05a1
acaagaattattaccatgttaatttaaagattattattccatacatacaagattcaaaagcaggcagaccttttgcagttcaccctacttgtaaacaactaagcaaccatacatgccgaggacttagctagggaacaaaacgggggaaaaatgagaaaaccttaaaaggaaaaaaggttgctgggagagcaaatgcattcacaggtatttacacctcaaaagcaaatgttgcttagggaggaggggccagggagaggaggagctcggatccgcgctggatgacgtattgctggacccaaacacggggaagacggtttcccaattgaggaactccct

SEQ ID NO: 33590 - DNA, 363 bp, Oryza sativa
  Clone ID: uC-osflM202043a06a1
acaagaatcagcaccatgttaatttaaagattataattccatacatacaagaatcagaatcaggcagacctgttgcatctcaccctacttgtaaacaactaaacaaccatacaagccgatgatcttgctaggcaacaaagggggaaaaaatgagaaaactttaaaaggaaaaaaggttgctgggagagcaaatgccttcacaggtatttacacctcaaaagcaaatgttgttgagggaggaggggtcagtgagaggaggagctcgggtccttgctgtatgtcgtcttggtggacccaaacacgggcttcttggcttcccacttgaggagctcccttacatagcggatcggggagcggaccgac

SEQ ID NO: 33591 - DNA, 177 bp, Oryza sativa
  Clone ID: uC-osflM202043a07a1
tttttgttttttttttttttttttttttttacaaaaattattcccttgttaattaaaagaatataattccaaacagccaacaaacaaaaacaggcagaccccttgcatccaacccaacttgaaaacaacctaaacaccccagcacggcccgatgaaatctgcctaggcacacaaaag

SEQ ID NO: 33592 - DNA, 209 bp, Oryza sativa
  Clone ID: uC-osflM202043a08a1
tttttgtttttttttttttactattcttaatctgactttacaacaatgttggctgatgacaaagaaaaacggaaattgggttcgagcaaatcatttactgcacgatacgtgcaattggctggacgggagcacccaataccaggagccaacaatggatgcgctttccttataggggatcaagggaaataagtcaaacgtgcccgattcga

SEQ ID NO: 33593 - DNA, 155 bp, Oryza sativa
  Clone ID: uC-osflM202043a09a1
gttatataattttctttttttatttttttttatttaaattttattttcttttcatcatttatttaatgtatttttttatttattattttttacaaaaaggtccaagaagaattgaccgagcgctacagaaatatgctcttagaggccccaaaaac

SEQ ID NO: 33594 - DNA, 413 bp, Oryza sativa
  Clone ID: uC-osflM202043a10a1
ggaagcaaagctacattccacaagtagcttcaataaattaatatctacagaacaaaaagtataaaatgtatagtagcatcaaatacagagtacaggatggttaaagttctcttgttacggtcgctgcttcaacatgtactttgtgcacatatatacagaattttgaagtgaaattcccatgacgacagtcttttaactcctgattagctcaagctgctttcttgcttttgtatttgtttgcgcagatgacatatatcacaaagttcagaaaactgagcccagcaagaagccagaagaaataatctaggtgaccttgattcaagttatcaggaatccatccaggatttcctcctcttgttgggaagtacgcaaccaatgtcaaaatgaatgcactgagataattcccaagagct

SEQ ID NO: 33595 - DNA, 284 bp, Oryza sativa
  Clone ID: uC-osflM202043a11a1
catatgttgttttattaaattaatatttacagaacaaaaagtataaaatgtatagtagcatcaaatgcagagtacaggaaggttaaagttctctggataaggaagcaagctttaacatgtactttgcgcacatatatacagaaattggaaaagaaattcccatgacgacgggcttgaaagttctgagaagaaaaagccggtggcctgctttaggatacgcccgcccagatgacatatgtcacaaagaggcaaaaactgagcccaatacgaagccagaagaaata

SEQ ID NO: 33596 - DNA, 351 bp, Oryza sativa
  Clone ID: uC-osflM202043a12a1
atgttctcatcttttttacttaataagtacatttcagtacacacatggtcaaggcaggaatttgaaaaagccgtcaacatacttcaaatcattgaccacaccatacagcaaacattgggtaaacatgggaataaaaagaacaggggatagcaacttggaatgttctagcattactttgggggcgtccctttacgaaacaggggagggggcaccagctgttgatctcggccatgcccactcaacatggttagatagcgccagaccacgctgaccacaacatggcggctcctgagaagggaccaactgtcaagagcgggttataaaggctccagaggccctcatgattggccc

SEQ ID NO: 33597 - DNA, 402 bp, Oryza sativa
  Clone ID: uC-osflM202043b01a1
agaaacattgcagtttgaaataccggctcaatcaatcacaaaggccgttgaaagcacgccgaaaatcagcaaaaatcaaaaatcattgctgttaacgtaaaacaaatgttaacatacagaatacagttaactacatgttgttgaaggcatgagggttttttttctgccagcactagtttacatatatgagctgcattaggaaggacattgatgagctaaatgtggcaaaattttgagacgtacatgccaacgggcaagcacatatccatgaccctgatatgatcatatctgggagagctgttttggccatttgggggaagggcgtttgaaaagggtcatgcacacgggataatgctgctggacgcttttattgaatatggattttatagccccaggagggcc

SEQ ID NO: 33598 - DNA, 390 bp, Oryza sativa
  Clone ID: uC-osflM202043b02a1
aagacccaaagcatccaagtttttaaccgaaaggaaataaacgggttttaaacgactaacatagggcacatggggggcagaatttaacggcccatgcaacgggggccagggccgggggcaaaacttaacgaacgctaaaaaatttaaaaggcagccggaaaaacccccacttcaacggggctaattttttttggggggcagccttggccaccttggcaccggggggggcctttttttccacgttctgggggaccccaacagccaccggtggcctaatggcacgcacgggaaaacgaccaagggggggggccttaaagaagggccccacaaccagggggttggggggaatcattttaaccaaacccggttccccgtttttgaggaacttgg

SEQ ID NO: 33599 - DNA, 371 bp, Oryza sativa
  Clone ID: uC-osflM202043b03a1
aacaaaacaacaacacaggagaagccagcgcctccttacccaaaaaaaaattggggcaaaacgggctaaaatttacaaaggccggcacatcttttttacggggccggggggaatttggccttaaaagaggtaaaaaggtaaggaaaaaggtaaggaaataagggggaggtttggggttgcctgggggcccttttttcaacagaaatggtaaaagggggaaatgtgataacaccggggatgctggggcgcatgggggagggaacttggggtcacaccaaggacccgttgacgaaccaggaggcgaggcagggaaaaccgttgctggtcggggcacctaccaggttacagtttgctcaaaagaaacagggggc

SEQ ID NO: 33600 - DNA, 336 bp, Oryza sativa
  Clone ID: uC-osflM202043b05a1
attgtaaattttgtttatatattttttaattgtttattactatttattcatatgttaatataaagagccatttgggggggaggatcgatgcaaaagaaaaactaacatggttgttttacaaaaggaacaaaaaaaagaggagggaccgcacaacaaaaaccgaaacacccgaaggtacacgcaagaaaaaaaagcagaagcggacaatgaaacggtccggggggggatacaacacccacgaaagaggggggcccaaaaaggggggggcaaaaaaaccccaattacggggggggaaaaccccaatctgtaaaaaccgggcggggggcaaagaaacaa

SEQ ID NO: 33601 - DNA, 449 bp, Oryza sativa
  Clone ID: uC-osflM202043b06a1
agtacagtgaaaatattttttttaacgactcgcacgagacaatacgattgatagagcaggaaaatattacaggactataaccctggagggtcataaccaggaaaaaggaaaaaatataccaccacccacacactgacagcgccaacacacaagaccgggagaaggctaacaccggaccggccgccgctaagcatgactgatcaccgctagaccgacaaaggaacgcagacgagatcacctaaaagaacaccctcacaaccaacgcaaagccaactcctagagggggcttgcaccaatcgatcgagaggcttcggctaggggatgccaaaacgacgtcttcaagaagagaagcgatagaaaaccggcggcaccgtccgtcggggctcaaagaagccaagactggctttcgcccggcaaccaccctttggggatgagacaggacgacaacg

SEQ ID NO: 33602 - DNA, 492 bp, Oryza sativa
  Clone ID: uC-osflM202043b07a1
ctccactaaatacatccacaatatagtagtatgtgccatgaacaaaaacaggtttacagctattacaagccaccttcaatcaaaagaatgaatacaatatatgaaaccgaaaaattaaaatgccagacccattgtaataattctcaaatttctcatccgcaatctcagatgcaaggcaccaccacttaataatcaacaccaaactttttccctgtacagcttttggagatctggctgttattttcgtcctgtttttctgggttgtgaaattacatgataaatactcggaatttttcgctgccgatatcagatgagctcataccatgcttcttctccttgagtggtctgtggtaactgactttggatttgaaagatggtcagcaccaccgatgctcttgggttcagccagcctcttcagtcgctcgctgaatgattcggtcgatccactcttttctttcttcagaccagttagagatggaactgatatactta

SEQ ID NO: 33603 - DNA, 235 bp, Oryza sativa
  Clone ID: uC-osflM202043b08a1
agaattgaaggcatcttttattagtgtttacaagtattggctatttacaacatgcgccaaaaagaatggtttgaatcaaaagaaacagaatacaaaaccgggcaacacaaacacaacacgctggcagcaaatcaagcccactttgagctacttaaaaaagcataggggaaagcaatcaaacggtcttttaaggttacagatactcacatcgacaggcggtcaccttatttggggg

SEQ ID NO: 33604 - DNA, 451 bp, Oryza sativa
  Clone ID: uC-osflM202043b09a1
gcgaaatcaaccacagtttttatacaaaaccaggaggattaaacgtacgccacaacacaaagtaaaagagctaagtagaacatcatcattcacgaaaatgtcggcacatgcatacatctaaagacaccatttttctgctgccataagcgccccactcttacttattcagttcaggacttgaggcgaaggctacctctcaccttcaggcgcggggacctcacctactgggtcttggccgactcgctcttcgacggctgggcctccggcgataactgggcgaaaaccttggcgatgcgctcggtggggatggcggcgaggtactgtgctccggtgtaacccttgtcggccgcggcggccatcaccttgctgtacttctcggcccaataggcggcggtgggcacggagatctgcgccacctgcgggaacagaggcaggttgttgagagagcgcc

SEQ ID NO: 33605 - DNA, 410 bp, Oryza sativa
  Clone ID: uC-osflM202043b10a1
agagaaaaagatgttcacatattcgcgaaaagaagataacaatacatccacatgccaatacaaagacccattcgttctgtaagacgcgatccaatagaattactagctcggctgtcttacaaaaggaacaaaaaaatgaataggcactgtttaacttacactgatacaccctctgttagtcgcttgaaatcaccgttcttaccatacaatgaaccgctcaacaacataattctacataaaagaattagtggctacatacaattgatgtacacgaccccccatttacaaaaggagaaatagactatttctcaataccctgctgcaagtattgaatcaagtcgtaccctgcggtagtccatttgttgtaggcatccacacatgttctgaccataaaattagcagccttacgc

SEQ ID NO: 33606 - DNA, 315 bp, Oryza sativa
  Clone ID: uC-osflM202043b11a1
acctaaattctcatcaccttatgtaacgcagcctttgctacaaactagtattaccggcacacaaaaactcatctcgggaagaaaagaagaaacgagttcccttaacagccaacacatggatgatggacagaccgacaacagaacctagaccttacttttttaaaagctcagttcagttcctgacgaaagggcttagaacgtccaagtagttggggaaggtcttgcgggtgcaaccagggtccctgatcgtcacgggcacgtcggcccaagcagcgagggagaaggccatggccatcctgtgaccatcggaggggt

SEQ ID NO: 33607 - DNA, 438 bp, Oryza sativa
  Clone ID: uC-osflM202043c01a1
tttttgtgttttttttttataaaaaagtgggcactagtaatgcttcccattcataatggctgatggggcgtttaggttggcaccctccggttaagttgatcaaccaaaccccttgtgacagaccttgcaccacgtataacctctcctttttacaacaaaacacccaacgagcgcagttccaaagtataaccatgcaacgcgcgcacacgcgtacatataccagagtccacaccaaaaccaaaaaaacgagcctagcaatactacccattttagcacccaactttggtcgggccaactgcccccaagtttaacagcgccttggattcatatattcatagaatggagggaatgcgacggcgttcgatgccacgcggccgttcgtcttacaggagcagccgccggccggccgtttttttgcggaggccgaccagggaggcg

SEQ ID NO: 33608 - DNA, 485 bp, Oryza sativa
  Clone ID: uC-osflM202043c02a1
acatgatccgaatgaacagtcatcggcaaatatttctcaaaggagaaaatgattacacaagaaaaactaagcagaaatgatcacacaagaagaccaagcaaccttgttattatgcatcagcatcagcatatactcctctcagatagctaagaatctacctttattcccatactaacattcaatggcacaaaatgggaatgagatcccatgaacacatgaaaagcagtagcagcagcatcgcgaaatagttactggtaccgatacaacagatggatcgaaaatctcttacgcgcaaagcagctcttgcaaggagcctaattatgctatgatgaagaacagagaccattcctactgaagacagcatcaaaataccataaccaccatgagtcaaattaagggttcctggcttggaaatccttcatgaacgcgaagagctttttcacaccggcgagcggcatggcgttggaaaatggaggcgcgcacgc

SEQ ID NO: 33609 - DNA, 424 bp, Oryza sativa
  Clone ID: uC-osflM202043c03a1
acgacaaaccacgaacttggatattaaagatgccacaaagaaggttcacataaacaacacaggtcacagcagcgaaagctacaagcaaaccctgcataatcgaaaagcaaatgtttttcaaaaccagactcacaaactgatagatagaagcccacacggacagatcataggatagcagcagtaatcaagcattgccaaggcaccaggcaagaaccctgaacctttctagtactcgtaacccttatcaccctgggaaccattgtcgaactcggagccgacctcctcgaagtccttttccagcgcggcgaggtccttgcgggcctcggagaacttcccctgctccatgccctcgccgacgtaccaggggaccaaggcgcgcttggaggacatgagggcgaacttggtgccgaggcgggagaacacc

SEQ ID NO: 33610 - DNA, 81 bp, Oryza sativa
  Clone ID: uC-osflM202043c04a1
atagaaaaaaccttaggggaaaagtatattgtgcgattttttaagaaagccttttacacatgttcttacaaatacaaactt

SEQ ID NO: 33611 - DNA, 584 bp, Oryza sativa
  unsure (1)..(584): unsure at all n locations
  Clone ID: uC-osflM202043c05a1
aggggggccggggggggcaacccctttttttataaaaaccccaaaatccccaaaaaaacccccccccccttcccaaaaaattaaaaaaaaacaaaaggttttaaacctgacccccctccccccattttcaaaaacccccccaaaaaaaaaaaaaaaaaaaaggggaaaacaccccccccttacattttaaaaaaaaaaaaaaacccctcccctttttgaaaaaccctccccccccggggggggggggggggtctaacacccaaacacccccccttttggggcgacccccccccaccaaccaaaaaacctttaatatttttaccccccccaaaacccccaaaatatttgaaaaaaattgttaaaaaaaccccccccaaaataaacccccccccaaaaaaaaaacccccaaaagagggggggggggggggaggaaaaaaacccccccccaacccccccctttttttttttcccccccccacaaaaaaagggggggggggggggggtcctttttttttaaaaaaagaccccccccccacccaccgggccccccacctnaaaaaaaaaaaaaaaaaaagcaccccccc

SEQ ID NO: 33612 - DNA, 360 bp, Oryza sativa
  Clone ID: uC-osflM202043c06a1
atggagaaaagaatgcatttctatggattagagtacagcagagaacgctatagagatcacaggagttgacgacgacagcaacatgatgcaaacaattacccgctagcatatatataggccgacgagacgacgcaccgatggatcagggtatcctccctgactggtcctgcggaaacaggcccggggatgaacgggaacgcccaactttgggagcccacgttgtccctggatgaacctttcgacggggtacttctgctgcgcctgctggtacgggacccgtttgaccccttttcacttggggcgcttgctcatggcggcgccgtcgcccggggttttcaacctgggggaaaaaccaggggt

SEQ ID NO: 33613 - DNA, 89 bp, Oryza sativa
  Clone ID: uC-osflM202043c07a1
attattgttcatgggataaaatggttatacaggtataacaaggggcccttgatcacaaaaaaggaccaagcatcctggatataaagaca

SEQ ID NO: 33614 - DNA, 371 bp, Oryza sativa
  Clone ID: uC-osflM202043c08a1
acgacaaaccgccaagttggaaccaaacgttcgcccacagaagggggacgacgtaaagaaacagaggccggggtggaggggtacaaacaaaccctgaaggaggcgaaaggcaaaggtttttcagggccaatttcaacaattggttaaaagggcgccgacaggggcagatgaaagccctgaaacggatgagaaggggggccaaatgaaccaaggaagaagcctaaaagaagctggaacctgaaaaccttaaggggggggtgaccctcccggaaaccggagccgaccggccgaaaacccttaaacagagcggcaaggaacttccgggccaaggagaacttgccctgaaaaatgcgctagacggagtacccggg

SEQ ID NO: 33615 - DNA, 493 bp, Oryza sativa
  Clone ID: uC-osflM202043c09a1
caaacacaatacccttataagtacttattattaggaaagtagcgtgcatgggcataaatggcaacggggggcaggttaagaatcacaatgctgagcagcggggaaacaaaacaccataatgggacagagcaaaagccttcgaaagggagcttttaggcagaaggcttttaccacttgaggggcttgaccacctcccaggtgaagtctgggtcgtcccttccgaagtgaccgtaagccgccgacttgaggtagcggccgttgccgcctttcttgaggtcaaggttgatgatgatcatgccaggcctgaagacgaagtttttcttcacaatcttgaggatctccttgccagggatcctgcccgtgccgaatgtgttgacgaatactgacagtggctatgggacaccgatggcgcatgatacttgaccaatgcagcgtccagcaaggccactagcaacaatgcttttggcagcttggcttgcgacgtatgctccac

SEQ ID NO: 33616 - DNA, 115 bp, Oryza sativa
  Clone ID: uC-osflM202043c10a1
atgtagtaacttgtatttaataaggaagtacattatatatacctttctgggcgatcaacctcccatgcactgatgcacaaatatatcccggactcaactacaacactttttcttt

SEQ ID NO: 33617 - DNA, 197 bp, Oryza sativa
  Clone ID: uC-osflM202043c11a1
actcaaaaataattatgatcgagaaaaaaaaattatgtacaggttcataaacacatacctaccggcaggatacaaacgcaaatgaaaactaagggacacaggacgcgtttaactttgatcaatatctgatcaacaagcggggtcatgcgtacacctcggaacatttccacttgtggataggggcaggcgaaactttt

SEQ ID NO: 33618 - DNA, 262 bp, Oryza sativa
  Clone ID: uC-osflM202043c12a1
aaaaaaaagaacacctcagggtacttatcgctgcaggcgggaaccgaccggaaatggggggaggcacagatgcaaaaggtggggctgggagcaacttttacatgacggggggtcttttctttgcatttacttgggaagcaaaaaagggtttatggggggaggtaaaaaagggaggcaactaaaaacaagaacgggggggtcaaagggggaagatctagacccaaaagcccccccaacaacccaaagttggaggggctcgctc

SEQ ID NO: 33619 - DNA, 451 bp, Oryza sativa
  Clone ID: uC-osflM202043d01a1
tgattgatttcgccagggagaaggtcgggggcgccgcggcggaagtgcggctcatggccaccgccgggctgcggctgcaggaggggcgcctccaggaggccatcctgtcgtcctgcagggacgtgctcagggcttccggattccggttcgaggactcttgggccgaggtgatcccaggctctgatgagggtatctatgcttgggttgcggcaaactatgctcttggcacacttggaggggatccacacaaaaccattggaataattgaacttgggggcgcctcagcacagctgacatttgtttctgatgaagtacttcctccggaactgtcaagaaatttcacttttggtggaacaacatatactctctatagcaacagctttctaaactttggacaaaatgctgcacaagaatccttccatgaaatactgcggccaaaagacttcaaaaa

SEQ ID NO: 33620 - DNA, 439 bp, Oryza sativa
  Clone ID: uC-osflM202043d02a1
tttttgttttttttttttttttttttttttttttttttttttttttttttttctttttttttttttttttttttttggaacccggggggacaaaaaggaaaaaaaccccaacaaggcccggggaacagaaaaaaaaaaaaaccaaaacaaaaaaaaccccccccgggggggccaggggaaaacagggccccgggcaaaaatcccccggaaaaaagaaaccccgggggctaaaagtaggggaacccgcggggcaccccccggggggaggaccccctcccggggccggggaaccccccggggaacggggaccccggggccggggggcccccccggaaaaacccgggcgggccccggggggggccccccagttccgaaaagggggccaaaaaaaggggggggcggaaaaagggaaaaagcgggacccgggggggaacccccg

SEQ ID NO: 33621 - DNA, 114 bp, Oryza sativa
  Clone ID: uC-osflM202043d03a1
ggtgtaactcggtagacagaaagaaggaatagtaaagtgactaaagcattatatgcttacaaacatattttcctttttcatttatgcttgagaacccactttgacatgcttaca

SEQ ID NO: 33622 - DNA, 143 bp, Oryza sativa
  Clone ID: uC-osflM202043d04a1
gggacagcaaaaagcttgggaactttgaaactcccccacacaatacggggggttagagggcccaacaaagggccttaaatccagaagcgaacggaaagcccacctgggaaaacaaaaaaaggggggccaaaggccactaattt

SEQ ID NO: 33623 - DNA, 169 bp, Oryza sativa
  Clone ID: uC-osflM202043d06a1
gacagacaaacttattcttattattctcgaaataaccgtcacacaacaaaaatgagaacgaatttgtccagaaatgcactcaattacaacatcatccttgcagttacagcatacaagaagggaactttactgaactataccacggtttgcttcatccaccggggttttt

SEQ ID NO: 33624 - DNA, 368 bp, Oryza sativa
  Clone ID: uC-osflM202043d07a1
cgggggcccaccaaagtatatcggtggggggaccgccaaaatttcaggggggaaaaaagttgggaaactagcaaacatcatcagggtgggggcagcccccattggaaactacccgcccaaaaaagaattccgaaccaaaaaaagccccggttaattaacgggcaggggcaagctgggggaaaaacatccctgggacccccggaaaggggggctgaattggaatttccttgggggccatcctttaaagattttaaacccacccccttaggttctaatcgggggggaaataatccgggcgcatttccagccccttggtggccccccccaaaaaaacccgggaatacctggggaggggggcatttgggggc

SEQ ID NO: 33625 - DNA, 213 bp, Oryza sativa
  Clone ID: uC-osflM202043d08a1
agggagcacttattcattatagtgctttcatgctgctttaccacagcaaaacgtttaacacaccatcaaaccagacttaaggatacacattccaggggaataggacacaatgaaacgggacacgaccaaggaccagaccagacaaccatatcttcattgggggagacaaataggcagacttgtgaaccctagaacacttttagctacatggct

SEQ ID NO: 33626 - DNA, 271 bp, Oryza sativa
  Clone ID: uC-osflM202043d09a1
gcaactgaaattactgagagtttttttttataatatggagcgcaagaactgcaaaatttccatttgaagacaacataaagactgggggccatattaaacatgtttttaacatcactcccaaaaattgagtttagtctcataaaagcccaggccagcggcacgattccaacataggactatagtacaggagcacagcgtgggagaattatcgaatgctgcaataacttattattccggggactataaacttttgacttttgattccaagcag

SEQ ID NO: 33627 - DNA, 116 bp, Oryza sativa
  Clone ID: uC-osflM202043d10a1
ttttttttttcgaagaatgattggtccatattttattttggatcgggctgcaaaagccaaataagtccccccttgacatttacatcaagtacacaaccaaaagaaaacgtgcgagc

SEQ ID NO: 33628 - DNA, 85 bp, Oryza sativa
  Clone ID: uC-osflM202043d11a1
gttgttcgccctgctcctctgccatggctgctgccgcggcaaggtgggccccggtcgtcggcctattgggcctcctgctggttcc

SEQ ID NO: 33629 - DNA, 239 bp, Oryza sativa
  Clone ID: uC-osflM202043d12a1
ttttgttttatgttttatctcgtgttcctgaatggttatccctttcctttaaattttctggagggaatttggtttttattgctacaaagtccgcatttggcctaaaacgtcctataaaccccactagggggaagcacttgaattgtggggggggctccccccccttgtgaaaaaatttttcacaaaaaaaaaaaaactttttctttctttttgggccaaacataaaatttttttttttt

SEQ ID NO: 33630 - DNA, 220 bp, Oryza sativa
  Clone ID: uC-osflM202043e01a1
agtctcacgcacaattagagaatgaatatagcatgaaaacattgtgggcaaaaacaaatgaccccattgtaacaggggcagttcgatgggagagcaaaggccattatagggctggcgggtatatgctccagaaccctagcttaaaaattgatagaggattctggtgaaaaaaatatttgctctggaaatatatgtcgctttggatgcaggcatagcttca

SEQ ID NO: 33631 - DNA, 355 bp, Oryza sativa
  Clone ID: uC-osflM202043e02a1
ggccaggaaagggtatttactaaggcgaaaccgggagggtctcaaatacatcactttgaacaacataccacatacatgctcatgttttccttacaagggatgcataaaagaggaatgcaactttgcagccacctggatccttttttagacagaagatcattacaacccagttttggattgaaagcttaagcagaatccaggctgggattagcccctggatttttatttaagaggaaagcttaaacaatatccaggcatggacctcatttggtctggaacattgaccctggtggcttgacagggaaccaagggaattccccatcttgaaagacacccatttctacgggcagcaaat

SEQ ID NO: 33632 - DNA, 168 bp, Oryza sativa
  Clone ID: uC-osflM202043e03a1
gtgtaacctcatctttcgggtggcttaggataatcactagggagaactatgcattcacatgaagccagtacctgggcctgatgcccacattttttatcggaatacacctgccggctaacgctaacggagggaaggtaaaaaaataggtctacgccggcaacccatata

SEQ ID NO: 33633 - DNA, 73 bp, Oryza sativa
  Clone ID: uC-osflM202043e04a1
tttttggtttttttttttatttttttttttcttttttttttttggggttaaaaaaagggatcaaaagaaacac

SEQ ID NO: 33634 - DNA, 489 bp, Oryza sativa
  Clone ID: uC-osflM202043e05a1
gggatccaagggggaggcctttttcaccggttttaacctacctttgtggctttatttgtaacaaggtccccaagattaaatttcccgggtttttttttactaggagcccggggccctttttctaaaaaaaagaaggatgggattcttttggggattttttgaaaggaaccaagtcaaaaaaaaacaattttttaggggggccccccccttgggaaaaataaaaaaaccccggatccccgggggggggttttttggggggggttttttaaaatttggcccaaaaggggcccccttttttaaatttttacaccccccaaaaaaaagcgggggggtttattattattatttatattggggggggggttattattttttcctcccaataatacccccccacccacctttttttttttttggaggaaaaaaaaaataccccctctttggagtctcgtttcaaaaaaaaaaaaaatttttttttttttttaaaaa

SEQ ID NO: 33635 - DNA, 139 bp, Oryza sativa
  Clone ID: uC-osflM202043e06a1
ggaatgtaagttactctgattgatacagtctgaatatgatgctaagagttatatactgatattcttacaaggttgctactcaactagctgcctttttataaagcactgcatctgtggaattgaaaagcccattttcttc

SEQ ID NO: 33636 - DNA, 297 bp, Oryza sativa
  Clone ID: uC-osflM202043e07a1
ataaaacacaatgctgccatccatggactagtcccaactttttaacaaccctaacagaacaaccatttgctggggaccaacatacacttttttcaccacacaaaccaggacaagttttaaacagagacaaacaacattgtcagcaattagctagctcttcttcttctctcctttagattcggggaaccaacttttaagccaaacctttcagcacatgggtgaatacaaataaataccccaggaaaacccccccaaaacaaccaagccccaaggataccttggataagaaggtaaaaa

SEQ ID NO: 33637 - DNA, 170 bp, Oryza sativa
  Clone ID: uC-osflM202043e08a1
tttgggtgtaagagcgcaacgccattattatgatggatatggacattaaactggcagttagcgtagctcggctgttttccggacgtggagttaacgcccaaattatattcggaaattacctactgacatttccgggccgagacaaatagaccctcaagttaaatttgcct

SEQ ID NO: 33638 - DNA, 316 bp, Oryza sativa
  Clone ID: uC-osflM202043e09a1
ggacgcgaaatcactgagtgtatttagttaaaaaaatggggggcaaaaacgaatgaccccattgtcacaaggccagttagatgggagagcaaactccattttagtgctggagtggttatgctacacaagcctagcttaaaaatttatcgattatttggtttaaaaaaaatatttttggatatataagggcatgcatgcagagcatgcagcaacacagatgtaggatataatatatatgtgtattaatatatattgacttatgaatccaggcagtgtacttatttcacattttggagctttgcacgcacgaagaatt

SEQ ID NO: 33639 - DNA, 195 bp, Oryza sativa
  Clone ID: uC-osflM202043e12a1
aaagggaagactcgtcttcctgaatggcctttcttcccctaaaaatgtacagcaaattttggagtttctattggtacactggctccatatgctagaaaatggagcataaatagacacaaaaaattagagaacattacaggtacaacacaatgtggcataccttcacagcgaaagaaattccatccctatgggtgc

SEQ ID NO: 33640 - DNA, 80 bp, Oryza sativa
  Clone ID: uC-osflM202043f02a1
ctcctttttttttttttttattgtgtacaaacaggatttggccgggaaagaacaacaactaggggggatttgtgaaggag

SEQ ID NO: 33641 - DNA, 290 bp, Oryza sativa
  Clone ID: uC-osflM202043f03a1
atacaggacaaaatcatcttgcaagtgacatacaacgattattacggagctatatacaatctgtataaggataactctgggcgagatgccccctttttggttaggacacagctttgggcccaaagataactgtggccaactttgaacagggtctactactgcgtgcatataacatgtgccagccggaagaagctagccgaagataattcacatcacattactatttggatgcatcccgtgcaaaggatgaggtgtatagtgtattggttcccgaagaaggaatacgacag

SEQ ID NO: 33642 - DNA, 406 bp, Oryza sativa
  Clone ID: uC-osflM202043f04a1
gcccccttggaagattcttaaaataattggaggcaattgcctcacattcccaggcaggagcttttcccagggattaccgggcccaacaaaaaagcgggaaaaacggatgagcgtcgcttaaggccaagttagggctgaaatatttgggctcaaatgaggaccaaagggggatgcttttacttggatattagagcatccctcccaggtccaacaccaatgtaggggactggaacaccaccaagctcttttatcctctcgacataacgccgggcagctaggggaagttcactggaaccccggacagacgaaaatgtcactttgccccccaggaaacacctaaaatttgacccggccttgctccagaggatcaagatcccctgggaaggaatgaagcttctgcccaaaa

SEQ ID NO: 33643 - DNA, 253 bp, Oryza sativa
  Clone ID: uC-osflM202043f05a1
gcaaaattacaagcacaaatagtacttaacaaagtagctcaacttgtacaataaaccacgatgtggggcgaagcaatgcaccattatcattagtgctttcagcatatttacgacatcatacacaataaatattacagcagagatggccatcttactgctttgggacttgagagtagggcacgggtggatcgctaactcataggatcccttcatttatctagattctagacaacatattgaaaatcaaccaaac

SEQ ID NO: 33644 - DNA, 180 bp, Oryza sativa
  Clone ID: uC-osflM202043f07a1
ttttgttttttatgaacaacagggggcctttacaaaaaacaacaccggatgggggaaaaaactaaaactagaaaaatattttttctaacaagggcaaaaaaaagaaattgtcgggggaccccgggatggacaaccccctcagggataatttaactcgcttcaaaaaaaatgggccccttc

SEQ ID NO: 33645 - DNA, 280 bp, Oryza sativa
  Clone ID: uC-osflM202043f09a1
ctagggcaactaatatatacgggtattaccatttagcagccaaattacatcattttggcaaaatatccgacaacagcgtgacgagcacgctggcacctacggatacaaaaggtacatgtggctggtatccagattccaccccgctatgtgccacaaaaaggtaggaggagaataagaggggagaagaaaaattatcccgcgaaaaaagaaaacccccatgttgctggcgtaagatgatgagccattaaagggggttggagctttttattggggctggatc

SEQ ID NO: 33646 - DNA, 113 bp, Oryza sativa
  Clone ID: uC-osflM202043f10a1
ttttggtttttttttttttttttatttttttttttttttttttgaggcaatggaagatgcaaaaaaaaattgcggaccatcagttttcccctcggggaggaaccctctttcaa

SEQ ID NO: 33647 - DNA, 462 bp, Oryza sativa
  Clone ID: uC-osflM202043f11a1
aaggatggaatcgagtagcaatactttcaccccaaaatacagtttagcgacaatatcttagaaaagccgcttgctttgccgccatggctggcaagctgagcagagcagctaacacaaagaacacgagatcactataaaccaaacggcaacgaacgaagaaaatacagggtcttttttgtctgaagatacacgaagcgggtcggtttcttttatttttaggctcctctcctcctcgatgatgggtgtatggcaatggcaatggcgatgggatcttggcttagttgatgggaaggggctcgccgttccactccttgaggcagtcgagcatggggtcgatgagcttgccctggctgatgccgaggaacaccttgttgcactcctcgccgggggacttgagcttttcgccggtgaggaatacgcagccgagcttcttgcggacgaagcggtagagcgggaacgacc

SEQ ID NO: 33648 - DNA, 437 bp, Oryza sativa
  Clone ID: uC-osflM202043g01a1
aacatacgcaacatagatcttattaatccatcaagttccagtcacagcagtagataagaggcatagagcagctaagcccatagtaattacacgcagtttacctggcaaggtaaccgctttttaagaggcgcgcacgcgcacttaacacatatctccgcgacaaatataccagtcgcacaacaccacacacagttcataagcaagcaggccctgagactgtagcagcagccccggcggccggcgctagccttacaccttggcacattatttacgcatatacacacatagttaggttatagatagggatggctcaagagcacacgatcttcactgggctttcttctccctagcgatgaggtccatcacaagccgcttgatgctttctccgttcttttcgagcatctccttgtttatctcagggtcctcaaagcccattt

SEQ ID NO: 33649 - DNA, 354 bp, Oryza sativa
  Clone ID: uC-osflM202043g02a1
accaagtaggcactctaataatctggtagttcagagattacacatatggcgctcccaatcacgaaatacaccaaataaagcggcaggggagatatactagggtagagatatacatgaacattctgatacactcatacttgatacttgagcatatgacaacatataaccgtacgctcatagtggtacagaaatcattagactagctggattcaggtggttgaatagctcatatgagcagtgcaacattcttgcttcactttggcgcagatcctttcgccaacatggaccatcggggcttaacggcccttgggctgcctcttccttctagaggggtgcggccatgcctgaactatg

SEQ ID NO: 33650 - DNA, 508 bp, Oryza sativa
  Clone ID: uC-osflM202043g03a1
agacgatagcaagatcttttgagctatgggggatacgtttattacaaaacatgtctgattatttttagatgaagtacaatatatgtaggtaatgagggatttctttaagccctttttgctagaagtcggcggtgaaactcttctagggcccagattgggaacaagttcctgtagtttgtgtaattgaagaagagggaggaattgaagctcccaagaatttcttgttgtggaaattctcctgtctccagctgcatgttgattaattctttggccgcacggtataatggtgctggatctaattcaacctgtccagcatatattaagcccaacattccccacgcagggtgaactacatgaggcctcccactgtcaatatactcctcaacttgacaaccgaggtaatcctctccccatccaccagtacttagctgctttgacagcaagaagttgcatgcctttctaatagacaaactgtttttgaatgttcttcctgccgcaaccagtcctt

SEQ ID NO: 33651 - DNA, 488 bp, Oryza sativa
  Clone ID: uC-osflM202043g04a1
aagaaaatacagattctggattaattaactagcatatttaaatttaaaacgtaactgtttgagcaaataccacgaaatgttcaggcgctaagatacggcaataccgatacatccagcatagcaaaaatggcgaagagcacagagtcagataaagctatagagaactagggctccaggagatgggggccgaatgacaaccatggcgcttagtcgacctcctccatcttgctctcgccggcgtcgtcctccagcggcggcatgtcggcgtcagcctcagcagactcgtcctcgtcgatgctcaggccgagcttgagcatccggtggatcctggtgccgaaggtgttggggtcctcaaggctgaagccggaggtcaggagggcagtctcgaagagcagcatcaccaggtccttcacagacttgtcgttcttgtcagcatcggcacgcttgcggagctcgtccatgatggaattctccgggttgatctccat

SEQ ID NO: 33652 - DNA, 100 bp, Oryza sativa
  Clone ID: uC-osflM202043g05a1
ggaggtcggagctgaccaagggaggaggtcgagcaggaggaacagcatgtcgtccgacattgacagcctggttgagggggaggacggcggccaggagact

SEQ ID NO: 33653 - DNA, 76 bp, Oryza sativa
  Clone ID: uC-osflM202043g06a1
gccagcaagataattgttgcgacttgcgagaagtaagccgcaaattatggcataaacttgaaagcatatacccatg

SEQ ID NO: 33654 - DNA, 440 bp, Oryza sativa
  Clone ID: uC-osflM202043g07a1
gcagaacaagaatatgcactagacagtaatgattttgcatacagggttttcctttatatactttacactaggtaatacaaaaaagtaacagtgtgtattgacaatttacatcacatatataaaacaaatgaagcaacggaatcattactagacagacacaacgaaagcacaatcctggaattctctcttttccttggacagaaactattgtgctctcaagacataaacttgaacaaagcaaagaatacattggatcccatcatcagagaagaacagctgtcttgccgcaagtaatcaataactcaactctgtttcagattgagttcccaggcctagagaacaacctgctgaagagaaacacaaaaccaagcctaagatcagtcattttggaaaaatctctgcaccaaaataacaaaaaaaaaacccggttccaggttttt

SEQ ID NO: 33655 - DNA, 441 bp, Oryza sativa
  Clone ID: uC-osflM202043g08a1
cctattgggccattttaaaaaccgggcaggaacctttattctttatggactagaagagctggggattctaaaagaagcatagcgccgtgaaaaactccacagataatgccaaaccttggccagaggctttagcttatgttcagtcgtttgacttgtgaaaacgcccaggatttccaaactacaggggcaaatccatttaatttaacattaagactcgtctaaacaacaacctggcacaattcacaaacagcaggcttgtgtacaagacggtgtacacggctaattttattggggggttcgttcccaccattggagtgctgtaatacacgcgaacaagcagaaacattcggcaacaatttcttcagggaaatggcggcctatttagagatcaacccgagcgagcgttatttggaagagggagttttttttagacaggcacag

SEQ ID NO: 33656 - DNA, 364 bp, Oryza sativa
  Clone ID: uC-osflM202043g09a1
atcgctcatccatacttgctggtatcatttgacaaatcgacgtacaaaactgttttggaaaggtacatattcacaatctagataaatttagaatctggccttatagggtactccgtgaggggaatttagatggggagaaaagaaaaagggaacaagctacgattatatacatttcatctgccgcccccgtttatttgagttcaatgtataaaggaacaagttgaatgtatggactgaaaaatagtttcagggctcaatctgttaattgtatcccctcagaagaaattgacctgccggatgggtgttgcgaacgaacggttctcaaacagatttggttgtaagggggacaaaccgaatggagaac

SEQ ID NO: 33657 - DNA, 515 bp, Oryza sativa
  Clone ID: uC-osflM202043g10a1
tatcatgtccaggataatggccttgatggcgacagtgtcgaacagcagcacttctccggcgccggcgccctcctccacctcgctcacgtccagcagcacgtccacgaagtcccggtgatcaacgttctcatcgccgtcgccgtcgccgtcgccgccgtccggctggctgaggcggcggcgctcgcggtggtccgcgatgacacgctccagcaagccgtcgagctccgccgatatgcgcgccgccttggcgtcgaggcccatcagcttgtccacccacgccagccacggcacgaactcccccaccgtcgccgtcccgagaagcgcctcgaagttggcgaacagctccctcagcttctcgccgccctcgtcgccgtcgaggccatacgcgccgtcgccgaacgcggcgcgcgagatgacgccgttggcgtaggacatgagcaggtcgctcaggttcacggtctcgccgccaccgcgaacgccgcaacggcgcccgacgcggtcgaggagcgcggcga

SEQ ID NO: 33658 - DNA, 352 bp, Oryza sativa
  Clone ID: uC-osflM202043g11a1
ggccaaaacaaaagggccaaacagggggttaaaaatggaaaaacccttttccccaaaattttttttaaattgggggaaaccccttattacaacaaacaaggggaatccccaaggcccacccctaaaaaggggcaagggggggcccgtttttcccatggggggggggggtttttgttgggcggactaaatttgaagggggggggtggttgcccggaacacggacggaactttgaatttaaaaatttttaaaaaggggggggctgggctttgcaagactagggggtcctagacccccaccaaggggggggcggggacaaaggggggcggggtgttaaaaaaactggggaagggc

SEQ ID NO: 33659 - DNA, 456 bp, Oryza sativa
  Clone ID: uC-osflM202043g12a1
gaattaaagccgctgctccaatttaccatacgcagcatttgattacaggaataccaaaaaactactaccgatgacaggcattaattattaaaaagcacaggttcagattattgcgacaaaagtttttgatacccgtaagattggacgcttgatagccaaaccacacttagaaccctaaatatgcatacggaggatgtccaatcggatcttcagccaccaccagaggccgatcagtacttgtagtccttgacgtgaaggctttcagaggcaccctcgccgagcacagcatcaccctggtatgtaccaagggtagcctcagagttggccttgcacctggtgatgaaggccttctgcgccttcaccacgttctccgtgttgccgccccaggccttgagcgtgctctgctggagagcacggccgaaggagaaggacagagcccacggcttcttggtgctg

SEQ ID NO: 33660 - DNA, 298 bp, Oryza sativa
  Clone ID: uC-osflM202043h01a1
gttgatacaaattgcatttgccaaacataactttacacaaactttttacatcaacatgcgtttcacttatcacatgtgaacaaatgcctccgatagttagctgtaacattcaaggaaattcacaagactcgatgggtactactacactactacccatgacaaaactggagtggtaatgttttaaggtggtaggcttttatgcattttttgcctttagtagaatccgacaccgcgaagcatattgcctgctacttagaacaatgaggtccctcctgaggggaggcgacctgggggtttc

SEQ ID NO: 33661 - DNA, 188 bp, Oryza sativa
  Clone ID: uC-osflM202043h02a1
aaataattcacaacacctttttttattgatcagggtaaaaacctgcacaaaaatacacccttccgggacagaaattacctttttttcaaaacttgtacattaaaaaacgggggccacacaaattccaacatttattcgggacacgtccgttcatttactggaccgggtacacaaacccaaactttttt

SEQ ID NO: 33662 - DNA, 264 bp, Oryza sativa
  Clone ID: uC-osflM202043h03a1
ggaaggcaaaggaaattttactccattacatattaccaccaatagccaacattttttgagaatcctgcttaaggtagtggactcggcgcaccacaaggagaggggactgccaagtgttaactagcaccattgcgggctcgtaagtaaaaaaccatggatcatggcacggaaaataaaagctcagaagccagcagttcaaaagctccaccggttttgcaaaactaagtataactccaacggaaggaacaggattgcaggatagcc

SEQ ID NO: 33663 - DNA, 377 bp, Oryza sativa
  Clone ID: uC-osflM202043h04a1
gtaagaaacacatgatccaaatttattacacaaatgatatatgggccagattagtttcacctgtttgcacaaaactgtacatcccgcaaactcgcacagtgaatgttttgaatgtgatacttgagcacaatacagacagacgattagcagcatgggggccatactaattaaggtcttgggtctcaccagataatagtagaatacagctggcctttcagaattttttcctggggaagaagcccttattatgcccagcaacaggttcagagatgagggcgttgccgttggatgtttcagtctcatcacccttgccgaagcagtattcaggtgcctgccattctgcgtcctccagcacagcaccctcctcaaagctcatc

SEQ ID NO: 33664 - DNA, 417 bp, Oryza sativa
  Clone ID: uC-osflM202043h05a1
attataaaatgacttgtattatattcccaacattaaagtttgatattcggatacattttgctcactgtggcagacaaagcagaccacctagagcccttttattcagaatatatgcaagataataaagaacattggtcatagcatatactagtactatatgaatagtctggctggctgcttcacaaagtaacagagggaacgctactggagttttgagtattctttaatcttcagggcgcttccctcatcagcagctcctcatcttcttaccctctgtgccatctatctcctcgacagcatcgtcttcccagtagagagcctccattttaccagctttctccgtgttttcatcagcaaagcaatgcagaacagatcggggcgacccgggggcgattttagcagtagcagtgaagcttt

SEQ ID NO: 33665 - DNA, 487 bp, Oryza sativa
  Clone ID: uC-osflM202043h06a1
agaggacaaatacacagtacaaaattttataggttacctaggtactccgtagacaacaagattgtactaacaagctaaaatactactaatacatatatgcaggaatctaatgtacatgtatcgaaatatatgtggactcaaattggtcggataattttaatcaaaagatcttgtaactggcagttagggggaggacaatgatagagtagcctttgtcgttcagctaagcagcatgaaaagaatatctcacattgaaagggacgtgtgaattagcagatactttggtccagtatttcatttgacaaaaaaaaaaaatcaggtattattttacatcgctggctgccaattcttgccttagacgcatgtacgaaaatgatgtcttaatgtatgaattggccaaaactgagtttttttaagcaaaagaacaaattgacatccaagtttacctcgacaatgatacccaaagatccacacccatgaagaaatt

SEQ ID NO: 33666 - DNA, 359 bp, Oryza sativa
  Clone ID: uC-osflM202043h07a1
ggaaacatgaaccatgccaaaacatggagcttatatagtacgtacatatgggttcacaccgaacattggcgtgctttagtaatccaaccaaactgcccccaagtctgaacatcaccttgtgctgaacaaaaaaatcggacagggtcgatcggtacacagcctctttattttatccatctctacttacgcttgttcaaatctgtttgatcagccgcgaatctgtactatacatgcccactgatccaccggaaattgcagtttctaatgcctcaagaaaatgaagcaaagtgttcgatcgcggccggggtcatgggagcttaggcttacaaggggaccttttgcatctagcggccgagggc

SEQ ID NO: 33667 - DNA, 189 bp, Oryza sativa
  Clone ID: uC-osflM202043h08a1
tttttggttttatatatttttttttttttttttttatttttccacctaaagagaaaatttactgagaatttttttataggaaaggaacaggccgcaccaaaaaaataaaggcccccgcaagcgtaaaccacccccaatagggggctggtacgtaaaaaaaaaggggaataaaccaaccccaagaaaaat

SEQ ID NO: 33668 - DNA, 343 bp, Oryza sativa
  Clone ID: uC-osflM202043h09a1
gaaggcaaaggaaatttcccgcaaatacttatttatatgttttgacaacatttttcccgacgcatgctcattgtgggagacgcagatgaccacctatagcttttagggcaccctttttatttagaccacgcatacgtcccaagagcagaacacatgcttacaggcgaaaatactaaaagcctgggtgggtgttttacagaataaccacacgacaaccttaacagataaaaatgccacggaatgaaaacaaagcaccgaatcgtcaccagaaggcccatcttacttatcaaacactccatcattgttctccaacgcatcctcttcccaggggagaagatagccc

SEQ ID NO: 33669 - DNA, 350 bp, Oryza sativa
  Clone ID: uC-osflM202043h10a1
atggccgtcgtggttgctgttcgccggacgccgggaacggtgcgtcgcggtgcaggcggtaggtggcgcgcatgaagcgggtgaagtccaccatggagtagccgttgggcgcgcgcgacgggtcgatgctgaagtcggcgtggcatgttaggccgacctggacgtggcggaagcatgtggacgcggcggtcgttgtcgaggtttgatgaggtttgtagtttggagactggccttgaaacactcggtaagaactttgcctgagctcaccacattttggaagttcggaccaccagcaagctttacccttctcccggagtacttgtcttcgccgtcaggaacaagcggcagga

SEQ ID NO: 33670 - DNA, 227 bp, Oryza sativa
  Clone ID: uC-osflM202043h11a1
ttttgtgttttttaccttggactgtcaataaagatgctggccagcatgtaataaaggtaaactcggaaatatgaacctccatgtgtattctgagtgcaagtaccaaatcattttacagttggcagggacatataacatgtgtgaagtaggatcaggaggcgctttagccaatagctaaaatcgttgaacattggctcgatgacaaagggtgagtggattaacgctca

SEQ ID NO: 33671 - DNA, 439 bp, Oryza sativa
  Clone ID: uC-osflM202043h12a1
ggcggtggacagcgtgtgcgtgccgtgcccctccgtgtcgcgcgaccagttgccgtccaccgcgcccgggttgctcaacagcatgtccttgttgaagtacctggcgccgatcagcttcttgttgcaggagacaccgtacttggcggtgtcagagcaggagccctttcagcgcttgggcacctcgccgaccactttctcgtcggtgaagctgttggactccggccacacaccgctgtcgaggttggcgatgatgacgtcctggccgaacctgccgtgcttccagatggagtccgggaggatctggccgtccctcttcatgtccatgaaggcccatgacctcgtcgtgtgcagcttcagcatcgtgctcgccatcaccgtcaccacgttagggtgcctcgcgaactgggttgctacctcctcctccagatgcgccccgaag

SEQ ID NO: 33672 - DNA, 330 bp, Oryza sativa
  Clone ID: uC-osflM202046a02a1
ggattaaacataaattcatccccatttgaaaatgataatttataaaagcgaaagggggcggaaaagctaaaccctggacgccaaccttctccatttcccacaaaggtttttttttcttttttagtttgcccggtttttgaaaatggaaaaaaaaaccgaccacaaaattccaaacccaaaaaaactaaaaaaacccaaccggtaccacaattccattatagcaggtggggttttactagcagcagcagggggggtaatgccgggcccgggggttccccccggaaagcgggggttaagctgtcctggcccaaggggcggaaaaatgggttg

SEQ ID NO: 33673 - DNA, 90 bp, Oryza sativa
  Clone ID: uC-osflM202046a04a1
atgtacctaagttttgggggggtttatacggcctgttttttactgggagggtttatggcgcccgggggttcccccgggagtttacagccc

SEQ ID NO: 33674 - DNA, 419 bp, Oryza sativa
  Clone ID: uC-osflM202046a06a1
acattcaactgacacagctgggcctgaagttcatttccgcctgaacagcataggatacagatcatacacacacccaaacactgaaaagtgctaaccatgctggcagcactagtctttacggaagatgatgatacagatcagatgcatgccttgcgactatgttacaccaccatttacagactacagagttttcctttcccaacaacagctggagatccaaaaatctcctaatgcagcgctgtgaggattgtagatccttccaccttgaaggttgcaccgcaaatttcttcttctttggcaggaactgcggtcaccttgtgctttgggttctcatagcacttcaagccttcaactccaagagcattggaatagaagcagccttgggggaaaggtgccagagacttgccacacgatccttt

SEQ ID NO: 33675 - DNA, 407 bp, Oryza sativa
  Clone ID: uC-osflM202046a08a1
gaatcagtctccaacatacttcaaatcatagaccacaccatacagcaaacatagtataaacattggcatagagagtacagctgatagcagcttggaatattctagcattactttggtagcatccctctacaaaacatagcagacatcaccagctcttcatcttggccatacacattcaacctgacaagaaaaccatatcccattttacaacatatggaatctggacatgaaaatgtatctacaagaaatcaaaatagtaggtagtggggagtgccttacatggtttgctagggacagaccacactgaccagaacatttcgtctcctcagtaggcaccagctgccatgagcagctcatcaaggctccagatgccctcgttgcttgccccgcttgggtgcatcattttg

SEQ ID NO: 33676 - DNA, 484 bp, Oryza sativa
  Clone ID: uC-osflM202046a09a1
ggaattaaagtgcacatatattgaaatattagtccagctaaagataacactccagtaacactagttgagctattacaataatatcagcaaccatccaactaaaactatttcaatgacattttctagccatttgtcatgaccacactgctaaaattagacaaccaacaactaatacatatattctagccatcattccttataacacaaagccaaaatgagtgcacagccatacagaagttcatgtgcacatcacacagacagttcgccaaaaaactactttaacaagctatgcttcacaggttaagcccatctttctcacataagaacttgaacacccaagcatttagtgtagcatcactcgcattgcacaaccaaccacgcttacctttattctccttgtcagacaaatactcaccaacaagaaccctttgatcaggtgtcattgggattgcctctagttttctgccacaagaaattgcaatgt

SEQ ID NO: 33677 - DNA, 270 bp, Oryza sativa
  Clone ID: uC-osflM202046a10a1
aaaaaaaccctccttgaaaatttggaaattggacccgaaacgattcaaaggcagaggaaacacgggtgattccccctcagattccccccaatccaaatcccccgacaaacggcctaaaaaccccccaaatggattaaaaagtaaaacgggtttgagggatcttccccccgggacggactaaacctaaccacaaacaatgggtcccacgggccccagatttttcaaaaccagagggctatgacggatttggtcctcgcaacggaagggaac

SEQ ID NO: 33678 - DNA, 300 bp, Oryza sativa
  Clone ID: uC-osflM202046a11a1
gtcacctagagggatgaataggtatttccaaaaatttcttaaacttacaaacagcttagaactaactggatagtccggtaccactgcagacaatctgactatagagcagtcggatagtccgactgcatcagaacaatccaatcagagcatcgccagagaaaaactataagtgacctggaaaatagaaatagaaatgaaaaaataatggcggtggtggcaggatgtagcgtgggttgatcgtttagaagcacgaaagctccttgaggcagccggtggcagtgcccttggcaattcttgcag

SEQ ID NO: 33679 - DNA, 516 bp, Oryza sativa
  Clone ID: uC-osflM202046b01a1
tttttgagatcacgagtgtgtcactgcacaaaagcctttgcaagtcgatctggaatacgtgaaacaatgttgtacaagaatatatgaacagaaagaatactttgctttttgtccagtatacttgactcggaacatagaatacacaagatttgcaaatgcgcaaatcaatccttccctttgtacttgaaaaaatggccatattttcgaagaccacaaggctcagcggaaggaccattgtatctcttcgagagttcttccttttgtctctggcacccaaaggatgacgaacacgagggtgaaagcactcacgaccatgtaggacacaaaggtccctccagcactccagctaagcatcaagtttgctgtcattgttattccaaaggatgtaagccagttggcgagtgtcgcaaagcttcctgcgagactcttgatactaaccgggaggatctctgacattatgatccatggaatggcacccataccgaaggagaaggcgattacaaaagccacaagagc

SEQ ID NO: 33680 - DNA, 273 bp, Oryza sativa
  Clone ID: uC-osflM202046b02a1
gggcgggaaaattttttccccccccaattaaaacccgagaacccctctttgggggtttacccatgggtttttaaaaaaaaaaaaaaaaaaaaaaaccggttcccccattttggtcaaaaaaatgccccgggggcccctgggtgggggccccaaaacaatggcatgggaaaaacccccttttctcaaaaaagggcccccgggggggggttttccccctggttatggcccccggggaagaaaacccgggggggcccccccgggggggccccgggg

SEQ ID NO: 33681 - DNA, 357 bp, Oryza sativa
  Clone ID: uC-osflM202046b03a1
aaaaggacaaaaaacccctccttttttccccccctaaaaggggggggagggaaaacaccccccccggggggggggattaaaaacaaaaaaagggggcccccggggggaggggaaaaaaaaatgggcgttcttgcccggggcgtccttaattttccggggggggaacccggaaaaggcatttagggaaaaaaaaccgggtaccattgggccaaatgaggccccacgcggaggggggcccctccaaaaaaaaaacccttaaccccccaaaggggtggggcccccgggggggaaaaaagggaattccccgggggggggggggccccggccccggccccttctccatccccttcccaaaaa

SEQ ID NO: 33682 - DNA, 285 bp, Oryza sativa
  Clone ID: uC-osflM202046b04a1
ggctaaagggtattgccatttgccaagctgtacactcattagattatgtcttacaaggatgaataattgaaaatggtgtatttcaaaattcaaaagtacaccaattcttaatgtaccaattctctatgtagtgtaactgaacttgcatgagctttcccagcttgcatgattttgtcgcaaagggaaatgccttttgctccagaatgaaaaaaacatagcaggagtctaatctaacgcaaatggaaagttgagcacacgatctgcactggctgttaaaaaccaccg

SEQ ID NO: 33683 - DNA, 281 bp, Oryza sativa
  Clone ID: uC-osflM202046b05a1
gaaaaaaaacatacccagattgactccaaatgggggccagtttttgggccaatccggggtcaaattctgaaaaaggattcacccaaaaacatgggtaactaggggctaggaaacaaaaggggcaacgttaaacccaaaccaaacctttgttacccttgctaattaacggttttctcccaaaaaaaccctcttttaaaaaaaatgggatgggcaaaaaagggattttcccaaaaaaaaggggcccaacaggggccaaaacaggcccaatttgacaggctttt

SEQ ID NO: 33684 - DNA, 456 bp, Oryza sativa
  unsure (1)..(456): unsure at all n locations
  Clone ID: uC-osflM202046b06a1
ccgctcccaaacgctggaacccttttgggggcccgcccttnnttttttttggggatcgatcgaggcatgcctcttaaaaaagattataaccattggcacatgaaacattttaaagaatgtctgaactcaaaacactgtcgcagtaatggttcaagaacttggagaggcgtcatacagattacacataactcttcaagaatcctattctaattattattggatgggctattctacagaccataaatgccccattggcgtgtgttctattattctgcatagtttccgcagttgataggaaagcaggatgttcatctatagtcgggccttgacttgcttagctggtgcactcagaggaaccccatttgctgctctttctgcaaggtaggaacaaggcttgaagatgtcgctataccgctttggccacaccttcaacttgtcatggatgtactttgcacc

SEQ ID NO: 33685 - DNA, 497 bp, Oryza sativa
  Clone ID: uC-osflM202046b07a1
tttttttttgtactaaatttagatgtatctttcttagttttcatctttaatttgaaatttacattgtgaaacaagaccacattcttcctgaagtattcttcccattcttcaggcatgataagctgaacacaatgctcttggaagcaagagaatacaatttgatgccaatattcagctggagcgttcgaactagaactattgattccaaagaaaaatgacatcttcgtatctatacatgtaatcctctacactgtcattacctattaacatctcgaggttgtgtggtttacctattgaccctacagagttgcctcatcttggtttaagaatcttgtcgtcggcagtccatttttcaggtagaaaggatatccatcccaaaggtagcaatgctgccaaactttgcagcaaaatacacaaagggaagcttgtgtaatccccaccagacaccccaattaaactggacaacccaactccaaatactccgcttactattgctg

SEQ ID NO: 33686 - DNA, 468 bp, Oryza sativa
  Clone ID: uC-osflM202046b08a1
aaataagtctattccataacataacttccagtaaactgtgacaatacatttattgccagcttgtcatgctagcttggttcaaacctcttaccaatacatgcaaatgtatacatatacattcgtactagctaccaaagcttgacatgcggcatgtaatattagctagtatataccctatccaacaatactatattattgggcgagcgagcgatgttgatcgtgtagaactacatgcaaactattaatgggatgtacgtagtcagaccgtgagctcgacctgtttctacatcacttaaatttgggagttttgagggcacccaagcccaccatagttaatgtaagtgccccaactcgcggaactggcggaaccagacatgatattatagcaatagggcagcgatgctatcaagcccacaccattaggcggcatgggatggttggaggaaccaacatccaggattgctctac

SEQ ID NO: 33687 - DNA, 416 bp, Oryza sativa
  Clone ID: uC-osflM202046b09a1
caaatcaaggcctgaatagaggcatggccccagcccacaagttcaattcagttttcaaatcaacaaccctgcatggcgacctgaactgatcccagattcataaccatttcaccatatatcatccctggcttttatacccctcaaaactacaaatgcacacactagtacatcaacccaacaccacaagttagagcaaggattccaagccttacattcaccaattccttcgctttgcactgacattgggtaagcctacgagtcttggtaacgagcactttgagttgcatgccccaagttaactgtttcagcctttgtagggaagctgagaccgtagaatctggttgtcttccagcaacctgtcggactccaggagaagctcccccgactggttttgtagggcgttcacatgggccccc

SEQ ID NO: 33688 - DNA, 426 bp, Oryza sativa
  Clone ID: uC-osflM202046b10a1
aagcaaattgatactcatacattaaaatatgatagctataacatttttatacatgggaataatggtacctcaatctcggctgatagcgaaatcatgccaaataaaaaaaagtgtgtcatggaaataacattggtatgattcctgctaaaagtaatagcatacaaattatgaattctctgataacctgcttggagaattatccatattcaaaccgatacacatgtttcgcatgtcttaccatgttatgtcaggaatacgctgttcaaaaatgcgtatccagcaactaccccacctttgttcagtgaggcagccttggttctcatcaaataaacacactggtcatttataatgaccctgtctttgttccgcaggtaggctccaaaaattccaaattcaaaaaccggattttcccgaatgcatgtgcca

SEQ ID NO: 33689 - DNA, 480 bp, Oryza sativa
  Clone ID: uC-osflM202046b11a1
gatcgatcgagtcatcttacagactaaaaatccattatttttccagtatttacacaactccgttgcagctgagcttgctgccgttacaacgatcggtagccctatccagcaaagcgatccgtaatacgcctacgtcgccatacgttacgtacaccggacacttactgtgagtgcattctactctcgtcgaacacgagcagagaagctgctgattttgctgctcaattcgatccactacacgacggccttcgctggcggtatcacgatcgggctcctcacgacgtgctcgtcggagacccaattgaggttcccctcgacgccggcgacggccggctgccctgcccaccgcacggtcaccgtgaagctctgcttctcgtacgccctggagaagcgcagcaatggcggttgcacggtgaccgcgacgttcttgggcatgtccaccacggcggtgtacacggagttgggctttccgacgttggt

SEQ ID NO: 33690 - DNA, 319 bp, Oryza sativa
  Clone ID: uC-osflM202046b12a1
tttgtggccgccgtccttttttttttttttgcgatgtacaagtggatgcattaattcatcatcttgggtgttcttatattacaaatcaccaccatgcaagtcgccattaaccaccaacccagctttcctaatttaagtagtaatcaacaaaaggatgaccttttcttttttcataccctcccagctcgctcgtcatcacaaaactaaacagcgcgcgcgaacgcacaccaacgcatcgatcccgtttgaattgcgcgcgaaagagcttaaattaagaggatgaggagaaggtgtcgaagatggtggtggggagcgggtc

SEQ ID NO: 33691 - DNA, 350 bp, Oryza sativa
  Clone ID: uC-osflM202046c01a1
cggaaagactctggctggtaattcggaaaaaagattttacaacaagagaaacaggacgaggtcaaaaagtcttttccatggatggccgtgcataatcaaatatcgagcgcttaaaaagaacaaccacagagggcctagtgctccacagaccgaagccataatcatcccccaagatgaaaaaaaatacaatgggacgcaagatctattaaaccgcgagatggagaaacccccttagaaacagttctaatcgggccaaaagtcataaggacccaccagtaattacttacaacctggagtcaaggatttatggatggatatcctacaacggatacaccttgaatctttattac

SEQ ID NO: 33692 - DNA, 291 bp, Oryza sativa
  Clone ID: uC-osflM202046c02a1
aaacagccaaagagatcattgatattttaataagcatcatgcataaaccacgcaggttatcaagtcagttttaagggccagcacaacttttgcacacttgggactttgacccacaaagggcggcagcattacaaggtttgggacaacataatagttattcagtattcactcatgccccaacagaaacatcctgcatggtttcaaaagacccagcataggttacgcaaacattttggctttgggtgctccaacactatgctttagggcccaatagtagaacattttttcttg

SEQ ID NO: 33693 - DNA, 305 bp, Oryza sativa
  Clone ID: uC-osflM202046c03a1
acaccgcaccagccaagccaaaattccctatagatgaaagtttccaatttaacccgtttaataaatccaaggcccgcctaacaaacgaagggaatcctttcccccttccaaaccggggctttaccccacggaattccttttttccacataccccaggcaatcctggcctttcggggcccaaacttgggtgatttccacaagaaggcccccagggggtgttttttccgggggccccctttttcgattagggcgtcccattggtttagctttttcattacaggccccttggggggaaaacttgcaaa

SEQ ID NO: 33694 - DNA, 267 bp, Oryza sativa
  Clone ID: uC-osflM202046c04a1
tttttgttttttttttttttttttttttttttttttaaaagagaactcaattcttccttgaagggcagtaagccaaacaaataggccactgcaaatccttatttggaaaaaaggggaggggaaaaacatcgatcagcagggccgggcctcctgcatggaaatacatgtcctgggttacaaacataaaaggcacaacatgttgacctccaaatgttaaaaattgcatcgctttatgaagaggacttcttggcaatcttctttgccttg

SEQ ID NO: 33695 - DNA, 272 bp, Oryza sativa
  Clone ID: uC-osflM202046c05a1
ccccttggaaaaaattttggccaagacccctaacataattttttaaaaaattttacaaaggctttttattttggggacggggaaataccccttactcctttaaaaggggccagggtgtttaccccccgaaaaacccctttaaaaaaggggggggttttataaaaaccccccggggaaaaaaaagcgtctcctgggacttgggggggtaaaaaaggggaaggcccgggttttcccaataaacactttttatgggaaaaacccccccggggaac

SEQ ID NO: 33696 - DNA, 407 bp, Oryza sativa
  Clone ID: uC-osflM202046c06a1
gggtatgcaaaaggttcattacaattggatttctttacttagcaacaccacataggagatctacaaaaggggggaatttccaacacatcagcaggcacaacaactgaggcacacatatcataatcctatattaccaaagaattaagggaactacgctttggggtatgtacagggctgcagagtagacatcaaaaaattgggtcacaaggccagggccccatttaatcttcccagctccttggtttgctagtttacttgaagaagaacttccaaatttcccggtcagctaactcggttaaaaaggggccaccaaggacaccctcctccttcataaaagcttctgagttgccttgcgccgccttggaaccaaccagttctttttgaaccaatacagtactccgtatggg

SEQ ID NO: 33697 - DNA, 382 bp, Oryza sativa
  Clone ID: uC-osflM202046c07a1
aaaatgtacatcttccactttcacagattctgaatctatacctttgcaagtttaccgcatacattgtcgttgcaagtggacatttttccacaacgttctgtagtttcatcatgtatttacttactacaccaccatgatggtgcactctaccagtctatcactgtatcgtacgtgtgccctcgatcgtaacatatccacacccacaggatcgatattgcttgcaatatcactgtactattaaatacaacgaacaacaagaaataaccaaactaaggtacgtactttgccctcagctttgtgtaaagtactcactatttgccgggtccatgactcatgagctgctgctcctcagtctctgcagcctttccagatgagacttgag

SEQ ID NO: 33698 - DNA, 494 bp, Oryza sativa
  Clone ID: uC-osflM202046c08a1
ataccagaaactataatagatggctgtaaaatcactcgaataataatgtacacatgacccggaattttcgtaactgcactatgaaatatgaataggccattctgtcgcataaataggaatttacagccatgtaatgagtactctgaaaccccaattgctggattacctacacaaccatacaggagaagattacatgcactgggctaattcatgtccttatgatcttatattcacaagaaagtttcagtttctgtatacccatcttcatccttggacagaaaaatatattattgaggccaactaaattgacacaatggaactaatccgtgggcacctcatgcaacaatagggtaggatgcgcaagtagcaataccgcacatgttcttgcccatttccatcttgaagtaaccattgtcaccccagtctgcaccccatgagttcttgatgagccagtatggaacgccattttcgacaccatagccaacggccagaac

SEQ ID NO: 33699 - DNA, 519 bp, Oryza sativa
  Clone ID: uC-osflM202046c09a1
aaagctaatactagtgttgctgcttaatcaaagttccggtagccgtccagtacgaggtacattaataaaacgaacagcagctaaccccgcagaacgtgggatcccaaaatgctgatacaatacacagaacgagaaacctcatcgtgcccctaaatcaaacatataaaagcggcacattttcaaactaaaaccagaaaaaaccctggaggcttagccaagaacaaacattcaagaaacacaactcgcaaaagcttcacatgtcaaactagccgttctcccttcatgggcttactctggctttagagcataacatcgccagtgcaggctcctcacaccaacagcacacaagttctactctgggatcatctgctcattgtccgcgtcaccctcctgttcgatctgaggctgtttaggagctgaggctccaggagcctgcttcttcttgataccgctgacgatgtcgtcgatcctaagaagcatgcaagctgcctcgatagctgtcttgaacgttgtgccttg

SEQ ID NO: 33700 - DNA, 350 bp, Oryza sativa
  Clone ID: uC-osflM202046c10a1
acacggtaaaatccagatcttaaatttcacatttacagacattaccggcatcatcaactcgatcagtacaccatcttaagattaagatcgacctagttgattaattaactagtttataatcaccacaaaataaccttttaacttaaattactttctcctccccctcttttacacactactacacccctttcaaaactatgctactgatcgatcgatccacgcagccatggctggcgccgccgccgccgccgcgctacgtggttcgccggcggcgagacggcggcggtcacggcatgaagagcttatcgccgaacttgcagcgccacaccttcgggtagtactcccactgg

SEQ ID NO: 33701 - DNA, 331 bp, Oryza sativa
  Clone ID: uC-osflM202046c11a1
cccagccacaaatccaaacacttggtccttcctatcagaagatcagaatgaacaggttttcaaattcatctcccaactggacgataatttacacgtacatttaacacatttttccacccttttaaaactcctcccttttttttcccgggtaagattaaaattaacttggggccagccagcgtcgccgggggcgagatgtttacaggctgggcgtcctttcgggggcgccggaaatgacggggagcaggttgttgccgaaggggccgctgaggggcttggagaggttctcgacggggccctcgccggggacgcatgtctggttgaaaaaccc

SEQ ID NO: 33702 - DNA, 360 bp, Oryza sativa
  unsure (1)..(360): unsure at all n locations
  Clone ID: uC-osflM202046c12a1
gcggccgcaccttttttntttttttttttttataaatttcggacttggaaagcggaactcatatttttgagaaaattaacataaatgagcttgaagcacattaatggacggttggactaataaatgaagctaactggcgctgtgcaaatgacaaccatcagattccgtgttaacgcataacaccatagcattcttgctcaaacttgcagacatgctcccgatctccatatggttatcaaaagcctcgctgtggtcgctcaggttccacattcactcgaagtggggggccattcatttgctgttcatcaagggctgaattagattgatggagctcctgcttggaggccatggaaacaaaac

SEQ ID NO: 33703 - DNA, 385 bp, Oryza sativa
  Clone ID: uC-osflM202046d01a1
aataaaaacctgtgtgatcatgtaccacacgttataatacctatagatttttacaacttttataaaacccgagtgagagataacactacacgaaaaacaaacaacgcaatgggcagaacttcgatttcctgttctttttaacttccattattctctttcttcagatcagatcctaggaggcttggactaacataagaacaatcaacaaactgtactcctacaatgctaattctcattgctagcatagaccaaaatgaagaaaacccagtaactcaactttctagaaagtctgcatcttcaaactaccatctttcctcattttcatatcagcatctggttttgagcttcagttggggcctaatgaccatttgcttccaaacggaac

SEQ ID NO: 33704 - DNA, 448 bp, Oryza sativa
  Clone ID: uC-osflM202046d02a1
tttttggtttttttttttttttttttttttttttttttttttttttttttttttttttttttttttttttttaggcaacaacaacagaccattttttattttcagccccggtttatctttaccgggggggggggccccccttacaaaaaccaaaagggcctggaccaaagctacgggggccacggggcacactggggattcagctttcaaacaagcaagcaaaagccacccttcttaacggggtggctagttgcagaagggggggggggataaaacacccaaacccgaagcagctcaattgggcggggggggtttagcccaaaagcaaaaaaccttgggtgggggccccacccagggggggggcctccggttttttttatttagctaaccacctttgaaaaggttcgcttgattttttttatttgggaaaaaattaggggagcttttt

SEQ ID NO: 33705 - DNA, 322 bp, Oryza sativa
  Clone ID: uC-osflM202046d03a1
gcaacacatttaacttgttcagtgttcaagctaacgttgaacctggtacaagtacaacatgctggcacgcatgtccacatctagcgggtcgagggctcaagccgaatacaacacacggtatggtgcatttcatcataatttaaagtacttagcatcactttgaacaaggttttggggggcacatggatattcgaaaccttcttaaggggtccgcaaaagacttgcgcagcataatactttgcagacctatggttatcaacagcaacatgccactaggcacctttttgctcatgtctttagcacctttgtgagcattctgaat

SEQ ID NO: 33706 - DNA, 450 bp, Oryza sativa
  Clone ID: uC-osflM202046d04a1
aggcaaagctattaacaattattattattgtacaacaaaacatatgctgacagcctgatcatgaacccagtagactggtgcatgctccacaggcaaattatagaaaaatgtcaagaatagtactcttcaggtttcaataggacagatcacgctgcctccatgtttgcagcagcgcctacatcgccaatcatccttcaggctgtagcacttgcttaaattatagcagtaacatgttctacaattgtcacacgatttcttcaatatacatcacgttgtctcctggaaagattgagatcgagatagagctgctggattcgcctgcaggactcgtgcagcaccggatatctgctccctgctttcaggtttcgactggaatgatctgaacatgctacggtcaccaggttcaatgccagggttgtccagattgagctctttgagcttcgttaggat

SEQ ID NO: 33707 - DNA, 406 bp, Oryza sativa
  Clone ID: uC-osflM202046d06a1
gcatgaatgatgattgaataatgatggtgtcaccattacagagtaattacatcctgcgtcaaaaatcaggtggtgtaaaattagacaacactgcttatctacctgttagtggcaaactaaaaaaaggtaacagctgtctactctcttgttatgcacatcaaaatacagcatcagctgatgcaggctataagagacggctaagctcaggtttggtgactactgtactatggcttgcataagttcgtcgtatttacgatcgagtaaccagtttgatgttcttcgctaacaacagcaatgtgatcaataatgcgccccggctttctttctttcttgccatgataaatttggctccgattcccctgcagatgttgtatgatggatgcctatcaactttgccactgctaca

SEQ ID NO: 33708 - DNA, 415 bp, Oryza sativa
  Clone ID: uC-osflM202046d07a1
gatgatgttctcaattaatctatcaacggcattctgattaaacatagtatgccaaaataaacatgtttatatatcaactcattccaacattatgcaaactaaacaaacaccaacgatcttggggatctgatcagtattgtttctctatatttcccccattttggagaattaaaaaaaacttcacaaaatggttaaattaagcaaactgctagatatatataggagatcaaagccctaggggtttattttcaccagagactaagtcaatacccgaaccaccacattagcttgagccaagcctagcgcaaggttcgttcttgacttgatccctctgcaactcaccccatttaatttgctcatctatgcaaatatactccacacactatatttaacttaattttaatcctatcctcgc

SEQ ID NO: 33709 - DNA, 500 bp, Oryza sativa
  Clone ID: uC-osflM202046d08a1
gggcgccgcgggcgcccttgccctgcacccggcgccgcgcgacgtagccgcgcacccacggggtgacgtcctcgctgaccttgatcatggcgaagaagaggaggcggtagatgaagatcatgctgaagagcacggcgaggtccagccacttggatcggctcacgtcgatctggaacacgttctccaggatgtactcgccggggatcttggggagctcgtcgtcctggttgtcgaacaccaggcccttcaggtcgttctggtactgaccctgcaatgcccagtagtggaagctgatgtatgacatgggatacctccagaatggctttgggatgtcatggggaagcctgaagtatcctgaaaccagcatgaatatcccctgaattcctgcaccgatgatgatgcccatgaggaagttggggatgacactggcaatggccatcatcaagctctcgacgacggtgacgcttgcctagaggcagaggacgaagaaaggtagtgcg

SEQ ID NO: 33710 - DNA, 499 bp, Oryza sativa
  unsure (1)..(499): unsure at all n locations
  Clone ID: uC-osflM202046d09a1
gaatatgaaagtaggatcaaatgataattttaatgtcaaaatatacactctctacaagtataaaactcatttatcttttctacaaaacaatcaagaatggaaagaaatggctttccaggtccttcaaattcaacgagcaggcatgcagtgtgcatatactagatctacactaagcaagagaagtcttagcagtcatgagatacaccatttgcttttttggtatcactgttgtctttggttgccaaaagtggttcagtctccttttctggcatctgtgaaactggcagtggatcatttgttgccttcttcttgccctccttcactgagaagtaggagtacaatcccatcccaaatatggcgatcaaaattcctaatatgttccttgcgttgaaaggatcgtgtaacagaatgtatccaaatgagagaacgagacatgtcttaaggtggcctagcnacctgtatgtaactggagatgttgccccatcacaagaatgtgctg

SEQ ID NO: 33711 - DNA, 405 bp, Oryza sativa
  Clone ID: uC-osflM202046d10a1
agttattgtacttacattcgatagagcagaatatattgacacgataggttttttagttaggcactactacagctgatagcaacatggagacaataccccaagcaaatgcgtgcatacaggcaatcaagcttagagaacattactctctccacgcaacctcctcctgcttataccagaacatttgacagctgagcaatgattattctcttgacctgaaaagcccgataagttggcctcgatcatgtcatctatcttattgctgagttctggaccatctagaagcgccaccaattcaccagcaggctccttgccatcagatgcaggcacattatcctcctctgaactggtatctccatcgaagccgatgaaattccccactagctcagtagattcatctgccttgtt

SEQ ID NO: 33712 - DNA, 434 bp, Oryza sativa
  Clone ID: uC-osflM202046d11a1
gagcaccccaaatgaacaaattgcatttgaacacggcaaaacattgtacaacacttggcatcaggtaccccataggaacaaggccacaagggctaagcaggcgcacagcatttggtatatcattcggcgcgtgcttgtcagatgagctaattacacaggtaagccaatcgggaggttccacctatctaaatttccacgcaaaataatcatgagaagaaaaggagaaagggtttctgcttagcgagcccaaaggcctaaactacacgcataaaattattatccttaggccttcactcattgaccagttttacggacccatcctttataagcttcatgctaaggctgttgaatcttcctctagagtaatgccgggacgcctttttccaatctgtgcccggcttcatcattgctacaaattcgtcatagctaatctt

SEQ ID NO: 33713 - DNA, 457 bp, Oryza sativa
  Clone ID: uC-osflM202046e01a1
ggacacaatgattagggatcacttattcattatagttcttccatgctgctctaccacagcaaaacgtttcagacaccatcaaaccagacttaaggatacacattacaggtaaatagtacacaatgaaacgggacacgaccaaggaccagaccagacaaccatagctccattggggaagacaaataggcagacttgtgaaccctagaacagcagcagctccatggctgaggacttactggccaccacggaggcggagcaccaggtggagtgtggactccttctggatgttgtaatccgcaagggtgcggccatcctcaagctgcttaccagcaaagatcagacgctgctggtccggggggatgccctccttgtcctggatctttcgcttcacgttgtcaatagtgtcggacgactcaaccccaagggtaatggtcttgccagtcagggtctttacgaa

SEQ ID NO: 33714 - DNA, 398 bp, Oryza sativa
  Clone ID: uC-osflM202046e02a1
aaatacaataacaccatttagcaaccaaagcacgactatcaaaattacatgataaaattattattgtcttgaattatgtaaacgatgataacaaatccttttccagctacaaaagaaccagcataacaacaaagaattataaagttgcttaagtaatctctcccttcatctcaaaaagagctatatctagggggcctaggccacagcaacactttcacttaaagggtactttccatcctgcgacacacaagctcccaggatcaatctacttggccttgccgttctcgacagcagcagtcgaggggtttagctcatcccaggcctcgatccaggtgaccatggcatcggcaagcttgacgaagtaggggtcgattttggcgagcttttccctgacctgc

SEQ ID NO: 33715 - DNA, 512 bp, Oryza sativa
  unsure (1)..(512): unsure at all n locations
  Clone ID: uC-osflM202046e03a1
gaacgggaaaccagatcaaattggacagcattacataacagcaaacctcccaagtctctctattgcgtccattacaatgtgcgattttacgaccaaatatgttagcctaacaaagcaagcaaatacaaagcaatttagagctagaatcaatgactgatgcatgtaccaagttataaagaaatagcatcactcgtattacagcaaacaagagcaactctccacctaaatgtacataggagaactgaacccatgggtagactatgtgctcagaggaactttgcaggttgctttattgtggccataaccctggcacctgctgcaccgcactgcccttttaattgcgatgcgtgggtctgccggcttttcctttggcctgccaacccgtcgtcgggttcttattggggttgcatgtgttantggantttgagattgaccacttaatatagcaggaggcagcataacatcgggtatttgatttatcgacatggagtagggcaagcggtagcattctg

SEQ ID NO: 33716 - DNA, 451 bp, Oryza sativa
  Clone ID: uC-osflM202046e04a1
atatgaagtgatgcatcatcaggacctcttccgtgtgcatgtatacatgtacaaactgatacattaattgacattttcgagttagaacggcgtgtagtaataatctttgcacagtatagcatcggaaacgatataacaactttgaacaaaactgcaaataactgatggatgaatgtaaggttaagaatgtaatataatggcacctatgtgaatcatatcggtataaacggtaatgtttagattttgtgtaattttggtttttccttcaagggccaccaaagctgttccttgccgcgtgcaccgcgaagtttggcgcgaagtgcgcagcaggagcaggtggccggtaacccatcgttgctgccgggtcgtagaactcgtgcacaacgtttgcctccttgagaaagctaccaccaccacaccttgatggcctggacgaggagagtgctgtcac

SEQ ID NO: 33717 - DNA, 281 bp, Oryza sativa
  Clone ID: uC-osflM202046e05a1
aatgtaagcctgtggttttattgcatgatttgtcgggtaaaaaaaaattactaattgtacatcacttgacaggcctctctcactgaaagctgaaaccccctaaaccccgaagaaattaacagttgaaacgaatgggtaaataataaactcagacgaggccgacgagcttttcgctgaggtcccagagcttcctggccttctccgggtcgctggcctcctgcgagagctggttctcgaacgacgccgagtccttgttccagctccagtacacgccgggactt

SEQ ID NO: 33718 - DNA, 388 bp, Oryza sativa
  Clone ID: uC-osflM202046e06a1
acacatataatctatttagagaacattatgttacacagtacaaagtaggatacgaggagagaaaaacgcagagaaaacatctgttagtacaatgccatccatcaagatcgtcgtcaatggaagccatgagatggcagcagtatcagaaacagggaagcgacggcggcggccagcacacggcagccaccggcgccggcgctggatctcgccgccgccgccgagctgctgctgtcggtgggcttcgccgccgtcgccgcctcttccggtgggctggcaatggcgacaggcggcaacggcgggtccagcacgtcgcccggctccagcaccggcgccggcggcagcgccggcggcagcgcccccggcgctgccaggtgcaccaagcgcgccg

SEQ ID NO: 33719 - DNA, 408 bp, Oryza sativa
  Clone ID: uC-osflM202046e07a1
aaaaaatgtcatcaatacataaacaatattctgcctttgtgacagcaactccaggtgacaaggggaaacaaaaacaaggcaaaagccatattccacatgtttcagtaattcggaaggctgggctgagcatgcataaactcaggcccaacttcgaacaatcttttcctatcacacccacattcagataaggctaaagatccttctgagatgatcagaaccttcgtcgctttctccttgtagcttcttttgggaacttgaggggagctggaagtgtcattacagaggatttaaatgcaccggccgacgaagatttgcatcccagctggtcataatatgggttaatcatctggcgggtcattttcaggtcttcacatatatccttagggtcggatctgaagtcatcaacgt

SEQ ID NO: 33720 - DNA, 495 bp, Oryza sativa
  Clone ID: uC-osflM202046e08a1
ctggatgaaagtacaactttgccaatattattgtcaataaaactaggtcaaactcaacttacactgacgctggtattcatagaatcttttgctatataatatgccttcatatgttaacagtgatgaacactgtcgccatctcgctccatgtcaaatgggcaccatatcaacgtaaaagatcacatgtaacctttctctcctttcttccagggcgcccatggataaagcacaaaagacttttcagttctcagcgtttgtgctcctcactcgctgattccatacttaccaccattcattcatattccatgacatagaatacaaatgacaagaagtcctacagcaggaatgctaactttcgaatgtaaaatggattgattaagaacaatagttctgacccggaaaacaaaatttgtacatatgatttgacttcgctaacaaaatggattgcgcatctacatcgctttgaatggtgtaatctaatgctctattaaacta

SEQ ID NO: 33721 - DNA, 515 bp, Oryza sativa
  Clone ID: uC-osflM202046e09a1
gatcataaattagccatcactcaggaagcacaagccatgagcacttgttgcctcacttgtactagagtgtctactacagtagtatatagtatacaaaagaggaacttggaatttaaatagtagaaatacaggaggagcatcatctatctggcagtagaaatccccagaacaaatcaccagcatggcctactcttcgcctaaagactctcacttgtactaacaacgatgcacacacgctaggcctggccaggggtactctggattctagtccttactacttattatcctgcctagtgtatcatcgttactgtagttgccttgccagggtgctgcgccatgacacaactccattggcttctctcaaactcctagctcttctgtactcgatctctgcatccgagcatgactgtccacccccaactttcttcctcacttctatgggttttagagatatttcatccctcccctttctgaatggatggcaatctttcaccatcccttcatcctcacacaca

SEQ ID NO: 33722 - DNA, 332 bp, Oryza sativa
  Clone ID: uC-osflM202046e10a1
ggaaagaagaatcatgacgatgttattgcagcataattccaccgataccaaacatttcgtgatgtacctttacaggattggcgttcctttcttttggagtattacaaagaaaatcaaagaattggataatacacacacgtatcaaaaatggggaaaaaatgcgatgtaactgcttttccagttcacaaaaagcccaatcgaatatcgtcacttaagaagtattaataaggatctgtaaatgctactatcatgcttttactggggttaggtatctctcatgaatcttcagggcccctttgcatgccttttttgcatccagacttccagtgata

SEQ ID NO: 33723 - DNA, 456 bp, Oryza sativa
  Clone ID: uC-osflM202046e11a1
aatagaaatagattcaatttagtaatttcttttagattaagtcttagatctcgtttgacctgtgaaagacctcctttgttgaaatgttcccaaaattcctaaaataaaaggaaaaatactttccactgccctaaacaaagggcgggaagcaagacggcgaacatatcctctaaattgatcatcctcaaatcagctattcctggggtggggtattgtctgtccccataaatagaaaactctaggagtaataaattaggagtaaagtattgatataattggaattgcagaagcaaataccaatttactaaaaaaagaagaaagtatctaatctaaaggactcgttttcttttttaggattaaacaaaagggttcgcaaataaaagcgccagtgccaaactagtccataatgtaaaagttcataaagctgactaagcaaaaagaccggattacttgttt

SEQ ID NO: 33724 - DNA, 415 bp, Oryza sativa
  Clone ID: uC-osflM202046e12a1
agatagaaagcataccacatgacacagcactgcattcttaattacgtacacaccacaagactggagaggaaggactacatcatcgtacacacgccatagatgtctcaaaacatctttattcttagcacttatttaactaggatgcatttcttcagtctcaggtcttagatcacaaactcaggaaacacaaagttacagtgacaataactcatcacttgtaactggatcaaactactagcttagcagtactaggcccttccatctccttggtttcgtcaggaggttgcttgcttcacttgccgcagttgcaggggttgcaggtgcagttgtcgccgcacttgcacccgttctctgctcctgctccggcggcgggccggccttaaccccttggatgaccttggaagtgcaacaccca

SEQ ID NO: 33725 - DNA, 397 bp, Oryza sativa
  Clone ID: uC-osflM202046f01a1
tttttgggtttttttttttttttttttttttttttttttttttttttttttttttttttttttttttttttttttttggggcaagcaaaaaatttttttttttatccctttttcaaacatatagaaggggggggggggaacccaaaattggggggggttgggacaatttacaaaaaccggggtttgggaatcgggggaaaaacaaaaaagggcggaagcaagcccccctttttatttccactgaatttttacacatttggaatcccagggaacccggcctttccttccggggtggggggggcccccctgagccacaaaaaaaaaaggggagggggggccaaaaaaccgatcctttccccggttttggaaaagggggggggccattttttgttgccgt

SEQ ID NO: 33726 - DNA, 376 bp, Oryza sativa
  Clone ID: uC-osflM202046f02a1
gcacgggaccgctccaatgcttctactttgaaggattcatgcatgcatacaggccgtacaataagaggaaatctactatatatatgccactaagatcaagtttgcaccggtgggacaacttgccatggacgagtagattctctcttacagtaaacaaccagtttttgcttcgaattagtcattgaattgttcacttttctagagcttagtcaacgtttgcggacataataatatgaagatgaaacctagtgtttgcatgctcaaataatagtatggactaattgttgctgcacaccagctggaattaatttcttttgcagaagagcaagaatatagcaacaagcaagcaggccctcatcttgatactccaaggaat

SEQ ID NO: 33727 - DNA, 462 bp, Oryza sativa
  Clone ID: uC-osflM202046f03a1
gggtagaagaaagattgttattacatatggtacttccacaataatgataactacactgctgcctcgatctcatggcatcctggcacagaaaccgcattaatgcgttctaatggcaaagaaaaatttacaggatgaactgaaatacagattccacgtatgtcccgtcccgcttaagattaacatagtacaacctggcattctttatggagttgttcttttctccgtttccacagttcccttggaggtaaactaaaacatcattaacagtaacaagacagcaggctcagtaaggtcggtatcgccaatcagcccttgatctgctactgctactttcgctgtgaccataaccgtaatcatagtcgataccactgcagaacctgccataagttcgcattgaaccataagccccataaagatccatgggtttcatgtaaccaccaccagagtcacccttagtggtgc

SEQ ID NO: 33728 - DNA, 497 bp, Oryza sativa
  Clone ID: uC-osflM202046f04a1
tgtcaggatcagattttgaaggccttctcgacgctgtcgcggcgcgcgccgacggtcttgtagatgcgcatgaactcgcggaacgtgacggtgcgatactgcggctggccgccgtctccgacgagctccttcgccggtccgacgaggcagtccatcggcggcatcatgaacgtcgccaccgacgtcctcgccaccgccgagttcgtcatcgccctgtgctcgatgctcttcagcactccgttcgtcgcaatctcgaggaggtggccaaagttgacgacgaaggcgtcggggacggggtcgacgttgatccagtcgccattgtaggagacctggaggccgaagacgtcgccctggaggagcagggtgatgaggttgcggtcgcagtgcggcggcaagcccagcgtcaggctcggatccgggcatggagggtagtggttgacgttgatgatgacatcgccggcggtgaggtcgcgctcgaagtagtccggcctgagccc

SEQ ID NO: 33729 - DNA, 361 bp, Oryza sativa
  Clone ID: uC-osflM202046f05a1
aaaggagtaatcatcatcagttgaaaatttattgagatatacagctacagtcgccctatatagtccatgttgttatgtgtaggaaattaaatggagggagggcatgcatggattggaatgaatcaagtaaggtgggggaggtggatgtggagtgggacgccgggcgttgggtggagcagctgagcctccgggagcgtgtcggccagcatgtccttgaaggccttcaccgtaccctcggtggcgacgacggcggtgaggaggcccttggcgtccacgtcgccgttgcttattgggaccacgtaccttgcccgcaacaggctggccagcttcacggcgtccttctgcccggcgacgagggtga

SEQ ID NO: 33730 - DNA, 302 bp, Oryza sativa
  Clone ID: uC-osflM202046f06a1
ggacaaaaatgaaccccaataaataaataattttgatgacaacatatgagtcgcgtccaaaaccctggcacaagcaggaactgatttacaaactcacaaaacaaaaacccaacactagcttatgtcacaatggacctacagagagaatgaacttatgcttgatttaacctatcaacagatgggcaattttctatctgaaacccctacaatggaagcagctgagacctacagatcaataaaagcaactcagcaacaacttttaaaagaactgttggtcttcaacaggatcaatacaaaacatg

SEQ ID NO: 33731 - DNA, 355 bp, Oryza sativa
  Clone ID: uC-osflM202046f07a1
gagaaccaataattcttcaacttgcttacctaagcataggttttaagcacacagggaaacattgataaatgaaacatcaaaattcttctcttcagtgactacagcatagtgttccagcaagttcaaaagttcacaagacatagaaaaaggcagtgcatctaatcctcctcctcgccctcgttctcggcgatgttgaagtaccggagctcgtacacgttgcggtccttgttggatgcaatcacccgtagccagtcacgcacattgtgcttcttcaggtacttcttggtcaagtactttaggtacctcttggagaagggcccgtcggaggtgacggtgaccttggtcttgtcgcggg

SEQ ID NO: 33732 - DNA, 416 bp, Oryza sativa
  Clone ID: uC-osflM202046f08a1
aacccaaacccttttgatttattaattaattaaccctcttgtggaaggataatacttaattacattttcctcgtggatctcttcactaactctcctcctactaccagataaatgcctgcagtgatggttgagacttgagagcttcagaaaagccatcgacaacattcagaggagtaaaaggaaaagacttacctaactgctaaacacttagctactaccactatatgtacaaaaaaagaagctagccccagacaattaatcggcggcggcgactaggaggacgacgacctcatcgtggctcgatgacggtgatggagacgtcgttgacggacaccggcgaggcggtggagtcggtcttggtggtcatgagcggcggtgcgaggaggagcgcccttcggagcctggtgaacatgggc

SEQ ID NO: 33733 - DNA, 433 bp, Oryza sativa
  Clone ID: uC-osflM202046f09a1
attaagaactggatatgcttgacaattaatttgattccagcaaagtacattaattcatccattacaaagagccttctggtatactagctcaaataaaaagtcacacacagcattaggcatgcccattcctacacaatacacactagaggatacaatccaaaactacaagctccaagttatgtgagctatttcctcaagaatattaaaagaaaaaaaaatccatcagagttgtgcgcagacgataaaccggttagcagcagccagacatagtttataccaggctgaggatgcagttagtttcagaaaataataattcaatccagcaacttattattccatctttagtttttacactcaacatcaaccttgtgcagaatcccctgctttgtttcacctgcacgctgtagagtgggttgatcttttaccctccatt

SEQ ID NO: 33734 - DNA, 429 bp, Oryza sativa
  Clone ID: uC-osflM202046f10a1
agcagggaattttttgcctcttattttccagcccagacatcaccaaatcgggcttacataccacctccatgacgccgtccatgaacaaatacatcccaaaaaaacccaaacaattcgccgacgggagacatcactcacacggttacactgaacaacacaagaacaaatctcgattgcaatttgcaagcacgcggtaacgaaccagctcaccctttcgtcggcagctcaaatggctgccggaggcttcatcgccggctcgagcctagccttccagaaccgggcggcctcggcgccgtaacctttcaccaccttgacgacggacaccgggtcggcgatcttgaacacgcagaccttggccacaatgccgccgttttcgccttttacgtacaccggcccggtgccctttttccttttttggtaccatgtacc

SEQ ID NO: 33735 - DNA, 416 bp, Oryza sativa
  Clone ID: uC-osflM202046f11a1
agcaaaaaaaaagggtaaatttttaaaaaccgaaacagattccaggtttcaaaagcaggaaaacaagggaatgccccaagccaaaaaaaagacctgggaattagcaagggaaaaacccggattccacaaaaaccgaagggcaaaaatcaggcccaaaacaaggttaaacccaacagaaaataggggggtttaaacgacccagggcacacagggggcctatgaaaataacggtcaatgcaacgggggccatgggcgtgcccaaaactcccccttgaacgagggccatttctttttggggggagccctgggcaccctggcaccggggggggcctttttttcccagtttttgaagaccccaacagcccccggttgccccatgtcacgcacgggaaaaccacccaaggggggggccccaa

SEQ ID NO: 33736 - DNA, 456 bp, Oryza sativa
  Clone ID: uC-osflM202046f12a1
agaccttccaaaaaaggaagaacaagaacatttatttatttattttccgtatgtgaaatcacgcaggcactgatctacattgcaggccattcttaaccataaaacacaacatcgagaaacaaatatttaagagaaaaagaaaagctagagaaaagcaagctcctctttttctacctactactactactgagaacctatttggcaggacttcaacttacaaatttaacttcaagagttggttctaaagggtagctgtaaaatagtctaaatccaactttacatttctagatcattctgggatagcacttcaatcaacctcactcccattttgagtaaagctgaaaccgtttggttatgctctgaagctctaccaaaaaggctttccaaatactgatacagattcacagttaacggttctactcatgctctcatgagtcatgggcatgctttgcttgc

SEQ ID NO: 33737 - DNA, 288 bp, Oryza sativa
  Clone ID: uC-osflM202046g01a1
ggcgaagcaacacttcgatttagattaagcgcaagaaaattagacacaaaatatgagccatgaccaggcccaaccaaccaccatgatacaaccaagtatagttttaggtttcgacggacataaaaccatacagaatttaaaatttattctcggaagaggcttcatctactcttctctggggcaaaacacaactcccctggatctgcaggcctccatgaggagggctcgtctagttggtggctgtgcatgtgacggatcaggtcgatcacacgggtgctgtatccccat

SEQ ID NO: 33738 - DNA, 277 bp, Oryza sativa
  Clone ID: uC-osflM202046g02a1
cacctgaatacattgtagtacgtatgatctcgtgtgtatgaatttggtataaattcacagtacaaagtagaagaaccaaattcttgaattgattcttgtgtaagaatggagctttgaaaaaagggcggtggttgggagtttttgagacgaacacgtgtcgggcgccgacgtcacgtcgccgagtgcgtggccccgccggcgacggcgagcttttcgccggcgaggagtcaccggccgtcgcggcggagcggcggcttcggggagaggacccagtgct

SEQ ID NO: 33739 - DNA, 390 bp, Oryza sativa
  Clone ID: uC-osflM202046g03a1
agatgtataatcttgaacattttcttccgaaaaggagcaatcacgcaggcaaagtctcaagcttgaatttgaagcctgacaacagcggttagatgaattgcagaaaaggaaaagaagcaaaaacaaatatggtgcgattcttcctgacgcatctctatacaggttcatttttgcaacaaagaatggcagaaatgcctgaggacttcttcaccaatgcttatttctccaggctatcatatcatattagaagaaataatgccgccatcttctcgttgtcagcctatggaagagtagctctcaattccttcctgtctgccccaaatgacttcacaccaaaacccttgacatatacattcgtaaagagctcagaagtatcaggcataggactct

SEQ ID NO: 33740 - DNA, 482 bp, Oryza sativa
  Clone ID: uC-osflM202046g04a1
aacataaaacaaaatgcagcttcatcagtcaaaattcgtgatgtttctgccttgcagtatctgaagccactcacattggctatcgaacatgaaaattttgaaattacaagtctgtttgctgtggagagctgggtcgtctcgcctgtcgtcctggtgtctagctcttctaactagcagcgcgttcctggatactaatacacaaagcacaatctattctattatgcccccttgaccttgcgtgatggtggtcgccggaatatgttgatgagatcatcaagaccccgtgtagtgattactaggaaactgaagagaataattaggtaggagccaatcaccagaaggaacagtaaatcaaaagtaacacttgcaacctgatatacatttagagttgcctttgttgcatcatagaaagtgaacatgccatcaagaacatcgctttgaacgtggacatcagagtgtgctcaatgtcctctttaggtgta

SEQ ID NO: 33741 - DNA, 523 bp, Oryza sativa
  unsure (1)..(523): unsure at all n locations
  Clone ID: uC-osflM202046g05a1
gcctgcagtggcggcgggtgcgggggcgggggcgagcgggggagggaggcgggtgttctccgtggagctacggcccggggagaccaccattgtgtcgtggaggaagatgctcaaggaggctgacctcggagctgccttgccgcccccgccgctggcggcggcggcacagccggcggtcgcccccctccctggaccatctggtgcgacacatcctacagaaaatgactgcgcacaatcaaatcggttcaattcagttattgagaaaattgagcgcctttacatgggcaaaaatagtagtgatgaggaagacttggatgatgcgcctgatgatgatcagtatgacacagaagattcgtttattgatgatgatgaattggatgaatattttgaagttgacaattttgcaaccaagcacaatggttattttgtgaacaaaggaaaattggaacaaattgantttgattcagnacagactgtgaaccacagcaatgaagacgaaaagactcatcaagttcttatattg

SEQ ID NO: 33742 - DNA, 459 bp, Oryza sativa
  Clone ID: uC-osflM202046g06a1
gattgaatagtgcttccatacatttcactatttcagtcgaagttccgcaaagtctcatttttagaacaaaagaattctgaaagattctcaaaggaactgaacgaaatcctataaaaatcttccagtccaaaaaaaaaaatcccatcactctttcaatcggagttgcaatggttcgctcagcacagtaacttgtaagcaagcaaacagaacatcaatagccaagactttagcatacggaaccagtacgcactcctgatacacgcgatagcatacaaacaagcatcaaattttaaggtgcggaggtagctatggtgatgcaactgcgatgatgttcaggcaaacatattagggtaacgatgggcaggggatacgaggtaccattgcccagacagtctctactcctgtatcgcgtcctcttcttcctcgtactcggcctcgtcggggggcgcctgaactgct

SEQ ID NO: 33743 - DNA, 412 bp, Oryza sativa
  Clone ID: uC-osflM202046g08a1
aacaaacaaaacttattgttatagacttgtatagcaaaacaagagttcacagggtagtagtagtacagcagtagtagtagtacacaacataggctcttataacaggctcaggtctgcacaacaactcttgatagcttacaagcttcatcaactttgccgcagattgttttcactcacttgttacttacttagtagaacagttcactatcactgttttctgcttgctaatccttcttggtaggttgtacctccagattgggcaactttaagaactcagacgaaacgcacagttattcgcaagtgtaagtgcagagccatctcatttgcagcagagaacattatgctgctagtaaggacctccaggatatgttcatcaggtttaggtaccagcatgagtagcacacctgaagga

SEQ ID NO: 33744 - DNA, 382 bp, Oryza sativa
  unsure (1)..(382): unsure at all n locations
  Clone ID: uC-osflM202046g09a1
aacagaaatcaacaataggaatatgaattatattctgaatccattacaatcactttgctttgcatagagcaaggctagagccaaggacaaagccagatgatcagaatttcagaagatacatatatgtttcctttgcaataactttttaccttagcatggccattttcagagtcaccatgtgttaacatgccaaaacttctctcaggctctcggcactggtcgtcaatgctactacctttttcctttacattcagaactatgtgacaagtgaacaacatagaagcacgaactaaagaaaaaacactaaaacatggggtatgagagaacatatatgatttggtactntaacggcaagcgcatttcatatatttttgaagagctt

SEQ ID NO: 33745 - DNA, 468 bp, Oryza sativa
  Clone ID: uC-osflM202046g10a1
gtcttcactcgtccggtcggcgcgtggaacccggcggcgccggcgaagggcctcgtcggggcgacgccgccgccgtggtggtagtacggcgcgtagtagcacggcatcggcggcggcattgcgtcggccgccctgtcgcgcagcatgacggcgtgcagcatgtgcaccagctcggcggccttcctccgctcttgctccagctcggcggcggcggctcgggagccggacgccgtcgcttgctgctgctgcagcaggtgcaggggaggcagtatcttgggtccggccgccggcggcggcggcgacggacgcccccattgatgtctgtacagcgacgtggcggacgaacaagacgcgccggcgagatgcttcttcggtagagacgccgccgtcgtcttcccttcgtcaccgtcgtcgtcgcaatcgtcccgcggcttcagcgcggcgagcaccctggcgacgaccacatgc

SEQ ID NO: 33746 - DNA, 379 bp, Oryza sativa
  Clone ID: uC-osflM202046g11a1
cacaaccaatggtttgacatctgtctaacattgcttgatggatccagaatatatggcacgactataccgattgctcgacagcagacagggttaaactaaagctaataatagatcccacataatagtcagccgggcataaatgtatggcacaaaacaccaccagttcgaaaggggtatataccattcgagatttggtatataactttgggtatggcatgaactctctgcttaaaagttggagtttctccaatataatcaagggacgatagatggcatcagttactaagttttaaggtagagagaactattatgacttcgggtgcaccgatggttgatcttgcaattggtttgagttatctggctcgactttagggagcct

SEQ ID NO: 33747 - DNA, 277 bp, Oryza sativa
  Clone ID: uC-osflM202046g12a1
aaccaacaaaaaaggacagaataaacaccatcccattgaattgcaatgtaactttattgagcattttggtagacaataatgttaataagggacagatggagtataggaaaaggataccatagtgacaacatgctggttgcgtatcctgcgcgcgtggaaaaggtcatgaactttcacgctctggaaaaggcgcctgccttgcgactgacaaatttcattgacatgtggacacaggagcaccggctgggtgtgagagctgttattgcgagaagatagc

SEQ ID NO: 33748 - DNA, 209 bp, Oryza sativa
  Clone ID: uC-osflM202046h01a1
tttttgtcagtcaaaagaggtgggattagattaataatctatttgagaaactgccaaagacaattcgggtcagctcagctcatggcatatatacagggaaggaacttacaatgggcaggcgctctctcattactgcagtactacccatagaacactctttccagcactcaattaacacgccctttgctgttcgcgctgcgggcaacagc

SEQ ID NO: 33749 - DNA, 224 bp, Oryza sativa
  Clone ID: uC-osflM202046h02a1
agaatctgttaaaaaaaaaccagaaaagggaaaaaaaaaacatcaaatcaaaaaaaaaaacgaaactgggttgaacaaaaaccacgaaatggaaagggggctaaaaaacgggaataaccgataaataagggataggcaaatagggtgaaaaacccatagggacaaaaaaagggtaaagaaaaaatggggaccccaggaaaaaagggggcccaatgaaaacccgg

SEQ ID NO: 33750 - DNA, 161 bp, Oryza sativa
  Clone ID: uC-osflM202046h03a1
atattaaattttttttttttttttttttgaaaaaccattatcccaaaaagctttttaaaggaagaacagttccccgaggataagaagaaaccatgaccaaataaagggagaccagatattctccaaggcttcgggcggcctgcaaaattgaacaagagggg

SEQ ID NO: 33751 - DNA, 149 bp, Oryza sativa
  Clone ID: uC-osflM202046h04a1
ttttgggtgtttttaaatcaaacacttatcatttcgatgatacataagggcgaaccaaaacgaacattcacaatacacacacttgcatcaagatcaagatggaactccaaacacggtacacggaacgcacacgttacacacggggtccc

SEQ ID NO: 33752 - DNA, 240 bp, Oryza sativa
  Clone ID: uC-osflM202046h05a1
aaaatgggatttcccccttataacacataaatcattgggaaagaaaactctgtccagccaaatgcacgcgtggacaaggacaatgatgcagctacaaaggtagtgaaccggccaccacgagaggtccaggaagtattgcttgacgcatatgcgaggtcatgcccacgcacattggtacgcaccatccaatgatttcctctgggctatcctaatattcctcgcggtccatgaacgatccaa

SEQ ID NO: 33753 - DNA, 434 bp, Oryza sativa
  Clone ID: uC-osflM202046h06a1
aaatcaaactgttgtttatcatagaaaaacttcccggagaatcagatgctcagaattcatagcggtcttcagcatcttacaacttacaagatggcgcagatatacaagcgcaactatcttaaagtaagctgcaggaggaaatggaaccatttttaacaacgggaaaaatataggctatagaaggaaaccatttgaacaaattaatagggaaataaattaggaggatcgtttccgtccgatctcaatagaactggacgtttgatacgtagatggcgtctggcatccagatgaccgggatgacgcctttggcgatgaggctcttgccggactcggtggtgacgcgaatggagaagggtgccttgagtggcgtggcggtgtccatcctccagatggcgccccacgacagcttcatgggcctacacgctggcaatccg

SEQ ID NO: 33754 - DNA, 341 bp, Oryza sativa
  Clone ID: uC-osflM202046h07a1
atcatataaattgttttcccaacatgaaattttaaaagttattaaagacaatggaattgcaccgtatcgtttagcacgggcatattactagtatacatagtgctaaaacgtataacaggcaagcaccaggtatttgacaaagaacatggcatatgcaggaaagtgtagttactttatacctggtatgaaattgtaataatatgctaatcaaatacgttggcacgccatgttctttggcaactgaaattgtaatcatgagtgccctttgggtgctaaagatcatgagaagcagatgggtaactagctaataaaaattttgctcagaaaaagatatgcaatac

SEQ ID NO: 33755 - DNA, 244 bp, Oryza sativa
  Clone ID: uC-osflM202046h08a1
atgagacagatgatttcacccacatcatattacaagtgccttgtaagacaccgaattcgtacctattcgcataaagcagacataggacgagtattcatagggactaaacagagcccgggcaactcccaggtgtgtgccacgggccccagcttacaccggaaggaagagttactcaacgcggggcgtgaactagtacttattagcgcataaaataccgtgcaactccatgagctttgtcaagggg

SEQ ID NO: 33756 - DNA, 203 bp, Oryza sativa
  Clone ID: uC-osflM202046h09a1
tttttggttttttttttttttttttttttcatttgaatttttatgtatttgcttattgatgggaattgaacacaaacccacagaggaaaggcaactggggaaaacccggggggcggacgagggcacaaaacccaacggactacaaagcccaagccggcctacgccggaaagaagaaatgggtacaggggagaatacagaaaga

SEQ ID NO: 33757 - DNA, 260 bp, Oryza sativa
  Clone ID: uC-osflM202046h11a1
aatagcatgaaaagcaagggaaaagcaagccaaaccaagcaaacgtacataaggattaagagcagacaaaacacaagatacactagcaagataaacaaacttgaatgagcagcaagtaacacagggcgcacaaagcgaacatatgagcccgacaagcgcgccaagctagacaagtacggatcatagagcatgaacatggagaaccaggccaaaccttgaacacagtgtacatcgcagggctcacaatgcccgcaatgacc

SEQ ID NO: 33758 - DNA, 132 bp, Oryza sativa
  Clone ID: uC-osflM202046h12a1
tttttttttttttttttttttttttttttttttttttttttttttttttttttttttttttttttttttttttttttttttttttttttttttttttttttttttttttttttttttttttttgtttttttt

SEQ ID NO: 33759 - DNA, 402 bp, Oryza sativa
  Clone ID: uC-osflM202047a02a1
ggaaaccaggtcaaaaacagcattaaaaatggaaaggtaaaggggcaccctaaatggggttaaagcatgagcttatattacattcgacgttttctgtactagggtcggacaacaacacatcactcatggcctaaaactagattatcagtatccttcgaaaaacggtggcggtggcaattggttttttgctgacaatattggcgggaggatgacggccttttgaattggcggcggcggggacatagtcggcggtggcggtggcggcggctaggagacaggcggtggaggaaatgtcttgggcggcggcggcggcaagaaggcaggcggtggaaagaacactggcaatggcggggataccaccggtgcccgtggtggcggggtttgtaccgtgctggtggcggc

SEQ ID NO: 33760 - DNA, 173 bp, Oryza sativa
  Clone ID: uC-osflM202047a03a1
aattagaagtggggaactaaagatcaatgacaaattagggttaaacagacgaagaaacaggaacatgtacaacaaccgggcgctaatgccgaaataatgcatcgagaggattaaagccgaatgcaaaggaaagcaagttgcatgacatcataatcgaaaggactcagcatgac

SEQ ID NO: 33761 - DNA, 384 bp, Oryza sativa
  unsure (1)..(384): unsure at all n locations
  Clone ID: uC-osflM202047a04a1
aaagaaaaatggcattttgcaacacatttaacttgttcagtgttcaagctaacgttgaacctggtacaagtacaacatgctggcacgcatgtccacatctcgcgggtcgagggttcaagccgaatacaacacacggcatgttgcatttcatcataatttaaagtacttagcatcactttgaacaaggttttggtggtcacatgtatattcgcaaccttcttaaggtgtccgcaaaagacgtgcgcagcataatactttgcagacctatggttatcaacagcaacatgccactaggcacctttttgcttatgtctttagcaccttnggagctttgatgcagagactgaccttttgatcatgagtaccactattgtgatttttcag

SEQ ID NO: 33762 - DNA, 390 bp, Oryza sativa
  Clone ID: uC-osflM202047a05a1
accaaaacaatagagcccttcaaaatttgacttggtgttttctgccctacaaaagacttcatcagcttacttttagctcattattaactacataataaactcaaatcaaacataaccttgggaaaaacgtcagctaatatagtagtgtaactcatcgtgtaaaataaaaacgagtgtcttatccttttggtataacatgtagccgccatgctgtttacacgacccaaattacagccatttacctccggattgacctcaagaaaacaaaccttccgcagcagagacggaactgttatccagaacctccatggtgctcaactctcaccgaagaaatttataatgatacatctggcaattagtccaaacaaggttggcaccccagactttaaa

SEQ ID NO: 33763 - DNA, 351 bp, Oryza sativa
  Clone ID: uC-osflM202047a06a1
acagaagggttcttttattactagcatgcaccttgtaatttaggaagattacaacaatatacagcttcctcaactgatcaaaacagatcagatttttagccgactcatatttgagcgtgagttgtccacataggaacataccagaaacctaaactaggtcaaaaaaaaaaaacttagcaccaagccttttgaccataatttcccttgccaaccaaaaacttggtttcatgttgccaggatgattaggcattcccaattatcagcaaaacctcaaggcatattcaagttccttctcatcagcgcagctgtaacccaactgatatgcgcgtgcaaattgtccagaacccataa

SEQ ID NO: 33764 - DNA, 412 bp, Oryza sativa
  Clone ID: uC-osflM202047a07a1
gatggataatactgtcaaatctattattttaacttttatgggccagcttcccactatgtagtctctgactggctcaacacaccaaaatacaagatagggttaagaaaatctcgcatgaaaataaccgcaagtccctgatgaaaaactcacatgaatgttcaacagtacgcgctctactccatttcattttaccaccaaaagcgtagctgtactgagaatcccactagagctactgcacttgcagcatttcagggtcagggcactgtcaagtgtcaactagcaccattgcgacctcgtaagttataaaccctggatcatggaatggagaagaaaagctcaaaagctaacagttttaaggcttaaccgattttgtaaacctatgtataactacaacagaagggtcaggattgca

SEQ ID NO: 33765 - DNA, 379 bp, Oryza sativa
  Clone ID: uC-osflM202047a08a1
aacaaacacatttaacattttttgattttgatcgtttctacacattacattgaactggaaaagataagggaggcccatatttttgcagcaaccagggttacatgaaagccatagagataaactggacggctgtgtaaatctaacaagctctatattcaagggtaagccaaaagtccctgtaccctaggaaaagcgccacaaaaaaaaacatgggtacactcaatagtgtctatggacttgtagtcgggcttttgatccgacgagctcgaggacctccgggatcggattccccagttcatggacatatgcttgatgaaacggcccgacggggggtcggaccctgtatgcgcgcgccggtactctgaggtcgaccctcttg

SEQ ID NO: 33766 - DNA, 449 bp, Oryza sativa
  Clone ID: uC-osflM202047a09a1
acgcaaaaaagttgttattccattcgacgtttagttattccgccatgaacaccacaagcgttttacaacagcaagcaacggacggagccaactcaatgacagacaaaccgcacaagacacgttggccacacggacgccgaccatgacaacacctaaaccgaacaatggcggagggaaaaaaacgatggaaataacacgacagggaccaaggctgcgacaccggagctcagcagctgacacatacatagactacaaatccacaggcatgacacacgcctgatccggctactttgcacttgatggcaactctagcaatggcactgcaatagccttcctctgtgcccaagtgccctctcctatctaaagagactaaccatagatagatgcatggatagatagacgattgttcatgggttggatggatggatggatacttgttacgacgattt

SEQ ID NO: 33767 - DNA, 100 bp, Oryza sativa
  Clone ID: uC-osflM202047a10a1
agcaggcgacattattgaagagctatcgcacgtcgcatgctacgcgtaatcgtaagtcttgggatcttctttttatgtagcggcccgcccttttattttt

SEQ ID NO: 33768 - DNA, 313 bp, Oryza sativa
  Clone ID: uC-osflM202047a11a1
gtcacataaagggatgaataggtattgccaaaaatttcttaaacttacaaacagctaaaaactaactggatagtccggtaccactgcaaacaatctgactatagagcagtcggtatagtccgactgcatcaggaacaattccaatcagagcattcgccagaggaaaaactataaagtgaccatggaaaattagaaataggaacatgaaaaaaaataatgtgtgggtggtggaaggaatgtacacgtgggttgaacggttagaaacacgaaagctccttgaggcatccggtggcagtgcccttggcatttcttg

SEQ ID NO: 33769 - DNA, 198 bp, Oryza sativa
  Clone ID: uC-osflM202047a12a1
tttttgtgttcgggaatgatccaattatttatttgtaactactcaaacgcgtacctaaacactgatgcgtacatgatatcggcttgacatggacagcaagccacacacatggtcaagtttaaggccaacgtatggcggacagtcttgacacgagacgagaacacaattctcaaccctggaaggtgctacacgttcggt

SEQ ID NO: 33770 - DNA, 378 bp, Oryza sativa
  Clone ID: uC-osflM202047b01a1
cacatagacatttaactcatctgaagtatttttgaaactgtacattattgaaaaccaggcattttaaagccatacattgcttggggatacaagaacactaacaatacagatatcgcgagcagctcaattcgaatttgagccggttcgcacagaagccacgcagattcaaccatccaattcattcgagggactggaacctcgaccgctgaccaagaaatcttggttcgctggattccaggaaataatttcccttcacagcatctgggtctcataacatgaagccacgcttccttcataactgatatttgatgacattcctttggagtttgacattaatgcctcctctttcttacggaagaaattcattgcatcgctgta

SEQ ID NO: 33771 - DNA, 317 bp, Oryza sativa
  Clone ID: uC-osflM202047b03a1
ggcaaaaaaacaacaggggaatctcaattaggaatcccaggggggcaggttgtcggaacgggaaaaccggggtaacccaaattggaggtcgattccttaaggcttttgagatacaggaatccgagaaagggttgctacaaaaaaggatgactggacacgacaaaaagaatgggaacgaacggggtaccaggaaggccgcaaaacgattgaggggataccccttcattcccagggggaatttcagcaggggttagaagggggaagaacgcaagatggtaacccgacgatgattgggaaatggcaagggtgttacagcg

SEQ ID NO: 33772 - DNA, 282 bp, Oryza sativa
  Clone ID: uC-osflM202047b04a1
gtctccttccggctcgggatggtgcgggtggtgtcgttcctcgtcgggggcctcaacgtggccgtgctgctgctcgggctctacctcatcgacggcgagctcccaccggggagcggcggcgggctcgcgctcgccgcggcgcccgcgctggcggggatccgcgtgctcgccatgatcggcaccgcgcgcgcgcagcacgccacggcggatgccatcgcgaggcgccacctcgacgaggccgcagtcgtcggatcgccgcttgacgcccgttgcggcgcccac

SEQ ID NO: 33773 - DNA, 343 bp, Oryza sativa
  Clone ID: uC-osflM202047b05a1
agacactaaactggatattgaaatactccaaattaagactgttacaagcctagtttacagcaaggggcacttccaccctcctgctagtgttctcggtcacagcctcataggcaatggaatgccctattgggtttccttcgcttaccaaaatttctctatacaacggtagtagaccatgcatctcagttccagaacctcaatagatgcctagaatcacttgtagctaagcagaacagaattaattacatgcatgaataagcggatgctggtgctgcctgatgggctggtggtggggagcgagcgtaggtggagcaatgcattgtagacttgctcgaaaataggc

SEQ ID NO: 33774 - DNA, 275 bp, Oryza sativa
  Clone ID: uC-osflM202047b06a1
gtgcctaagccccacctatttacatattgaaataatggatgggaaacattactgttaggccgttggatgaattgatactacagatggacttctactaagactgttctgtgattgataagaatgaataggtataacgggcacatggtccaacaggaatggtcagtagaatggcacagctgccttcgatattgagatggcagtcgtctcctattgcaagagcttggatctccagaggggaaataaatgtccattattctgaaatttgacactgggtt

SEQ ID NO: 33775 - DNA, 236 bp, Oryza sativa
  Clone ID: uC-osflM202047b07a1
aagcgctaacttgacgatcttttggatttgcaaccgtgaaaagcatacaaatgcttgctgaaatatatgccaaactaaatatacagagagattacataggaggaacagatgaaaaactaaggaacgtgggggggaaacattgtgacccttttatgatattgacgcatattaaccacaagggaaagaacaaaagaataattgtggagaactaaagtagagtttttcatacgcacttt

SEQ ID NO: 33776 - DNA, 439 bp, Oryza sativa
  Clone ID: uC-osflM202047b08a1
gacaggcgaaaaccatgaggcaaatggcttatttcattgggttcttacattaaccaaatccctagctcactcgtcctcacttattcatttttccacggcaagaaaataatacattttcttccaaaaaagaagataaatatgatacatggtgtgcttgggacaacaatgatggaagcccacatcactagataattcgtgttttttacacaaaaaataatgaatgcattggtggcaaaaatgaaagagaagaagtgggagtccgggatggttttttttcttattacacacgaccctttgcagatcagggggaggcatcacggctataatactggtcaagggttttcgctggtatacggtgaagcagctctcggggaaagatgcgcagtattgaccaggcgaggtcaagcgactggaagatgttgcgtgtggcatatgctcc

SEQ ID NO: 33777 - DNA, 293 bp, Oryza sativa
  Clone ID: uC-osflM202047b09a1
acggtacataaatattccccttcgggcaaattaaacagggaattttttaggtcttgacaaggaaaccgggggaataattttgggatgaaaacgggcaaaaaagaaaagacaaggcccctaaggacgtatttggtcgaaagggggtctgaacaagtattgggggtggtaaagcttttttttgcctgaaaatttccacccccaaaaaggcgaggactccctggacagcaacatggggtttttaaacctttacttgaactggaaaaatttgggggaactcttaacagggttgagtt

SEQ ID NO: 33778 - DNA, 355 bp, Oryza sativa
  Clone ID: uC-osflM202047b10a1
agtagccaatagaacctgcttacctgcatcgacagcaaccgagatagcaacagaaagttcaagcctaattgcactggattagctaaaagattgcgacattaaccacaggttttatacaaaaccaggaggattaaacgtacgccacaacacaaagtaaaagagctaagtagaacatcatcatccacgaaaatgtcgtcacatgcatacatctaaaacaccatttttctgctgccataagcgccccactcttacttattcagttcaggacttcaggcgaaggctacctcttaccttcaggcgcggtgaccttacctactgggtcttcgtcgatttgctttttgacggctgggccttt

SEQ ID NO: 33779 - DNA, 334 bp, Oryza sativa
  Clone ID: uC-osflM202047b11a1
gttcctacgtagaagaaaaccagctgtactttgcaaacaacttaacgagataaaaaaaaagatgaaacgaaaaaaaaccaaagcttgctatgagcctcggaaataattagaaattacaagaagataaatgattgataagttgcagggcgtgcgttgagagaggtgctagcttagttggttttcttggacaaatgatcatcctcggaggaagaagcagcggcgttgtcgtcgtcggcaagggcaggaggagggggagtaaggccctgggggacgatagcggtggcgggctcgacgtgagccagaccggcggggccgatgacctgctcggggagct

SEQ ID NO: 33780 - DNA, 336 bp, Oryza sativa
  Clone ID: uC-osflM202047c01a1
ggaaaaagggaagcattgaccataccgaaggccaggcaaaaaacggtttaccaggagtataattaatgacctttgttttggttacccaaacagggaccctggtccagggagagggggcgggacagcacatgcaaacttggcctcctccttatcccactttaaacctaaagacaccgagcgatgtttttatgacacccaaaaaccgacgtttcacctacttaaaacgaactcctggtgaccgattaatgaaccctccatgcaaatccatacaataccgggggggggcttattaatacccgggcagataaaaagggccaaacgatcgatctaaaatgt

SEQ ID NO: 33781 - DNA, 352 bp, Oryza sativa
  Clone ID: uC-osflM202047c03a1
agctgaaaaggctatattacatacttccatacaaccatagcttatatacaatgctagcaatattacacatccgtcaactaactcattacatataagagagaacatggatagttagctgaaaaggcgacagtacattacttccgtacaaccatagcttctgtagactgctaacgatattacacacccgtcaacttaggcactacaccatcataatagggagatatctgacgatagtagccagactgcccagagagccaaaattttggggacagtttcagcttcctaatccccactggtccataggcattgtctgcaatttaaccagcaattcctaagcttttccctcactggc

SEQ ID NO: 33782 - DNA, 367 bp, Oryza sativa
  Clone ID: uC-osflM202047c04a1
gcactgcacgatgaattattattctttgaagattgaagctaaagcacgcaacgaacaaattacacatgacaaagctggatcactgatgtctttacactatttcagatctgtcacaccataacatacacaacgggaacccgaaaagaattggcatctaatgatcataatccggttacactcaaatcaaaatttctcccttgaagatggaggccggtaaaatcaaatatgctacatctagcaattcctcactaattaccaactgccagaaaatgctgcaggctatatattttctgaagcaaaaaattggaatcatggcttgaatggcgcaaatactaccacttgaattgtgacctccaaatcccaatga

SEQ ID NO: 33783 - DNA, 352 bp, Oryza sativa
  Clone ID: uC-osflM202047c05a1
caaggtataaagaatgtttataatcaccatcccaccaacacatatgcgcggtagaacatcagatcctaggtacaaaaataagaaacacaaagcaaacacacaagcaagccccattgcaagctgaggcccaagcaaaaactgtcttgcccttgtacgtgtatatatatttatctgcagtaaggtgcacaaacacatgatgatgacctctatagtacaatcaatacctgtcaaaatgcactccatctgtcggttccatgcttcgtcgggctagaggtgtctgatgacttgaacggtccagtaccaaaaggatcatcctcatcgaacgaataacctcggctgttgtagtccgtgc

SEQ ID NO: 33784 - DNA, 283 bp, Oryza sativa
  Clone ID: uC-osflM202047c07a1
gacctgaaactctgtgagcccttggacccttttagcagtttgattgatttgtgagtagtacatggtacaatcaccagctgtttaacaagtctcagcatccaagaagaacagagcacataatgtgttttagatgctaagttggtttgatgcatgggctggtgttagtatgcatgtgctgctagggccctcctgctccggctggcttgctgagaagtggctgcagcgcctttaccacgatggtcatgttcggccggaaatctgactcggattggacgcacaacgc

SEQ ID NO: 33785 - DNA, 372 bp, Oryza sativa
  Clone ID: uC-osflM202047c08a1
gaatgaaatcaactacctatgacatatatcatgaaacataacagtaaaaatattatacagccacaaaaaaaaatgcaagttacattttagcattacaatggctgcacgtccgcaacaatagtacactccttaaccaatacaaccaggtctaaactagtcattcaacaacccaaccggaacaatagttcacttatgaactaggcacttattttgtttttttttatagaaaccaacatataaatagttttttaactgccaactacagcctcagatcaatggaattgaagcctccaacatgccgacatagcaatgttacttcgggtcagaacggagtttgtgcggagtaatttctgggacaactctgtagatgtg

SEQ ID NO: 33786 - DNA, 334 bp, Oryza sativa
  Clone ID: uC-osflM202047c11a1
gggcagaattacatcacagttttaaattttcaataaagccactaggttagtagtactaggactccaaagtctccaatagtccaattacatttgtagtgtaatttacatcctgaactaagtaaacatactaatggaaaatgcactgatcctccattaggattcatacatactcctcggatataatgtgcagaaaaggaaatgacacgatgcaatcaggggctcaagagaagtttcatcatcaggtcatcagctttaatttcaacctctttttcttggcgggagccaaacctagatcgttgcacagctgctcattaggttgcagcgtctttggaac

SEQ ID NO: 33787 - DNA, 370 bp, Oryza sativa
  unsure (1)..(370): unsure at all n locations
  Clone ID: uC-osflM202047c12a1
gatcaagagcacacaaaataaattttgtggaaggacaacaggttatatgtcagttaatggaaacaaagcttgcaaagagataaaataaacctaactatatcatataaacagataaccaccagaaaggtgctcccaaaatgtagagtaaactgactacgatacctgatttaggaagagaagaaagaatatccatatcccttataaattaaactaacagctcttagactcatcttggggagcactaccccttgacattttgttgaacttagacatctgcaccactgcatccgccaagacagacggtgccattctttggagatcctcataccctttggttgccgnttcaccctttatttttttgaacatgaca

SEQ ID NO: 33788 - DNA, 54 bp, Oryza sativa
  Clone ID: uC-osflM202047d01a1
catgtgttgtattatttctcattgggttgtttttctttattttctttttttttt

SEQ ID NO: 33789 - DNA, 313 bp, Oryza sativa
  Clone ID: uC-osflM202047d02a1
gggtaattagaaccaaagggaaattaaacaagggcagtaagcagtaagagaaatgggatgaaagcagaggtagattattttaagaagcctggcacgcatgaggagatggagcaggagtacatgatgagatcaccatgatgatagatgacccatccaagcttgctagggatccatccaacattgatcgacacacgcacacactgacaacgacgacgacggttttatttaggcgtcagagcaaaaggcaaggcctgcctacatataaagctgggtaccaatgcaagcaaattaaggcctcgatcaaagctttgat

SEQ ID NO: 33790 - DNA, 316 bp, Oryza sativa
  Clone ID: uC-osflM202047d03a1
agcgctaacttgacgtccttttagatttccaaccggtaaaagcatacagcttcttcctgatatatatgccaaactaattatacagagagattcaaggagaacagataaaaaactaaggaacggggggtgaaacattggacccttttatgattgacgcaattaactacaaggaaagaacaaagaataatggggactaaagtagaattttccatatgttttttttctccccaagcagcttactcgactcttaacctagctaagctttgttgactgaattgacctgtgcgccataaatttttagcattaagctgaacac

SEQ ID NO: 33791 - DNA, 438 bp, Oryza sativa
  Clone ID: uC-osflM202047d04a1
ataccatactcccatggcttctctgttgttcatccatatcatgcaatgagaataatatcagggaggcaattctgcgagcagaatgttccaagagaagcagttcaaaacatttatgaggacaatactaactgaagtttctgaggtgtactgctaaggtagcacaacagtttaacacaagccacgggctcgcagttggagcaaaggagcaacagctagctgtacaaaaagcaagatatattacacattatgttctcacggattcagaaagcctgtcctctgatcaagtccctcatcactctagttcctgtttttaactcctatcaaagtgtcttacgatcaggatgctccaagagaggtagagactggtctactggaagacatttgacgacaccagacagccataattttacttggctgctttttttgcaccttgaaact

SEQ ID NO: 33792 - DNA, 322 bp, Oryza sativa
  Clone ID: uC-osflM202047d06a1
agcagttaatccgagtcttatacaatttatattaatttgggtcttgcagcaagcaagcaaacaagggtatgcaaaagttagccggtgacacaaacaattaagcatgcatgtatgcatccatgtgtagcggatgatcgacacagtaacaaaatagaggacttacgtactaccggaatgcatggaaagccaagccggcggatcaaagtgaggtgttgttacttgctagagactcttgctggagctggacagccaacccaattaaataatgggccccaatccaatggctgccccgtaccttggctatgctttattaattaaaggc

SEQ ID NO: 33793 - DNA, 405 bp, Oryza sativa
  Clone ID: uC-osflM202047d07a1
agacagtaaaaagatgatccaggtttcacaaccgacacataacgacagaagagaaatagaccatcagtagcacgcgagcataggaatgctgaagagaaacacaggcatttgacaaaagggaaaagaaacacggcaacgaaagcaactgtgttagcagaagaacaactagaacaggtaagggcagcggaacatcacatgcggaggacaaaaatttagagcttgtcctcgaaatcggagaggggagccatctgctccttgagaccctccctcttgcggatatccagcaccagggaagaagcctgcgagccagcggcaagaggatcagaggtcatcaggacccaagggacgaacacacactgggggaaggcatggtcagatggcgcagccataaactggcttgagaac

SEQ ID NO: 33794 - DNA, 417 bp, Oryza sativa
  Clone ID: uC-osflM202047d08a1
aaggtgcataaacagtcagtacagccattattaacctcgccagaagttttaggcccatcattatatgccagacaaaccattacctatatgatgagatcagattaaaaagccctaattctcatcgtgctcatttgctcattacatctgcattgcaccatccaagatccatatctgcatatccatagctgatacagctccatcgtgaaaacgtttattcctctacaaggttttgcatgctactactaatgcactatacctttagacattcccaggttacaataccgagtaaacaagctgcctaacaaacattacaatacttgatatgttgtatgatcctgaaggccctagccaagcaattcaagcagactcggcgaacccaatcctgtttttgccaagtcgaagacagtgggtatgcag

SEQ ID NO: 33795 - DNA, 433 bp, Oryza sativa
  Clone ID: uC-osflM202047d09a1
gggtcttaattttacagaaagaaaggatatggacattaacttggaagatcaaaatcaaggaacacacgcggatacatccatatgctctccaaacctcgatctgtctcttaaacacgatgaacacacacaaagagatcgatgatgatcgaattaataatccattagaggcaagcgagctccttgaggcacccggtggacttccccagcgcgtggtcgcagacggccgtggtcttcttgtcgctgccgccgtacagcaccctgacgtcctgcatcgcgacgccgctgcacggcagcttgccggagcagagcagctggacgaccgccggcgtgttggacgacccggtgatgttcctgaaggtgacgtccctgacggacaccttggagtcgcccttgctggtgcagatgctgttggggcagtacttctggtcgatga

SEQ ID NO: 33796 - DNA, 278 bp, Oryza sativa
  Clone ID: uC-osflM202047d10a1
acacaagctgacaagcatttattaagaagcacctgtttaacatagttaatcaacatgcataatagcccttctccacacccatcaccatcctgatcttgtctacctgaacataacaagtttacatggcaacattgcacaaagctgtaggcatttctcacatgagcatatatcccttcctgtactcactccataataagcaacacaagtagcaagcattacattatttttcttctctgctgctctatggtcctactcaaaacttgcaggaagtgcccagc

SEQ ID NO: 33797 - DNA, 293 bp, Oryza sativa
  Clone ID: uC-osflM202047d11a1
catcatcttgggtgttcttatattacaaatcaccaccatgcaagtcgccattaaccaccaacccagctttcctaatttaagtagtaatcaacaaaaggatgacctctcctctctccataccctcccagctcgctcgtcatcacaaaactaaacagcgcgcgcgaacgcacaccaacgcatcgatcccgtttgaattgcgcgcgaaagagcttaaattaagaggatgaggagaaggtgtcgaagatggtggtgtggagcggttcgcttaggtgggtggcccaactgttgagggg

SEQ ID NO: 33798 - DNA, 371 bp, Oryza sativa
  Clone ID: uC-osflM202047d12a1
agccaagagggagaagaggccagcaaatccatctcacccaccggccataaagaaaacaacaaagaaagagcggcatttgagaaagaggagaaactatatataaggaacaatatctccacggaccgatccgaaccgggcgttctcgaaccgacgggtcacacgcatagcgccaccggctccatgggggcatgaacccaaaggcgcactcattagcctacttatcctgggtcatcacaaaagacgggtgaatccaagaagacgatgacggcagcaaaggtggagacaatatgcgaagaagaagaggaagaagatgaagaagacgacgaggggaatggtgtcatcacggtgaccatgtgcgcggtgaaggcgaa

SEQ ID NO: 33799 - DNA, 321 bp, Oryza sativa
  Clone ID: uC-osflM202047e01a1
ccacttgtcatttgcaaagtttctatcaacaaaagggtttaagcatagaagaaggggaaaaaaaacaatacgatatctgcagcatgtgatgtttcgcactatcacccactcgagcgcaaagccaacttgagtttggcagcagtacattagacagtgggttgctttatcgtcaattcagctcttagatgcaacacgccgtctaggaagaagaggctgtcgtcagccatgaacgtcgaccatggtatcgcaaagagattcctgtaaccaaccgtcttcccaccggtgaacgtgtagtttacccttggtcttgctcacaaaact

SEQ ID NO: 33800 - DNA, 408 bp, Oryza sativa
  Clone ID: uC-osflM202047e02a1
ggcgccactattgtagagctatgcacgtcgcatgtcaccgcgtaacgtcaaggcttgggatcactcttagtagcggccccgcgcgtggccggtcggtcggctggctgtccctgacatgcatcttgtgcccccgtgacagccgcttcgtcgcctcgccgccgccgacgccgccgtggttcctgccgcacattgaccctctttagaatcttttgaacttggcgtccatctccttgttgggcgcgtacttgggcaagctcgatggttcgcaggcgtacggttccgtcctgaaatactcggaggcgagggcttcggtggcggtgccacgggcggagggcttgacggagaggagcttggagaggagcgcgaacgcgtcgtcgcccatcatgcccccgaacgtctccctgagcc

SEQ ID NO: 33801 - DNA, 350 bp, Oryza sativa
  Clone ID: uC-osflM202047e03a1
agagaaaacacgacgaatgaaaaaaaacaaaagaaaaggaaactatatagaggacgccctaaaataaaatattttaataaaaaaaataaaaaaactaaaaaaaaattacaaatcaaaaagaaaaaaaagctaaaaaaaatgctcttggaagcaagaaaaaaaaatttgatgcaaaaaataagctggagcgttcgaactaaaacaattgattcaaaaaaaaaatgaaatcttcgaatcaaaaaatgaaaaacttaaaaatggaaaaaccaaaaaaaatctcgaggtaaagtggaaaaaaaaaagacaaaaaaaaaatgacaaaaaattggtaaaaaaaaattgtaatccgg

SEQ ID NO: 33802 - DNA, 337 bp, Oryza sativa
  Clone ID: uC-osflM202047e04a1
tttttatttcttttttttcaaacaaaaaagggtccatatttaaaaggacaaaaggtttccaacatacctaaaagaatccataaaggtcatgggaaacccattaagggcccttcaccctttaaataaaacaacacacaacacacaagaaataaccccggggtttccaaacgggcatatttaagtttttacatgaccagccccacgtggatcaacaaacaaacaaggcacctaaaattgaaggaattgaattgaaaaaaaaaaactggggggggggggggaagctgtttaggagggcatgtctgtctttgaacaaagaaaactaaagggccggggaatt

SEQ ID NO: 33803 - DNA, 308 bp, Oryza sativa
  Clone ID: uC-osflM202047e06a1
ggaaaaatgggcttttattcaggaaattttaccaccggtccaaactccaggattgcgggaatccaaacgagaagatgaaaaaaacccgggacaggtttttaaacgcccccaaaaaaaatttgcggtatttggggaccagggtaatttttcccggggggcccgtgcaaggggccctggggcaggtttttttaaggggggctccgggccttttacaaaagtttccgggacctgcttcggggaccctttttttttttcctggggtggctcctccggttcggggtttttcttttgggggcttcgggacgggg

SEQ ID NO: 33804 - DNA, 439 bp, Oryza sativa
  Clone ID: uC-osflM202047e08a1
gaacgaataaccaggtgctattggcaatagccaagtgaagtattttcctcaaactggccctgggatttacaatcctccctgacgccaacatggtatacaaatagcatgatcacaattttgaacttgcttctcttctaattatacatggcagatgaagaggctttgaaaagccgtgagacgaaacaagtcgcaaatcgcagtgttccttccgtctagcatggctatggttggggattctactttcatggcatgcatatgcaggtcagcacacaagtgggattgtgctgtcttcctcaacgttcgagtacggcaaatctggcagttctgcgcttatggagaacttcagccaccggctttttttcacgtacaccagagccggctgcagcacgaacccaaccagcattgccatgatgctgaccaccataccttgaggaccgag

SEQ ID NO: 33805 - DNA, 417 bp, Oryza sativa
  Clone ID: uC-osflM202047e09a1
gacactaatttcctttccattttatctcccaagaacttgtttagaaccccacacattttgacattcacacgccacaattcagttcaattcccccttgtatgtcataatcagcttcacctcgtggctcagtttgctccggcgtgctcggccttgtcgtccggtgaatccgccgtttttttgtaggtgtaccagctggcgatgacgaggtagacgccgaagttgatgaggctgagcacggcgagcagccagaagaagtagtcgaggtggccgcggttgaggttgtccgggatccacccgacggcgccgttccgggtggtgacatgggtaacgatggtcacgagcagcgtgctgaggtagttgcctagcgcgacggtggtgagcaacacgccgagcacatgctgccatggcgttgagcct

SEQ ID NO: 33806 - DNA, 269 bp, Oryza sativa
  Clone ID: uC-osflM202047e11a1
cgggaagatcagtactactttattaatgccatggccatgcatacatatgggctttaacagatccatgaagaattcctggcccgaaaccgaaaaatacataaaggaaactcactcactctggctgcagagcgaccgtgcgaagtgcgtactcacacgcaattttatttgatcgatcggggccggcacgggggcgcacacgtttacttcgccgcatacgccgacatgatgtcgccgtcgaacggttcctggccgaagcagtccaggttggg

SEQ ID NO: 33807 - DNA, 345 bp, Oryza sativa
  Clone ID: uC-osflM202047e12a1
ggaaaaaagccctcatgacgtcataatgccattattgattctttcattgacaaagttgtaacatttctactttgaggattacaaaaaggttattaatctggctttactagagctagccttaatagctactccctccatttcacaatgtaagtcattctagcattttccacattcgtattgatgctaatgaatttagacatatatatctatctagaatcattagcattaatatgaatgtaatgacttacattgggaaacggaggaagtagctcctcataacattgatcaaaatttatacatttgaaaattattttggttcccttcacagaagctttacacaaagaa

SEQ ID NO: 33808 - DNA, 279 bp, Oryza sativa
  Clone ID: uC-osflM202047f01a1
ttttggtgtttaggccttttgtttgccactagaacacggcgaagaatatataaaccaaagggatcaagaaaggagtagggcaaacaattgaagcacgatacctgaggcatgcgatgaaggggcctatcggcgactaaaacgccaagccaaattgggcttggaagtggttcgtaaaacagcgggtggggtgaccgggaatagatgtgtaagaggcacaaggctcgaaaaggcaagaaggggctgagggcagagcatggacgaggaccatggtatcgaaaa

SEQ ID NO: 33809 - DNA, 371 bp, Oryza sativa
  Clone ID: uC-osflM202047f02a1
agaatggcttgccccagtacatgaggatgacctggaggagggggtcgctgccgccgacggcgaggccgcctaggccgtcggagccggcggggtcgaggctggaggcggcggggttgatgggcccgacggtggcgaaggtgcgctcccactcgatgatcttgggctggttctgcacctggcacgcgaactccggagacagcacctgcttcgagcagctcgagtcggcgtgcagccatggcatagagtccgacggccggtcgtagtacgccgacaggtccgggaacgccggccccggaaccaccggtttctggtccagcggggagctaaccgccgggggtacccccaccatcgggtttcttttgacgccgacg

SEQ ID NO: 33810 - DNA, 299 bp, Oryza sativa
  Clone ID: uC-osflM202047f03a1
ggcagattacattacattattattattcattaaggacacctcaaaatacatcgtttgtcgtgttaatcatattacaaaattctatctgaacaaaacaccttaagtacatagtcatattgtacaaattacaaaagtcgatctgctctcgataactttacgagattgattgattcgttcattcacaaggcaattaacacctcaaattttacaacaacaacatcatgagcaatagctgaaactttgaaagcagaactccagtctgtctgtataaccagcagcagcaggcagcaaagcaaact

SEQ ID NO: 33811 - DNA, 248 bp, Oryza sativa
  Clone ID: uC-osflM202047f04a1
gccgaattgatttacacacaaccacgaaggggagtaattagtaatttgatcaatgaaatgtctaggcagttcttgccgccgatcgatgcaatccgctgtttcacctcgcgctaaaacgacttcccctccgtaattaattaaatcacatcgcctgatcgcccaccgcaaacgcggcgtggcgccgtttcactgcacacgaagcaaggcacctccaaaaaagaaaaaaaaaccgagagaaaagaaaaaga

SEQ ID NO: 33812 - DNA, 323 bp, Oryza sativa
  Clone ID: uC-osflM202047f05a1
aaccaaaacataggagggttcatttcttcttctcaaagtagtgtagcatctttccttttttcaccattacataagcttaagcaataacagataacaaatcctcctcctcctttagggaaaatattcaaacacaatacccttataaggacttattattaggaaagtagcgtgcatgggcataaatggcagcggggggcaggttaagaatcacaatgctgagcagcgaggaaacaaaacaccataatgggacagagcaaaagccttcgaaagggagcttttaggcagaaggttttccccacttggggcttaccacctccagggaa

SEQ ID NO: 33813 - DNA, 55 bp, Oryza sativa
  Clone ID: uC-osflM202047f08a1
ttttgtttttttttttttttttctttttttctttttttttatttttattaaattt

SEQ ID NO: 33814 - DNA, 163 bp, Oryza sativa
  Clone ID: uC-osflM202047f09a1
ggtctactaaatttcttatgactgcaaggataatggtcaccagaagcctgcagcttcggactgaagttatgaagcataagtcagaaagaacggtccaaaacagaaaaaaaagaggtgatgccaacagaagtgaaaataaaaaggctaaacaagtaagtgggta

SEQ ID NO: 33815 - DNA, 126 bp, Oryza sativa
  Clone ID: uC-osflM202047f10a1
cctcatcctttttattcattcctcccaaagagacggatccacggaaggtttcttgccctcatcaggcaagccgaggacacacacacggtggcagtggaagcgcctatgaacaagacgctaaatcaa

SEQ ID NO: 33816 - DNA, 146 bp, Oryza sativa
  Clone ID: uC-osflM202047f11a1
gttaagaacaaacatggcacaagcatagacatgcaataaccaataatccataccgaggcaacaacaaatggcccaaaatatgactatcacctatgatcaagttaacatacggcactacaaagaaaaggaatggacgcactctaaag

SEQ ID NO: 33817 - DNA, 210 bp, Oryza sativa
  Clone ID: uC-osflM202047f12a1
gaattctgacggaaaaaccaagcacaaggcaacagagtctcgatggtgttacattctgactaggaggggtacattacacacgaaattcaagacagcaaacaggtctggaggtttttacttgactgataggaagatactactcaaaggacacctgggcttgagtaaatcaactgcattgatctgagaaaccatgttctgtctttcctggga

SEQ ID NO: 33818 - DNA, 343 bp, Oryza sativa
  Clone ID: uC-osflM202047g01a1
gcgggttcaatataaaaccatgtcgatagatagatagaatagagcactacatatttttctcagcactagtgatgttcattcaaacattaaaccacaggtaggtctgaaaaggcttaaattactagcaaaaagtatagtcctgccaaacagcgcaagagctttagcacaatgacatgggatcaccactcaacggttggccttggcaacacgctcgatctcatccttcttcttgatggcatagctgttggatgagcccttggcggcattaataagctcgtcagcaaggcactcagcaatggtcttgatgttcctgaaggcgctctccctggcaccagtggtgagg

SEQ ID NO: 33819 - DNA, 355 bp, Oryza sativa
  Clone ID: uC-osflM202047g02a1
aggttaaaccctttttactaattaatgccttagcacaaggttaaacggtacagaaagacagccaatgacggcacaacctggactagtatggatatcgcggcaatgcgaaggagacgaaaacgagtgagtcaacccacacgggaagataacattgattttggatttgccaaaggttacactagccgacggggtttttttctctgtagtagatcagatcaacggatgccccattttttgagcaacctaaccagggccctcgtgaacctttttaacttcgactttgaattgggcaaccgcgacatcttggcggtgcctgggtcgctggtttcttcttggtggtgctgctgatgctgct

SEQ ID NO: 33820 - DNA, 314 bp, Oryza sativa
  Clone ID: uC-osflM202047g03a1
aaggtaagcctgcggttttattgcatgatttgtcgggttaaaaaaaattactaattgtacatcacttgacaggcctctttcactgaaagctgaaaccccctaaaccccgaagaaattaacagttgaaacgaatgggtaaattataaactcagacgaggccgacgagcttttcgccttggacccagagcttcctggccttattccgggctcgctggccttctgcgagcagctggtttcttgaacgaacgccaagaccttgattccagcttcagtacacgccggacttgggcaggctcgggtcgtccaccacctgt

SEQ ID NO: 33821 - DNA, 87 bp, Oryza sativa
  Clone ID: uC-osflM202047g04a1
tttttgtggagactctaaactgggtattgaaatactccaaattaagactgttacaagcctagattacagcaaggggcacttgcaccc

SEQ ID NO: 33822 - DNA, 99 bp, Oryza sativa
  Clone ID: uC-osflM202047g05a1
gagacattcctaatgtagacaatggggtaattaaaaactactgaaaaagaacggaggaacatctcgataacagaattcttggcctgcggctacttcttc

SEQ ID NO: 33823 - DNA, 455 bp, Oryza sativa
  Clone ID: uC-osflM202047g06a1
attgtcgacgaatttatcagatatgctctagatacatatcttgtgtgtatatagccggagctttgttttcacatatcctcacccaacgataattgtagtactcttacaataaaaccggtcggagagggagggaagagattattacatatgtgttaagagcagaggccattgagatggtacataaccaaactgtaaaataaaaatatatagcatattatatattgatatatcatcaacatagcccaaaacaaagctgcatactattattataggcagcaatccaccagcgcgatgcttgatcttagcttagttgccaccagactcctcgcaacctgggggcttgtaggcgatgaagctaatcaactgcacctgcctgacgttgtcgaagccgatgatacggacaaaggcatcagggtaggcctttttggcctcctgagctccttgagcacctgggt

SEQ ID NO: 33824 - DNA, 247 bp, Oryza sativa
  Clone ID: uC-osflM202047g07a1
aaagggggggaaccccaaaaaaggggaacctgcccatgttaaaaaacctattttgccaaaaaaaaaaccgggccccccgggggtgcccccaaaaaaaacggggaaaaactttggctaagggttaatttattttcaaaaaaaattttgcccccaaaagaatttcttaaactttgggcctaaaaggagggcccccccattttttcccccaaaattttttcccctcaaaaaaggcccgggggggggggtt

SEQ ID NO: 33825 - DNA, 335 bp, Oryza sativa
  Clone ID: uC-osflM202047g09a1
aaggatctcagtatttttccaaaagggatgcaatccagtctcaccgactggggatcaaaatactggggttttccagcagttaaagcaaaagctgtgaaagacttttcctgctaaacctaagatatggaacccataaaccataagaacaaaatataacaagataattgtctcggggattgcactctgtaaaaccagagcgacccagatgtctaaatatttttatttaactgtagaatgaattgtccgattgtctaatgttacgacagctccactcctttaaagaggttgcttccttcaggtaggaaataagatcagcacgctctgggctcttcaac

SEQ ID NO: 33826 - DNA, 326 bp, Oryza sativa
  Clone ID: uC-osflM202047g10a1
atcggttaaatgctagtatttatttcctttttttctcacctttacaaacctgcaaactcatttctgcaaagaaaaaaaaatgaaaatatgttgcagagtattcctaatttcctactacacccttcgtccaaaaaaaataaatctagcactagatgggacgtattctagtacaataaatttagacagagatattccagattcggtatactataatatggcatatccaaatatgtttagtttcgttgtattatgatggggactatgttggttttttatttgacggagggtgtatgatacccgaaagaagagaaaacacactgaatttc

SEQ ID NO: 33827 - DNA, 415 bp, Oryza sativa
  Clone ID: uC-osflM202047g11a1
atggcgccgttcaggcgctgggcggacctgccgccggacctgctgtgccgcgtcggcgacaggctggacctcaagtgctacgccagcgcgcgcggggcgtgcacggcgtggcggtcggcgctgtcgccggcgtcgccggcgctcctcgtgctgtccgacgccaggatgtgcccctcggcggcgtccctcccgacgcggcggtgcttcgacctcgcggcgatactgacggggggcagatgcgtcgggtccagcaacgggtggctcgtcctgtccatcgcgctctacggcgggcagagcgcgttcgtgctcttcaaccccatcaccaccacggagatcgtcctcccgcccctgatctacgagagcaggtgggtctccaaggtcgtgttcgcgccagccccgccaggacgactacgcc

SEQ ID NO: 33828 - DNA, 249 bp, Oryza sativa
  Clone ID: uC-osflM202047g12a1
cagagaaagcatgttaagctgaaacatggggcattggaacagagtctgaacagtatggctcgaccacatttactgatttacagccaccaagaaactcaaaaagaaaaacgtattgctgcacttgcaggaagccactgaggctattattcagctaagggaatgtcccaaaatttgcaactacacaattgtgccccaaattgcaatccattccagaaacgcttatgacagacccatgactttgccagtggc

SEQ ID NO: 33829 - DNA, 305 bp, Oryza sativa
  Clone ID: uC-osflM202047h01a1
gggatgaagggcattgattattcaatccaagaacttaaacacaaatgggtctatacatatatggtttctgtttactttcacccatattgggactaaattgagacggtttacaggttacaatcacatatgacttgtgtaaaaacattaaactgacgccaaccgatgtatcttcggacttcttttctgaatccctattatgatcatcagggacttaagtggttagcttgcggagagcagtggtggtcttggagcctgactgcctttccagatgcttggagatgtaattttcaggattcatgagcttg

SEQ ID NO: 33830 - DNA, 297 bp, Oryza sativa
  Clone ID: uC-osflM202047h02a1
ggggctaaaatatactggctctggaacatgggaatttacataattttcgtagtcctccaaaattccccccaaaatttctcagccttcaaaggaggtgttaattggtaaagcttggggcatataaatctccagttcactatatgtaagcaaaatattctctactagactactgcagcaaattacacatttcaaagcttggaggcacccatcgacagggcctgctgcttaagctcccgccgaaggatctttcctgcggcgatttggtttgcagtgacaaaagccattgcgaccttttgt

SEQ ID NO: 33831 - DNA, 396 bp, Oryza sativa
  Clone ID: uC-osflM202047h04a1
tttttgtttatttacttaattgttttttttatttctttatattaatactgttacatgcctattttacagtaaggggcacattcacccttcttttaatgtaccaagaaacaggcggggaggaaaaggaaagaaaaaaagggtctccttcgcggaccaaaactaaaaaatacaccggggggtggccatgcaacccaaaatcagcaccccccccgctgcctggaagaacctcaagcaaggggaccaaaataaaaaacatggggggggaagcgggagctggcaccccccgatggcctggcacagaggagctagcctaagtatagggagggcaccgcacacctgttcgaaaaaaggatggaggtgcatggcgcacaccgaaagggttggtttttttcggca

SEQ ID NO: 33832 - DNA, 280 bp, Oryza sativa
  Clone ID: uC-osflM202047h05a1
ggataattcacccagacggcgatccatggattgggagacagactgcaggaaggcagatttattaccaacattgtcttcaacctaacggatgatcttctcgatgacagactccttggcgagcgtctccctgcacaagatgctccccatgtcgaacgcggggaggcccgagttgacgccctttttgagcagcatggtggtgacgcgcaagacgcgcttggacttggctggcatttcccacccatggaaccttagaatggggatgtcctccttcgggtccagt

SEQ ID NO: 33833 - DNA, 276 bp, Oryza sativa
  Clone ID: uC-osflM202047h06a1
caaggagagtgaagcattactgtatggcatggaccgggagtccatacaaaggcaggcatattgagaaataaacctgaaagtagaccaacgtacgaacttgattatagctggacctgtatcgggggtacatcagtgctatttactggcccaatgactgtagggcgaagcctttttgttgcacttttagtggctcaatgactcaaaggggaagcctttcttggcagtgaaattcggggcttggccttggagtccaccttagggaatttcaaggtcttg

SEQ ID NO: 33834 - DNA, 314 bp, Oryza sativa
  Clone ID: uC-osflM202047h07a1
agaaccaaaatttaacataattatacccttggggccatggttagaacaataagcttatacagacaggtttgaccaattaaacgaaccaagtttgacaagggaactcaaacaaacaatttgggatgacccaaacatagggcacttttacactggtcgaacacatagggaagtcggtttcaaaaagaaaaccaaccttgcccgcaaaattccaatacattggttgaaaaacgaatcaaacataacttggtactacagaagacaagagccgagcccttgggaaaattagaacccttttctggggacaattgttgggc

SEQ ID NO: 33835 - DNA, 133 bp, Oryza sativa
  Clone ID: uC-osflM202047h08a1
caccactaggagaaaggttccattatgctctgtcccctaaaaccacccaaaatccagcgtactcatgggcatactcacaatttttgagatccacaattttccatggggggaatgaaatagctgggtaaaaaca

SEQ ID NO: 33836 - DNA, 150 bp, Oryza sativa
  Clone ID: uC-osflM202047h09a1
cctactttgcatccttttttttggccgccctttttttttttttttttgcgggttcaatataaaaccatgtcgatagatagatagaatagagcactacatatttttctcagcactagtgatgattatttaaacattaaaccacaggtaggc

SEQ ID NO: 33837 - DNA, 255 bp, Oryza sativa
  Clone ID: uC-osflM202047h10a1
aaacgggggaaattgatgcctgaaggaaagagataaaaaagcacaatgccaaaaatattagggatttatgagccgcgtacattttgccccaaatagccagggttaagcctaaagctaaaacatcctggaagaaacactttgaaaaaaactttaaacaaaaccctagtaaatatttacagggtataggaggaacatgttaaataactaaattgataaaactaaccttgaaaataaaaaaattattcatactaaaac

SEQ ID NO: 33838 - DNA, 327 bp, Oryza sativa
  Clone ID: uC-osflM202047h11a1
gggaaacaagggggctccaatatttttttggaaaaacggcacccagggcggctttttttttcaaggggaacaccccaataaaaaggggggacagagtaccaaccccccacccaatttcaatggacttccccgcaattaaattaaacctgaaaactcccaaaatcaatagaccctacttttttaaggaaaaagagccgggccttggaatgcaaagcatcccgaaaaaacttccttgttttttcattcctgaaaccccagaatgggaaccaagccaagaacccccaaaggtctccctttttaaaggtttaacccgggattttggccaat

SEQ ID NO: 33839 - DNA, 437 bp, Oryza sativa
  Clone ID: uC-osflM202047h12a1
aagcatcactgcatcaaacagcaatatattgacttctaatgtagcagtacttgtacaacttttgagcagcaactgtaatgctgaaatcggatcaagaaatgtgcaagcgaacagcaatatattgacactaatgaacgacaagaacatatctgatgttctcaagttctacatgtatctgaaatataaatcgctaaaaaaaattaaatatactataaatacacttgaccataaggagacgtggttgaaaatccattcaagtacccatctccctagaaatcacttccgaggatgaatgctacaaaccaattttggaaggcggccggccgacatctttcaaatggtaagcaacctgaaatatacgatcaggtagatggaaagagatagcaccgcacaaatgtgctgccagaatagaagtgcccgtgctttcttgacagcat

SEQ ID NO: 33840 - DNA, 536 bp, Oryza sativa
  Clone ID: uC-osflM202048a02a1
attaatttgtaaggttaaaaatatccaaaacaaaggtccctgcaaaaaacaaggcaaaaaaaaaggaaagtaaagtaaaaaacattaaaaaacaaaactggaaagaaaaaccagaaaacggcaaaatggcgaaaaaaaaaaaacaagaaaaaaggaaaaaaggaaaaaggaaaaaaaaacacgacccaaaaaaaaaaaaggaaacctaaaaaaaaagccctttggtaaatccaaaaaaaccccaaggaaaaccttgaaaaaaaaaccccaaaaaattaaaagacccccatcgggggataaatggtaaaaaaaaaaaaaaaaatcggaggaaaaaaaaataaaaaccaaaaactaaaaaattaacagcgaggcaaaaaaaaatttcataaaaaaaaaaatcaaaaacacaaaacctaaaaactccccaaaaaaaaaaaaactccactacacaacggggaaaaaaaaccccataaaaaaaaaacgggttcaaatacacagaaaaacccacgaacaaaaaaaaaaacacgggagaaaaa

SEQ ID NO: 33841 - DNA, 83 bp, Oryza sativa
  Clone ID: uC-osflM202048a03a1
cagcaaatgtcctgcgaatcaccaggcaaaaaaaagggagctagtacaaagcctaaatacacacttggagaaaaccagcaacg

SEQ ID NO: 33842 - DNA, 317 bp, Oryza sativa
  Clone ID: uC-osflM202048a05a1
cgcactatcagtcaaaatgatcctgattctcaaaagtgaaaaaaaaagagtggttgactttttaaatatttgacaatacataaccaggggggggtacacgtataaatagacaagccgttttagaggcatcatctttacacttcagttattctgctataggaaatatgacatgccctgatcttccaaagatgctaaggaaggtcatgcgtaaacaaccggaaaaggttttgacataacagggcgaattacatgcccaaagaaaagccgcttaagcaccacagtcgcacaaaaggagaacatttttctaggttcattac

SEQ ID NO: 33843 - DNA, 246 bp, Oryza sativa
  Clone ID: uC-osflM202048a06a1
gggacaaaatcatttgatgaaaatgggaaaaatggaactgaaaaagtaagaagtattaaaaacaacaacattcagctatatctgaaaccccacatatggaaagaatctttaaaacttgaatgactttacttgtaactatacaagacacttgctgataattatacctggcaaaaatgtccttcaaaggaatcaacccaaacaggtgtttcaaatacaatgaaataatggtttaaaactacataaaat

SEQ ID NO: 33844 - DNA, 449 bp, Oryza sativa
  unsure (1)..(449): unsure at all n locations
  Clone ID: uC-osflM202048a07a1
agcaatgtaaatactcgcattccaaaacagccgctggacaataatcggactcagaggatcagttttaaccgaacagaaataaacgggttttaaacgactgacatagggcccattgcgagcagatattaacgggtccatgaaacgagggccctggccgcgggcaaaacttaacaaattctagaacctagatattttcaactgtaagacaatgcaaaccaccatttgaaccgaggctcacttcttctttgggggcagcccttggttcacccttggccaccgcgttggggtcctttttctccacgttttttgatgacccccacagccaccggttgcctcatgtcacgcaccgnaaaacgaccaagaggagggttcttcaagaaggttttcacaaccatgggcttggttggaatcatcttgaccattccagcgtcaccgttcttcaagaactt

SEQ ID NO: 33845 - DNA, 152 bp, Oryza sativa
  Clone ID: uC-osflM202048a08a1
ggacaatacatttgcaagcttcattgaacatttatgtagcgaacaaacagatcattgacaacattatgcacagtacgtaggggtgctcaatcatagcactggcatatggggtccaaacaatttaacacaaatagcattaatcacacgtacaa

SEQ ID NO: 33846 - DNA, 101 bp, Oryza sativa
  Clone ID: uC-osflM202048a09a1
gtataatatttttttttgttttatttattattttttttttttataaacactttattggtttcataatgcttagcagggaatggagcttaatcaatgataga

SEQ ID NO: 33847 - DNA, 371 bp, Oryza sativa
  Clone ID: uC-osflM202048a10a1
tttttgttttgttttatttcctcctcatttttttttttttttttttttttttttttttttttttttaggcttgcaaaccgggccatggaatttatttttaccaagcataccccaaaatagccccgccttaataaccaaagccctactttttgggttaaaaacccaacagggtcagaaaacacccaagctcagaactccgcattacccaaattgggggcaaggttgggggcccacaattcccctataccggggggggtttatttcccgattctacgagctttttaactagaggtcgcccgggaaggcaattcccgatagaaaagggcctcccggttttacaaaacccaagcccacaacagaggggatgaacc

SEQ ID NO: 33848 - DNA, 336 bp, Oryza sativa
  Clone ID: uC-osflM202048a11a1
gctctaattatgtgcagctcttgacaagctgttaaattaccaaaggaatattcattcttgattaaatgttaatgacttatcaattctatatcatctctacttttagcaacaccatcactaactgataaaatatgtattaggtctatgggctgttaagaacatagcaaaatataaatgttgagttgcaaaacacattccagataaagggaacacccattgttcaaggtagtcatgcatttgagattatcttttacctacgcaatgggcaagcttcaatcttacctcctcaagttccacttcttccatgccattgttacttaaccaagaagataagca

SEQ ID NO: 33849 - DNA, 217 bp, Oryza sativa
  Clone ID: uC-osflM202048a12a1
atgaagattatttaattatatataaatccgtgatactgtactttgtttcagtaaggtcaaatggaactggaatagcaagaagtagtttaattgaacagatccatctatgaaagaataaaaggaattggaagaagtagctatcgctcaggccgctttagattcagcagcactagcagcattcagatccacagaaagatcaagtttcttcccagtgatc

SEQ ID NO: 33850 - DNA, 448 bp, Oryza sativa
  Clone ID: uC-osflM202048b01a1
atacagaatacaggattaattgaagatttacagcattctgaaatgacacatgtgaatgaccaacagaaagatcatattgaaaaaaaaattctcggcctgcataaggctcgctatgaagatatagtaacattatctatgcatgctacagcctgggccagctagcctttgccatctgttggttgtagggttacaactctttataattctaagaagtaagacgaatgcatataaccaatcctaatcatctccttcgttgttgagccatacttcgcgcgtgagcctttgctttcctatcagcatacataggaaggttcatgatctcatatatttcctccaggagcttgtcttcagtaatgttatcagtgatgcttctcattacccgtccatttaccagaggaaaaatgttaggttaggatggtctttatgctttctcatgcccaacagaaat

SEQ ID NO: 33851 - DNA, 180 bp, Oryza sativa
  Clone ID: uC-osflM202048b03a1
ggcaaaacctgaaaatataactggaagaaccaaagggaatatgagagggttatctttgactctaaaaaaggagaccacaccttaacatcagcattaagccacgtccttaggaaacatcagttataagagcctttagctaaccaaagaagaggccatgaaatccaaaaatcccagatggga

SEQ ID NO: 33852 - DNA, 368 bp, Oryza sativa
  Clone ID: uC-osflM202048b04a1
cttctacattcgtcaacatagtactactagctggcgagaacaaaagtcgaccaaaaccgaagataataatatgtacaaaaccaacacaaaaaaaacggcgcatacatcaaatgttctgcaccaaccaaagatcggagtttgtttacgtttctccagattgcaaaaagcatagaaacccagtaacctgcaaacctaaaggctaggtatgctgctgatctctctggcttaatccaaggcgttggcctatatgaagcgctaccacagcgactccaatagcgaaacccgcaacaagtatcatgttccatcgagcattcgaacagcctgcaaatgccatttcggatacccctgagaaaacctcgattgctgct

SEQ ID NO: 33853 - DNA, 81 bp, Oryza sativa
  Clone ID: uC-osflM202048b05a1
ttttttttttttttttttttttttttttttttttttttattttaatatttttttattttttttttattttaaggggttttt

SEQ ID NO: 33854 - DNA, 336 bp, Oryza sativa
  Clone ID: uC-osflM202048b06a1
aagttgagacaaaacagttgtttctaaaaaaaagtatttataaaagggatttataggaaacttaggattcctcaagagtggtcttgtgccatccatttcatctagaaattcaagcattaaccaagaagaaacaaaatgaaagaatgttgaaagcatggtagtaggccaaagaaatcaatgtgtctgttgtttgttgatctgattggattggaccgttgtatcctccttggctagatgttactaccacagtagtagtactgacaaattgaaagcagtgtgggggtatactatactatactactcctataccacaagtatactgaaacatggatctgt

SEQ ID NO: 33855 - DNA, 78 bp, Oryza sativa
  Clone ID: uC-osflM202048b07a1
acctagccaacccccaccaggggaaaaccaacaagtaccaaaccgcagatcaacaaagaacatttgataatccccaaa

SEQ ID NO: 33856 - DNA, 106 bp, Oryza sativa
  Clone ID: uC-osflM202048b08a1
ggttggtgcatgtagcgacgttttattagaaagagagtcttcaccacaggttgcggattcgcgacaggaggacctggctcgacgaacgcttaataagcatcacgcg

SEQ ID NO: 33857 - DNA, 76 bp, Oryza sativa
  Clone ID: uC-osflM202048b09a1
atgttgacacattgctaaatgctaatttaaagtttaactggctctcttgatcatgtaacaataccctttattaggt

SEQ ID NO: 33858 - DNA, 286 bp, Oryza sativa
  Clone ID: uC-osflM202048b10a1
gcaaaaccaaaatttcattgtcgacggattcagatatgctctaggcatcatattacatgagtacgtgtgtatagccggagatcttgcattcacgtgccctgtttcaccgtcaccgaacgatagaccgatagttgtagtagtactcttgcaacaacggcaggttcggagccgcgaggagaaccaattaccgggcagctttaacacggacccccaaataaataaaaagggaaaagagaaaggaacatgccccgaaggaaacggaaaggcgcttagtttgccgcctgac

SEQ ID NO: 33859 - DNA, 355 bp, Oryza sativa
  Clone ID: uC-osflM202048b12a1
aaactagaaataacattaagtttccataggaggtttactggctggacggacatacatgtataaaccaggtccaagttccagccattttgcaactaatgcaaaacctatatgagaaagacctatagaattaccgggttcacaggagacgcttccaccatggaagcagagggatgaccatggtgaactttaaaagcttaaggtgctctttctttaaacgctacaagtttattcttcagtactttcagtagtaccaattcgagccgtcattcttctgctggccctgcattgcgccggggtattcgacggcacctgacatgttgaaaccagagccgaacctgaactccgatgcgccatt

SEQ ID NO: 33860 - DNA, 276 bp, Oryza sativa
  Clone ID: uC-osflM202048c01a1
gagatcgactaattgggagaaaatttgctacaaatttacactcagatgatacaaaaacacagggagcactacaagcgaaaaattatgcatgcgggtgtgtcatattacaaaggttttaggtccaggaatgtttatatggctggccaatcgatcgatgatcatcattagatcatcaccatgttccagaagacgtttggatccgcacttggacttatccttccctttgcactcgaatcttgaaaatcatcttgagatgaaatgggacttttcttctgc

SEQ ID NO: 33861 - DNA, 122 bp, Oryza sativa
  Clone ID: uC-osflM202048c02a1
aaaagttccagaatggagaaaatccgtaaagaaagcctcaaaaatgagagtggcatagatgattaaatcaggcctaaaaatttaggactaaataatttgttggaactgacaattaattcctg

SEQ ID NO: 33862 - DNA, 308 bp, Oryza sativa
  Clone ID: uC-osflM202048c03a1
gctcaccttgtacgtccccgccgcgccgacgttggtgagcgtgcgcctgtgcgtcaccgtcgtcgccgccgcgccggagctctccgccgcctggctgctcgccgtcgagtacgccacggcgaaggacgggtagttgaggttgtacacggagtaggccttgccctccgtgcagccgtagctcttgctccgcgccacggcggcgatcatggtggacgtgtagttgagcgcgcagaggaaagtccgacgtagttcggcggtgcccgagggtccgtagacgagttcccgggttcgaccggcgctggcccggg

SEQ ID NO: 33863 - DNA, 395 bp, Oryza sativa
  Clone ID: uC-osflM202048c05a1
gacaggaagaatcagagaaagcatgttaagctgaaacatggggcattggaacagagtctgaacagtatggttcgaccacatttactgatttacagtcaccaagaaactcaaaaagaaaaatgtattgctgcacttgcaggaagccactgaggctattattcagctaagggaatgtcccaaaatttgcaactacacaattgtgccccaaattgcaatccattccagaaacgcttatgacagacccatgactttgccagtggctgggtcgacgtcgatttcgtagaagcagggccttgtaggaagaccaggcattgggcttaaggtgccaaccagtgggtagatgaaaccggttccaatgctggccctaaaatccctgataggaagcacgaagccag

SEQ ID NO: 33864 - DNA, 514 bp, Oryza sativa
  Clone ID: uC-osflM202048c07a1
gctggcgtggcgttcgtcgtgacgtcggaccagttcgagcgcatgctgccccaccgcgacgacgcggcgtgccccgcccgcgggttctacgcctaccgcgccttcgtcgccgcggccggcgcgttcccggccttcgccgccacgggcgacgccgacacccgcaagcgtgaggtcgccgcgtttcctggcccagacttcccacgcgacctctggtgggccctactcgtggggctactgctacaaggaggtgaagggcgcgacgtcagacttctgcgtgccgaacgcgcgctggccgtgcgcgcccggcaaggcgtaccacgcccgcggacccatgcaaatcgcatacaactacaactatggggcggccggcgaggcgatcggcgcggacctgctgggcaacccggagctggtggcaacggacccgacggtggcgttcaagacggcgctgtggctgtggatgaccggcggtcgccgggcagccgttggcgcacgccgtcgtcacggggcagtggac

SEQ ID NO: 33865 - DNA, 383 bp, Oryza sativa
  Clone ID: uC-osflM202048c08a1
gcatgtagatggtagatggactatatattaaaagcaaagttcttaaatgggtgacagatacgggcatatggcatgccggacaccgacattacagttacagttacatggccgcgaaacagtggtaagtaagtaaattatctactgagtcttggtgaaattgaagttactgcacgacgtgtagaacggcagcctcgcgaacccgagccgcttcttctccgagtcgaactgcatgcaacatgttcttccatctggaaccctccgagggatcaaccgccggccgaactggcggcgttcgccggaactttatctccacgaaggccaggcacggccttgccccccttcacgttccaccatcgagtttggtccccgtcatcgtgtagttc

SEQ ID NO: 33866 - DNA, 466 bp, Oryza sativa
  Clone ID: uC-osflM202048c09a1
ctcaattatcaatgtcggaacagggaaaattacacaatttgtcaaataggaaattaaataaaaccttacaccattcgcacagcaagatgcccatcaccccggtgcatcggcgtgcatttttattctgagttctgacacatcacacacaactcgaactattatactctgccgttctggacgaagcaaaacggggttttattacacgcccccaaggcctcatttgaaaaggcctcaaacccggcccatctacgtgaatggaccgaaaattttcaaccaaaatcaacggcccatattcacgcggatttctcttggtgttcggcccatgtggaacaaggcccaaggatgacacgactgatttttttttaattggaagccatataatttgttcaggttaactacctcgtgtataataatttgtttttatggatatgatttggatcagcggctgaagctgcgcttggggccc

SEQ ID NO: 33867 - DNA, 437 bp, Oryza sativa
  Clone ID: uC-osflM202048c10a1
cccagataagctagcagtatatttaatataacatgaatataatgtaaagtagacattcatatactcggaaagtatttcaataccataaatgtataaagaagagtattctaaataaagtacaaagcttacagaagaggaaaggaaagctactagagccatgcccgaactcttccgaaggcttccggactcccgatttctattctattcctattccactagctagataacactaaactaacttgagagaatatgagagagctcttgcttgaggtgtgtgaagagagtggggaggttgaagtccttttatagcctcccagtgacggttatggcagttggaatggtcggaaatgccctttaaccgttattggggagcaatcctggatgtccacgccaaaccctgcatccaacagcatcaggatggaccatgggctgggcca

SEQ ID NO: 33868 - DNA, 312 bp, Oryza sativa
  Clone ID: uC-osflM202048c11a1
ggaaaccgaatccatccatccaaacgtgcttgatcaatttaagggcaaaatcggatcaaacagggggacacaaattggccaggcatatggggaaaatcaagatagacagatgctactaatattactggcatatacatattttcctttttttagcttgggaggagggagggggtgccaaaagaaacagctttttggggaggcacctgctaaggctaaatacctggcccaattgacaaatttggccaaaacaccaaattggaaaacccgagctaggggcccccctttggctaaatcttttcggttaggggatgt

SEQ ID NO: 33869 - DNA, 204 bp, Oryza sativa
  Clone ID: uC-osflM202048c12a1
ctaatagattaaaacttcggaaaatcataactaaataaccgtagatccgttttaggtggttcaagtttctaaatttttctaaaatcaagatctacatgttaaaaatatccacatgtactgtttatgcttgtttttgtactgttttgttgattttgtttatttgctttagtttccgacgtttccggaggagagccgtttccgttg

SEQ ID NO: 33870 - DNA, 70 bp, Oryza sativa
  Clone ID: uC-osflM202048d01a1
gaaactaagcggatgtttacatataaaaggggccttttattccgcccaaattcagaattggggggggggg

SEQ ID NO: 33871 - DNA, 539 bp, Oryza sativa
  Clone ID: uC-osflM202048d02a1
gaatggaaaggaaggcacagaacagtttttaaatccaaccacaaagttaatctgtaagtgttccagattccagcagttccgttctaaaagttacaagattcacaatggtgaaaatgatttgattagccctaatattcctggctctctaatttgtctgtactgacagctcaatcctcaaggaagttgtactcaaaatgtgaagtccgttccttgatttctctgacacccatccctgatcctgtgcccgtcattttatgaccatgggaaattcaaaagtacaacataaggatcccccgctcataactccaaccaggttgttaaccttgtggcctcccacgttgcccgtttgggaacccaagtaattgaaactcttctgggaaaatactccccacgattgctttcttttaagttcttctggccactttaaaaattgcttgggtatgtgtttttgcctgatagtaggaaagcaaagaacaaccaaatccctagataatgaatcgccacccattcttttcccaaaaggcaggaattgatactac

SEQ ID NO: 33872 - DNA, 422 bp, Oryza sativa
  Clone ID: uC-osflM202048d04a1
aatattctcaatttatagcatttcaaaataaagctttttaccacatgttagtttcaaaaactctttagaattcatatcatttcccttggtactggtatctggtagagagttacatcatttggggccttgggggctatgaccccagtagtagcacttgcccgcataagcttctccattttccctaatttataactctaatgtttacctggagaaacacaagggtttttgccaattttcaaaatcttctttggccagtttcaaaggagcaaaaccattttagtcgttcgggccttatgttgctttggcttgggttaagttcggttagtttaaaccatttatttaatttgcccaagttttgtttaagagtcagcacccccttggaatagaatccttcaacacgggtctaccttaaacagcccttt

SEQ ID NO: 33873 - DNA, 435 bp, Oryza sativa
  Clone ID: uC-osflM202048d06a1
ggggataactaatagttaataaatcatttgttcattctatggcaagaaaaaggcaccacggtgcatattaaagcatgaatataaatactacaaagttactaggccaaacaacaacctgttcagatacatcattaaaccatctgctctttagaaatattctacaatgatgatcaaaactgacaccttttagtaatagtacacaataggatgatcaactagcgttgcctcgccttccggttcatttctatcaattgtgtaagagagacagcactccatctctcaattccttcttgaagttgtgcgtagagtaggcgcttcacagagtcgatgcaaatacttacggtgccaaactcatacactggcataccattgtagaaattaccaactctgggcataaacaataagccttggtccattgcatatgcctggatagac

SEQ ID NO: 33874 - DNA, 77 bp, Oryza sativa
  Clone ID: uC-osflM202048d07a1
ggaacaaaaccccgttttactactacaagggcaagcaaaccccaaaaaggcttaaaattttttcccccccttttttt

SEQ ID NO: 33875 - DNA, 308 bp, Oryza sativa
  Clone ID: uC-osflM202048d08a1
actgaaagataagagaacgtgcaacatttattatttcaaagggaagatacataaaattaatcatacaaggggcaatacaaattggagatttggagaaccacatagaaatcatatgcctggaaatggcttacatgaattttagatcagagtatttggagcctgattgaccttaattatacatatatataatgcattgaatggcttaattatgggccgaaagggcgacatggtgatacataacgagggagaaggaacaaaaccataaacaaaccaacagtatcgaatggagcaatggatttgaaagggac

SEQ ID NO: 33876 - DNA, 220 bp, Oryza sativa
  Clone ID: uC-osflM202048d09a1
gggtcttaattttacagaaagaaaggatatggacattaacttggaagatcaaaatcaaggaacacacgcggatacatccatatgctctccaaacctcgatctgtctcttaaacacgatgaacacacacaaagagatcgatgatgatcgaattaataaatccattagcaggcaaggcgagcttccttgaggccacccgggcggaccttccccagcgccgtg

SEQ ID NO: 33877 - DNA, 156 bp, Oryza sativa
  Clone ID: uC-osflM202048d11a1
aaagaatcccggagtacttttattttgaagttggagcagcgatagcgattattttcctaaaaaaaaattgggatggcaatatcatttatcaacattcagtaacccctatgtgttgcaatagggaattacaagaaaacagcttcattacagaaaatg

SEQ ID NO: 33878 - DNA, 199 bp, Oryza sativa
  Clone ID: uC-osflM202048d12a1
aagacaaacacatattgtttatctatataacaaatcaaaaaattgacagttacattctgaggcctatccaattagcatagattggaagggagaggattaactacatcaattttggtggcggaggcccagagagatcatgatgggtatgcaaagagctttctggacccaagtgagctaacccaatttttgggaatcatga

SEQ ID NO: 33879 - DNA, 251 bp, Oryza sativa
  Clone ID: uC-osflM202048e01a1
ggccacaaaaacatagggtttgactttttttttttagatggagcgagtacaggaccagtacaacgcatgcataatgcatgtcaaatgtgccgtcgccgagatggccacgactccatatcaatcaaagaaaaagaatcaatatgagaattgacctccactaatgaatgtataaattatttttgttacgtgagccaaagaaaagaaatacctaccaatcaattcaagggggcaacaaaatgttgaaagaagcc

SEQ ID NO: 33880 - DNA, 461 bp, Oryza sativa
  Clone ID: uC-osflM202048e02a1
gggcatatattcagctagctgagcatagcattgcaaatcacaaagaagcacacaaccggctagaatagtgtcactgaaagcactagaaacatggtactactaagttgctaacatcaggcaaccattctacccccccagacagacattatttgtaccactccaagcaccatgactccatcaagctgctatagcgaaggttactgcaaattgaacgtgaatgacaggattattcctagggctactccgaaggcgagggctaacagcttgcaagtcccatcacaggtgtctgacggtccgaggcgctggcgaagaagtcatgtcgaaacgcaggacgcagtcgtcgctcaccacgacgccgacgccctctccctgctcctcccgacgtgcctcccggaagcatctcggtatctttcgcgccgcgccctccagcactgcacgcagtccgcccgcgcgacgcccgc

SEQ ID NO: 33881 - DNA, 403 bp, Oryza sativa
  Clone ID: uC-osflM202048e03a1
aagggaattcactgtcatagataaagcatcgaccgcccaagcatgtccaacataaaattaaaacccatgattatcaaatagtttggtttagataacaagaagcataataatgataaaaccatctaagagcagcaggcatcacaaggcacagcaaaccagcacatcaagcctcaggcgccggttgtgagaggccggccttggcgagcagcttccccattgccttaggggagcacacctggtactggacttcccccggggccgggctgcaggaacaccttggggagactccagcttttcgggggtcaagctggtcgaatccatggtcttgctcaggaccttgagggcgagggcttcgggcttctcccgggtcaggccgtcccggaagacctgcttgagcatggac

SEQ ID NO: 33882 - DNA, 110 bp, Oryza sativa
  Clone ID: uC-osflM202048e05a1
aatgtaagccctgtggcttttattgcatgatttgtcgggctaaaaaaaaaattactacattgtacatcaacttgacaggccctcttctcaacctgaaaggctgaaaaccc

SEQ ID NO: 33883 - DNA, 131 bp, Oryza sativa
  Clone ID: uC-osflM202048e06a1
gccgccgaggaggaggcgccgaaggaggagacgccggcggcgccggccgaggctgtggccgaggaggcggagcccgccgagcaaacggtggccggagaccaaggaggcggggagccaagctgcggcccgag

SEQ ID NO: 33884 - DNA, 481 bp, Oryza sativa
  Clone ID: uC-osflM202048e07a1
agtaaaaatacaagttcgtgaatggcgataatacttaaagctacctccaaatagcgtgtagcattgcgtagcaaaccaagcatataacttaggacaaacattcagttgcagcttcacatcatcgctgcttatcataactgcaataacagccgcagatggagcataaactaagtatattttcgtagtttctagccttatatataaaatcagaatcaccaactgtgaaccatccacaggatggttcgggggactacctgaatcagaaatctaactcctttgaggtgtggatggcaagacacggtggagaaccattagaatcccacgccacatttgttgcggacgttggagccccctgcagaaccttgtagtacccatgctcttcccagttctcgccccaggagttcttgatgatccaataggccctatcctttaggcggattggagcaaaaccagatgcgccgtagccaacgagaagaacacc

SEQ ID NO: 33885 - DNA, 191 bp, Oryza sativa
  Clone ID: uC-osflM202048e08a1
tttttttttttttatttccacggatgaaaagctgaagttaaaaaaaaaaggagctacattaaaaaggcaaacaagtttagagattcaggcaacttttggcgagtttgccaataatgcaagacttcaaattttgcccaccgtgtgtaagggatatgcactattagagaaaaaaccaaggtaccggtttcttt

SEQ ID NO: 33886 - DNA, 493 bp, Oryza sativa
  Clone ID: uC-osflM202048e09a1
gacccttggacggacaggatgccgccaatccaaacatcatctcaactctcatgacaataagaaaagcacgaattccaacgtgtccacatcgagcttacaaataaaggacatgcaatgcctggcctgtattctcaatcataaccagcccatggaaaacgctaatacagcgatactaataatgtgctgcaaatacaggaagtggttgaaagttgctaattaactagtaaataagtcacggaagcaatgtagtgcacataaactgtgtccactgggtacttcagctcgacacattttgacatacgcagccctaatcttatgattccacatagcaattgatcctagtacatcttatgatccagtaatacagcaggtagctgagtaaatggactcagaaatagacttcaggacagattagtggccctctccttcaggctttgctgcttccttgatctcgtcacccccatcctccgcattgtcagaggtccagagagtc

SEQ ID NO: 33887 - DNA, 459 bp, Oryza sativa
  Clone ID: uC-osflM202048e11a1
gtggaatggagggagtaagccgcccaaagctaacataatgtattacaaaatagcgacaagaaccaccttggtgtaccaaatgaattactgtaccacccaaattgacaagaaaattacaaatcaataacaggaacagggccaacaaacggatacacatagtttactcataatatcatggatcaatctcgctagaagcgcttcaactgtcaaagtccaagctcaatctgttagaatagacaagagcacactattttttggggtatcacggtgaaatcattttttcgaaatacatgttaccccctcccttcttaactccttgtacggctgtatctgacttagcaaacaaaattgttcaaggtcaaccacactatcaaaatcgctctactttcttgctgagagatctgctttgtgttcactgctagcagttacaatataaccagcaccaacctgacaatcttt

SEQ ID NO: 33888 - DNA, 438 bp, Oryza sativa
  Clone ID: uC-osflM202048e12a1
cagagaacaaggtctgttgatatataattattctgtttttatttgaatacacataaacgatcaaactgtgaaacggcacaggatctgagataattaggaaactacagagcagcagctacaatattaaccatagcagctgcaggataaacacggggctaaataggcaggcctttgtttcttctttcacagcctggattatctggaaggggtaccatgacttcagttcattctcctccctcatgataatctttcccaacctgggaaaagggtcggagaatgcctagctgcgtcgacagaagccttcggcaatcctctgcagcaacaatgcctgaagaataagctccatgcacggacccaaagtgatcgatgcaggcggccttcccagcgaaaaaaaggttgcccaccggagcacagaatctttcatacaagtcaactggc

SEQ ID NO: 33889 - DNA, 426 bp, Oryza sativa
  Clone ID: uC-osflM202048f01a1
aaaaaaactcttgcattttcaggggatatagacaaccatcattgatacatattttggtatcacaacatgctgaagggtgacgtacaatccgggtactctaaaagttgaccaacattatttacctatatcagccgtgcaactgctaggggccttgcttttggcagccaacttcaccaagtcaatcaggtccttggtttagaccttggatcccagactgacaccgacaccctgggcccccactggaaagtcgcaatccagaggagcccggcgtgttattggccagtttcttacccaggtgaacagggtggcccaatcaagtgaagcctgctaacctccgacagttcccggggatggcgaagccacaatgtttggtgacatagaaccccttatccatgttgaaggtgtccctgacccctgggctgcccc

SEQ ID NO: 33890 - DNA, 465 bp, Oryza sativa
  unsure (1)..(465): unsure at all n locations
  Clone ID: uC-osflM202048f02a1
caacctcaccgaaagagggtagatctagcttcttacattcatttagactgtacaatatacatgcatcaacagacaaacctcaaaaactaaaagccaaaaaaacatccgtcaaactagcaagagcagcctcataaacttgctcctcgaatcaaaggaacagatacacataacagatcatgtcacaccaccttgataaacaagcagaagaccttgtttcgtgcaaatgggcaaaaaaaagccaggctgcttcgatgctcctttggagggtgttggcttggatgcagcatgatcatgcacgagctaatcctacaatcctacaatttgcagttgatttggtcttgtcactgctgaaagacgatattggggagattaccgagcattcaggacggnctctattctttagacaaagtaatcttgtcgcaccaccgtgatgaagtcagcagaaagtgaatcatcctctttttg

SEQ ID NO: 33891 - DNA, 267 bp, Oryza sativa
  Clone ID: uC-osflM202048f03a1
aaatacttatagccggggctctcattatttttatttacaaatgccttacccaacaccatattttactcgcacttaccacttttacatcaaggcagtgagtgaccaggtgaaacaaactcaaaagaatggtcacgggcgggaaaatcaaaagacgatgaacaaaccgggaagcacaccaaacaaggtggggggacagtaattggattaagcgttgaacaacttaaacgggggctatatatagacccatgacggtttagtttgccacca

SEQ ID NO: 33892 - DNA, 404 bp, Oryza sativa
  unsure (1)..(404): unsure at all n locations
  Clone ID: uC-osflM202048f04a1
atactcatgtatagtatagcccatatctttatattatattattattaacaaaaacttgtcatgcccagctatggcttgggcgcgatctgatacacagaacaaagagaaaacataaaaaggagaaataattaatagcaagcgtcaagccggcctgcttaaaaggggtaaaggcagctgccgtcgtcgctcctcgccgttgggtcgaagttcttggcaacaggngtcggtgcaacctttccggcacaggcaggttacctgcttgctgggctccttgccctcctcctcctatgcaggccgcctacgatgcatcgatgggatgcgaatagcttgagatcttttattcaacttgatggcgcaaaaccgtagaaggaaccagtctttaaggcgtcggaattagcgtcacc

SEQ ID NO: 33893 - DNA, 460 bp, Oryza sativa
  Clone ID: uC-osflM202048f05a1
gacttggcaaatttgtgagcttttcctgtaaaagtttggtgtatttccagagaaacatttttaagataaaatggattcccggagagaaaccttggatcaacattgctatagggtagtggttacatatttacataggaacctaagatgttgaaacctgctgtaaatgaacaacaatgaagggtttgctgctatcttatatgcacaccaaatttgggcctgggatagcatcttccagatttttgagagaacaagaaaaagaggcgggtagaggcacaatattctggttgtggctgcactgcattacattttcagctggctggttcatcctagtagtatgaacgtctgcgtccatatctaggatccctgtaatgactggcgatcctcctggatgctgcaatgccgggcattggtcctgtaactatatattcatcatctatttaataaatctgatttcccttat

SEQ ID NO: 33894 - DNA, 500 bp, Oryza sativa
  Clone ID: uC-osflM202048f06a1
gggtgaatgcacgtgttggcaaatattgcaaacaaaactcatggaaggactacccaggaaaactgagatgtgtccttgtaacaacccaaaccactgccaataaatcaacgaaaatatacacttctgtaagtaatgacaccacacaactgaacaagagaaccttgacaagatgaactgcacaatgaagatgaaaaaaaaaaacgtactgcactgggactttcacgaaggcttcaatcttcagattgagcattcgtctcatagatgcaccggcgtttgttgtaccggatgtacctcttgccatcggtgctggtgatccgcacctcggggatctgctgaacgatgctccagttcttgccaccgtccaggcagctcctgagcaatgagaggctgcactgaagcttgaaatggcacagcccatcgcgcttacggatcaacagctccagccaccgtgggaatgcaatactcagaagatgatcagctcatcaaaaaaaatgtctctg

SEQ ID NO: 33895 - DNA, 395 bp, Oryza sativa
  Clone ID: uC-osflM202048f07a1
gggaaacgaataaaagcattattgcaaaaacatcatcttcttcttcatcttcttagtgtacacaacaccaactcgatcatcatctcgtcgcactaaacccatattccccaacccaaagacaacgaactcgctggccacaaatccatccaaccacaattaaccactgctaagctacggtcccccacttcacttgccggggacgaagttggtggcgttacgcccaggcgtttgttgttgacggggctcggcgaggtggtccggtgaggttctcgagggggcccttgccggtgaacgatggccctgggaccgaagaagtccgaacaatggagaaccatggcgaggccggttccggtcttggatctccttcaccttgagcttccgggaacgcctcgggg

SEQ ID NO: 33896 - DNA, 482 bp, Oryza sativa
  Clone ID: uC-osflM202048f08a1
atggcaaaaaaaccagtaacacatgatttctgatacttacaatgtacatctcgcaaccaaagcacagatcactcttacagttacagaggaacttagtatacatcttcctaggattagatacgtagaacaagtgacaacaacttattgcactatagacccccagctaaagtactagcagtagcttattcgggcacaaatacaaaggtggcaagcctaagggttcttacaataaccatacaaggcccatgccttatgcccccagggaatagataggaaaggtatacacagctttgacatattttacaatcaccgcaggaatgcaagggtgatcaccccactgagggcagtcagacctccttccagcaagggaaaagtaggcaagaacctgagcatggctatccacacagggttctccatcttctgtcataagattaaaactttcaaggcttggaggggtaaaactcgatgttccagaaaggcct

SEQ ID NO: 33897 - DNA, 499 bp, Oryza sativa
  unsure (1)..(499): unsure at all n locations
  Clone ID: uC-osflM202048f09a1
gcaagggggggcgcggcaagaacgccaagcagatcacctgggtgctgctgctcaaggcgcaccgcgccgccgggtgcctcgcgtcgctggcctccgcggccgtcgcgctcggcgccgccgccaggcggagggtcgccgccgggaggacggacgccgacgcctccgccgccgccgccgccggcgagagccccgtgctccgctcccgcttctacgcgttcatcagggcattcgtcgtcctctcggtgctcctcctcatcgttgagctcggcgcctacatcaatggctgggacgacctcgccgnctccgcgctcgccctccccgtcatcggcgtcgagtcgctctacgcgtcgtggctgcgcttccgcgccaactatgtcgcgccattcatcccgttcctcaccgacgcatgcgtcgtgctcttcctcatccagagcgccgaccgcctcatccagtgcctcggctgcttctacatccatctaagcgcaataagcctaacccc

SEQ ID NO: 33898 - DNA, 489 bp, Oryza sativa
  Clone ID: uC-osflM202048f11a1
ggtcaaaaactcggattaaatcctccaatttcgttcgaaatttacaccaaacacggctacatttgccaagcaaaaacttgatcacatcatcatcacctgttctagctgaaactgaaaagcatattacacgtgaaaaaggattgggatgttgctgttgttctactactggtcgtaggtgtagatgaagtccggagttcccgaccatggcgttgagcacctgggagacgaggaacccgccgccggcgaggacggcgacgatgagcaggcgccgtgacggggttcttgagcagctccacgatgggctgcgccagcgtgtacgcgaacccggtgctcaccgtcaccacgtacagcgcgtaccgccgcatgttgtcccagaactcctccaccagcgggccctccggccccagcgccgccgcccgcccggccgccgccgccgacgacagcgccaccgtcgccgcgaaggccccgatcgcgccccagtcgggagcc

SEQ ID NO: 33899 - DNA, 126 bp, Oryza sativa
  Clone ID: uC-osflM202048f12a1
cagagaaagagaacatgtagaagcttaaatgatctcgtgtgagctttagagatttgaccaacaccatagtgacgccaaacaagaagcaatgagaacatggggacataaccatgaccgatcttacac

SEQ ID NO: 33900 - DNA, 69 bp, Oryza sativa
  Clone ID: uC-osflM202048g01a1
gaatgttattattatttttccatctttttttatccatatttttttattacattataatttaaggtgaca

SEQ ID NO: 33901 - DNA, 319 bp, Oryza sativa
  Clone ID: uC-osflM202048g02a1
aaaggcaaattttattaaacacttatcattttgatgatacattagggcgaaccataacgtacatttacaatacacacacttgcatcatcatcatcatcggactccatacacggtacacgtacgcacacgtacaaacggctcccttgtttcgtacaatctgaaggagagttgaccacgcacgcgtgcaggcactttaccttggttacaatttggactaacgtaaacccccccagaaccctgcacgggtgaacccgtcggaaccgggtactacaagggccacgttccccgtacgcgaaaaaaacaccaaaaaacgtatacc

SEQ ID NO: 33902 - DNA, 163 bp, Oryza sativa
  Clone ID: uC-osflM202048g03a1
gagacaatgaccacttcaaaaaagttcttattggaactggaaaacattaattacatcccttttgtaaagctcagggaagcataccttattaggatttttaccatcactaagcactaaaatatagatgtaactagctagaaacatttgcctcaatgcaatgctt

SEQ ID NO: 33903 - DNA, 456 bp, Oryza sativa
  Clone ID: uC-osflM202048g05a1
gagagtaatagtagtagtaattatatattgcacttccttgatttgttttgacagagaaacagaaagcttactgcctcattaatccttacatagttggagtacatgatgatgatgatgcatgcagaaggcttaacttaaccatcacttgatttaccaattacacaagataattaggccattaattagccctagcagctagcttagcttcgttaggtgcagtgcttagttgcttacccccagtggcaagtactgtaattttcttcatcttcttcttggtctctgccatggcagcttcagcttcagtgtttgagctagcaaagctggaacagctcgggggaggatctgaagaggtcgtcgaaggcggcggagtcgaaggcgaggagcgggtcggtggcggcggcgacggtgagggcggcggcggcggcggcggcggcgccgttggtgttgatgcaggag

SEQ ID NO: 33904 - DNA, 192 bp, Oryza sativa
  Clone ID: uC-osflM202048g06a1
aacccttaatcccttatcttcccatttatcaactttttatcatccaatagattataataataaaaggggggggaagtagcaattatcttgccaggggggcctgattttcagcaggggatatatttgggaggtttctaatacatgggggaagaagggaagggtttggcccctgtgtagtagggaggagatccc

SEQ ID NO: 33905 - DNA, 103 bp, Oryza sativa
  Clone ID: uC-osflM202048g07a1
aaaaaaaacaaattaaaaaaaaaaaattctatattttttttttgccccccaactttttttttatttttttttaagacaaagggctagaaaccccctttttttt

SEQ ID NO: 33906 - DNA, 368 bp, Oryza sativa
  Clone ID: uC-osflM202048g08a1
gagcagaaacatgttgctacatggttactgggctcgattacagccaagatcgacatgaaaccacaagagtaacaagtgtgccgaccacaacctttttaggatgacaatgatcgccagttaagctgcacctaccactaacccgggggaaatgttcaaaggacattgcaaactgggagtactgatctgctaacagagacactattctgaggctttgcttaatcgtaaaccctgaaggaatgacacgccaattagcttgaaaatagaatcttcgcaaagggttcttcttgcccgttgctagggccactgctttaacttttgcttcaatgaagagacccggaatcccttccaatccatgacccggatacctt

SEQ ID NO: 33907 - DNA, 445 bp, Oryza sativa
  unsure (1)..(445): unsure at all n locations
  Clone ID: uC-osflM202048g09a1
ggtcgctaaagagctaaagatttattattactgcaaaaattgtagcaatagaatagattatacaaaaagcagatgctgcggtctaattatccacaggcaatgaatccatatatttttctatgaataactatatccttcaacttcaagcatcctatcctaatgccaaccattccatcctgcattacgcaggattctagcttaccaacatgggcaggtgggcacgcatttccccatttccgcacctccatgcttaggctccctaaggaacaccctctgagagcatgaagagttcaaacacaaacatagttgatcacgctacagtttgattgcaacgcttttattattcccctcttccatgtggaagnctctgggtcaaacctgagctcccaggtcggccagtagtgaaggtcctgtttcaaagtaagcacacgaggtttgccattca

SEQ ID NO: 33908 - DNA, 467 bp, Oryza sativa
  Clone ID: uC-osflM202048g10a1
aactaacaaattaaactagaaataacattaagtttccataggaggtttactggctggacggacatacatgtataaaccagttccaagttccagccattttgcaactaatgcaaaacctatatgagaaagacctatagaattaccgggttcacaggagacgcttccaccatggaagcagagggatgaccatggtgaactttaaaagcttaaggggctctttctttaaacgctacaagtttattcttcagtactctcagtagtaccaattcgagccgtcattcttctgctggccctgcattgcgccggggtattcgacggcacctgacatgttgaaaccagagccgaacctgaactccgatgcgccattgatgtcgcccatctggttaccgaatggagtatcgtcgcggatgaagaactgctgctgtgccggggtggtctgctgcgggtgctgcatcatgccattgaca

SEQ ID NO: 33909 - DNA, 305 bp, Oryza sativa
  Clone ID: uC-osflM202048g11a1
aatcaaactaaaattttctgaaaaatatcccggtgtactccggcaatagtcaaatactccgtatcatcggttattcagaggagaggaaagcactaacaaaaaaaaattgactagtcaacagtgctgcagtcccaacagcgatctctgccacgtgctctatccgactggcttaactccaaccgacagcagcagagcacgctgcacctccggccgaatttcggggttaatcctgccgtggacgcccggccgtcaggtcattgaggcctgataacgcctccgccagggcccagggaagccagaaggcg

SEQ ID NO: 33910 - DNA, 489 bp, Oryza sativa
  Clone ID: uC-osflM202048g12a1
aagcatcactgcatcaaacagcaatatattgacttctaatgtagcagtacttgtacaacttttgagcagcaactgtaatgctgtaatcggatcaagaaatgtgcaagcgaacagcaatatattgacactaatgaacgacaagaacatatctcatgttctcaagttctacatgtatctgaaatataaatcgctaaaaaaaattaaatatactataaatacacttgaccataaggagacgtggttgaaaatccattcaagtacccatctccctagaaatcacttccgaggatgaatgctacaaaccaattttggaaggcggccggccgtcatctttcaaatggtaagcaacctgaaatatacgatcaggtagatggaaagagatagcaccgcacaaatgtgctgccagaatagaagtgccgatgcttccctgacagcataacctctgaggctcgcaatcgctccaagcagatggcactagggtggagtact

SEQ ID NO: 33911 - DNA, 206 bp, Oryza sativa
  Clone ID: uC-osflM202048h01a1
ataagcaaaaactgactgatagtattattttcccattacatccaatccagaaacttaaaaagccatataagttcaggcaacatataactgtgattgtattacaccagaattataatggcgactcaggaggcagccagatgacaactttgaaacaaaactcaaatatttaacgagaactagccaccaagaggggaatcgattatagg

SEQ ID NO: 33912 - DNA, 234 bp, Oryza sativa
  Clone ID: uC-osflM202048h02a1
ggaggcaaggccaactggttgagtaagtaaatgacctctgcccagtgtccagtaacagtctgtctgactgacgtgaactttagtatttacagcgtttatcaagactagatagcagacaccgtgatcaattaagcttaggtgaatatgtgacggaggagatctccagaatacgagaacgacttttccgtttcatccaggcaatggtccttctcctcccgggtccagctagaggcg

SEQ ID NO: 33913 - DNA, 647 bp, Oryza sativa
  Clone ID: uC-osflM202048h04a1
ttttttgatggaaagtaaagtaggatcaataatataatgctaattgtaataatttaaagaaaaaaaagcaaaaaatttaaaaggttgaaaaaaaaaatggaaaaaaagaaaaaaaaaaatagaaaaggcaaaaaataaaaaaagggaaatcaaaaaaaaggaagaaaaactggggggtatacacattaaaaaaaaggggcccaagaaggaaaaacctcacaaaaaggaaggtgaaaataaaaaaaaatggaaaaccattaaaataaaagaaacaaaaaaaaggcccccaaggggacaacaaatttaaaagggggaggaaaatataaaaggcaaaataaaaacatattgagaaaggaaaaaaattgaaaaaaataaccttcccagggaaaaaaaaaagtgcaaaaaaaactcacccaatattcaaaaaaaaaagggaaaccggaaaaaaaaatatcaagggggaaataggaatttcaatgaagaggaaaaaaaaaattgggaaaagggcattaaaaagggggggaaaaaaattaaaaaggaacccttttaagggggggggcttcgtaaaaaaaaaaagggggaaacaaggggaaccctttaagggggaaaaaaaggggggagccacgaaaaccccaaaaaccaggggt

SEQ ID NO: 33914 - DNA, 62 bp, Oryza sativa
  Clone ID: uC-osflM202048h05a1
gtcaaggaatgcaggatcaacaatagtatgccaactgctcaactttcataacgacagaggtg

SEQ ID NO: 33915 - DNA, 111 bp, Oryza sativa
  Clone ID: uC-osflM202048h08a1
tttttttttatttattaattattccaaaagacattaatattatatatttttgttttattttttttttttttttgaaaaaaacaaaaacaaaggggggttaaaattttttac

SEQ ID NO: 33916 - DNA, 127 bp, Oryza sativa
  Clone ID: uC-osflM202048h10a1
ggaaaaaatgcaagattttagtatgcatccaataaaattaattaagctagctaagctagtagctaggtatccattcaatccggccaacatgtaatcacattatagagaacagaagcttttatttata

SEQ ID NO: 33917 - DNA, 97 bp, Oryza sativa
  Clone ID: uC-osflM202048h11a1
agttagaacccattgacacacggtatgaactcatgaacatcaactttgcagagtacagtctacaagttacaaacaattaactaacaacaggcgccac

SEQ ID NO: 33918 - DNA, 102 bp, Oryza sativa
  Clone ID: uC-osflM202048h12a1
atataacaaaactgaaaactatttaatagggtatataaaaaaataaacaaatatacacagaaaacaacagattaaaaacaaaaaagtaaaaagaaaaagaac

SEQ ID NO: 33919 - DNA, 430 bp, Oryza sativa
  Clone ID: uC-osflM202049a02a1
atcctgtatgagtatctccatgttgcaacagaagagaaacgagagttacacttgcttggatagcagagttctgaagttttgtaatggaagctaaatcagatttttcagatgttttaaatttatttgcttccaacatgagttcacgcaccccacgtaatttgaatttgcaaatcgaagtgtgcaacaaagcctagcactcgatcgtcaccgccttttgggaagctgaaacgcgcgcttcaagtagtggctcgccacctcgtcgtcacggtggcagagcacgcggaggatcgtgtccgggtccgtgcggttccaccgccatgtcgcttccggcaacggcatcctttggccggcggagcttgccgtgccgttcaacttgcacgcgatgctcaactcctccacgagctgctccgccgttttgccccatgagcgc

SEQ ID NO: 33920 - DNA, 355 bp, Oryza sativa
  Clone ID: uC-osflM202049a03a1
gactggatgcagtagctactgattggaatttgatagtcagaaattacaagaggaatcaggtcctaagataagacgatcatgagttggtacaaatggctaacacaacagacaaggcccacgactatcaactctttcacagaaaagtggaacaagatatatgatcacagacgctcatcttttaatgagaaaaccaagcaggattcccagaatagcaataaccagcacaaaaactagtgagaaaccaccgtgctgactccccatttgcctccttagaagatccagttcttctcgaagcttcatgttctgttgaatggcaaaactcttctcctcctttaactttgaaatcaaggccaat

SEQ ID NO: 33921 - DNA, 310 bp, Oryza sativa
  Clone ID: uC-osflM202049a04a1
aaccctaaacagcaactatagaccatgtgttcaaccttgtttcttcccgttatccataaataggattgcaatttacggcatttactaaagggttttaaattgaaacccgaaacttgtgtaaccggactggtccccgaagcccctttttgtttttgaccaaaaaagtggacttggggttcccccctaattttacattaaaattgtttcccggggtgggcaaattttattacctttaaatgggttaacggggtggcccttttcccatttttttttttagacccgaagcttgtttggccaaatgagaaatgtt

SEQ ID NO: 33922 - DNA, 433 bp, Oryza sativa
  Clone ID: uC-osflM202049a05a1
gcaacaatcatcatctcattgttcaagagttcaaacattatcgtcgtcatcatgggacgaggaaaatttgccagacacgcaccagagatgggagaacatctggactctggtctcttctaagtgaagctaacagtaaggctaaggtaacaactcccaagaggccaaagataagacaacagcaatcctgaaacaacatgagacccaaaaagaaacggttgcggttcgattcccaagcacaacgtacactggcagtcgttattcgtgatgtccgtcgaagatttcagcgctgctgccaatggtattatgttcttagaaccacttgaacagcagaccaccgtgtgtggcgaataaaggcgcaaacacaagggactcgacggccatgagcttgatgaggatgttgagcgacgggcctgatgtgtccttgagggggtct

SEQ ID NO: 33923 - DNA, 440 bp, Oryza sativa
  Clone ID: uC-osflM202049a06a1
ttatgtggccgcccttcctttttttttttttgtttttttgaaacattgtaacctgctaccactttattttccgtagaaacaaacgggcgcttgttttcgcctaaggacagacccgtgcgatatccaaagaagctttccctctctgtgtacagaattacatgtgacaactgccttctgctttgcgtttcccacacctacggaagaatgggtgcccatcttgaattcaatatacatgtcgcgcctggtgaaaacgaacaccatcgtatacacgtaaccgataccctcctgatcattggcacacgtgggattccgcactttcatcattccaaaatgtgccgcccccatttttgctggaaagggacttccttgtaccctttatcatgggggcgggcctgttgtgcacgtgcaatgcctagaatgttcggactcacaggggcaac

SEQ ID NO: 33924 - DNA, 437 bp, Oryza sativa
  Clone ID: uC-osflM202049a07a1
accttgtagtagtagtaataacttaattagacaccaaacaatagaacatcattagtacatgacttagtaataacttatatcaaagatcaaatctctgcccatcaattaatcagagcacagttcttcctgatctctcctggggctcccgtcaggaccccgacattgcccatcctcaccatggacaccccgaatcgccggaagaacgcctgcctgctcgacctcgccatgacgcgcaccgtcgccgccgcctccctgtcctggagcaacgcctggtcggagtggaagaggcccctccggctcgccaccagcctgtagtagtcggtgtcgaacgtcgtcgagctccccggcaccatctcgacggtggtcgcgttgtcgaaccgcggcggtcaagcggcgcggaggaccgccgcggcgtacgcccggtcgagcgtcgggtc

SEQ ID NO: 33925 - DNA, 399 bp, Oryza sativa
  Clone ID: uC-osflM202049a08a1
agacaagaacattttggtagactttgttgaattgaccagatacatccattaccaaggaaatgaaaccgagaatatcaagagatacattgaagtcaccatgtagtaaattaattgcctgaagctttcgttgtcgatgctgtcaacttgacagttaaatatgattaggactacgtgcttcgttaacattagtcgtggacaatggtagctcaaaagttttctgcttctcaaaattgtcatcttgatcaacttgattgccatggtccttgttcttgccccaaatgagagcatacaggcccacaacaataattattgcaccaatcacccttcccaaggtaacaaccttacaaagaatgaaagatcccaaaatagtcactattatcatgcaaagagggcttaagg

SEQ ID NO: 33926 - DNA, 407 bp, Oryza sativa
  Clone ID: uC-osflM202049a09a1
ggggcataacttttttaggaccaaaaaaattgacataaaattgttaaacaggcttttggcccacaaaacaagataaaacagagtgttgttcttttggaaacgaaaatttatttcaagaccatttcaaagtaacagacatggggatgccttcaacagcaaaacaactgcatttttggatcccaaaaggcagttagatatacaaggggtttgcccaaagaacatttcccatttgctttgccctaatcttgatcgacatataaaacaccttttgcccaaattgaataactagcccttccatgatgctgaaataaattttcggttcaataaaaatagttttgttcttcccaaaaatatcttgcaagggctccttaaggtcttttccttttttttggggagtggaattaact

SEQ ID NO: 33927 - DNA, 491 bp, Oryza sativa
  Clone ID: uC-osflM202049a10a1
caggtaacgagttcatcaggttctcagtagcaaacaagacacagcaaacaactgaacagcgacaaaagtccaggagttttgccttgctgcatcaaggacaaaagcgtcaggcccgcttctaagaagcgctatgtgcaaggtaaaaaagaaaaagaccaaacccggtaacggtttcccccctccgttgcaagtgtagatacttactaacggtacagtaaaaagaaggccgagcagataaaacaaaagacatatatcgtaacttctctttcatatatgtctatctctatatataagcagtgccatcagcacctcctgtacctacaacacctagtgcatcagctggcgaggtgcacggggacgcacgggagtctttgaggggctcacccttattggcaaggaacccagtatgacaccactgcagttgagagcagcagtggcactttcagccatcacatacctcacaaaggcaatgcgagtagaatgatggtagt

SEQ ID NO: 33928 - DNA, 210 bp, Oryza sativa
  Clone ID: uC-osflM202049a11a1
cttaaatgtaaacgtcctaaaactcaaatataaggtcaacacttagcacccccgcccataagtcctccatcaggccagggcaccatctcccaagaagaccaaggcccgggatcacggtgaaggggctgaccccacaccaaaaaaaaggcggggccatcgaccgcagaaaaaaggcgccggagcaccacccaaggcccacaccatggggga

SEQ ID NO: 33929 - DNA, 422 bp, Oryza sativa
  Clone ID: uC-osflM202049a12a1
ccaaagaaacaaaggggcgcttgtttttgcctaaggagagcccaagggcaatgccaaaaaagagccccctccttctaataaaatggaccctagctttagaccaactttttaattactgcatgcatgccaccagacagggggagggactcgacccaacatttaaaactcatggggggcttccacaaaccatggaatcatattattattccctcctgctatggtcaagggagggtcccttctcctagccttttgtctttaaccctttcctccctactggaaagagcccatgtaattattgagccccacttgattgaacagttcttgccttggctcccctactgttggcatgatgtacctgccattgccctggaagagagagttgttgttgctccctccctggacttgaagtgtgtagggtgtaa

SEQ ID NO: 33930 - DNA, 460 bp, Oryza sativa
  Clone ID: uC-osflM202049b01a1
cttgtccaaatatcgttgagcaaactataataggagaactaaactttctccctccattattgtaataacataggagaactaaactttctccctccattattgtaatcataaccagagatctaaataaaataccttggtagctggatgaaaactattccataggagaactaaactttctccctccattattgtaatcataaccagagtatctaaataaaataccttggtagctggatgaaaacttattccattgtcaatatgaagcgtactttgaggcaaactcagcaatattcttattcgagctccctcctttcttcatggctttccttagctttcttcatccacctattagcatttttcctgtactttgccttcctctcactctttaaaacctctctgatgcatcttttcacctattcttttctcaccatgccttccttgtcccgatgttcgcttacac

SEQ ID NO: 33931 - DNA, 497 bp, Oryza sativa
  Clone ID: uC-osflM202049b02a1
ctgcaaacttgggctggtgctatattcatatagaactcgacattactgatctgagaactcatatccggtccagaatcaaagcagatgaagcacctatgcaatacaatcaatagaatcaatggaagagaaagccaacttgcacagataatctaaagctagcggctaacatttctggtaatatagagcagctgcgataatataagtatgcctcttagaatttatattttcttcttgataatccttcagatttaatttaggcacaattgatcggtggctgcaagcaacatggtcccatactctgatattgatttgtcttccaactcttaaacttaagacgcactggaaggaatggcaggttatcctcaagatttgtctttccttgaaagatttgagaaacttctattgccacggaaagccagtgctggaaacaatgggtagcatactgagacacatcatgctgattttgtttgggaccacagaatgactgagacgaaaaa

SEQ ID NO: 33932 - DNA, 189 bp, Oryza sativa
  Clone ID: uC-osflM202049b03a1
aagtggatagtttgtttttagtttaatgaaggaatacactacaaacagggaattacatggcccaaccaaaggaggtcttggactgagaagataattcatcaaagctaataggcaagcacgcagagcagtcccaaaggtaacacccaacggaaagttattaccatatagatccaagggggcttataaaaa

SEQ ID NO: 33933 - DNA, 387 bp, Oryza sativa
  Clone ID: uC-osrocyp002a01a1
gggcctctttagagggcgccctcttttttttttgtttattataattcaagggtgcatcgctacttcagttagattcagaaggttctacccccacaaacctattacatcttaaagtccaataaaaatggagaaagagtttccaccttgtgctagggaaagattctattcaagtgtggagttcagaactgcttttgatcccatcataaacttaacttaaaccatgcagtatccccgggtagtatgtctagctgtttgctcttgctaataggccagagaaggatggaacaggggagtgcctaattcgttcttgagcttgctttatctactcgggagctatgaccttcattattttgggcatagcgaagaccattatgaccataaaaccaa

SEQ ID NO: 33934 - DNA, 361 bp, Oryza sativa
  Clone ID: uC-osrocyp002a02a1
tttgtttgataattaatggaggattggtatccacaccaatcaacttgtcattgatgtaccaattgacatgtaaattatgttccgacactcgagtttcgaacaatattacagtttttagtcaacaacaccccaccacaactccataagcttacagctcttgtactaagggccactcaacggcagcgtggggcaaaatatagcttagtaacggtatttagtggagtagtccttgggagcaatcaccaaaccacgccctttgcgagcacctctgtagacggtctccacaatgtcgatgaactcctgcttgtccttcaaggcccagttgatcttgttgttgtttcctgtccccagatcaatcatg

SEQ ID NO: 33935 - DNA, 361 bp, Oryza sativa
  Clone ID: uC-osrocyp002a03a1
tttgtttttttttttcaacacaggtaatcaagatagcgctatattagtatatttcacttgcaaaatacaacaacggaatcagaaagctgccagccaaggccatgaacgctgcaggcgccacggcattgcagcagcaatctcacacgattacaacacggataaatacagcaagctcaaaagggaaaaaaaaacacggacggagaaacaacgtaatctgctgatgagcgtacgagaagccttcaggatcctgaatacctccctttcttatttcggtgcacgtatcgtctcttcctggatcttgccgcgttcgcgggtggactggttcgatcagcaaatgggcaggggctcgccgttccactcc

SEQ ID NO: 33936 - DNA, 374 bp, Oryza sativa
  Clone ID: uC-osrocyp002a04a1
ttgtggtattaaaactgatggaggacattacttcagagctgtggctgaatgagtacatcgagattattgtaatcaaggtaaaaataaaaggacgggtccaccagtcatacaatacagacaaccatgaaaccagtgtcccagcccagatcctggagcatcaaggaagagtttttctgcgatctaaagctgttcttaaactctaaaagatgcatcggtcagcaagcctggagttggagcaatgacaaaggcaaacatgccattgttctttgcatatacaattgaaagtgtagagcatttcattgcagtctggtacaaggatcacttgctcagaacataactgtttcgatgcctcatgtttgcaaatgttggatttt

SEQ ID NO: 33937 - DNA, 579 bp, Oryza sativa
  unsure (1)..(579): unsure at all n locations
  Clone ID: uC-osrocyp002a04b1
tggtaccccgctcgcggatatctcgcgggcggcagacccacggcgcgcgctcacgctgccgatgcatagataatgattgccggtaacacactaggcaaggggagtatgttacgtggagagtgggatgtttcaagatgtgatcatgtaacctgccagggattagcttcactcatagatggccacaatgttctccagaagctaaaggctgttgataggatggctgagaggagaccttccctgctgcccacctattccattatgcagtgctacttagaccgagcgtatacttgatggtcgacgaagactcatcctatgttcttctggccattggtggtatgtaataacttggtcgagattggccttagcaaatgcaatggcgttacagatgaaggaatctcttcacttgtaactcagtgcagccacttaagggttattgatctcacatgctgtaacctncttaccaacaatgcccttgattcaatagctgagaactgtagatggttgaacatctccgtttggatcctgttctccataagcgaaaagggactggagcagattgcaacctcctgccccaatcta

SEQ ID NO: 33938 - DNA, 161 bp, Oryza sativa
  Clone ID: uC-osrocyp002a05a1
tttgtgtttggaagtatcaggggaccacagcttttgtttagggaaccaaagcaaaaaagctgagcgacctgcgacccacggaatcacaaggaactctgaatcaatgacgatcaagagatcaacgcaacgtgggattaaaatagactcaagactgctaccat

SEQ ID NO: 33939 - DNA, 408 bp, Oryza sativa
  Clone ID: uC-osrocyp002a06a1
agcgggcgcgcccttttttttttgttatgccataaacagggaaaagcgccctgctttcataacctacagtgactgtcagccgtctaccgcaaatgcaatggcctgcgtgcaaacagggaacacgtcttggggactggagcttgcggggacagactgatgcgcagcaacatcagcgcgggaaaaacatcatttcgcttggttttattggcttatcatgcacacccacacgctctacctttatacctgatcttgcttgatctctgcctgttgaagtccaggtggacgaaggcaggcccacgatgatccacgcagggacagcctcagaacctggagcaggaaaaaaaggggaagccctttatatatagggagcacaaaaatgtggcatggtttcatccagggttcattatc

SEQ ID NO: 33940 - DNA, 136 bp, Oryza sativa
  Clone ID: uC-osrocyp002a07a1
tgggtttttgtcattttcggggatatgtttgctgcttttataaacgtgaatggaattctcccacagtatacgaggaaactgcaataccgacacactgggagacatgagcacgaggtaactatggaaatggcacaca

SEQ ID NO: 33941 - DNA, 519 bp, Oryza sativa
  Clone ID: uC-osrocyp002a07b1
ttcaactccggcgagaggaggaggcggcggtggggcgttcgtctgggagagagaccagggccggggggctagggttcggccgttcagagaggcggcggctgaggaggaggaggaggaggaggaggcgatctgccatctctacgatctgagcgaggtggagatcccgcccaccctggaggagcttgaactcacggcgaaccgcctggacgacgttgacccccgcatcggccgccttccgggcctccgcaagctctccttccgccagaacctacttgacgacgccgtcgtcgagcccctttccacctggtccgacatcgatgggctgcaggagttggtctttagagataacaaacttacaacgattcctgatgccaccatctttaaaggccttctggtctttgatgcatctttcaatgagatatattattttaaggggttgtccaaggttttcaagccactgaaggaactctatgtttctaagaatgaagttgaaaagaggaggaacttgaacacttttat

SEQ ID NO: 33942 - DNA, 366 bp, Oryza sativa
  Clone ID: uC-osrocyp002a08a1
ggtcttgcgcacgttcagctccttcacctgctccctgaagccggcatagttggagggcatggcctctagcttgaagggcaggtcgtcaatgtggtacagggtgcttccccagaagaacttggcctggacgcccgcgtccttgagggccgcgcacaccttgcgctccgactgcagctcctcgtgggtcacctcctggtgcgcaaacagggtcttggcgccggtcttgccggccaggtcagccaaaacctcctccggctttccgatcctgacaaccagctcgctgcctctctccctcaggttcttgcgcaggtccgttacgcactcgatctggaacttgccccgatatggcccggtcttgtcgaaccc

SEQ ID NO: 33943 - DNA, 361 bp, Oryza sativa
  Clone ID: uC-osrocyp002a09a1
tgtttttttaaaaaacgagggatttttctcccccttgtgcttttctcaaacacagccttagagcagatagaaataatataacaagaacagtaattcatgtcaataaacgatccggagggacagaagcatgacacagaacaaattcatgtctgcccaaacttcacttattcataatttgtaagtatgaaaccacatgcaaattgatacacagctggagggtaaaggaaatcatagccagccccatagcactccatttttgtgaacaaagtctctactccagttttgcagttggcacaaatacaatattttcacgataaagatcgggtagcactctactgcctcaagctttgcaagatatatt

SEQ ID NO: 33944 - DNA, 328 bp, Oryza sativa
  Clone ID: uC-osrocyp002a10a1
tcgtccagcaccgccggttcgtcttcgtcggccaagggggaggggaaggtgagcacgggggatgatctcctggacgccctcctcgaggtgttcccgcagttgaatttcttaacactggtagaagtttgcatggaatataagaatgatatagatggtgctgcggattatattatccataatgtccttccaagtatcccggacaacaatgatgcacatgcaaacgaagggcctgcttcggtggataatgatgcagattcagtgcagtcttacttagcgaacaaatacacagctgagcaggaggaggaggacgaggaagaggcagaggaag

SEQ ID NO: 33945 - DNA, 283 bp, Oryza sativa
  Clone ID: uC-osrocyp002a11a1
ttgttttggcggcaacagggaactacagcttttctcgagggaaccaaaacaaaattgctgtgcgtcctgtgttccacagcaatcacaagcaactctgaatctctgacgatcatgagatcatttgaacgtggcattaaaatagacctaaaaactacataagaaaaagaaatggaaacaaaacgcatgacacctcaaggatggggggctgccaaacggagggtctgctttttacagtgatggatgtatacacaagccttgctggggtaacgcacaaagacccagc

SEQ ID NO: 33946 - DNA, 378 bp, Oryza sativa
  Clone ID: uC-osrocyp002a12a1
aacttaagaattaagatctccatcacataaaaacatacagtgactgagtactggattacacgattgagttgttcagggttcagataggaaaaacatcttggggactagagatagagggaatcgacagatgcgcagcagtagcgcgcgggaaacaggacatcacgattgcgttgcatgtcgtcggctgcgcagcggcggcgcggggcttaagacctgctcttgaatgggatcgccctgatgatcacctggtggtagatggcagccagggcagcgccaacgaagggaccaacccagaagatccaatggtcattccaggcatggtccttgttgtagatgatggcagcgccaaggctcctggctgggttgatgccagtaccg

SEQ ID NO: 33947 - DNA, 132 bp, Oryza sativa
  Clone ID: uC-osrocyp002b01a1
tttgtttttttttttttttttgttttttttttttttttttttttttttttttttttttttttgggggggggcaaaccaaagttttattagaagtgggtaccggcacaaaaggtagcacgcggcccttaaaaa

SEQ ID NO: 33948 - DNA, 374 bp, Oryza sativa
  unsure (1)..(374): unsure at all n locations
  Clone ID: uC-osrocyp002b02a1
ttggttttggaaccccactggatgagaagtttctcttattgcaacgaaggaaagatgttgcatttttttttcttttgggcgaggaaaccgtgtcagctcagttctcagctagttacagaatgtgtcacaanaaagcaaaaataaacangattacagaatgtacaannaatttccttatgagtcacacaaggttttacctcctacacanncccttagttgagtacaccccttcacccttttccttgtcaagcagagcaacctatgncggcttttcgttgtcttgaaatgctcgaaccactatctgcggtagagctatcttctacctcatcaacacagtttctacctgcttcctgcaggagatatcttgaaggccc

SEQ ID NO: 33949 - DNA, 524 bp, Oryza sativa
  Clone ID: uC-osrocyp002b02b1
gtttagatgattccatcttcacgatgtggttaattggatacagctgagaaacttgcagaattagatggtgaggttgtggaggacaacttgagcaatatcaagacttttgacatcccaaaagttgttttgagggaaacatctccatgtgctttgcccattgatcaaagagtgccccatgctagcagcaaggatcataatttaaagtcaaaggtattgaaggcctcaaatagaagttctatttgtgttgatatgatcaggtcctcaaagatggaagcaacgagctctgtagcaaactcaccggtatcaaggaaaagatccttttgtgagactgcatttcatgtcccatcttattcatcttcagctgaagtgcattcgcatattcaagatatggggggttccttagttgggccttcaagatatctcctgcaggaagcaggtagaaactgtgttgatgaggtaagaagatagctttaccgcagatagtggttcgagcatttcaagacaacgaaaagccgcatagttgc

SEQ ID NO: 33950 - DNA, 387 bp, Oryza sativa
  Clone ID: uC-osrocyp002b03a1
tttggttgaaaagaaaaacagggctacaaaaagacgggactcaactgcaatgcaattcagggttcggagagatcagagcaagccttaacagattcacacagaaaaatcaagcaagaagttccatggcacaaccggtagagacctggagcagatagacaaaatggttcagcagactacacactagttacggtctcggtacttcttcatttagggacagacgacttgtaaaccgagtgtgtgcatgccaccttacctaatacggtagatgcacaggttttcctacttaccaggggtactactgccataaatcggcaggggaaaagtggtgcctgacttggccatcatgaccttggcgaactcctcacagatgatctggccgacaccgtg

SEQ ID NO: 33951 - DNA, 394 bp, Oryza sativa
  Clone ID: uC-osrocyp002b04a1
tttggtttttttttttttttggtttttttttttttttttttttttttttttttcaacagcaaacgggggaccagaattaggcaaacaaaaatgttaaagaatgcacaagtggggtagcccgcttaaccgaggggcttcacaaaacaatgttagcatgggcccgcttttgagatgcacaatcaaaaacctccgttttggcgaccaccttcctaagagtcaaacattaagattctggatataaagaaagaccctggaaagccttgtgacaaggggggattcccacagggcaaccctgggaaattttaacgagccccgggccatttttattaaaggaccttaattcccctgggttaacgggggaaaacttaggggggcggttgccccttttggggcc

SEQ ID NO: 33952 - DNA, 497 bp, Oryza sativa
  Clone ID: uC-osrocyp002b04b1
gtcgtcatcaggtggcacttagaaagtttgcctctggagacattcgattctatgagtcagtggaggattccatcgtacattctgattcacgttctttagctacacttcttctaattcgcgacattcagtctaaacgtcttccatcaaaggaactaaaatcacctctgcgttacaatggcttctgtcacagctcctggattcgggagatgcagcacgcatcagataaatcaataattatcagtgaaattctggattccagaaccagaaaccttgtatctgtctccaaaatcagcgactatgttctatcaaatgaactcgtcagcatggcattagcaatggtagcagaggacaaacaaatcaacagagttcttgaagaactttttgccgaggagggcaacgagatgtgcataccgtcagctgagttttacctctatgagcaagaggaactgagtgtctttgatataatggtcagggctcgtgaatgagacgaggtgtca

SEQ ID NO: 33953 - DNA, 374 bp, Oryza sativa
  Clone ID: uC-osrocyp002b05a1
tttggtttttttttttttttgggagggagcgtatatgatatccaggatccagcttccatttccttgattcagatggcactgtatattacaacatagataatacagctaccaataaaaaaacagtcttctacagaagacatacgagtatgaagcgctgccacattagcaaaacatcaggaaaaaaaataaacataatacccaccagattaaccagacatggttcctattgtagtttgggcagatgtaagatttacattacaagatgggtttattttgcttcagttctccttccgatttgtggtgcttcgggaccgagatgatctgtcggttgttgacaaccgcctaccctgctgatctggtttggaacctactga

SEQ ID NO: 33954 - DNA, 379 bp, Oryza sativa
  Clone ID: uC-osrocyp002b06a1
tttggttttgaaacatttcccgtccatgtatttgatttttcatttgcagtgtacatgagtggaactttagttacatcgcggttccaacgttattttcagaattatgcattcagttgatacattgggaaaaagaaagagggtaaaaaaggaaacatgaagctttaggcactccgtgaaacggcaactcaaactacctattagactatttcagttgtatttttatcacatcgcagcatacatcggttgctcaggaagctcggcaagccattcctccttgagtttcccttgagtaaatctcctcagcatttccagggaagctttgggttggtccattggaaccatgtgaccagcattgtggaccttgaggaagctgagtggc

SEQ ID NO: 33955 - DNA, 214 bp, Oryza sativa
  Clone ID: uC-osrocyp002b07a1
tgggtttttgtacacctttttgggggtttattttttttttatagcatctaaacaaatacgtgcgacgcggggcttgatctcagaggaacccgggacaaaggacactttagctattaccaggccgcgtcacgtattgaagacgtctgcaaaggactgagtgcacaaacctttgggaagggcgcacagggggggctcctacacaccctttagtggg

SEQ ID NO: 33956 - DNA, 176 bp, Oryza sativa
  Clone ID: uC-osrocyp002b08a1
ggaccacgacgtgggcggaggagggaggggcgcggacgcggtcgaggcggagccacgcgcgcgccgacggttcgaaccactctgggtcgagctaaaaccgtccctgccttgctgagctggactccagacacggggacacacccggaacagacctggagcagattagaaaaatgttt

SEQ ID NO: 33957 - DNA, 310 bp, Oryza sativa
  unsure (1)..(310): unsure at all n locations
  Clone ID: uC-osrocyp002b08b1
acattgggggacaaaaaagggccttggaaaggtgcccctcaaacggggggcaaaaatatggccaagggatgggattttgggtactaaaaaccaaaaccagggttgaaccatggggggggggggnggggacccaaaaccaccccctggatccccccagggttttttgggccaaaaacccccccctcgtcataatgatgatccgcacaacaccaacaaatgggggagagataaagaggagggaaggaccttaacaaactccccactggcttcctttccttcttttctcctggggaatcttttttggggccca

SEQ ID NO: 33958 - DNA, 381 bp, Oryza sativa
  unsure (1)..(381): unsure at all n locations
  Clone ID: uC-osrocyp002b09a1
tgggtttttttttttttttggccttcaaatcatttcatttataggggatgcaagataaccgctcaactaggagcaaacatacaccttcagaggaacattaacacaaacttaaaatctttcggacaaacacacttccaaactgaatcctaatacaaagagcctcttggggcanaacacacttccaaacttcacagccgaaactttctttcacccgagctatttaaaagaggattgccaaagaaagcaatcctccacctcttgcatgccatgctctctatttatagggctaagactccctaagacattgtctcaaatacccctagggcgaaaccctaactcagaagggatctggtccacccattcttccttagaaccgaagga

SEQ ID NO: 33959 - DNA, 512 bp, Oryza sativa
  Clone ID: uC-osrocyp002b09b1
gtacaccgtgtgaggaggtcttcgcaacggacttcgcaaggtcaagtgcaagtgccgggttcgcgaacagaatggagaatggaagaggagcttgtatacatgcactggcatgtgcatatgcaagcatggacagtggtgcttcggttgtgcatgcgtgcacatggccgaatgccatgcacgggcgcaagacatgcatgtgtgcatgaggagcttgctagcccattggtgcatgtgagctgtgattggttggcagggaggccaagccaatccagcccttcctcgtggctcaagatgatggatggatcagcaggcagggaggccaggccgagcaggcccaagacaagacgacggcccacggcattggcaccatgcgcgggcaagcgcgggagattgcgcgaggcacgcgcgcgcagtggacacgcggcggcaaggaattcggcgcgtgcgggcgtgggggtccacgctgtttcaagtggctcggaggcggaggttgtactgggacccacgcgcga

SEQ ID NO: 33960 - DNA, 370 bp, Oryza sativa
  Clone ID: uC-osrocyp002b10a1
tgggtttttttttttcacaggagaagttacgacactttattcacaaatgatcagggtatatctgcatacatgcatgcatgcatacatccatattatgctttgcaaatgttctgtaacatactcaactcatagctattatatacaaatcaatagaggaattgtgaaaatgaaaataaaactagagcaattaccaatcagccctcgagctctagtaaaatcttaaatattatgaaaccttaaggactagaatgtaagaattccataggtatacgtataaaaccaatttcctgcagtaattataatttactgactttagtttccatgtaatcaccaaaatgacatcaaagaggaaattaccttttttcacccc

SEQ ID NO: 33961 - DNA, 376 bp, Oryza sativa
  Clone ID: uC-osrocyp002b11a1
ttgttttgtcacttaataataatagcattatggtttccaagtccaacaagattgtatatgcgtagttttcatagagaaggaatttgagagtaaactgctctaaaactcagctttggaaagaaagaaaaaggtaatgtacaacaatcccccgccccattccatgtgctaaacacgcactttacccatttgagagtatgactgatctatctttactgtatctgcatcaatcatggttgctgcaggcatacattgctgctgacacaaagtagaatgcctgagccaaaatcgtcagaatgaatcaagaattagagaatgtgattctgtccaaatgaagatgcatctgaatctgtacaaattgaatcaaaacagcttgctg

SEQ ID NO: 33962 - DNA, 181 bp, Oryza sativa
  unsure (1)..(181): unsure at all n locations
  Clone ID: uC-osrocyp002c01a1
gattcatatcaccattttatacacaaaagaagaaatggcacatgactaactatacaacttgcaatctatctcctttaaacactatatagatccacgaactaacaaaaagtgaccagaccaacacacagatgntgctggntccaccgatgcaccacatcaccctnctttgctcnntgctaga

SEQ ID NO: 33963 - DNA, 321 bp, Oryza sativa
  Clone ID: uC-osrocyp002c02a1
ggggggcacgagaacacatacaggaaggctcaactgggaactttcaatacataggtttagaacatgtaagacggggaatcaacatagtcccaggggaaaatataagtaaatgctgtatactagggaaataagatggtctatggcatccaggcaggtcccttttaggcaaagcttccaggttggggccatacttttggtcatctggtttgggaaggggctccaataagcaggctccatacttcattggtcttggcattcttttgtcttggctgttgcatttgtcaatttaaggcctaataaccatgtcgctttccataggaa

SEQ ID NO: 33964 - DNA, 353 bp, Oryza sativa
  Clone ID: uC-osrocyp002c03a1
atggatgtgtacgcagctagctagctagcagctgttacatatatatatttatatagtactgatcagagattgagatgcaactgcaagttgcgctatagaacgagttactaacatgtatatattaattcctccatcgatccctatatgcaagctagtaattacagtaattagcagctgtagcaaggatgtaacaattgagatgagctgagtactcccacatgattaggaggcatcgatcgatcgagttgatgtagtcgtcatcgtcttggcggctgatggatgatatatactatccccagagaggtagcgaataatccgagcagaagaaggcgtcatcgatatcccagagcggc

SEQ ID NO: 33965 - DNA, 491 bp, Oryza sativa
  Clone ID: uC-osrocyp002c03b1
gtattatactagcttgcttgttcaattcaatcgagcagtagctaattgcatagtgatcgatcgatctgtatagatggtggtggccggcaagaagcagggacggcattctttttctgcatcatcatcgtcgtcttcgtcttcttattgttcagtagtgcagctgggtcatcatcagcgcccacagggtgaggaccctctcatcggcatcaaagcagcagcagcaggaggaggaggaataatgagaaagggcccgtggacggagcaggaggacgtgcagttggtttggttcgtgcggctgctgggcgaacggcggtgggatttcttagcaaaggtgtcaggtttgcgcggcggcgggtgatgagcatatgcgtgcgtgcatctaatctatcgattaattgttgatgatgtcgatcagatggatggatgcatgcatatgcccgacatagtagatttgatgatagtaactgacataaatataatgtatgcgtgcg

SEQ ID NO: 33966 - DNA, 365 bp, Oryza sativa
  Clone ID: uC-osrocyp002c04a1
cttgatcgaaattagacggccattaatttgaactagagtatcacaaactacgtacatcgacaaaatccccgtatcatggtactaagcattttcgcatggaaaaatggacgtccctcgaaaccatcacatttttaaacaacctaacacaagagctagataaaaaaacaacagttggtggcgacacatcactacagctcgtccttatcatacgacgacggctccgcctcctccttgatgttggatgattccttctcttcaacctcggcctcctcgacctcctcttcctcttccacggccgcgtcggggctcaggtcaaggctcttctgcaccgacctgtagatgctggaggcgaagtccttgggatt

SEQ ID NO: 33967 - DNA, 372 bp, Oryza sativa
  Clone ID: uC-osrocyp002c05a1
ttggttttattaaaccactatgtttattcatgccaaacaccagcactagtccagtgacaaccaaacgacaatcctacactccaaaagtttacatttaggttctcaaatagtgatacatagctttgagagttgaaaccgtcagatactgacatagtttatgaggtgcccctggagttggcaaaaacttcacgaagattgtcgcagctctggacgcacaaagtctgcatcagcaggcactgaaatgtcaacggtgggcctcaactgagcacagacttcaatggcactatggacgggatcggagaagaaattgctgatgaggtcttgattaactggagcattcttgtcaacagtcacaaaagcttgttgggtcaa

SEQ ID NO: 33968 - DNA, 383 bp, Oryza sativa
  Clone ID: uC-osrocyp002c06a1
ggcgccctttttttttttgtttttactgaaatatggatataccacatagataagtgccaaaaggtgagaattcagtagcttaacaaattgcacgattctctcttaatctgattaccacaatgagtgcaactgtgcgaatcaccatggttaacaattgagaatgaattcagaagagtatcgactctacacagtatctaagagacgccaccacatgagttctggtacgcggaccgtcatttcactcgtcaatagtgttttttatcagaggaaaaacgttacagcatagcaaatactatgcatgaaagaagtaccacatattggagaggatgttgccctcgtgtgtgaagaatcgggctgtacctgtatactagcatactcaatac

SEQ ID NO: 33969 - DNA, 339 bp, Oryza sativa
  Clone ID: uC-osrocyp002c07a1
atatacatcgaaacattacatgttactttattaggctcaagacttactattcagcttgctagcgcaaatcgtataacacatatgagacttgcagagctaacgaaggtgaccaaccaacacacgatttgttgtacacgatgcacaatcacccattgatcgaatccatggatatgtggacagcctcacaagcaattatgccaccaaagaccatggcttgaaccttaggttctttcttggaagcgagacatgctaaaggtaggcccacagttacatttgttgagtacttgaagtgagggagcaaccgggcacagacgtcattcaggtggttcatcaactggc

SEQ ID NO: 33970 - DNA, 88 bp, Oryza sativa
  Clone ID: uC-osrocyp002c08a1
tggttttttttttttattggggttagttatttcttctgttttaggtttacttttttttggtgtaaggaggcccgggaaataaaaccta

SEQ ID NO: 33971 - DNA, 534 bp, Oryza sativa
  unsure (1)..(534): unsure at all n locations
  Clone ID: uC-osrocyp002c08b1
gtgaaatgcaggccaaacctgatctcatcattggcaattacagggatggaaaccttgtcgccactctgctggctcacaaattaggagttacccagtgtaccattgctcatgccttggagaaaaccaaataccccaactcagacatatacttggacaagtttgacagccagtaccacttctcatgccaattcactgctgatcttatcgccatgaatcacactgatttcatcatcaccagtacattccaagaaattgctggaagcaaggacactgtggggcagtatgaatcacacattgcattcacccttcctgggctttaccgagttgtgcatggcatagatgtttttgatcccaagttcaacattgtctctctgggagctgacatgagtgtctacttcccgtacaccgaggctgacaagaggctcactgccttccaccctgaaattgaggagcttctctacagtgaagtcgagaacgatgaacacangtttgtattgaaggacangaacaagccaatcatcttcttcatggctc

SEQ ID NO: 33972 - DNA, 372 bp, Oryza sativa
  unsure (1)..(372): unsure at all n locations
  Clone ID: uC-osrocyp002c09a1
tttgttttatcaaatttggaagaacaggtgctcatttgaagcagtagttatttacaggttacaagccaatcgtgtggtaaaagttactccaatgtctaagaacagaagaatttttctgttcttctaaactgcancctctagtgtacaaatacacaanccatctgtacagngttgcaagcacctgtagctcctgcagcctcttgcgataccttgtgttaatacgatgaatnttcacagccttctccaagccaatctatagcatcaaaatataggtactcaaattcttccgcaaagttcatgccacctagcactatacttgagacatcagtaattggaatacagtacatggagatgccactcaattatccaggc

SEQ ID NO: 33973 - DNA, 512 bp, Oryza sativa
  unsure (1)..(512): unsure at all n locations
  Clone ID: uC-osrocyp002c09b1
ctggggtttgatgggttgtttcaaagaagcaaaagttgcttgagcacctctgatgatgaggataactgcaataagaaactttatggttgccttggtgcattccgtcggctacttcagaggtctcagtatcaagttcaatatggacgtcctattcagctacttatcctagcaattgttgttttactagtcttaatttatgccatgaaggcaattttgtgactgttttttgatcaactagtgtctcacgattgacttgcacttcttcatcagcagtctgtaaggtgtatgacaattcatagctgatgaaactaaaaggaagggggnattttgtttctctagctagttgaatgccagtgacagtgaacactgttttgtatgtttcgaagggattctatcataactcgcaagattgtcttggctatgaagaaacaacctgacatgggaagcacaacatttaccaacccaatatagcaaaatcagtgaaggattgattgtttggaccggcagatcat

SEQ ID NO: 33974 - DNA, 314 bp, Oryza sativa
  Clone ID: uC-osrocyp002c10a1
tgtttttgtgtagaaacattttttttccatgtattttgaggaacatgcacatatcaacatacatgtaatacgatgttgaattaagcaagcaaatttaagcatgcagagtgcactgcttagcacacactgcatgtgttgctagctagctagctccatctagttccctctcttctcatcatgattgacacttgataaaattaagcaagatttagctagctagctgagctgatctgatcaccatgcatgcatgcaagcaaggccaattcaatttcaagctcgccggccatacaccacacagcacatatacggtgggt

SEQ ID NO: 33975 - DNA, 313 bp, Oryza sativa
  Clone ID: uC-osrocyp002c10b1
tttttttacccaccgtatatgtgctgtgtggtgtatggccggcgagcttgaaattgaattggccttgcttgcatgcatgcatggtgatcagatcagctcagctagctagctaaatcttgcttaattttatcaagtgtcaatcatgatgagaagagagggaactagatggagctagctagctagcaacacatgcagtgtgtgctaagcagtgcactctgcatgcttaaatttgcttgcttaattcaacatcgtattacatgtatgttgatatgtgcatgttcctcaaaatacatggaaaaaaaatgttttacac

SEQ ID NO: 33976 - DNA, 302 bp, Oryza sativa
  Clone ID: uC-osrocyp002c11a1
cattattgtttgtttttttgggaaggggaaaaccccaagagcacaacaggggggggggaaaaggtaggcccaagacaaggtaaaccccaaaggaaaaaaggggggtttaaaccaaaaggggcccccaggggggatatggaaaaaacggcgaaagcaaacggggccaagggggggcccaaaacttgacgaatttgaaaagggtggaaattctaaagggggaccccggaaccaccatttggagggggtgtttttcttttggggggaggcccgggccacactgggacccgggggggccctattct

SEQ ID NO: 33977 - DNA, 263 bp, Oryza sativa
  Clone ID: uC-osrocyp002c12a1
cgggcgccctcttttttttgggttttttaaacaaatgggtttaccactcatattttggccggagggggggaaactaataccttacaaaaaggcgatctgttttcaaagccacatacagagcgagctggcggataccagggtcacaaatagaaatgaatgaccacgaatttggccattacagggcatctaagagactcccccacatgacgtctggtacgcggaccgccaactcacgagataacagtgatttttattgaacgaag

SEQ ID NO: 33978 - DNA, 426 bp, Oryza sativa
  unsure (1)..(426): unsure at all n locations
  Clone ID: uC-osrocyp002c12b1
gttcacgctacatcccgagctctcaccgagagacccaaaaccctttccaccgatggccaccgccgtagccgccgccggcggtggcggcggcggcgagcagccgcgcaggaggaagccggcgccggggagagggggagtggtgctccccgcggggctgtcggaggaggaggcgcgggtgcggcccatcgcggagatcgtgtcggcgatgggggagctctcgcggcgaggggaggacgtggacctgaacgcgctcaagtcggccgcgtgccggaggtacggactggcgcgggcgccgaagctggtggagatgatcgcngcggtgcccgagggcgaccgcgccgcgctgatcccaaggctgagcgccaagcccgtgcgcacggagttgggcattgtcctaggtcgacgtgatgtccaagccgtaccggt

SEQ ID NO: 33979 - DNA, 352 bp, Oryza sativa
  Clone ID: uC-osrocyp002d01a1
agaaatggggaaacacctttagattgattagtttttataggaaaacagaaagacagttttttttacactagcagggttttgggagtacaacagacaaaacaatcaaacaaagatgccacagctcaagaaaagaacagtacaagaatttgtaaatagatcagaaaatcataaaataaaaagaccaccaatggagtaggtacaacacatcggcaacacactgcctcactgcaattttgcagattattactaggtagtctattgttcttttgataattcattgtactcgtctatcaccacaataatgtcgggggcattatcctttcgaatattgcttgcttgtcctttgatctga

SEQ ID NO: 33980 - DNA, 511 bp, Oryza sativa
  Clone ID: uC-osrocyp002d01b1
gttatgtgggggtctgcccttggccattgtagtagtagcagggctgattgctagtaaactgaaatcaaagatagaccagacattggatcagcatttggttgaagtagatgaggctttaagtgcagagttgggaaacaatctcaccactgaaggagtggcgcaaataattaaccactgttacaaaaatctgccatctgatcttaagacatgcttgctgtacttgagcacatttccaaagggccgcaatattagcaggaagcatttgataagaagatggattgctgaaggattcattactgaagagcatgggaagactgccgatgaagttgcagaagacagcctcaatgaactcattggcaggaatttggtaaagcctatcaacaacaacagcaacggcaaggtgaagagctgtcaaattcatgacatggtcctacagtacattgtcttcaagtctagcgatgaagaattcatcaccgttattggtggccactggcagacggcattttcaagc

SEQ ID NO: 33981 - DNA, 352 bp, Oryza sativa
  Clone ID: uC-osrocyp002d02a1
aacacgaagatgccaatgacggctttcattaacaaatgaaattctggtacatgtacactgcccaaatacaacactctttacaagatatctatctatatgtacacgttatttacaatatgtacatggcactgcttacggaaggctcaccaaaacgggcaccacccgacgtagttttggcacaagttttcatgcgaagtcgcttgaagtataagcctctgaacctgaaccttcacggataaaccaggttccacctctcgagtgtctcctgaagccagatgctcgttaccatgttgggtggagcttcccgcccccgacaacgatgatccggaagagaaatcgcgccctgtgagct

SEQ ID NO: 33982 - DNA, 553 bp, Oryza sativa
  unsure (1)..(553): unsure at all n locations
  Clone ID: uC-osrocyp002d02b1
cttgcaaatcaataagcttattaagacattgagcggcgcaagaggtcgtcgataagatccgccaacatagtggaggtcttgttgatcaggcacagcttgtttcaaaggaactgatacgagttgccattctgtggcatgagatgtggcatgaggctcttgaggaagctagcaggatgtattttggtgagcacaatattgagggaatgcttgcagtgcttgaaccattgcatgcaatgctcgagaggggtcctgagacaataaaagaaaatactttcattcaggcttatggtcatgaattactggaagcccacgaatgctgtttaaaatatcgggctacaggagaggatgctgagttaactaaggcatgggatttgtattaccatgttttcagaagaatagacaaacagcttncaagtcttacaactttggatttgcactctgtgtcacccgagcttttgagtgtcgaaagttggagcttgctgtaccaggaacttattctgcagatgcacacttgtgacaantgagtatttgttctcatttgatgtataacatt

SEQ ID NO: 33983 - DNA, 350 bp, Oryza sativa
  unsure (1)..(350): unsure at all n locations
  Clone ID: uC-osrocyp002d03a1
tttggtttaggttcaaatccagcttattcataaagcatactgttgtcccacaggaaactgtttcataaaactaacatatcatacggactcgatggtccattaaaccagacacaagtagacatcagcaccacaaatacttgacgaacagaggctcgggatgaccaggcacatcggcagttccaccaaactggctgattactgaccaccacggcggcggagcaccaggtgnagggtggactccttctggatgtcgcagtctccgagggtgcgtccatccttcagttgctacgccagccaagatcagacgctggtggtctgggggaatcccgtgcttgtcctggaacttggcc

SEQ ID NO: 33984 - DNA, 343 bp, Oryza sativa
  Clone ID: uC-osrocyp002d04a1
ttgggtttttttttttaggagcaaaacatttctattaccacaactttttaaggatggaattgagtagtaattctttcaccccaaaatacagaatatggacaatatcttagaaaagccgattgctttgcccccatggctgggaagcttggcaatggagctaacacaaagaacacgagatcattattaactaaactggaacgaacgaataaaatacagggtcttttttgactgaagatccacaatacggttatctatattttattgttagaacgctctactgctcaaggaaggaaaatggcaacaggaggccaggaacggatcttggcttacttgacgggaaggg

SEQ ID NO: 33985 - DNA, 365 bp, Oryza sativa
  Clone ID: uC-osrocyp002d05a1
tttggttgcacaagaagccaaacgtgagagcttgtacaaaacttcagctctcttcaatgttgactacgctaattaaaattgtaactccataaaaactcggctacgccgagaaaactgtaattacaacagatacggcgtagccaattcacgcaatgcgcacccatacggctacagtatggttcatttaacgtctgatagacgatttcttaaggtgctgccgcaggtggcgacaaatactgaaaacagcgaggtaatccaataaagaaataacattggaaatcctctgcagcggcaacccaagtctctaaatgatcataatgactcgagttaccctgcagcgcaaatttgtacccgggttgcgaacg

SEQ ID NO: 33986 - DNA, 420 bp, Oryza sativa
  Clone ID: uC-osrocyp002d05b1
tgctagacagcaaatcttggactaggcttgcagtgtggcaccttagggtttttctatttagaaaaggcttagccggccatttccagaccactcaacatgtaatgagtgtacgcgtgttagagtttaaataatcacttacaaaaacaaataattttaaaaataataactgcttttgcagcggacacgtggtgctcgacacgcgtcttgtatttgtgagctacgaattcgagttggatgactcagaatttacacagcaatctggacatagtagtgacgttaatgttattaaagtcattaataatactgcttcgcagaatgttgaatttttggatcatgctggattttataagtagatccttcaggtgaattagatgacacatttaaacttcagatagggatgatttaccactgatgagtttt

SEQ ID NO: 33987 - DNA, 369 bp, Oryza sativa
  Clone ID: uC-osrocyp002d06a1
ttggttttgtcacaaattttgcccttttttcacacgccgctgtaactagcgacaggggccttcaaaattcaacacccgaagtttttatcacagcagcaaacactaacacacgaaatcgcacgatttcggtacctccaatggtataccacaaacaaccaaacaccagtatatatctctctcacggtaatgttagctctaatgtgatcttttcacatcgccaaagaagccagtatcaatccctgattagtctgtaccgaagtagcgatcaccatactctcctaaccctgggatcacccggtactcctcgttcaacccagtttcgatctctgaggttacaatcttcagacgagggaatcgcttgcagacaca

SEQ ID NO: 33988 - DNA, 474 bp, Oryza sativa
  Clone ID: uC-osrocyp002d06b1
gttttaatgcatctgatgtcatcattttggagggcattttagtttttcatgatcaaagggttcgtgatttgatggatatgaaaatttttgttgacacagatgccgatattagacttgcccggcgtataaggcgtgatacagttgaaagaggtagagatgtcatctcagtgctggagcagtatgggaggtttgtgaagcctgcattcgatgattttgttcttccttccaaaaaatatgctgatgtgatcataccgcggggggagataaccatgttgccatagatttatattgtgcaacatatttcgcacaaaacttggtcagcatgacttatgcaaaatctacccaatgtttatgtggttaatacaactttccagatacgtggaatgcatactcttattcgtgaccgggacattgcaactccagatttcgtcttttattcagatcgtctgattcgtctggtagttgagcatggac

SEQ ID NO: 33989 - DNA, 362 bp, Oryza sativa
  Clone ID: uC-osrocyp002d07a1
ttgtttttgcgaacaaaactttcgaactcttttttttctccttgttttctatttcatttcattccgatagatagcaacaagcagttcaaacaccataaccaaagcgaactcaattcatggtaacatcacggacgaagaacacctaacactggatggatggatagagggcttctcgactcgagagagccactggacacgataacgactcgactcgatgataagatgattctgacacggttagctaaggataactggccacgatgggccccaccaatcagttcctccagttcccgccggagtcgccggcgtagccgccgccacggctgccaccgtagccgacggcgacgccgccacgggcgccg

SEQ ID NO: 33990 - DNA, 361 bp, Oryza sativa
  Clone ID: uC-osrocyp002d08a1
ttgttttaatgagaacactagaacttagacagcaaaaagatgatccaggttccacatccgttacatcacgacagagtaaaaatagtttctcagtagcacgcgaacataggattgttgatgtgaaacacatgcattcgacaaaagggaaatgaaatacgacaacgaaagcagttctcttagcagtagaccaactagaacatgtaagggtaacggcacaacacatgcggcggccaaaaatttagagcttgtcctcgaaatcggagaggggagtcatctgctccttgagacccttcctcttgcggatatcctgcaccagggttgaagcctgcgagccagcttcaagaggatcagaggtcatcat

SEQ ID NO: 33991 - DNA, 314 bp, Oryza sativa
  Clone ID: uC-osrocyp002d09a1
tgggttttttattttttttggtttttccctttttttttatatatggttctatgactatacttttcaatttggattctatcttctttaaacactttttaatccacgaaccaacaaaagggacaaaccaccccaaaatgggggacaagggggacaaccaccccaagaaaaggaaaaaagcgaggtgaacagccacaacaaaaaaagtggagccggacaaaaccaccccatccaaacgcacacggccgcccggggggcaccccccaaatggggccacacccacctttgggggcccccagcgcgggccgccacagggg

SEQ ID NO: 33992 - DNA, 473 bp, Oryza sativa
  unsure (1)..(473): unsure at all n locations
  Clone ID: uC-osrocyp002d09b1
gtaccgcgccatcctgtgcgccgactgcgacgagcccatccactccgccaacgacctcaccgccaagcacacccgcttcctcctcgtcggcgccaagctctcccctgccgcgctcgccgaacagccgctcccgtcctccgactgcagctccgacgacgacgccgccgccgccgccaccgaggaggagtaccactcctccgccgcatccaccggcgccgcagtgagcgcgcctcttgacgcctccagcaacggcgccggtggcggaggaggagtagggaggggagcagcatctccgactacctcaccaccatctgccccggctggcgcgtcgaggacctcctccccgacgacgacgccttcgccgncgccgccgcgcaggcggngaaagagaaggacgagcgcgtgccgttcctcgacgccgacctgtcgacgtggtcgcccgccggccggagaagagggcggctcgtgggcgc

SEQ ID NO: 33993 - DNA, 349 bp, Oryza sativa
  Clone ID: uC-osrocyp002d11a1
ggataggtaatcaccacctttattcgattcttcggcggcattgctgtttggtaccttcccatggcagttcaagcgaaattttctgaaaactaccaccacataggcttacatgcgaacatgcatactacatacaacggcgcctttgacaggtagcagagtttccaccattccatggctatggatttattattcttcaccaggtgcaccaccagcaggcgatctggttgccgggtaagagaagggcgttatcatcagaggagcaccttggctgcagctagcctagcaattgggaccctgaaaggcgaaccagaaacattgtccagcccagcctttgaaaagaaagcgactg

SEQ ID NO: 33994 - DNA, 488 bp, Oryza sativa
  unsure (1)..(488): unsure at all n locations
  Clone ID: uC-osrocyp002d11b1
tttgatcggaaatccttggagttggcttgcagatcccaagaagcagctgcagctgtccgtgttggccgtgttcaactcatgggatagcccaagagcaatcaagtacagaagcataaacaagatcactgggctgaagggcactgctgtaaacgtgcagaccatggtgtttggaaacatggggaacacctctggcacgggtgtgctcttcactaggaacccaagcactggagagaagaagctttacggcgaattccttgtgaatgctcagggtgaagatggtggttgctggaatcagaactccagnaggatcttgatgctatgagggaccacatgccggagccttatgaagagctcgttgagaactgcaaaattttggagagtcactataaagaaatgatggatatttgatttactggtcaggaaaataggctttggatgtttcagtgcagacaggaaagcgcacagganaaggtgctgtaaagattgct

SEQ ID NO: 33995 - DNA, 369 bp, Oryza sativa
  Clone ID: uC-osrocyp002d12a1
gacagaattgggactgccattacatttgaacaagagatagacacagtgttttctttgacagaacacccgtattatggcggctacggatttaacacgtgcacacgggagcgggcgttttccgaaccccaaacggtataccggggggaacgagctagaagtgtgtctctctgttagggggcatgcacagtggtacaggggtctgctcttagcatacccacaccgggtaggctaatgccttgatgggggcggattcgcttctgtggaggcacataccgcctggacctcctggtgctcttgcacggccgcggtgacgctaacgacaaggttgtagtgagcccccctgggcatgctggaggcgacgtccttggg

SEQ ID NO: 33996 - DNA, 365 bp, Oryza sativa
  Clone ID: uC-osrocyp002e01a1
ttttgtttttttcctgcaatatgcaaataccattacatggtagcttcttttttacacgctgtcttaacagcttttgcatacataggacgacatagcggtatatgtacatatacggatgcacgtatgtacatacactgatgcaaaatgacccaaagaacgcaaatttaatttactagtaccatcatatctctctctagtcctactctgctgtagcgtggggtaattatcaaacgtaatacgtactatgaacacacaccaagccaagccccacgtcactcgcactggctgatcgattgatcaatactactactaatttatgctatatgcgatggtcgaggggttgtggcgttgttcatgcgttgccg

SEQ ID NO: 33997 - DNA, 548 bp, Oryza sativa
  unsure (1)..(548): unsure at all n locations
  Clone ID: uC-osrocyp002e01b1
ttctctctccgttgtttatccattcgctacaatttgcatctgcaaattaaagttgataactaatcatacaagctagtagcttcagcttgatttcatcttcagttctttctggataacaaatcagaccaactttgtcgatcgatccaaattcagagaaattatctctgagtagcgaattaaaagatggggtctctgatggctggatgggattcacccgatcttggcgaagagaacagagttcttgcgaggaggaacaagcaagatccgatgtcatgtcatcgacccatccaaattaattaattatgagatcgacaaacatccaagcttgctaggctcgtcgtcgtcgtcgtcgaccaccgtaccatatatatgcatgcatgccacgcacgtatatatatgctcctcaacctcaagtcaattaattaagagaatggatgaatgaatcaatgttgngtatgatttctttttgtttttgtttacccaccgtatatgtgctgtgtgtgtatggccgcgagcttgaattgaattgccttgcttgatgcatgcat

SEQ ID NO: 33998 - DNA, 400 bp, Oryza sativa
  unsure (1)..(400): unsure at all n locations
  Clone ID: uC-osrocyp002e02a1
tttgtttatagtagtctgtagtctatgtatacacatgaatgtctgaacgagatgtagctgcacgacattgtgttcacagcataaatgttagatacagttacttatgcaaaccgtgaggactctaggctatttcctaacaattccacaacttatanggcgagtactgttggtctccctttcacctctttttcttgggaaacaangtgtaagctcatgctgatacatattgtgatgaatcttccagattatttctgccactcggatcagctgaatagtctttcctggattattgagaggactcctcgctccttcacccttntcttggggaacacagtgaagtctcagtgtgataccaattgtattgatctttccaggttatctggccatctggatcagctga

SEQ ID NO: 33999 - DNA, 312 bp, Oryza sativa
  Clone ID: uC-osrocyp002e03a1
ggattcaggattcatctatgggttaattacaacaggggccaaatcacccactgtaaagaccaagaaatcacctggaacagcagcaagaccactcactcactcactcactaaggggtacgggctactaccatacagttaatttacaccggaagaaaattcccttccattttacacccgacgacccgaaagggggaaaaaaaaacgttacgttagcccggcacgcaacgttaccggggagccaccgtcccggaggggatgccccttttggagttggcgtggcccccgttgccggaggagatgaagagggccccc

SEQ ID NO: 34000 - DNA, 560 bp, Oryza sativa
  Clone ID: uC-osrocyp002e03b1
ggaacagctgttgcaattaaacgggcacacgaaggttctcttcaaggttcaaaggagttctgcacagaaatagaattgctatcaagactacatcatcgtaatttagtttctctggttggctattgtgatgaagaagatgaacagatgctggtgtatgagttcatgccgaatggtactctgcgtgatcacctttctgccaagtcaagaagacctctgaactttagccagaggatacatattgccctgggtgctgcaaagggaatcctctatctacacaccgaagcagatcctcctatatttcaccgtgatgttaaggccagcaacatcctcctggactccaaatttgtagcgaaagtcgcagactttggtctttcaaggcttgcgccagtaccggatgtcgatggaaccatgccagctcatatctccaccgttgttaaggggaccccaggctaccttgatccagagtactttctaactcacaaactgacagacaagagcgacgtgtacagcctcggcgtcgtgcttctagagctattgactgggatgaagccaatccagca

SEQ ID NO: 34001 - DNA, 365 bp, Oryza sativa
  Clone ID: uC-osrocyp002e04a1
tttggttttttttttttttttttttttttttttttgaaggactcgcacagacggggcgaagttctattgatagagcaggaaaaaattataagattgcaaccctggagggtcgtaaccaggaaaaagaaaaattaaaccaccacccacacacggacaacgcctaaacacaagtccgggagaaggctagcaccataccggccgccgttaagggagaccgaccgccgttggaccaacaaaggaacacagactagatcgtcaagcaagagggtgccaagaccacgttttcaaggagagaagcgacggaaaaccgacgccgacgtccgggagggatcaaaggagccaggactgggctttcgcccggtaac

SEQ ID NO: 34002 - DNA, 368 bp, Oryza sativa
  Clone ID: uC-osrocyp002e05a1
tttggttttcaatggaaggatagtaattcattcatatcagataattaagaatacaaattttacatataactaccaacaaaagtacataatccaccacacacttaaatgacaagcaacttcagcatgagacacacaatggccaaacaccttttcaccatgcaaagccatccatccacccatatgaatgcacctgcatgcaactagcttaattagctagctaattaagcacactgatcaatgagagcgatcattcatgatcatggtgatctcgccgagccgacgcctcggtgaccttcacgacgtgctcctccacctggatctcgtcgtagacgaccaccgccccggccgccaccgtctccgacacgacc

SEQ ID NO: 34003 - DNA, 66 bp, Oryza sativa
  Clone ID: uC-osrocyp002e06a1
acagcgtgaactccgacacggtgagctcatacggcactatggccttgtgtccaaccgggaaggaca

SEQ ID NO: 34004 - DNA, 365 bp, Oryza sativa
  Clone ID: uC-osrocyp002e07a1
ttgttttaggagaaaccaaactcaaagttttattaattagaggtatgtattaaggaccagaaatttcctttgggaaggaaacaaaaaggggctgggatttacatgttcatatacactccatacaagatcttggatcatctgccctaccaaagtaccaaccttaagtgcacagttttgttttcactaacttaaaatccgaaaacctggcacttatagaacacctttggatacccatccatcgtccgattcttaaccctaaatcctgaacccgaaaccataaaagcgtcacacccctataaaaaatgcttctgctatagctgcagattgagcatctcagctcatgagtgattcataactttgctaat

SEQ ID NO: 34005 - DNA, 181 bp, Oryza sativa
  Clone ID: uC-osrocyp002e07b1
ctcttttcgcttcgccttctactctccttgtccttgacctcccctgctccgccgcgccgcagagcgagcggccatgaccaaggtgcaccccaacgtcgcggtggtggcgccggcggtggtggaggaggagaagggggaggttgtgcttctatctgttacacgaaagaagatagtgtttaag

SEQ ID NO: 34006 - DNA, 365 bp, Oryza sativa
  Clone ID: uC-osrocyp002e08a1
ttgtttttttttttttttttttttttttttttttttttttttttttttttttttttttttaaaacaaagttcccacgccataaatggggggcaaagggcccccaacgcagtttttgaattcaaaaagactggccaaacagcccaagggtttcatcatagcaggaaaggtttttaacccgccacagaaaagggaccctcaggcaaaaagaaaactggagggggggaccactagcaaaatccgggcttaggaaacccccctgattttggggccagcacccgttccccctgccggggggggatcgcccttgaccatgccgccggccatgtgcgggccagggccctggtacattttggggaagaagggg

SEQ ID NO: 34007 - DNA, 386 bp, Oryza sativa
  Clone ID: uC-osrocyp002e09a1
gaggggccgcctttttttttttgttttgtaaaaaactcaatgaaacaacttgttaatctgagtaccatgaattccaggatacacaatgtgctttaagatgtacaattatggtgatacaaatgtgctttcaagctgtacaattacgatgtgctagtattcacatgctatacacaacttgggtatgcgcttcctcaatttatctcttctggaagttgaatatcttgattgagagcccgaaaaggaaggcgaagaggacggcaaatgagaccaccatcacggtaaccacccacaagaagtcacgatggtaaccaaagtagctctcgacaaagttagatattcggacaccattatcaaacgtgttagttacatccccgaactgggaagtt

SEQ ID NO: 34008 - DNA, 362 bp, Oryza sativa
  unsure (1)..(362): unsure at all n locations
  Clone ID: uC-osrocyp002e10a1
cagtaataaagatataacaagctttcacttgcataatgtttttccttttttttgcaagtataatagtttttatgtactgtacatacatacgtcaaatgacaagggaaaatctttttctcccgctgacaccccctgactaaccgaagagaattgttggtcctgctttctacaanaaatttacataatttaagggcttctttggaagaagaacgtcatatctgcgtcgtctcacgagggaggggctcgcgacgngcgcagttcccgtacgccatgctccggccgacgtccaccggcgccgaggggtcgacgccgagctcccgggcgcggttcacgtactccttcttcacgttccccctctgcaa

SEQ ID NO: 34009 - DNA, 341 bp, Oryza sativa
  Clone ID: uC-osrocyp002e11a1
gcaaaagcagcatcaacaaccgtactggatgcaatgcatccatttcgacgatctgtcgatttttattgaaaaccaagtttgttttcaggcatgtttagaacatgtgatgtagtggaatacaagtggcatctgaccaagaacacactctaagcagccaatttcctcataaatacaccctttggagcaagaccaatatcatcgatgacaatacagttttattcagcctgcttccaatcttgaattgttatttctttttccctagttcaagacagcaagagcttcaagaagggaagcaacaaaatgcatctggacctcctcatcgatcgtcaagaacaggggca

SEQ ID NO: 34010 - DNA, 175 bp, Oryza sativa
  unsure (1)..(175): unsure at all n locations
  Clone ID: uC-osrocyp002e12a1
cttttctccctttcggtgaaggcnngtggcgccttttcttcattagccttcacgcctgccaaggtatcctcagccttcggttgttaagttcgtttcgcctccaagcttgggccctgtgtgccacgaaaccccccccgtttcaggccccgacccgctgcggccttatgccggtaaa

SEQ ID NO: 34011 - DNA, 371 bp, Oryza sativa
  Clone ID: uC-osrocyp002f01a1
tttgtttaacgatcaaagaaccagatcacttatgttggagatgaatgtacaagataaatgataacatgacttgcacaagtacgattacaatagacgatcctaggtagtgggtacatataccatttttcttttggtcctaccactaaccacaaacttagtatgacaaaagttggaccatgcatgccatgtataatacagtagccaccggacaaatgcataccaagagttcagaaggtgcataatattcagccatgaaacaaatacaacatcattttgttaggacaccaacaatgccaaacagagtagcttacatgacaagggcttgtgaaaactgaaaagaaactgtcttgtagataagcgattaaaaagcc

SEQ ID NO: 34012 - DNA, 368 bp, Oryza sativa
  Clone ID: uC-osrocyp002f02a1
tttgtttgatcaactgcaaagcatataatagctcacgataagtcacttgcattatatcaaattcatggaagtgtgcagcaaaatagtgataacttagccactgaggcattcgctaagtaatagctacaaaactccaatcacatagagaccaggacacaaaagactactgcagcaccctaacttagatgatgccaatcttgttggccacgtcgagagcatcgtagtctggtgtcagcttcacgtaagccttcttcttcccatcaggcctgatcagagtgttcactttctttgcctggatgtcgtacatcttcttgacagcagccttgatcttcttcttgtcagccttaaggtcaacaatgaagaccaga

SEQ ID NO: 34013 - DNA, 341 bp, Oryza sativa
  Clone ID: uC-osrocyp002f02b1
cgtttcgcgtccgttgttgtcgtcccggtgaggtaagttcaagaggcagccctgtgaagctgcaatggctactacagctcatcctgccaagatgggagatacgaaggcccaagccttgacaggaggcaagtgctgctaagtctgggacagtctgaaacacgaccctgaagatccgcccatgcgaatcatcatatggccccacgacctgcaatgattttaaaggcgcatggtgccctcaagagatttatccaggttggtacactctgagcctgggcctgttcttcttgtataaccgctaccactcaatgctgctggggaggaaatcgaagacgacagcactt

SEQ ID NO: 34014 - DNA, 369 bp, Oryza sativa
  Clone ID: uC-osrocyp002f03a1
ttttgttttttttttttaaggagggaattgagtagcaatactttcaccccaaaatacagtttagcgacaatatcttagaaaagccgcttgctttgccgccatggctggcaagctgagcagagcagctaacacaaagaacacgagatcactataaaccaaacgggaacgaacgaagaaaatacagggtcttttttgtctgaagatacacgaagcggttcgttttcttttatttttaggctcctctcctcctcgatgatgggtgtatggcaatggcaatggcgatgggatcttggcttagttgatgggaaggggctcgccgttccactccttgaggcagtcgagcatggggtcgatgagcttgccctggct

SEQ ID NO: 34015 - DNA, 360 bp, Oryza sativa
  Clone ID: uC-osrocyp002f04a1
tttggtttttttttttttttgtttttttaaacaagcgcattctgacacagcatgcattggattgggggggtttactttgcttattctttttacagcagtgcgccactgatgcatcaagctacaccaggagttgcgaaaagcatacaggttaactgcaaatgccggatcaatttattctaaaatctaaacagggttcaatgaaaatttacaccgatcgtgtctcgaagtttggattccaccctaggggcagtaagaaaacacaggtgatttgccgaaacaagcttctgggctccacctgattggacgaattaaggctgactcaggatctgcctaaaccttttctttatagttgtggccatg

SEQ ID NO: 34016 - DNA, 382 bp, Oryza sativa
  unsure (1)..(382): unsure at all n locations
  Clone ID: uC-osrocyp002f04b1
tgcttctcatctcacctgctcgcaatggcgagcaagaagagctcgacgcaggcgtctcccatggccgccgccgccgccagccttctcctcggtctcctcctcgtcctccccgtgccagccgtctcgtcgtcggacgcggaggagggnggtggtctcccggttccgggagtacctccgcatcgacacggcgcagccggcgccggactacgccgcggcggtggcgttcctcgggggcagngccggcgccgcggggcttgaggcgcgcacgcttgagctcgttgtcggcaagcccctgctgctgctccggtggcccggtcggggcccgaaactccctttgctgcattttaaacttcacaccgacgttttgctgtcggagcccgta

SEQ ID NO: 34017 - DNA, 62 bp, Oryza sativa
  Clone ID: uC-osrocyp002f05a1
tttggggtttttttatattttgggtttatataattctttagggagcaaaatcaatacatcaa

SEQ ID NO: 34018 - DNA, 366 bp, Oryza sativa
  Clone ID: uC-osrocyp002f06a1
tttggtttactcctggaactctggaaccactagtattacatttcaactgcattcagctaaataatcagaacatatgagctcatgcaaccatgcacaaacagattcaagaatagccttatacatatcacatatgcgagggcaaacatgcacctatgatatagcttaaacatttgtaacaaggtaccaggttcaagtaacaaacatcaattcatcatctcaagcacacattcctaatacttatataaaggtactagtgatcataagcggaggaaatcatgaataatctccaaggaaatgccaaaatagcagcagttctttggtggatctaagcgcagggccaaaccaaacaccttactcctccgctgg

SEQ ID NO: 34019 - DNA, 367 bp, Oryza sativa
  Clone ID: uC-osrocyp002f07a1
tggttttgacaaagattttgggcgtcttattggtgaaaaaacatgagcaggaaccaacatatgcatcgaatatggtcctgctcgctgttgggcggctggcagcagcagcagcagatagtaagaaaacaaacacaacaacgtttctgcacctaaaagattaattctacagtgtcttcaggagtggaagactacagctcagaacttcgtatcttctcactgacagtagaaccaaaagctggaccgcccttccggtagcacacaagaaactcaaccgggtaacccttcaatttgtgaggcacgattccgaggtccgaaaaggtgagagcattatcagacactagggtgtctacagaaaatgcattaatct

SEQ ID NO: 34020 - DNA, 541 bp, Oryza sativa
  unsure (1)..(541): unsure at all n locations
  Clone ID: uC-osrocyp002f07b1
ctgaggattgtcaccgacacctgaagttgatgggtgacctgggtcagattgttcctatgaaatacaatccaagagatgtggattcaattaaggctgtcatggccaaatccaatgtggtcattaacctaataggacgcgagtatgaaacaagaaactatggatttgacgaagtaaatcatcatatggctgaacaacttgcaatgatttcaaaggagcatgggggtatcatgagatttatccaggtttcttccctaggagcatcggcctcttctccttctagaatgctgagggccaaggctgctggggaggaatctgtgttgaaagaatttcctgaggctacaattatgaggcctgcaactatgattggacagaagatcggattntgaatagatgggcacagtttgccaaaattggngtttcctccctcttgttgattctgggtctacaaagaatcagcctgtttatgnttgggatggttgctgctgctattgtcaactccctcaaggatgacggcaccagcatgggaaagacctacgaactg

SEQ ID NO: 34021 - DNA, 373 bp, Oryza sativa
  Clone ID: uC-osrocyp002f08a1
tttcttgtcggggtcgtagagtagcgcccgtacagcgccgggaccatgatccggatgagccggagcgggtcgcgcaggcacgggcgcgcgtactccacgaggctctgctacctgaccgggcttggcttgaggacagagcgccgcctcaaaaggatctccaggagcaccacgccgtggctgcacacatgcattggagccgtcaggacggcgggcgtgatgatctccggcgcggttgatgcatgggtgcccatgacgcgcgctgaatcgagggtgtaggccttgttcggtgcgtccatgaacaccctgacttgcgacaggttagctgtgcattacagatgcagtgggatgatgtaggatttgatgagcccattaa

SEQ ID NO: 34022 - DNA, 544 bp, Oryza sativa
  Clone ID: uC-osrocyp002f08b1
gacacgcaccaaattgtcaaccataaagcatacctcggcggctgctgcgagtcagctgcgctcgctcgccagatacgagactcggccggtgcgagacgggcacggtgcatgctggcatgcggatagactgcggcagaaatgaggacatccagctatggcacggcctgtagcggccgcatgcgaggaggaaggagaaggaggcagtgcaaagtacgtgcacgctcggggtactgtcttccgacggggagccggccgggatgcaggatacaagaagacagaaatagggcgacatgaaggaaactgaaaaatgtctgccaggtctgcctgctagatcttgaatatggtctaccggtccagggtagggatacagcactcgctattaattagaatgatgcaatcccaaggagtgatgtgaaccgtgagtactttgcggaagagcatgatcgcaaggccagggctggaattgaataatgattcttcccatcgggaaggcacaacccaatgacaccattgctgaagcttcagaggacggcaccatattaca

SEQ ID NO: 34023 - DNA, 385 bp, Oryza sativa
  unsure (1)..(385): unsure at all n locations
  Clone ID: uC-osrocyp002f09a1
ttgtttttttttttttttttttttttttttttttttttttttttttttttttttttttttttttttttttttttccaaacagggggggccctggaaaaaaataagcaagatttagctggcggggggacctgatccggacccccaggcactccaggcaagcaggggccaattaaattagaaagcatggggnggccatccctacacacaactaaatatgcggggggggtgaaaaccaaaaacaacagaggggaaagcaccacacaacactggagttacattcatgccaccctttaaataaaacggcttgggggaggggacaatataaatacgggggggggctgcatgcaaaaataggggccggggggcgacgaccacgccgaggggg

SEQ ID NO: 34024 - DNA, 372 bp, Oryza sativa
  unsure (1)..(372): unsure at all n locations
  Clone ID: uC-osrocyp002f10a1
aatcacaaagggtataaattactcatcagctaggcatatgtaacatgatgttcttgttcatcctctttttttcttttccaaaacaacagatcaaatgaatgttgctaaaggaagaagaagggcgtaaaaagaactttcaaaacggaaacaataatgttacagcatagagaaggcaccagatagatacacccaagcctatctattctaccaccacgcaccaccaccactcttgtgggtcttggagctttcantcagttcaatcaagcttctcatgctggcggcaaccctgtcgagcgcctcctgcaatgtcttcttgaacctgtccatgtccatcttgatgttctgcttgtccaggtacgccgtcttgagcgc

SEQ ID NO: 34025 - DNA, 375 bp, Oryza sativa
  unsure (1)..(375): unsure at all n locations
  Clone ID: uC-osrocyp002f11a1
ggacgacaactttaaatattgctcaataaaacactatctggagacaacacacacgagagtcatatccagaggaaaacaatcagcccagacggaccactagcaccaaatgcaaagcaatggganagaacnntaattcgaccgctaccacccctagtannaaaaccagagaagtagagaggtaaggggggaccaggaagaaaaacatntctagtangaaccagggagaagaatcnccatccatcatggtgacagcagcantgnaggcatctaaantcgatggtctccaataacatgcggagccatcgatcgatcgatcttcccattttactggccctcgccggcgtcgcccttggaggcttctttcacctcatcacc

SEQ ID NO: 34026 - DNA, 243 bp, Oryza sativa
  Clone ID: uC-osrocyp002f12a1
tggtttttttaccaaaccgggctatttacattggtcaaaccagcaggactacgcgctggagaatattggttgcatgggatacatacaaacccatgtgaggctcagaggcatacactatggatatcccaaagcgaccgaacacctaagacacaccagaatctggtccaatagatcacgatcaacaatgcctatagggccagaggaaaatcaacgaagacgcttcatgcccgtttatgtgcgctg

SEQ ID NO: 34027 - DNA, 539 bp, Oryza sativa
  unsure (1)..(539): unsure at all n locations
  Clone ID: uC-osrocyp002f12b1
cttcgtttcacaaaaattcatagctcacccaactctccctccccttcctctcgccggagtcgccgcggccctagccatcgaccggcggcggcggcggcggcggtagccgtgggatggacgaattcggcggcggatccgtcgggccgttctccaagaagccgaggcacctgtcccggtcgctgacgtaccaccaccaccaccacccctaccagggccaggggcgctcgccgtcgttcaacgcgcggcgccagcatcatccgcagcagcaggaccacgcggtggntgctgtacacgacgtcgctccngcggggtgcgccgcacgttcgcggactgcgccgcggtgcgcgccgtgctgcgcgggctccgggtnggcggtggacgagcgggnacgtgtccatggacgcctcgctgcggcgggagctccagtcgctgctccggncgcggggccgccccttctccctcccgcagctcctcgtcggggcccgccttcgtgggggagccgacnaggtgcggcagctgcacgaggccggcgagctgcg

SEQ ID NO: 34028 - DNA, 398 bp, Oryza sativa
  unsure (1)..(398): unsure at all n locations
  Clone ID: uC-osrocyp002g01a1
ttttgttaacatccaagaacagaagaacttgttcgttctattgttattatgtgtacgataatagccagtgactctcagcacacacacatcatcatctggcaatctaaaactgtgttatttgttgcagtcttgcagtcgcatgcactcgatcactttggcgatgcanggcactgccactcccagctgtttcactctcagttttaagttctccagcacattcactttggcaagctgacagagctgacacaccctgagctcctgagagactgtatcacgagctgtcagtccgttgtcggggtggaggtcgcggtgtaagaagcattggtgacagattcagacgactgcccttcctcgtacacgatttctgaatcaggcccaggctgcatctcctccattct

SEQ ID NO: 34029 - DNA, 410 bp, Oryza sativa
  Clone ID: uC-osrocyp002g01b1
gtttttggctggtgcggttagcggctagggttttggttgtttcgtctgatcgatcctacccgattttgcggcggcggcggagaattggtgtgaagatctgatatggctggcggccgctgcggcggaggaaggggggagggctcggcggcatcatcctggacccggcgatgatgtccgtcccgctcgacgaccacatggtccaccgcggccacggtgtgttcgacaccgccatgatcctcgacggccacctctacgagctcgacccgcacctcgaccgcttcctccgctccgccgccaagggccggatcggcaccccgttcccgcgcgacacgctttcgagaattctcgtccagatgacggcggcgtccaactgccggagggggtccatccgctactggctcagcgccggc

SEQ ID NO: 34030 - DNA, 361 bp, Oryza sativa
  Clone ID: uC-osrocyp002g02a1
acgggcacaaccaaaatgcataattaacgataccattgttggatacattcttgtctagtacaaaattaatatgctaaagattaaaaacaaacttcgatgttcagaacttgaaacaaaactttcaactttgcagcgatatggcaagaggcttagtcgaagaggctcatgcccaggtcaccatcggactcctcctcgggctcttccttcttctcttcctccttggcagccgatggagcagcagcaccactgtcggcggcaactggggcagcaacagcgaacttgctggggtccttcaaatactccttgatcttatcagcatgtgggtacgagtattcggtcttcacagcaacagcaagcacat

SEQ ID NO: 34031 - DNA, 366 bp, Oryza sativa
  Clone ID: uC-osrocyp002g03a1
ctctttagcgggcgccctctttttttttggtttttgaggcataaggaccggattgagattctgggagaactatcaagctctaactcgcattctttttacagagttgatgatgacagatcacacttatttgctgtcgattgaaagaatcaccagctgttattggacgacattttacaaccactgtcaaaagctacatacaccagcgacacaattttgccgaagcattttacaaacaaactagctggatcttatgtagtcatcatataccttgtagttcttttgtttctcttgtggagttctttgtctgcttctctcctcaacatgacaattgggtcatggacgtgaaatgttgcttttttatggtta

SEQ ID NO: 34032 - DNA, 363 bp, Oryza sativa
  Clone ID: uC-osrocyp002g04a1
tttggttaatcaaaacttattgttctttccataacagagacgacagccccaaatacttgacttgtccactatgattttcttgacaaacttaggtaccagataacattgagaaaagaaaaagaaaaacataacataccacctataacttaccatacttttaacctaacaaaattactctacgaatgctaaatgtgcgttggagttcttatgggcggaactgaaatctcaagggcacgagcagattgattttgctgggggaaaaaacccaagaaatctgctcccaaggacccacactcacagggccatcacaccaacatgaataactttagcaagcttttaattcacacgcagaaatccacctgc

SEQ ID NO: 34033 - DNA, 362 bp, Oryza sativa
  Clone ID: uC-osrocyp002g05a1
tttggtttttttactattttgggccaaaatctgagacattgcacaaaaatcaaccagttcaaaaggtataccaggtcaaataaacagcaagtaacaaaactccaccaaaaaggcaactgttttaactccgaattcaagtcctaaatagtacttttgcaactgatgattttgcttataaacattgtgctgctcacttgaagcattttgcatccagcaagtcctcgccctcgaacggatcctggtcctcaatcatggcattgacacgctctttctgggcctcatcagagaggtcaaccttggtccactcatagagctccatgtcgtagacctcatccatgacgaacttgtggatgtcctgacca

SEQ ID NO: 34034 - DNA, 360 bp, Oryza sativa
  Clone ID: uC-osrocyp002g06a1
gaacagggtgcttgtttatgaaagttggaagtgccaaattgatcaattgcccaaaccaaaaacgatcagagcttatgttcaatcaatttcctaacaacacacaacttaggatgggattctgaaattttgtatgaactcatcaccattatttgatgtgctgaatactagagattacgaccattctacccatctatacacctgacattctttataacgctcttaatgagcatgctaaaatacatgatcgccacgacatgggtacatcagcagaagccttatttcttcgttttacaaggccgtcaggttgtgcttggagacccctcggtctttacttggggctcagtggttactctgactgat

SEQ ID NO: 34035 - DNA, 322 bp, Oryza sativa
  Clone ID: uC-osrocyp002g07a1
cgcgcgcgcgagcgtggggactctttagcgggcgcgctctttttttttggtttttgcgaggatccggtgcatagttgacgtgattaccggaggagacctatatagtatagtacagacgtacagagagataacacctaacataacttaattgctgataataggaactatatgctgtcttgcctttgacgctgggcataagaggctaaacaccgaaagagagctgcatactattggttcaccttggattgaagtcacggtcactaaattacagattacaatcattaccgacgaagtagtaatagaaccaaagctgtagtattat

SEQ ID NO: 34036 - DNA, 411 bp, Oryza sativa
  Clone ID: uC-osrocyp002g07b1
gcgctcttctcttcccctctcgttagggttaggtttttattttctctctctcgatttctctcttcgcttccacttcccaaaattctcgagtcaaacctcgtggcgttcggccatggcgacggcggcggtgctcggatcccacgacgccctcgacaaccggatgcatctgggggccttcgccgtgtccccggcgtcgaagccgaggcggaggcggcacagcaagggcgcgtcgccgccccccaaggaggcggcggtgagctcgccgccggtggttaaagtccggcgcgaggttggcgtcgcctcctcccaaggctgcggcggctgcggcggtgcctcaggggcgtcgctcgccggggcgaggaagcaagggtcgccgacgaaggagttgccgaagcagaggctcgtgatggg

SEQ ID NO: 34037 - DNA, 184 bp, Oryza sativa
  Clone ID: uC-osrocyp002g08a1
tttggtttttgaacaaccagggcgggaaagtgactatgggagaactatcaacatttaactcgcattctttttacagaggcgaaggattacaagatcacaccttatatgttgagtgattggaagcaaacactctgcatgcctatgtgggacgatcatggctaagaagcgcatctgctccaaaaga

SEQ ID NO: 34038 - DNA, 411 bp, Oryza sativa
  unsure (1)..(411): unsure at all n locations
  Clone ID: uC-osrocyp002g09a1
tggttttttttggaataagaacacaaggcaagcatagcttaataaagaaagtaaatattccagtagtgtctacctctcccaggtagcccaggaagcagcacaggctaacagctacaaaaatttccaaacatatgttgcatacggaaatagagaaacaacatnggaagcgcgtaccttaacccacagattcaaattagaccccgtgccttaccacatccctcccaaagcgatgaaagcttggtgcatatttataaatcaaacaacagaagacaatacttgttatctcagagaccttgactttcctaagagcataantctagtaganaggtcacgcgacgtgtggaccggccagctccatcgatggctcacatatgtagaacctactggatgatcgaacagcattcctctcat

SEQ ID NO: 34039 - DNA, 363 bp, Oryza sativa
  Clone ID: uC-osrocyp002g10a1
tgtttttagaacaaccaaatgaactcattttatatattgaattattaaacatacacgttttgcaacgcaatcacaataacacaaatgatcaaacagccttgacgcattacaaccagctttacttatttaaacaaaacatgccactaccaccaccttgtaaaactcagcacacaagacaacctcagtggtagtagttgttgagcctcctgcagttcttcctgatctccccctgtgatccagtcagaggcgagatgttgcccatattcaccattgactgtgcgaagtgcttgaagaagaggttgacatcatcagcatacgccttcacgagcgccgctgtttcagcgctcttggtaagcaggacct

SEQ ID NO: 34040 - DNA, 316 bp, Oryza sativa
  Clone ID: uC-osrocyp002g11a1
ttgtttttttacacaaagaggtaaataggtgtgtattaacatacacaaaaatatcagggtacaagccagtgcagtacatagcaaaccttcatctcaaacaaaaaaaaaagataacataggatacctatcaacatggcaatgggaatatacatgctaatctaaaatatggtaaactcagcactgctataattacaacaaataagcactctgcttactattcaaaacatattaaaagagatagggttaaacaatggctatgaagattgttgtattacaccgttatggatataaagttctggcttcaccaatacaatcc

SEQ ID NO: 34041 - DNA, 300 bp, Oryza sativa
  Clone ID: uC-osrocyp002g12a1
tagcaagcaaggaagagaattagtcaagcggatcattagacggaggaaacaagacatgggatgtccacaacagcctaaacaggcagccaacaaggagcgctgtctcctataggacgagagaaaaagtaaaacataacggtgagaagtgaaactgattaatgatagtatacaatgatgatgatggataggttgcataggacgcccggcgtcattagtgtcttgctgatgccatcttggccactggtaagggtacactcggatctgtattagcctcttagctgcccttgtggctattctcat

SEQ ID NO: 34042 - DNA, 520 bp, Oryza sativa
  unsure (1)..(520): unsure at all n locations
  Clone ID: uC-osrocyp002g12b1
ttcttctcttctctggtggtgtgggtgtgtccctgtctcccctctccttcctcctctcctttcccctcctctcttcccccctctcacaagagagagagcgccagactctccccaggattcagccatgaagggggccaaatccaagggcgccgccaagcccgacgccaagttggctgtgaagagtaagggcgcggagaagcccgccgccaagggcaggaaggggaaggccggcaaggaccccaacaagcccaagagggctccctccgctttcttcgtttttatggaggagttccgtaaggagttcaaggagaagaaccccaagaataaatctgtcgctgctgtaggaaaagcagccggtgataggtggaaatccctgaccgaagcggacaagggctcctatgtagccaaggccaacangctcaaggccgagtacaacaaggccattgctgcctacaacaggngcgagagcactgccaagaaggcacccgccaggaggaagggaggacganaggaggaatct

SEQ ID NO: 34043 - DNA, 172 bp, Oryza sativa
  Clone ID: uC-osrocyp002h01a1
tttgtgtttttttttttttgggggtttttttaggataccaactcactagttcagtttcactagatagaaagcataccacatgacacagcactgcattcttaattacgtacacaccacaagactggagaggaaggactacattaatcgaaccagacgccataagaggggtcaa

SEQ ID NO: 34044 - DNA, 354 bp, Oryza sativa
  Clone ID: uC-osrocyp002h02a1
tttgtttatgaagaatgtctttttttttatttagagcgtttttgttactttttaggcccatgtggacactatttttacatggaacatcaaaaaaactaacattttattgcaacacggtactactagaacatcctggttttactaggaagaggttgctaaaaatgcataaccagtcaggttattgaaatgattttaaggccccttaccaaggatccggcgggcgagctgaataaccttggacataatggggacccccttggcggggatggaccaaaggttggtgtccttgaaaagcccagccaggaaaggcttagaggccctctggagcccgtgcaacgcagatttttggaaccg

SEQ ID NO: 34045 - DNA, 372 bp, Oryza sativa
  Clone ID: uC-osrocyp002h03a1
tttggttttagagaagctccacatgcaaaagtatatattccagtgtataatatccaggtaaagccaaagcctacacaaaccaaccacagaaccacattctcaccaggtcacctaaacttctaaacaagtctttgtgggagatatccaggtagtatatatattgggaatcctcacccagagtttaccatgtagaagattgagatgtactgcacacaggaatggtcatcagtaccatataacggacgattgctgattactattactggttgcaatgtaacactttggatacaatagtacattacagagctagcttaatgcgaagccacaataccgtcagcgcaggacgatcataaataaagcttacacaacata

SEQ ID NO: 34046 - DNA, 258 bp, Oryza sativa
  Clone ID: uC-osrocyp002h04a1
tttggttttttttttttttgggtttttttttctttgtgttttttaaacacagccttgggcagaaggaaattaagtaacaagaacagtaattcatgtcagtaaacgggccagagggacaaaagcatgacacattaacaaacctcatgttgtgaccaggcttccactacaattcaaaaggttggaagtttaagaaccacatgcattattgatacacagtctgagagggtggaaggtaaattcatgagccagcccccatag

SEQ ID NO: 34047 - DNA, 367 bp, Oryza sativa
  Clone ID: uC-osrocyp002h05a1
tgctcctgaagggagaagaggaaaaaacccgactggttttggccggccaagtcgcgaagcgcttgccaagaggggtggtatagcgactgtacaatatcaatatggcagggtcttaatctgtctcacatgttatgatggaatcgctctcacatgaagtagctcagtgctttcttcttcctcgaaccgccctcgccatataggtcgttccattgaagaagttcattcatgtttgctgaatcagatgaaacgcttgcacaaacctgctcatgggcagatttgaaatcatctaaggtcagaggacgaatgtcctcactaccatacaatgcaggctcaggcctgccttctgcttttgccacatttttctcct

SEQ ID NO: 34048 - DNA, 275 bp, Oryza sativa
  Clone ID: uC-osrocyp002h07a1
cggcatgcgcacgcgcgcgtgcgcgggtcctctttagcgggcgcgccctttttttttgttttttttttttttttttttttttttttttgaaaaagaaaatgatgtccacagcgtcaaataccacacatttcactggggggaagcactcagtttaaacccattctttgaaggcctcggcagaactttattgggtttggaacaaccaggcaatttttgctggcaaagcccccaggaaactgaactatagtttactccactcacccaaggggcgcaca

SEQ ID NO: 34049 - DNA, 388 bp, Oryza sativa
  Clone ID: uC-osrocyp002h08a1
gtccgacgcggtcgaggaagaaggtcgccacgaggatgaagagcgtcttggtgacaccgacggcgcaggtggtgccgaggaggtgtttgtcgtcggtgatgccggcgctcttgaacacgcgcgggctgtagagcacgacggagtcgatgcccgacgcctgctggaagaagtggatgccgatgcccgacagcaggatgcgccgcatggccggggtcggggacaggatgagctccttccacacccgctttctcgtttccgctccctctcttggggacggtcaccacgtcgccgtcgagctcctcggcgatgccggcggcggccttgatgtcggccaggcgctccgcggcctcctacgccgtgtcggaggtcttctccagcaccaccttgg

SEQ ID NO: 34050 - DNA, 294 bp, Oryza sativa
  Clone ID: uC-osrocyp002h09a1
tgtttttacataagaaaccgagggaatccattattcattcacttaatgatcaaccgataaacacatacactcatacagcactgatacaccgaaaaatacaaggattacctgtgacgacacgtacagataaaaaaccatacaaaccacacatgaacacaaggagaaacgaaacgaaacggctcgatactgcatcatatccatctcagctcgttcacgcgtacgtacactacacatatatactcgggacgttgcccttctgctactatctgcgatggacggctctgctatcatata

SEQ ID NO: 34051 - DNA, 406 bp, Oryza sativa
  Clone ID: uC-osrocyp002h10b1
accaatatatatgtatttacgtatgtatgtatgtgtttcttatgtttagttacagagatggaaagaacattaataagtatacaccaagaccaaaaactgacaaaaacaaaagatgtagagggggcaagcatcagagagaacaacaaaatgtgtgactaaacaatgtataacatacacttgctcctatctttctttcctgtatacaaattatccttaaccccccaacaataatgcctaaactaaaggaattaatctagctaaattaagaatcatcttggaaaaaaggagagttctctcatattaatatttctccccatcccatgcatgcatatgcatccatcaccttcaaggctagggaccattttgcaaataaatctctctctctagagatctctgatgcttgatc

SEQ ID NO: 34052 - DNA, 365 bp, Oryza sativa
  Clone ID: uC-osrocyp002h12a1
tttggttatttaaaacttagttggttctttccataacagagacgacagccccaaatacttgacttgtccactatgattttcttgacaaacttaggtaccagataacattgagaaaagaaaaagaaaaacataacataccacctataacttaccatacttttaacctaacaaaattactctccgaatgctaaatgtgcgttggagttcttatgggcggaactgaaatctcaagggcacgagcagattgattttgctcggggaaaaaacccaagaaatctcctcccaagcacccacactcacaggcccatcacaccaacatgaataactttagcaagctcttaattcacacgcagaaatccacctgc

SEQ ID NO: 34053 - DNA, 83 bp, Oryza sativa
  Clone ID: uC-osrocyp002h12b1
gggtcttacgcgcccgttttaatctcaagtgaacttggggggatctagtagagacactagccgtggtcaacaaaaatatcggg

SEQ ID NO: 34054 - DNA, 440 bp, Oryza sativa
  Clone ID: uC-osrocyp003a01a1
aacacaatatcacagatttcctttttgactgaatatccagtatgaatagaccaaaatgcccctacctacactggtttccaaacatgggggaattatcaagaagacaaagcaaagggggacatttttctgatcatgccaccaggaggggcaccaccaagatcgccgaggcggtgggggccacggaacgcgggggcccgatcggagcggacttgggtaggtaggggtaggagtccggcgggggtattttgcactcgtcgccggtgaagtagatcttgcgcgggaacccccagccctggttgaaggggaaggtgttgaactcctttcgcatcagcacctccaactggacgttgccgaacgggcctgccttcatgagcaggccgttgtataacttgagcccgtaaaacatgcccgtgtttttgatgttgccgaaggggaggagg

SEQ ID NO: 34055 - DNA, 495 bp, Oryza sativa
  Clone ID: uC-osrocyp003a02a1
ggctgtaaacaagaaaagcagaagctttttcctatttgcccatatgcccagcaaacaactatcgcttcctccactacatcaaaattcgaatttacagcaggaagcaattggacaaacccaaaactagagaagaacgaacgaaaaatctataagccgctgggcaacaccttttgccgctgggagctttagcacctggatcactaattcactatgtgcaaagaaccatttggtcctctcattgcttacccaccttgcggcctggccatggcacttcaaagatggctacatacatacacccgacaacagctcggagtaccgcaagtcgcggccattatggctgtgccatcctccaagcacatatgatgatttgtagggcaggttaccgcgatactccaggcgcataatttacgacatccagcagcatcaaaattgagggccttgttcgagctagtttggaagcagaaggaaggagcgtctaccatatgcacagctaat

SEQ ID NO: 34056 - DNA, 438 bp, Oryza sativa
  Clone ID: uC-osrocyp003a03a1
ggaacagcaaaggaagaaatgcatatttagatgcacaactctacgagtctcacggtgcaagcatagccatctgaccacaaaaaatgttgagccactgcacacggtgcagtgtcagttgtagcattcacaacataccgagtttttttttaggaggtaaaactctacgagtcttacagcatagtaaaacgtatccagctattactagatacgagtagcattttttaagtcgcaaacaaaagggatacagttctggcttaaggggtgtaaaatcagcttcactatcttcatgttcgccggaacgggaaacagagcacaatcatctttgggtacaaaaatttacgggaaacctttgggacgacgttgatttgggaaccaatgacgagtttcctagatgacatactctgcttactgttgcgcgcactgaactctttgggcacc

SEQ ID NO: 34057 - DNA, 486 bp, Oryza sativa
  Clone ID: uC-osrocyp003a04a1
tttttgggtttttatcacttgaatcctgatgatgccactgctccattgccctttgcttatacagtgctttggcacacaggagccttttcttccatgtgcctctgtaattaaacccccccaaacaaatgaaattaaccattacacataattcagagtatcgtttcagtctctgcctaatacttcaaaacaggtcttgcgttacttttgatgaagcccaacatcgtcttcgtacaagagcttttctacgccaagagtacctgcctgatgctttcgcatgagcaggatgcagtttagtctcggcctgtcgtttaatgcccttgacctgctttctgaagatccctttgatgtagctcaacagccaagatccaacatgtcagcaggggttggtttgcttgtccatgtttggcacgatgttttgcaactggatgtggagcacgctgatccttgtcctcctcacccgctgggagatgctgagggggtgcctgg

SEQ ID NO: 34058 - DNA, 459 bp, Oryza sativa
  Clone ID: uC-osrocyp003a05a1
tttttgtttttttcttgttttgataagaagtccatttaagttagaaagcatcaagtttaatttgttcaagcacaaggagtaaacctgcatcgcatcacatatgcagatatgctgattaggggttacataccacgcataaaggacacagacacaggccctctagtaggctagttcacgatcattgatcatactgcagctgtaattcagtaactacatggggtcaaacatttaggccaaggaagtgaagaaaccgccggcgacggagagaacgaaccggttgccggacacgcgatgcccagatccgtacgcgtccccggcggcgccgctgctgaatccaccgcccccgttcccccagaagcgcgcgtagcacttgccgaggtacacctcgccggccgtggcgtagccgcagccggccttgagctggccggcggcggccgagacgcattcggagcaggcctt

SEQ ID NO: 34059 - DNA, 355 bp, Oryza sativa
  Clone ID: uC-osrocyp003a06a1
tttttgtgtaggatcaaaacatttctattaccacaactttttaaggatggaattgagtagcaatactttcaccccaaaatacagtttagcgacaatattcttaaaaaagccgcttgctttgccgccatggctggcaagctgagcagagcagctaacacaaagaacacgagatcactataaaccaaacggcaacgaacgaagaaaatacagggtcttttttgtctgaagatacacgaagcgggtggttttcttttattttaaacctcctttcctgccacattgtcgctgaatgggaaatcatcagattgatcctaaaaaaacaaccccacaaggaatacttgaactatttcaatgg

SEQ ID NO: 34060 - DNA, 478 bp, Oryza sativa
  Clone ID: uC-osrocyp003a07a1
aagccaacaacgtatcaatcgcttcaactttttttacacggcttcagataatggtcaatgaaaaatattgtgcgacagcaatgcacattgcatgactatggattagcttggagcttactgtgccagattaacttaaattatgtccatggaaaacagacgacacccggcccccacccccaagccactaaaacaaaacactggagtactggactgaagcagcatctctcttcgattgctgactatccccaaagattgtacacacatgggaaattatattgtagctagactcgttgaaattccgtagagtacagccaatcatttgtacatttcacctcttcattgtgaacctgatcacaatgccatttcagcttgcaaggctgcaagctcatcctcctcagctgatgctttctgtggagcagggcgagttggtatcctggtgcctgggacctgcactggatgcacaggtggagctgcaaca

SEQ ID NO: 34061 - DNA, 469 bp, Oryza sativa
  Clone ID: uC-osrocyp003a08a1
tttttggtgggcttaatttaattttcttttgtccggaactagtgacagtgcattaggagttcattcaggaaaagacaaaacacatactgcagtatcatacctagatgcatccaacttccaattctctgagccagcaaagatagggcatgttctaattcaaaactgcaaacaaactatagccgactcaaccaaagatagggcatgttctaattcaaaactgcaaacaaactgtagccgactcaaccaccaaacatatgagaggcagtaagggttgaagatccatggatctgttcaggcgatggtaacatcaactcttccggccacttggtccagatcacgccttccctgggaggtgatgagtcttccgcccttggggtcgacatcgatgatgcccatcttctgcagctgctgaaggatgttgcgtgagatagcgccgctgctcttgcagaagtgcgggggacgtgagcca

SEQ ID NO: 34062 - DNA, 388 bp, Oryza sativa
  Clone ID: uC-osrocyp003a09a1
ttttggtttggagataatgcagaacaaagagttactataaaagggctaatgcagaataagaaaatacagattctggattaattaactagcatatttaaatttaaaacgtaactgtttgagcaaataccacgaaatgttcaggcgctaagatacggcaataccgatacatccagcatagcaaaaatggcgaagagcacagagtcagataaagctatagagaactagggctccaggagatgggggccgaatgacaaccatggcgcttagtcgacctcctgcatcttgctctcgccggcgtcgtcctccagcggcggcatgtaggcgtcagcctcagcagactcgtcctggtcaatgctcaggccgagttggagcatccggtggatcctgg

SEQ ID NO: 34063 - DNA, 417 bp, Oryza sativa
  Clone ID: uC-osrocyp003a10a1
accagagttgcaagtcatagcatttgctcacaaaatgcacttgaagcaatgttatccatgaacgttgacaggaaggaagctaacacgcagtaaccagatgcatcggcattcaaaattgattctcacttaacattatgcaatactttaacatggggctacttaaacagatctaccaaatacattacataatgttaagtaactcagttttcctccagtagctgacgaatgatgatccgcacatttcctaccagccagtaggggccggagcactgccttcctcccatccaggggcggcaggaggtgcaacagcagcagcagcggcaggaggaacagcaactgcatcccacccttctgcagccacaggagctggagcagcaccccattccccaatcggtgccacagggagggcaggaggct

SEQ ID NO: 34064 - DNA, 515 bp, Oryza sativa
  Clone ID: uC-osrocyp003a11a1
ttttgtttaaacaggaagcccacctaggtaactcaaatgaagtcaatcattctccaactagttacagcatatacataccacactgtgaacgcactcctcccctcccctcccctctctcaaaacagcatatacttataatggaaacatggcccttcgccacagttagacaatcacattcactacctctagtggaagacacacagaattaccattcatgggttatacattcaactattcaagggtgactgcccacagcatacccctccttcagccacattgccactcagcaagaaatcatcagattgatcctcagaaaacaaccccacaagtaatacttgaactatatcaatggagaatacatgcaattacaagctatccctgccaggagttaattttttatttttggaagatccaacatcgctactgggggttattagaagatggtctaaattatccgcatcacttccggcaacaatggatgcattagactccatatcatcatcaggaaactcggg

SEQ ID NO: 34065 - DNA, 482 bp, Oryza sativa
  Clone ID: uC-osrocyp003a12a1
gtgcacgcgcgcaagcgcgggtactctattgcgggcgccctcttttttttttttgatgggatcaaaacatttctattaccacaactttttaaggatggaattgagtagcaatactttcaccccaaaatacagtttagcgacaatatcttagaaaagccgcttgctttgccgccatggctggcaagctgagcagagcagctaacacaaagaacacgagatcactataaaccaaacggcaacgaacgaagaaaatacagggtcttttttgtctgaagatacacgaagcggttcgttttcttttatttttagtctcctctcctcctcgatgatgggtgtatggcaatggcaatggcgatgggatcttggcttagttgatgggaaggggctcgccgttccactccttgaggcagtcgagcatggggtcgatgagcttggcctggctgatgccgaggaacacctttgtgcactcctcgccgggggac

SEQ ID NO: 34066 - DNA, 468 bp, Oryza sativa
  Clone ID: uC-osrocyp003b01a1
gatcataaggcaaagctgcgagcgccagatcatcttattactacagcttcttggcgatatgctacagtagcttcttcctcccttgcaaaaagaaacccaaaccttatctacaacgcaacacacacaccggacacagagcgctcgatcgatcgaagcagacgagacgacgatggcgaactactactaggtaagcgacaacacctaggctatacagggatacagcgcgcggcggcgacgggcggcgagacggcggcgatgatcaggcgctggccttgttggccttcttggagatggcggagcggatggatttgggcggctgcatcggcttcgcgggggcggccttcctcgccctcttggcgcgggctgggcgggcggggggaaccgacttcttcgcctccgccgacgacgcgggcttcttggcggcggcggcggaagggcgcggggtcctcttcctcttggcgccgccga

SEQ ID NO: 34067 - DNA, 485 bp, Oryza sativa
  Clone ID: uC-osrocyp003b02a1
gacgaagatgtcggccgcctcaacgatcttgccggcgctgtccttggtgaggcagcccatgaagccgatgtcggcgacctgcacctggccgcagctgttggggcagtcggtccagtgcatccgcaccgcccggggcaccgacacgagcttctccacctgcgacgtcaccagcagcgcccgctgcttcgtctcgatgatggcctggccgcagaactggttgccggtgcacgcgaccaggcccttgagcagcagcgacggctgctgggagaacttgtgtagcagcggctcgcagagcaggaccttcaccttgtcgttctggacgttcgggatcacgacgttctgctccacggtgcggcggagctagccggagccgtactcgtcggcgaggcgtgcgagctcgaacatgtccgtcgactgcacccggccgacgggcacgtgcaggccgacgtaggacatccctttctgattctgcgggtgcacgccga

SEQ ID NO: 34068 - DNA, 481 bp, Oryza sativa
  Clone ID: uC-osrocyp003b03a1
aatgatggttctgctttggtacctcgttgatgccttacaaatgtcaaatcaaatacaacctgatagtttgcaaactgacaccagcccaggtgaaaaggaaaacaacgaagaaaactgcaccgattctaagaaagaaccgaatccaacacactataaaaaccccagtgaggggagagaaaagaaatcccgggttagtctactgagccagcagcatcttttggacggttctgtacagatgtaaaagctgttctatacacgcaggcaattggtacctttgttatatgcaaaaccataatggctagtgaaatacgatgctaaggaatgctcccctttcaagattgatgggtagctgccctccaattcttgtgacaaactgaagtgtccagctgatgggtttttggaagaacttgacctaatatgcgcaggaggttaccccatgaagttccaagaagtgccacataaaccacaaacaggaagggga

SEQ ID NO: 34069 - DNA, 454 bp, Oryza sativa
  Clone ID: uC-osrocyp003b04a1
gacattatcagccaagggtttatttgatgctgggacatcatcaacaggaggccacatgcattcatggtagataggtaaacactaatcctatatgacacatacttttggccggtggccacttgatcaactcaactggtcacaggtgcaacactacgtaccaatcctaattaattcactcggcacctgcaaattctgcatgcaaattactacaggctacggcagtaatctgatgctgaattaattccttatcccctttctggcgaaacatggggaccactgcatcttgcatgctctagctacaacctcatttttggcactacagctagcttgcacattgcatgcccagttcatcatcatcaatcacactttgcgtctttggtttgcaattcgatccccttctgcatgaactactactgtcgatcgatcgtcgatcgatagttaatttgattggatg

SEQ ID NO: 34070 - DNA, 514 bp, Oryza sativa
  Clone ID: uC-osrocyp003b05a1
atactaaaacaaccatttcattcattttactgtttatgttacaacctacgaattcttacaacatttcaatactagcaactatacaactctccaatgcaaaggaatctcgtccaactctccaatccgaagttccaagcgtgtcaaagcttcaccgtctcagcagagcatcctacaagggtttccagaacggaaaaggaggacatgaaagtatgaaacaacacacacgctattcttgtgagttgtgcctatttaaaaaaggaaaaaaaaacacctatacggttggagggtccacggatgttgaactctttgaagaaacccaagtacgtggctttcttgtgtgtccggctgatggaacccaaaaagttagtttgtatcttcacagagtgttgataaaggagtaacaccaacgtttgtctttgatcttctgctttcttgaattcagtcttcgtcctttactaaatagcactccattctacattcaggggtagttattccattaaccaagcttcaatgc

SEQ ID NO: 34071 - DNA, 489 bp, Oryza sativa
  Clone ID: uC-osrocyp003b06a1
gcgaactcttttttttctccttgttttctatttcatttcattccgatagatagcaacaagcagttcaaacaccataaccaaagcgaactcaattcatggtaacatcacggacgaagaacacctaacactggatggatggatagagggcttctcgactcgagagagccactggacacgataacgactcgactcgatgataagatgattctgacacggatagctaaggataactggccacgatgggccccaccaatcagttcctccagttcccgccggagtcgccgccgtagccgccgccacggctgccaccgtagccgccgccgccgccgccacggtcgccgccgtagccgccgccgccaccgtagccgccctcacggcgcccgtagccgccgccgccaccttcttcgtagccgccgcctccacgaccgccgccgtagccgccaccgccgccgccgtagcccccgtcttcgccggcggagcggcgggact

SEQ ID NO: 34072 - DNA, 452 bp, Oryza sativa
  Clone ID: uC-osrocyp003b07a1
ttttgggttttttttttttttttttttttttttttttttttttaaaaagaaaacacccaatcacagaagctacagagtccagacattatggggacctcgccacagggactacatcacaaattcacaatgggaacaaaacaaatcctccatataaaggaccggagctaacaaaatctctacgaagctcaaaatcgaaaagagggcatggatgacagggcccacaaaatgagacgcggggccatagagagggctacactttgaactccagaagcagcccttccttttggagggccttgaccttggccaccgggggctgagctatggcgaacttgggaatgaccgggatgttgttccgcgaggcgtccttgaggaaaagcccggcgaccttgccggcctctgtccagcgcaagcccaacttgggcttggcccccgggggggcgttggcaccaaac

SEQ ID NO: 34073 - DNA, 457 bp, Oryza sativa
  Clone ID: uC-osrocyp003b08a1
ggcgagtagtcggccccggtacaagtgctacagccaccctccctcgccgtcgcgcggggacgcgacggccgccgccgccgccaccgatgacgacgagctcttccctggcaccgatacggacacggacaccaacaccgatgacgactcgctcttcagctcggcggcggggtccgagcagcagaacgtcgccgccaccccgaggaggctgaccaggctgaaccatttcactgccgccgccgacgccgccgccgccatggacgactccggcgacgagcatcagcagcggacgcttctcaagacactgagcaggtcggacagggtcggcctggcatggccggagcagccgctggacctgctcgccaaggacgccacggggaccgggagcaccaccatgccattggcaagatcctttcgaacctacaacttatttaaggcgtgttggggcggcggccgccgc

SEQ ID NO: 34074 - DNA, 451 bp, Oryza sativa
  Clone ID: uC-osrocyp003b09a1
tttttgtgtttttttttagagagaaaaaaaaatgcagcagatatgcaaagatcgttacaagacagatatagaacagagaagctcaaggcgtcattaaccctatgaagctttgacaagatacattacattaatatatattggctatgccgaatgccgatatatcaatatcgctggaagatggattgcacaacagtggctgccttagttggaagaaacatgttgatgttggccattgagtggagtgacgtttgagatcaacagatgccttcatgtgtgacttgtccggagcatccatggcggaagcttgatgttgcctgcttgtgccggagacggttgagcttctgactcccctgatcctcttggttggctttgactgttatttgttgtcgggatgggacctgcagccgtcactggtgttggtgatgatgagcttggggttgctcaatttggc

SEQ ID NO: 34075 - DNA, 501 bp, Oryza sativa
  Clone ID: uC-osrocyp003b10a1
gaaacaaatgatggggacatcagttttgacggaacagtttgcatacaacagcattgcaacccaaatccttttatccgaagaacacaacgacgacagcaaccagccgagtgcagaggcaaaagaggagctcacatcctgctcttcttgacggggccgagctccttggccttggtcctcagctcgtgcttcttgatcttccccgtcgccgtcttgggcagcggcccgaacaccaccgacttgggcacccagtaccccggcatcctctccctgcagaaccgcatgatgtcgccggccaccgccgcctcgtcggagctgtcggcgccttccttgagcgtcacgaacgcgcacggcgactccccccactgctcgtccgccctcgccaccaccgacgcctccagcaccgccgggtgcgcgtacagcaccttctccacctccaggctgctgatgttctccccgccggagatgatgatgtccttcatccggtccttcacctcgatgtac

SEQ ID NO: 34076 - DNA, 475 bp, Oryza sativa
  Clone ID: uC-osrocyp003b11a1
aacaaaagccatactctctgtattaaagatccaacaggttcagagaacacgcaagctcagaactacacatcaccaaaattggagcaagtttgggggtacatatccgctcatacagtggaggatttatttctcgattctacgagctttttaactagagttcgaccgggaagtcaattacggatagaaatgagcatcctgtcttcacaaaacccatgcacacaacagtgggcatgaaccgcatgatattcaccatcaagtttagtagggctccacgggtgcgcggaacttggcaccagcgtagacagcagccgcaccaagctcctcctcaatcctaagaagctggttgtatttggcaaggcgctctgatcggcagggtgctccagtcttgatctgacccgtggccaaaccaacagccaaatcagcaatgaaggtatcctcagtctcaccactcctggggctggtcatcacaccccag

SEQ ID NO: 34077 - DNA, 410 bp, Oryza sativa
  Clone ID: uC-osrocyp003b12a1
ttttgggttttagggcgggccatgtaaccttgactttgtagtcaattatgtcataaaaataagctggagtactctgcagcgtaaccaaggttaacatacaacaggataaacagaaagttcggtatacaacatgaggcattacactacagaaagacttaaactctgatcttactgttgaatacaatgatccgcggaaatgatatcataaactctagttgttgatcttcttcttgggcctgagctggttgttgaggccgcacttcttcttgcgggaggtgtcagccctggggtgcagccgagcatagcacttggggcagatcatattggactgattgtacttggggccaagggcctggggggagggctcgatgatgcccccgcggaggcggtggacgaggtggagcgtggtc

SEQ ID NO: 34078 - DNA, 471 bp, Oryza sativa
  Clone ID: uC-osrocyp003c01a1
agagggcacatctcagggaaatctttacagttgcattgtaaacattgagtttgtacatgaatccatattacagtaaaaaaaaagctactattgcacaatgctgcaatattcattgcagtgcaacaaactgatgtcatgatagtaacaagcagataagaaattctgcaaccagaattcagagagcttcacttatatttgataaaatgaagcatcagaagcacaacgcgcacatattctcaagccttgcaagataagtactaatttacatccccattttgttttcatttcctggggttctccctaacagcaaaccgagtaagacattacccattatctaaaaagtaagacattaccactactttctcagtgatattctacatgaaaaaagatgacaattttttcttgcagtctataaccacttgagacctcaactccgacccggctgagattgattcccttgttcaacataag

SEQ ID NO: 34079 - DNA, 454 bp, Oryza sativa
  Clone ID: uC-osrocyp003c02a1
ggaccaaactcacaagtttatttcaacatacttccatttatgatcctttccaatagaacactggcgccagccattatttcatcacaattccttaccactttttggttaccatacacttggggggatagccagtaagggggggttaaaagggcttccataaaatggaatttttcccttaaggtacctaccttttgggggggaaaaaaaaaggggaaaagaatacccaaccctaaaattgaactttaccgggggggcttttttgggcttcctgggggctatttactaaaaactgggggcttggtttggctaaacttggacctcccaaattcccttggaggcaccacccaagaaaggccccggggtcccaaaggctactttttttttggcattttttaggggataacaatcttttaggtggcccgggttcaaaatttaagggaaaaaaaattttcct

SEQ ID NO: 34080 - DNA, 442 bp, Oryza sativa
  Clone ID: uC-osrocyp003c03a1
atgggtctgtgcgtgtatcagttgatcaattagataacaccaacattgcaactttacatgatctgcagccggtaaggtgatcaaatcgtctgaaacttttttttttttggctacctatggatgtatctttctctgaacccacacagttcaagcaaagcacatatcacccaaacctcaaatgaacaatcatatacacaatttcacaaacccaatctctgacacgccaagaaaaacggaggccactgcagcaaactcactcactctatacagggaacaaactgtgaagattctactggatcagctgccattgccggcggtgattgagcgaatgctaggagatgctgagcacggtggtggctctagctcttgacgggtccaagctgacgcacttgaccaatccacagatcatgttcacctcctgatctttcaccatgctcttgct

SEQ ID NO: 34081 - DNA, 500 bp, Oryza sativa
  Clone ID: uC-osrocyp003c04a1
ctgcaaaatgagtcatcgattcacattggcctttgcttaagcagcgccctaaatcagaacatgctcgaggagttgcaagagggttgctttggatggcacggcagtacggaactgctactgcctactgggcggcatgacgcaccttttttttttttacctatgtacacgacctatgtacacgaaagttaggagtacaacttggatctcctggaaggtgcagatcatctggtgtgcgccgctctcagaagagaagcaggcagagcaccgcgaacacgacaaggaagaaccatatctggtgcagggacctctccacctccatgtgctgccgtctcagcctggggctcatgtggtaagggctcgtgtagtacgcgctcgccgccgccgtcgccggcgactgcccgcgcgacacccacgggagcaccgccagggccatccctccgagcatccctccggtcgttgtcgtcgtcgagtggaacatgcccacgccgcccacggcagca

SEQ ID NO: 34082 - DNA, 459 bp, Oryza sativa
  Clone ID: uC-osrocyp003c05a1
tttttgggttttaagtaaaataaatagcaccaatctaacccacttccagaaccactcaacaacgggattatagtactccaccccccactgaataagcgcgaaacgcaacgcaccaaagccagacatggtctttgcaacttgttgtctttgccgctaggtttttttctggcattttcgacgatactataaacggagtcttagagcgagctaaaaaaaagcaaaccgaaaacgggaatacggcaaaagaaaactaggcaaaactaactagccaactgctccccagtagcagccaggcagcaggatcttgggcccgtgctgccagtttcacagataagagttttccagaccatcagttccttgggaccacatgcctgttgagttcttcaggaccgtcttgttcttcatggctagctagggaacatggggtatgtgatccagttaactagctttgacggtgcc

SEQ ID NO: 34083 - DNA, 496 bp, Oryza sativa
  Clone ID: uC-osrocyp003c06a1
ggaatgttaataatcatttctagatgattagagttccttcaagtatgttagagggcaaatacagccaccgttatcattgaaggaaaggcgccctgcgccttgtgacctgaacttttcgcagcctaagaagaggcccttctcagggacatgttcagtacatccatttttggcatgccaatgccccatcgatgatttcttttgaccggtgatctacacaggcgctttcacaaacacaatcctcaaaatccaacactttgccagttgttactaacaagcaacgccgttcctgcccatgtgatcaccagcagaaaccatttgggccccgacggccatatcttcactttcactatctgatgcatcgtcaagtctggctatagcatcgagtaatgactgctcctggtcttgcaaaagtttcttggccttttcgatctcacccatatttggattggacaaaaccctctccacctctatgacaacacttcgagtgtaggtacat

SEQ ID NO: 34084 - DNA, 351 bp, Oryza sativa
  Clone ID: uC-osrocyp003c07a1
tggaggatggttatgagtccttgtgtgtgtgtctagttgataatatatacttgcatgggcagttctagccttctagcatggttgatagttgttatgtggtggcagatggttgtggcgtgcaatcttttgtggagttgagcaatgctggctcaaatctgctgatcttttcccccctttcatgttcaactttaagcatagttactatatctggatgctagaagtattatggtactatcaatgccccaagtgaaccttgtgatatattgtttcatggctttatgtttctttaccggttttaggctagtgggatgtattctggcattactttgttttgctgatatgacatctggt

SEQ ID NO: 34085 - DNA, 493 bp, Oryza sativa
  Clone ID: uC-osrocyp003c08a1
tttttgtatttttaaaactattttcccgatcgaatacacatacaaccttattttgatcgttaagatggtgcatatgctctctctagctatatatctactcctcgtctccctcttacatgtcgctatatagccttagctactttttgcatgtgtgcgtgtgtggctaataacctaagctaagccgattcaattgatttctagccggcggccgggtgcggccgggtggtggtccagaacaaggcgagcgcgcggaggcggccgaagtagtcgtcgacggcgacgaagcagcgcgccgcctgcctcaccgtcaggatccgccgcagcgcgtgcagcgttcgcatcctctcctcatccgcctgtcgtaggaagatggcgaggttggcgagcttgtccatggcgagctgcaggttgctgtagctgccgtactgccccatgaagctcgccgcagccatggcggcggcggcggaggggtggtacatcaccggcggcgtct

SEQ ID NO: 34086 - DNA, 490 bp, Oryza sativa
  Clone ID: uC-osrocyp003c09a1
ccatgtaaacagaccacatgcatataatacagaccattcaaaagattggtaatagtaaaaatacaagttcgtgaatggcgataatacttaaagctacctccaaatagcgtgtagcattgcgtagcaaaccaagcatataacttaggacaaacattcagttgcagcttcacatcatcgctgcttatcataactgcaataacagcgcagatggagcataaactaagtatatttcgtagttctagcttatatataatatcagaatcaccaactgtgaaccatccacaggatggtcgggggactactgatcagaatctactcctttgaggtgtggatggcagacacggtggagaccatagaatccacgccacatttgttgcggacgttggagcccctgcagatcttgtagtacccatgctctccccagttctcgccccaggagttcttgatgatccagtaggccttatcctttaggcggattggagcaaaacca

SEQ ID NO: 34087 - DNA, 516 bp, Oryza sativa
  Clone ID: uC-osrocyp003c10a1
ttttggttgcacaagaagccaaacgtgagagcttgtacaaaacttcagctctcttcaatgttgactacgctaattaaaattgtaactccataaaaactcggctacgccgagaaaactgtaattacaacagatacggcgtagccaattcacgcaatgcgcacccatacggctacagtatggttcatttaacgtctgatagacgatttcttaaggtgctgccgcaggtggcgacaaatactgaaaacagcgaggtaatccaataaagaaataacattggaaatcctctccagcggcaacccaagtctctaaatgatcataatcactcgagttaccctgcaacgcaaatttgtacccgggttgcgaacgggcagttccatttgtagaattgtagttggtgttacgggcaaaataacaacgagcgtcattttcccaaggcacttcaaattcaacagtaggatttactctcgaattaaaatagacggcaccgttcggtccatcaggataatctaacgggcc

SEQ ID NO: 34088 - DNA, 522 bp, Oryza sativa
  Clone ID: uC-osrocyp003c11a1
tgattgatttcgccagggagaaggtcgggggcgccgcggcggaagtgcggctcatggccaccgccgggctgcggctgcaggaggggcgcctccaggaggccatcctgtcgtcctgcagggacgtgctcagggcttccggattccggttcgaggactcttgggccgaggtgatcccaggctctgatgagggtatctatgcttgggttgcggcaaactatgctcttggcacacttggaggggatccacacaaaaccattggaataattgaacttgggggcgcctcagcacagctgacatttgtttctgatgaagtacttcctccggaactgtcaagaaatttcacttttggtggaacaacatatactctctatagcaacagctttctaaactttggacaaaatgctgcacaagaatccttccgtgaaatactgcggtcaaaagactccaaaaatggtacactggttgatccatgtgctcctaaaggatattctcgcatcaaagaagtaatatcaagacccagca

SEQ ID NO: 34089 - DNA, 512 bp, Oryza sativa
  Clone ID: uC-osrocyp003c12a1
agtacagtgaaaatattttttttaacgactcgcacgagacaatacgattgatagagcaggaaaatattacaggactataaccctggagggtcataaccaggaaaaaggaaaaaatataccaccacccacacactgacagcgccaacacacaagaccgggagaaggctaacaccggaccggccgccgctaagcatgactgatcaccgctagaccgacaaaggaacgcagacgagatcacctaaaagaacaccctcacaaccaacgcaaagccaactcctagagtgtgcttgcaccaatcgatcgagaggcttcggctaggggatgccaaaacgacgtcttcaagaagagaagcgatagaaaaccgccgtcaccgtccgtcggggctcaaagaagccaagactggctttcgcccggcaaccacccttgagggatgagacagcacgacaacgccctcaggagggagaattaaccatcgttgtcggtccggccaaggccgggctgggttttacctg

SEQ ID NO: 34090 - DNA, 225 bp, Oryza sativa
  Clone ID: uC-osrocyp003d01a1
attgagacgttagaaaaaaaacaagtaggactaagaaaggaaaaaaaacaaaacactgaaaaaacgaaatccgggcggagcaacacaaaaaaaaccggcgggcggagagagcagaacagccggggagacaaataagaccgccggtttacggcaacggaggcgacaccacggggcgcactgcagtcgtgcagcctacggcgccgccggccccggggcggccgccaa

SEQ ID NO: 34091 - DNA, 420 bp, Oryza sativa
  Clone ID: uC-osrocyp003d02a1
ggctgaatgactgaatgatattatgataatgttaaatgaacttgaactgttcaagataggatagataggaggaggggagccggccggagggtggaaggcggcggcccaccaaaccctaaattcctttcattttccttttttttttcccgcatccgacgcatcgaggcaggggatattcttttcttatccttctaagttttcgttcttgcattcttctcgatgcaagagaagatgtcaatggcgtggcgtcgccgacgagttcagcaacggttgcgcacggacaacgccaccacctgcgcccactgcttcagcctcatcttcaccgtctccggcgtgtctcctggagagagtatggacatggggctcccgagcggcgactcctcggacacatccgacgaggaggcgccgcacgagcagggg

SEQ ID NO: 34092 - DNA, 413 bp, Oryza sativa
  Clone ID: uC-osrocyp003d03a1
tcttcccccctcgaatcccgataagcagaggcggaattctccaccgcggcagcaacctgcaacccccagttcgattcggctgcgaggtgaggtcgtccgattcccaattcggtcggaatcacgccgaattttttgtctctactagggtttggtttcggtctgaggatttctagtttggtggagaatcgaggtccgatcccccaatcgggtcggaatcacgcccaatttttgtctctatagggtttggtttcggtccgaggatttctagtttggtggagaattacctctgggattttgcggattcgacgtcggttgctagggtttgtgaggggagcgattcatggctcttgagagccacggagcgccctgttcactacgaaggccataggaagctggcccacaaggttggagcg

SEQ ID NO: 34093 - DNA, 497 bp, Oryza sativa
  Clone ID: uC-osrocyp003d04a1
gaacaggaaacatcacgtaaaagttctttgctagccggtttgcaaggaagggaaacgacattggaggggacaatatatggatatttacacatgaaaagatccaacaaagaagtcataatcgcactagactattattattacacactaagggattattattattacagcataaaaacactctcactaaacttgagcagattgttgctctgcttctactagagccactcacctgttaacgcaggagagaattcagcttctgggttatactatgcgaacttctccctttaagcgtttgatccgcttcaattggatctccagatctgtctccctgtgcccacgtgaatgccgcatctcatggactttaaatgtgctgtccacatcatctttgagggctgattcaaggtcttctgttagaagcgccggtaaatttgaccacaatcggcctgaggagaacgcaattgaacttatgctctgtggcgacaagaaaatgctctttg

SEQ ID NO: 34094 - DNA, 498 bp, Oryza sativa
  Clone ID: uC-osrocyp003d05a1
acgagcagcgatctcacagtatatttatattagaatcaaaccaggctggagatgtagactgttctgtacaagaggggccgctaccaaatccagctagtaaacagggaggatttccaaatgtgcaaccacacataataaataagtacacaccagtagcaattgcatgtttgctaaaatgttaattatggttacatatatttatgtgcatatatttatagagcgatgcattaaccgttccagttaagggcgtgcaagcgatcgcacaatatcgatgcaaaacgaagattggtgccagcaggactgaagaagaatggggattaagcacccacgcaattttcccaacaaccatagctcgaactgaaactgcctccaccagtctgttgagcatactcagcaattactttgcgggcacacgcgtcccacggcctcgcaatttctcttagtgacatgggctcagctaaaccccgaagcaatatgctgaacttcgacctcgctttg

SEQ ID NO: 34095 - DNA, 509 bp, Oryza sativa
  Clone ID: uC-osrocyp003d06a1
acattcatacgggccaaatctttcaataccactataactggtgtacataaagtatttcatcagaagtgcagttcaactgctgaataagcaggtacagagctgaatatcgatggtttacaaattccctctccagcttatccagagtaggatcttatcagatacttctgagctgatatctcagcgttatcagaggacagctgaagtaaaagcttgagatatcaagtatcatgatgtctatgtacaaagccatgtttaagatctatcaattacataatactagcacactttgccgtacaccaacctacctatgttttcttagcacattgtacgagttctcatcaaccaaaagctgacgcggtgcaaatcatgatgcagaattgtggataaatctgagaacaatccatcagagttcagatgataaatcagaggacggtgaggctctgctggtgagtgcaggcctcatggtgaccaaagcagattcatttgcaccagctcttagagcaatcctg

SEQ ID NO: 34096 - DNA, 474 bp, Oryza sativa
  Clone ID: uC-osrocyp003d07a1
gtcattcacaaaaattgttaaacttttggataggattttttaaattcttgaaaagatcctttttcaatttttcctcctttaacaacgttttcatctgaccctttgccaactaggatcgcagggatattctcaatagctatatgatttgtcaatccatctaaccactttgcttgatcgtttccgccgaaaatgaagattttctttctggtttgtgatggaaccattggctgaaccatcatccatatcgttgaaaatagtccgggagcgccaacgagaagaagaacacgaactctttccacgtacacctcatccatgatttttgcgagaggtcgaaaaattgagatcgcattatatgctcttgaataccaacctggaacaccaccatctctcaaatcagtcaattctacgattccaagatctaaaacgtttttttctatagcaatcttgaaaacccgttctagtaaatctaaaacc

SEQ ID NO: 34097 - DNA, 414 bp, Oryza sativa
  Clone ID: uC-osrocyp003d08a1
caatcagaactcttttgctccaaaattaactttcatacattaatattctcaggtccccgatttctacagggagacgatgtagtactccacagaagtactcattggcaaacacagacaactacaaacctattatttacataatccgtcatgctgggtacagatatgccttatcaagcaaacgatattcccactttttctcaagaaagaggaagaaaaggtcaaggtaaaacgtctccaaggttaaccaatactattccaagggcctgggttcagtcacatcagttttacttatgctcctttgcgagctcgatcctttattttggttgaacccctttttcaagaagaatgccattgcaagctgggccccaaggttagatcggccttgggatagacaaacaatgcttccgataagca

SEQ ID NO: 34098 - DNA, 457 bp, Oryza sativa
  Clone ID: uC-osrocyp003d09a1
gaaaagcaatatccatggattcagagaacaaggtctgttgatatataattattctgtttttatttgaatacacataaacgatcaaactgtgaaacggtacaggatctgagataattaggaaactacagagcagcagctacaatattaaccatagcagctgcaggataaacacggtgctaaataggcaggctttgttcttctttcacagcctggatatctggaaggggaccatgacttcagtcatctcctccctcatgataatcttcccaacctggaaaaggtcggagatgcctagctgcgtcgacagatgccttcggcaatcctctgcagcaacaatgcctgaagaataagctccatgcacggacccagagtgatcgatgcaggcggcctccccagcgaaaaacaggttgcccaccggagcacagaattttcatacaagtgagttggcttcccaaca

SEQ ID NO: 34099 - DNA, 508 bp, Oryza sativa
  Clone ID: uC-osrocyp003d10a1
atagaaaccaacatataaatagttttttaactgccaactacagcctcagatcaatggaattgaagcctccaacatgccgacatagcaatgttacttcgggtcggaacggagtttgtgcggagtaatttctgggacaactctgtagatgtgcacttttatgttatccttctggacaagctcgaagacacacacatcaaacttctccagattgttgccaacagcaaatttgccccagccaccactgaaagaaccaacagaacgatcactgtagtagacatagttaacttcccaagccttcccttgtggatcccagagtgtgatccttttgttggtacggggaagacactcacggacaaattcacatgggatattcatgaaaaatccaacatagacatatgactccatcattatttgcacggcaaaaggattcttagatttaaactctcttgccctttgaagagcatggtccctctctgcttcagttaccggacgcctctgtgatattact

SEQ ID NO: 34100 - DNA, 443 bp, Oryza sativa
  Clone ID: uC-osrocyp003d11a1
gcaaagcgaaggaatctcatttaatttccagccacgggtaagaaccaagataatcgcggtacacacgctgagataaggaagagcgtgtccacatgtagctgtcgatgagcttaccagcaggtttatgagctgtctggtgtcagtagggtgagtaattgcttgattttctttttgctgaacacttcaattaccatcaatcagctcattaattgtaccgacacgaaatggcactggtaattactgcggttcattttgacactttttgttgcttcaaaggaagaatctcgaattgctttcgcaatgtggtgttttaaattaattggcttgttccagcttcgatctttttttacaagatgccgaatcttcaaactttctaaaattctcgcgccgttatttcgccgcgacgtacgtatacacgacgacgacccctgcaaccccaaatg

SEQ ID NO: 34101 - DNA, 492 bp, Oryza sativa
  Clone ID: uC-osrocyp003d12a1
ttttggtttttttttttttttttttttttttttttttttttttttttgtttttttttttttttttttttttttttttaaggggccctttggaaagcaaaaaaaaggcccaaattcaaactaattcggccctccggaccccaaaaatggggggggatttcgaaaaagaaacaaaccgtctaagttaacccaagtccgggggaggacccggacccctaccaggggggggcccccccggagcgcttttccccctcggcggggacccgggcccccccgccaaggccccctggcccgggggggggccccgggggggccccccaaccaaggggaacggggggctcggggggcccctctccatgttggggcgggaaaaagcccccccggggcacattcttgggccgggccggaagggcaagaaccacaggagccccccccgggacatccccgggcccccgggaaacctctccggccaggacccccgggggggggggccc

SEQ ID NO: 34102 - DNA, 341 bp, Oryza sativa
  Clone ID: uC-osrocyp003e02a1
aagggagggaaatttttttggggggcaggggggaaaataaaaaaaaagaaaccctaaggggggtaggtaggtagtttgaaaaaaaaaaagggcttggatgcaaagtggggggttaaaaaaagggaaaaggagggggaccgggagctctgtgaaaaggggaaaaaatgggggggaaaaaattttttttaattgaaagtggaaaaagaaaaaccccaattggggccaaaatttaagggggggaaacccaaaatggggttttccgccccaaattttaaaccttgggaaagaaaaacaaaacccgggggggtggaaacgcaaagaaagggggaacggggccgggg

SEQ ID NO: 34103 - DNA, 479 bp, Oryza sativa
  Clone ID: uC-osrocyp003e03a1
gggcgcagaaatgcacgggagaggcccgccggacggcttagttctgcttccacagcagcgtggtctcggcgatcatgccggtgacgacgtatgggtccatgttggacgccggcctcctgtcctcgaagtaccccttgccctccttctccgtgtcgcgccccacgcggatggacgcgccgcggttcgccacgccccatttgaaggtgttgatgtcggcggtctcgtggcggccggtgaggcggcgctcgttgccctcgccgtaggcggcgatgtgctccttgtgcctcagcgcgagcttgtcgatcgccttcttgatcacctcgtagcctcccggctccctcatcgacttggtgctgaagttggtgtgggcaccagcgccattccagtcacccgggatcggctttgggtcaagggagagcacgactgcggccacctatgtgacccttttgagatgtagcgggcacccacacttgtcagca

SEQ ID NO: 34104 - DNA, 502 bp, Oryza sativa
  Clone ID: uC-osrocyp003e04a1
agcaggcaaccagatctataacaccaataataaaaaacacaaaaccaaattgctgaaccagagcctaaaaacctatgcattacactgttatacaccgaggccagattatgacatggtaatgcgctacagtatattgtaaaaaacttcaacaaagcaacatcacagattaaatcaagggggggagggggaatcatcagttcaaaggctaggtcttctcagaaatctatatatagctccagagacaaatgtagtgctaggatggagagcaacctcaaggtattcacaactttgccttcttcaggttgaatggagaataattgcctgaattaattgtttgcagtgagcttcagttcatcaggatttaaatcgcatcacaccagaaaactggagcctggaagaaaaaaaaaagaaggccgctccagatgttctggtcactcttcagcttcatcatcattagcaatttcacttttgcagctggtattacaactctgtacttctggag

SEQ ID NO: 34105 - DNA, 492 bp, Oryza sativa
  Clone ID: uC-osrocyp003e05a1
gcccaaacagaccaagggtatcatcatagcagcaaagttttttaacacgcaacatcaaagagacactaatgcaataagataacttgaagcgcggatcactagcaaatttcgcgcttagtcgacctcctcgatcttggggccagcaccgctgccgcctgccgggggagcattgacctcgtccatgccgccggccatgtccgcgccagcgccctggaacattttggcgatgatggggttgcagatgccctccagctccttcatcttgtcatcgaactcatcagcctcggcgagctggttgccgtccagccactggatggcctgatcgatggcatcctcgatcttcttcttgtccgctgccgggagcttcgaggcgaacttctcatccttgatggtgttgcgcatgttgtaggcgtagttttccagcgcattcttggactccaccttcttcttgtgttcctcatcctctgacttgtacttctcggcctcctggac

SEQ ID NO: 34106 - DNA, 355 bp, Oryza sativa
  Clone ID: uC-osrocyp003e06a1
tttttgggttttttttttttttacataaggagcagcagcttaccagcgaccggctgtggacgacgacggctgtggcgacgaccggcgacgatcggcgacagcggcgacgtccggtgatggcggtgcccaaaacagataaagacggctagggctgggatcgatccctttttttgcccccttttttttttactggtggttatatagagtctagaaaggagaacaacgggccaaatcgattcaatccccgagacttcgtttggactccgattactataaacttatagtctattttgcattagtcggcaagccctaaataaaaaaaaaaaaaaaacaaaaaacggggtggccgctcccg

SEQ ID NO: 34107 - DNA, 463 bp, Oryza sativa
  Clone ID: uC-osrocyp003e07a1
ttttgttggaagaacgcgagattgtatactgatcaagatacaaaataagctggagttactactgtcagtaggtacaaataatgtccacatcagttgccagccaacgacataattgtacaccggtcgtattattgtgagctgctgcgcacaaacaggactggaagcctgatggatggagaacgtgttggtggtaatggtatacatcaaagccacatcgtgccggactgctacatgggccacaactctttcacaatagttttctaaacagattgtctccaatgttatctttgtcaacaaattgtgttaccaggctcatcatgcatgtaacttaatattgtcaattattttttctcttcgccttcagaattcgactctgtaaatacaggtttcggctgagtttgggaatatgctggtgcaatgaactttggatctttctgtgcagaatctgcatacttcaaaattg

SEQ ID NO: 34108 - DNA, 435 bp, Oryza sativa
  Clone ID: uC-osrocyp003e08a1
gcacaagaagccaaacgtgagagcttgtacaaaacttcagctctcttcaatgttgactacgctaattaaaattgtaactccataaaaactcggctacgccgagaaaactgtaattacaacagatacggcgtagccaattcacgcaatgcgcacccatacggctacagtatggttcatttaacgtctgatagacgatttcttaaggtgctgccgcaggtggcgacaaatactgaaaacagcgaggtaatccaataaagaaataacattggaaatcctctccagcggcaacccaagtctctaaatgatcataatcactcgagttaccctgcaacgcaaatttgtacccgggttgcgaacgggcagttccatttgtagaattgtagttggtggtacgggcaaaataacaacgagcgtcattttcccaaggcacttcaa

SEQ ID NO: 34109 - DNA, 451 bp, Oryza sativa
  Clone ID: uC-osrocyp003e09a1
ttttgtttttttttttttttttttttttaaattgctgttgggcactattacttttttttcgccgggaaggccgaaggaggccatccaaatatattaagaaggagtaaaagttacaagaaaaaaaaaacatcacaatgcaccaaggggcatgaccttacagcacgcactaccacccaagcacaaaccgttgagggtgaagcctagcaccaaatgacccccgctaagaatggccgaacgccgttaggcctacggcaaccccacagagacaagactccgaaaacgaagccaccacgggggtcacgacatccaggatgccgccatcgcccatttaaaaaagatggggttttcacccagagaagcttatcgagaaaggaagagggtaacccttgacaacgccccaaggaggttacgacgcccgaagacatagccgttgccggccccatgaattacc

SEQ ID NO: 34110 - DNA, 476 bp, Oryza sativa
  Clone ID: uC-osrocyp003e10a1
accatataacggacgattgctgattactattactggttgcaatgtaacacttcggatacaatagtacattacagagctagctaaatgcgaagccacaataccgtcagcgcaagacgatcataaataaagcttacacaacatagccaacatgcaaaccattcggactgaccagagatgagggttcttgaagctgccgtggtgtgccatgcatcacaaatgccgaacaactagattgtagcagccaacatgaaaggaaaaggcatggataatgcagcaaagatggatgatgaagaccgcagattgtgacgcttcgttcaccaaccatatgaaacccctaaattttgtcaagtttctccgccttcaccaccggattagccttggcaatagcatccctagcagcggtccgatagtcaaactggcagtcatgcttatcggaatagcggtgcgttgcgcaatacaagttgccacattcgcag

SEQ ID NO: 34111 - DNA, 401 bp, Oryza sativa
  Clone ID: uC-osrocyp003e11a1
atatcaaccaagcaaaattattatacacacaaatctattttggcggagaatttcattttacatgcagggtggcaactaggaaagaacacccgccaactaaagatggtagacaggtacaaatggggctgttaatctacaaaatttacaggttgtcggagcacatcaccctgtgtcactcactagggttcatcctgacagaacaaaccaatcatcccgaaccattatcagaaggtcctcctggctcttaggccttggtgaggcaccatctgaagttctgaagaatataggcactatcaacaactcattagcagcagccaaactctacaaacccaaaacttgccttctctcttttgctgtcacattttacatgtattctcctcatcaaccattccattctcatt

SEQ ID NO: 34112 - DNA, 506 bp, Oryza sativa
  Clone ID: uC-osrocyp003e12a1
gcacaagaagccaaacgtgagagcttgtacaaaacttcagctctcttcaatgttgactacgctaattaaaattgtaactccataaaaactcggctacgccgagaaaactgtaattacaacagatacggcgtagccaattcacgcaatgcgcacccatacggctacagtatggttcatttaacgtctgatagacgatttcttaaggtgctgccgcaggtggcgacaaatactgaaaacagcgaggtaatccaataaagaaataacattggaaatcctctccagcggcaacccaagtctctaaatgatcataatcactcgagttaccctgcaacgcaaatttgtacccgggttgcgaacgggcagttccatttgtagaattgtagttggtgttacgggcaaaataacaacgagcgtcattttcccaaggcacttcaaattcaacagtaggatttactctcgaattaaaatagacggcaccgttcgtccatcaggataatctaacggcc

SEQ ID NO: 34113 - DNA, 409 bp, Oryza sativa
  Clone ID: uC-osrocyp003f01a1
aatgaaaaccacacctttgtatgatatatattatttatcaattgaccctacatgctacaaagtcagtgacaagcaaatgagctttctaaattaacatatgatagccaaaactgccaattttgactaattctgttagctatatcaggggtaaaaaaacaagtgtcaaaagaatgaatactcgctgcatcattatttacaccacacatgagcaagctagttcagtcaccttcagccattcaggaaactctcgtactgtgttcccatcaaagtactattaacttcagcccagttatctatatgatcacgcaaaagtttggtatggatttttacatgcctactggacagctttctcttaaggaatcttaaaaaatccaggacattcatgagcttagtatcattgctgacaaca

SEQ ID NO: 34114 - DNA, 484 bp, Oryza sativa
  Clone ID: uC-osrocyp003f02a1
gtctaaagtcaaaacatcttataacatgaacggagggagtataagacaagctttgaactcttagcttgtaatgaacctatacaattacaaaaccactcatatatattgactcatatgtgctaattcatttaaaaccgacaaattcttcctcctccgtggaatgaaaatatatggaatcaacacctttgagtaacttgtagtcggtaagtacacggtaagcgcaattaagatcgtgtgcaagaacttgtagtcgatcttctacacgctgaggtacaagtcgatctgcaggacggcgttgttggtggtggcgttgaaggagtgcgtcctgaggaggccgtacccggcggcgccgcggagcacgccggcgccgccgaccaccggcagctccctcacctcgtcgaggatggcgtccctggcgagcaccgacacggcgcccgcgcggtgcacccccgccgtgaactccatgtggcgctgaacagcagcg

SEQ ID NO: 34115 - DNA, 507 bp, Oryza sativa
  Clone ID: uC-osrocyp003f03a1
tttttgggttttttttttggccaaaacctttgatggaaattttatggacatcgttggacacaccacatggcccacagggttgttcaaactacgagctgtttattctgtatttctggcaacactaatgaaaccagagaaaacgcttctggatttctgcatcagctatgcgatgaaaccctttgaaatcagagcacctgcttcattttgtaaacatgcttttgagcttctcgttggcggataccagttcggcagcaacaccaacctcgttagcggagtgtcctgcatctggaaccatcttaaattctgcttcaggccatgctttatgaagatcccaggcagacatcataggacagcaaacatcataccggccctgtacaataaaagctttaatgtgtcgaatcttgtcaacattgtctaacagatgcgagtctgagggtaaaaaatcccttattcacaaaataatggttttcaatccttgcgaatgccaatgagaacttatcatcttcc

SEQ ID NO: 34116 - DNA, 390 bp, Oryza sativa
  Clone ID: uC-osrocyp003f04a1
ggaaacaaaaaaaaggggattcactatgcatcctttaaaaacaggctggggaactaacagggctactgcctcactcgtttagcacaagcatcgtcagatcacatgaatgggtgcatgcccaggggactttagcccgggcccagcagtttttcacaaaagcagattaaagcatccaaagcttaatatatgattgcagagcgatgaaccatcaaagcgcattaagaaaaacattccaagaatggtttgcgtccccagtgggggctccagtttcatagcatcgttctacaggggagcccccatccctaccgtaataacgaaaaagggttttttcagttcaccagatccataaaagacgggatgcaacaaagaagggaattttgttggggggcc

SEQ ID NO: 34117 - DNA, 496 bp, Oryza sativa
  Clone ID: uC-osrocyp003f05a1
ctgataattaattaggaatactcgagaaggggcgttatggttcacatcctctttgagtaaatatgacagttctaacaaactaacatagccacagaactccttcactttctttgcgagggtaaaacattatttacaacaaaaagaaaagtacctgccttcacaaaagaagaagacaaatagcatgtgattgacaattaggcgtaaactttcaagcggttctatcaattaaatagcaggtaaatgaagtgggctctcttgacatcaacatctatgaccaaaccttttccagatttttcccgaattgagaatctggtaacctgttgccaatgagctcccgtagctcaaactcgctgggaaatctctgttcggataattttgagaaaaccaattgtccattgcagtaaacttcaaaggcaccagaactttgtagaaatgactgggcgaaattgccaaacagccagattgttgccattgttccaaatctattagcacggag

SEQ ID NO: 34118 - DNA, 495 bp, Oryza sativa
  Clone ID: uC-osrocyp003f06a1
gtaatcaacagcatgaacaagagcataagtttttgagtacaagatcgatacagattttcttacctccataataagagccaaaattttacctggtactgtcctaggaccagtactaataattaagcaagagaacagatagtcacatgagctttttaaggtttagtaggatatctgtaaaacattcctgccactgccaatatttaacatgccgaggattcgctgatcatatgcttccgagttgtgcgacggtgccagagtcatcattcatcaccctcttgtgacggcgttcccctccgacgcagttccttcatcttgcggaattcatcatagtgagccttccgttgctcttcgaaatctatatgaaagcatgtaaaagcagtcattcttactttgaaaaaaaaaacacaaaacaagatggtgaaatttgaggttactcttgcaaaacacatagatagtaaaaattgaagcgtatccaccagtgccttgaggacttcc

SEQ ID NO: 34119 - DNA, 451 bp, Oryza sativa
  Clone ID: uC-osrocyp003f07a1
actattagaggtgtaccaaatttatatttgaacagaactcgtgtgcaggtagaattacacaatatatcatatccaaatcttggagaaaatgcatcttccatagtatcagctgcaaactcccaactcccaacttactcagcagctcaagcacgttattgtgaaattgagagatgcaacccttaccttgcaactttacacatacactatgatacaggttctcttgtcccattaagcacaggaatcagcatggcaaaagctgttagaagtagtgtcatttagttcttcaagaagagtgcatcatcagtatatggctcaacatatctagtctaaccaccagctaaatattgaagatacttctagttctacacaagtccagcatgtttgcctccttttaactgcaccaatcaatctttaaacaaccaaaggagatcagacaatgagagcaggactt

SEQ ID NO: 34120 - DNA, 507 bp, Oryza sativa
  Clone ID: uC-osrocyp003f08a1
tttttgtagctttaaacacctacttaagtttcgctactgcatttttagataacacttcctcagttctctctacaaacttgcaaccatgcagaaattcagtgctcattgttctacgtgattgaacatttgaacccccatcgttctcgttctaagttaaagttgcctagtggctgaaaatcgctgcaagcctgcaactatctctcgcaaaaacgtgcagtcagcgtggagatcggatcccaatatacgccgtatcactgaaactaatgtttctagtgctagtgctaagttcaatctgatcagagtcagcagccatgctcggtgatccaccgagcaatgccgctagctcgccggagttgggctgcccccatgggtgcagcgacagcttccccagcctgtcgagctcctccgcgacctcccgcatcgacggactcttctcgccggagatctccaggcactgcttcgccagctcggcgacctgctcgagcacctccatgctctgctcgccct

SEQ ID NO: 34121 - DNA, 436 bp, Oryza sativa
  Clone ID: uC-osrocyp003f09a1
ttttgttttttttttttttttttttttttttttgacacaaaaatgcttgatgcttttatagttttatatgcagtttctgcacaactgagttgcaagtaacaaccaacttttccccacgaaaactaattgacaatcccaacctcgcgtgtaacgtaacgacagagattatttagctacctgctctttatcgccactcgctatttactactagtacaagttctaccactaacaaacacgggcactggggatgattggcccgcgacaccttaccgggctgggatcccgccgttgctggcgacggacaccctttcgcccgagtagtcgccgaagcttttgtctgccttcgacagcgtgtacgccacgtccaccatgctggggcgctttgccgcccacgcgttcgcggacccgtgggcggacccgtgggcggacccctggg

SEQ ID NO: 34122 - DNA, 498 bp, Oryza sativa
  Clone ID: uC-osrocyp003f10a1
gcacaagaagccaaacgtgagagcttgtacaaaacttcagctctcttcaatgttgactacgctaattaaaattgtaactccataaaaactcggctacgccgagaaaactgtaattacaacagatacggcgtagccaattcacgcaatgcgcacccatacggctacagtatggttcatttaacgtctgatagacgatttcttaaggtgctgccgcaggtggcgacaaatactgaaaacagcgaggtaatccaataaagaaataacattggaaatcctctccagcggcaacccaagtctctaaatgatcataatcactcgagttaccctgcaacgcaaatttgtacccgggttgcgaacgggcagttccatttgtagaattgtagttggtgttacgggcaaaataacaacgagcgtcattttcccaaggcacttcaaattcaacagtaggatttactctcgaattaaaatagacggcaccgttcggtccatcaggataat

SEQ ID NO: 34123 - DNA, 403 bp, Oryza sativa
  unsure (1)..(403): unsure at all n locations
  Clone ID: uC-osrocyp003f11a1
agcacaagcacacagggtattattattgattaagatatggggatttttttccgatacaagcattacttagtctagtagttgacatatattaaagattaattttttgagcaagcatgcatattcccatacaagctagtatcagcatacttaggtagattgctggcatttgtaacagggaggagcagagccagagtacaatacttaagtctttttcatccagctgttatacatgatgatataatccatcatcatccatgggggttttacttgaggatgtacttgagcacaccgggtatatggatcctgtagaagtagtcctcccaatcgatggtctttgggtcgaagttgaacatttcatcgtcttgagggttncctgttttccccatcctttgccttagccttt

SEQ ID NO: 34124 - DNA, 478 bp, Oryza sativa
  Clone ID: uC-osrocyp003f12a1
aaccaaaacataggagggttcatttcttcttctcaaagtagtgtagcatctttccttctttcaccattacataagcttaagcaataacagataacaaatcctcctcctcctctaggtaaaatattcaaacacaatacccttataagtacttattattaggaaagtagcgtgcatgggcataaatggcagcggggggcaggttaagaatcacaatgctgagcagcgaggaaacaaaacaccataatgggacagagcaaaagcctccgaaagggagcttttaggcagaaggcttctcccacttgaggggcttcaccacctcccaggtgaagtctgggtcgtcccttccgaagtgaccgtaagccgccgtcttgaggtagcgtccgttgccgcctttcttgaggtcaaggttgatgatgatcatgccaggcctgaagtcgaagttctccttcacaatcttgaggatctccttgtcagggat

SEQ ID NO: 34125 - DNA, 498 bp, Oryza sativa
  Clone ID: uC-osrocyp003g01a1
ggcaaaaagtttctcataacaaacaaatcaactacattcaatcacatacacgaagattgaagagaagggatgtcagttgacaacatataagcttcactgtgccagcttgtaagacaattacaagataactcctattgatttcaggtaacagaaccaaacttggaaattaattaacagtagccaagtagcagctcattattctttactagaaggtgtccaacaaagtagagcaacaaaaaggtgaaacgtcaaaccaacagagaatagaagtgccataagattttaaaccctgtggtcaatgtaatctcagccgatgagcaatttgttctcttccagaaatgagtaggtcgggacttcgaggttgtatggtgcagggcccttacggattctacctgatatatcataatgtgatccatggcatggacagaaccagccaccaaagtcaccagcgttgggaagtggaatgcagcccagatgagtacacaccccaatcacaac

SEQ ID NO: 34126 - DNA, 367 bp, Oryza sativa
  Clone ID: uC-osrocyp003g02a1
gggggcttgattagaggctttccattttttttatttcctaggagtagaattaaaggtggtggctttggacatggaccctactgatatgagtagcgggatgatttctcagggggtcctagtcccaaacaaagctcggagatgaagccgggctttacgggtcacatcatggacaactcatgggggaactttttattccggctccctggcttagctaactccactttattttaaatatttcttcttaaaattattccaaggttctaacctgtcctgcaggggcaagtagcctcagggctcttcagttcttgcagctactcttgcccccggttttgattcataaccagccaggtactttggttttaagacc

SEQ ID NO: 34127 - DNA, 318 bp, Oryza sativa
  Clone ID: uC-osrocyp003g03a1
gagcgaaattaactaacttgggagatttacattgcacataggttttgcttgagtttataatagtctaatagctcacaaaataattccatatcgaccgagataacttattcacaagagcccacagattgcggagcaatggagacaggcataatttggcctgaccttgaactgcatcattatataaatggaggggaagatcaattggtcccctcatcagctgccttcatctgcggcagcagctttgcaaactgggcaggtgttcttcacctgcagccacttcttgatgcaattgcagtgaaacccgtggccgcatttcag

SEQ ID NO: 34128 - DNA, 438 bp, Oryza sativa
  Clone ID: uC-osrocyp003g04a1
aaagcagagatgtacaattttactcatttgggtgcaaacctggagtaaaaaatttcatcaggattcaggaaagggatcctaatgctatgttgcaagtctgcaacaatgtttcctccccctatggggtcatctcgcccaacaattggtgccagattctgctacatagcaaccatgacgcatttagtaaaccgccagaaacaaaaggggtttttacaaagggggccggtccaaccccctgaaagaatgaaagaatcggagcaacggccaggattattggtgaagcaatacgaaggccgaagcagcccggaccaaaaccaggggggggccactgctgggatggggcctgaatccactatggctcattggaatcctctgaggcattgcacactcgttgccgttgaaaaagacctttgaagggaaaccattttcagcaacaac

SEQ ID NO: 34129 - DNA, 382 bp, Oryza sativa
  Clone ID: uC-osrocyp003g05a1
gaaccgcgacgcggcgcgcgacgcgaacgagatgttgctgtagccgaggctgagcacgccgtcggacgcctcgaacccctggccggcgtgcgccgtggtgcaccccagcaccaccccctgcagcttcgccttccggtcgccgccgccgccgccgccgcgcccgccggagagcgccaccgtcgccgagtcggtgcccaccacgccgcgcgccgccgagttgtcgttgtaccggtagtcgtaggagcaggcggcggtggagctggagcagttggcgagggagaaggggatggtcgacttgcacgtctccgacgagcacgggatgggcgaccacgtcttggagtcgccgggacggaacacccgtggcggcgccaccgccggagac

SEQ ID NO: 34130 - DNA, 518 bp, Oryza sativa
  Clone ID: uC-osrocyp003g06a1
ggccgcggcggcggggggcccgagcctggcggacaggttccggagcaggttcaggccggcgaggttcgggcggcggcgaggcgggggcgcgggcgcggccgactgccgcgtctgcctcgcgcggttcgagccggagtcggtggtgaaccgcctcccctgcggccacctcttccaccgcgcctgcctcgagaagtggctcgactacgaccacgccacctgcccgctctgccgccaccgcctcctccccgccaccaccgagtccccctcgccgtcgccggcgacggcgaccccccatttcgcccggatttagagagatctccccccttcaatccgccactgggccgtgtgcgcgtaggaaaattgagaggatcatttagctctagtgctagctccatttagtgctcctttttccccccactttcttaatttttttttcacctctttgcagtgtttttttttaccatcttcgagtggccttttcttttcttttctttctttttttacttctttgtgttgct

SEQ ID NO: 34131 - DNA, 246 bp, Oryza sativa
  Clone ID: uC-osrocyp003g07a1
ttttggtttttttttttttttttttttttttttttttttattttttttttttggttatattttttttttttatttttgttagtttttacaaactaaaataatctcataacttattaactttattagcaagggtaaaacattatttacaacatacagaaccgaccttggccttaaaaagaagaagacaaagagcaagcgaatgacactaaagagaaaactgtcaaacagggaaaaccaaaaaaagga

SEQ ID NO: 34132 - DNA, 452 bp, Oryza sativa
  Clone ID: uC-osrocyp003g08a1
ttttgggggaaatacaattatacaaacgattcaggaagcactacatatgaaataaaagagcattcagatctgtaggattttgcgtaccaaataagagagtattttcttttaaaagccctctatcctaacctagatgatgataataaaaataatgtccgaggaagaagggccacagacatctgcacgtgtgaaccatagcacatccgttaacaaaattatccatgcagtcataccaacaatgatatgtttgcagttcagcctaagaaatacaaccctgctggcattatttgatgaccatgcagagagacccgtgggcggctattttcaggcttgctctgccgctgcactagatttggaggcaattttcaggctggcttgctctgccactgcaatacaccttgttggcctaatgaccagcaaaggcttgccgacagggccgagcacctcacaat

SEQ ID NO: 34133 - DNA, 364 bp, Oryza sativa
  Clone ID: uC-osrocyp003g09a1
tttttgttttttgcacaaaagaaaatgatgtataaatccagcttgaactgcaactcaaattttatctgtaccaccaccagattaccaatttactgactttaaacaaatatcacacagatggcagcatcgccgtcatacagtcaacatatcacatccatccgacagcactttaacgcaccgaaaccatacaatccagaatgtcgggaagaggcccaggtggcttaacttactaatgtttgtggcacccagcaccatatcatgcacatcttgggaaatagtgttgacccacatagcctccggccattgcccttttaacattagcttcaaacagctttgggttgtcacggaggacagctgctgcttc

SEQ ID NO: 34134 - DNA, 465 bp, Oryza sativa
  Clone ID: uC-osrocyp003g11a1
gacaccaatagacagagaatgcaacaacacaaaagctactatacaccatgaattctcgctgtactggtgttctcacatacacatgcgcgtagaattcaacacaaaattaaaccaattcaacacgagatcgacgagcaccaacaaatcaaaaaaaagaacaagatacacaaaattaaacgacgatgatgaaccaaccatgcgaataatgaaacaaagaattattgaaaatgaggatgcagatgagagctcaagatggaaggcttgatgttgggatgatgaggatgaagaatcagtagtggtgggtgttgacgcggcggcaatggcggcggatctcgcccttggccttgggcggcaatggcagcttgctgagcttgacgagcgcgtcggagaaatcctcgtcccagagcgtgccattgtcggcgtactcgtggacatggccgcgcgccttcttcttcgtgagcagct

SEQ ID NO: 34135 - DNA, 391 bp, Oryza sativa
  Clone ID: uC-osrocyp003g12a1
aaaggcagaaggtattattgaaagcaatcttcttgtctgggaaaactggcagaccgtgcttatcagtatacacaattcaaacaactcacacatcaatcacctatttgctttatgtatgcctacatgcagtctgtagtatctacaacttattcaacctcattctgcggttgtccaacgctccaaaagcaattgaatcagtgatttgagtcaggcaaaatccagcgtgcgtagactttccacttgtccaattacctaacctggtgtcacacaaaaagatttctagtcaaggccgaacctcttgaagaggtgctcaaagattccttgtccggagacaagctcctgtgcaacgaatccagcaatggcaatcatggccagacgtccgttggtcagc

SEQ ID NO: 34136 - DNA, 483 bp, Oryza sativa
  Clone ID: uC-osrocyp003h01a1
agtaacaactgacaaggacaggttatttgcaacagaactacattcaactgatcacagccggcctggagttcattcctgcttgaacaacaaaggtacagagatcatactacacacccagaacactgaagcacttgccatgcaggcagtacttctcttttatgaaaagatgatacagatcagttgcaactatgttacaccaccaccatgtacaacgaccggacaccgaaacatcatcctagtgcagagctgtgaggattgcagtggcgctctcaaccttgaaggttgcaccacagatctcttcttcatttgcaggaacagcagtcaccttgttctttgggttctcatagcacttcaagcctccaagagcattggaatagaagcaaccttgtgggaaaggtgcaagtgacttgcccatgatcctttaagcaggtcaatgtcgttagagaaggcacagatccatcagcagttatccccagaacagag

SEQ ID NO: 34137 - DNA, 393 bp, Oryza sativa
  Clone ID: uC-osrocyp003h02a1
aagcaatgtaaatacttgcattccacaacaggcgaagggcaattattaggctcagaacaaggttaaaccgaacagaaaatagagagttttaaacgacacagtgcacacagggggcatatgataataacgggcaatgcaacgagggccatgggcgggcacaaaacttaacgaattagtaaaagcttgatattttaaatgcagacacgcaaaccaccacttgaacggggatcatttttttttggcggcagccttggtcaccttggcaccgggtgggtccttttttttcacgttcttgatgacgccaacagccaccgtttggcttatgtcacgcaccggaaaacgaccaagaggagggttctcagagaagggctcccaaccatgggcttggtggga

SEQ ID NO: 34138 - DNA, 337 bp, Oryza sativa
  Clone ID: uC-osrocyp003h03a1
aaacaccaagtttccctctttgtaaaatgtgaacaagagttttatcatctgtatgctgtatggttacacaaaacaaacaggagtgaagtgcccaccaccacttgcgctactgtatggccacttgtacaacaccacacaccggatgaatccaacttaggtacatttgctaaacacctacaaatctgttcatgctaaatgtaccaccagccagctgtgtatggtattgagtggaacaaatgaactccgggatgggcctaattcaattcaaattttaattaactaaaataaccaatgggaattttccttcctttggcccaaagggaagggaacccctttg

SEQ ID NO: 34139 - DNA, 424 bp, Oryza sativa
  Clone ID: uC-osrocyp003h04a1
gagaagagcagtaagaactttagatgtacgcaagtcgcaccataccatgtacacctggtgacctaaccctgcctataaacagggcacccggccaaactaactgaatccatgaataaaaaggtccttttatttgaacacaagctcgtagggttcatcattaacacaagctagtaggggtcaacatgacaactaaacgcagccagcaaaattggttggtgcttcaaccaagatctccaggtgtggctccttggattctggggctttatttttgggtgtatacaatttatcaggtgaacaaagggaggctggttgtcccaggagaacattggacggctgcgcaagctgatcacaacagaggggaggggaaggagaggggccggaaatgatcccggcatgggggaaaacttgaaatggtggggaattt

SEQ ID NO: 34140 - DNA, 338 bp, Oryza sativa
  Clone ID: uC-osrocyp003h05a1
tttttgggtttttttttttttttttgttttttttttttttttttttttttttttttggttgttttgtttttttttttgctgttctttaaaaaaatgggggggtttttaaactctctggaagacaaaagggggaaaccattttggcggttttgggggggaaaattaatgggggcgcccccccaaattgggggggcccccccgggggggggggggatttttttagaaattgggggggggcccataaccaagggcccggccctcccttgggggaggcccccggggggaacgcggggaaatatactaagaggggggcccaaaccccgttgcttaagggggga

SEQ ID NO: 34141 - DNA, 491 bp, Oryza sativa
  Clone ID: uC-osrocyp003h06a1
cgcacacatagtaataaaaaatggtgggacccacatgtcattctccgttccctcgccacaatgtgaaggcccacctacactcctgcgtctgcacaccagacgacgtcaccacccacacctgccgccgactagcacaaccgcacaccagacgacgtcacccccgcacgcgcagatcccagagcaagcgtgtggtgggaatggcagggaggctgaccgcggtgttctcggcaagctagtccctggcgaggccgtggaggaggccggcgagcgggttggcgtcgggctcgcgatcgagctcgcggagcttccggtcggcgcgcttcttctccagctggatggagccatggcggcctcgatggacgggttccccatgaacctcttgaactcctcttccgacctccagtcaacctcctactgctccaccgcgccggcatgggccttcccgccggcagccattcctccaggggactggatttcccatgtcttggcag

SEQ ID NO: 34142 - DNA, 544 bp, Oryza sativa
  Clone ID: uC-osrocyp003h07a1
ctctatttcggggcgcgccttcgtcttccccggccgctcaaccgcctcacggggttcaacgccttctggtactcccaccactgcttcgtcatcgtctacgccctcctcatcgtccacggctactacctcttccttaccaaggattggtacaagaaaacgacgtggatgtacctggcggtgccgatgttcctgtacgcgtgcgagaggctgacgagggcgctccggtcgagcgtgaggccggtgaagatactcaaggttgcggtgtaccccggaaatgtgctgtcgctgcacttctccaagccacagggtttcaagtaccagagtgggcagtacatcttcgtcaactgtgccgccgtctcgccgttccaatggcacccattctccatcacgtcggccccacaggacgactacgtcagcgtccacatcaggacgctcggtgactggacacgggagcttaagaacgtcttctcaagggtctgccggccaccgacggaagggaagagcgggttgcttccggccgagtacgaccgcgacggcgccatga

SEQ ID NO: 34143 - DNA, 430 bp, Oryza sativa
  Clone ID: uC-osrocyp003h08a1
tttttgttttttttttttttcaggggaaatgtatattgtgtgatttgtttagaaagccttttacacatgtacttacaaatacaaacatgtacattgaagtgatctagccctttttgttgacaagcgtatcggggtaaggttcacaaacatgcacacaatggacaagagaaaaattcggactgctgtatgcctgggtgcctagaggcatggctgttacagactggccaatttcatccaaacaaactgaacaagtcagatattcacagcattgtaacttcagctgtcattcacaagaaactgtccactccagtcagacatttggaccagtaaatgtctccccaatcacatgatactttccttgggccgccagaacatagtgcccttgttattcttccgcataaaatgggttattgtcagcatcaaaatcaaa

SEQ ID NO: 34144 - DNA, 75 bp, Oryza sativa
  unsure (1)..(75): unsure at all n locations
  Clone ID: uC-osrocyp003h09a1
atatcttatctattctctatattctatctattatctatctgtatatgtatctntgtatatgtatgtatatgtgtg

SEQ ID NO: 34145 - DNA, 445 bp, Oryza sativa
  Clone ID: uC-osrocyp003h10a1
ggggcaaatcaagatgagcaccgtactcatacaccttcactgtcataagttggcatcaaaacttaaccaatcaagtaaaagcacaccaaataagctgtgccactaattgattacacaagcccttgatgtatcaaggagttccaaatacaacacctagcagcagaatactaaaattaaagctacaacaggaagctttttggcttctaatattagctttgctcctcggcctcagcctccgctgccgcggcctccctctcttccgcggctgctgccatcagttcgtcaaatttgtccgtcttgcccagcactatttcaatcttggctttctgcatagggcgactcctcgaatcatctttgacgtcaacagtagatgtcataatcttcttctcgacagcaaggccattatttttcagaatttcagcaacagtcaccacagttgcaatag

SEQ ID NO: 34146 - DNA, 496 bp, Oryza sativa
  Clone ID: uC-osrocyp003h11a1
agcatctctccgctgacagaattcagaaattttagatagctcgactgagaaatcctgaaccagaagacatctctacacaagtcctggcctcaaatgtgattacaaaaactcctatgtcagataatgggtgggaaatgtcaagaggcaaagatcacaacaaggtgtcgactacagtggagattgcctgaggtcctcctcgctcaagtaaagccaatgcaagatcgtgctcattccaactccgaagcccagacgctatcttctttagcgtgtccagtttaatgtcccgcaaccatgacgggacaaacttcaccaccaggaacacaaagcgcgatacatatgccttccaggtgccatggtcacaacccagaagaatgtgcccatccaatacacccgccatgaaatccatatggtttccaacactcgtggccttcttgcaggaaagacaatttcatgacaggagaagttctttccgctccccagagcagactaccacaga

SEQ ID NO: 34147 - DNA, 361 bp, Oryza sativa
  Clone ID: uC-osrocyp003h12a1
ccgtaggctgggtccctttttgggggccgccctttttttttttttttgggccaaaatgtaagcggaaaatgaatcaaatcccctgggtctggttgctcctcttgattcgtgagcaaagagcaacacagcaaagttacatatatatttgcagctccctaaccatctgattaaagaaaagatgctatcgagggcgttcaaatgaatattacaaatacgttgtagtgagcaaacagtagtaacatacgtcgaattttacatagaaggaagtacttcgttatctttaggacgagcagcacgacgtcttctggttgacaggttgcccgcggatctgcaccgtcggtggccttgcatttgcagcggc

SEQ ID NO: 34148 - DNA, 586 bp, Oryza sativa
  Clone ID: uC-osrocyp004a03a1
acccgggatccggcagaatgcattaatctctggctttgtggacacctatctcacccttaaccaagcggaagagacaatttttaaagaagctatcgctgaattttcccccctggaacaggaggacgttatgcagttaacaaccagttggatgcttcagggcattgaacagggcatcgaacgtggacaaaaatctctgctactcaaacaaattagacatcgttttggagagttgaatgcagttaatttgtcgaggattgacattctcacagtgcctcaattggaacagttgggagaagtgctgttggactgctctgatttcgcagaattagaacaatggctagcggcccaatctgaaacacctgagcgaaaaatttagtgaatttccagaggtggatgttgccatgaatgttcccaaagaatcaggtttcaaccatcggcttgcaattccaaaactgagttgataaagttgccgacggggcagtttagtttcttctgccaattgccgactagcctgggagcgagttaaccctttagccattaaacttctcaattcgtcccgtagattttcttcagagaagctgggcct

SEQ ID NO: 34149 - DNA, 420 bp, Oryza sativa
  Clone ID: uC-osrocyp004a04a1
cccacctgttgttgtgctcacgaacaaacgcatgtttagatgcacaactgtacgagtctcacggcgcaagcatagccatatgaccacaaaaaatctggagccgctgaccacggagcacggtacgtagtcgcattcacaacatacctagtttctttttaggaggtaaaactctaccagtctcacagcatactaaaacgtataccagctattgctagacacaatgagcattttttaagtcgtaaacaaaagggatacagtaccggcttaaggggcgtaaaatccggtacactatctatatgtgtcgccgaaacgggaaacagagcacaatgatctctgggtgcaaagatttaccgggaacctttgccacgactgtcatttgagaaccaatgacgagattgctagatgacatactctgattac

SEQ ID NO: 34150 - DNA, 376 bp, Oryza sativa
  Clone ID: uC-osrocyp004a04b1
tttgttctgctccggacaccaactatgacccggctggggctatgtatcccccatcgcctcctccaaggcgggggatgaggatcggaggcagcgacacgggaccgggtagaggatgcgccggcagaggcggaggcgaggcccataagttcgggcgcgcgccgaagaagagggacatcaccaagaactacgagatcctgggggtccccaagaccggctcctaggacgacctcaagaaggcggaccggatggccgtcatgaagaaccacccctacaagggcggcgaccccgagaagttcaaggagcttgcaccagcttatgaggaactgagtgacccaggaaaacccgaaacctatgaccaagatggtgaaaatgccct

SEQ ID NO: 34151 - DNA, 400 bp, Oryza sativa
  Clone ID: uC-osrocyp004a05a1
ccggggttccgcgatgtgaccgtttgacaccgttcacgccgattccttacggcttttgccttagggcgggctaaggattggcccacagacttgaatatctaagctttacttcgggaggggccaaaggggggggggcattatgatttcggcctataatgccggcatgatccaattaccaaaattctaccatggattgaggtatgcttgctcacattgtgcctaccctacaaaagacagaggcgctggcaggagtatttagcgccgtaaatggagcccaacggtggttttaacggcaatggcgtcagttcaaccatggcggatagcggcgaagactgagttatcgtggccgtgattccccatccctacagcgaaactaaattgcagttattgcagccggggg

SEQ ID NO: 34152 - DNA, 198 bp, Oryza sativa
  Clone ID: uC-osrocyp004a06a1
gccgccctttttttttttttcgggtgacaaaacacctgcggtgatacttcactgtcatctgaactcctaagcgtgtggtgcgatactgggactgatgaccccttccccatctggggtaatctatgcccttcatgggtttagcctggccacaggattatacttctaccataactgccctagtttgggcaaccacatccc

SEQ ID NO: 34153 - DNA, 509 bp, Oryza sativa
  Clone ID: uC-osrocyp004a07a1
cccggtgatctgatgggagggggtgctgccgattctgaaacactggccatattgacctaagaagccagcactgaagggggtgtggcaaaaatcatacgaccgggggaggcttgcaaagctgaagtgacaatgacctgcaattctgaccctacataggggcgcccttgttgcaccaccaccatggtgccatcttgtaggtaacctactccctgggaagcttccttgccttgtttgatgatttttagctccagagaatcccctggtagggaaatgggccgcactgcctgggccaaatcgatcacgttgagaatttggactttttgcaagttggcaactttgctgaggttgtaatcattggtgagcaaaatgccattgatttcttgggctaaatggactaattgggcatccaccgtggcaatgtcaccataggcagcggaatgaataacgatgctttggggaaaatccgcctggatactgccgagaatatataatgccctacggcctcgcac

SEQ ID NO: 34154 - DNA, 510 bp, Oryza sativa
  Clone ID: uC-osrocyp004a08b1
tgcggtcactctgaggataatagtgaaactttggctaaattttccttcatggcctggatgtggggtttaagtttgggttgttctgccacaatcacattatccagattattgattcgccaaccccgttcaaggattaattgatgcacctgagccaaaagtttgaggctatcggccccctgccaccgggcatcgctgggagggaagtagtggccaatgtcccccaaactcaatgcccctaggagagcatccattaaagcgtgggtcagcacgtcggcatcgctgtggccatccagtcctaaatggtgggcaatggtaactccccccaaaatcaaggggcgatcgcctacgaggcggtggatatcgtagccgttgccgatgcgtagagcagtcatagaaatttagtgagttcaaataatctaaataaattgggcaagtagagaataattagcttactaagggttacttgaataacccccaaaaaaaccggttgatccccgggtaccgagctcg

SEQ ID NO: 34155 - DNA, 599 bp, Oryza sativa
  Clone ID: uC-osrocyp004a09a1
acccgggatcgagcaattttcaacagcacggcgtagtcaccgacccagaggcgatcgacaccctagtccgttactccatggcttgccccgccctgcccacctgtggcctagcagtcaccgagtcggaaagaattatgcccagtgttaacgcccgtctgcgggatttgttgaacagtctggatttacccaatgaaagtatcgtcacccgcatgaccggttgccccaacggttgtgcccggccctacatggcggaaattggttttgttggtagtgcccccaacagttaccaagtgtggctggggggaagtccgaaccaggaacgtttagcggcagcctatacggaaaaaatgcccctggaacagctagaaagcctttttgaacctttatttgtgtacttcaagcagagccgtaaaggtaaggaaagttttggagacttttgccatcgagtgggcttcactgccctacgggaatttagccatggttacacagcaccggccaagggcggtaaaaaccgcaaaaaccaacggcgggtcagcctgtccgatgaaatgtatgcccagcttaagggcccgtctgagcgggattattccccatgaatc

SEQ ID NO: 34156 - DNA, 520 bp, Oryza sativa
  Clone ID: uC-osrocyp004a10a1
atagcgaaggactattgctgctcaccagcaacggtaaactttatcatcgtttggcccaccgggagtttgcccaccaacgtacttattttgcccaagtagaaggctctccaacggacgaagacctagaacccctgcggcggggcataactttcgcggattaccctaccagaccggcgatcgccaaaattatcactgaaccagattttccccccagaaatcctcccattcgttatcgagcctccattcccaccagttggttaagcattaccctaacggaggggcgcaatcgtcaggtacgtcgaatgacagcggcagtgggcttccctaccctacgattggtgcgggtgcaaatacaggttactggtcgctctccccaacagggcaaaggtaagtcagcagcaacttggtgcttaaccctagaaggtttgagtccggggcaatggcgacccctgaccccttgggaagaaaatttttgccagcaactcttaacgggaaatcccaatggtccctggcagaaaaa

SEQ ID NO: 34157 - DNA, 515 bp, Oryza sativa
  Clone ID: uC-osrocyp004a11a1
acccggggatcagcgttatgaccgctttacacctatcaggttgattcggaatgggttttagcccgatagagagataaatattagcccccagacttgttttactaagtattatttaaatatctaccaaagggatgatggcagaagaattttggtatataatgccgccatgatccaattaccaaaatcctcccatggttagagctatacgtcctcccattgtgcctaccctaaaaaagacttggtggcaaaaaggggtttttagtgcggaaaatggattcggtcgttggtttcaacgggttttcggtcgttacttccagggaaaagagttagtttcggagagttctttgtttctccatcagcgggccatggaggaggcggtgattttgggtcggaatgcggaagccctcgacaacgaaaaatttggcaagaaagaattcttagtattagttcgactccgttacattctggccaaaaatatcggtgaatatgagggacttaattatagtgtagaacta

SEQ ID NO: 34158 - DNA, 464 bp, Oryza sativa
  Clone ID: uC-osrocyp004a12b1
ctgtagaggatcgcgtttgcgcaatctgtcttgaaaaaaatgggtttacatattgagtttctttgccggtttggggaacggggcattactaagcgacattatggccccgccaatattgaccccgatgggcgatcggctattttttcccggtggtttgagcgggattctatattgtatcactctgataccgcatccactgaatccttattaattaatcatgcctatgaactggataccaaaaacagggagttatgatgggaatataatcccgttaacaggctaaacccatgcagggcatagataaacctaaagggggaaggggacatcatgccccgtatctcaccactcacctaagagtccctataccagttaaggatgaagtgcagggcattattgaccgctacagggaagacttactggcaagaagacaggttcaagatgttcctagcttctacgaggtcaaa

SEQ ID NO: 34159 - DNA, 334 bp, Oryza sativa
  Clone ID: uC-osrocyp004b01a1
atcaacatcacctattcaaatttataagttactgatgtaattaactcccaacggtaagttttgttaggcagaacaaagtataaatcatctgataatattctggtctcaagaaatataaagcccaaaaaaatgggtcaggagaggacaaaaaaacctcttccacatcagaagcatgacatagatgacccatcaaaactacttgaagctcagctcaaatatcacaattctcgctctgaaacaagtttttggaatgcttgtgacgacaaaaccagcccttctaacgaatagggtggtactgtgctgatactcgtttcggtggaagcttacggaggat

SEQ ID NO: 34160 - DNA, 85 bp, Oryza sativa
  Clone ID: uC-osrocyp004b01b1
attgttctccagaagagcagccaacaaacgcacgggggaagcaaaacgaggaaaaaaaggggagctcgcggcgaggggaggagaa

SEQ ID NO: 34161 - DNA, 537 bp, Oryza sativa
  Clone ID: uC-osrocyp004b02a1
cccttgattgaggttaagcacgaaggttctgaaatgttcctggaaattatgatcgatatccgccgcaacgtgggttattctctcttccagggccagccccagcaacaaccccaggccggttaaccctagtcctagtcagtcaagttttgtgcggaaggggagatttggatttaggcaaatgccacctccccagtttgattgggggcttacatggtcttaactgccgttagacttttgcctgaaactccctgagcattgactccagcgattccctcggatttaagcaccaatcttctacccgcaaataacccacatttccccctgggcaaaccgctctgaggggcagatttttttcatccaaatagcgatgaattttttccacactggcttgctgaccgggccagtggaatgttttagcctgcttaatggcccttagattaccttccccatcgggcagttaatgacggccggtgaaaagaataccgacgttctgtccccagtaatagcaactagcaccttgagaataaccaggagtcc

SEQ ID NO: 34162 - DNA, 584 bp, Oryza sativa
  Clone ID: uC-osrocyp004b03a1
ccgggatcgccatgaagagttcctgctccttaatttccccggtttctttgtaatcagacgggtcggcacatacatctggaccgaataactagcatcccgtcgcttggattcatcaacatcatacttgggttgtttgagcttgtaatctttgcccaaaaagtggagttccagcttgcctgtgtagtcagaaatcggcgaaaaactattcaattcctcgattaaaccttcctccaaaaaccagtggaaactagcgtgttggatttcaattaaatcgggcaacatcgtggtggcaaggtttgtcatggtggctcagaagtctccggaaatttgcggtggttggggttagggaaggccggggagaggttaccaggggggcgatacccccagattaggcaggcaccggtagtttaaaaaggttgcgggcattagtagtggtttgttgggcaagggtttctagggggacatggcgcagggcagcgatcgcctcggccacatggcggacaaaggctggttcattgcgtttaccccgttggggcactggcgccaaaagggacaatcgtttccaccacaggcgatcgggggga

SEQ ID NO: 34163 - DNA, 405 bp, Oryza sativa
  Clone ID: uC-osrocyp004b03b1
cagtgcccagatggtcccccccgatcgcctgttggtggaaaccgtttgttcctttttggcgccagtgccccaacggggtaaacgcaatgaaccagcctttgtccgccatgtggccgaggcgatcgctgccctgcgccatgtccccctagaaacccttgcccaacaaaccactactaatgcccgcaacctttttaaactaccggtgcctgcctaatctgggggtatcgcccccctggtaacctctccccggccttccctaaccccaaccaccgcaaatttccggagacttctgagccaccatgacaaaccttgccaccacgatgttgcccgatttaattgaaatccaacacgctagtttccactggtttttggaggaaggtttaattgaagaattgaatagttttt

SEQ ID NO: 34164 - DNA, 358 bp, Oryza sativa
  Clone ID: uC-osrocyp004b04a1
cgaatgctcaccagcccaggccgggaggctctttaatggacacactagttcgctgttaagaagcctgaatccactgtgtgacttcatactctgaccagatgcctatttgccagaacggatctactcgcaccacctttcccaccgggtaccggtctggcacgtcacaaatggcaaaaacctgccgtaaatctcagcacggtgcaaagggaaccaacacaccactttcctgtaggacctcaaacccacataggtgggcttgacagacgggggctgtttgttctcacacgctggcacaataggtagcccacctcacataccaagacgctgttgacacactcctttctcaggaacagataca

SEQ ID NO: 34165 - DNA, 430 bp, Oryza sativa
  Clone ID: uC-osrocyp004b04b1
cggctgcgggaacctgatcggcttacccacggtagaaatcgctgctgattattttattactgctacaggtatggacgctgttgttgtcactgacgaccatacagtggttgccggcgacgccactggcatgatttaccagaggaaattgggcgggtccaaatacggaaggcgactgccgtctcaatgtgcaatgtcggctagtgctcgaccaaaagtatgttggaaaactcccaagccatgattaaggactatcgctggccagcaagggaaacctccctccgttatgattaagaattgttaggtgactcttatgtgtctgcacctgtgaaaggagtgcgttaccagtgtctaaagatgggcttaggggaacctatggtgacagcgtggaagaaaatagagcccccgggcgttaagcacacctagatggact

SEQ ID NO: 34166 - DNA, 526 bp, Oryza sativa
  Clone ID: uC-osrocyp004b05a1
ccggggatcatcgtcggggaacgccacgtagccccccaggggaatagcccggatggaatattccgtttcggcaccttggtatttcaacagcggtggcccaaatcctaaggcaaagcgagtgacatggatgccctgtaaacgggcggccgcaaagtggcccaactcatgcacagcaattagtactgcaagtactccgatcgccggcaacgccgctaaaactgacataaatttctcaaataggaaaaaactggggacgaaatcccgccgaacgtgtaattcccccgattttaacccaacggccgacagaccgagttccctggcccatgcaaacccctaagtttctgttaacctgaagaaggtgagggtatctgacaaaaatttcagattacacagttatcaatatcaactctatccgttagtcaatggcggctctcagaattatatgggcgatgagcaccaagatattggcaaggtaatagcaaaactggaaacttcaaaggaagtcgttgctaacctaaaactccag

SEQ ID NO: 34167 - DNA, 504 bp, Oryza sativa
  Clone ID: uC-osrocyp004b05b1
tgctgccgtcgactctagaggataaaaccggggcgtggttggcaaggtaattaaacatttcttccccttcttgaatgttagcctctagaaatttgccgacatcctcaccactgttaatatgtgatgcctctgagagaaaagcagaacgaagaaaggtctggagttttaggttagcaacgacttcctttgaagtttccagttttgctattaccttgccaatatcttggtgctcatcgcccatataattctgagagccgccattgactaacggatagagttgatattgataactgtgtaatctggaatttttgtcagataccctcaccttcttcaggttaacagaaacttaggggtttgcatgggccagggaacacggtctggcggccgttgggttaaaatcgggggaattacacgttcggcgggattttcgccccagtttttttctatttgagaaatttatgtcagttttagcggcgttggcggcgatcggagtacttgcaggac

SEQ ID NO: 34168 - DNA, 491 bp, Oryza sativa
  Clone ID: uC-osrocyp004b06a1
ccggggttctaggctacatcattctccgtgcccagaagcctagctagctctaagttacctaatcactttccatctttacttgaaggccactatgaaaaccccaatcctttcgtttcaagcaacttttacccgcctacaggagcacatggaataccctcaagcaggagtgttgagcaaaactttattgcaggacaagacctgccaatacaccctcttttgtttggcggcgaacaccgaaatttcagagcatacttccacccgcaatgccgtggtgcaaggaatagaaggcactggcattttgaccctagaaggtaaggatatttccctagacccaggggtgtttattgttatgccggcccatgctccccacgccctaaaagctatctgtaatctgtcctttttgcttactttgtcacaacctaattaggcattcagtcccaggatttttggagttgttttactgggtcaatacatccccgttgggcttggga

SEQ ID NO: 34169 - DNA, 569 bp, Oryza sativa
  Clone ID: uC-osrocyp004b07a1
cccggggatcgcctgcccagggacaatccccgcctattggccaaagcggccaggaatctcaaagaaattaaccaagcccgcgatcgcctcaaggaattattggagctggagttaagcgctaaaacttcccagattcctaaaaaggaccagaccagcaaagctcccaaagctaaacccaaatccaagcccaaggccacatctgctgcaccttacccgccccccggcgatcgtccacctcaatcccatcaccatcatcaccagaccaaccacaaccacagttccagttcccagcaccatcaccaagaaaaccacaatcgaccctactatcgggacttaaccggggcagatttgcgttgggctaatttaaaagagaaggatttgtcaggacggaaaatggtgtctgccaatctaagtaatgcagatttgagcgacagttttttacaccaagttaatttggaaaatgccaatctttttcgggctaatcttttccgggccaatttgttggaagctaatctgcggggagctaatttgcaggaagctaatctggtaggagcagatttaagtggggc

SEQ ID NO: 34170 - DNA, 452 bp, Oryza sativa
  Clone ID: uC-osrocyp004b08a1
acccggggatcattgataaggcttgctccttctcctgttcagaagccgccagatagtgggacaacacattcaaattcttgtgaccactaattttttgaataacccggagattcattcccttccgacacattatggttaacgtagtccggcgaaaagaatgggttgatgccccccaacaccaatcctgtcagtggtggccttcaaaattttgtgggccatggaagaatacagatgaaagcccactcgtttgcccagaaatgtataggacaatggaaacctatcggattgttgagcttaccggtaatcatcaaataaaacttgcaacatcggggggcggaggttgtggccatcgagattgaacataaattcctggttaaagatgaccgctggcggagtttagtccaaggttatttgtaccgtcaaggttacattgccaccccagatttaactac

SEQ ID NO: 34171 - DNA, 495 bp, Oryza sativa
  Clone ID: uC-osrocyp004b09a1
tcccaaaagtgtgctccgtgttgtcccccaccctgtgctcaggtttgtccagctcgggcgatcaccattgatgctgatgaagatgccccgacaggagcgcgggcggaacaatggtacggatgcggccgctgtttacccatctgaccccagggaatcattactacttattctcatcaagcaacggcgactagtctggtcccttggttggagttgggacaaatcgctgccctggaaatccatacccaggtgggacatgaagaacggttatcagcacactactcggcgtagtctggctccggtattgactcaactgcaagcgatcggcattagttgcccctaccatgctccggcggtggagtatctcacaaaccatctctggctggctggggccattagcaatgccgacaatttggcgaaccgatggcaggcccatgagtggggacattggccggggtactacccatctttgtttccactacactgatcctgtagagt

SEQ ID NO: 34172 - DNA, 522 bp, Oryza sativa
  Clone ID: uC-osrocyp004b09b1
tgcctgcagtctactctagaggatcaccgctgtggagacaaagatgggttgtaccccggccaatgtccctacttttgggcctgccatcggtttgtcaaattgtcggcattgctcatggccccagccagccagagatggtttgcagatactccaccgcctctgcatggttggggcaactaatggcgatcgcctgtagttgagtcaataccggagccagactacgccagagttgctgaaaccgttcttcatgtcccacctgggtatggatttccagggcagcgatttgccccaactccaaccaagggaccagactagtcaccgttgtttgatgagaataagtagtcataattccttgttgacagatgggtaaacagaggccacaaccgtaacatttttccacccacactcctgtggggacaacttcatcaacatcactggtgatcgcccaagctggacaaacctgagcacagggtctgggacaatccggaggacacttttggggatccgctggtaccgaactcg

SEQ ID NO: 34173 - DNA, 280 bp, Oryza sativa
  Clone ID: uC-osrocyp004b10b1
tgcggtcactctgaggatctccataattgccgttgattgttgtaggtaaagcccccggctttttgttatgcttgcgctttttctgggtcatagttatagactttgacatcgggattaaaaaagggagattgcacaggaataaaggaattttgtttttcccccaaccctcggtaaatgttattaaccattctttcccggtcaatgccataggcgatcgcctgacgaaaattgagattattaaaccaccgggatttaatcggatccccgggtaccgagctcg

SEQ ID NO: 34174 - DNA, 448 bp, Oryza sativa
  Clone ID: uC-osrocyp004b12b1
cctgcaggtcgactctagaggatcgcgtcaggggtaaagtcgccactctccgctgctttcacccacacgcttcattataaattagaggcagggagccggacaaaatccaaaagaaaatttctgcccggtactccaccatttgggcaaagtaaacgctcaacagcacccgcagtttgtggggaaaatgacccataaagttttagtcaaattacaactcacccgctatccccagccaaggtttggggggagtattcactttaacctgcttcttcttcgacgggaaagggtaacaccggcaggcgatcgcctcggaacacttcttcggaaagtttacctagggcttcactgcgttgaccaaggcaacgggctaaacccagggcggaaagcacgggcagggtagtggcgcttaaaactaatttggttaagggatccccgggtaccgagctcg

SEQ ID NO: 34175 - DNA, 582 bp, Oryza sativa
  Clone ID: uC-osrocyp004c01a1
ccggggatcattgataaagcttgctccttctcctgttcagaagccgccagatagtgttacaacacattcaaattcttgtgaccactaattttttgaataacccggagattcattcccttccgacacattatggttaacgtagtccggcgaaaagaatgggttgatgccccccaacaccaatcctgtcagtggtggccttcaaaattttgtgggccatggaagaatacagatgaaagcccactcgtttgcccagaaatgtataggacaatggaaacctatcggattgttgagcttaccggtaatcatcaaataaaacttgcaacatcggggggcggaggttgtggccatcgagattgaacataaattcctggttaaagatgaccgctggcggagtttagtccagggttatttgtaccgtcaaggttacattgccaccccagatttaactacgctgggagtgcgtaccattggcgatcgggcctatctcaccattaagggtaaaaatgccagcattgcccgcttggatttgagtatgaaattcttgcagtggaagccaattaaattttgacagaactctgttca

SEQ ID NO: 34176 - DNA, 596 bp, Oryza sativa
  Clone ID: uC-osrocyp004c02a1
ccggggatcgccgaattgggggaaaacatccaagttcgtcgctttatccgctttaactcttggtgaaggcatcgaaaaagcagaaaccaactttgcggaagaagtggccgccgccgctaagggctagtaactcaggcttgattaccgcactacttattagctaaatctaagaaccttttgaacccagatttccaccgccacaggccagggaagatttgggtttttgcttttgggataaaccccagaaaatcttggcagcccatctttgctttgcccagagagtgtgtcaaaatcgtgggtaacttagtctgtcctaggcttccataacttataattatcgccatcattgctatgttgccattgccattaattgctaacggaaaaggatttatccgcgctctagaaaacgacggggctttggcagtgtatgcccccctagaaggtggttatgaaggtcgttaccaaagacgcctacaggccaacggctacgccagtatatccctttcggcaaggggtttgggggacgtggaagcctatttgatgcaagtccatggagtacgtcccgcccatttaggtaagaaaaacattgcccaaga

SEQ ID NO: 34177 - DNA, 51 bp, Oryza sativa
  Clone ID: uC-osrocyp004c03b1
cgcctgatgcggcattttcttcttaacgatatgtgcggtatttaacaccga

SEQ ID NO: 34178 - DNA, 511 bp, Oryza sativa
  Clone ID: uC-osrocyp004c04a1
ccggggatcccgatccgctgtaaagataattacaatcaaattttttgactctggctttgtccctggactcaagaaaatttttgcgaggcattgcactttggcgttggtgattacttggggctagaacggtcagaatgctgagggtggcggctccgagcaatcgttaagatatattacaattgtgagtaagtgggggtagtccctcccgttgctgatctcaccctaccagtgccccaacgccatgatcgatcgccttttgtacgttcgtcttccctgtaacccgattttccccattggggtgatttatctggcggaccatgtccataaatgttttccggcgaccgcccagcggattttcgatttaggcaccattcctcccctggatttcaaccgggcccttgatgaatgtattgatgaatttcagccgacaattttggttttttcctggcgggacattcaaatctatgctccggtggggggtaagggtggaatcccctgcagaacgcgtttg

SEQ ID NO: 34179 - DNA, 503 bp, Oryza sativa
  Clone ID: uC-osrocyp004c05a1
ccggggatcgccgatgacccgacaacccatcaacaatgacagagtgtgccccaacctgtttccatgcgactggggggagaaggccatcgagttactctggtccatcggccagccctagaccaacaatggcaacgtctgcaaacattatccgaccagaactatcaacaacggcaaaaggcgatcgcctatttgatgactccaggcatttttgagcggggccgggatggggtttccacctgtcggccctatccttgggagtggaaactcacccacaatcagggtacatttacctctcatgccgacggaacgggctgtggacattagcccacgcattcgggatcgacagcgcaatccaggggctagtaaacccgccccccaggtgtttgccgccccaccaggcactgcttattacctgaaccaaccccagggtttatttgccgaccaagataatgctcccaaacatttacaacaaagcagaaaagtaggttattgccatttgcttt

SEQ ID NO: 34180 - DNA, 533 bp, Oryza sativa
  Clone ID: uC-osrocyp004c05b1
agaggatcacgctttcctgggcgctattcccatggaagatatggatttgactatcattcccagtgagagacgattggctgttaatccccacagtcctaatattgccacttccatcgccaaataaacgacttaataagctttggtaattcacctattaacctcctgcaagttaacccaaagcaaatgggaataacctacttttctggtttgatgtaaatgtttgggagcattatcttggtcggcaaataaaccctggggttggttcaggtaataaacagtgcctggtggggcggcaaacacctggggggcagggatactatgacctggattgcgctgacgatcccgaatgcggcggctaatggccacagaccgatccgttgccatggagataaaggaaccttgattgtgggttagtttccactcccaaggatagggacgacaggtggaaaccccatcccggccatgctcaaaaatgcctggagtcatcaaataagctaaccgccttttgcccttgctgatagttctggtcggat

SEQ ID NO: 34181 - DNA, 440 bp, Oryza sativa
  Clone ID: uC-osrocyp004c07a1
tttttggttggtgagcaaagaatggacagtatcataaaacatctgggagcacatatcacggttttgtaagctaaaaacaatacaaggctacacaatgatgttcatgtaggataatctctactgcctgtcattccaactcaaacaaattgacaacaactgacaactcatgaaaattgggagtagcaaaaattgagttcggatgggcctttgtaataatttgatatacgtgtgacgtcttcgtcacagctcagttaactgctgcctcccttctgtttgagggtgatcttgtcgcctaagctgagggcgattccttgggtcttactccgtattctgatatagccgctcagcttgccatcggcttgcttttcaacgctgatgttcaccaatgcatcctgaccaaaaacactcttggcatagagattagcagcgataaacccaca

SEQ ID NO: 34182 - DNA, 454 bp, Oryza sativa
  Clone ID: uC-osrocyp004c07b1
cataggcatagagaggtttctcccccccagatccgatccccgcacagagcccagatccaccgaccactcccccagatccaccccccaccggcggccgtgcagcggcggcgtcggcggccatggagaagccatgcaccctcctggtccacttcgacaagggctccccctccatggccaacgagatcaaggccgacctcgagggcagcgacgtcgccgccaaggtcgacgccatgaagcgcgccatcatgctgctcctcaacggcgagaccctcccccacctcttcatcactgtcgtccgctacgtcctcccctccgaggaccacaccatccagaagctcctcctcctctacctcgagatcgtcgacaagcgcgacgtcgccttcggcaaggtactcccggagatgatcctcatctgccagaaccttcggaacaaccttcagcaccccaacgagta

SEQ ID NO: 34183 - DNA, 292 bp, Oryza sativa
  Clone ID: uC-osrocyp004c08b1
gatgcctgcggtcactctgaggatcgccaaggtggtggggcagcccgtcactctccatggtgccgggagaacattcgcaggggtccatgcagcggcccaggtggcccattttgacgacccagtgggacagattcctccccaccgctggagtaaaattcttaatggtcatttgccccaagacataatagttagggggtcagcggcggtggatagccattggcacgcccgcttttctgctctgtggcgacggtatcgttacagcatctatacagatccccgggtaccgagctcg

SEQ ID NO: 34184 - DNA, 463 bp, Oryza sativa
  Clone ID: uC-osrocyp004c09a1
agtgtatgtatacatgttattcattcatcgtacaactccatccgctcgcatacgtatacgtaagtaatatttgtatataccaggactatccctgttcggggcttcacgggctcaacgccgcggcggggaagacagcgagggggatcctcacggtgtgcttcttgtcgcccctgaggaccacctcgccgaagctgaaggtgttccccggcgcggtggtgttgagcacgatcctcagcgtggccgtcgcgccgggggcgacggcgaacgtgtccggcgacacgcgcaccgacacgccgtcgggcgcctgcacgtgcgccatgtacgtctcgttctccgcgcccacgctcgtcacccgccggtccacccgccgcgaccccaccaggctcgccaccgtcacgctcggcgcgttcaggtccgagcaccaccgcgcccgcgacggcgggcagggcacgcccaccgcgcg

SEQ ID NO: 34185 - DNA, 458 bp, Oryza sativa
  Clone ID: uC-osrocyp004c09b1
gttctccgctgcggcagccggcaatcgcacggcggaagcaaaacgaggaaaaaatggggagctcgcggcgaggggaggagaagggactccctgttcctcctcctcctcctcccaaccctggtggtgtcacttcaagacggcaaaaggaagcagccatggagatcgaggccgtcggggccgatggtttttatggtggtgatggaggatgacccaatcatttcccccaagtcaagccaaaagaaagtaatgagaggtgaggaagctcagaagtacaaggcaatgaccacaacgaagcatgatatcttcctggattcatttctcccagctggatcttacaagaagctatacagttacacccaccttctcaatggctttgctatctatgcaaaatctgaaaaggcaattaaaactcttagtggagcaaaaggagttagactcatcccagaagatataaaaat

SEQ ID NO: 34186 - DNA, 440 bp, Oryza sativa
  Clone ID: uC-osrocyp004c10a1
atgagaagttggtaaaaaccttttaactgcccaaaaaacggcaacaggttttttggctaccaattaacagagcacgaggctaccaattctaactaccgttaggcttatatacagctaccctataatcaacggactactatggtacattacataagcacaaggctagaatgtaggactacacggtaagtttcgccaacagataatacacagaaagacaagaagagaacacagagtctcccgcttttaatggccaccatcggggagaccaactccatcgtctcccccttttcctccacaagaccttgcaacagactcgaacagcttctcgatctcaggtgcacagcgagtaaatgatcgagcccaaaaactgtagcgtggattctttataagctcaatgaaagtaattagtagcccccacgggtgagggggttaactattag

SEQ ID NO: 34187 - DNA, 505 bp, Oryza sativa
  Clone ID: uC-osrocyp004c10b1
tcgtccacgcgtccggattaatcttggggattacaatgttcatttggcgaagattattgatggcggaagaaacaaggctgcaaccgagtttgctatatcacttgtccagacattgattacccaagaatctattagcatcgcagaggtttataatgttgttgatgccttatcaaaacttgcaatcaggcccagttctcctgaatcgctgcagcagttgattgaaatcgctagaagttttgcttccgtgaaggatgaaaatattagacagtcaagggataaaaaggttttatccggtcgtcctttggtgaataaagaggaaaataatgctaatgatgttgcgttcactgatgctgttggttttcaggagaaggtcgcagtattcattctctgaatggtgtaatatatgcgatcatcccactatgggtgattcagcatacactcattacattgtgaaagctgcaacaggatggcttgctaaaaggagatgatttgaccgacccgttta

SEQ ID NO: 34188 - DNA, 569 bp, Oryza sativa
  unsure (1)..(569): unsure at all n locations
  Clone ID: uC-osrocyp004c11a1
acccgggatctgttaattctggctttttctcccatggtgacacagcattatttttccccttaatggattccttgttgggtcaagacccataccttgtatttgccgatttccaagcctatgtggattgtcaaaaccaagtgggagaagcctataaagatcaggaaaactgggctcgcatggccatcttaaatgtggctcgcatgggtaagttttcctcggatcgcactattcgggaatacgccgaagacatctgggctatcaaacccgtggtaattgaattagaagacctctgtcccgatggtcaatgtttgttaatttctcctaataaatagttaccttaacctgcctctattgcactgtaaaaacccagtcctgagcatcagttacattttgttaagacactgttactggcccttcaatcttcgtttaccgtccagataaagacaactttcgtcaccttttatcactggattgtgattattccagtatcaccatggtncaactcgtaataagatggttgagaccgcgtttttactagtaggattgagtgtttactgatacttttttag

SEQ ID NO: 34189 - DNA, 558 bp, Oryza sativa
  unsure (1)..(558): unsure at all n locations
  Clone ID: uC-osrocyp004c12a1
ccggggttcacctttataacctgtttgagaagttgaactttcggcacataatctttcccaatctcccttaaacgggaaaggtggggactgttgatagtcgttttgagacttttaaaacaggcctttaagctgcttcgggttggataaatctggtttgtgagtgaatgaagtaaaagcgccctgagaattttgccaagtttaggtaaaatttttggggcatttttcctggctgaaaattttttggcggtgtgttcgccgcaatcatggcagataatagggtttgaaggctgattaatcccgctgtttctatgtctgataatttgaccgaactctcccaacaactccatgatgcttcagaaaaaaaacagttgacggcgatctagactgacaacttaagattcaggatggggttctttaactacatttgccataaaatgtagctatcatctgttgatagcccattcataatgcgaagacgcagacctaccaggcgaagggtttcttcgcgaattgtcacancaagcattgctgaccaaattgctaatagtcagcacaggt

SEQ ID NO: 34190 - DNA, 325 bp, Oryza sativa
  Clone ID: uC-osrocyp004d01a1
acccgggataaaaatgttcactggctgagcggtactttcattgttgtagtccgctctccacagtaggcgcagatttttttctcccgttaggggggtgtccagttgtagtctgccgccccactcggtggagtcaatttcagactgaaaaatactattgcccaagctaacggaggctcggccgtcgaaagggaaaaacctagtcagataatcacgatagtagatttgtcccttaaggttgccattgaggacgttactgtggctgtaatcaaggctgactacggtgttattgctggtttggggggtatcaaggtccagcccgtcaatc

SEQ ID NO: 34191 - DNA, 95 bp, Oryza sativa
  Clone ID: uC-osrocyp004d01b1
gaataaggaaggccgcaaccgagggagggaccggaccgggatacccgggaagccacacgcgatttttacgccggccggggccacaggcacgagcg

SEQ ID NO: 34192 - DNA, 250 bp, Oryza sativa
  Clone ID: uC-osrocyp004d02a1
ccggggatctcgctgggaatcccgctacccctgctactcgcaacatcactgttgatacggttgcaccagcggttaatgagcttgacatcactgacaacaccgataccggcgcagatgacttgattactagcaatggcaatcctgtcctcaccttcacgggtgaacctggactcaccatcacccttaccggtccggatggtgcactggctccatctgctgcctacaccgtcgcagagacacccagtgcgaa

SEQ ID NO: 34193 - DNA, 266 bp, Oryza sativa
  Clone ID: uC-osrocyp004d02b1
ttcgcactgggtgtctctgcgacggtgtaggcagcagatggagcctgtgctttcatccggaccggtaagggtgatggtgagtccaggttcacccgtgaaggtgaggacaggattgccattgctagtaatcaagtcatctgcgccggtataggagttgtcagtgatctcaagctcattaaccgctggtgcaaccggatcaacagtgatgttgcgagtagcacgggtagcggcattctcagcgagatccccgggttccgagctcaaca

SEQ ID NO: 34194 - DNA, 297 bp, Oryza sativa
  Clone ID: uC-osrocyp004d03b1
aggataaacaattggaaaacattcctgtctgataatcttaatttttacgaaacatattatccaagagaacataaccccctggttttaccaataattttgccccatcggcgatagtggctacagacatatatctgggtactaggactaaaaagcaacaaatcatattggggcatagaaccaatccgttgccaatcttctataaaaccttggaaagtattactattaaagcgagcatctgtccctaagcctattgtaaaaaacttgactcctgaaaaggatccccaggaacagagctcg

SEQ ID NO: 34195 - DNA, 608 bp, Oryza sativa
  Clone ID: uC-osrocyp004d04a1
cccggggatctttttcccggcttagcggacatgctcggagaagctcccctccagtgttagtggcgagttagatgacttggatgccttgttgagtgacaccagctcccccggtgccgatgctgtgatctcaacttccctagacgattttgacttcggcccggacgaccatgacccctagactttttcccctaaatttccggtaacaaattgaccttaaagcggataaacccaactaactttactgggcttatccgtttttttgttgtcggaaagaatgagttaatcgactaattcactattgaattcgttataggtacgctgtttcagttccatggactcggaacggggcaataaatcaaataaatcccggagaacatcatccactacttgaaacttaagtgctccctgggcgtcgaagatttttttgccgcttttgtctagaattaccggctggggtaccccaccgctgtagtaatagccaggctcatcgcgacggaaacgcttttggtcgggaatgctgtcaacggaaaccggaataatgctagcaacccgaccgtaaattcctgcatacgggaaacgatgaaagcatactggttgcaatctttact

SEQ ID NO: 34196 - DNA, 377 bp, Oryza sativa
  Clone ID: uC-osrocyp004d05a1
aatacaaaagacacatctttattctataaaggtcgggaattggtagtggaggtgggggtggcagaaccaacaccaccactactctcttttataaggagtgtagatgagtcggggtaatttgttcctaaatcacatcttggaatatgaccttgtcgatgtggctatcaattgcctcaggtgagcagtacgcgacataccacaagctcttcaccacatggagaaacccctccccggttagtctgttaatagcgctgcagccctgtagaacgcgccgagtcaattcctgcatctccaaatccacttgctggtctatctcctcaactttttccgtactttccccattctcctgggcaagaaccctcctggaaagtttgcag

SEQ ID NO: 34197 - DNA, 183 bp, Oryza sativa
  Clone ID: uC-osrocyp004d06a1
tcgccacttatgccacttttggcgcgtgtttctcaaacagtttggtgtcagccctaaacagtggatgctgcgtaattgatactctctcccgggtaaagccagaggatttccatctacccaaacaaagaaaattaggggagtttctcccgttagccggggattgttttgcctcaaagtccgctt

SEQ ID NO: 34198 - DNA, 243 bp, Oryza sativa
  Clone ID: uC-osrocyp004d06b1
ggccaaatatccgggcttaacgggagaaactttgctttttatgactgtttggggagatggaaatcctgtggctttaaccggtagagactatcacttactgagcatccactgtttagggctgacaccaaactgtttgcgaaacgccgcggagaagcggcctaagtggctataacccaccttgttatggactctcgggacagggctatcgccctgtgatagcagatcccaagggatccgcgctcg

SEQ ID NO: 34199 - DNA, 524 bp, Oryza sativa
  Clone ID: uC-osrocyp004d08a1
ccggggatcagacagtgctaaccatggccaacgattaccaagggaaagcccaagattttgccctcgtggtgccggttccggtggtgctacaggaagaccaagtaaacgtaggggagagaaaaattattgagcgtttagacaattttagtgccccccgtttagtggaatattttgacaataatccctgtgaaacctacggcggccgtcaatttatggatgcaatgccagcggcccccagcatgaccagaggattgcaagaaaaaataagcaatgaagcgttgggagtcaccattgaaaatcagttttcggtaggagaatacgacattctcatcctcagtgccaaggaatccaatggcctagaaacttggttaaaccaaaataattaccgcattccccctggagcgaccgatgtattgggagcatatattaaacaagggctaaagttttttgttgctaaagtcaacctgaaagaattcgatcgccaaggatttcaagccttacggccgctgatgatggcctatgaa

SEQ ID NO: 34200 - DNA, 586 bp, Oryza sativa
  Clone ID: uC-osrocyp004d09a1
acccggggatcgcccggtcaatgcacagccgtaaactctgaatgaaatcctctaacctcgtatttaaccccgtggccggattaatgtgcccatgggaaaaaccactgcccaggtgaatatcagaaagatgcaggacttttaacatggcaatgactctccaacaaaaaaagggaagacctctagtcctcccttcatcctatggtaatggcccgctgggggacctaattattcaacgccgggggcaatcagttccctcgtttcaccggggatgaccaccacttggttgtcttcaccaatgtccaccagcgcttggctaccttccttgaggcggccggaaagaatttcttcggctaacacgtcttccaacaggcgcataatggcccgacggaggggacgggcaccgtaggctgggttgaacccttcttccacaatgcgctccttgaacttgtcggtgacctggagagaaatttctttttccaccaaccgggcaaacacatcccgtaggagaatttccgaaatttcctggacttccctcttgtcaattggcggagacgatatttcatccaacgattcaagactcagggcg

SEQ ID NO: 34201 - DNA, 495 bp, Oryza sativa
  Clone ID: uC-osrocyp004d10a1
ccggggatccttagcctggtttaaacggcgttttctggtaataaaaatacggggataggtttctgaccaggtgatacacacataaggatattttttatcatctttaagcagaacattaaaatggggttggtgttgtttgattaaattagcttctaaggctaaagcttccgcttccgtatcggtgacaataaactcaatttccgctacctgttgcaccatcaaagcaatgcgggcagtgtggggttgggaatcccgaaaataggatctaaccctagttctcaatttttttgccttgccgatgtagagaatttctccttggcgatcgcccatgaagtaaacccccggctcttggggaatttcctggagacgccgttctaataattctggttgttcaagaagagacgtagaggaaacagtagcaaccattgattaagcaaaagagcgaatgtttttctatggtagaagggaaaactagggcttggcaatttgcgtctg

SEQ ID NO: 34202 - DNA, 459 bp, Oryza sativa
  Clone ID: uC-osrocyp004d10b1
ctgcaggttgactctagaggatcgccgtaaagcaaattggttcgccagcaggacgactaatgggcacttttgtttgtgagggagccggcggcaaaaccaccttggggggacaatgtggggccagtgccaatgcgggtaatggtacgctcaatccgttgggactctgcttgaaaaacaaactgattttcccccatcttgagagggattacaggggcaaaattgccttgggcactgcgttcaatgggctggccattgagggtaacggtcacatttggagcggcagaaccaatgaaaaaaatcgtcgggctactggtttggtgattttggggtggataggccaaaaataagggctgactttgggctacagccggcatagtgaaaaccaccgctgcccccacaccaatcattgttcccaaccaagatttcattgccatcattgcaaaaaattccccgtttaaa

SEQ ID NO: 34203 - DNA, 552 bp, Oryza sativa
  Clone ID: uC-osrocyp004d11a1
acccggtgatcgcctttcctggctccaaagattcataacttcacgttgctagagctatttgctctgaatccttcatggaaggtaacatcaccctggggataatgactgtcaaacgaaagagcaaaaaatacctcatcgggaaccccttcgagagcaagccccgccacattcttaaatccaaattttttgtagtattctgggtgtccgacaaggcaacagcccttggctcctaagcccttcaactgtgacagtccttcctgaataagagctttaccaatccccctacgctggtataggggtaacacggagaccgggccgagtccataccagttttttgtgccgtccgagatggccacaggggaaaatgcaatatgtcccacaacacgactattcacttctgcaaccaatgacagggttaaagcacctgccgaacgaagagcttcgatgatgaactgctctgtgtggttactaatctgtaggggcgcgaaagccgcactagtcacttcagtaatgagaacggcatcggactttctctcatccttataaaatttc

SEQ ID NO: 34204 - DNA, 324 bp, Oryza sativa
  Clone ID: uC-osrocyp004e01a1
gttaaacaaactcaacatgtagtacttgactatagcaaactgaagcccgtaccccacacgaaacacaaacttcgatcactgatcgggcttcgctgaccaggccttgaccaatcttgacacgaacttaacaaagctgcagtgcagaaaaagcaccaaactaacacacgccaaacacttccaaattccaaccatggcctggtctcacacacgccccaattaagcgctgctcttgtgctcgccggtggcggaggcggcggtcttggcttcctcgccggagcccttgtggaaaccgggcagttgctccatgatcttgcccagtatacc

SEQ ID NO: 34205 - DNA, 241 bp, Oryza sativa
  Clone ID: uC-osrocyp004e01b1
aacgaacatggaggattttatgaacacggagagccaccagggaggcgaggcggcaaagcaggaggaggggaaggacaggggccaaatcgacaaccataatggcaggaagaaggacgaacagccagaggagaagaagcacgaggaggagcttgccaccggcaagaaaaaggactacgcggaaagagccaaagacagaagaacaccacgccgagggcaagaagaaggaaagcccacaccacaa

SEQ ID NO: 34206 - DNA, 584 bp, Oryza sativa
  Clone ID: uC-osrocyp004e02a1
ccggggatcaaccgcaaaaagaataatgtgagcgaattagaacaaagaattcgtgttctcaaacaagaaatatcagatcttgaggatagtgctcgagtagcattacagactttagaagagcccatcaaggatttaattccggttcaaaggcaaggtattaacgaagatgatttccttaaccagtttagtaattccctaaaagtaaagggcttagactttcatgaacgtatcgttaaagcctttcatacttctctaaaagtacaagatatttcggcattagtaattttagccggaattagcggtacaggaaaaagtgaattaccccaaaaatatgcggatttcattggtgctccactcgtcatgttgccggtacaaccccgttgggattctccccaagatttacagggtttttataattatattgaaaaaaagtataagccaactcaattaatgcattatttctatcaatatcagcaggatagaaaaatgcatggcagaatcatcatggtgctacttgatgagatgaatctagctcgggttgagtattattttagtgatttcctttctaaactcgaaacacgacg

SEQ ID NO: 34207 - DNA, 595 bp, Oryza sativa
  Clone ID: uC-osrocyp004e02b1
ggtcgactctagaggatcaggttctttagtccactttacaaattcattccaaggtaaataattttctgttttttcatacttgatttttcttccccgtaatttcaattcatttggacgaccaaaagttaagacattggctcggtctaacactttatcggataaggattgagtggtttcatcttcattcatggtgccaataaacaggaattcttcgggaatcagaatatctcgttgcttctcaggaagttttaaactacctacgtccaatgataaataggttggcttactacgtcgtgtttcgagtttagaaaggaaatcactaaaataatactcaacccgagctagattcatctcatcaagtagcaccatgatgattctgccatgcatttttctatcctgctgatattgatagagataatgcattaattgagttggcttatactttttttcaatataattataaaaaccctgtaaatcttggggagaatcccaacggggttgtaccggcaacatgacgagtggagcaccaatgaaatccgcatacttttggggtaattcactttttctgtaccgttattccggctaaattactatg

SEQ ID NO: 34208 - DNA, 348 bp, Oryza sativa
  Clone ID: uC-osrocyp004e03b1
ggtcgactctagaggatcgcccacttggagcaaacggacacggaacggattagtagttcccgtctttttttagccttaaaagaaggcaagttggcaatggccaatcatttgttgggacggccctatgccctcagggggacggcggtgcagggacagcaattggggcgtaaattgggctttcccactgctaacctttgtttgccagcggataaactctggccgaagtatggagtgtatgcgggttgggtcaatctaaatgccttggacgcacccataccagcggtgattaatcttggtgatcgccccacagtcaacggccagtaaccttcggcggaagtgcatttactt

SEQ ID NO: 34209 - DNA, 425 bp, Oryza sativa
  Clone ID: uC-osrocyp004e04a1
acacatatataaccacataagtactgcaaatttggaaagcacatatgtagcttaaaaacctggcctatatcttgatgaatggctttatccttcaatagcatggccctcattttccataaccagaagggggaggcaacaaccttggttcttcattggcaatcttccaaaatacctcagggcagctggagcccgacagggaagatggcagaagtggacatgggagaatgctgcatgctttgaatttcccttcatgtatacccaacaaggaagggggccctggcgccccaatttctttccatatctgagccatgggatatccatccatgacactctgagagcggttgaggactcttgccatgcaactgggaacatcaagaatgactcccccatccatactgaagattgggacaacatttaggaggcag

SEQ ID NO: 34210 - DNA, 229 bp, Oryza sativa
  Clone ID: uC-osrocyp004e05a1
ccttagatggataaggtgaacctcccggctctacttaaagtcaatgctggttcatataggcattggacgggggggcaaaacccaaatccaggaatgtttgctttaaaggtgtatggcaatggcgacatttcataaactcagacctaaaaaggtggaatctagtaaggggtgattttggtctcgctgggataattcggtaattgcttggggccactcaatccctaggcga

SEQ ID NO: 34211 - DNA, 243 bp, Oryza sativa
  Clone ID: uC-osrocyp004e05b1
tcgcctagggattgagtggccccaagcaattaccgaattatcccagcgttgatcaaaatcaccccttactagattccacctttttaggtctgagtttatgaaatgtcgccattgccatacacctttaaagcaaacattcctggatttgggttttgcccccccgtccaatgcctatttgaaccagattgatttaagtagaccggaggttacttatccattaaggatccccgggtaccgagctcg

SEQ ID NO: 34212 - DNA, 490 bp, Oryza sativa
  Clone ID: uC-osrocyp004e06a1
cccggggatccggaggttgccccgatcgccacccagcaaatggccgagttgattggttcgattttttcctttggatacttgtcggcgattcaagtttttgcccttagcccagcaggaaggcgacccccccagtgtgctagtggccatggtggaccccgataacttggctgcccaggacgagctaaaccgaattttgcgggttaaaggttttgaattgcgccgcttggtggccacccaagatgattttaaccaactgttggaacagtactatgccatccgggaagagagggaggcggcccaggaaaaaagggaccaggaaagggcccttgataaacttaatgatttgacggatattgtcggctccatcgacatgaatctgggggaggacaaagaagatgtccatagtgctctagactccaacgatgctaaccaagcaccggtgattaacctggtcaacaaaattttggctaaagctctccaggaaggaact

SEQ ID NO: 34213 - DNA, 540 bp, Oryza sativa
  Clone ID: uC-osrocyp004e06b1
tgcaggtcgactctagaggatcgaaagcctgatttaaaaccccatccttgcggaaacgaattctcagggtttttttctgcggctccacgtgaatgtcggaagttccttcctggagagccttagccaaaattttgttgaccaggttaatcaccggtgcttggttagcatcgttggagtctagagcattatctacatcttctttgtcctcccccagattcatgtcgatggagccgacaatatccgtcaaatcattaagtttatcaagggccctttcctggtcccttttttcctgggccgcctcccactcttcccggatggcatagtactgttccaacagttggttaaaatcatcttgggtgaccaccaagcggcgcaattcaaaacctttaacccgcaaaattcggtttagctcgtcctgggcagccaagttatcggggtccaccatggccactagcacactgggggggtcgcctttctgctgggctaagggcaaaaacttgaatcgtcgacaagtatccaaaggaaaaaatcgcccaatca

SEQ ID NO: 34214 - DNA, 210 bp, Oryza sativa
  Clone ID: uC-osrocyp004e07a1
acccggggatcagctcaggggtcagcagaattcctccaaaaacagaggttgccgccatgagatttgccttaactcgattatcttcaatctgttccaatgcagtcgccacttccctcaattttaatgtagggtcagaggtctgcgtcaataccgctaggggcaatagccctgggctttggaggaatatctccgaggggtgctcccagagcc

SEQ ID NO: 34215 - DNA, 245 bp, Oryza sativa
  Clone ID: uC-osrocyp004e07b1
atgcctgcggtcactctgaggatccggctctgggagcacccctcggagatattcctccaaagcccagggctattgcccctagcggtattgacgcagacctctgaccctacattaaaattgagggaagtggcgactgcattggaacagattgaagataatcgagttaaggcaaatctcatggcggcaacctctgtttttggaggaattctgctgacccctgagctgatccccgggtaccgagctcg

SEQ ID NO: 34216 - DNA, 296 bp, Oryza sativa
  Clone ID: uC-osrocyp004e08a1
aagggggacgcccaaggcagggagaaaaaaaaaccccccggaaaaattaaaaacgcccgggggggggccaagggccaaaaaatttttttaccggggggcaccaaaggggggggggggggggaaaaaagggcccctggcccaaaggaaaaaaaggggcccccgggcaaaggaccggccatgggaaaaaaaaaaccctttaaagaaaaagcaacccccaactaaaaaaattggggggggcccccctgggggttaaaaaaaaaggcctttaatgtgggagaaaattccccccaaggggg

SEQ ID NO: 34217 - DNA, 407 bp, Oryza sativa
  Clone ID: uC-osrocyp004e10a1
aataaaaactaagacgcatgggtcgcaccttagtttttgcaacattaattaatgaatgttttcggatcaaaccaacagaggttacatggattcgaattcaatggcaaagccagcatctagcatcgtttgccacaagactaatgttgtaattgtttacagctaaagcttggactggtacagctattacagctaaaagcctaaaacttctgaggtgttatgtactgcagtagtaggaaatcctagtacatgcttgttacaatgaaattttatacttcaaaacgtgagccttcactagagtgaaggggcactatggatagctcatagcttgtacaactggcggaccaactccagggacttatggtcctctgcacaaagggcaataatttagtcaaattccaagggaacca

SEQ ID NO: 34218 - DNA, 468 bp, Oryza sativa
  Clone ID: uC-osrocyp004e11a1
ttcatcctcctactagtttctttcttgtttctttggaatttttttgatctcttgaagagatccggttcttggattaagttttggacaagaaccgtactgtgaccatgtcgtcgccttcgcgccggagctccagcccggagagcaacaccagcggcggcggcggtggcgccgacgagcggaagaggaagaggatgctgtcgaacagggagtcggcgaggcggtccagggcgaggaagcagcagaggctggaggagctgatcgccgaggcggcgcgcctccaggccgagaacgcgcgcgtcgaggcgcagatcggggcctacgcgggggagctgagcaaggtcgacggcgagaacgcggtgctccgcgcccgccacggcgagctcgccgggcgcctccaggcgctcagcagcgtcctgagatcctccaggtggccggcgcgccgtcgacatgcccgagatgcccgacgac

SEQ ID NO: 34219 - DNA, 468 bp, Oryza sativa
  unsure (1)..(468): unsure at all n locations
  Clone ID: uC-osrocyp004e11b1
caatgtcaaaatattacaatcatcagttcatcacatcacaaaccagcacacatgtgctctccaagaattacatcaaatcggattgttctcttccacccttattagcaaggagcactggagatgaacacatctcacataagactagacaagattacaacacacattgcttattaatggtctagattaatgaaaacaacatgaagcaaaccataattaaacataataagcatcatcagacacaaccacagaggctagtactactagttgtaatgcagctgcaaccatgccattgatgccaatggccatggcgtgcgagctctccatggtggctcagaactggaaggcgtcggccatggcggtggcgacgatgggctgggccgcgaacggcggctgccatgggcggagcancgggtcgtcggggatctccgggatgtcgacgggcgcgccgccccctgaggatctccagga

SEQ ID NO: 34220 - DNA, 537 bp, Oryza sativa
  Clone ID: uC-osrocyp004e12a1
cccggggatcaagcccaaaaggtctatcaccaatacgaacacaagttgcagattttagcctatcaagttaacccccaagaccccaaccgagccaccgttactgcccgggtagaagaaattagccagccctttaccctaggtaatcaacagcagaagggctccgccaccaaagatgacttgactgtgcgctatcagctagtacgacaccaaggggtttggaaaattgaccaaatacaagtggtaaatggcccccgttagtgcgtggcgttaactccccttttgaccaatggcatacggctagatgcccccataggtacggaaacctgcacttccgagaactaagcccctaccgtcactataagagtgtgaacgtgtcggccccaggcaatggattggaaccatggcttttcggcccatcgttgtgtcttatattcttacttgttaacgggagttaattaaaattatgggaaaagttgttgggattgacctcggtactaccaattcctgtgtggctgtaatggaagggggtaaacccac

SEQ ID NO: 34221 - DNA, 533 bp, Oryza sativa
  Clone ID: uC-osrocyp004e12b1
cggcgattttacccgcatctttggtggcttgccgttgggagtcgttaatgtaggcaggaacggtgatgacggcttgggtaacggtctcccctaggtacttgctggcatcgtccaccaatttccgcagcacttgggcagaaatttcttccggggcaaactgttttccttgggctgggcaatctagtttcacattgccgttgccgtctttaactacgctgtaggcaacttcggtggcttcattggtaatttcatcaaatttacgaccaatgaatcgtttgacagaataaaaagtattgcccgggttcatcaccgcttgacgcttggcaatttgccccactaggcgatcgccatttttggcataaccaaccaccgatggggtcgtgcgaaaaccttctgcattggcgataacagtgggtttacccccttccattacagccacacaggaattggtagtaccgaagtcaatcccaacaactttttccataattttaattaactcccgttaacaagtaagaatataagacacaacgatg

SEQ ID NO: 34222 - DNA, 460 bp, Oryza sativa
  Clone ID: uC-osrocyp004f01a1
ccgggatccacaaggctcgatgggcacctttacggcgggtggtgtcactgtcaatgcgaatccagcgtaaatcgggaaattcttgggttagggcttcggttactttttgggtgccactgccaaaaaatttcagatagggggaagaacattccggacacactttgggctggatttccgcatggttacagtaatggcaccgcaggagaggttggccattgccctggacgtagtgataggaaagggaaacgtcacagttgggacattccaacacataaccgcaactgcgacaggagacaaaggtgctatggccccggcggttaataaacaaaataccttgctgttgtttggctttgagttcccccagggcagtttgtaaagcccgactaaaaatggagcgattgccctgttttaatttccgccgcatatcgacaattttgcaccgggggtaggggggcggact

SEQ ID NO: 34223 - DNA, 561 bp, Oryza sativa
  Clone ID: uC-osrocyp004f02a1
ccggggatcactgagggatttggtcacaccggacaaataggtgtggtccccaaacatgatttcttttttaactgtgtagtccaactgcacggtgccgcagtcctggcagtataaaacccgcaggggataatagggttcctggcccacttccgccggggtgagaaaatggttacaccagggttgttcccccaaatcgatcgccaaatctagacgggtagaatcacaaacacggcactgcataggaactaaccaaaaaactaagaaccaggacgacgggcaagggctatcttcccacgtttgttgtttcggctcaagctggggctaggccgttgggggtgtttagggctggcagtgaatttgctgtaaatcggcgatggtggcgtcggtccccactaggtttccctgggcataaccaggccagtgaatggcgatcgccccttgggcatgggcccctttggccatggtgatatccccctgggcatccccaatcatcaaggtgtgctccggtttcacgcccaactcccggcaggttaaaaggtataaagctggatcaagtttact

SEQ ID NO: 34224 - DNA, 625 bp, Oryza sativa
  Clone ID: uC-osrocyp004f02b1
ggtcgactctagaggatcaccaattgcaaagcctagtggatgtggctaaggggtcggaccaaggactcattaaacctgatccagctttataccttttaacctgccgggagttgggcgtgaaaccggagcacaccttgatgattggggatgcccagggggatatcaccatggccaaaggggcccatgcccaaggggcgatcgccattcactggcctggttatgcccagggaaacctagtggggaccgacgccaccatcgccgatttacagcaaattcactgccagccctaaacacccccaacggcctagccccagcttgagccgaaacaacaaacgtgggaagatagcccttgcccgtcgtcctggttcttagttttttggttagttcctatgcagtgccgtgtttgtgattctacccgtctagatttggcgatcgatttgggggaacaaccctggtgtaaccattttctcaccccggcggaagtgggccaggaaccctattatcccctgcgggttttatactgccaggactgcggcaccgtgcagttggactacacagttaaaaaagaattattgttggggaccacacctatttgtcctgtgtgaccaaattcctcagtgatccc

SEQ ID NO: 34225 - DNA, 562 bp, Oryza sativa
  Clone ID: uC-osrocyp004f03a1
ccggggatcgccgtggacagaaacggcaacattatcctggtggctagccataacctggtggggggagctggagctagcttgggggaatttgcccaaattttgcaacagttgggggcggtgaatgcgttgaatttagatggcggcagttccacctccctggccctggggggtcagttgctggatcgatcgccagtgacggcggcccgggtgagcaatgccattggcgtgtttgttcgttaaataatggttgtgccgaccctaatcaatgctgagggggtccacgtcaatatccaggtaaacggagctagggcaaatttgtttaattctctccagcggcaaaattactttgatgaagctgggatatttaactaacaactgccagcgataccgttgggcaatgcggagaatactggccggggcgggtcccaaaatctccacggtcttgggtaaaagttgttgacacccaaccgcgatcgcctggatcgttttttccaccttcctttcattggtccccaaacaactgagcaaaattaacttgccgtaagggggataatttaacatt

SEQ ID NO: 34226 - DNA, 587 bp, Oryza sativa
  Clone ID: uC-osrocyp004f05a1
acccggggatccccaggcttgccccaccgtcatcgaccaattaagcggagatgttgaaggaaaccggcatcccggtgcaggtgattttcagcagtggcaaagatgtggatttattgccccaacggagtaacaaaggtaacgccacccaatatctgcaacaacatttagccatggagccgtctcaaaccctggtgtgtggggactccggcaatgatattggcttatttgaaacttccgctcggggtgtcattgtccgtaatgcccagccggaattattgcactggtatgaccaatggggggattctcgtcattatcgggcccaatcgagccatgctggcgctatcctagaggcgatcgcccatttcgattttttgagctgatattttagttaacaattccgaatgggcaagcaaagtaagctacaatttgacattgttcaattttgagtacagggtgtaaagccgaggagggcgttattgctgagccactaaacttgacggtcagtttgcgcgggacattagaagtcaaggaaaagttacaaatcttccgtctgacgggtttgttggacgcattttccgagcctacct

SEQ ID NO: 34227 - DNA, 488 bp, Oryza sativa
  Clone ID: uC-osrocyp004f06a1
gagctatgacgccggatgcacgcaacgacagctcgcaacctctggtgcaggcgacctacatttttggccagtggaatcacctgaaacaaacccgtgaacgctttgggctggagatggcccggcaaaccctaattgatgaactgattagctacagcagacaccaaggctatcaaacccaagtggcattccatgctcagtaccaacaaagccctgctagccaagagcatcccagcccccacctttccatccactacactgactggctccagactgccgatacgctcattgaaaagcggagggcccattatcgccgtcacacctatgagtatgccggccggctaattgtcgtcacctccgatcgcgctcaggtaataaccgtgggggggcaccgcgcagaatggatgtcggcccaactttttgcccaggaggtggatcaaaggcgagctaaaaggtcgcaacaggctaaacagtacggtgaaaagagtcaa

SEQ ID NO: 34228 - DNA, 387 bp, Oryza sativa
  Clone ID: uC-osrocyp004f07a1
ttggttttttttcattttttttgtgactcaatcaattctattcattccattattgttggaacacaatgtgaatacagatacacattattagctgaatccaagaaattacccttatcaatcacacaatgaaaatggtagcttattacaaccccggcgggcatgaaattaatcttcgatcgaccgacatatacgaggatgcataatatcgatcgataggcattagcacgacgattattaatcatagtatatgggcatatataaaccggtcggcgcagtaattaatgaatttacaggcccatggcgtgcaagtctccccagagggtttcggcagaaaaactaatccttctcttctccatgggggtgagcaccagctcgggggtgacccca

SEQ ID NO: 34229 - DNA, 525 bp, Oryza sativa
  Clone ID: uC-osrocyp004f09b1
atcctgaggttactctgaggatcgcctgggaggtgagcaagttggtggaggtggccatcattgatttccatttcgaccaggagctaccgggggaaaaggtttaccacatcaatatgaccagcaactctggcattaatcccctagtaattaacctcgaccaggaagggggcggccccaatctgcgggccattgagctggccatgctattcgccaaaaccctacggttgggcagtaatcaacagggcaaactactagatgcgttcaaacattgctatttccgtcggggcatctcccaggaatccccccagagttggttgaaagtaccccctaacttttctgacttggaagctttgctggaggaaatggccgaggaagacaaggaagcggaaaagctgagactaaagctattcaccatgtttgagtacggcattttcaacaaaacccagcccccctatgaaaggttaacccgttggaatcttgccaaactttcccccaattgcaggcgatccccgggtaccgagctcg

SEQ ID NO: 34230 - DNA, 262 bp, Oryza sativa
  Clone ID: uC-osrocyp004f10a1
acccggggatcgcaatggtgctcaaactgcggaagaaggaattgtccaagtcttgcactaacagtttcattaatagtccaaagaaaacaatgggaatggtgcccaaaccaatacccagacctaatttaaattcgagggaatcgtattggcgagtttgcacagctttgataatgcccttagcaatgccggttaaatcttcccagaagtaccaaaatacggctccaatgctacccaattgaataacggcggtgaacgccacccc

SEQ ID NO: 34231 - DNA, 272 bp, Oryza sativa
  Clone ID: uC-osrocyp004f10b1
ggggtggcgttcaccgccgttattcaattgggtagcattggagccgttttttggtacttctgggaagatttaaccggcattgctaagggcattatcaaagctgtgcaaactcgccaatacgattccctcgaatttaaattaggtctgggtattggtttgggcaccattcccattgttttctttggactattaatgaaactgttagtgcaagacttggacaattccttcttccgcagtttgagcaccattgcgatccccgggtaccgagctcg

SEQ ID NO: 34232 - DNA, 309 bp, Oryza sativa
  Clone ID: uC-osrocyp004f12a1
gctccgcacccggggatcattagggtgtagtctcggttttcgatgacagcttcagcgctcattatcctcgtggggcaattttgcaaacaatggcggttttttctcttttagcctattacaactttttggaaatgttcttaagattgcatatttccttaaaattaatcagaaatttgttcgaggggtaatgctgtgccgactgtccactgctccaactgcgattgtcaagcccccaatgacctaggcgatcgcctgtgcaaaacctgccggactcctctgctgaaaaggtatctgtggtcggtgggggac

SEQ ID NO: 34233 - DNA, 310 bp, Oryza sativa
  Clone ID: uC-osrocyp004f12b1
ccgcaccgacacagataccttttcagcagaggagttcgttctgtcttgcacaggcgatcgcctaggtcattgggggcttgacaatcgcagttggagcagtggacagacggcacagcattacccctcgaacaaatttctgatgaattgtaaggaaatatgcaatcttaagaacattgccaaaaagttgtaatacgctaaaagagaaaaaaccgcgcattgcttgcaaaattgccccacgaggattatgagcgctgaagctgtcatcgaaaaccgagactacaccctaatgatccccgggtaccgacgctcg

SEQ ID NO: 34234 - DNA, 488 bp, Oryza sativa
  Clone ID: uC-osrocyp004g02a1
ccggggatctaaaaatggggggcgcataccccgcggcttgctgcgattgggtctttctttaagaatttctttgggttcttcagaatagaaaaccgcaatctgtttctgaaaaatatcttgactactgtgcccgtgggcgacatctttgctccaccaactcggcggccagtttaatggcggcaatgagactatctgccctggcaatgccttgccccgcaatgtcaaaggcggtgccgtggtcgggggaagtgcggacaaagggtaaaccaatagtggtattaatagcctgatcaaatgccagcagtttaacgggaattaagccttggtcatggtacaaagccaggtaagcgtcggatacccgtcgtttggccatcggttaaccaagctttgccagggccgacccacatggtatcccgaggaatggggccaattagttgggcctggggatatttttttctagcttgctccaaccaaggaattaaccaatc

SEQ ID NO: 34235 - DNA, 474 bp, Oryza sativa
  Clone ID: uC-osrocyp004g04a1
tcgccagaatggcgttggacgatcccccacgggacggatggcatcctatccatcggccgccattcgtacctttttgtgctatgggatgacggaccgggacctgaaggtgccgcagcagatcgacgacagatgtagaaaagccaccgttgcagaaacactctatcttaccctgcactcagacaacacccaagtacggaatccatttaacaggctgtccctcaacgaccccacaccatcacaacaccaggggcaacacgttaccctataccagtaacatagggacacatgacactgctagggcccctctgcccacaggggcaaaggagagtttttaccctaacgcttgacatggtcacaaccataggggaacgcggacctaaccacatgtggcccgacctgaaacccgcgtaaccgcgcgccattcgtttttagcaggctgcaactgctctgggaactctgcggctgaacccagat

SEQ ID NO: 34236 - DNA, 271 bp, Oryza sativa
  Clone ID: uC-osrocyp004g04b1
atggcatggcagacctatgctggcggtttttgtgctgggctgaacggattctgccgatcagaataaaatgggcattgtggatgctaaggcgtcagagccgagaaataatggttaggaggctgatgagaccaatgctaggttggaacccgacatgctaaatagggtagactttggcatggcctgcttgaaaaatgcaatctacaaaggtgctaaatggagcgaaccatactgctgttatgctgacctgtacatgcgctatctacgtgaagcc

SEQ ID NO: 34237 - DNA, 429 bp, Oryza sativa
  Clone ID: uC-osrocyp004g06a1
cataatcaatggaattcttatcccaggccattaaaaaaatttcaccaaaaaacaactccatcacaaggggttctatccttggagtcttgtcctccaaattactacagtaagatgtatcgtttagccataacaaacataaattgttcataaactaaaacctaaaatgtaacttcactgaaaatttctttaaaaaaacccaggggattgatccccacttggaacatacaattcccatgactcaaaaggcttaaaaacatatgctgggctctgtagggttgcaactaatcaatcttcacagatgagtaaatcaacctcgtgaaccagaaacaagcgcagaaaccgatggtcccagtaagcacaaagaacgctaatgaagcaagcaacatgtccccaaagtacaagatgccagacaccagcttagtaatctgc

SEQ ID NO: 34238 - DNA, 494 bp, Oryza sativa
  Clone ID: uC-osrocyp004g07a1
acccggggatcctaaggggccttccggttcgggaaaaacaacattgttgaccctgatgggggggttacggtcggcccagagcggtagtttgcgggtgtttggtcaagagttaaatggagcaaaaaaacaggatttggttcaggtccgccgtcacattggctatattttccaagcccacaatttgctcgaatccctcactgctaggcaaaatgtacagatggccatcgaactacacccccaatacaatgctcaacaggcgaaagagttgtccattgccatgctggaggcggtgggactaggagctcacattaactacaatccccacaatctttccggtggacaaaaacaacgggtggcgatcgccagggcactaggaagtcatcccaaaatgattttggccgatgaaccaacggcggccttggacagtcaatcgggccatgacgtggtggagttgatgcgaaaattagcccgagagcaagggtctactattttga

SEQ ID NO: 34239 - DNA, 438 bp, Oryza sativa
  Clone ID: uC-osrocyp004g08a1
ttttgttatacaaactgcaccacaggggctccacgttaagtattatgccttaattaatacactcgaggaaaatttcacgtctaagtgacaggaaaaatgaactatgttgacgacagaggcgcaatgatagcctaacgcaataaacaggttggaatcaatcatctgtaggctatcaattgtacaaatccgtgaatccagctttcaaccagaacaatcgaaggcataaaatatacattactgtggagcagtatatgcataaccgagggcgcataaccttgtgaacccttctggccaaactattttgtaaacctttcgtgcacctacaagtatttcttgctcactgaggggctatgcctgccgaggactttgtcgaaatctgtacttgagacaggtggaggaaggatctttagtgccggtccttggagcaagctcctgcat

SEQ ID NO: 34240 - DNA, 579 bp, Oryza sativa
  unsure (1)..(579): unsure at all n locations
  Clone ID: uC-osrocyp004g09a1
acccgggatccacaattgctgaaattccctaaggcgatcgggtaaatcgagtgtttgcgtagacgacattgctccgatgaatttgacgggggttgggcgaatcaaggttaaaataatgttaaggcttgctgattattaactcaaacttgtcgaccctgtgtggtccaactccctgggaaatctcctggggagagtatcgcttttacctgtccctagtaaaaggagcaaaaatcattaataaccattaacattaattaacattaatcccaaaaacctgcaccgatacagaaatgtctgctacaagataaatacgggattttgacaagctaatagctgatactatttttcccccgttaattggcaattatcggcttttttggtcgttttttctgttttataactaggtagtgcaaactaccctaacaccctccccaaaactatgaatgccgtcgccgatgtgnccaatnngaccattcacaccacctgtgcccaagacattcacgatattgaattgccccagtggttagaggattgtttacagcagcggcagagggagatagaacaggggcaggaccaaac

SEQ ID NO: 34241 - DNA, 514 bp, Oryza sativa
  Clone ID: uC-osrocyp004g09b1
ctgcaggtcgactctagaggatcgtaggcgaaacagaacgctcgacaaattagacaatggggcgccgttgtttcgtcctggccctgttctatctccctctgccactgctgtaaacaatcctctaaccactggggcaattcaatatcgtgaatgtcttgggcacaggtggtgtgaatggtgggggtgggcagagcggcgacggcattcatagttttggggagggtgttagggtagtttgcactaactagttataaaacagaaaaaacgaccaaaaaagccgataattgccaattaacgggggaaaaatagtatcagctattagcttgtcaaaatcccgtatttatcttgtagcagacatttctgtatcggtgcaggtttttgggattaatgttaattaatgttaatggttattaatgatttttgctccttttactagggacaggtaaaagcgatactctccccaggagatttcccagggagttggaccacacagggtcgacaagtttgagttaat

SEQ ID NO: 34242 - DNA, 279 bp, Oryza sativa
  Clone ID: uC-osrocyp004g10a1
gcggtaacgtcccaacttacggtcccagattcaactttattgttatgcctgccccagggtcggcgatgtgacctttgcccaactccattcccgccaagtgcccaacagttaccgtattgttaacctcgcagacgtgattcccctcctgccccccactacggggttaggcacctatgtccatgtcgggcaaagttggagtttcctcagccaaggaggggacatcttacccaaccatgtggtggatacctaccagggagcagtggatagggaagtggaaac

SEQ ID NO: 34243 - DNA, 328 bp, Oryza sativa
  Clone ID: uC-osrocyp004g10b1
gcctgcaggttactctgaggatccgtttccacttccctatccactgctccctggtaggtatccaccacatggttgggtaagatgtcccctccttggctgaggaaactccaactttgcccgacatggacataggtgcctaaccccgtagtggggggcaggaggggaatcacgtctgcgaggttaacaatacggtaactgttgggcacttggcggcaatggagttgggcaaaggtcacatcgccgaccctggtgcaggcatagctataaagttgaatctgggaccgtaagttggggaggttaaccgctagatccccgggtaccgagctcg

SEQ ID NO: 34244 - DNA, 510 bp, Oryza sativa
  Clone ID: uC-osrocyp004g11a1
acccggtgatcgattagcatcgtgcctatccaccaagtcgcagcttccggataattttgcacggcaatgatcgtaccgatgagtcctttctggggatggtggagcccaaaaacgtggagatcctcaggagttttacctgctggaacatcaacaaattcggcttcagcagcggtggatgcaggcggttgccctgtggttaagttgaaaaaatcggtgcagcgttcaaacaaggcttgcaggcaattactgtcctgctttgtcagttgaacaacagtgtaatcaagatgttgccaagggaatggcgcaaagttagaggtcaataggtgcatgacagggacgggtagataaacatcctcaatcgcagcgataaaccatcgaaacacgcaaatcagtccgcagccccagccgttgctcggctttttctagctccccatgctgcggtgacaactgggctgagtccacaatgcgaaagccgcaacgctgatagaaaggcgcgttccagggcacttc

SEQ ID NO: 34245 - DNA, 548 bp, Oryza sativa
  Clone ID: uC-osrocyp004g12a1
gcgatttctagggttttgggtcctttgctcggggcatgggccctgcggttcggcggcagtgacgagcggcaagccacctagaggaggagatgattacggagaagccgagctggattcgccacgagggcctgcagatcttctctatcgacatccagccgggcggcatccgcttcgccaccggcggcggcgaccagaagattcgcatatggagcatgaaatcagtggccaaagacaatgacagtgatgattccagccaaaggttgctggctacaattcgagaccattttggaacagtaaactgtgtgagatgggcccatcatggccgctatcttgcttcaggatcggacgatcaagttatccaaattcatgaaagaaaagctggcactggaacatctgaatttggaagtggagaacctccagatgtagaaaactggaaggttgttatgaccttaagagggcatactggccgatgggttgacctttattggtcccctgatgactcgacattggctaagcggagtttggataatactgtcacatatggagca

SEQ ID NO: 34246 - DNA, 373 bp, Oryza sativa
  Clone ID: uC-osrocyp004g12b1
ggaacccataagcaaaaaggacattaagttaatcgtctgaccttctacagatttactgttacacaatcgatcaccaggaggcctccctcgctcgctttctttctactgttacactctgctcgcgttacaactaacgggttgtttggctgaggtctcaccctttgctattaagaagaagatgaacacaaaggctctagcagctacataaatttaatcaaccatgggcaattctcaaaacacatgatagttctatgttgtatgcacttgattgtcctatgcttacccaagggggtgtcagtaataattctccagcaatcccaactgctatgaggcaccattattgttgccttctgttgctgctgctggtggtggt

SEQ ID NO: 34247 - DNA, 553 bp, Oryza sativa
  Clone ID: uC-osrocyp004h01a1
acccggggatcagctatcaccatgaggcactccagcgttgcaccaccaaccgcactgagccgtcttcatttttttgttgttccgtcaccgcaaaaccttgtttggccgattcattaagtacggtttccagagcgtaaccctgggtgattttttgcagaaatccttccaccgaaaggggctgttgccagtactgtaaatctgtcaccaactcatattcctgaccattccagctaaaacctaggtcgtaatcattgctctgttcaatcaccactgcggctttggcggtcaaaccctggtagccccgcacggtggccggcccttctttccaatccagacccaagttggtgagggtgccttctaacacaataaggttaccaaacctggttttgatattgctaaagcgagacataggaaattacaaaaaaattataagaatggatgagacacggtcttaaaacttttaaacaaggattttcatacagagagaatttaactttccccaggccaagtagaaagagtctgggattgctgaactgattggttcaacggactg

SEQ ID NO: 34248 - DNA, 134 bp, Oryza sativa
  Clone ID: uC-osrocyp004h01b1
actctagaagaccaacccacctgcctctaccgctccgaaaaggcaaagccagccacgcaatatttttttccctaaggactccataggggacagcgcccccatgaaaagccaatcggagcgacacaggcatcgcc

SEQ ID NO: 34249 - DNA, 411 bp, Oryza sativa
  Clone ID: uC-osrocyp004h02a1
gtgtttatttttggtagaataaccaaaacactagagcggatcataccgtatgttcctagattggacaaatatgttcccaatagaacaggccatggctggggaagcttccgtgtaggcatcggctaaccaagtgtgtaggggaaccaggggaatcttgatgccaaaacccaacaaaatcagaatcaacagaatggtttgggctgactcggtaaaggtctgggtaattactggattgtaatcaaaggaatggctaccacttagtaaactgatgccgagaaaggctgctaacaccaacaaaccaaaaaagggagtgtagagcataaacttcatggaggcataaccccgtttttgcccaccccaaatggccatcattaagtggaagggaattaattctagatcgtacaagaccat

SEQ ID NO: 34250 - DNA, 159 bp, Oryza sativa
  Clone ID: uC-osrocyp004h02b1
attcttttggatctaattaaatgacctcctccacatgcccttcttcccacggatcgaacgggccgggttctcacaaactggggcgccgcaacggcgacgctaaaaaggtaaaaaaggcccacttgaaagcttgctctatacctctgagactgtgaaaac

SEQ ID NO: 34251 - DNA, 480 bp, Oryza sativa
  Clone ID: uC-osrocyp004h03a1
ttttttgtgtttgttgccacagaaacacatacttaatttattctgagaaggttgcaaagattacagtcctcaacaatatgccggtaaaaacagggatctggggaaaaaacaaccatacaaggcttacatgacaaggctatagtatgccccttgcaatggccaaatcccccaacacctggcattcccaagagtacctgtaacaaaaaatcaaccctctatgacccttacacactaccgaaaacattattacacatgacctcaagacaccaacagactcagtaaccatacacacagggtaagtctgcaggcactccagcgtcgtcgggaggctggaacaccggggctgccgactactggtgacaccggcagttgagctgcggaactccatgacagcccccctgtgccgatgccggtgcctgcaacttcatgactaggaagcaagcaggaaagaaaaaaggatatgggacactacggcaacct

SEQ ID NO: 34252 - DNA, 182 bp, Oryza sativa
  Clone ID: uC-osrocyp004h03b1
ttcgtatagggcatctccagcctcgagtgctgcgggggcgctttggtgaccaagatcaggtctgagggttcgaacatgactgatgcttggttcgccttgatcgtgtgcaacggcacgtggtgtaccgttctcaccctcttctctattaccaatggggggcgtgaaatgcagcgggttacccg

SEQ ID NO: 34253 - DNA, 226 bp, Oryza sativa
  Clone ID: uC-osrocyp004h04b1
gctcaggtcgactctagaggatcgtgctcactaatccccggcgatggaagttaattaatacttcccggtaattattctttttggtagaaaaactaacgcaactgggctaccacttgattttccagtaacagcttttgctgcaacaaatactccaccgtcagacgcaggtagcgctggtcatctacccaaaatttgaccttgatgcgatccccgggtaccgagctcg

SEQ ID NO: 34254 - DNA, 579 bp, Oryza sativa
  Clone ID: uC-osrocyp004h05a1
ccccgggttcaaataaagagttgatttggcaggaaaaagtccagttttcccaggttcccggcccccaattggttaccatctggcgggaaagtttgtttcatcttttagatcaaattcccgatgaactaagcagtcaaatccaggcgatcgccattgatggcacttcctccacggttttactgttggatagccaaggcaatgggttaatggagcctctgttgtataacgatgaccggggcaaagaagttaagcatttattatcagcaatagctccagcagatcatttagtgcaaagtgctacttctagcctagccaaactgctttggtactcccaacaaccggagtttgaacgagctaattacttttgtcatcaagcggattggttagcaagtttgctccatggtggcagacccgttagtgattatcacaatgccctcaagctgggctacaatccccacaatttaacctatcctgattggttaaaaaatgcttcttggtttgcccttttacctgcagtaattgcccccggtaaagcaattttccgttattcccagcattgccacccagaaaattccctaa

SEQ ID NO: 34255 - DNA, 249 bp, Oryza sativa
  Clone ID: uC-osrocyp004h06b1
tgcggtcgactctagaggatcgcataaagccctgggctttggcctgggtcgcttctgccagagaccccatttgtttccagaccttgacaccagcattctggagctgggtcacccagtccagtggcggaaatgaccagaagaagataaccaccggcacccgttcggtcatgcagatggcgatgtggtcgtcgttggcggctgcggtaatgaagtcgatgccaaaggggcgatccccgggtaccgagctcg

SEQ ID NO: 34256 - DNA, 472 bp, Oryza sativa
  Clone ID: uC-osrocyp004h07a1
agaataaccaaaacataggaggtttcatttcttcttctcaaagtagtgtagcatctttccttctttcaccattacataagcttaagcaataacagataacaaatcctcctcctcctctaggtaaaatattcaaacacaatacccttataagtacttattattaggaaagtagcgtgcatgggcataaatggcagcggggggcaggttaagaatcacaatgctgagcagcgaggaaacaaaacaccataatgggacagagcaaaagcctccgaaagggagcttttaggcagaaggcttctcccacttgaggggcttcaccacctcccaggtgaagtctgggtcgtcccttccgaagtgaccgtaagccgccgtcttgaggtagcgtccgttgccgcctttcttgaggtcaaggctgatgatgatcatgccaggcctggagtcgaaagtcttcttcacaatcttgaggatcttc

SEQ ID NO: 34257 - DNA, 532 bp, Oryza sativa
  unsure (1)..(532): unsure at all n locations
  Clone ID: uC-osrocyp004h07b1
gtcggatctaattaatttacctcctccacctcctcctcctccccccgatcggatcggcccggctcctcctcctccgccgccgccaccgccgccgcagataggagaagatggccgcacttgataccttcctctttacctcggagtctgtgaacgagggccaccctgacaagctctgcgaccaagtctcagatgctgtgcttgatgcctgcctcgccgaggaccctgacagcaaggtcgcttgtgagacctgcaccaagacaaacatggtcatggtctttggtgagatcaccaccaaggctaacgttgactatgagaagattgtcagggagacatgccgtaacatcggttttgtgtcagctgatgtcggtctcgatgctgaccactgcaaggtgcttgtgaacatcgagcagcagtcccctgacattgcacagggtgtgcacgggcactttaccaacgccctgaggagattgtgctggtgaccagngacacatgtttggatatgcaactgatgagacccctgagttgatgcccc

SEQ ID NO: 34258 - DNA, 298 bp, Oryza sativa
  Clone ID: uC-osrocyp004h08a1
tgtatgcgcccgccctacattttatgggcgtttgaagaacctgaattgggtgttactggctgactgatttttctgttataaatacggaatccacccaagggggagggccaaccctaaggttcgcaagcaacacatgagattaccattacatgcattgcttaaactaaccctgactgatggttctcatgcagagtcagtttagacacctactttgtactaaacccttccctcactatctagcattttttttcatctttaacgaccttcacgataatattgcccttcttgttgctaatgc

SEQ ID NO: 34259 - DNA, 337 bp, Oryza sativa
  Clone ID: uC-osrocyp004h08b1
gtttttaaccatagctggagcgctaacattgtcccgccacctctgctgtactggcggactttgacatgtgcaagtggctgcagtcaaaacgctataagccgctgggcacgctgcggccgaagatcgtgcaccaccttctactacaagaacgaggcattcaaacatcgcgaccaagccgcactatctcgaggtgcccgctctgtcggtccgcgcagcaatccaccaggcgttcaacgattccggtgactccctgaaccgctgcatttcggggataatcattgacgtttagatggcagatctaggtactgaccagcactagttcttctttgaggcaata

SEQ ID NO: 34260 - DNA, 453 bp, Oryza sativa
  Clone ID: uC-osrocyp004h10a1
actgacttcatatctaatacaccagggaataaaatatacaggcactaagaattttacagcatgtcgtagtatcttatgaccgcaattaagctactctgaagaaacgaactgaactccgcctgcatggaacttgcaagcacagtcatcatagacctctgataatttctaccgacagcagtctcctgttactaatctggaaattttgagcaggcggagcaagtcctgggatgtcgcggatgttcttgttatgtgggttgacaatcttaacaacaataattgcaatcacaccacaaacaatcagaaaaagcaatgccataatgcatttgtcagttgcaacctgacggccaatctctttcaccagctggctagccttctttaacgaaaagtgaacagtatccagctcattgccaattctcttcatttgttctggttgctgtgatagcgctgaagcag

SEQ ID NO: 34261 - DNA, 594 bp, Oryza sativa
  Clone ID: uC-osrocyp004h11a1
gctcccacccggggatcgagtgtaaaagactcaactcaacgcagacctgcaataggggggattccggcaagattttcagtcttggctcaacctttgttccgtcgtagttggggattgtccttacctttgcctggggctaaaacgatcatttccatggcacgacaagctcgctatcaaaaccttttagggctcaatccgagaactgaatcccgcagtctaatttggtgtcgtcgtttctccgttcgtcctaattgccttgggcttttgtatagaaaaaattgctttgaaaaaactttagaaccgggtatttactccttttgggattttcgctcagaattggaacttttcctgattccccgttctgaccagttctttattgttacaaatcaagaagtattaaccaaagataatattcctctacgtttttcttacattgtcaattatagaattacagacggtcagaaattgttgacctatattgatcctgcccaaatgggatacatcgaatggctagcaagtatgattcaaactctgattcatcctctaacccaaatttatagtcatagggctattaacgaattaacagccttgagc

SEQ ID NO: 34262 - DNA, 602 bp, Oryza sativa
  Clone ID: uC-osrocyp004h11b1
atgcctcaggtctactctagaggatcatctcctattaattgggaagcattttttaacgccctagcggtggcaacttctgtgcgggcattttccaaatccgtttgacctctaattttggcttctaactgaagagcaaaaagagtttggatatttttgggaaaagtaatatcccttaatttcattgcttcaatcataaccccaaatttttgggctgattcttgcaattcatccggaatattggggatgaaagcttcccattgctcattaagctcaaggctgttaattacactaatagcactacgccaataaatttgggttagaggatgaatcagagtttgaatcatacttgctagcccttcgatgtatcccatttgggcaggatcaatataggtcaacaatttctgaccgtctgtaattctataattgacaatgtaagaaaaacgtagaggaatattatctttggttaatacttcttgatttgtaacaataaagaactggtcagaacggggaatcaggaaaagttccaattctgagcgaaaatcccaaaaggagtaaatacccggttctaaagtttttcaagcaatttttctatcaaaacccag

SEQ ID NO: 34263 - DNA, 401 bp, Oryza sativa
  Clone ID: uC-osrocyp004h12a1
ccttagtatacatcttcctaggattagatagtagtagagtgggaaatagaagtgcttattccagtacatctcagctaccagtagcttattacggtacatagcagctagccatctagagttctagacccatacaataaccacatatcaacatatcacccaaaaaaggcaagaggcaagaacgaagcagagagataccatatcggtatttacagtcacgcaggatacaaaggaaccacagatcgtgggcagtccgacctcttcccggcaagggagtagtatgcaagtatctgagcttgactatctacacagggttcaccatcttctctcattcgatttgcattctcagaactgggaggtgtaaactctatgttccagaagggcctggccatgagcatgagatc

SEQ ID NO: 34264 - DNA, 397 bp, Oryza sativa
  Clone ID: uC-osrocyp005a01a1
gaaaaccaaaccaaaccaaacacgacaaccttgcttacagactcgatatatacagatagataatccaagccacgcattgagttaaagatcttctgttatttttgcttaaagacactagaacaggatgtgcatcaatagatgcccattccaggatggaacaacaacagaggcacgggaggaagaaagcactgggtatatatcctaaggtgaaaagcagcacaggagaagagagtacacacatggttcttcattcatgagatggatccaatagatgcagatgcagcgtcagaaatgcagtgatgtgtgctagtgagttgaactggtggtaccatggccgctgctgattgaaccccagttagcttcggttcccatttgcacagcgatgctgtccatcgac

SEQ ID NO: 34265 - DNA, 308 bp, Oryza sativa
  Clone ID: uC-osrocyp005a01b1
aaacccctgcccgtaccgggcccgaattccgagggctcctgctccatcacacattcttgtttgggcatcccgcctccgcatcacccgccgccgccgccgcctgctgctcgaggtcgcggctgcgtagccggtgctgcaggaggtgcttcggaggggagatctcggtggggactgctgcttgctgcttgaggtggcggcagctgaggaggaggaggaggtcgctgtggatggcgaggtgggatggggcttggagtaagcagcgggagaggggaggccgcgtactgaacacgccacggctaggggcacca

SEQ ID NO: 34266 - DNA, 434 bp, Oryza sativa
  unsure (1)..(434): unsure at all n locations
  Clone ID: uC-osrocyp005a02a1
ggctacaatgggaagccagctcaaatgcaggaaaaagaactcttgaggttgtttcacatgtgcaccaaagaggcaaaaaccactccatgcttccctatttatacacatactactagcagtatgcatacataactacaaggtagctaggtgcagntccctaaaaagacctaagcccatcacttagccagcaacttaaagnnataattaaccctacatanctaatccttacaagngggcatatattatcgaagacaatggaggaaactaccatctcaaaaagatttaaatctctagcaaccatttgaagcttcttattcatgccagttcgcatgtcccgtgccggtgatgaccctactgttcaagtggcgaggtgggtgactgaactgctagccgctctgatacctcggcgagagatgttaagttgcacttgatca

SEQ ID NO: 34267 - DNA, 298 bp, Oryza sativa
  Clone ID: uC-osrocyp005a03b1
tcactccctcgagggacgcgaccctcgattgataggtttaaaaaaggggagagagagtgaggagacccctaccgtggacactgggtggaggcgccattgctggtcgcgttgatccacgtgccggctggcgccgcggaggaggccaaccaggtgaccaccagccacctgtggacggccggctacaagaacgccgaccgcagcaagagcaagagcccgaggcaggagaggagctttgccgacccggacaactacaaggccgtcttcgagcacatcgacgatgactcccacttcgacgacg

SEQ ID NO: 34268 - DNA, 375 bp, Oryza sativa
  Clone ID: uC-osrocyp005a04a1
tttttgggtctaacatacgcaaactgatattatcacaatgttagccgatgacaatggaaagagtaatctaggtacaagcggatcattgacggtggagacaagacattggctgcaccacaacacccaccagtggcgccaacaaggagcgctatccgttataggacgagagaaaaagtaaaacatcacgatgtgaagtgaaactgaataattctagtagacgatgatgatgatggataggctccttaggacgcccgccgcccttagcgtcttgctgctcccatcttgtccactggaaggctcactcgtcatcgtcttcatcctcttcgatgccctcgtcgtcatcctcatcattgacctcggacttggacttgtcag

SEQ ID NO: 34269 - DNA, 338 bp, Oryza sativa
  Clone ID: uC-osrocyp005a05a1
tttttgggggtttttatttttttgtgtgtttttttttttttttttattttttttttgtgtttttttataatcgtggctggccaggtaaaccacgcaaaacattaaatgaaaagggaaaccggggtgggggcaaaaaaatcttaggaaactggggggggatttaccaaagtttaacggccctggatcccgggcaaaagggtttttcaaggaccggaacccaaggggctaatggcttcaccacccaaaaggttaaggggcggttccaacaaagggcgcacttaaagacccctaacgccacggccagggggggggggccccacaaaaaaagggcccggccc

SEQ ID NO: 34270 - DNA, 275 bp, Oryza sativa
  Clone ID: uC-osrocyp005a05b1
gtctgcgttgcgtggattccccttcccgccgatccggcgatggattcggcggcgagagcctcgcagtcggcggcgccgccgccgcccggcgccggggtccgcgtccgcgccccgctgattagatactggtctgaaaactgttgttgatgctagaaagtttgttcctggagcaaagatgtgtatgcaacctgatgtcaaacccaacaagtgcaaatcaaggggctctcgtaaggagaggagccgaactcaagcaccacttttgcctggtcttcctg

SEQ ID NO: 34271 - DNA, 243 bp, Oryza sativa
  Clone ID: uC-osrocyp005a06a1
cttaagcttggttcctctttttttccgcccttttttttttttttggggtttttaaggagaaatcatgattcctcgccgcttccactctcgcaagtcacaggaccataaaaagaggcaacaaaagggccttaggtaaagaaaaattataccgaaccattactgccactcctccataattttaaacatactggtttcatatttaccatgcctgaattgacttttctgttcgggacgctatcctgc

SEQ ID NO: 34272 - DNA, 342 bp, Oryza sativa
  Clone ID: uC-osrocyp005a06b1
gtctgcgttgcgtggattccccttcccgccgggccggctatggattcggcggcgagagcctcgcacccggcggcgccgccgacgactggagccggggtccgcgaaacccccgccgggataagacactggtctgaacactgatgccgcggctctaacgttcggtcctggagcaaccatgtgtgagcaacctggtgaggcacccaacaagtgcaaatcaaggggctctcgtaaggagaggagcccaactcaagcaccacttttgcctggacttcctgacgaccgtggtatcgcttgactcatacggggtcctcgagtggaacatcccaatcttcggatagtttg

SEQ ID NO: 34273 - DNA, 358 bp, Oryza sativa
  Clone ID: uC-osrocyp005a07a1
ggggaaagcgagatgttttcttcctcaattttcatgacaaagttttacaagaaaattcagaggctgtgcttatgtggacaggcccaccggacaccaaatttacaactttgatcttataggctatatatcacactggcacccttaattataccctactaatccacttattggtctggagacatggattaaattaccaaggggaaaaaaaaagaaaattaaaccagcaaaaaaaaaaaaaggcccagaggaagctaagctagcccccccaagctcctcccatggggccccacccgtttggacttttaacacccttacctgggaaccatttttggcctacccccccccgggtcccgggccc

SEQ ID NO: 34274 - DNA, 384 bp, Oryza sativa
  Clone ID: uC-osrocyp005a08a1
tttttgggtacaaaccaaaatacattacgactggactgaatccagcaaattatgatattcttacacgatccatctcaacatgacagagatcaaatgatggatcgatcagtggtacataaacaccaagaggaccaggttttcatagacttatttgacatcattaacaaccacgaccacgataattgacgacgatattgccgacatgatcgatttcataggactatttgaccagcagtacgaagaccccgtaaaagtagcccacaaattaagagtacataaacttaatatatagttttgatcataagatcggcagtagtacagattcagaatctaattgacaaacacaaacaccggaatataattcggtaatcaagcaagccatga

SEQ ID NO: 34275 - DNA, 314 bp, Oryza sativa
  Clone ID: uC-osrocyp005a09a1
ggggcttcaccggcgaggtggcggacttggccttcgccttgggagacgccttgggcttcgccgccggcgcggcggcgaccttgatcttggtcttggtcgccggcttcgcggccttggtggtagcaggagccttcgccttggcagccggcttcgcggccttggtggtcttgaccttgggcttcgtggcgggggcggccttgggcttggcgtcggcggcggccggagcggcagggcgggtggaggagagcttgaaggagttcttgaccttggccagcttgccggcggcggtgagcttcttgaggttgccggagagg

SEQ ID NO: 34276 - DNA, 355 bp, Oryza sativa
  Clone ID: uC-osrocyp005a10a1
tcagggagcgcgtgggggccgtaggggccgtctgctcctccggatcgtggggcgatgagcatgcattcttcaagagggatgagaatgagataagtccgtactcatggaatatcacagggacatataaaggaagttggaactttgctggttccacaaatggttcttctaggtttcttgagtttacaaaattgaagggcgatgcggttttggaactattaagtacaccgacaaagataagcggggtgcactatgttcagggatctgttacattccatgatgttctagacaatgctcatgatcgtggagttgctcagataaggttagaaggcgtggcatatggccttttcggcaactt

SEQ ID NO: 34277 - DNA, 266 bp, Oryza sativa
  Clone ID: uC-osrocyp005a10b1
tttgttcaggtaagatttttttttccttagcgtcacaatagggacaatgacttgcgtacaagcacacgagatcacgttgacagtaaaagcggaacagattctgtacagctatcttccagaaaccacccatggttgcaactcgacttattgcacctcaattcccaccttgtatatgctgagctacctacttgataactatatggtacacagtagtgctcatctaagctagcagcaaggagcgcctgcaagtagggcactccatcttg

SEQ ID NO: 34278 - DNA, 420 bp, Oryza sativa
  Clone ID: uC-osrocyp005a12a1
ggggatactaaggtgaaatcatgattccctctattgtcatgctcgcaagtcacaggaccataaaaagaggcaacaaaagggccttaggtaaagaaaaattataccgatacattactgcaactcctcccgaattttcaacatcatacacactacatcgcatgcagggaacatgtgccgctaccaagagaccggacaaaacctcattcctcccaatgacaagttactcggatatattcattggaggttcaaggctctcgacaagaatgcgcaggtctaaatccttatcctcaaactttcttgatgaaaggatgattcaagagttctgaagcagacatccgctccgcaggatccttttgtatgcaggaggagataaatgcacaaaattctggaaagaactggtccgctggtgcaaaaggtggt

SEQ ID NO: 34279 - DNA, 402 bp, Oryza sativa
  Clone ID: uC-osrocyp005b01a1
gacccacccaatttaaggcacatacattcagttcttttttttccaatggatcacatttttgttgacgatcagttcacaaactagtcacaatcacatcgttattacttctgcttcttcaagcattcatgtaacatcaaaacattacacacactggtttaaatacgccttgggaaaagtacaagaaatttactatcttttcaacacactgaagctcagttaattaacaaccctgcagtttttgcgaatttggccgtcgtcaccggtgagggggctgatgttgcccattttcaccatggatctgccaaaatcccaaaagaacttgggggcattggcgctgtaagtctccaccagctccttggtgttggcgatgccgtcgtcgctggagaagagaccctggtcgga

SEQ ID NO: 34280 - DNA, 446 bp, Oryza sativa
  Clone ID: uC-osrocyp005b01b1
tatggcattaacttctgcgagagatggagtactcttacagctacaggttcatgcttgtatgctcagttcttgtactgtgccttaatactcggggtgcgagatgccagttatccgacgatttctacgactacatatgtcctgatgtgtacaccgttgtccagcagcatgtttatgctgccatgaggactgagatgaggatgggtgcctccctcctaaggctccatttccatgactgcttagtcaatgggtgtgacggttccatgcttctggacggagacgacggcgagaaatttgcacttaccaacaagaactctgtcagagggttcgaagtcattgacgcgataaaggaagatctcgagaacatctgccctgaagttgtttcctgcgccgacattgtagcccttgcagctggctatggagtactatctagtggaggcccttactat

SEQ ID NO: 34281 - DNA, 430 bp, Oryza sativa
  Clone ID: uC-osrocyp005b02a1
gggtcaaaaagccatagcatggtatagcacatgtcaaaccatcagtaaattatggggataaaaaacaacataacaacctattactgatatgttatgaaatcatctttcttttttctaacttcttgccttttgtcccccagaaccaatagaaatctacctcgctaggtaccgccaatattcacagtcacttttacgaaatttcgttcaaacaggctcaagacacccaagagccttttgaaccctgctttttgatcagatgtcaacctggaagggaacctgatgttgaatttaatcttcagatctcccttcttattgggcccttttggatttggcatgccttctccagggaccacctccacatagtcaggatggatgactgaattaatgggcactgacagactttgcgcatcaagtgtaatgatacgtgcag

SEQ ID NO: 34282 - DNA, 420 bp, Oryza sativa
  Clone ID: uC-osrocyp005b03a1
gggcaatgtatactcgcattccacaacagtcgaagggcaataataagtcttaacatccaaatttaaaccgaacagaaaatagagttttaaacgactgacatagtgcacaaagcgagcagatattaacggtcaatgcaacaactgaaatgaccgtcgacaaaacttaacgagtactaaaagagctagatatctcaaatgcagatatggaaagcaccacttgaacgaggctcatttcttcttggcggcagccttggtcaccttggcaccggttgggtccttcttctccacgttcttgatgacgccaacagccaccgtttgcctcatgtcccgcacggcaaaacgaccaagaggagggtactcagagaaggtctccacaaccatgggcttggtgggaatcatcttaaccataccagcatcacc

SEQ ID NO: 34283 - DNA, 323 bp, Oryza sativa
  Clone ID: uC-osrocyp005b04a1
tttgggtttttttttttttttttttgtaaacactattttttttttttaaggacaatccaacatggggattctggccccttatatatcctaaaatatgagccgtaataaaaaagggtatgtttactttacaacaaatgcaaatttttaaaaaacacctcatattaaattggattttggaattttaaaagttgtatgccctaagtttcactttccccctccaatggggtttgggaaaagattttttgggggcttctccaaaggggttgtttttaaaagggaaagcctgggaacccccttttgtaaggggcccccccattttcgtc

SEQ ID NO: 34284 - DNA, 216 bp, Oryza sativa
  Clone ID: uC-osrocyp005b04b1
ggccggaattcggaattccaggacgcgtccgttctcctgttacagtcgacatcccctttctcgacccctattgctgctgaaggccggaaggatgagcgccactgacgggagggagatgaactccggacgcgtcgctatttatactatagggttgcgctaggctgaggagttctggccgtagcggtgggacctttctatggcgatggaagttgaaca

SEQ ID NO: 34285 - DNA, 373 bp, Oryza sativa
  Clone ID: uC-osrocyp005b05a1
gtacaaggagctgcagcctttgattaattattataatgagcagatagtatatacaactcctctcaagactagctctatctctctctaaaccctcctaaccaaaagctcaaaagacaaaaatttgagatcaccatctcaagcacctatatgttagccacattgctctagatcttgcgatcttcctttttttttcccttcttccgtatgaaacaacaaaaaaatttctgactcctgtggttgccaacaaaatctgccaacctgttcatcacacgccccaattcgctttacactgtacaggaccggtgatcgtgtgttcagccgttgagcttcgccaagaactggttgagatcgtactcgtctgcatactgagact

SEQ ID NO: 34286 - DNA, 521 bp, Oryza sativa
  Clone ID: uC-osrocyp005b05b1
tatcggtttatcacaagataggattatcctccgttctcagtttgataagttcaacgtaatcataacgtcatatgatcttatacgcacggatattgattctcttgagaatgtcttttggaactattgtgtgctggatgaggggcacataataaagaactcaagatctaaaataacatctgctgtgaaacaattgaaagcacaacaccgtcttatcctcagcggtactccaattcagaataatgtattggagctctggtctctatttgactttcttatgcctggatttcttgggacagaaaaacagttccaagctacatatggaaaaccattgctagcagcaaaagatccaaaatgttcagcaaaggatgctgaagctggcattcttgctatggaggcactgcataaacaggtcatgccgtttctacttagaagaacaaggatgaagttttatctgatcttcctgagaagatatccaggatagatattgccatctcagtctattgcagctcagactttatgac

SEQ ID NO: 34287 - DNA, 377 bp, Oryza sativa
  Clone ID: uC-osrocyp005b06a1
gggagaaagtcaaggttcgataaatattgcttcacttgtacaaagtacagataaaaatacattgatacatgacacggagagagccatgcacaccacttatttggacacacagagggcaaggctgcagagaaaatcaagcaacacaagctgaactcacggccccacctgtcagcctctcactggtcgaggccggagactcttgtgaaaaacagcaacaccacgcatgcagaagaagacaaattattacacacacaaatcgacgacacggcggccggcgacgtacggcgaggtcgtcgccgccgccggcgacgttgtgatgaggtcgatcagccgaagaggtggtgcttcttctcgccggtggactcctcggcgctctt

SEQ ID NO: 34288 - DNA, 389 bp, Oryza sativa
  unsure (1)..(389): unsure at all n locations
  Clone ID: uC-osrocyp005b06b1
cttatggtcacttccaatacattttcctaattgncatcactagcttctagctaggcttattaattaattagccatggcggaagagaaacacccaccacacccggtccaacacaaggagggccaccaggccggccaccgagtaaacttctaccgggagggccgctatccactcgaaaccgtgaccaccgaagtgggcccccgcgggccagaccaataccagagggtcaagaaggaggagaagcagcacaagcacaagcaggaccttggggagggccggggcctctgcgccggcgcctttggcctgtatgagaagcaccaagcgaaaaaagaccccgaaaacgcgcacaggcacaagatcacggaggagatcgcggccacggcggcggtcg

SEQ ID NO: 34289 - DNA, 106 bp, Oryza sativa
  Clone ID: uC-osrocyp005b07a1
tttttggttttttttttttttttttttgacaataaagttcagaactttaagagaaccgggtgatcagaatcatacaagccaagaatgagcaacttttaggatttcg

SEQ ID NO: 34290 - DNA, 445 bp, Oryza sativa
  unsure (1)..(445): unsure at all n locations
  Clone ID: uC-osrocyp005b08a1
gggaatggcacaactcgctagtcagttataagaagaaaacgcagaagagatgtccaaatgggataagattgttcaatccaacaagttctctgtaacatcagcagctctcttgctcaacaaaagcagggatgtctcggggaggcagggaaatcaaaagcaaacacggaaacgcttcagcctatacactgaacatggccagacggaaagggacgcaaaaatccctatagaaaatnaagtcaaatacgcaccagatacaataccacaagcaaagcagcgtggttacactgtcacggcatggnggagaacatcttttttacatcggaagcaaaacaattggatcaaactgcagacgccatcatcgtcgtcatccacccgaatgttgcgcaacccaacaggaggatttggtgctcgatcgatgaactcttcagcgtttccattcagcttt

SEQ ID NO: 34291 - DNA, 373 bp, Oryza sativa
  Clone ID: uC-osrocyp005b08b1
ctgcactacattaccattttcttcgcgttctctctcgctgcaatggaggcgtactgttgggaggagggagggagagagcgagggagagagggagctagggtttctgggccgtcgctgcctgcttgagttcgtcgtccctccggttcccaacccttgggcgtgcggcagtgtaagctccaatggggaagtctccgtcgaagtggatcaaatccgcgctcttccgtaagaagtcatcacggtccggctctaccaaggcgaaagatttatcgaagggctccaacaacacagggtatgctgctgctgtgaaggatgctgggtttgagagctccccgttgatatcggagccggtgctcgttacacctcataacaatga

SEQ ID NO: 34292 - DNA, 439 bp, Oryza sativa
  Clone ID: uC-osrocyp005b09a1
gacaaggccggcggggggtacgcgagcctgatcggcgggtccaacctgacggacgtggtgatcaccggcgcgaacgggacgatcgacgggcagggggcgatgtggtggtccaagttccattcgaacaagctcaagtacacgcgtgggtacctgatcgaggtgatgcactcggacacggtggtgatatcgaacgtgacgctggtgaactcgccggcgtggaacatccacccggtgtacagcagcaacatcgtggtgcagggggtgacgatcctggcaccgacgcactcgcccaacaccgacggcatcaacccggactcgtgctcccacgtccgcatcgaggactgctacatcgtgtccggcgacgactgcgtggcgatcaagtccgggtgggacgagtaccggatcgcgtacgggatgcccagccagcacattgtggtgc

SEQ ID NO: 34293 - DNA, 428 bp, Oryza sativa
  Clone ID: uC-osrocyp005b09b1
gacgactaatttctcatttgtatttcacgaactgaagtttaagttacataattgcagagcaaggagaggcagcactgacatgacgcagagcgagcgctgtgaagcagcacagtcagaaaggtcactctgggttattgtttttgtttcagaagaccgcacgcagaggctagtgttgtagtagtaacgacggtcacagctacagctacagcgctgcaggctgcagccagatcagctagatggaggccgggacggagtaggcgcactgctgcatgacgagctggtcgatgggcagcgtgtccgtggggaacgggcaggcgccatcgtgcgccccctgcagcggctggcacggcgccggcgtgacgccggtggacaccccctcgatgtcggtgcaggtccacgggtacttgcgcgacttggagagcgtggcg

SEQ ID NO: 34294 - DNA, 345 bp, Oryza sativa
  Clone ID: uC-osrocyp005b10a1
ttttggtgttttttttttttttttttttttttttttttttttttttttttttttggaaaattcaacattagggtgctggttatggcccatcatcagaacattaacaggggggcaccctactacattctttttccacttttttttttgggaattttcctagacaaactcttgaggaacattaaacttacaaggcaaccctgaaaaaagggggcatttgggtcaaactttttttagggccatttggggttatactatccaaaagggccccactaaattcccagaaaaacctttgggacaaacccaaactttgggtgaaccaccccacctaaaacaaccgggaggaag

SEQ ID NO: 34295 - DNA, 409 bp, Oryza sativa
  Clone ID: uC-osrocyp005b10b1
attttctcttcccctgctcccgtcgccatcgcaaaggagaaaaaaaaaagaggaggaaggaaggaaggatgagcgccacggcggtgtcgtcgctgaacccggacgcgccgctcttcatcccggcggcgttccggcaggtggaggacttctcgccgcagtggtgggacctcgtcaagaccaccgcctggttccgcgaccactggttccacgagcaccagcagctcgacgagatggccgactccctcgccctccacgacgccgccgccgacgacgacgacctcgccggcctcctccccgacgacgccttcgacgacgacgacgacgacgacctcttcttcgaccagacccataacctcctcgttcgatcccccgcagccgcccgccgctctcagactgatgcggtgctcag

SEQ ID NO: 34296 - DNA, 390 bp, Oryza sativa
  Clone ID: uC-osrocyp005b11a1
ttttggggcgttttcactgacatttgccaatataattgtttcaacatttacatcgcctgggcattgtgattggttcgttttgtcgttcagcatgtaaacaataactataacaatacatctgacattgacatgcgcttattggtcacgagtcacaacacattctgattagagcaccggaggagcgccttattggaccatgtgtttgagcagccgcatggtgggttttgcaggacatatttacgagacaacgaggtgctatctcaccaatccccaacattatttatggatacggatcacatgcggacaggttgatcctgccagtccctcttcgactcacagcttccatagtgaaatgtccatcgccttaatgaagaaatcggagtcctcttt

SEQ ID NO: 34297 - DNA, 579 bp, Oryza sativa
  unsure (1)..(579): unsure at all n locations
  Clone ID: uC-osrocyp005b11b1
aaagatgaaagccatgccccctgcgggccccgatcccgagttcgagccacgcggccgtttcgctttatcacaagataggagtatacgccggtctcagtctgattagaacaacgtactgatgacgtgaaacgaacggatacgcacggaacatagatactctggagaatggcttttggaactattgagtgctggaagaggggcacataatccagaactcaagatctaaaataacatctgctgtgaaacaattgaaagcacaacaccgtcttatcctcagcggtactccaattcagaataatgtattggagctctggtctctatttgactttcttatgcctggatttcttgggacagaaaaacagttccaagctacatatggaaaaccattgctagcagcaaaagatccaaaatgttcagcaaaggatgctgaagctggcattcttgctatggaggcactgcataaacaggtcatgccgtttctacttagaagaacaaggatgaagttntatctgatcttcctgagaagatatccaggatagatatngcaatctcagtctattgcagctcagactttatgac

SEQ ID NO: 34298 - DNA, 418 bp, Oryza sativa
  Clone ID: uC-osrocyp005b12a1
ttttgggaaagaaaacggcaaaggtcatttcatgagttagatggaagcgcctcacatatccagagacctaaccatttcttacactacaccatcaagggatacatagaacttcgcctactcaagagaactatctaaatagggagacatagccgaggcagcctttgtacagatcctaaacaccaaccatttcaaccaagaggggacctacatagctatcaaccaaactcccaactcaagctgcaggtgccttgcgggtcttcttcgcggtcggcgaccggacggtcttgggcttggccttcgccggcggagactttttgggcttggcgaccaccttcttctccggcgccttgcgcttggtgccagcggcggaggccttcttgggtttggcagcggcggcgtccttcttgggtttggcggc

SEQ ID NO: 34299 - DNA, 181 bp, Oryza sativa
  Clone ID: uC-osrocyp005c01a1
tttttggggtttttttttttttttgtttttttttttttttgggcaaaacataggatgacttaacagaatgatctaacaaaagacagtccctgtcacaccgtttctgacagtaatcatttgagcacaagaaagacaaggctatgatctgtttccagtccttttatgagatggttaggcacat

SEQ ID NO: 34300 - DNA, 440 bp, Oryza sativa
  Clone ID: uC-osrocyp005c01b1
ctctctcgtcgtcgagttttcgattccgccgcgggagatgatgaagcacttggtggagactgagaaggcggcggagaatgccgggccgacgtaccggaacgagctggccaaggacgccgggcgtctgcggccgtcgacgggggtctacagctgctggtacctctagcgtagatcggtggacaagtacccagacagtccggtgctggagcgacagagagtacgctacgacggcaaggcaggtgaatataagaggatgacttacacggaggaatatcacattgagaagaaacttgctgcctacattagcaagctcggaataatcaagggtgacagatgttacaaatacggtgcaaactgccctgaatggatcatcagcatggaggcttgggatgcacttagcgctataggcaagccgctctatgatagtcatggtgctggtg

SEQ ID NO: 34301 - DNA, 390 bp, Oryza sativa
  Clone ID: uC-osrocyp005c02a1
ggggaactcttttttttctccttgctctctatttcatttcattccgatagatagcaacaagcagttcaaacaccataaccaaagcgaactcaattcatggtaacatcacggacgaagaacacctaacactggatggatggatagagggcttctcgactcgagagagccactggacacgataacgactcgactcgatgataagatgattctgacacggatagctaaggataactggccacgatgggccccaccaatcagttcctccagttcccgccggagtcgccgccgtagccgccgccacggttgccaccgtagccgccgccgccgccgtcacggtcgccgccgtagccgtcgacgccaccggagccgccctcacggagcccgtagccg

SEQ ID NO: 34302 - DNA, 422 bp, Oryza sativa
  Clone ID: uC-osrocyp005c02b1
ttggtttttctagggcttagtgggttgagatggcggcgccggatgtcgagtaccgctgcttcgtcggcggcctcgcctgggccaccgacgaccgctccctcgaggccgccttctccacctacggcgagatcctcgactccaagatcatcaacgacagggagacggggaggtcacgtgggtttggcttcgtcaccttctcctccgagcagtcgatgcgcgacgccatcgagggcatgaacggcaaggagctcgacggccgcaacatcaccgtcaatgaggcccagtcccgccgctccggcggcggaggcggaggctacggcggcggccgtggcggctacggcggcggtcgtggaggcggcggctactgaggaggtggcggcggcggctcctggcgccgcgagggcggctacggtggctgcggc

SEQ ID NO: 34303 - DNA, 434 bp, Oryza sativa
  Clone ID: uC-osrocyp005c03a1
tttttgggtttttttttttttttttttttttttttttttttttttttttcaaaaactaggcctcggttttgctaatattcaaaactcacaaccgggggaagaaaccaaactcaagggtaggggaaaaccaggaccacaacggggatagaccactagttccggggggaagaattccaaagaaacccaaagggaaaaggcccaacccaaagggaacagaggatctacatatcctaagctccaaaatccagtctacgacgggattcagcctcaggaggtccagccaaatcatttttttaggctcactgcatttggatcttttccaagattttttaacaaagcatccatcacaggtttaacccgcagggggattgggaagcaacaaaattcccaccagcaatcggatggaccacttgacccgggcaactaggcctcct

SEQ ID NO: 34304 - DNA, 425 bp, Oryza sativa
  Clone ID: uC-osrocyp005c04a1
gtttgggataaaagctctttaaatttacagaaggcaacagagatgaatttattgacgcttgtacactcagaacgacgaaacacgggctgatagcaaagctacaacaaacgaaaatgccaagaaaacgtgcatcaggaggcaggaggtccaaacatacattatccatctcctcaaaacgatactaccagatcaccagataccaaatcaccgtacaagacatgtacacaagaacgaacagggatcggagctggatggtgtagagaagcgctgaagcggtggcgcctacagaaagttcagcaccagggcccagacagggtagatgaagagcaagaggatgccaatgctgttggacactcccgtgcccttcctgaaggcgttcctgaatccacctgacgccctgatgtgctcttgaagcaggtagcatc

SEQ ID NO: 34305 - DNA, 436 bp, Oryza sativa
  Clone ID: uC-osrocyp005c04b1
tgcggagttgacgaagcgagagagagagggagaggtggaggaggctagctagggttgcgagcgatctgcagcgtgggagatggggaaggggttcatgtcgtacctggcgatgaagacggacgcggcgggaggggaggcggcgcaggcggcgctgatcgacgccgacctgcaggagctgggcgtggcggcgcggaagctcgccaaccacgcgctcgtcctcggcggcggcctcgggttcggcaccaccttcctcaagtggctcgccttcttcgccgacgtgtacctcctgatattggataggacaaactggaagaccaacatgctgaccgctctcttggtcccttacattttctttacactgcctggtgggctgttctctctgctgaggggagaaattggaaaatggattgcgatcattgctgtcatccttcgtctc

SEQ ID NO: 34306 - DNA, 438 bp, Oryza sativa
  Clone ID: uC-osrocyp005c05a1
tttttggtttttagcaatgtaaatactcgcattccaaaacagccgatggacaataatcggactcagagcatcagttttaaccgaacagaaataaacgagagtattaaacgactgacatagtgcacattgcgagcagatattaacggtccatgaaacgagagccatgcccgtgggcaaaacttaacaaatactagaactagatatctcaactgcagacatgcaaaccaccatttgaacgaggctcacttcttcttggcggcagccttggtcaccttggcaccggttgggtccttcttctccacgttcttgatgacgccaacagccaccgtttgcctcatgtcacgcaccgcaaaacgaccaagaggagggtactcagagaaggtctccacaaccatgggcttggtaggaatcatcttgaccataccagcatcaccggtc

SEQ ID NO: 34307 - DNA, 386 bp, Oryza sativa
  Clone ID: uC-osrocyp005c06a1
ggaagaaaaagaattgcattagaaaaagaggatgatttgggtagtagtatttcttgagtaagagtcgagcagcatggtccagttccagaacgtcgaaaaccaaaccaaaccaaacacgacaaccttgcttacagactcgatttatccagatggataatccaagccacgcattgggttaaagaccttctgttatttttgcttaaagaccctagaacaggatgggcatcaatagatgcccattccaggatggaccaccccccgaggacgggaggaagaaagcactgggtatatatcctaaggggaaaagcagcccaggagaagagagtccccacatggttcttcattcatgagagggatccaatagatgcagatgcagcgtcagaaat

SEQ ID NO: 34308 - DNA, 480 bp, Oryza sativa
  Clone ID: uC-osrocyp005c06b1
gatcactggggagttttagttatggtcgtagtggtcgtcttcacaatatatgatttgacattgctgcttcttacctctggtagagatcctggtatagtaccacgtaatactcacccacctgagcctgaatcgattgatggaggcagtgatatgggaaatggacagactccacaacaactacgtttaccacgcacgaaggatgttttcgttaatggagtaattgtgaaggtcaaatactgtgatacctgcatgctgtaccggccacctcgatgctctcactgttctatatgtaataactgtgtggagcgttttgatcatcactgcccttgggttgggcaatgcattggaaggcgaaattaccgattctttacatgtttgtattctcaaccacattgctaggcctctatgtctttggctactgctgggtgtacattgttaaaataagagatgctgaacattcaacgatatggaaagcaatgt

SEQ ID NO: 34309 - DNA, 383 bp, Oryza sativa
  Clone ID: uC-osrocyp005c07a1
tttttggtttttttattttttttttttttttttttttttttttttgggaacaaccaataatttagcaaatcctggaataactttttgcatgggattttaacattcagtagactattaggatcagcatgggatcataaaaggggcggcccagtaacaagggggcaaaagatacataactttaggctggaaacttgggatttaagggaatttttaaacaatacattcgcacagccttcaggggccccatttattcctcctcctggggcttctccaggcatttaacaaaagggtccagggctttgacaaaagaatgcctgccctttgggtttgaacccttgggggaccaaagggggaggggtttttcagctaggacattttggccc

SEQ ID NO: 34310 - DNA, 425 bp, Oryza sativa
  Clone ID: uC-osrocyp005c08a1
tttttggacaaataaacctttactacgtacacaaaaataagttatcttcaagagagaaaacaaaactagaggtacaatcattaagacccgcaattcggctagtagaaaattcgaaacaaaaagctttcaaactgcacgggcaaacatccttgttgcccggtgaaacccaacacaacaatccattgcatacattaggaatgccctgatgcgatgccattgtctgaaaaaactgaccgactcagacgacctacactgcacactacctggacagatttcttccagtacaccaattgacttcaccttccgcattgccccatggccaacagccctcaggtgctactgaaaccatgggacgcatgcaaacaatctgcagatcacgtctcaatcagctgataatggtacaaatctgcccacaaacttagaag

SEQ ID NO: 34311 - DNA, 405 bp, Oryza sativa
  Clone ID: uC-osrocyp005c08b1
ttcgctcgctgtctcgcgtcagcggcggagctctctagaaggagcagaggagtcccccccaagcgatcgattcgatcccctccgccgccgatcgcctcgccgaagtctccgagaaacacttgagggatggctgaagaggatatccagcctattgtctgtgacaatggcactggaatggtcaaggccggttttgctggtgatgatgcacccagggctgtctttcctagcattgtaggcaggccacgccacactggtgtcatggctggtatgggccagaaggatgcctatgtgggtgatgaagctcagtcgaaaagaggtatactgacattgaaatacccaatcgagcatggtattgtcaacaactgggatgacatggagaagatatggcaccacaccttctaccat

SEQ ID NO: 34312 - DNA, 432 bp, Oryza sativa
  unsure (1)..(432): unsure at all n locations
  Clone ID: uC-osrocyp005c09a1
ttttgtttttttttttgggcaaaacagatgttccgtccacaaaagagcatagttcatgtgaaacaaatgtctgtttgacatgtccaattattagccaagatttcatcaacacaacaaatgcacagcgagtgctttaagagtgagttcctcgtagcaattttttttgggtattctggttcaaaaggccttatgcatggcccaaaagacatgatggcatctttggtagngctgcggcaagccccttggatttcatcaatcttcacgacgcagctcgccggtggcaggaggcatccatttcccggaattatagacactttggccgaccttccatccagggacatctttcataattatttcctcccacataagagactttgtccactctttgacaaatctttcatcttcttcagcttggagcactggcactaaagc

SEQ ID NO: 34313 - DNA, 415 bp, Oryza sativa
  Clone ID: uC-osrocyp005c10a1
ttttgggggaactattttttttctccttgttttctatttcatttcattccgatagatagcaacaagcagttcaaacaccataaccaaagcgaactcaattcatggtaacatcacggacgaagaacacctaacactggatggatggatagagggcttctcgactcgagagagccactggacacgataacgactcgactcgatgataagatgattctgacacggatagctaaggataactggccacgatgggccccaccaatcagttcctccagttcccgccggagtcgccgccgtagccgccgccacggctgccaccgtagccgccgccgccgccgccacggccgccgccgtagccgccggcgccaccgtagccgccctcacggcgcccgtagccggcggcggcaccttcttcgta

SEQ ID NO: 34314 - DNA, 239 bp, Oryza sativa
  Clone ID: uC-osrocyp005c11a1
ttttggggtttttaatttttttttttttttaaaaaaaaaacttcgtggaatatatatcctgtttttattccggttttcatattttccatgtgaggtagaccctggcaatgtacactgatttgaacatatattttgaggcggaagaaaaaccctacacccttgttgatttgcttggcaactgtctaatcctacagggaaacacacaccacatattgcaaaatcatctaaggcaagagatt

SEQ ID NO: 34315 - DNA, 332 bp, Oryza sativa
  Clone ID: uC-osrocyp005d01a1
ggaccaagagcaatataggagggtccgactttgcaatctggcatcgttgccgagcttaccgccaagcgacacagcagctccgactttagaatacaacatggatacctaacacgctgccataatgatcaaggggcctaaacatcccacaagggacataagcccaagctgcctaagcgccacatcctattcatggtcagcaacaacacccctaaaaagaaactggagggggtaattggtacccagcttcattaccacaacgaagcaggtccgactttacctagcaaaatcaaacaaggggcaaagggcgccccccgcgaaaaaaaaagggaaac

SEQ ID NO: 34316 - DNA, 362 bp, Oryza sativa
  unsure (1)..(362): unsure at all n locations
  Clone ID: uC-osrocyp005d02a1
gaacgtgtataaacttgataaacacaggctgagagcctcggtttgaggagcctgaaaagagcctaaattggtaagatctgaccttagtatgtgcgctgctttaccaatggtcgtgacttgctcatggtgctatgagcgacagataagtgcttttatagaagaagtccggttgttgcagccaacttgttgaaatcctacgactgggngaaactctgcgtggctcagtatgaagtgtattcaacatcaatccaaaaggcctcacgagcaagtgatgcttcttcctgagactctgaaccccccgaagacgacggtttggggagagcctcacctttcggacgccgacaaaggcataccggacctgg

SEQ ID NO: 34317 - DNA, 545 bp, Oryza sativa
  Clone ID: uC-osrocyp005d02b1
ttgccagttagcaggaactttctcatgaggttcttgaccacagggcgaagcatggcctggaaagcacatgttctggtggctgttctactggcagtggttgctgtgaccgccgtcaatgcgcaatccgggtcgccccaaagtaaccagactgctgcggtagcaaatgcgaccctctcccaaaaccagaccgccttctccgctctagtgtcaagcctcgaaacagccctccaagctcggctcaacctcttcgctcttaacaccacccaaaccctccaatccctaaacctgtctcagcccatcaccggtgtcgcatctgtaaacctcacggggctagctccaaactcgagcaccatcaatgacgcttctctcatttcaaatccaggtctgaggtccgacctcacagttcctgcttgctcctcctatctgttcaatgtcacctacccgggtaacaggaccctctgcctgggtctatctttcaccccctctcagaacgccaccgctctgtccagcaattctagctccgaccaaacgctccctctgaatgg

SEQ ID NO: 34318 - DNA, 414 bp, Oryza sativa
  Clone ID: uC-osrocyp005d03a1
gaaaataaagacttcgcgaccttatatttgccttccaggaagcccaaaattctacccaatagtgaatataccacaaagctatttatagtctaatggttacaggccttgcaacctaagctaactgattgccttattttccatctgtcccactaactgagcatgcaatcttacagaaaatgcaatggcaaaagaaaaaaaaggagcgaaaatagatatcatctgtctcatgccttctgttctgtggtcaaatcaccccatctgacgttgtactttgctgcaaggtagtgagcccctacaggaccgcggcttccataagggtatagctcaggggctatccgcttctcttccagctccttgagtaagggagtgaagagcttccatgcgggatccaactcatcagaacggataaaaagc

SEQ ID NO: 34319 - DNA, 429 bp, Oryza sativa
  Clone ID: uC-osrocyp005d04a1
ggcaaaagcccataggcccaaacattataccacaccattttcagcccaatcatattatattcatttacattagtatcaaataacaagacagctaagcccatataggcccaacaatcaaacacagtaacaaccgatacagcacacaggttacaaccctattagcatccatcggaacccgacaaacattcaatacaacacaaaatttacaacccagaatctacaacccaattaaatgtaaccatacagaatttcacccgatgccgcgtgaccaagatcttccaggtgagcttagcagcacttaagttttgtatcaggcagcaatcttgttttgatttgcaaatcgaaacatcacccccaaaaaagtaaccgtcggtaggcgtcccaaggtatactggtgctgctgatggcggaagatagaggaagagagcc

SEQ ID NO: 34320 - DNA, 438 bp, Oryza sativa
  Clone ID: uC-osrocyp005d05a1
tttttgggtttggtaggtaaatttctcctcaatttgccatcgaaggcatcagtttttcagtaccctctgtgattagcacactaaaaaaaagcatgtctggctttgatttattttgttttggtctacacgatgatgctatcatggggacaaaaaaaaagaaggcctggggaaaatccatcaggcttgtatagaactccccatctgttcaatggtgaatggcaattcagtcgcggtacgctgccatgaagccctcatggaatgccttgaagcgggagatgatcgcggggatcttctcctcctgtggcaggattgtgcatctgatgtgccatgtgccaggaacttggccaaatccagatccagggacaacaacaattccggttgcctcgaggagacgaagggcatagaaagcatcaggtgctttgttagcagctttagcag

SEQ ID NO: 34321 - DNA, 430 bp, Oryza sativa
  Clone ID: uC-osrocyp005d06a1
acaccaatacaaatatctcacatatatttcagaaaaaaaacaacaaacatatatctcacgtacaaacaaagctcctcgtcttcaagagcgaagcctgagttattcacacgatgcatatatatgtatatatagcacaaactaattaacggcaaatactccatccgtttcacaatgtaagtcattttagcattttcaacattcatattgatattaatgaatttagacatatatatctatctagttttattaacattaatatgaatgtgaaaaaaatactaaaatgacttacattgtaaaacagaggaattagcatacatagcgagaatctgtaccgtaaaccacgcagcaacacgtacgtatatgtgtgtgttcttaacacacatgtataataaacttaatcatgtactacgtccatttcatcttaattaaa

SEQ ID NO: 34322 - DNA, 344 bp, Oryza sativa
  Clone ID: uC-osrocyp005d07a1
tttttgttttttttttttttttttttttttttccccaagcaaagaaatgataactgacagagggattgtttagacatgcttcaaacataaaaaaacacgcgcaaagccacaatttattatcagggttgaagcgacatcatactatcatggagacggataacaaatagggtccatgagacgaacgatgaaacgactgagcaggagcattttttattcacgcagagtactatggctggcaagggatagcagcaatcgatggccccgtaaaagataacgcaccggaagcttaatcatcgaactcctggcggccatggggggggggcttttgataacgctggtttttt

SEQ ID NO: 34323 - DNA, 392 bp, Oryza sativa
  Clone ID: uC-osrocyp005d08a1
ttttgggaatatcttcaaaatggagctcttgccacagcagatgcagtaatttacaaacaaggcattttcctagttatctctagcagcagccatggcgctaattcacgagacaatttgaccaactcagcgagggctcagtaagcaaaggctcaagagagagagaaaaaaaattggaattagaatgtctggacagatatggtagtagtatacatagtagatacacgggctgaaaaaaaaaaatctcttcttcaatctcagttctgggacttctccaccttcgccttgatcttctgctcaatgatcgccttctcggtgtcgaggctgaacatcctgttgagggcgtgcatgttctccagcgtcttatctagggtgccgttgacgctgccgtcaca

SEQ ID NO: 34324 - DNA, 406 bp, Oryza sativa
  Clone ID: uC-osrocyp005d09a1
ttttggggcggtactagaaaagttcaagaatctcaaatcaatttatgaaatcaaactacacacataatgttcttgactccccacgtacttacggaataattatattggcatacacaaaaaccggagctaatcagaggagatacacccatagacaagccatcagacccaacaatttttttgtccatgaaacagccagctaatgctaatagacaaggggttactcatgaaagatacagcttggccacatctagaagcacttcctgtggacgatagctgggccagattcttgatactcagcccttgagatccacatctgctggaaggtgctcagagatgcaaggattgatcctccaatccagacactgtactatctctctggcggagcgacaaccttgatcttcatgct

SEQ ID NO: 34325 - DNA, 497 bp, Oryza sativa
  Clone ID: uC-osrocyp005d09b1
tggacgcgtgggctcctcttctttagatcagttaaaataaatggctgacgcagaggacattcagccccttgtctgtgacaatggaaccggaatggtcaaggctgggtttgctggagatgatgctccccgtgctgttttcccgagtattgatggccgtccgcgacatacaggcgttatggttgggatgggacaaaaagatgcttatgtcggtgatgaggcccaatccaagaggggtatcctaaccttgaaataccccattgagcatggaattgtcagcaactgggatgacatggagaaaatttggcactcacacattctacaatgagcttcgtgtagcaccagaagagcatccaattcttcttacggaggctccacttaaccctaaggccaacagggagaagatgacacaaattatgtttgagacattcagcgttccagccatgtatgtcgctattcaagccgtgctttccttctatgctagtggacgtactactggt

SEQ ID NO: 34326 - DNA, 434 bp, Oryza sativa
  Clone ID: uC-osrocyp005d10a1
ttttggtttttttttttttttttttttttttttttggacaagggcaatattccagtattactaacagcgccaaagtttggacaaacttaacgagtagcaatccagggggcaatggagtaactgcaacaacgaaataacatttgacataacttaggaaaggggctattgccctgaagcaggtcctaactccaaaattttacgagcatttgatgcgcaaacagtcaaacattcaaccatgtttcacaggcttatttcagcaagggccctggacagcaaaaaatctcaccctagcagcccacatttgaaagcagacggcttcagttgcgcctgctgctccaggttggggaagatgatgaacttgagtatcttgaaggtcgccatgtgcctggaggaccattttggcgggctgggggagcaccatctcgagcaggggg

SEQ ID NO: 34327 - DNA, 342 bp, Oryza sativa
  Clone ID: uC-osrocyp005d11a1
ttttggggcatttaaactgcagatgaaaaccatctggtcactttatacaagccgtacatcagctaaaagaagttcacgatgcctcagggctcaggcagacagaaactgaaaacgacgcagcaagttaaaaacaaattacaaaacctacatgagacaaaattaaatcgtagagatagtgtcccactaccaccaaagcaacattatttgcagaggttcctttttttcagcccacatgatcccgtggtctagttattattcgaaaatctccgtccgtcctcaaattcgatcgaattttaaatctctctcttctagaatagcttgaatagaattcctccttgcgtg

SEQ ID NO: 34328 - DNA, 494 bp, Oryza sativa
  Clone ID: uC-osrocyp005d11b1
ttaagggtgggtggaggtatctacaccaaggcggctgacgtcggtgctgatcttgttggcaaagttgaaaggaacatccctgaagatgatcctcggaaccctgctgtgattgctgacaatgttggagacaacgttggtgatattgctggaatgggatcagatctgttcgggtcgtacgctgaatcttcctgtgctgccctagttgttgcttccatttcttcctttgggatcaaccatgatttcactgggatgtgctacccgctgctggtcagctccatgggcatcattgtctgcttgatcaccactctctttgccactgacttcttcgagatcaaggccgtgaaagaaatcgaaccgtcactaaagaagcagctcatcatttctacggctctgatgactgatggtattgcactggacagtatggtggcgctcccatacaaattcaccatcttcaatattggtgaacagaaggaagatactaactgggggatgtc

SEQ ID NO: 34329 - DNA, 336 bp, Oryza sativa
  Clone ID: uC-osrocyp005e01a1
aagaagaatacttggtcacatggattactggattaccatctccactagtgaattctatctgaaaaatacaacaaccttggcaggaaggcagcataaactacatattcatcgtattcatagatgacccaataacacaaaagccactgcagtaagcaacgttttcgtcagcctgaatctattccaaaccctgacaggatttcttcttgcatgcaaatgtaacaggtaggctgctctgaataggacaaccacgcgtatcatcgtcgatattaagctagtgtatggttttgatctgacgttctagtctatctagggacacttggagttgaccatcgccca

SEQ ID NO: 34330 - DNA, 425 bp, Oryza sativa
  unsure (1)..(425): unsure at all n locations
  Clone ID: uC-osrocyp005e02a1
ggcaaaaaaatgattttctttttcaggtttgattaattgataatctgggggatacaagattatgcaggcaattaattacaaccccatgaaaaacaatctctcaagatctaaaagaaccaaatcaatcgaaaatccaaccaagaaactaatgttgctttgagactactaggacctctgaactttcctgtccctcctgacgataaagcgaaaaactgttcactgctccatttccgacaaaaaatggagaagctcctcctatacacctaaaaactgaatcttggttttcttttttatttttgntggtttgtttggtatcgctgttgatcggaccaagaacggcgatgatgcttgatcagaagaaggatgcgccgccgccgttgtggaagaagttgtgggcgatggcgtcgcgggcctgcgcggtggcg

SEQ ID NO: 34331 - DNA, 403 bp, Oryza sativa
  Clone ID: uC-osrocyp005e03a1
ggaccacaaggtgcctatttcctggattatggtggaaatatattatgttatgatatccgtaacatcgttgcatgaatgggacatttcaacagacatcacacaaatggagggaagcatgaaaataaggattcatgcattattcagtacaatatagaacagatcaaagaaatctggaggagaacgggttgtacatacgcgaatggaatagtcaggcagtagaacaaggttttttatgtttcctaacagtagcacaatcagttagctcctcttcagcataaatgtcagtgtgatgttcagtgttgttttgctctgcattccaaattatacaggtttttatgcgaaccctgcatttttttgcagaaccctgtcccggaggaatggcttatgcagttctggagttgga

SEQ ID NO: 34332 - DNA, 317 bp, Oryza sativa
  Clone ID: uC-osrocyp005e04a1
gggttagcggagcacattttcatcttttcatctgatattccgtcaactgggtatgctaacttcatatactcccaaatacagcccaacaacaacttcctgatatctggtgaaatacgaatgccccttgagtagtggtattcgtattccatccactcttcctccgatgcaagctttttcactagcgagctgatcaacatccagctgctcctgtcacgagggcactcctgaaacaagttgtactgccctatggggacctgaccacatcctatagctgcaggttggcccctttccaaaaagctggcatggatccagagaaa

SEQ ID NO: 34333 - DNA, 386 bp, Oryza sativa
  Clone ID: uC-osrocyp005e05a1
ggcaaataaacctttactacgtacacaaaaataagttatcttcaagagagaaaacaaaactagaggtacaatcattaagacccgcaattcggctagtagaaaattcgaaacaaaaagctttcaaactgcacgggcaaacatccttgttgcccggtgaaacccaacacaacaatccattgcatacattaggaatgccctgatgcgatgccattgtctgaaaaaactgaccgactcagacgacctacactgcacactacctggacagatttcttccagtacaccaattgacttcaccttccgcattgccccatggccaacagccctcaggtgctactgaaaccatgggacgcatgcaaacaatctgcagatcacgtttcaatcagctg

SEQ ID NO: 34334 - DNA, 394 bp, Oryza sativa
  Clone ID: uC-osrocyp005e06a1
ggacagattattgtgctcctatatttgaccttgcaatgcatcaatggacagaacaaagtcaacaacagcaacaacaacgataacaaccggtatatcatgtatacattgcatttgacatacaacaaaagtgctggctgtcacaggaaaccgaaccatcatgaaacaaattacagaaagtagctgacaactttgaaaattaaagtacaccgccgcggcggcgtggggcggcgcctcccttggatcggtcctcgccgccgtcgtccaaaaaccaaaccgggccggccgtgatccggcagcagggagcacacctgaattaaagagagaggatattttcgtttttgaggcctgtacagtacacacaccaatttggctcatcgaacactgatcctactac

SEQ ID NO: 34335 - DNA, 418 bp, Oryza sativa
  unsure (1)..(418): unsure at all n locations
  Clone ID: uC-osrocyp005e07a1
aatctaacatacgcaaactgatattatcacaatgttagccgatgacaatggaaagagtaatctaggtacaagcggatcattgacggtggagacaagacattggctgcaccacaacacccaccagtggcgccaacaaggagcgctatccgttataggacgagagaaaaagtaaaacatcacgatgtgaagtgaaactgaataattctagtagacgatgatgatgatggataggctccttaggacgcccgccgcccttagcgtcttgctgctcccatcttgtccactggaaggctcactcgtcatcgtcttcatcctcttcgctgccctcgtcgtcatcctcatcattgacctcggacttggacttgtcagattcctcctcgtcgncctcctcttcctccttggcgggtgccttcttggc

SEQ ID NO: 34336 - DNA, 422 bp, Oryza sativa
  Clone ID: uC-osrocyp005e08a1
aggatcaaaacatttctattaccacaactttttaaggatggaattgagtagcaatactttcaccccaaaatacagtttagcgacaatatcttagaaaagccgcttgctttgccgccatggctggcaagctgagcagagcagctaacacaaagaacacgagatcactataaaccaaacggcaacgaacgaagaaaatacagggtcttttttgtctgaagatacacgaagcggttcgttttcttttatttttagtctcctctcctcctcgatgatgggtgtatggcaatggcaatggcgatgggatcttggcttagttgatgggaaggggctcgccgttccactccttgaggcagtcgagcatggggtcgatgagcttgccctggctgatgccgaggaacaccttgttgcactcctcgccgggg

SEQ ID NO: 34337 - DNA, 347 bp, Oryza sativa
  Clone ID: uC-osrocyp005e09a1
ttttgggtttttttttatgtccaaagaataaaattatccagcaaccaacaatccatgcaaaaaaaaaaagaattagaaaagtttcttagcatcaacacaggagcagcaatccagctgaggcagatgcagcaagagccaagaagtagccggcaatgctcggcgccgcggcgcgacgacggcgtgcgacgacgaggctcttcttctcgtccgccttcgccttggcgctcgacgacttcccgggggagcgggctggcggcgtcggaggccggcttggcgtccggcgccggcgccggcgacggcgccatgggcgggtcggtcctgaagatctgcatcgggaggagcaccct

SEQ ID NO: 34338 - DNA, 406 bp, Oryza sativa
  Clone ID: uC-osrocyp005e10a1
tttttggtttaccagtcgtaatctcagaaatttcctgcttcgttgtgcaattttggtcacactgatacaacaccgattaaacacgcaacaaaatgatgttgacacgtcttcgtcactaaaaacaaaccagtcattttactcgactgtcctgtcactactggtcaaaaggcactaatcctcaaacttgatcttcttagctgaaggctgaacgctgccgataaggggtggacactcgtaatcaatcccagcagctttgattcttttgcgacgtttctcatcccgttttacgattttgtcaaccaactttttgtgctcttctattggtttatccttgttcagcctcctccgttcaattgctacccgatcaattggtataaacccccgtcgcacaccttttcacattttg

SEQ ID NO: 34339 - DNA, 528 bp, Oryza sativa
  Clone ID: uC-osrocyp005e10b1
gtcgtcgcgcctcgactgcttttgctcccctctcccccaccgcctcctccggccgccgccgccgccgctgccgccgcccgacgacgtagtcaggggggctcgtcaggagtaaggagggagatggggctgagggagaagaagcggaaccagaggcgcgtgctcgcccggcgctcggccgctccccgctccggggagggcaaggacttcctgccgctggaagaaaggcctgggaagaagagggcccgggaggagcagcccgaggagccggagaacacgtccaccgtcctctacatcgggcacatcccccatgggttctatgaggaacagatgcaaggtttctttcagcaatttggaactgttaaaaggttgaggattgcccgaaaccgcaagacaggaaagtccaagcattatgggttcattgagtttgagaaccctgaggtagcaaagattgtggcagatgagataaacaactacctgctgtttgagcacactctgcaaattgcgattggtccacctgagaaaattcat

SEQ ID NO: 34340 - DNA, 347 bp, Oryza sativa
  Clone ID: uC-osrocyp005e11a1
tttttgggctttttattgtgttcctatttttttttttgtattgcattaatttttttgttatttttaacattgtttgttctgggaaaaacaacatgttgtccgcgagtaaattggacccccaaaaccccagggggttggaaaccgggcccgaccctaacagcccccaccccgtttggggaagagttccggggttaaaaaccccagggcccgggcccaaaggggggggggcacccaacccccaaattttttcacaaacttttggaagggaaaaattttggggggttttcgaaaacccctgggggaaaggggattggggggggccaaaccccaggaacaacccccttggg

SEQ ID NO: 34341 - DNA, 436 bp, Oryza sativa
  Clone ID: uC-osrocyp005e12a1
tggtgaggtgagccctgggtgcagaggagggcgacgtggatggcccggagcacctccgccctgttgaattctctgagatttgggtctacaatgcccagagggttgttgttctcgtacagctcccaggcccattcgaaaatgtaaatcttatcttcttcaagtgtatcatcgtagttcggccgtccagctaaagtctccaataagaccacgccaaatgcaaagacatcaactttctcagtcatatgacctctcatggcatactcaggtgcaagataaccgaatgtaccagcaactttcgtgctgacatgcgtcttcttgtcatcataaagtttggctagcccaaaatctgagatcttaggattgagattggcgtcaagtaagacattgctggccttgatgtccctgtgcacgacaccgatgctggactcttcatgaa

SEQ ID NO: 34342 - DNA, 401 bp, Oryza sativa
  Clone ID: uC-osrocyp005f01a1
tttttgggttttttgaatgaagcggactttatcttattcatcattcatagtatgaaccatgacatgccacccgcgaccgagaatatacattgccgagaggcgagagcccaaagatggacataaaaatttaaaaagaagaggtgaaaattaagtaaaaacaccgcagaaaaatagattggcgcgcttccacgctagctgcaaatatcgctctaataatctgcatgcttcggacggagaagcacatcggatatagagaggaggaagaagaggaggaagagatgagcggcggcggcaaacggcgaggaggccggcggtgagggcaggcgcacggtgacgagaccacggcgtacggagcgccatcattaggcggcagcgtcgtcccaggtggcggcccagttggt

SEQ ID NO: 34343 - DNA, 274 bp, Oryza sativa
  Clone ID: uC-osrocyp005f02a1
gacttgaattctaattttgcacatgggcaagcccgagttaaaaagaaccaatgaacactttatccacgacccatagcaaatcctgaaagataccgacacgatccgaagcaacctaatcgattacacatttacagggtggatactgaagactaagaacacgctctctcatctcatccacagaagacaagagagggggggttcgggctggcttattgctcaggtacaaatctttttttacagaagcttcccttatttagggaatgaggaattgagg

SEQ ID NO: 34344 - DNA, 475 bp, Oryza sativa
  Clone ID: uC-osrocyp005f02b1
ttaatcctattagttgaaatagcttataaatgtctgccctgttaacctattcaatgatttatgattctatgttccatggaaaaagatccgtatcaggatttgctgattaggtgttgatatgtgacttggatatcaatgtttatttgtggaactgactgtgttctattcaagtagagcactggcatattatcaagctgacatgcaaattgcgttggcgtattaccaggccgacatgcaaagtgcatagacgagccatcgtagagttcacatgtagtttgcatgtagtactgtaacggctaacagagtcatcataaagttcatagacgattttggtcggaaagacaagaaaatgttaacggctacataaatgaaatggtcaaactagaatgctagatggtccaaaatttgcctaggatgcatgcttgcttatcaatacacgaaagattgcttgccgtatttatgaaattccatattt

SEQ ID NO: 34345 - DNA, 266 bp, Oryza sativa
  unsure (1)..(266): unsure at all n locations
  Clone ID: uC-osrocyp005f03a1
tttttgggttttttaagaatccttccctcttttattaacacgtttattaatcaacaacaaacaatgtacgtacaaaatgtacaatcacaccttccgtttcgcacaaaatttattcttttttaaaacaaaactttctaaaattttatgtactatatatcgtcctaaaacatagcaaaccagacaccagatagngacattatccagatttcgtagtattaaggatgttttccattctaaatcctacatatgcctataattttcgggac

SEQ ID NO: 34346 - DNA, 492 bp, Oryza sativa
  Clone ID: uC-osrocyp005f03b1
gttgacgtttagcttagctagctaaaaagtaagtagccgtgcgaagtcgtcggcggtgatcagccggcgatgacgacgtacagggtgtgctgcttcctgcggcggttcagggcggcgtcgaacgagccgtcggaggagctcggcgacgagttccaggcgtacgccgacggcggcggcggcgtgatgggggaggaggcgctgaggcggttcctccgggcggtgcatggggaggccgccggcggcggcgacgacgagctggaggcgacggcgagggaggtgattgccttcgcggcggagcagaggctgctcaggaagggcggcgccgctgccgccggcggcgggctcaccgtcgagggcttccaccgctggctgtgcagcgacgccaacgctgcactggatcctcagaaacgggtatatcaagacatgggattgcctttgcacactacttctctacacggggcacaacttatacctgacggggaaccagctgag

SEQ ID NO: 34347 - DNA, 403 bp, Oryza sativa
  Clone ID: uC-osrocyp005f04a1
accaaacccaactatttacattgatcaaaccagcaggactacgcactgcagaatatttgttacatttgatacatacaaacccatataggctcaaatccatacactataatccccaaacgccgaacactaagcacccaaattggtcataatcacatacaatccataggccaagaaatcaagaagggttcatcccttcttgcctctatctactactattacctataagctataatccttatattaacatggaagatttattggtgcacaaagctaagcgatcaagagcagcaattggggcagcgtaccaatccgttctcgttgcagtcgccgcagcggcgggcgcatccttcctcctggacgaacaccttgcgggatccgtcgcaggcggggcatggcacgaacc

SEQ ID NO: 34348 - DNA, 488 bp, Oryza sativa
  unsure (1)..(488): unsure at all n locations
  Clone ID: uC-osrocyp005f04b1
tcctctcgccggagttttcgcggccctagccatcgaccggcggcggcggcggcggcggtagccgtgggatggacgaattcggcggcggatccgtcgggccgttctccaagaagccgaggcacctgtcccggtcgctgacgtaccaccaccaccaccacccctaccagggccaggggcgctcgccgtcgttcaacgcgcggcgccagcatcatccgcagcagcaggaccacgcggtggtgctgtacacgacgtcgctccgcggggtgcgccgcacgttcgcggactgcgccgcggtgcgcgccgtgctgcgcgggctccgggtggcggtggacgagcgggacgtgtccatggacgcctcgctgcggcgggagctccagtcgctgctcgcggcgcggggccgccccttctccctcccgcagctcctcgtcggggcccgcctcgtggngggagccgacgaggtgcggcagctgcacgaggcccgcgagctg

SEQ ID NO: 34349 - DNA, 355 bp, Oryza sativa
  Clone ID: uC-osrocyp005f05a1
tttttgggggatcaagcttgatttttcatggcaggaagcaaatcacaggatcctaaaacgactgaaacaccctaatacaaagctggcagaaacttacacggatcaaatactgacagaaagggaaaagaagagaaaaaaaggcgaaaagcgcgacaagcatcgactcctaaggttgaaggtggcatcctagttgtcgacgacgagcttccgccgcttgaagttgaccatcaccttgtccttgatgccgacgaccatggctttccagttggtctccgggaagggggagaccagctcgaactcaaagttcctcagcaggtgagtccatatggccttgatctgtaagtaggcgaagggc

SEQ ID NO: 34350 - DNA, 431 bp, Oryza sativa
  Clone ID: uC-osrocyp005f06a1
gggctacagaatcaaacagattcataccaataggttgaaacaaactccatacacaagtcagtgcaattatcaggctttcagtatcatggttagatgactcacatgaggcaacacaaccagtcaaacacaggtagcacacacatcaaacattgctaaaacaccacagcataggttcttcattacaagtaacctgtaatacgttccccatccttttattaccatgctccccccctttgaatctaacaaggcagtagcccagaggcacaatggcaaactcttttgctctacctggggatcaatcagttgggaggaactctgacagcaaacagagcatgcaccattttctctttttttttattagctttttaatttgggaggggcatgcactgccaaacttatgcacaggacacctgtgcttcctgctcatgcac

SEQ ID NO: 34351 - DNA, 379 bp, Oryza sativa
  Clone ID: uC-osrocyp005f07a1
ttttgtgtttttttagactaatatcctagcaactttgtgaattaaaaactgaaaagtggaagggcaataacagccgaacggtccgaaaagcaagaaaaatgttcatttcagcatatcaggcgatggaacagaactaattcccagtccttatctacaaacacctacaggtcaagcagaaccggattcctgcacgaattagagccaacaaaccgaccaatgaacggtcccgatgcaatgcaacgaaatgggcacgcgcttgcgtacgtgttcgtacggattttgattattccttgcgccggcgccggcggcggcggcggcggcggcgaggctccaccgatcattgatggcggatggctcacatgatcgcgcaggcgttggg

SEQ ID NO: 34352 - DNA, 330 bp, Oryza sativa
  Clone ID: uC-osrocyp005f08a1
gcagctgaaaattcatgagctaatacatatagaattgagttcttgttccagcatagaaacagcaggtgaactgaacatccatccaccaagagaggagaagggaggaggtattacatgattttacagaaggcttctcacagaacaaaaactttcttatacacaaaaaaacaagtaaagaagcccaagcatgaaacacctcctgacaagagaacaaaaggaagaacagatcgatctggagtgtacagggtatgaaacaatctgggtgaagaaacctaaaaatcggctctaataaaatcccaaggaccgaagagatttgcacactcctggctg

SEQ ID NO: 34353 - DNA, 386 bp, Oryza sativa
  Clone ID: uC-osrocyp005f09a1
gcacaagaagccaaacgtgagagcttgtacaaaacttcagctctcttcaatgttgactacgctaattaaaattgtaactccataaaaactcggctacgccgagaaaactgtaattacaacagatacggcgtagccaattcacgcaatgcgcacccatacggttacagtatggttcatttaacgtctgatagacgatttcttaaggtgctgccgcaagtggcgacaaatactgaaaacagcgaggtaatccaataaagaaataacattggaaatcctctccagcggcaacccaagtctctaaatgatcataatcactcgagttaccctgcaacgcaaatttgtacccgggttgcgaacgggcagttccatttgtagaattggagttg

SEQ ID NO: 34354 - DNA, 415 bp, Oryza sativa
  Clone ID: uC-osrocyp005f10a1
tttttggtacaaggttcaagcaaagcatctactacttgagaattcagataatacatcaagcaaaatcacacaccagccatcagtgcttccatctttagcatcacagcctgaaagctcattccaccatcctccacatgcccatccatttgacatagttgcagagggcttaaaaggacgcgaaaacacgacgcagcgatgaactgcgggcttggctgcagactgcagcaagctccatcgcagcccagagcaaacatatgtacatatatgacacagcagacgacaaccttactacacaaaccatacacgactcaacatagtagacggcgagcagcagcaggcgtacttaattactagtagcatctacgttatatcacagtagtagaggtaagataggtagacaacactcgacttccat

SEQ ID NO: 34355 - DNA, 411 bp, Oryza sativa
  Clone ID: uC-osrocyp005f11a1
ccagaaaggggcaaaatatcattggcgcaaacagatgatcagtcgaagataacttggttagttaaagggacaccatgttccaacaaatagtgcaaaagttagggtaaaatacgatgtttctaggcgagaccactactgcacatttactaatagcttccaaaacatctttccaacaaatagctttccctggtggccagcctccaactatcactcgtcacatgaaatcagtgtgacggtctggcaaaagaagaatctatatgaatgatttaatggcaaaaaagggcccccatataccattcaagatgggattaagcctgaactgtgcttcgctccgacactggctcaagcatagaaaggaggttggaaaccacattgcaaggaggaacatgcacaaggcggtcactgaaacta

SEQ ID NO: 34356 - DNA, 414 bp, Oryza sativa
  Clone ID: uC-osrocyp005f12a1
tttgggttagtctaagagttgtcatattttaaagattaattttttgagcaagggtgcatattcccatacaagctagtataagcatacttaggtagattgctggcatttgggacagggaggagcagagccagagtacaatacttaagtacttcttcatccagctgttatacatgatgagtataatgccatcactcatccatgatgtgtctttactttgaggatagtacattgagtcaccaccggagaaatatggtatcctcgtgccaaagtagttcctcggcaactcgatggttttttgggtacgaagtttgaacattctcatacgtcttgaggggttcctgactcttcccccatcctctgcgctgagcctctccaagtttatgtcgtacgaagcattcctatgaagaaggcgaa

SEQ ID NO: 34357 - DNA, 423 bp, Oryza sativa
  Clone ID: uC-osrocyp005g01a1
tttttggacaccaacaagcagatgttattaacataggaaagctccattagatcctgttgacatgcacgggaacatctatattccagaagagattacttgggctgtgcaactcacacaagattgaatcgaataacacagaatcttaaagcctaggaacttctgggggcacacagaccctatgagctggtactaatgaatacattgagattgcctgtttcttcatcctcccttgcttcctacctcgatccatgttgtaatcatctacattgctttaattgcagacggttgccatgggctcagtgatgcaacagtggaagcgtgctttacggacattgctgagaatcttcatttttgcactatcaagcatacggacgatatcagtcaatgcggggcgaacttcagggttcgcatcccaacaaagag

SEQ ID NO: 34358 - DNA, 156 bp, Oryza sativa
  Clone ID: uC-osrocyp005g01b1
tctacgttttaagccaagccaaccgaactcacagcccgatctatttcaaacaccactcgggttagcttccctatctgttgccatggcggctgctggtcagcagattctgctgctgaggaagagggcgccacgggttggggctgcaagcttgtgcca

SEQ ID NO: 34359 - DNA, 359 bp, Oryza sativa
  Clone ID: uC-osrocyp005g02a1
gggcacattaacaagagagtaaaattcaggacgaaatgtcgacaagatattggaatcttggccacgcacgcaccaattcttgggtgacgcggccggaatcgaacggcacacccgacccaacccaacccaacccaacccagcgaactaaacggagtcaatcatcttgatgacctaaaaaaaagggaaacaaatttctgccaaattttattggtttttctttcccgtttgcttcctctcttcttctgcttgtctctcttttcatcacttagaggcgtgtgcacgtctcgtacaccggcgcgccggtcacctgcgcgactgcgccgggtagggcgcgacgcgcgtcctccgtgtgccgtccg

SEQ ID NO: 34360 - DNA, 275 bp, Oryza sativa
  Clone ID: uC-osrocyp005g03a1
gggaagcacaggtagattatattaagaagcctggcacgcatgaggagatggagcaggagtacatgatgagatcaccatgatgatagatgatccatccaagctaggttgggatccatgcaacattgatggacacacgcacacactgacaaggcacgacgacggctataactagcgcgtcagagcaaaaggcaaggcgcttgcctacattatgaagctgggtatctaagtgcaaggcaaaattaagggccttcgatcaaaggctctgaatcgacagt

SEQ ID NO: 34361 - DNA, 213 bp, Oryza sativa
  Clone ID: uC-osrocyp005g04a1
gaagaataacatgttggttgcattgccatcgactatgtcatcctgttctgttccttttggtatctgtctgatcacaacaaatcatatacaattgccaagctagaacttcaccaatcgtgattaattacttactacaatcctgaatctacatgatttataaacgttgcctgcactgcaaaatgctatcctgccttccctcctttatcaaacgtg

SEQ ID NO: 34362 - DNA, 483 bp, Oryza sativa
  unsure (1)..(483): unsure at all n locations
  Clone ID: uC-osrocyp005g04b1
ctctctttaggcttagttattccattccatgtacagcaaacaccattagcccggtcccaactcccaagtgttttcggttagcaacctaccatgcttgtcctcttgctcctcctcgccgccgccgtctcctcgccggcgccggcggccggagacggcgggggcgccttgccggtgctcaacccgatctcctccttctgtaacacgacggcggccaggcggacgtacctgccgaacagcacgttcgaggccaacctcaacggcctcttcgccgtgctgtccaggaacgcctcggcgtcgggctacgcggcgggggcgttcggcgcggcgccggacacggcgtacggcctcttgctctgccgcggcgacttcaccgggaacgactgctccgccgcgcggctggcgtcgtcgttccagcaggcggcgagcagctgcttgtacaagcaggacgtcgccgtctactacgaccagtaccagctncggtac

SEQ ID NO: 34363 - DNA, 426 bp, Oryza sativa
  Clone ID: uC-osrocyp005g05a1
gtattcaatccacattgtattaattattaaaatacaagtgcgtttaaggatacaataatacacagctccaccattgtacatggtataaaataaatgaaaaaaaaaaaaacctcaaaggtgaaagagcagaaaatggacacaaaagtcacttctgatcatctaatgctactggccatacaaaatttatgcttaaaatttgtcatttaaattaacctaattattactctgagaatgataatacgcatgtcacaatctgattcaagtgcctgtaaagaaagatctcagcaaatttggtagcagaattcagtaagttgataatggtcacctaattatgtttgggcttgaactgtccaagtggaaataagacagagaaattaacttactaatttgtcaaaatggccaactgaaaacgatacacttgaattg

SEQ ID NO: 34364 - DNA, 394 bp, Oryza sativa
  Clone ID: uC-osrocyp005g06a1
acatcatggggccctcctaaggggtttttaaaaaatcgcagattctagttggccaaagaatatgtccaggaaaaggggcaggggggtttccattttggcagccccaacaaatttaacattgcccaaccaaccccatacaacaaaggtgcggccctacttttttttccccggggaactattcctaatatatctaaggaacccctgcgtttcccatgaaacatatttaatttgaaaacagtcttacccaaggcagctggtaaaattaatggcatctcccttagcaggggaagcatttgtttaatttggcatagccctggctggggggtcttaagttgtcttggatgaagcccccccaagggcaaggttccccaagttcacagccattgcatttttt

SEQ ID NO: 34365 - DNA, 458 bp, Oryza sativa
  Clone ID: uC-osrocyp005g07a1
tttgggcgccctcttttttttttttgggacacaacctgtttggttttaattaagtcacatagttaacgactgatgcatgcatgacacgtctcaaaagatcatcttggtagtgacaatgtatgaacttggggttgaactttcttcttcctttgttggctaaaaaaaaaacttttgcagtaactggtttcatcatgtgtgcctatgagtagaacttgaacttgcagccacatgagattactatgatgaacatgtaatctaccagtagaacttgtatgtcttggcatctatgatgatctgccggagtcctccgattggtgacaggatcatgagcatcactccaagaatgatgcagatccagttggtgaaccatgagagactgaaccttcttggcttgtagattgcttgccacatgatgcagggaaggaagtaagtagttggcgcgaaagctaattcaccga

SEQ ID NO: 34366 - DNA, 367 bp, Oryza sativa
  Clone ID: uC-osrocyp005g08a1
tctggcgtggtccaccgctgcacgtcgcgcgccaccggcgaggccttcgccgtcaagtccgtcgaccgctcgcagctggccgacgacctcgaccgggagctcgcggagctcgagcccaagctggcccagctggccgccgcgggcaacccgggcgtcgtccaggtgcacgccgtgtacgaggacgacgcgtggacgcacatggtcatggacctctgctccggccccgacctgctcgactggatccgcctccgccgcggcgcgcccgtcccggagcccgtcgccgccgccgtcgtcgcgcagctcgcggaggcgctcgcgcactgccaccgccgtggggtcgcccaccgcgacgtcaagcccgacaaca

SEQ ID NO: 34367 - DNA, 234 bp, Oryza sativa
  Clone ID: uC-osrocyp005g08b1
gttgttgtactttttgatcagggagtcctatgttgaggagcaccggtccttggtggagactcaaggagcagataagtcagcagatgtaaaagctggctcgcgcagtatccgaaaaggcggtaagcacactggtagctgatatgccgtttataaaaacaaaaaagagaaacgaccgcgtacaaaaagctactacgaacatggaggaaacaggtaaaaggctaagcaacacaaaag

SEQ ID NO: 34368 - DNA, 409 bp, Oryza sativa
  Clone ID: uC-osrocyp005g09a1
tttttggcatcacaaatggtacgatgttaaatgatatcgactgctcattcccaacttgcgtgtggtcatcgcaaaccgtttccttttcagtcaaacaaacacatttacgcgccaacatcactcatgcaattatgcatacatctttcatcagggggggaccctaactaaactagaccctacctagatatgaattatacctctataatagaattgtagtagaaaccctatcaggatatatgacgctacatagaattgtaaatttgaactagcctgagctggctgactgatctccagagaacacacttccactggacagtgccgctgatcctgactgggaagggcccaacccgcggttcctctggatctgcctaagcctgaatatgtcccgcggcattgctcggctctgcac

SEQ ID NO: 34369 - DNA, 123 bp, Oryza sativa
  Clone ID: uC-osrocyp005g10a1
tttttgtgtttttaaatttttttggttttaaatttattttttttttttttttattttttttttttttattttttttttttttttttttttttaaaaaaaaacaaaggctttttaaaattcaag

SEQ ID NO: 34370 - DNA, 431 bp, Oryza sativa
  Clone ID: uC-osrocyp005g11a1
ttttgggttttttttttttttttgggcacaaactaaaacgcaacactacacaaacacgtcaataaataatcactttaagttacttacaatttccacactttctcagacagcaattgcatcgaaatgcacacacgacgcgtgacccagagggcaaatatcttgacaaccttgatacaggatatgacatctaaaaaaagactaacacacagcatttaagagcacaataggagcaaacaagagcatgtacagggggcttaaaacgttgtttaaggtcatagccgctggagtaccaggccgaccctttatttagccagccagcctccagtacttcgggtcagcaggctgccataacactccagcattctcatccatctcaggatagggggagcaagtcgaaaatatctcctcacttccccttttatacccaagag

SEQ ID NO: 34371 - DNA, 426 bp, Oryza sativa
  Clone ID: uC-osrocyp005g12a1
ttttgggtgacaacaaaaaacgcgaactttccctcgtgcaatcaggggttacaacccaagcctgaacaaatacctgaggaaaaaggggaaattaagaacctcacaccctaataagggattcggatttaccaaaaccaaactgcccttaaaatggtcatatgatgccggggatattatccgagaatttacaaggtacaaccttcattctttcttccaaaaaatttacttccttctaaaatgaatcaaatggttaataagccttgaacttcattggcatggtcttggagctccaaagtccacccatgttgacgggcttgtcggcgaagagcgcgtcgatgttctcgtaccagttgccctgatcgagctggtaacccaactgcatgtagctcggatcgtggtacaacgcgaattcatcagcgacagccg

SEQ ID NO: 34372 - DNA, 94 bp, Oryza sativa
  Clone ID: uC-osrocyp005h01a1
gaaaaaaaaatccccgggccccaaagggtctaattggtgggaagggaaataatagaggcagggccccggaattaagattttaaaccccaccccc

SEQ ID NO: 34373 - DNA, 340 bp, Oryza sativa
  Clone ID: uC-osrocyp005h02a1
cttcttaaaaggggagccaaggaaaagcaaggggggccccggtccccaaaggaacccccctcttagggggtaaaacccccccaccgggaaaaaacctttttaaccaggcccccccctggaaacaaagcccgaaggggcccaaccacgggaaaaaagggaccaagggggggaaaaggggtttttacgatttaaggggttaaaaaaagaacctcccttctgggggggcccaaaagaggccttcccccctggcctttgagaacccaagggccctcccccaaaaaatgggggggaaccccccccagggggtggccccgggcccgaaaaacaccctggggggggg

SEQ ID NO: 34374 - DNA, 411 bp, Oryza sativa
  Clone ID: uC-osrocyp005h03a1
gttgcccaacctgaatagcttcttttgtatgtaattttgcttcaacaaggcaggtatgtaagtgtgtaaagcaaacatagacataagaagcaacctatttcttagcctatagaaaccttctctatatttctcttgcacagatgaaaacttgttaagagctaactgtggaaaccatttcatattcacttgccttcctgttcttcgaacaaatgaagaaagcgcctccaaaccgctgctgaaggaacagaagaaccgacagcagtattgctccacatggtatggcaatgtcccatgcgaggctgaagagatcatcgcgagggtttgcatacctgtaaaatggtcttaagctgggcacaaaatgcttagccctgaacacatcatacacatgaggtagcgcacgaatcatggggc

SEQ ID NO: 34375 - DNA, 191 bp, Oryza sativa
  Clone ID: uC-osrocyp005h03b1
ttttcggtttaagccaagccaacccaaccacacgccgagacacatacaaatggactagggtactactctatgcctgttgagaaggccactgtagctgagcggattctgctacgagagaagaagcaggctgtgtctcaaagggtgaagctggtgcgaatagggtaccatgctgtgcggatatggcggagcga

SEQ ID NO: 34376 - DNA, 300 bp, Oryza sativa
  Clone ID: uC-osrocyp005h04a1
atctatgaagggggggacaaattaaccaataaaaaaataaaaaaaacaccaaaattttggggaatagggggggaaaggaaaaaaaaaaaactaaatgcggggggactaaaaaaaaactgttatgccaaaaaaacccctaaaattttcaaaacaaaaaacacggttattggaccaaaacaacactttttggcattaaacaaaggggattggggggccacccctttgggggcctaaaaggacaggaggaggacaaaaaaatggcgggcgccccaaaaaaaatcaagaaagaaacaaaaaggg

SEQ ID NO: 34377 - DNA, 570 bp, Oryza sativa
  Clone ID: uC-osrocyp005h04b1
cacctccatcggccgcctctctccggcggcctcgccgccggtgcgccacgcccgtacgatgctccctcgccgcagcgccgggtctccgggcgccgcctgagctcatcgactccatcctctccaaggtgaagggaactgaccgtggagttttgctgcccaaagatgggcatcaggaagttgctgatgtcgcactacagcttgccaagtactgcatagacgatcctgtcaagtctccactaatatttggagagtgggaggttgtgtactgctcagtaccgacatcaccgggagggctctaccggactcctctcggccgcctgatattcaaaaccgatgagatggctcaggtggtgcaagcgcctgatgatgtaaaaaacaaggcgaccttctctgtctttggctacgacggtgcggcatctctgaaaggcaagctgcatgtgctgtatggtaagtggattcaggtcatattcgagccaccagcagtgcaggtaggctccctggggtttcagtatggtggcgagagcgaagctacgctgagatcacctatgtcgacgagaagacaggctggga

SEQ ID NO: 34378 - DNA, 310 bp, Oryza sativa
  Clone ID: uC-osrocyp005h05a1
aaattaaaatatttttgtttttatttttttttttttatatatttttttttttttccttttttttcactttctttagttaaaccaaaaacggataacaaatcccccaaaaaaaaccaaaaagggtgggggcccaatgaaaaaaaaaagttctcccccagaaaaaaaggaacaaagggccgtcttttttaaacgaaaaaaaataaggggaggggggtaaaaaaaaacggccaaaaaaaaaaccccaattttttttaaaaaaaaaaaaaaccgacattttttttggaaagtccggacaaaaacccaaaagccc

SEQ ID NO: 34379 - DNA, 355 bp, Oryza sativa
  Clone ID: uC-osrocyp005h06a1
aacacaaagggggggcccaagggacattgggtttttggaaaaattattttggtagcaaaactgggggacaaaaaaaaatggggggccggggcttattaggggtcaagaaggaaaaaaaagggggggccaggggaaggcttgctcactttgggcggggggaacaggacacagggactagaccccaacaaggaaaaagggaaaccggggaaaaaaaaaaaaaggaaaaactaaaaaccgggcccagttcgggggcccctggtctccaccacctttttttacagggccctgcgggtgggtcaaaaaacaagggacccaaaaaaaatggtccccccccaaaccaaaatttttttttttt

SEQ ID NO: 34380 - DNA, 425 bp, Oryza sativa
  Clone ID: uC-osrocyp005h07a1
ataataaccgggggggttttaaaacgtggggcttttttcctctccgactttttttttgttctgcgcatgggccttcaaaaaaaggccccggaggaaaggggtgggctgcccggggccccgaggtaacaaccgctttaggggcaaaactttttaaaagggaaagaaccgatgggcccgtgcccccccttgaaaaaaaagaccggggggccccacccgggataacggggcccaggggggggaagggggcccccacgggtaagggggtaaaaagggggcccccccccccggggggccccaaggcgggggccccggggcctttggggaaccaaagggcccaggggggaaagggggggggcccccccctggggggggggcccccgggcgggaaacccccccggggggggggagcaaaaaggggttccccc

SEQ ID NO: 34381 - DNA, 230 bp, Oryza sativa
  Clone ID: uC-osrocyp005h08a1
gcttggaccctttttggggccccccttttttttttttgggggattgagaagtccgggtgtttacagactgtgggggttttccaagtccagcacactcacctggaaaaatatattctgaagaaaaggcacagcttttctctattcatgaagctgcagactgaaccatcatcagctatctgaaaccaacccagcatttccttgtggtcacccccagagggagggatgttttg

SEQ ID NO: 34382 - DNA, 342 bp, Oryza sativa
  Clone ID: uC-osrocyp005h10a1
ttttggtttttttatatgtttttgtttttaaaccaaaacataggaggttgcatttgttcttctaaaaggagggaagcatctttccttctttcaccattacataggcttaagcaatcacagataacaaatctctcctcctcctctagggaaaatattcaaacacaatacccttatacgtacttatttttaggaaaggagcgcgcatgggcataaatggcatcggggggcaggtttaagaatcacaatggctgagccgggaggaaacaaaaacccctaatgggacagagcaaaagcctcccaaagggagcttttagggggaagggttcttccccttgggggggt

SEQ ID NO: 34383 - DNA, 96 bp, Oryza sativa
  Clone ID: uC-osrocyp005h11a1
ttttgggttttttttttttttttgggttttaaccaggacataagaggttgcatttgtgggtatcaaaagttacaaggagtttttcacatttcacaa

SEQ ID NO: 34384 - DNA, 342 bp, Oryza sativa
  Clone ID: uC-osrocyp005h12a1
tttttggtttttttaatttttttgggttttttcttagacataaaagtcacaatcaccgaaccggctttgtatcaggacaacgtcagaatccacaacgttggaataaagggggaccaacataaaagataagacaactaaaattcttttcacgcgccaaaaaccaattcaactagtgccgctggagtttaatgaacgttgccaccttcaagggctttttggccattttggcgcttcttggcattagggtcagaagagctacggggatcatgatggtgatgggggaggccgcggtggtgacaaaggggtccggtcttgtgaggccttttaccatttctcaccttt

SEQ ID NO: 34385 - DNA, 481 bp, Oryza sativa
  Clone ID: uC-osrocyp005h12b1
ctctctttaggcttagatatttcattccatgtacagcaaacaccattggcccggtcccaactcccaagtgttttcggttagcaacctaccatgcttgagctcttgctcctcctcgccgccgccgtctcctcgccggcgccggcggccggagacggcgggggcgccttgccggtgctcaacccgatctcctccttctgtaacacgacggcggccaggcggacgtacctgccgaacagcacgttcgaggccaacctcaacgggctcttcgccgtgctgtccaggaacgcctcggcgtcgggctacgcggcgggggcgttcggcgcggcgccggacacggcgtacggcctcttgctctgccgcggcgacttcaccgggaacgactgctccgtcgcgcggctggcgttggcggtccagcaggcggcgagcagctgcttgtacagcaaggacgtcgccgtcttctacgaccagtaccagcttcggt

SEQ ID NO: 34386 - DNA, 181 bp, Oryza sativa
  Clone ID: uC-osrocyp006a01a1
gtgggtacaagcacttgatctttaaagttcaaagaccaccattgatcaggtttctaaaaggagtttcacaaagtttgcccttcgtcaacacatgagttcacgataggcgataggccaccaaggaccaagggcaggactcagttggggtgggtatacttactaatattttatatatctgcgc

SEQ ID NO: 34387 - DNA, 422 bp, Oryza sativa
  Clone ID: uC-osrocyp006a01b1
ttcgtttaagactggtaggtctcgaccccagcatgagatcccttctctagctcatttcagaacgagatcgcaaatgggtgactacgccatctgatcccgcttgctccgatctcgatctggtctccccgttcccgttctgttctagtggagtgatgcttgcgcaattctatctgactattagccggtcggctttctggctcctgcagcgaagatcaagatcaggatcaacgggttccggaggatcgggaggctcgtggccagtgtggccctgcaaagcgacgatcatccgctcgtggccgtcaacgaccccttcatcaccaccgactacatgacatacatgttcaagtatgacactgtgcacggccagtggaagcatcatgaggccaaggtgaaggactgcaagacccttctattcggtgaga

SEQ ID NO: 34388 - DNA, 327 bp, Oryza sativa
  Clone ID: uC-osrocyp006a02a1
gcaaaagaggaacacatctgtgtttatttatctgcaaacaataacacagttccataccaaatacgcacgataatacatactttaaacagactgagtttaacgtacatcacgtcacatggaacattggccgtcctctaaaactggaatactacatcacacacaaacaaactaccaattggggcgcacaaataaatctgcaacaacagatctagtaggagtactagttaacacagccaacaacagcagcacccgttttattctgaaccctctctgcttctgaatcatttggttgcaatgaacaggccccacctgtgctcaccggcagag

SEQ ID NO: 34389 - DNA, 316 bp, Oryza sativa
  Clone ID: uC-osrocyp006a03b1
aaagctcggcccgcactggaccggacccggaacttgctgggtcggacccacgcatgcgtctttttcctacacacgccttggcccctctcctgtcgccggcctgccgacgcggcgtctccggagccatggccgccagcggaggcgtcccagcctcggccacgcttcttctacttgcaatacacgccgcggccggaagtcccctcgccttcgccgtgcgcccggtttggagcccggagacacccggtggacaccagccattgatgtgtgccaccgactgatccttgagcaagctgaagacaacatatgcggcggacag

SEQ ID NO: 34390 - DNA, 309 bp, Oryza sativa
  Clone ID: uC-osrocyp006a04a1
aggccaaaccatgcaaacttacataaggtttaagtgcagtcataacacaatatacactagtttgataaacaaactttattcagcagcaagtaaataaggtaacacaaagcgaatatctgatcctcagtagcgcgccaggctagacaagttcggatcatagagcatcgccatcgagaactaggccaaaccttcaaaacaatgtacattgttggcctcacaatgcttgcagtgaccaccagttcgagcactggtaaatccagcaacagtccacgagaaagattcagcgaggtttggcttagctcggagcgg

SEQ ID NO: 34391 - DNA, 381 bp, Oryza sativa
  Clone ID: uC-osrocyp006a05a1
gcttcatacattaccttgcatgtttgcaaaaggacatttcaaaattttatcttccaaaatgccatcgtcttgcccgaggggtagatttagcattataagagctatgcaacgggcacattgcacattgccaccaattcttgtcatgatttacaagagaataagcgaacgctaccctattgttggtattatagccccccgtttaaacttgccatgtcgacactctcacgcaacaaaaaagagcatagttttactttctgtcgactcaagaagcccggatcaactgtacactagcaactgaatgtgctgataggaatagaagattcatatcttgactgacacttcagctggcacattgaggccaaaaagggcagacccaccatg

SEQ ID NO: 34392 - DNA, 283 bp, Oryza sativa
  Clone ID: uC-osrocyp006a06a1
cgtgcgcttgtcctctatattggccgccctctttttttttttttgttttgttttttttttttttttttttttttttttttaacacggttttttttattgaaccaaacaaaaaaaaatcggattatgggcaaattctctcttggttataatgaattggcagaatggaccctagaaactaaaaatggccccattaatttgagccgcccgttttttatatatgggcacggttgatagattgacccttacaaaagccgggcgggcacccccccatgctctcgaaccc

SEQ ID NO: 34393 - DNA, 428 bp, Oryza sativa
  Clone ID: uC-osrocyp006a06b1
tttgcccggaggagcaggagaagcggtaccaggtgtggaaggccaacaccgacttcatcggcgccttccgcagccagacggagatctcctccggcgtcggcgccttcgcgccgcagaccgtcaccgactccttcgtcggcatgaacctcttcggcgacctcgcctccggtgagttcgtgcgccagttcaccgggttcaacgccaccgggttcgtggctcccccgcccagcccgagcaccgatcccgccgggctcgtggctgccgtgctgcgtcgactggcgctccagcggcgcacgtcaccggcgtcaagctccagggctctgcgcgtcgtgtggtgcgttccggaggatggcagccatcgagggcctgccaggatcaagaccggcatctggtgtggctgccgagcagggactggtggactgcgacac

SEQ ID NO: 34394 - DNA, 313 bp, Oryza sativa
  Clone ID: uC-osrocyp006a07a1
gtaggtacaagcataatttcataaagtttcaagtaatccagtgttacggcatttcaaaagtgctttgtcaggtctgcccttgcacaacacaggagttcaagatagtagatagcaaccaatgcaacaggttcaagactaaataggcatggatataaattactaatattttatatatctgcgcggctctatcttgcgatggctggagaaggaaggataatgccaacgtaacttgggcacaggccatctgttttggggtgtccataatctcaggagagatgtccccttctccatcaaaatagctcaataatttcag

SEQ ID NO: 34395 - DNA, 373 bp, Oryza sativa
  Clone ID: uC-osrocyp006a10a1
gcacaccattgtgtattcttaccgcgttttcgttcatttcaagttttcaaccgataccgttctaaagattacatcagaaatgttggtacatatcaaccgatcagggaatacgcaatttttccctgtttattggactcgaactccgacggctaatcatagcaagagcagtacatgcattaatattggactcatctcttattatatgcacacatagcaatgctgctgcgttgaagattcggttttcagttgacgccagtagaaattcctgaagtctgtcgatgaagcttaacatgttcatcagccgatcttgaccaccgaactagccaaaatttattccttgtgctagaggcagctcgcttgcatagttgatcga

SEQ ID NO: 34396 - DNA, 475 bp, Oryza sativa
  Clone ID: uC-osrocyp006a11a1
tttttgtaaggtgtaagagctttgaagcaatcatcattaataacacttggtatgaattaacacaggtgagcatgagctcaagggtaaatctcttttccatctttttctctacctgtgaatcagtgaccaacatgctatacatatgccattgatttaggcctgaagaacaatgactgggaaacaaaaaatgaaaaaaagaaagggggagaagaatgaacaaaatttgaacaatgaagtaccaaaattatcttctcaaatccgttcgaccatgaatcgtgtgatcaactggcgttcaccagttcatcttcatcatatgagtagtccaaagttcttgtaactgagcctccaaactgttttttttcgccttgtaccatggaaggaacttctcagaaggaaaggtctctcatgtcgccttcgcgttcaggggctctgtatgaatatcccaattcttctcagattgtcgcctactatgctg

SEQ ID NO: 34397 - DNA, 360 bp, Oryza sativa
  Clone ID: uC-osrocyp006a12a1
tttttgttttgtttttttttttttttttttttttttttttttttttttttttttttttcagtccaaacatacccctttttaattgactttaaaacccgggcagtttataggagggcggaagcatttcccccatttacaaataaaaaccccggggaaaaaaaggaatcaattcattacaatcgggccaaaatatgactcatctgttcttttttatcccacagaagggtccaacaaaacgacaaatttttttgcaggctatttacactgatgcacaaatatggtaacgtttatggcagagtttggaaaacaagaaccctttttcaactttttagggattttaacttacacagataacctaac

SEQ ID NO: 34398 - DNA, 396 bp, Oryza sativa
  Clone ID: uC-osrocyp006a12b1
gttctttttagagttgatgatatcagggttggcgcaacttccagaaaatctattcctcttcttgttgacctactcaaacccattccagaaagacctggtgctcctttcttggcgttgggtcttctgacacaattagctatttgtttgccccccaaacatgatgctaatggctgaagctggaatcctagaggcacttaccaaatacttgtcacttagcccacaagatgcaacagaagaagctacaactgatttgttaggcattctttttagttgcgcagaaataaggcacaatgaagcagcacttggtactgttaaccaacttgtggcagtccttcgtctaggaggaagaaattcacgctacagtgctgcgaaggcattagagagcttatttattgc

SEQ ID NO: 34399 - DNA, 428 bp, Oryza sativa
  Clone ID: uC-osrocyp006b02a1
aagcagcgcacagatcgcatatcatttgacttacagcatacacattaattcttcaagtctcaacttggattacagcgagattaacgtgcgctcctccctaacacctctacgtcacatcccgtagttaaccggacgtagagagagagagagagagagagagagagagagagagagagagagagagagtccatctattattcagatattattccaatgtgtttctggacaagtagcctaaactccgatcagtctcgagaagcctgcccgtgtgtgcaaaatccagaaatcacccaggacaaatttacatgatcccaaccgtatttgaggccattaacattgattaaagtcaaactatggccgttccgactccgaaggcgctatcatagttcctcaccatgttcttcgtcgagggcataccagcaacaaca

SEQ ID NO: 34400 - DNA, 329 bp, Oryza sativa
  Clone ID: uC-osrocyp006b03a1
gaggggaagggacccgggaaaattgatctgaaacttacatgataataacccacgccaaaaggggccaaacatttttgggttgggagtatgttcaagggggggcattattagcattgctcaagccccagggtgctttagggaagggaagggggggaaaaaggggggcttgtcccggccaaaacctcttgcatttcctaagccccaaaaagggggtggtcctttttaaacatttttccacccccaaagggaaaggggggaaaaacttaggggggctttaccgggggggggtttataaattccaataaattaggctttaaagaaaccccccc

SEQ ID NO: 34401 - DNA, 463 bp, Oryza sativa
  Clone ID: uC-osrocyp006b04a1
aaagagaactgtcgtcaacgttgttcagcgaccaaagcaacaaaagttgcaatctcagggtgataccagaccgcaaaaacaatgcaggctaatagaaagttcatcgatccattacacaccaatagcaatatagcatagccccaagggcaccaaatcctttcaggtgttaagactccttgatctcgtcttaaaccggaaatataactattacaaccatggcatgaccatccacaagatgaacgccagagactgggattaaatttcaagcttcaggggactcgcttgctctgggcgagcgtgagccgccacggttaccaccatcaccatttccatccctagggctcgggctgccgttgtcccttgggcttcggctattgttgtccattggactagggcttccattgttccttgggcttgggctgcgcccattggcagccacagggctacggtagccgtcagatgg

SEQ ID NO: 34402 - DNA, 438 bp, Oryza sativa
  Clone ID: uC-osrocyp006b05a1
ggtcagctataacagccggtcagtattcttcagaaaggtttaaatcgaaacaaatgagacaattagcaggtcagcatataaggaggcaacaattggctcctatcaacaatttagaacacatgaaacaagggaaatattttaacctcgcaccaaaacataaatttctgcgtatgccgatctctttcaccaaaatctgtgcttaacagccgccttctcttcaataatgggcaaatggcaatgcaaccatgatcaccaaccattacacccaagctatgtcgaagatagtctcagccagcattacaagctcagtggagatatgctggtttttaagcttttgcttagtgaggcagcaactggtgcatgagtcgattaatcatctcataactggtgaacgtaatgacagcattcgggttgtccttagcaaattcgtagcacaac

SEQ ID NO: 34403 - DNA, 328 bp, Oryza sativa
  Clone ID: uC-osrocyp006b06a1
aaaagggccccgacggccccccaaaaagtaaaatcataacgccatttaaaggggggaaaaaggccccacggccgggttttaattggaaaaggcggcccaaacagaccagggggatgaccatagggccaaagttgtaccacccgcaacatgcaagggacacctgggcaataagataccggggggggcggaacactctggggtggcccgcttagaggaccatcttgatctgggggccagaaccgaggacgcccggcggggggggagtctcctggaccatgcccgcggggcgggacccccccaccccctgggtcaataagggcaggaaggg

SEQ ID NO: 34404 - DNA, 361 bp, Oryza sativa
  Clone ID: uC-osrocyp006b07a1
ggtaaaagcatcaccgatggagcttattaggtgattcgaaatcaccactttttctgaatccacaggtacaaaactgctcccaaaagcaagtcacacgagtctattacaaggaaacttccaggatgtgctcagccagcaaacatcactgtctgaatcctcagaacactgctgcggatggttttaagatgttattcttggagggagctgctatgctaccatcattcacttcagttttgtgactgcggcatggattgcatctgcaagatgccgaatggtcctcccgctcaaaccagccatactgatcctcccatcagatgtcatataaatggggtattcctgcctcatgaaagccacttgatca

SEQ ID NO: 34405 - DNA, 452 bp, Oryza sativa
  Clone ID: uC-osrocyp006b07b1
tttcgtgtaaccaccaccagcacctcctcctccgccgccgacgccgactcctccctccaagctttccccaccatggcgtcgtcgtccgtcttcgctggcctcgcgcaggcgccggaggaccccatcctcggggtgacggtcgcgtacaacaaggatcccagccccgtgaaggtcaatctcggcgtcggcgcctaccggaccgaggaagggaagcccctggcgctgaatgtggtcaggcgcgctgagcagatgctgatcaacaacccgtcacgtgttaaggagtatttgccgatcactggactggccgatttcaataagctgagtgctaagcttatttttggtgctgacagtcctgccattcaagagaatagggtggctacagttcagtgcttgtcaggaactggctcttaagggtgggaggtgaatttcttgcagggcatatcatgacgcac

SEQ ID NO: 34406 - DNA, 323 bp, Oryza sativa
  Clone ID: uC-osrocyp006b08a1
tttgggggggttttacacagatcgcgtctcccccgacggacagcatccacatttatttttcaagcctcaactcggaagacaacgagactaacgtgcctttcaccctaacagctacacggctcatcccaagaagcaccctacatttagggagacagagggagtcccagagggagaccttaaaacactagcgtgagaccgtttgttgatccgaggctttggccaggggggaaaaagaccatttgcctcaaccccaaaccgcctggagaaccctggcccagagaaggggatgggcctttttaaacattttcccacccccaaaggga

SEQ ID NO: 34407 - DNA, 350 bp, Oryza sativa
  Clone ID: uC-osrocyp006b08b1
atcatccaggacgacatcatataggcaatcaacacgcatcccaatgctggctggacgggtggacggaatccatactttgcaaactatactactgcgcaattcaaacatatccttggcgtgagatccaacaccgcattcagagctaaatgaggaaccagtgaaaacttatccaacatcgctgatgcttccaaaggagtttgatgccaggtctgcatggtcacagtgcaacacaactgggaccatacttgatcagggtcactgtggctcgagttgggcatttggagctgtggagtgtctccaggatacgtcttgcattcattcaacatgaacatttcgctatctgtcaatga

SEQ ID NO: 34408 - DNA, 368 bp, Oryza sativa
  Clone ID: uC-osrocyp006b09a1
actgaatcaatgaagccccttattttttggtgcacaacacatgaaacaagtccaaataaatgagaacaaattctacttcatagccatgggacgaaacatagggggctccatttttaaaatttcctttaccaaggaaattaagggctggcgtcaccagatccaacttcaggttctgcaccaccggcactggcaccatattgggcttgaccattaccgccaccattgccaccagcatttgcatttgcatatgggccatagtagtagttattagcagtgctagagccataggccgtaccactggcggacccatgaccattggatggccaggaaccaccgggttgtgcggtaccaccaccaacaccaggacc

SEQ ID NO: 34409 - DNA, 453 bp, Oryza sativa
  Clone ID: uC-osrocyp006b10a1
agcaaaaataacaatacatgctcctaatcgatacatgtgctgttccatgttacatcatcaccaagaagggaagggaagggaagtgagccaagccaacaaagtcctggctggctggtgtctaattcattttcttcttatcacgacgatgatagtagatgtaattattacttaatcgaaggaaggagcatatatatatagcgaaagaaggataaggcggatatgaatgatgatggatgggctactcggagcgggcggcgaagcgctccaccttaggatcggagaggttgatgccaaccatggcctcgccgagcccgctgctgacctccgccaagatcttggggtcgctgtagtgggtgacggcctgcacgatggcgcgggcgcggcgcgcggggtcgccgctcttgaagatgcctgagccgtcgaagacgccgtcgcagccgagctgcatcatga

SEQ ID NO: 34410 - DNA, 503 bp, Oryza sativa
  Clone ID: uC-osrocyp006b10b1
gaggaggccggtgtctgcgccgtcatggccctcgagcgcgtccccgccgacatccgcgcccagggcggcgtcgcccgcatgtccgaccctggcctcatccgcgacatcaagcgcgccgtcaccatccccgtcatggccaaggcccgcatcggccacttcgtcgaggcccagatcctcgaggccatcggcgtcgactacgtcgacgagagcgaggtcctcaccctcgccgacgacgcccaccacatcaacaagcacaacttccgcgtccccttcgtctgcggctgccgcgacctcggcgaggccctccgccgcatccgcgagggcgccgccatgatccgcaccaagggcgaggccggcaccggcaacgtcgtcgaggccgtccgccacgtccgctccgtcatgggcgacatccgcgcgctccgcaacatggacgacgacgaggtcttctcctacgccatgcgcatcgccgcgccctacgacctttgtatgcagaccaagcagct

SEQ ID NO: 34411 - DNA, 480 bp, Oryza sativa
  Clone ID: uC-osrocyp006b11a1
agagaaaaaaagaatctattggggaagttcgaataaatccttgtcaaaactgctttgaaacaacagcaagagcaatcctgtctgtgcagtagaagtcgcatttaccgatggcgaattggcgatcgatcgcgttagacgaggagcatctggaagagcatgtcgttccagatgtcgatggggcctggcaggcaccagtggatgcagtcgttgtagagctgcaccttctggttcggcaggtggccgtaccggctggggtggccgtcgggccgcatcagcatcgccgccgtggcgtccatgagcatcatccgccggcccttggcctccgcgaccttctccgcggcgcggtactcctccatctgcgccgtgtagaagtgcaggtcccgcccctccatcaccgtctcgttgctccggagcggctgcgtccgcttgcagttgccgccctggtcccacgtcccgttctcgagtgcgacatcggcgaca

SEQ ID NO: 34412 - DNA, 492 bp, Oryza sativa
  Clone ID: uC-osrocyp006b11b1
cgagcaagcaagttcggttttagccatcaaagccgaaagccatccgggcattcgctctcccctcgctgctagctagctttgcttgctaatctagagctaagcaccaaatggtcctgattgttcttctcgcttctgaattgttgtgacctgtaactacaaaggcatagttagatatagaaagagggggggagaggggccggaggccggagcggcgggggcggcggcgagatgaagctccacttcgtgctaaggttcctgttcggccccgtgccggtgtacttctcggcgctggccatcctcatcctgctgacgaacgcgcagtacttcgggctggtgggcgtcaccgttccccgcgcgacgaagcttggcgtcgtcggcgccgggtgggtgagcgtgattgaagtacttgcgacatcttccgcggagaggtgggtgccagacttcgacgcgccctactacaaccacaagacgtgctacatgatccatgagcac

SEQ ID NO: 34413 - DNA, 469 bp, Oryza sativa
  Clone ID: uC-osrocyp006b12a1
ttttgtttttttttttttttttttttttttttgaaaaaacagaacacggaatttatatgtatcccgtgtctcagtatttcagccagataggcagatacatcttaaagacttggtacagtaccagaaaatgtaaggtcagccagacacatggagacttcataaagcaccacaaaatataagggatatggaatgatgataagttaagcttacagatccatccacaaatagataaacaacaagcataatcacaggatctaaacaggtacactccttaagatgccccttggaagtagacgttgcattaagacaactcagacatcaagtcctctcatcaagaagttgatattctcaacagaataccctccagataacatttggaatgcatggagaaacttctgaacaaaacatgcagatctaatacctgaacgacctatttgaaagttgaggcgggacctcccagaacctgcac

SEQ ID NO: 34414 - DNA, 375 bp, Oryza sativa
  Clone ID: uC-osrocyp006c01a1
aacaaaaaacttttaacatagggaaagcctcacaaaaaaaagccagctccatttgtgggacccatggtaacaaaatacagtgtgcggcccctggtttacaattttgtactagaatggcgcatgaaaacctgtttacatttaaaggttgtttaagcggcataatagccgttaaatataacttatgatactacttagcatgacacgtaatatcagggtgcccaattttgatcaagcccccgggcccccaggtacctttaaacttatgcaatttttagccccttcacgagcattttcaacgcaggtgccctactgtacctttttgaccggcttttactttggatttggggaattttgtccattaaccaaatcttacca

SEQ ID NO: 34415 - DNA, 470 bp, Oryza sativa
  unsure (1)..(470): unsure at all n locations
  Clone ID: uC-osrocyp006c01b1
ttttccgagttccgacgccgcagacccccttccacccctctcagctccagtttcatccagatctttctctattgtttcgtgaaaaaaaaacttcgccctttcatatttagaagattcatgtcggaacatgacggagacaaacaaactacgggaagtcttcagaccagttcttctcaaatggagaaacacgaggtggtgtgcggagataatgctagacttaaagaagaaggagcaactgtggataatatggatccttcccgtccttttctataccttgagaaattcgatcagaaaaagatggatgagcgggtaaaaattaaatctgcttgggccgccaagaacgtaaagaacgatatcatgacagatcctactcctcaggttgtgtttctatttcacttacagaattcagttgacagatcattctgttatattagntattttcttcctacctgcagcatnttggtgtatct

SEQ ID NO: 34416 - DNA, 446 bp, Oryza sativa
  Clone ID: uC-osrocyp006c02a1
acttaacattgtatttaacatctcagcatcaccatagctgaatgttcttcaactcccagtgcgatacacaccaaaacaaaacacggcaagggacatgtagtaacattacagggctactagagagagagagagagagagagagagagaggagtagaacgaacatattctaccggtagcaccatctttcaccatttctgtatgtgcactggtattcacagccctctgggggttcttgctcttccacatcgtcatgaggacgccaatatggcaagggcacaggccacctgtttagcttgacactgccatctccagggattttccagccaggcgcatcagatggatcactaccattgccaacttcagcagcactactttcattctcaaaacatgccagaattttaagaattacatcccatggcatgtagggggtcctattttttatcata

SEQ ID NO: 34417 - DNA, 495 bp, Oryza sativa
  unsure (1)..(495): unsure at all n locations
  Clone ID: uC-osrocyp006c03b1
gtgtgaatgatgctcccgctttgaagaaggctgatattggcattgctgtggacgactcgactgatgcagcccgtagtgcctccgatattgtcctaactgagccaggccttagtgtgattattagtgctgtgcttacaagtcgagcaattttccagaggatgaagaattacactatttatgctgtttcaattacaattcgtattgtgcttggttttatgcttcttgctctgatatggaagttcgatttcccaccatttatggtcctgatcattgccatcctcaatgacggtaccataatgaccatttcaaaggacagagtaaaaccatccccacaacctgatagtgtgaagttatctgagatttttgcactgggggtcgccttggtagttacttggccatgatgacagtcattttcttctgggtagcatacaagactgatttcttccgagaagtgttcacgttgaaaagccttgaaagactgctcangatgacttt

SEQ ID NO: 34418 - DNA, 449 bp, Oryza sativa
  Clone ID: uC-osrocyp006c04a1
gaacgactcgcacgagacggtacgaagttctattgatagagcaggaaaaaattacaagatcacaaccctaaagggtcgtaaccaggaaaaaggaaaaatataccaccacccacacaccgacagctccaacacacaagaccgggagaaggctaacaccggaccggccgccgctaagcttgaccgactgccgctagaccaacaaagaaacatagatgagatcgcccaaaagaacaccctcacaaccaatacaaagccaactcctagagtgtgcttgcaccaatcgatcgagaggcttcggctaggggataccaaaacgacgtattcaagaagagaagcgatggtaaaccaccgccgccatccgtcggggctcaaaggagccaggactgggctttcgcccggcaaccacccttgagggatgagacagcacgacaacaccctcaagaggggga

SEQ ID NO: 34419 - DNA, 456 bp, Oryza sativa
  Clone ID: uC-osrocyp006c05a1
gggagcgaaaagtaaatttggggagtctatatttcacggtacaaagtagactctcttccttattcgttctttttttttttttttgcatcctgcaatttttcttgtcttgttgcactgctcttgatcactgtctactccttggggattttgagcagcttccccaccgtgaagccgccgtcgacgacgaggttatggccgttgatgtacctggcctcgtcggacgccaggaagacggccgccctcgccacgtcctcggggtcgatcaacgggccagcttccatctgctccatggacgccgccatggcgttcttgagctcctcgaagctcatcccggggtaggcctcaaggacctgcaccatggacagcggcgtcgcgacgccgcacggcgagacggcgttcgcccgcacgccgtggcgcgccagctccccggccacggtgcgcaccacgcccagcacg

SEQ ID NO: 34420 - DNA, 319 bp, Oryza sativa
  Clone ID: uC-osrocyp006c06a1
aacttaaacccttgttcgattctttgccagcactatctagcactaccacaggccaagcaccaacaccaccagcaccagtatcatatactatactatactccgtagatcatgacatgatacccgatgaatgaccatgacctatccaaagagaaatgaaagaaaagagaaaaagaaatacaaaccaaacaccagacccgattgtattacgggtttgcttttagctaccagagctagtacgttgccccagtccagtttccttcttaaatacaaggttttagatcagtaagtacaatatctaaggacaagatggggtgcgaga

SEQ ID NO: 34421 - DNA, 389 bp, Oryza sativa
  Clone ID: uC-osrocyp006c07a1
agaatgattggtccatattttattttggatcgggctgcaaaagccaaataagtccccccttgacatttacatcaagtacacaaccaaaagaaaacgtgcgagcaaaaaaaagtctccagaattcactagcatcggcgaacgtactagttaaacatattcaccatctcatcatggaaggagttattgatgattgattgattgcacctgctggaagcattcttgtggacaatctagcctgtgttctgcatgccggcagcaatgcccttcatcgtcaggatgagggtgtcctccaggccaggtgcgtactcgctcgcagcgttcagttggaccagctcggcaggctggttgctgtcgacgaactccttcgacaggccggctgcgacatcacc

SEQ ID NO: 34422 - DNA, 323 bp, Oryza sativa
  Clone ID: uC-osrocyp006c07b1
gaaagcctagtggtggttattgaatcgctccgtgcaattccttggatttttgcttggacacaaactaggtttcatcttcctgtatggcttggatttggtggagcgttcaaacatataatgcagaaggatatcaggaacatccatacactgaaagaaatgtacaatgagtggccattcttcagggtcaccttggacttgcttgagatggttttcgccaagggagatccaggaattgctgctttatatgacaaattgcttgtggcatggtgatctgcaatcctttggagagcagctgagaaacaactgtgaagagacaaaacagc

SEQ ID NO: 34423 - DNA, 281 bp, Oryza sativa
  Clone ID: uC-osrocyp006c08a1
tttggggtattttaagcagatggtatgtccccaacaccatgtcggattggtcttgcaacagccagtgcggtgccccccttgacatttacatggaaggggccatgtagtaacattccacgactcctaaatagagtgagagagtcacagacagaggggagcggaccaaacatattttaccggtagcaccatctttcaccatttgtggatgagcactggaattcacaggcctgtgggggttcttgctctaccacatcctgatgaggacaccaatgtggcaaggg

SEQ ID NO: 34424 - DNA, 461 bp, Oryza sativa
  unsure (1)..(461): unsure at all n locations
  Clone ID: uC-osrocyp006c09b1
taagaaggagagttatttaactacattccaatggtccgatggaggatttggatttttatggaattcacgtgtttccccgatgttgtggcgagctgtggcaggacctcctgcccaagcatggtttcctgcttgtgcgtatgccgtcatgccgcttgagaattggtcgggatcaatgaagtttagatttcaagttgtgtgttctagttttcataaagggcgtttgcgtattgtgttttgatccaacaggtgctcaaacaaatcctgagttgaatgtcgcgtattctcacgttattgatatttcagatactcaagattttaccatagaggttcctcatatgcaaacacgaactttgttaactaggggctgaaccgncatttacactgtttaccacacaatacggcactactttgttgccacccgttgtcactggtaatggaactattgcttgttatggtgagac

SEQ ID NO: 34425 - DNA, 461 bp, Oryza sativa
  Clone ID: uC-osrocyp006c10a1
ggcaagaaacaggagatcgatttggagtgaacccattacatggtacaactccatatcatcatcatcatcatcatcatcatcatgtttatgtacacaaacatcttctttacaagtacagccatggatttttctttttacatggcagtagtagagtagcaccagtagcatggtgatggctcaagcaagccctttatctctctcaccatggacaagaacaacatatatttacaaaacacctcacctgacctgactgttccatctcaacgaacacaagacttgagatccagaaaccaattcagtaaaaaaaaaaagaagaacaataattgattaaaaatcctctcctcctccggggttggtttgatcatcctcctgtgcatcgggcgatcgtttctaaactcctttttttccttaattaacctccctactatctgctgtaataaaaccgtactaaaaattacttt

SEQ ID NO: 34426 - DNA, 387 bp, Oryza sativa
  Clone ID: uC-osrocyp006c10b1
ttctcttccaaccaaaagccaagccatatacagagagagaagaggcacaggccaaatcttgatcttcttcttgttcctcctccttcatctcctcttctcctttgcttcacctcatcggcctaaatttatcacccacaggcgacttggccagaggaggccgcggcggatacactgattgataggtacacagatatagacagcgatcgatactagcttcaaaacgagggatattctgatgctcttgcatctttagagagagagagagagagagccagacagagaggagatcccgtccggcgcgatgaaaaggctgcccgctgagtcatggccgtccgacgaagagcttacactccgcaggcaggcagaggctctgtgcgctcctcggcc

SEQ ID NO: 34427 - DNA, 464 bp, Oryza sativa
  Clone ID: uC-osrocyp006c11a1
cacacaacttttcacttcatgttgaaacaagattttgacaatactaaaaggagtagcatacaagctcgaaaagtggatgggttaggagaaactgagctaagcaacaccagctttatcaaagcacataaactgcttaccacctccctaacataggatggtgagtgctgctgataaacgctccagtcagtaaatctttatcacccggagtagatggacgccaagatgatcttatttgcgagctgtatagctttctggaacatagatctcccctccagcttcaccgtgttgctccccactgatcgttttccttgcagccaaaaactcagcactcatagcattcattcctggtattaccgcttcctccactatcctgtaaccatgttcatcagcatattttctaatatcctctgtgattttcatcgaacaagactttgggccacacattgagcagaaatgtgctactt

SEQ ID NO: 34428 - DNA, 451 bp, Oryza sativa
  Clone ID: uC-osrocyp006c12a1
caacgttcaacagctagcagatcaggcaggtgcctgcttatatgacgtttgttacgaaaattgtgatgagtggcagtatttcaaagtttctcaacgtttacagcccaagccacacaaatacaaccagagctttagaataggtgacaaacatgtcccagtgctattcagccttcctgggagacgaaaccgggaccaccaccaggcacactatgggaagtacagagggggagaagtgaattgctagtgtcaactgacatttggaaatcgacagccaaatcatgcacatgtgacgtggtatggttaactttccccagtactgccggttttttcagagcatttcttgtgatttccttacagggcgcctaaccttttttttgaagtcatccctgttctctctccattccttagcttgttcaatatttgctggtgattcatcatttggaccagaaag

SEQ ID NO: 34429 - DNA, 402 bp, Oryza sativa
  unsure (1)..(402): unsure at all n locations
  Clone ID: uC-osrocyp006d01a1
gaaaggaaattaaactgatttattacttgttccattaaaaccatcacactcgggtacgtggtgaaaccgtgaaagttaaaaaacaaaaacagtagtagtagagtgaggccctgctcgctgttacatgagaggtgcacgaagaaccagcacacgagcagagcatccagcccacacgcagcaaggaaacggtagggatgccgccgccgccgccggccgatccgccgcccggcgatgatgcgtcgtcgtcgtcgttcaggtgcacgcggaggcggagcggcgtgcggcgcggcgcggtcgagaggtgatgagtagttgacgcggagcagatatatatggatggatggcgttnatcgtcggtcggacgactgtgaggtcgcgcgcatcacgcgcgggcgtagctgc

SEQ ID NO: 34430 - DNA, 148 bp, Oryza sativa
  Clone ID: uC-osrocyp006d01b1
tacaattaacaaaaaaaaaaaaaaaaaaaaaaaagcaaagctaaataggatgattgcataatatactctatctattactgaagcaccaatggcgccgggggcgttctccacggtcaacccaagggtgttccttgacatccccatcggc

SEQ ID NO: 34431 - DNA, 472 bp, Oryza sativa
  Clone ID: uC-osrocyp006d02a1
acaccaatatagggggcacacattcaataaccaagaggtcgtgaatccattacagctttttaaaaagttcaacctggcactcaaataaaaagcttaactttacatagtcagccaaagacattttgacatttagaaactaacgctacgaattctgtagaggttacaccaaagtactgcggcagtagccactacgtagaattaaaattacaggctaccacaaataatctggttttctctgacaaacttcataatccagagcatagaaaagatacataagctagctgtccatttttttgtcaagaacaccatattgtaaagttaggcctatctggcaccactgcaatcctagatcagttaatgaggatatgctatgtttccttaatgaagtggtgagcaagcaactctgataatccagaactaggaatgctctcgcagccgaacagctcctgaagttttgagtcacataatattg

SEQ ID NO: 34432 - DNA, 378 bp, Oryza sativa
  Clone ID: uC-osrocyp006d03a1
gcaaaggcaaatacgggggggatgcaccttcctgaattggttggtgccactggaaacatataaagtccaaaatggcccaaatgatacttcaggaataaagtaattttcagaactagaaggaatcgactgcacactgtatatggactttgggatgcaggggaatgacttgcctgaattccaagtaccctactgacaccatacatgtcatataagccacatacaaagacatggggcgtcatgttttctaaatgattcatcgacccaaaagtgtgacgcggtccttttgaatgacctgagccaggttgagatcaaaaagctcacaacgaattggcatctccatctcgtagaatggatttttcagaacaaaatcccggtaga

SEQ ID NO: 34433 - DNA, 441 bp, Oryza sativa
  Clone ID: uC-osrocyp006d04a1
gttccaaaggcaatctgattaattatcaatcttctcacatgagataaataggtaaaggccatttagaattcatgaatttaatgaaaaaaatatcaagcctctgaaattcctgcaaaattcatacatttcgaacaggcttaagataccagcctatatgttggcaggggatttattttttctctttgaataagttgacatacgccagacagacaagtgtcttccatgcatggaacagtgcctctgatgttaaactccctttcctgctcctatcaaagcggcattgcctcgatgagattattgtggaatctttattgtttcacaataatttgcaacccatgcatgagcactttccaaaactcggagctcgccgacaagtagatctttggccatttcttttctgaatggatgcatgctcctagaggcagggccatcaacaatttc

SEQ ID NO: 34434 - DNA, 488 bp, Oryza sativa
  Clone ID: uC-osrocyp006d04b1
attcaaaggggggcggttgcggcggcgactgcgactgctctgtattcctgcgttggctgcgcagcaagtctggaacccacatttcttctgtattatctctcggaacctcctctgcctttggaaggtcattatttgcatcggagcccattcaagagggggactgtataatgcaagttccttaccatgttcttacccttgataaacttcctcaaaagtttaacaccttacttgaccatgctgttggagatacatctaagcttgctgcgctcctcatcatggagcaacacttgggaaatgaatcaggatgggcgccgtatattaaatctcttcccacaagggatcagatgcatatcatggtgcttggggatctaaatgagctcatgcggtccaaaacagctcaatttatgatgaagccattgaacacaaggtacaagctaaaaggaatttttggcactgaagccagctcttgattcatttccaatttggtt

SEQ ID NO: 34435 - DNA, 451 bp, Oryza sativa
  Clone ID: uC-osrocyp006d05a1
caattcaaaaagactgcccaaacagaccaagggtatcatcatagcagcaaagttttttaacacgcaacatcaaagagacactaatgcaataagataacttgaagcgcggatcactagcaaatttcgcgcttagtcgacctcctcgatcttggggccagcaccgttgccgcctgccgggggagcatcgtcctcgtccatgccgccggccatgtccgcgccagcgccctggtacatcttggcgatgatggggttgcagatgccctccagctccttcatcttgtcatcgaactcatcagcctcggcgagctggttgccgtccagccactggatggcctgatcgatggcatcctcgatcttcttcttgtccgctgccgggagcttcgaggcgatcttctcatccttgatggtgttgcgcatgttgtaggcgtagttctccagcgcattcttggac

SEQ ID NO: 34436 - DNA, 457 bp, Oryza sativa
  Clone ID: uC-osrocyp006d06a1
aaaaaaatacccgcattccacaacagccgaagggcaataatcaggctcagaacaagtttaaaccgaacagaaaatagggagttttaaacgacacagtgcacacagcgggcatatgataataacggtgaatgcaacgagtgccatggccgtgcacaaaacttaacgaattagtaaaagctagatatcttaaatgcagacacgcaaaccaccacttgaacgaggatcatttcttcttggcggcagccttggtcaccttgggaccgggtgggtccttcttctccacgttcttgatgacgccaacagccaccgtttgcctcatgtcacgcaccggaaaacgaccaagaggagggtacttagagaaggtctccgcgaacaaggggggggtgggaataatcttaaccataccagcatcaccggtcttgaggaacttgggctccttctccagctccttaccaga

SEQ ID NO: 34437 - DNA, 455 bp, Oryza sativa
  Clone ID: uC-osrocyp006d07a1
ttttggttttttttttttttttttttttttttttttttttttttttttttttttttttttttttttttttttttttttttttttttttttttttttgggggggagaaaacggcgcccctgggggggaccccccaggggggaccccaaaaaaaagccaaaaggtaaccctttaaacccccaaaaaaaaagggggtggggggaacccaattttaagggttcccgaacccgacaaaaaacggcccgaccccgggccccggccgaaaacgggaaacccggggaaaaaacccgaggaaaatggatttcaagggccccccccaaggggggaaaacaacgggtttaacccgggtggccccccagggtccccccctgaaaatgggggggacgggccccaacccgggaaaaacccgggccaacccgagggggggggcggacaaccacggggccttggggacggg

SEQ ID NO: 34438 - DNA, 498 bp, Oryza sativa
  Clone ID: uC-osrocyp006d07b1
tagacaagtagctatctatctctatctagcaagctagctaggttgcttgcattctctcctctctctcttcctgtgtcaccaatggcgccggcggcgtcctccaagtccaacccaagggtgttccttgacatcgccatcggcggcgagtgggttggccgcgtggtgatcgagctgctcgccgacaaggtgcccgacacggcggagaacttccggcggctgtgcaccggcgagcgcgccgggcgctccggcaagagcaggctccactacaaggggctcggcgctccacccgcgtggtgcccgggttcatgtgccagggcggcgacatcacggccgggaacggcaacgcggcgagtcggcgctggacggcgccgcgaggcacttccccgacgagggtgtcgcggtgaagcacgacgggcccgggtgggtgtccatggcgaacgccgggcccaacaccaactgctcccagttcttcatcaccgtcgacaaggcgcccgtggc

SEQ ID NO: 34439 - DNA, 468 bp, Oryza sativa
  Clone ID: uC-osrocyp006d08a1
agaacaaccagattctccatacagctgcaaaaagctactttcgcccaaaacatacgccatcggtctgaaactctgaatcctgtcggcactcactcagctcaagttacatctctgttaaaaccatgcatcctacaacaagcaacactcaaggatctgaatctagagaaacaacactataaccctggaaaaagggggttgacattcagaggattccaagaaagctagtagctgaaatcacccgtcgctggttaatgtcaaggcaaggacaacacaggtcagggtgaaaatgatcgtagccgcggcgaaggccaggatggccctctgagagacgccctgcttttcttggccggccagctcaacctctttcagcaggcctctgatctcatcgacgtccgagtccttcgccgcatggattagcctgttatgaacctcatcgagtttggcgagccttctagctcggctggcgtc

SEQ ID NO: 34440 - DNA, 439 bp, Oryza sativa
  Clone ID: uC-osrocyp006d09a1
acactatgattccaatgtttatatatcatctatcctacaagctgaatttggaattatacatcatctgtaaggtgagagaaatttaaatattgacatagataacccgttaactacggcaaatgtttgctgacttcctaagcagacgcctgacagctagcaagagccgagtggaacttctcatcaaatcatggtaccagtggcaagtcaataaaattagcagcgcaccatttcgtcgccaatctgctgcctaatggacctcagcatgttgcctcatcttagaaatatcaccaattctgcccgcaatgtttccagggaagtcgcattaagttagctcaacgagtctgcgcttcaaggaggatgttcgtggccgtgttgatgtcatttctggctcgcattagcgcctgtcttgcagcatttccatcaaagcccatcgaaacca

SEQ ID NO: 34441 - DNA, 451 bp, Oryza sativa
  Clone ID: uC-osrocyp006d10a1
actaggaaacaatggtatgtaggattctttatacttttgccaataactaaactgcccagttggtggcttcagaaaaaaagaaggggcaaatttactttgcaggagggttgctcaatgaaaagcaactcctgtttacatgaattacaacaaattgagctatagacttgcttgtcagaaaacaagcaaaaataaattacagaaaaaaatggtaagagaacaagcggctgtgatgtgagtgagggggagaccatgttacatgttgaatgaagttggtcaaattaattacaagctaacaaatcttgacatcatatatgcatcttcaagttcacccgccaaaccctcgttagcttccatggaattcttcatgttagtgtttgttatgtactgctccaatgcaccgtcaccccgaagaattttggctccacatcctggcctatcaattgaacctatt

SEQ ID NO: 34442 - DNA, 443 bp, Oryza sativa
  Clone ID: uC-osrocyp006d11a1
acgtgctaccaaactttataccattaggtaaggcatcagagcatctgtatatacaaatacattaaactcaacctcactcgcattcacatgaaccaaaggtgacatttcaacctcactcacaaagccacaagacagaaacatcaatacacacaagaaaggcatataaacatgctgcctagagcgtccttctatttttttggccccttcaatcttgatgccattgaaatcatgctgttctatacagaggtaatggccgagtaaacggcaaaatcacagaaaattcatagctgccatcatccttgctctgttcttcaagaaccctagagcttcagcttcatcagagctgggtgacggtgcgaatccaccaatatggaccatagaacatgcacatcctcatcctggcaagacttgacatccttgtacagaatgtgcattcccctccg

SEQ ID NO: 34443 - DNA, 438 bp, Oryza sativa
  Clone ID: uC-osrocyp006d12a1
agcaatgtaaatactcgcattccacaacagccgaagggcaataatcaggctcagaacaagtttaaaccgaacagaaaatagagagttttaaacgacacagtgcacacagcgggcatatgataataacggtcaatgcaacgagtgccatggccgtgcacaaaacttaacgaattagtaaaagctagatatcttaaatgcagacacgcaaaccaccacttgaacgaggatcatttcttcttggcggcagccttggtcaccttggcaccggttgggtccttcttctccacgttcttgatgacgccaacagccaccgtttgcctcatgtcacgcaccgcaaaacgaccaagaggagggtactcagagaaggtctccacaaccatgggcttggtgggaatcatcttaaccataccagcatcaccgttcttgaggaacttgggc

SEQ ID NO: 34444 - DNA, 471 bp, Oryza sativa
  Clone ID: uC-osrocyp006e01a1
gccatgcagcaagtctaaggtttcatcacacacgactcaaaatgtctccatccactgagaagcgagcacacacaatggtgacgatccaagtcctccgctaccaaaccacgacagatgctagcattacaagttttacaacaagcccaaaagggtttttacttaaactggtccggtctgaccaacaagaagctagagaggatgtagcacagcgtgcgcagtgttcttctgttagtcactgcgggcaggagacccgtcggcagacctggagcgggatcctggaggcgatcctgaggattgcctgggggacctccggtgcggaggggatccatcgctgtcagctggcggcgacctcttttcataaccattatcagcatcacgccggtccccatctttattggcaggagaataggatctccgcttcttgtctacttcatgttcttttggctgacgcctaggagattttgcacgatg

SEQ ID NO: 34445 - DNA, 469 bp, Oryza sativa
  Clone ID: uC-osrocyp006e02a1
aggttcaaatccaacttattcataaagcatactgctgtcccacaggaaactgtttcataaaactaacatatcatacggactcgatggtccattaaaccagacacaagtagacatcagcaccacaaatacttgacgaacagaggctcgggatgaccaggcacatgggcagctccaccaaactggctgattactgaccaccacggaggcggagcaccaggtggagggtggactccttctggatgttgtagtcggcgagggtgcgtccatcctccagctgcttgccagcgaagatcagacgctgctggtctgggggaatcccctccttgtcctggatcttggccttcacattatcaatggtgtcggagctctcaacctccaaagtgatggtcttcccagtcaaggtcttcacgaagatctgcataccaccacggagaccaagcaccaggtggagggtagactccttctggat

SEQ ID NO: 34446 - DNA, 461 bp, Oryza sativa
  Clone ID: uC-osrocyp006e03a1
gattacaaaattgacaactgagaaaattttatatccataaagattcatccagatatgcacaaaatgatcatttcttgagctagatatcctcaccttacagttgatttaacatggatacagcacatgaattctcaagagtgactattcacttgattattacaaggatatagtgctctcaatactagtcttctttacagtgaactcagggccggatcaggtagtatattgtagatacagctcatagaagggaagcagccatgtcaaacagcacaaggcccaggggtcatcttctgcctcctctcatctaagtctagggtatgaacaaaagccggcaagcaacagcgaccggtgtaccacgccttctccttgcgattcttcgcttctctgatcggcgtcggttctgtgctacacgtggagctggactcagatactggcttcacagctgcagaaataggctggaa

SEQ ID NO: 34447 - DNA, 462 bp, Oryza sativa
  Clone ID: uC-osrocyp006e04a1
aggaaacgacttaaataacagaacagtcaggtagaacagactaccagactgaaacggacttcacaaggtagggtacatatgagttcaactgggcacaacagccctcaaaagtccattcatacttcgttggggggagagtggtgacttgatggttatttaggtgataacgtcgttgggtttcgacacgtccaccagtttggctggctttagcccatggcgtacttctgtgtccaggagcgagcggtggattcatacttggccctatcagtcttgtacatgtgagcaatctccggcaccaacggatcatcggggttcgggtccgtcagcagtgaacaaattgacaggaggacctttgatatggtaagtgcaggactccactgttccttgaggatgtcgaggcaaatgctgccattgctattaatgttcgggtggaaaaccttggtgcggaaagagaccttcggt

SEQ ID NO: 34448 - DNA, 516 bp, Oryza sativa
  Clone ID: uC-osrocyp006e04b1
ctcgcagcttcctcttgtttttcttggccgaaccccccctcgacacgccgtcgccgccgaggggagagagagagaggccgccggccgccgctaccactgacccccccccctcgccggagcgccccgtcgccggtcgggtttgatcgatggcgtccaagaggatcctgaaggagttgaaggacctgcagaaggaccctcccacctcatgcagcgcaggtcctgtgggtgaggacatgttccattggcaagctactattatgggaccctcagacagcccatttgctggtggggtattcttggtgaacattcatttcccaccggattatccttttaaaccaccgaaggtctctttccgcaccaaggttttccacccgaacattaatagcaatggcagcatttgcctcgacatcctcaagaacagtggagtcctgcacttaccatataaaggtcctcctgtcaatttgttcactgctgacggacccgtaccccgatgattcgttggtgccggagattgct

SEQ ID NO: 34449 - DNA, 450 bp, Oryza sativa
  Clone ID: uC-osrocyp006e05a1
ggtacaattcttattcattccaaaatcaattgccattgccaatcacacgccacagcagcagcagcacacccaatcacaaggattgcattattctcgatcgattgaacaaggcaactaagagtttccaaaccgaaggcaaacctctcagaggttggccggcgccggagcctccacggcggcaggtccgacgacgaagtccagcacgagcacctcgtcgagcagtggcctcaccgccgccttggcctcctgcaccttcccgtccccctccaccgtgtcgagctcctccacgctgtcgaacaccgccaccatgccgaactggtaccccttagcccgcgcgggggaggaagttctccccgaagctcaccctggcgcccttcgcctcgcccgccgccgacgtcggcgcggcgaccttctgcacgagctggggcacctgcacaccttccttcacct

SEQ ID NO: 34450 - DNA, 446 bp, Oryza sativa
  Clone ID: uC-osrocyp006e06a1
ataacaaaatcaacatatatcaatgtaattgggttattctcacgttcatcacatcgaggaagtccaaatttcattacaccgtttctcagaatctgtaatgcagagagagcatacataagcataacaattatgaccacaaccctatcttgaccaaacccaaaataagcagagttaatgtacaatgtaattttagagcgtctactagattgtttacagccaatgcttctggggctagccatcccattagcagaaaacaaaaaccatggaagccaagagaccaattcagaagtgatgaaacagcagatctagatacaactgtaatacatatatgaacacagcctaccatatcgtctgtcgagtggacaaaattcgaactcgtaaagtcaggatattgtcatggtatttggtagattttctccagtccaggtctcagatttcacggtctc

SEQ ID NO: 34451 - DNA, 483 bp, Oryza sativa
  Clone ID: uC-osrocyp006e07a1
ggcgacccggcacggtggctggagatcgccgggaagctgctcgcggcgcgggacctggtcggctgcaagcgcctcgcggagcgcgcggtggacgcggagcccctcctcccgggcgccgacgagctcctcgccgtggccgacgtcctcctcgcgtcccagcgcctgctcccctccggccgccccgatcccatcgccgtgctccacctccaacccaaccccgaccccgccgaggtcaagcgctcctaccgccgcctctccaacctcctctcctccaaccctcgccccggcgctgacgccgccctccgctgcgtgcaagaagccttcgctcacctctccgattcctcggctaatcccgctcccgctctcgctcctcctgctgctcctgcttccggcggcgacgcctctgccgccgcggccgatgcgttctggacggcgtgtccgtactgctgccatgtgtaccagtaccagcgtgctctgatgggc

SEQ ID NO: 34452 - DNA, 407 bp, Oryza sativa
  unsure (1)..(407): unsure at all n locations
  Clone ID: uC-osrocyp006e07b1
aatagncactagaagtattttctgcttcattgctcattgacggaaacaggatgcacacacatgcatatggcccatacttattttcagttaggacttaggacatccacaacctagctaacaagtaacaacgaagaagacaagtataaattacaagctaccgatatcctgtaaaccaggccatgtgaatcctcttattcagctgctttgatataagtactcaaggaatcaactgatgtcacaaaatacagagcgattttgagatgacccagacatcggagctccatgagactcagttgcatgataaactcttcgttaagccttgctgatcatccatgtgggcatgcagagtgcattatttccttcgccagtaaactncttcaattaatttgcagctgataaatactaca

SEQ ID NO: 34453 - DNA, 465 bp, Oryza sativa
  Clone ID: uC-osrocyp006e08a1
ggaactcaaacaaacaatctgagatgacacaaacataggacactcttacactgatcgaacacatagagaagtcgtctccaaaaagaaaacaaacatagcctgcaaatctccaatacatcgctagaaaaacgaatcaaacataactcgatactacagatgacaagagcagagcacttgagaaaatcagaagcatttcctgaggacaattgctgggccagattcggcggactcgtcctttgatatccacatctgttggaaagtgctgagtgaggctaggatcgaccctccgatccagacgctgtacttgcgctcaggtggagcaacgaccttaatcttcatgctgctcggggcaagggcagcgatctccttgctcatacgatcagcaatgcctgggaacatggttgtaccaccactgagcacaatgttgccatgaaggtccttcctgatatacacgtcgcacttcat

SEQ ID NO: 34454 - DNA, 390 bp, Oryza sativa
  Clone ID: uC-osrocyp006e09a1
ggccccccaaaatatgccattttttatgtctcatgaaagggatcccggggtttaagtttcggggcaaagagggctcccaaaacgacattttatttttgaaccccacataacaggggttttttgacaataatacccaaaatcttaattccagaacttaagggaatctactaaaacttcatcaatcataaattcactggggcacaccaagccccttggagaaattctcaaactttgggtggccactggcaaaaatcatggttttgtaccatgcctttccaggagccttggttttagaagacccccccgggctgagcttggtcctttgggaggcgagcttttaaggcctgggcttgacacccgcagcctaagtgagaggtgccattttgggcc

SEQ ID NO: 34455 - DNA, 488 bp, Oryza sativa
  unsure (1)..(488): unsure at all n locations
  Clone ID: uC-osrocyp006e09b1
cactatccacctcgccgccgccgccgccgccggaaatggccgccgccgcgcgccccctggtgtccgtgaaggccctggagggcgacatggcgacggactcggccggcatccagatgccgcaggtgctccgcgcgccgatccgtcccgacgtggtcaccttcacccacaagctcctctcctgcaaccgccgccagccgtacgccgtgtcgcgccgcgcggggcaccagacctccgcggagtcgtggggcacgggccgcgccgtgtcccgcatcccgcgcgctccctgccggcggcacgcaccgcgcggggcagggtcgcgttcggcaacatgtgcgttgggcgggcggcatggttcgcgcccaccaaagatctgtgcgccgctggcaccgntcgcgtcaacatccgcctccgccgcatagccctcgcgtccgcgctcgccgtcaccgcgtccngtcctcgtcctcgcccgcggcaccgcatcggggcgt

SEQ ID NO: 34456 - DNA, 442 bp, Oryza sativa
  Clone ID: uC-osrocyp006e10a1
ggatggatacggtgggacccgtatgtcattagcacatggattaagaagggattaaaacaaagattaagcacaatagggcccacgtgtcatggagaccttagaggaggattaacaaggtgattactgtgcacacatgattaaggaaccatgggtcccgcatgtccgtgcctcacctgctctgttttatccccttttctttcctgctcctcttcttgatctctcctctcgttcccctctctgctcctctccaccgagcggcgcagggcgaagaccggcgtgggcgcggggcgctgcggcggcagccggcgttccgacggcggacgaggcgggaccggtgccggcgcggcaacgacagccgatgcggcgacggggaatgcaacgaggcagaggggcacgcgaggaggcggtgctcgacgcggtgtggcggcacaacggaggaaga

SEQ ID NO: 34457 - DNA, 66 bp, Oryza sativa
  Clone ID: uC-osrocyp006e11a1
ggtcggtgcggccaccggcggtacggccggtggcgccggcacgcccccgcccggcagccccagatc

SEQ ID NO: 34458 - DNA, 66 bp, Oryza sativa
  Clone ID: uC-osrocyp006e11b1
gatctgtttctgccgggcgggggcgtgccggcgccgccggccgtgccgccggtggccgcaccggcc

SEQ ID NO: 34459 - DNA, 479 bp, Oryza sativa
  Clone ID: uC-osrocyp006e12a1
gccgccgccgagggcgccgttgctgctgctgtccaccttgctctgcttctcggggacgcggcgcacgctgcccttgtcctcctccacgggggtggccggggtcggggtggcggcgctgccgcacccgtggtggcagggcggcgcgcgcggcgcggtgaagaggatctcgcagatgcggtcgcggcggcgcaggagctcctgcggcgcgtcggcggcggcgacgaggatggcgttctcgatcacgtcgcagattccggcggagccggccgccccgcggaggagctcgcgccaccgatccagccggtgggacatcgccgccgcgggcacccgaggtcgggctgcccccacctccacctgcacccccacgactccggtggctcccctggcaccaccaagaatagatgccctctctggtcacctgctgctgctgctacaatcttgaatttctttctccccttatcagattacgttgcaccaaa

SEQ ID NO: 34460 - DNA, 314 bp, Oryza sativa
  Clone ID: uC-osrocyp006e12b1
tctttaagctgcgacctccgttgcgcgagagagagaacgagtcgaacggaaggagttgggaaagggagacgcgagatttgctgttaccactaggaggccatggtggtggtggtggtgtgcgtgcgggggaattaggaggaggagcagttgatggtgattggcataccatggctttacccttgatagagttccttaaaagtttaacagcgtactcgtccatactcgtggagatactattaaacttgcttcgctgcatattatgtagcaacagttgggaaaggaatctagctgctgcggcggatactaaacatatt

SEQ ID NO: 34461 - DNA, 317 bp, Oryza sativa
  Clone ID: uC-osrocyp006f01a1
ggactgaacccaggcgggaaatccccacaggattaatttcgcggcacaagaggttgttggagcattacatatttagatgagcggcacacccaaagaacccggagcaggtggccaaagtttagacccatacatagggcacccagtgtttgcatacaagaggatactaggggattatggcggctttttttttttttttcggattgagcaaagagatgccccccccatttttttttgggggggggggaaccccgcggggaggaagtttttcggatgcttcccctcagaatgctttttgcacttggtctaaaagggggggc

SEQ ID NO: 34462 - DNA, 408 bp, Oryza sativa
  Clone ID: uC-osrocyp006f02a1
gcttgcaatatttgcatggcatatattcaatctatattcaaatacctccaaaatatttgactcccctgacccaaccataccaaatgcattcacataaaatctgtttgttcagataccattttagttaatagacccatctattagaagaagatgaaagaaaaaaggtaagtctgaccgcattgattcaagcagcaggtccaatacatctgcaaggagacggttcgaaaggtaagtcgccacattgactacaaagagcagagccaacagatcctttgcatctctgtctcatggatttcccaaattcatgagatacatcaaatgtaccgagcagaaagttttcttcaacatgttaatcacattatcccttgtcctggtcctatgactccaattaaagaaggcctggtgaca

SEQ ID NO: 34463 - DNA, 456 bp, Oryza sativa
  Clone ID: uC-osrocyp006f03a1
gcacaagaagccaaacgtgagagcttgtacaaaacttcagctctcttcaatgttgactacgctaattaaaattgtaactccataaaaactcggctacgccgagaaaactgtaattacaacagatacggcgtagccaattcacgcaatgcgcacccatacggctacagtatggttcatttaacgtctgatagacgatttcttaaggtgctgccgcaggtggcgacaaatactgaaaacagcgaggtaatccaataaagaaataacattggaaatcctctccagcggcaacccaagtctctaaatgatcataatcactcgagttaccctgcaacgcaaatttgtacccgggttgcgaacgggcagttccatttgtagaattgtagttggtgttacgggcaaaataacaacgagcgtcattttcccaaggcacttcagattcaacagtaggatttactc

SEQ ID NO: 34464 - DNA, 388 bp, Oryza sativa
  Clone ID: uC-osrocyp006f04a1
atatggatattaatgaatctagacagagatcataccttaattgtacaactctacatgacaactaggccattcaaagcacgcaagacaggatgcagctgcttgaacggaaaacattcacgggggtctgtcttattaagccacctgtaccgggaaaccgtgcccgggccgcattgaccgtaactgtaacaacagcatggcttcctcgagccctaccaagagcggtacgaccttgagcacctgcctcacgtactatgacattaccttgtagacactggcgccaacgttgctatccaacatcgggacagacaggtagacaaccagggacagtgcgtggtgacaaaagtggatccaccttgagctgtagagactgatcacatccggcctatgc

SEQ ID NO: 34465 - DNA, 307 bp, Oryza sativa
  Clone ID: uC-osrocyp006f04b1
atgagagcaatgctttgacttggcatcggacatgccaattgctgtcgggtcccaaaagccggcaacttgatgtgcagatgacagcgctgcatcggcagcagatggcaccgagccgtcagctaatagctcggctgtacccggttgacacggcataaccaaccgtcacaacctgcagacagagactagagcctctggtgctgctgacagtcggggacagcgatagcagctctgacgaccagacaacgcggatggtgcggaccatgacacgggcgatccggagcacggaagagctcgtcaagcacctgac

SEQ ID NO: 34466 - DNA, 392 bp, Oryza sativa
  Clone ID: uC-osrocyp006f05a1
ggcaaaaattgcaacatcaccatgcaaataacagaacgatgtcataacataagcaatttccaacttacaaaagcttgggttgggttctttctcagtaggaaaacatatgtccaagcatgggaacttagttccaagatatatatacttggctctacaactaaagaggcaatcttctacacaaaagaagcctacaattggggctgggcctcttcctgttattgggtattatgtacattgactgaaaccaaaactgcaaattcacctaccaaaaggggctacttttctttcctgtaagttaaaatgattaaactagtttacttacattccattaacaatcaaaatctgcaagaaccagaagcatttacactgatttttcagatgattcctccatg

SEQ ID NO: 34467 - DNA, 463 bp, Oryza sativa
  Clone ID: uC-osrocyp006f06a1
gtcttgtcaaatctataacattaaggtgatcatgaacattcattgcaccatactgataaaacgagattgggtatctgacaactaataatctaaacaaagtttgtgcagtaccatgcaatggttgctctgcaactcagtacataaaaaaaacaaaaacaaaaaaatggcaaacaaaattcctccattaaatattaggttcatatggttccaaagtagccatagaaaatatccaggtagatcaataggacaaagatgcttgaactagtttcctccttagttggttactctgtacttcttaacagtgttaagcagaatctttgcttcactgttgttattgaagtggtcacgaataggctgcaatatttggtttattgcttttgctagagctggcttaacatcagcaggatgcaaagcaccagtcttataatcatcgatgagttcatcccatgtttgaaatgtcttg

SEQ ID NO: 34468 - DNA, 445 bp, Oryza sativa
  Clone ID: uC-osrocyp006f07a1
aacgacacggagcgcgacacgtggcagtacgtcggctacatgttctccaaaacggcgcgccaactcatgctcgcacgactcggcttggacccggaacgcgtcaacgccgacgtcgaacaattcaaaacggcgcatccggcaagcgatttggacgcgaagaagaccgacacagttgccggtggcgataaggcgacgccggccgtcggcgccgacggcgccgttgcatcgaccgccgcctcgtcgacgtcgaccacgtcggcgccggaggactttttcgaccgcgtcgccaacggtggcttgcccgacgcggacggtgccaagacgcccgacgccgctgcgaagccgtcggcggccgacgcgtttgcgttcttcttgccggcgacggcaccggacgccaacatcgagaatttggtcgcacgcacgctgttggtgggcaattttgcgg

SEQ ID NO: 34469 - DNA, 386 bp, Oryza sativa
  Clone ID: uC-osrocyp006f08a1
aggatgaagccggtctattaaaacacgcttagggcatcagccccctgaccatttatcaggcagggtgccttgggtggaaacgagagcatatgcccgaaactagtaagatgtagctatgaacaagacattgcacaagaaacaatggataataaattaacaactcaaatatgcaacagataatagatcaacacagggccaacatatttttacatcttgaacaaaacaatggcgacaatctcacggacagcagggcacttcatccaccacaacgttgcaccgttcaaatggaagttggttgtcctcaccaccgtctccattcagctctgatcgctctgttgtttgtagaagaaggtagagactggccgcgtgtgaagccattcatgtct

SEQ ID NO: 34470 - DNA, 314 bp, Oryza sativa
  Clone ID: uC-osrocyp006f08b1
tctttccgaggacatcttgtaaggagacaagctgcatgaacccttcgtgtgacatggttgatcgcgaaacttcaagctttagttcgaggaagaaatgttagactctccggtgcttccattcaatttgttgtgaagtacggccaacataagtttctgagtgataaaccatcgtacgcttgcaaagagatggtttcttcaaacgcatatgttcgaaagcttctatcttcatcaattgggttagaagctcttcactctcagtatgacaagagggaccccaattcattgtacaactggttggaaagaccgactataag

SEQ ID NO: 34471 - DNA, 385 bp, Oryza sativa
  Clone ID: uC-osrocyp006f09b1
ctgacgcgtgggcggacgcgtgggctcagagaggaggcgtgttggttagctcattggcagcagcacacacaaaccacatctcctatatatagctcatttttagcttttggaatttgagagaggttttgagagaaatggctagccaaggtgtagcctccatgttcgctctcgcattgctcctcggtgcctttgcctccattcctcaaaaggcggaggcgatcggggtgtgctacggcatgagcgcgaacaacctgccgccggcgagctcggtggtgggggatgtaccgctccaacggcatcacgtcgatggggctgtacgcgccggaccaggcggcgctgcattcggtgggcggcacggggatcagcgtccgtcgtctgcgcgccc

SEQ ID NO: 34472 - DNA, 470 bp, Oryza sativa
  Clone ID: uC-osrocyp006f10a1
tttaagtccccttcattctagggaaatcaaatttaatttctggtccaggttgagatagttgagctgaattatgtacagaaataaagcggtgctacatcatcggtggggaacaagaagaacgagtttaaacatatatatgatacagaatagataagataaaaatgaaaacacttctcccttggatcatagagcctccaggtttgcaagttttagctttttttcaacagccaagtgatcttccactgcaatgcaagtacagcgcagaatattggcaagaaaaatagccatttcagcttcacttccatgaatatggtcatggcgtgcgaggccgacactatgagtcagctgttctgcccaagtgtagatgcgagcggtcaacaaccataacttatcagcaacagagttccggaggtcatcccaaatgctgctagagagaaacgaaggaagggtgacaggcaagtcactcagta

SEQ ID NO: 34473 - DNA, 451 bp, Oryza sativa
  Clone ID: uC-osrocyp006f11a1
acagaacagtacagttttccagatttcacataaatgatcttccaggtataatgcaccaattgcattccacaagcagcactttgaaattttggtagagcaattgaactcatgatctacttgaacgagtatatactagtactattgatcaaccagcatgtggaacagcagctcgctccacaggtcaatcggccccggcaagcaccaatgcaggcaatccacaacgaagctgccctccacgctgccgcccggcgggtgcccgtaccggctcgggtgcccgtccggccgcaggtccatcgcctcggtgatgtccagcagccgcagctcgccgacgttcctgctcaccgccgcctccggctgcctgaccgcgtggacctgcacggcgaggtactcggcctcgacggcgcccagggcgcgctcgtcgcgcctgaacgggcgggtgcggacgcagtcg

SEQ ID NO: 34474 - DNA, 462 bp, Oryza sativa
  Clone ID: uC-osrocyp006f12a1
gacaggaccatatgcatggactttgcagtacatacatatgtaagtttcattagcatgcagttcaatcacaactgaaagtgaaaccacacggcatctgccgcattcaggcccgagaagtgggctctacatgtcacaaatttttcccttttttcacacgccgctgtaactagcgacaggggccttcaaaattcaacacccgaagtttttatcacagcagcaaacactaacacacgaaatcgcacgatttcggtacctccaatggtataccacaaacaaccaaacaccagtatatatctctctcacggtaatgttagctctaatgtgatcttttcacatcgccaaagaagccagtatcaatccctgattagtctgtaccgaagtagcgatcaccatactctcctaaccctgggatcacccggtactgctggttcaacccagtttcgatctctgaggttacaatct

SEQ ID NO: 34475 - DNA, 483 bp, Oryza sativa
  Clone ID: uC-osrocyp006g01a1
gaataaaataataacagggagtgcttatatacaagatttacaatacgtgtttgcaagtttcatgtcatttgtgatggatgaacatcattggaacctatttactcttcattgacatcaaaaaatggaatcgctgtgtataccatcattcgcttttttttttgtgtaaaagacataggatacaccatggatggtacatatggtacatgaactaaatgaattgcgttggagccgggttaacgactaaaacaagaagcagatgcttctacttctggacacatttgtatctctctgacccttgtaaaaggcagagatagcaatatgctctgaagcgtatgtgataaaagatgcaagcacaacaccaccagcaaccatcaatcctagcttcgaaataatgcagtcacacccaagagagtcggtaacaattcagtgacaatagctataattgccatccctgtgccagaaaatgttgcatctatgtcacag

SEQ ID NO: 34476 - DNA, 399 bp, Oryza sativa
  Clone ID: uC-osrocyp006g02a1
aagggacaaacaaatatggctcactgaattctcattgagaagcagttatcagaatgtgagcaacatacatgctatgtcaacatcttggaaggatcacaattgtaaagtatctatactgcattaaaagaacttgagtataccataacataaaaaggattatttcacatgacaatctcaggtttcaggatgcttgatttgatctctttgtgcgggagaataacaccgccgttggtatagacctcatcacctacatgtacggcctctcctaggatagtcatattttctatccgggcccattgtccaacagttgagtgccatccaataatgctgtttgatatgcaagcatgcttcttaatacgcacgccacgcattaccgtgcaacgggaaagcctcacacca

SEQ ID NO: 34477 - DNA, 435 bp, Oryza sativa
  Clone ID: uC-osrocyp006g02b1
tgttttttcctctccctcagtccctctctccggccccctcctcccccaccggcgacgccgcttcccctacccttcagccagcgcgccctccctctccccccaccgacgacgtcgcttcccctaccactcacccagggcgcccttcccttcccttggcagccggcgtctcagccgcggtgccctccccctggctcctcggcggcgtcctcaccctcttctccgccacaacacaacggacggtatcgacagcctcggcggcggcaccctcctcgtagaagcggcgtcctcgcctcccatgaccagtggcgtcgcttatttagttttttggtgcgcagtactgtgctgggctggtgggctgcttctcctccgctctgtgggctcgctggtgggctgcggctgctatctgtgccggcctgctgctgctttgggtgggct

SEQ ID NO: 34478 - DNA, 440 bp, Oryza sativa
  Clone ID: uC-osrocyp006g03a1
cacaaatgtatacccttctctttatgtacatcaccacacaaaggagagaggagagctactagtacaatactgggagtataccaggtaaccaacaagaaggaaaaaaaaaataatagccaccctatcttaccccatttccccaactcttataccatccttctcccaaatacagattctttttcccttttacccccaccacacccaaattaatttacaccgttaaaatcccccttataccacacaaactatacccccgtcccgtcctcccgccacaaaaccaagaattcaactgacactactactttcaccaaattcacatctaggctttagcaaaacccatccttattggcgttgccaaacactagaaattgcagttacctaggctgcgggcgcgctggaaacgacttcacatgcctcatctgtggaggggttgaggagcg

SEQ ID NO: 34479 - DNA, 383 bp, Oryza sativa
  Clone ID: uC-osrocyp006g04a1
cccccaaacactaattcagggggcaaaggggaaaaaattccggggggagaaaaacaaaataaaagttggggttgccccccactaaaaaggaaaaggggggagcgcatgcatgcccatgcccagaggcgaaaaacacgatttgggggaacaaccccaaggggcacacttgcacccccccccgcaggggaacccggtcccttccccaagggaaaggaaggaaggccgggagccggggaaaacattccataatcgttttgggggccaaaaagggggcgggcaaaaagggcggaaattttgcaacggggtttcgctgggctaagccccccacaaacagagcgcccaaaatcgggactcaaaacaaaaagaattggggagggggggca

SEQ ID NO: 34480 - DNA, 438 bp, Oryza sativa
  Clone ID: uC-osrocyp006g05a1
attgggtcgtaggactgcaacgattcgcctcacttgcatttgcaactcaaaaaattgacaaagattttgtgcgtcttattggtgaaaaacatgagcaggaaccaacatatgcatcgaatatggtcctgctcgctgttgggcggctggcagcagcagcagcagatagtaagaaaacaaacacaacaacgtttctgcaactaaaagattaattctacagtgccttcaggagtggaagactacagctcagaacttcgtatcttctcactgacagtagaaccaaaagctggaccgcccttgcggtagcacacaagaaactcaaccgggtaacccttcaatttgtgaggcacgattccgaggtccgaaaaggtgagagcattatcagacactagggtgtctacagaaaatgcatcaatctgatctttgttgaaaattgatggg

SEQ ID NO: 34481 - DNA, 383 bp, Oryza sativa
  Clone ID: uC-osrocyp006g05b1
ctccgttcggcgacgatgcaggcggcggcggcgtggaggcgtcacctcctcgacggcaacatctcccccaccaccgcggcggcgatctccgccttcagatccgcctcccagccggcgctcgcaccccaaggattgggtggagcggatggcgcgaggtacatgtccgcgagggcgccggcggtcaaggggacggggcatctcgtccgcaagggaaccggagggaggtcgtctgtgagtggaatcatagctacggtgtttggagctactggatttcttggccgctaccttgtccaacaacttgcaaagatggggtctcaagtgcttgtaccattcagagggtctgagggattgtcaccgacacctgaagttgatgggtgacccgg

SEQ ID NO: 34482 - DNA, 431 bp, Oryza sativa
  Clone ID: uC-osrocyp006g06a1
ggacacaatgattagggatcacttattcattatagttcttccatgctgctctaccacagcaaaacgtttcagacaccatcaaaccagacttaaggatacacattacaggtaaatagtacacaatgaaacgggacacgaccaaggaccagaccagacaaccatagctccattggggaagacaaataggcagacttgtgaaccctagaacagcagcagctccatggctgaggacttactggccaccacggaggcggagcaccaggtggagtgtggactccttctggatgttgtaatccgcaagggtgcggccatcctcaagctgcttaccagcaaagatcagacgctgctggtccggggggatgccctccttgtcctggatcttcgccttcacgttgtcaatagtgtcggacgactcaacctcaagggtaatg

SEQ ID NO: 34483 - DNA, 471 bp, Oryza sativa
  Clone ID: uC-osrocyp006g07a1
gcgtagccgaaatagtctactattccattatattctagccggcaccagttgcaaatctgcattttacagtgaattgaacaatgaaagtatagctgtcgaatcctctcaagctttctaaagtatttccaaaacagaaagaaaaaggcaccagtgatacacctcactaatgcaaccgttcttcataaacaattcctaaaaggttcatccgtgttgacgtctaaagaatagcagcctaacttgttctcctcgaggaacagccaatccagggctcaatggcaaaaggttgcagccatcacttgggcaagttaatgaagcccgtatatttgctcactgaacagatgaataactacaaataccaacttagtaccggtacttgatatcatctgcaagggctttggccagcagtataatctcatgaggagaatatttgcaacttgcagctgaataaacaccacaagttgcaatatttag

SEQ ID NO: 34484 - DNA, 452 bp, Oryza sativa
  Clone ID: uC-osrocyp006g08a1
aagcacaaaaaatacatatatattgaccagtaaactgatcacccggggtcacaaccaacacttacacatgtaataatacatactggccaatggttttttcccagaactaattaaactttgcaagcataaacaaagacaaaacagacagtttccaaagttcagagagttcagactgctcacagtaaaccaaccaacaaaaacatgtagacgacgtgtagcacactgtcaatcgatcgatcgatcgatcggctgcagtgtcccaatgtgattaagcacactggtagtcggatgggcagatcttgccgcagttgttgaggatgaggctgaggtcgatggggatgttgaggttgaggccgagcacgttggccttgatggcggtgcagaggcagacggcggcgaccaggtcgacgaggccgtctagcagcgagcagcatggctcgtactgggccacc

SEQ ID NO: 34485 - DNA, 397 bp, Oryza sativa
  Clone ID: uC-osrocyp006g09a1
caggcaaatgcatgcacagttttacagaagcaaagcaacgggttcccaaaggtccacacttacagtacgttcaacgtacaactgatccaagcaaatgaaacaggtttgatgatgcactgatgcgagaaactaaacggttggatcggagtcggagactaggcgatcatggacaagcggcggcggcggcgatgagcttagtagtcggtggtggggagctgctcgtgggtgtgggagatgaagaggacctcgtagatgacgccggcgaggccaccgccgatgagtgggccaacccagtacacccactgggactcccaggaccagctgacgagggccgggccgaaggagacggccgggttcatggaggctccgtcgaacgcgccgccgacgaggatgttcg

SEQ ID NO: 34486 - DNA, 408 bp, Oryza sativa
  Clone ID: uC-osrocyp006g10a1
gtcatctgaaatttctttacaatggtgtattcacagtcactgcagcctcattgatgtcacacatacacagtcagagagatgattaattaggccaagaatgatattgcaaactcaattagagaaaattaagctcctaattaagattacacgtcgaattctttaaccactcctactatcttttttactccactaaccacgcacgacgaacttttttttactgcgtgtaccaaattaatgcgctactacactttctccacctcccggcggtggcctcctcctcgccgccgtctcctcccgccggcggcgccggcgacggacacgggcacgggcacggacacgccgcacaccgtgacggcgtgcctacccagcatccgcaccccggcgcctcctgatggcgccttcttggcc

SEQ ID NO: 34487 - DNA, 452 bp, Oryza sativa
  Clone ID: uC-osrocyp006g11a1
catcgactagaaaatttcaaataggagtagcagaactgggatgcataacaacggtttaaacaccttgattgtactatcatgagtcaccatactactaggaataagggggcacatgtttcacaaaactgatgatgcacgaaagcaaagcttctcagtatttgatcggagcaagaatctccagctgaggacccagcttctcctcggctgccttctcagccttgacacgcagcttcgccagttgcttcctcctgtcataggcaaccttggccttctccttcctgttctcctaaagctccctgatggtgtcggtttccggtacgggtaccatatcaatatgcttagggggttttcttggaagtctgcttacgttctctatccctttggccgaagcctccaggtactattgggtttcacaaaacctgcggattttcctacagtgctatacctacacc

SEQ ID NO: 34488 - DNA, 73 bp, Oryza sativa
  Clone ID: uC-osrocyp006g12a1
atctgaagttgcaaaccaaagctttattagaagttggtaccggcacacaagctagcaccggcccttacaacaa

SEQ ID NO: 34489 - DNA, 446 bp, Oryza sativa
  Clone ID: uC-osrocyp006h01a1
ggtgaaaatttctcagggtatttgtctacttgcacgaaagcatctaatgttacagattattatacatcagaagttcaaacctgcatttctcatctattggcactcgaaatcgaatacaacacgatatgtatggtaatagtgatgtaaccgccaaaaaagaatacatatatagcacatacacataatctacaaaatcaaaccattcccatgactcaaccttgtataaacacctggatgaagcagagtggctcaaaggggagatcgctttccgcacctgttgttgtccatccaagtcagaaaattgttcaaaccttctctcctggatcttatgaactgtgtgactgtataagactggtatttgctccagaaatttgtgactagctttcgtgcacttgttgttgaagcgttggccatgcagcctcctcgcattactgatccatttacag

SEQ ID NO: 34490 - DNA, 437 bp, Oryza sativa
  Clone ID: uC-osrocyp006h02a1
acatgaaagtttattgtattaaaacacacggcttagcaaaattaggaagcgtgctcataaaaaatactgtaaggaaaaaaaaaagaagtgaagaaccagctatcgactcaaaattgaatgagaacgtgatcaatcgaaaaacttcacccctctatcaaagtcctcgcagaccttgacgtgcctggccacgccctacttgtcgacgacggcggccatttcccggaactccggctggcccacccgcggcggcgtgaggttgcacggctccatggacacggttcgactgcacggaagagcggggaccctgtggccgtgcgcgggcatcaggatcgtagggcgacgcccgcgaggctgctgtccaatacccgaacgtgacatccggacgtgacagctcagggaagccctgcaggggatctcgcagctctttgtccagacag

SEQ ID NO: 34491 - DNA, 412 bp, Oryza sativa
  Clone ID: uC-osrocyp006h03a1
accacaactttttaaggatggaattgagtcgcattactttcaccccaaaatacagtttagcgacaatctcttaggaaagccgcttgctttgccgccatggctggcaagctgagcagagcagctaacacaaagaacacgagatcactataaaccaaacggcaacgaacgaagaaattacagggtcttttttgtctgaagatacacgaagcggttcgttttcttttatttttagcttcctctcctcctagaagatgggggtatggcaatggcaatggcgatgggatcttggcttagttgatgggaaggggctcgccgttccactccttgaggcagtcgagcatggggtcgatgagcttgccctggctgatgccgaggaacaccttggtgcactgctcgccgggggacttgagct

SEQ ID NO: 34492 - DNA, 87 bp, Oryza sativa
  Clone ID: uC-osrocyp006h03b1
acgcgtccgttgtaacgttacactgagccttttctattaataaggaatcgtctgttgtgctcgtgcccaccaccaacaccgtagcaa

SEQ ID NO: 34493 - DNA, 423 bp, Oryza sativa
  Clone ID: uC-osrocyp006h04a1
ctcaccccaccttttccttgttcttttcttgcttggaacacatcactgacaaacttaatatcacacaggtgcatggactaaagagagaggaagagagagagagagaggaggcaaaaaaggtaaagagaaaaaaaaccaggttgcaaaagtacccacatctcccttaagtagatacacccaaaccctctgcaggcagtagcagttgttgtttgcagcatcagcagcaatctcaccacaggatttttacacaaggggaaaactggctcagccaattgcctctgccttcttgtctggatctcaccctcattacatttccttgttttaactgctgtcttcacctctggtcctggtggttttctgctcctgatgatgcctctcccatgaacctaaggccaggaacatcttgcctgtccttccacctgg

SEQ ID NO: 34494 - DNA, 457 bp, Oryza sativa
  Clone ID: uC-osrocyp006h05a1
aaactagataaattgcaggcatattcattcaagcatcacaaactggatagagctattaaaagcagtactaatacaaacaaatatcttgagccagatacaacaccacgaccgttttctccattagccaagctcaaataaccgaaaacttaccattaagggagtaaaagtgtaaaactacaatacttacaactgaagtaatgcaatatgtcattacatacaataggtcaacagccacagtttaaagctcctcaaagattatcatctcatgatgttcaatagtctgccttagcggacacaagttgatatgctctagccagcttcccgtcaccagaatcatttggctgccaagaccaaggtgtaccattattcctcagctcaggcctcaacctcaccacaagcattaacaaaaccaacaacaatcccgcaaaaatgaaaccacacagcagtgagcgagtaa

SEQ ID NO: 34495 - DNA, 373 bp, Oryza sativa
  Clone ID: uC-osrocyp006h07a1
agggaagaagccgagaaatccagttttgtttttggacttttgataatgcaaaagtgacttcacacgacagtcgacagtagtacaactgaagatggataatgtccacataatcacaatcagctttatcaagcaacggaacaaaaacgtaccctgtacccagaatcattattcatttattcccttttcatgcataaaaaacctattcccaacaagggtcgtactagcccacacaatcaggctcgtgccgttattatcaaccgatcaaattcaccacagattttattctaattaaaagtgcagctcatcgatcatcatctgtcgccctcaactcagacgtcgcaagtgagccagagcggctcatgaaactcgccca

SEQ ID NO: 34496 - DNA, 407 bp, Oryza sativa
  Clone ID: uC-osrocyp006h08a1
actaaaacatatggattcaaaacatctggacaatgcgttgtacaacattcaaaaattcttccatactaaacaaggaacaatacaccagaaaggcaaaagaagctaaagcaaatgcagaacactgacatcaacgaggtcaggccgcctgagctgctgctctgcttcagggattacaccgcctgaatgcattgctctcatgggcattacgctgcgaataatacgcacggcgccggatgctctcttcgatcgtggcgcttccgaccttctgggttccaaatatgctcttcttttcttcttccaagaagttcttccctctgaattggtttgcgttcacagatgccgcctccttggcatcgacgtctgcagctttcttgagcctgctccatctttgttcttcgtggacctct

SEQ ID NO: 34497 - DNA, 419 bp, Oryza sativa
  Clone ID: uC-osrocyp006h09a1
agagcatagatgacgcctcgcattatcgcatatagcgggtgaaaaaacgtcaggccagcctgcgcgacaacgtgtagttacagataagagcagaactgcgagtcaaatacactcttttctctccatagtagagtttgagcagcgagcgggccaacataaattattcaattattaaatgatatgaacactcttgatcatctgaacactataggaacaaaacttcgctaccgcgattttactattttaggtgtccacaacttcaatgagggtgggttcgtagtcagcaggagcctctaaaccatggaaggtcattacggttgcagcaacattggcgagcccaggggtctgaatgtcagaccggaatttcacaccagggtgaagaccgggacctccaatagcaaccgggaccggctgaagag

SEQ ID NO: 34498 - DNA, 427 bp, Oryza sativa
  Clone ID: uC-osrocyp006h09b1
ctaaaaagaaaagaaaggctttcgtctcggtgggcaaaagcgcgagggcaaagcgaagcatctagtaggcgatggcgagctccggtttctcatggacgctgcccgaccaccccaagctccccaaggggaagacggtagccctcgtcgtgcttgacggatggggcgaggccaacgccgacaagtacaactgcatccatgtcgcccagacgcccgtcatggattcgctcaagaatggtgctcccgagaggtggagattagtgaaggctcatggaacagctgttggtcttcctagcgaagatgacatgggcaacagcgaagtgggtcacaatgctcttggtgctggtcgcatttttgcttcaaggtgctaagcttgtggaccttgctcttgcctctgggaaatttatgatgagagggggttcattacatc

SEQ ID NO: 34499 - DNA, 451 bp, Oryza sativa
  Clone ID: uC-osrocyp006h10a1
ggagcatgattgacgcctcccattatcgcatataggggatgaaaaaacgtcaggccagcctgcgcgacaacgtctaggtacagataagagccgaactgcgaggcaaatacacttttttctctccatcaaagaggttgagcagcgagcgggccaacataaattattcaattattaaacgatatgaacactcttgatcatctcaacactataggaacaaaacttggctaccgcgattttactattttagttgtccacaacttcaatgaggggtggttcgaagtcagcatgagcctcgaaaccatggaagttcattacggaagcagcaacattggcgagcccaggggtctgaatgttggaccggaatttcacaccagggtgaagaccgggaccttcaatagcaaccgggaccggctgagagtatgtgaggtaagaatctggtaccaccgttctt

SEQ ID NO: 34500 - DNA, 140 bp, Oryza sativa
  Clone ID: uC-osrocyp006h11a1
agactcctctcctcctcgatgatgggggtatggcaatggcaaaggcgatgggatcttggcttgaatgacgggaaggggcatcgccgttccacctccttgaggacagtcgagcactgggtgtctgacatagactccgccct

SEQ ID NO: 34501 - DNA, 482 bp, Oryza sativa
  Clone ID: uC-osrocyp006h11b1
ttcggcccgcagatcgaggtcatccgcgccgccaccaagtccatcgagcgcgaggtcaactccgtgaacgacaacccggtgatcgacgtccaccgcggcaaggcgctccacggcggcaacttccagggcacccccatcggtgtgtccatggacaacgcccgtctcgccatcgccaacatcggcaagctcatgttcgcgcagttctccgagctcgtgaacgagttctacaacaacgggctgacctccaacctggccggcagccgcaacccgagcttggactacgggttcaagggcaccgagatcgccatggcctcctactgctctgagctccagtacctcgccaaccccatcaccaaccatgtccagagcgcggagcagcacaaccaggacgtgaactcgctgggtctcgtctcggccaggatgaccctggaggcggtggacatcctcatgctcatgacctccacctacatcgacgccctgtg

SEQ ID NO: 34502 - DNA, 355 bp, Oryza sativa
  Clone ID: uC-osrocyp006h12a1
ttttggtgatttaaatttattggggatgacagttgtaagacactggacacctcgatccatcattggctcaggagaaaaacagaagctcgacagacaactaaattaagacggagaggacgagaagaatgaaaaagccctgggcgatccccatgacaacaactacagcattgctagaccgagcccttcaactaatccccgggcagcggttcacgctagctcgcccgatgggcggagctgcatctccgaatacactgggaccggattaattcatagggcgcagcgcctaatgacaacggacacggaacgaaccagggtgttcgaccacgggctgacccggcagcgcgccaggtaggcg

SEQ ID NO: 34503 - DNA, 206 bp, Oryza sativa
  Clone ID: uC-osrocyp006h12b1
agcaaccactgacttagcctgttggggtcgaccttccccttgagagcaactgacatatacatccagtacgccagcactcggtgtgcgtacctgacctgtctttcatgaacaatccctatgcccttaccaacaatggcaacactcttactttgacagctgctggcctgatgcctgtggctctgcagatggagcctagctgaccctct

SEQ ID NO: 34504 - DNA, 228 bp, Oryza sativa
  Clone ID: uC-osrocyp007a02a1
ttggggtttttttttaatattgtttgtattttttattttttttttttaaatactacgaatctacacaactttccagatcgtagttcattaaatcattaggagtggagggagtacaatctttaatatttgaaaatacttttcgcatattcaattatcctctgaaaggaacactctccgatccttgcttcgattcagctccagatccagctttgccgtcttcggctggct

SEQ ID NO: 34505 - DNA, 497 bp, Oryza sativa
  Clone ID: uC-osrocyp007a02b1
ctcgattattgcctctttgttctgagtgtgactgtcaatctgtgagcttagctagtgactggccattgcacgagaaaagaacaggttgatcgatcattagtaggtgaagtgttcttgccctgttcttttcttggtttcttgggtaaaccaactggttgggttcggtgagtttgagaacttcagaaactgtaacaacaatgggaggcaccatggattacctgtctgatcttctcggcggcggcgggagcagcagccgtcggaggtacaagaagaggaagcagttccagacggtggagctcaaggtgaggatggactgcgacggctgcgagctcaaagtcaggaacgccctctccagcatgaaaggggtgcagtcggtggagataaacaggaagcagtacaaggtgacggtgcaagggttcgtggagccgcacaaggtggtgaagcgggtgcaggcgacggggaagaaggcggagatctggccctacgtgccctacacc

SEQ ID NO: 34506 - DNA, 444 bp, Oryza sativa
  Clone ID: uC-osrocyp007a03a1
ttttgtttataaacagcgtgccattgcttgcagccttgcactgccaaccatttgcaggtataataatataaacattcaatatccccaagaaaccaacaaaaaaggacagaactaaacgatccatccccatctgcagattctgtccacacttgttcatacttctatcttgcatgactatctttttgtgttcagacatcatctcaatcgttctcatatcacagtggcacatgatttgagatgcttaatcaggagaatcaatggagatgatcccatcagctgtcaccaatcatgcttggtttttgtagtttatccttgccgacgccagcttggtaaacaggcttccatcgtagacttctcgcacggcctccttgcgaagaaggccgtccttgtccttgccgatcttgtacagaatcttccactctgacgatgctgcgacccatccag

SEQ ID NO: 34507 - DNA, 491 bp, Oryza sativa
  unsure (1)..(491): unsure at all n locations
  Clone ID: uC-osrocyp007a03b1
ctggtacagaaaccgccgagagagttcgtagcgggcaacgcgcgaggcagggccgagaagaaaccgccggcgacgcacgcgcgatggacgctcggcggaggcggttgtccccggcggtggccgtggcggcggctcttcttttcttccccatgttcttcgggagccatacgccggcggcggcggcggcgtacggagaggcttcaggcgacgccggcgtgacggcgctgcagaagcacgcggcgttcttcgacaaggacggcgacggcatcgtctccctctccgagacatacgacgggttacgagcactcggactcggatctggcctctccagcttgagcgccgccttcatcaatggcgtcctttccccaaagaccagacctgacaatggaacagcaccacgcttatctatctacatagagaacatctancaggggattcatggaagcgattcaagcgcctatgattcttgaggaaggttcgttgctgaaaag

SEQ ID NO: 34508 - DNA, 386 bp, Oryza sativa
  Clone ID: uC-osrocyp007a04b1
ctttcccccctctctcttctcccccaaatcgagccaagaatcaccgccgccgccgccgccaatgggcgcgcttctcctccgctgcgccctcctagccctcgccgccggcctcgtcgccgcgcgcggcggaggcggcggcggcgcgggggcggcggggaggctgtcccccaactactaccgccacagctgcccgcgcgtggagcggatcgtcgcggacgtcgtcgccgccaagcagcgcgccaacccgtccacggcggcgggcacgctccgcctcttcttccacgactgcttcgtcggggggtgcgacgcctcggtcctcgtctccccgctctccgccgaccggtcgcccgagcgcgccgcggagatcaacctctcccttccgggcg

SEQ ID NO: 34509 - DNA, 463 bp, Oryza sativa
  Clone ID: uC-osrocyp007a05b1
ctctcatgggatgtcatggaacccatctgcttctatgtgacctccatgtacttcatggccggctacaccttcttcctccggaccaagaaggagccctccttcgagggcttcttcgagagccggtttgcggcgaagcagaagcggttgatgcacgcccgggatttcgatctccgccggtctgaccagctccggcgagcctgtggcctgccggtggttcggactccgacgagcccctgcagaccgtcgacggcgacgtcggcttcgacgcaggagagccattgccattcttactgccattgccaatgatctttgtgctgctctgttctattgtcagaatatttttcatgcccagtttatgggggttaagctagcttctccattgtatcgctctgatgcgcggatgatgcgatgcacagcatagttgtgtgaagagatgacaaggcagattttagcttgaaaacct

SEQ ID NO: 34510 - DNA, 65 bp, Oryza sativa
  Clone ID: uC-osrocyp007a06a1
tttggggtgtttcaaatatggattgcaatttgaaaatctcaacaagaatcatcatcgctccgact

SEQ ID NO: 34511 - DNA, 374 bp, Oryza sativa
  Clone ID: uC-osrocyp007a06b1
ttcgatccttccaaagtccaaaccctagtggtgacctcgcctcggtctcgaaaccctagccgcagatctcgcctctccttgccccgcgccatggacgacgacttggagatgccgccgcccggcgccgacgacgacttgatgatggcggaggacgggatgggcgacttcggcggcgccgacgggccgccgctgaaggtcggagaggagacagagatcgggaagcagggtctcaggaagaagctgctcacggagggcgaggggtgggagaccccccaggtcggcgaccaggtcgaagtacactacactggcacactgcttgatggagagaagtctgattcaagtcgtgaccgtgggacacccttcaagtttaagct

SEQ ID NO: 34512 - DNA, 569 bp, Oryza sativa
  Clone ID: uC-osrocyp007a07b1
ctctcgcatcaccaattctaaccctaacgacaaccctactctctctctccaacaatcaaagattcgatggccgtgctggtggcgaggcaggggcgggagctgcagcggtacacgagcgccgggggccgcatcgtggtgggttgcatcccgtaccgggtgcgcagcggcggcgagatggaggtgctggtgatcacgtcgcagaaggggcacggcatgatgttccccaagggcgggtgggagctcgacgagtccatggacgaggccgcccgccgcgaggcgctcgaggaggccggcgtccgcggcgacaccgagacgtccctcggctgctggtactacaatgagccgcgctacgacaccacctacgagggcttcatgttccctctccgggtcaccgacgagctcctccagtggcccgagatgtcctcccgcaagcgcacctgggtgagtagtagtagtacatgacccccccatctgactttgatacacgggaaattgccattctacggtgagaacgatcgatttgatcgaccaagaacgacacgggcgttaatagccatttattttgtgca

SEQ ID NO: 34513 - DNA, 484 bp, Oryza sativa
  Clone ID: uC-osrocyp007a08a1
ggttcaaatatggattgcaatttgaaaatctcaacaagaatcatcatcgcccgacaacttgggaagtaacgtttctcatcagtgcaccactagaacaaagattagccagcacacaaaatctaagatatgtcgtgagtgtcctgtccttaggcagcagtaacaggttccgatccttgcttcgattcagctccagatccagctttgccgtcttcggctggctgcttggtcatcttggcgaacatattgctgtagaatttggcatccttcttgttgtactccttgaccttttccttgaggttcttgtatgtcaacttcacatccctgttatcaggatcaatttcaagtgccttcttaatatccacctctgctaactctaggtcagcaagttgcatgtaagcttgggcccttccgtataaagccttgacattttggctgtcaagttccaaaaccttggtgcaaagcttctcaacttgcttgtaatctt

SEQ ID NO: 34514 - DNA, 486 bp, Oryza sativa
  unsure (1)..(486): unsure at all n locations
  Clone ID: uC-osrocyp007a08b1
ttcgaaccttccaaagtccaaaccctagtggtgacctcgcctcggcctcgaaaccctagccgcagatctcgcctctccttgccccgcgccatggacgacgacttcgagatgccgccgcccggcgccgacgacgacttgatgatgggggaggacgggatgggcgacttcggcggcgccgacgggccgccgctgaaggtcggagaggagaaggagatcgggaagcagggtctcaggaagaagctgctcaaggagggcgaggggtgggagacccccgaggtcggcgacgaggtcgaagtacactacactggcacactgcttgatggaaagaagtttgattcaagccgtgaccgtgggacacccttcaagtttaagttgggacaaggtcaagtgataaaagggtgggatctaggtatcaagaccatgaagaaaggcgaaaatgctggtttcaccattcctcctgattnggcctatggtgaatctggttca

SEQ ID NO: 34515 - DNA, 484 bp, Oryza sativa
  Clone ID: uC-osrocyp007a09a1
aggtaagcatagagggatattctctttttttttcatccctctcttgactcattttctcatagagttcaggcttctaaaacatcatgctacaacaacagcttattaaagaaacaaagagagaaattaaaaaaaaagttgattgctttgatcagcatcaaacaacaagacctcctgcatttcacttatgtacattgtcagttaccatgagtttaaccaccattctttgttcgcttcgccgtggatgaccttcgcagcggcttgtacagcacgaagcttacatacttggattgaaaccggtgagtgactccaagagcaagcagcgactgcgatccccatcctttctcgatatacaggtggttgaggacaacatgctttggcttcagagtttgttcttcagagttatcagtatcaccaagaacagacattacaagctgaggtggcagtataggtggcttcttggcaaactcctcatcacctgggagct

SEQ ID NO: 34516 - DNA, 584 bp, Oryza sativa
  unsure (1)..(584): unsure at all n locations
  Clone ID: uC-osrocyp007a09b1
cgcggcgaccacgtcggcgaggagcgcgagagtgggggccctcctcctgtccgccgtccgcattctcgtcgtgtctggtttgagctgctgctgctgctgctgccggtgggagttgggctgcttgcttgcttggtttgattggtggaggtgggaggagtactggagtaggcgagtagctgtgggttggggtcggcgagggatccgggcggcggggtatggggaacgcgagcggcaaggaaggggaggagaacggcacgtngcngccgggggccgccgccggagtggctggctcggcgggggcagcggcccgggctccgccgccgcttatgccgccggacgccgtgatgcgggagctgcctcccccggtgccctacgtcttcacgccgcaggttccagtagccccactgcatatacctactgaattttctcctgttttcaacaattcatggataaatgaatcggatgaatccaccaataaccatccccaggagaagggaattccaactttgatctcatggagtcaaggaggaaatgaggtgtttgtggaggatcatgggatacctgacatcangggggtgttagag

SEQ ID NO: 34517 - DNA, 133 bp, Oryza sativa
  Clone ID: uC-osrocyp007a10a1
tgtttttttatttaattatatatgtataccccgttttcgtttaatacctgtcttgacccattaccccacaaaggacaaccttctaaaagaccatgctacaaaatcaagctgactaaagaaacaaagagagatt

SEQ ID NO: 34518 - DNA, 160 bp, Oryza sativa
  Clone ID: uC-osrocyp007a10b1
attcgtcaccctcttgtaactcattgaccgtctcactgtgacatatggacccttacacccctcttcctcctgacctccggcgagctcttcttcgagggctgcagggagaggcgtcgtgggtggagactcaaccggagcatgcacgcggccgagaggcacg

SEQ ID NO: 34519 - DNA, 63 bp, Oryza sativa
  Clone ID: uC-osrocyp007a11a1
tgggtttttaatattttcccctcttaccctttacctcttcctgctaagaatggacacacacac

SEQ ID NO: 34520 - DNA, 453 bp, Oryza sativa
  Clone ID: uC-osrocyp007a11b1
tcggtctgaccaacttccacggcctggacctcaccaccgacaagctgcgctcgctcatccgcaagtggcacaccttgatcgaggcccacctggacgtcaagaccacggacggctacctggtccgcctcttcgccattggcctgaccaagcgccggcccaaccaaacctccaagactgcctacgcccagtcctcccagatccgcctcatccgcaagaagatgaccgaggtgatggagaaggaggtgtccaccgtcagcctgaacgagttcgtgggcaagctgaccaccgagaccattggcgccgagatcgagaaggccacccaaggcatcttccccctggagaacgtcctcatccgcaaggtcaaggtcatccgctcgcccaagaccgacctgggcaagctgctggaggtgcacgcggacgcgggcaagaaggtggagcggaagtaagtggagg

SEQ ID NO: 34521 - DNA, 355 bp, Oryza sativa
  Clone ID: uC-osrocyp007a12a1
aggatcaaaacatttctattaccacaactttttaaggatggaattgagtagcaatactttcaccccaaaatacagtttagcgacaatatcttagaaaagccgcttgctttgccgccatggctggcaagctgagcagagcagctaacacaaagaacacgagatcactataaaccaaacggcaacgaacgaagaaaatacagggtcttttttgtctgaagatacacgaagcggttcgttttcttttatttttagtctcctctcctcctcgatgatgggtgtatggcaatggcaatggcgatgggatctttgcttagttgatgggaaggggcttgccgtttcacttctttgaggcagt

SEQ ID NO: 34522 - DNA, 377 bp, Oryza sativa
  Clone ID: uC-osrocyp007a12b1
tcgttaccttctcctccggctcttcttcagtatcgaatcctctcttctcctcgtgcccaccaccaccaccgtagcaatggcgggcaacgggccgatcaacaaggaggacccgctcaactggggcgcggcggcggccgagatggccggcagccacctcgacgaggtgaagcgcatggtggcgcagttccgcgagccgctggtcaagatccagggcgccaccctccgcgtcggccaggtggccgccgtcgcccaggccaaggacgccgccggcgtcgccgtcgagctcgacgaggaggcccgcccccgcgtcaaggccagcagcgagtggattctcaactgcatcgcccacggcggcgacatctacggcgtcaccaccg

SEQ ID NO: 34523 - DNA, 453 bp, Oryza sativa
  Clone ID: uC-osrocyp007b01a1
caatcggagcttaggattgttcaatagatatggcattttgatgatatccaatgacatgagccagtgcactgctgctattcctgaaaatttagcatgtgcacaagaggacatatattcgaaatgtataagattctaagtaagaagctttggtgtcacaggatcacagttagctaaccatcgtgtacaatcggcagtaccagatatcaagacaaaattattgccactatatatgtggaattagtagtatgcagtattcactaggatgatccaggtgaatacctgagggatcagctggctaactctttgggctatgtaggtagctactagctgcatgattatcatcaggggtatatttctttggtgattgatttgagcatttgtatgcccatcttctaatcgagatcaaaagcagtttgctgttggagaaactgcatgctggagatgtccttcccg

SEQ ID NO: 34524 - DNA, 502 bp, Oryza sativa
  unsure (1)..(502): unsure at all n locations
  Clone ID: uC-osrocyp007b01b1
cttgtgggttcttgcattgggagagggggagatgagcggcccaatgcaacgctcgtcgcagccacagtttatctctagcgtcgagcggaacaatcaatcgaatggtcctggcactcctcttattgacagcatagatgttgatcagattgttattccagagaaaaatagttggaagaacctattttcatacatagggcccggatttcttgtctctattgcgtatattgatcctggaaattttgagacagacctacaggctggagcacagtacaaatatgagcttctttggatcatacttattgcgtcatgtgctgctcttataattcaatcacttgcagctaggctaggagtcgtgactgggaagcacctggccgagcattgcagagctgaatatccaaaggctacaaatttcatattatggattcttgcggaactagctgtagttgcatgcgacattcctgaagtaatnggaactgcttttgcttttgacatgctccttaaa

SEQ ID NO: 34525 - DNA, 462 bp, Oryza sativa
  Clone ID: uC-osrocyp007b02a1
atgtgaagccgtaagataaagagacatggaatattacaagaagcactcaaacatcttcagagttacaaaattcatgtcacgctacagggagtatcaagaactctcttgaacatcaggcaattcttacctcctaccagactacatgttctaccaaaaaccatccaatccggtcgcacatcccacttccatttatatatgttaattgggagacaccattgtatcacatttgtagcagatgatgtttcgagctgtctcatcagtcgatcttcacagaagcatatatcttcctcacgaaccagaagcaagcatagaagccaatggtaccagtcagcacgaagaaagcatacgagatgatcagcatgtaaccaaagtagagaatgcctgaacaagcttcgtgatctccagcttgttgaaaaagtagaagatggcataagcaaaaagatacagtgctgaagagccagc

SEQ ID NO: 34526 - DNA, 348 bp, Oryza sativa
  Clone ID: uC-osrocyp007b03b1
tttacgcgtggggaaaaatttctccccaatctcgcgaggctctcgtcgtcgaatcgaatcctctcgcgtcctcaagatgcagatctttgtgaagacattgaccggcaagactatcaccctcgaggtggagtcctctgacaccatcgataatgtcaaggctaagatccaagataaggagggcatccccccggaccagcagcgtctcatcttcgctggcaagcagctggaggatggcaggaccttgctgactacaacatccagaaggagtcgacccttcaccttgtcctccgccttcgtggtggcatgcagatctttgtcaagactctgaccggcaagactattaccctt

SEQ ID NO: 34527 - DNA, 407 bp, Oryza sativa
  Clone ID: uC-osrocyp007b04a1
tttgtttgcacagaacaggattacgtaacaatacgctatgcccaagacaagtcaatactacaacatttgtggcgagtacagaggtacaaaagtcaggcaccgtaagcctttcgattaaaaaccaaactgaaacacgcacgattttttaacaccccacgaaaaacaatctgatacctagctcctttggtggtggaacctaaagagctttatcttcccaaaacatccacatcattatctgtcatgactatatagtttcgatacgtaaaaaggcagcgttcactcagggatatccgccatgtcttcctttcatttaagcccggccaagatgctttaagccttgttggcaatgttgttggaaagccagtcaagccccctatacaacccttcaccagaggtagcacattgtg

SEQ ID NO: 34528 - DNA, 226 bp, Oryza sativa
  Clone ID: uC-osrocyp007b04b1
ctccctctccgcccatttcttctctccacctgcgatccatccgcgcccgcgaggaggagggagccggacgccgccgcggggagagcaggggagagaaggagaggaggagatcgccgtcgccgtcgccgtcgccgtcgccgatctcaagcggaagcggatatgggcctcacttttcacaaggttgttaacccgctttttcgccaagaaggagatgaggatcctcatg

SEQ ID NO: 34529 - DNA, 212 bp, Oryza sativa
  Clone ID: uC-osrocyp007b05b1
gcgaataagcacatggttctgtgctctgaaagatagggctcgcctgaagttcttggttctttaggctgcttctgcctgtactccggtcttgttaactaacggtccacatgaaaagcatgttcaggagctgctttggtatatcagatttggattatggtgggtcatactaggggtggcttcatccattgcgttaggctctgcattgcacacat

SEQ ID NO: 34530 - DNA, 284 bp, Oryza sativa
  Clone ID: uC-osrocyp007b06b1
ttctgcccaagagcgagcctagaaccaccacgggctccgtcgccgatgacagcgcttctcctcggatcagcccggagagccctctcgggagctcactgcaccagccgcaagcgaggcaacgaaagcgcttggtccacgcccaggatgtccatcaactactacctacacagctgcccacaccttgagcgcatgcccgcggacgagccacccagcagagcatgcgccaacccgaccacggcggcggacacgcatcaggataactagcgccactgctactgccaagg

SEQ ID NO: 34531 - DNA, 323 bp, Oryza sativa
  Clone ID: uC-osrocyp007b07a1
ttgtttttttcatgaatattaacacgcactgttttaagatatcaaacataaattatttaccttctcgatccaggatccaagtggtagaaggatatacagtgcatgctatatggtacatgccttcatgctgaagctgactagaagtgtcaatacaatgacaatttattcacacagatacgttcacaatttggtggtagatatatacatgaatgatactgttcagtccaggctggggccgcccgttcatggacttagtgcttgtgcttcggcttttttactattattacggtgcagtgcgcatgatgagaacagtagtcactcac

SEQ ID NO: 34532 - DNA, 473 bp, Oryza sativa
  Clone ID: uC-osrocyp007b09a1
atctaatatcttagtctcatgaataaacaaagtttatcttgtacataattcagtaacattttacatatcatggtaatcttctgcagaatgggggagcctgagagcaacctgtaaggttattgacaaatgacagaggtcgtcaccgtagtagtgtttgagcaattgttaccgcagtcctgaggataatgcttggtaccatgagaatgcttggaacaaccaactgtccgtattatttgagtgaatcatactagtctaaatgacagctgcattgtcttgtactcatggccttttgaacatatggttggtagctcgagcaggtaatcagtaagtagctatgctccatctactgcccagcaatggctcattgtcgtgtccttgctcttgacattctgataaccataaatcaatgtgatcgacgatctgctttcttactttgttcacagcttttggagatgaacaattagacgagtcac

SEQ ID NO: 34533 - DNA, 526 bp, Oryza sativa
  Clone ID: uC-osrocyp007b09b1
cgcatcgtctcctctccgccgccgcagcggaagcggaagcgcgcgcgcgagagagatggcgtcccgcgccgtcggcgccgcagtcgccgccgtggcggtgctcctgctgctggctcccggggcggagccgatcgggctgtggctgccgcctcccaccggtggcggggggcgcctcggcggcgccgccgcaccaggcaggtacctgacgcaggaggagcggtggatggaccagaccctcgaccacttcaaccccaccgaccatcggcaattcaatcagcgttactatgaattccttgattactaccgagctccaaaagggccaattttcttatatatctgtggagaatcttcgtgcaacgggattcctaacagctacttagctgtgatggcaaagaagtttggtgcggcagtggtctcccctgagcatcggtactacggaaagagttccccttttgagagtttgacaacggaaaatctaaggttcttgtcatacaaacaggccttggttgatctgggctgtttccgc

SEQ ID NO: 34534 - DNA, 152 bp, Oryza sativa
  unsure (1)..(152): unsure at all n locations
  Clone ID: uC-osrocyp007b10b1
aagaggnnnnggccgacaaggaaagataaaaagtactggaccattacagaagatcataaaaaagcggacacttcaagaagaaggaaagacctgaagtggctccctcaacagaggaagaacaggggtagacagggtacacaaagggaggcaag

SEQ ID NO: 34535 - DNA, 472 bp, Oryza sativa
  Clone ID: uC-osrocyp007b11a1
actactataaagacaaactatcgattaggggaattgtaaactgtacagaccgaccatgcggtaaattgttgaatgtttacaaggtcagcagtccaacgactccaaccatccatccagacatcgaatgcgaaaagtagattatttatccaagtcatcaacaaaaagaaaagtatctgatcactgtacagtttgcgcaaccaccattgcataaccatggcacgcctggacaagagagctgaagaacagtgccatcttgtgtgaggaagcgttgttaccattaaaaagcattgatcccaaattgcatccgcacagctccagaaaatattcacatcacaagatcctttggagattgtcccacagcacactgcactcaatcagatccataaatgctgatggttgtctgcctaagtacttcagaagtcctgtcaggctgtgagatgccaccagatatgtgagggctgcgtatcttttt

SEQ ID NO: 34536 - DNA, 299 bp, Oryza sativa
  unsure (1)..(299): unsure at all n locations
  Clone ID: uC-osrocyp007b11b1
tcggaacaaacagtgaatacttcgaacctgtcaattggctccaagaaaaacagaagccccagaagttctgtgctgggaacatatgttaattgtctttcaacaaaacaccttcatccgtccaaatcttctggttcagttacaaggaacagatttggtcctgttgattgtgatggcatccacatatcctcttgtggacatgctgtacaccaggaatgccatgatcgatatttattctccttgaaacanagatatgtcaggagacttggttttgaaactggtcatattgttgatccggatct

SEQ ID NO: 34537 - DNA, 224 bp, Oryza sativa
  Clone ID: uC-osrocyp007b12a1
agccgaaacattagaacaggtccatttcaccaactaaagctactactgctactccactcacactactgtcaccaaccttatctacaaattaaaacgctgaaagcatcatattcctctaatcactaggtatatatatatagtttgtcccctaagaaagaacttttgattattctttgacatttgtgaattttttggtcagacaatggctcaggcgttgggattct

SEQ ID NO: 34538 - DNA, 414 bp, Oryza sativa
  Clone ID: uC-osrocyp007c01a1
aatgtaaaagggtgacggtgcgccgagattgtattgaacgtgtgtgttagattgattacatggggctcggggtctatttatacccgagattacaaaatatgtccatgtcggacacaaatataatctctaacaaactttaagataccataaggcgttgcggcaaacttttgcccaaacttatctctaaggaaattacataaaatatcctaattgatagatacacttgccttctcaggacttaatccgtgcatggcaatccacatgaagcacattaactcaacccgacaacgtgtatcgagttacattgtcggaatcggtttaatcggctaaccttgtccgactcgaactctggcgattctggttgcagccgattcggactttagctgattcttgctttgttcccggaacgatcca

SEQ ID NO: 34539 - DNA, 471 bp, Oryza sativa
  Clone ID: uC-osrocyp007c01b1
ttagtattttctagattttatccaaatcctattatttagaagcccatatgtcctaaaccatatatccgattccaatgacacttgacctaaattcatctaaattcaaactctacattttgatatcagacttgctattttaagatttatttgaatttccttaattaccatttgaatttatatttgattcaaacttatatttgaattcttactttaaacttatatttgattatcgcatatcttctttcattccaaaatacccattagcccctaaagagccgccggttggaactttacgcctttcatggggatgtttgcccggtctactggcccttacatcagactgttggttgtaaagcccagcaaggtcaaatgtgctgctcctagcaccccacgcctctatgcgtactgtggttggagctttactattccctcgaccttcacagcacgccgcacagttagctctcgggctat

SEQ ID NO: 34540 - DNA, 387 bp, Oryza sativa
  Clone ID: uC-osrocyp007c02b1
actacccttctattgcatcgctttcgtcacgaccgaagaggcggaggagtgtataagggcacgcccctagactatcgccatggtacagtgcgctgccaccggatcaaccacggggatcgggacgagctaccaggggaggtaaatagccggcgagcgattaacaggtgtgcctcgccgcgcggcgcagtcgtggaagtggtcgtcccaggtgcccctcgacgagccgcctacgccggcgctgacgaccgagcaggtcgatctatgcaggcaggcgctcgagtagcttcgaggcgatgtgtggccggccggaagccatgtccgacgagttcaggagactccaagtatgcatgtactgtgttcgaccaatgtcctcggcggcacgatgtg

SEQ ID NO: 34541 - DNA, 421 bp, Oryza sativa
  Clone ID: uC-osrocyp007c03b1
gaaaaaagcattcgccgctttgcttcgacccagccaagcctgggcgttgcgtagcgcgcttcaagccagcagctagctagcgcgagagccgtcagttcagtcatgcatcagctcgaccggctttgctacgccgtcgtcgtgctcgtcgtgatcggcgcgacggtcgccgaggcggccaccggcacgttcatctacgccgggtgctcgccgtccaagtaccagccgggcacgccgttcgagggcaacctcaactcgctcctcgcctccatcgccaacgcggcgcccaacggcgggtacaacagcttcacggccgggagcaacggcaccggggacggcgcggcggcgtacgggctgtaccagtgccgcggcgacctgggcaacgccgactgcgcggcgtgcgtgcgggacgccgtggggcagc

SEQ ID NO: 34542 - DNA, 351 bp, Oryza sativa
  Clone ID: uC-osrocyp007c04a1
tttggtttttttgcacaaactggcccttgctatcaacaacactccaacagtcatgctgatacaggtagcaatgcatagcggatttacagccaaacccagacagtactagcataagcacaacgcatgtgccagaatttattcttgttcatagagcggaaaccgcttctttattacattgcactggcattactacataaggtttgcgctttgcctcctagcacagaacttgggccatctctcatcttcactggagttccttcaggaagtcggcgttatcaaccaaaaccacttttccagccatcagggtcaaggaaagaggcaatctttggggtgagccctggtagtggacct

SEQ ID NO: 34543 - DNA, 452 bp, Oryza sativa
  Clone ID: uC-osrocyp007c04b1
cgtctaaccctctccagtctccactccactggatcctcccacctcggctcgcaggaatggcaagcggcagtgaagctgagaagtcacctgaggttgtgctggagtggcctaagaaggacaagaagaggcttctacatgctgtttaccgtgttggagatttggatcgcaccattaaatgttacacagaatgctttggaatgaaattactgaggaaaagagatgtgcctgaagagaaatatacgaatgcatttcttgggtttggacctgaggacaccaactttgcacttgaattgacatacaattatggtgttgataagtacgacattggagcaggatttgggcatttcgctattgcaactgaggacgtgtacaaattggctgagaaaattaaatccagttgttgctgcaagatcactcgcgaacctggtcctgtcaaggaggatccactgtga

SEQ ID NO: 34544 - DNA, 437 bp, Oryza sativa
  Clone ID: uC-osrocyp007c05b1
agcacaacaaagcagggttctcaccggagaggcattttgttttcaatttatactgcttgtatgcccaaatcgatatatcggatgtcactttaagttagtactttcacacattagtaaattactaaactaaaagagagaatcagtgtatatgagtctattggggcatcaactaattacactcactagactcggttgatgtacatcaccagctacatttgccatgggtatgtacatctgggcaatactgcatatatttgctcagagtcgccgtgccttgtatgtgctgccacaaacttaaaaccttcgacccctcctacatctacaaaactgcaccccggtttctttttcaagccaactctcttcatttcagtgctaatgtttgcagagtccttccatcttccaacaacggtatatacatttgacaaggagactcttca

SEQ ID NO: 34545 - DNA, 411 bp, Oryza sativa
  Clone ID: uC-osrocyp007c06b1
actatgggggcagctgcgcctgcctgcagcgcgcccgcgcctgaccctggccgggtctgcgccagccgtgcattccggccaccaccagcagccgccgcggccaccggggcgccctcctcctcctgccccccggcaccggcgaccgaccatccccttgccccctttccccgtcgggttgtgaggcgagatgagggagctgcgcgtcgccgtcctcatcatcgcggtctcgctgccgtccttctccgcgtccgaccgacatggagatgccctgttcgaatgaacccaaaaccgcgatgtgctggcaatcagctttcggattggaaccaaaatcaagtcaaccctagtacatggaattctgtaatttgtgacaatccctactaatgggctcaagctacatttgctgctcgtgga

SEQ ID NO: 34546 - DNA, 377 bp, Oryza sativa
  Clone ID: uC-osrocyp007c07b1
ctaccttctcctccgttttttcttcagtatcgaatcctctcttctcctcgtgcccaccaccaccaccgtagcaatggcgggcaacgggccgatcaacaaggaggacccgctcaactggggcgcggcggcggccgagatggccggcagccacctcgacgaggtgaagcgcatggtggcgcagttccgcgagccgctggtcaagatccagggcgccaccctccgcgtcggccaggtggccgccgtcgcccaggccaaggacgccgccggcgtcgccgtcgagctcgacgaggaggcccgcccccgcgtcaaggccagcagcgagtggatcctcaactgcatcgcccacggcggcgacatctacggcgtcaccaccggct

SEQ ID NO: 34547 - DNA, 461 bp, Oryza sativa
  Clone ID: uC-osrocyp007c08b1
cgaagcagcaggcggcggcggcagagcacggcgacctagcccgacctcgcaaccatggcaaggggtttgaagaagcatctgaagaggctcaatgcgcccaagcattggatgctcgacaagcttggtggagcttttgcccccaagccatcttctggtcctcacaagtccagggagtgcctgcctctgatcctcattatcaggaacaggctcaagtatgctctgacataccgtgaggttatttctatcctcatgcagcgccatgtcttggttgatggcaaggtcaggactgacaagacctacccagctggtttcatggatgtcatttccatccccaagactggtgagaactacaggcttctgtacgacaccaagggacgtttccgccttcagtctgtcaaggatgaggatgctaagttcaagctttgcaaggttcggtctgtgcagtttggccagaagggaat

SEQ ID NO: 34548 - DNA, 499 bp, Oryza sativa
  Clone ID: uC-osrocyp007c09b1
ctaactggtagtcagtcatgaaggtgctcatcgttctcgctctggtagcatgcgccgcggccgtcggccgtaaccgccccgacacgcacatcgtcggaggccaaaacgccgacgccaacgagtggcgctggcaggcaggatggctgagcggcggctcgttcagctgcggctgctcgatcgtgcacgccaactggatcatcacggccggtcactgcgtcggtggagtcatcggacagtacagcgtcgaggtgggcagcgccaaccgcggcgctggccagagaatcaccgtcagctccgtcgtccgtcaccccgactacaacgtcggcgccggattcacgcccaacgacctcgctgttgtcggcgctagcgtgcccctcgacggtagttcggtgatcgctgttcccggtggcattgacaaaggcgagaatcgcgagtcgcagaactgctacatcaccggctggggccgcacgtgcggctcgtgcagtctgcccgtcgccct

SEQ ID NO: 34549 - DNA, 449 bp, Oryza sativa
  Clone ID: uC-osrocyp007c10a1
acagtaagctcattatatatagaagataaccaccaaaataccaatatgtagaagtacatttttagtacctaggctactagtagaacaaataaattttaggcaatgagcgagagaggcaacgaggctgtctttctctggaacaaaaatagctgaataaataacagggtaacatgaaagtttactctagtcctccagaaagtaggtgcaagtgcaagtattttcctaaaccaataaattcccttgatttgccctccagatccaactaaagttaaataagtgaaagaacaaactggtgtccacctccttgaaagcaaccgtagaccaaccaaactacagtcttttgcactttgcaccagatacccaatttgtgtgtgccaggatcagatctggtggtggctctatgcctggttatcgcttttgcgatactgtgcccattgggcttctgaaca

SEQ ID NO: 34550 - DNA, 462 bp, Oryza sativa
  Clone ID: uC-osrocyp007c10b1
tcgtccacgcgtccgcccacgcgtccgcggacgcgtgggtccgcctccgcctcctcctcctccacctcctcccaccccctcgccgatccagatccatcgccggggaggcgccagccatggccggcggcgggggcgccggcggcatgtcggagtcggtgctccgcaaggtgctcctctcctactgctacgtcggcgtctggatcttcctctccttcgccgtcatcgtctacaacaagtacatcctcgaccccaagatgtacaactggcccttcccgatctccctcaccatggtccacatggccttctgctcctccctcgccgtcgccctcgtccgcctcctccgcgtcgtcgagccgccctcgtcgcccgccatgaccccgcagctctacacctcctccgttgttcccatcggcgcgctctacgccatgtcgctgtggttcttcaactcggcctacatctacc

SEQ ID NO: 34551 - DNA, 499 bp, Oryza sativa
  Clone ID: uC-osrocyp007c11a1
aacgtgcggaacatctacttcccgttcgacgtggcgaacgacacggcgatggaggtggcgacggagatggtgaaggagctggacatcgccgaccgggagcccacggagatcgccgccatgatcgagcaggagatcgtgaggttggtgccagggtacaagcagcacgagtactcgtacgcggatgacaacgacgatgatgacgtcagcggacaccctaatcccttctactacctctcctcttcgccgacctcctctcagggatctctctgcggagtggggtccacatcgtcagaggggtttcctggcccacatggaaaagttgactggtcaagagattactgttactaccctccaagcagcgtcagcgtgagcgacgacgatgacagcagcacgagctcactctctgctgcagtcagtgcaagcagcctgcatcagcagcagcagcattgctcgcctcttccagcagattgggccagcatctgcatctgcatctgaagac

SEQ ID NO: 34552 - DNA, 474 bp, Oryza sativa
  unsure (1)..(474): unsure at all n locations
  Clone ID: uC-osrocyp007c11b1
gtccgccctttttttttttttttgataacacgcatatatatatatgcactcgttccaaatatacacaattttggggccgcgcacgcaatgcatactctgcactgcgcacattaagggcatgttcactttgatgtcaaaaaaaaaaccttatcaaattttggcaacttgttaaaattttagcaggatttcttatatatagttactaaaatttgacaccaactaaatgtagccactttttttttggtagctttaccaaaatttagtaaggttcaaagtggcatcaaagtgaacggccctaatccattatcagaggctaatactctgcatctgattctctgtacataatggagtagcaaattaagttgctctgaaaaagttattcagaacatgtagtggtgcttgtggtcgatctttgtgctgcttctccgcngtggtgggaagagctagaggaagaagagcagcagcagtagggtc

SEQ ID NO: 34553 - DNA, 393 bp, Oryza sativa
  Clone ID: uC-osrocyp007c12a1
aagagtacataaacttaatatatagttttgatcataagatcggcagtagtacagattcagaatctaattgacaaacacaaacaccgcaatataattcggtaatcaagcaagccatgatatcagctgcaccccatcatcctccggttaaacattcatcaacgacgacgtgattaacctgaaccaagaaatggcatggtatctgatcaagatatataatcctgatgaacagatggattttaagtttttaactgaatccattaaaatggaagtgaattcagatgcttacaattgagtgcacaaactgcatcaatggaggagtacatcagaaaagggcgccgtcgattgggaagtcgtcgaagctccacaggttgacgccggcgttcatgtcggtgt

SEQ ID NO: 34554 - DNA, 221 bp, Oryza sativa
  Clone ID: uC-osrocyp007c12b1
ctccctgtccacgcatttcttctttccacatgccggaggaggccgcacgcgcgctacgacgtagaggcgcgccgcctccgcggcagcaaggccaaggacaacttgccgggcacgcccgccgccgcgcgcccacgccgcggcaacacgagagccaccgccgtgccaccgccggcgacagaacccgccgcccccctctcgcggactggagcgaggaattctcg

SEQ ID NO: 34555 - DNA, 386 bp, Oryza sativa
  Clone ID: uC-osrocyp007d01a1
agtcgcaaatgaagatgtgttttcacgtttcgatcaacgcgaccaccattacagaaagatccgtgtcatgtagcatgctagtatttgcaaagctactacgacgacaaacctgagaagattcacaccgtatcaacaaaatgcaaaagaacttgtattcaccataaaacccagttgaagtgcggctctgtcataatacgtagaggcaatagccgcggtggttttttcttatgtgcaaagcgggaagagaagctttcaagacctcttcttcctcttcttctcctccgacttgtcagacgcgttcttgagcatgatgaccaggattcggacaatgacggtcacgaagtcagtgaagagggtgagtgcgtgcttgatgtattccatgtcac

SEQ ID NO: 34556 - DNA, 508 bp, Oryza sativa
  Clone ID: uC-osrocyp007d01b1
ttattattcgaagccatccaccaacgaagaaaaaggaaagggagaaaaaaaaatccacgcacactttgcgtgcgaggcgaggcggttcgattcgagaggagagagagagagagagagagagagagagatggacgccttctactcgacctcgtcggcgtacggagcggcggcgagcggctggggctacgactcgctgaagaacttccgccagatctcccccgccgtccagtcccacctcaagctcgtttacctgacactatgcgtcgccctggctgcgtcggcggtgggcgcatacctgcacgtcgccttgaacatcggcgggatgttgactatgctcgggtgcgtggggagcatcgcctggttgttctcggtgcctgtctttgaggagaggaagaggtttgggattctcttggccgctgccctgctggaaggggcttcagttgggcctctgatcaagcttgctgtagactttgactcaagcattctcgtaacagcatttgttggaact

SEQ ID NO: 34557 - DNA, 380 bp, Oryza sativa
  Clone ID: uC-osrocyp007d02a1
gccgcaaaaaaaagggataatatattcagttccaaatgactaaaactgatcccaaattatggttactacatagtcgaaaaacaaaaggctgcggaagacggatcgatgatggccatggctgtacttgaaacagggcatataccaccatacaggcctgaaatcacacccagaaccttaaacgagtacctcattttcaaataagtcgggcaacctaaactgactttaagctctccaattacatccataaacagccggccaagaagtactttcatttgaaagaagatccaactattggtataacaatgtccttaagcaacggtttcaaaaaccaaagaaaccaagctcggttgccctctcttttttgaatgtctcgaagtact

SEQ ID NO: 34558 - DNA, 451 bp, Oryza sativa
  Clone ID: uC-osrocyp007d02b1
ttgtaaggcgtttagccccacaaccatcaacagtgggcgtggtgctgaatttgaaggagctgtcattgcattgttccatttgttgattactagaactgacaaagtccgtgccttgcgtgaagctttctaccgtcagaaccttccgaatgtgacaaatttacttgcaactgtattggtcttcctcatagtcatctacttccaaggcttccgtgttgtgcttccagtgagatcaaagaatgctagggggcagcaaggctcatatccaattaagttgttctacacttcaaacatgcccatcattctgcactctgcactgattaccaacctctacttcatatcacagcttctctacaggaggtacagtggaaattttctggttaaccttcttgggaaatggaaggaatctgagtactctggccattcggttcctgttggtggtctcgcttactat

SEQ ID NO: 34559 - DNA, 450 bp, Oryza sativa
  Clone ID: uC-osrocyp007d03b1
ttttgtccgaggcccacactggaccctctaggaggccaatcacggcgcctgctcgtcctcgaagccgcccgacgagtgccatgtaccgaagtaggcggcatcgaccgcgctgcacgctggcgctcctacgtgcagcgtgcggtgccgaggccaggcggacaccgttggacccattcgagcgcgtgcgccaggccgtccacctgttctgcggcggcaccctatcccgatggcgccaccaccacccgcctccgccttcgacgaccacacccatggaactccgcccggaggaggtagaacttacgaaagttgaggaacacactgtgaagttagagatggagctttttgtcacggaaaaagaaacggttaaggttttgaaagaaccacaggcagcaaatgaggtagctgccaccttgagatacagctagagaacgcggcatctgagagcgcagc

SEQ ID NO: 34560 - DNA, 248 bp, Oryza sativa
  Clone ID: uC-osrocyp007d04a1
tttggtttacttacaccctggagtagctgctgaatttcaactttgtgcatagaactaactaattacacatgctgattattcataagtctgtactattacactgcatagctactacttattgatccagaagaaaaagaagatgttgctaattaatacacagtcttggtgctgaagctgccatgggtgcaagaggaggagtcggcgacggcggtggtggcggtctggctttttcttcctgtgcctgtgct

SEQ ID NO: 34561 - DNA, 583 bp, Oryza sativa
  unsure (1)..(583): unsure at all n locations
  Clone ID: uC-osrocyp007d04b1
cacgggccgccgcccccactgcaccctctcccacccccatcacggcgcctcctcgccctcgcgccgcccgccgtgtgccatggcggaagtagcggcgacgcagcacggccacgccgtcgccgcgcgcgcaatgccgggccgcggcgaggtggacacgtcgtccccgttcgagtccgtgcgccaggccgtcgacctgttcggcggcggcgccctctccccctggcgccaccaccacccgcctacgcctccgccgcccccacccctgcaactccgcccggaggaggtagaacttatgaaagttgaggaacaaactgtgaagttagagatggagctttttgtcaaggaaaaagaaacgtttaaggttttgaaagaattacaggcaacaaagcaggttgctgacaacttgaagctacagttagagaaagcggcatctgagagtgcagcttctgcaagaggtcacagtgatgcagggaaggtgtatccactccctgacaccgaacggaaatgcagttaccatactgggcagccngtcgagagcgcaaaaggaatcagtccgcgctaaccacangatcaagctgatcag

SEQ ID NO: 34562 - DNA, 527 bp, Oryza sativa
  Clone ID: uC-osrocyp007d05b1
cttcttttgtaaaagaactgtttgctaagatgagaccttctaatctttctgctgaatcaaaacgcgaactggtcctgtttttgcttgagttttgtactctcactaaaagcatgcaggctgaccagcaattacgtctatgtagggatcttgctagtgaaggtgcgtctgacatcatgtctgatgtgatgcagagtcaggataaagtgctcgtctcagctgggacagacatccttgtatattttcttaatcaagatcctaacttactgagatcatatattgctcgtcaagaaaattctcatgaaggaaattcacttcttggtcttctggttcaaggcatggtaactgactttggtgagggactgcactgacaatttctggaaattttgaagattctgatggatggatttgctacaaatatgcctacaaactatcattggctttctcccctatggacattacccaatcaacatctagtccagttggtgtgggtacaagagtttgaaaccattctgtgaagactgaaatac

SEQ ID NO: 34563 - DNA, 490 bp, Oryza sativa
  Clone ID: uC-osrocyp007d06b1
ccggccaccaactttgacccgtcctcctcctccgcatcccccatcccctcctccccggcggcggcggcggcgcggaggcggcggcacggcagcggctagtggtttcgtcggcggaggcggaggcggggccaagatgttcgggcgcgcgccgaagaagagcgacaacaccaagtactacgagatcctgggggtccccaagaccgcctcccaggacgacctcaagaaggcgtaccgcaaggtcgccatcaagaaccaccccgacaagggcggcgaccccgagaagttcaaggagcttgcacaagcttatgaggtattgagtgacccggagaaacgtgaaatctatgaccaatatggtgaagatgccctcaaggaaggaatgggtggaggcggatcccatgttgatccatttgacatcttttcatcattctttggaccttcttttggtggtggtggcagcagcaggggcagaaggcaaaggaggggagaggat

SEQ ID NO: 34564 - DNA, 537 bp, Oryza sativa
  unsure (1)..(537): unsure at all n locations
  Clone ID: uC-osrocyp007d07b1
atttcggagggggatgtgtagcggcggcggcggctagggtggtggtttgctgttcttcgagctagcatctgtagtaattctcgcaagttatttgaaggacaaatatggctactattcaagatataggtgtctctgcagctatcaacatactgagtgccatcactttcctgctagcgtttgctttcctgcgactacagcccatcaacgatagggtttacttcccaaagtggtatctcaaaggtgcaagagagagtccaagtcatgggggtgcatttgtgcggaagtttgtcaatttggacatgcgatcatacttgaaggtcttaagttggatgcctgctgctctcaaaatgccagaggatgagttaattagccatgcaggccttgattcagctgtctatctgcggatctacttaatagggcttaaaatatttgctccaatcacagttctagcatttattattctntgtgcctgtaattggaccaatattacccttcaaagctcgaaggtgcagcacagtgatattgacaaacttcata

SEQ ID NO: 34565 - DNA, 573 bp, Oryza sativa
  unsure (1)..(573): unsure at all n locations
  Clone ID: uC-osrocyp007d08b1
ctcctcacatcgccagctcgtccgcttgccccgcaccgcaaccgcggcgcggaggaggagagctctcgcgccgcgcgtgcgcgcgcgcgtgcgggcgtgcgcgggcgatcgaatccgatcgccatgaccggcgccgacgagccgtccatcacccgctggaccttcgaggacttcgaggtctactacgaggtgcgcctcggcatccgccgcgagcccgggggagatgaagacggcgacggcgacggcggcggaggtcgcggctacgcgccgcttggatccggctccgcgggcagcacccgcccttnncgcggcgcacgccaacggcggcgccgacctggccgtcttcgagcagttcgagcggctggagaggaaggtggagctgcggaatggagcaattgaagctgggcctccgcagaaatccctacttccttcttttgaatctgcagaaatgcgcaatttagctgagacattgttgagggatatcattcgtgggagtccagatgtcaaatgggaaagcattaaggtttgagaatgcaagcgtcttctgaagagcagtgtgatgctataaatacc

SEQ ID NO: 34566 - DNA, 294 bp, Oryza sativa
  Clone ID: uC-osrocyp007d09a1
gacacaaatcttattcactcgattcgattcctgggcaccgatccagaccaattgtgcttcttctttcacggttaaaacagggcggagaaaaaaaaagagtaaggaaggggagaaaaaaatgaagaagacgaactagcgagtagacggagaggagcaacgaacgaactttgaatccagttcgaacagcgggttggtggtgagtggaggccggtcagccgcggcagcgggtgatggcggagcagccgcgggagtaggggttggcctggccgccggggcggcagttgtagtaggagg

SEQ ID NO: 34567 - DNA, 564 bp, Oryza sativa
  unsure (1)..(564): unsure at all n locations
  Clone ID: uC-osrocyp007d09b1
caaccattacgctatccgccacgagcaagaaggcgacctcaccaaataatcccccaccaccacaagaagcaggggcgcgccatggcgagagccgctaccgtggcggcggcgtcgtccgcgctgctgctggcgctgctcctggcgctggcgtggggagccgcggcgggggcgggggaggtgccgctcggctgggagctcggggtcggcgtcggcggcggcagcggcgacgacgacggcttcgggttctccggggcggcggctgacggcgccgcggtggtgaggcgggtcctgcaggggcggggctacatcagctacggcgcgctgcgtcgcgacacgacgccctgctccgtccgcggcgcctcctactacaactgccgccccggcggccaggccaacccctactcccgcggctgctccgccatcacccgctgccgcggctgaccggcctccaccaccaccaacccgctgttcgaactggattaaagttcgttcgttgctcctctccgtctactcgctagttcgtcttcttcatttntttctcccctttcctactccttttttttc

SEQ ID NO: 34568 - DNA, 319 bp, Oryza sativa
  Clone ID: uC-osrocyp007d10a1
aatcacaaacattgttttaagactagtatcaaaggcctattgtatctacatctttacattaatccgtaaacaaatatgtacaaaatttagttttacgaaaaatgcatttgtttcatatgaatggatagttgggactataccctgaagcgaatgtaatcagggccataaaaaaggtgaaatacaataggtatatcacacactatcttcttcaggcttgtctgaaggcctgataagaggagctaccctttcagaaatgatagccttaccattctcatctcgtttgacagggtacagcacatagtgttggattatgaataag

SEQ ID NO: 34569 - DNA, 319 bp, Oryza sativa
  Clone ID: uC-osrocyp007d10b1
cttattcataatccaacactatgtgctgtaccctgtcaaacgagatgagaatggtaaggctatcatttctgaaagggtagctcctcttatcaggccttcagacaagcctgaagaagatagtgtgtgatatacctattgtatttcaccttttttatggccctgattacattcgcttcagggtatagtcccaactatccattcatatgaaacaaatgcatttttcgtaaaactaaattttgtacatatttgtttacggattaatgtaaagatgtagatacaataggcctttgatactagtcttaaaacaatgtttgtgatt

SEQ ID NO: 34570 - DNA, 430 bp, Oryza sativa
  Clone ID: uC-osrocyp007d11a1
aaaccttcaaatgaacaggggaaacaattccacaagcgtttattacaattttcggtttttccacgatacattgcttgattgaaagtaaaataccatcaaataggctgtaatatgtaatatccaaggagccatgcttcagaaatgcagattaacaagattatgtatcacttcactggttcaatctttcttttggagcctgagtgtgaaagcctgaagggataagagaacttgcttgatccgttctctgatttgcgcatcaatcaaattaccatcactgtcaaactttggaggctgctcaaatgcttttacggctagttctggcttgttgatgaagtgaagatctaaaaataccccgacctgacgaagatggtactgtgatctacccccttcaaagccacctcctgcactgacaattgcagcaggtttgtct

SEQ ID NO: 34571 - DNA, 517 bp, Oryza sativa
  unsure (1)..(517): unsure at all n locations
  Clone ID: uC-osrocyp007d11b1
gcgcgcgtcaccaactcagcagcctgagccgccgagggagaagacgacgacgacgaccaccaccaccaccatggaggccgcggcggcgaggcccgtcatccgcgtcgccgccatctgcggctccctccgcaaggcctcctacaacggcggcctcctccgcgccgccgcgggggtgtgcgaggagtccatcccgggcctgcgcgtcgaccacgtcgacatctccggcctgccgctgctcaacaccgacctcgagaccgccgatggcggattccctcccgccgtcgaggccttccgcgacaaggtccgccaggccgactgcttcctcttcggatcccccgagtacaactactccatcgcaaccccactgaagaatgcacttgattgggcttctagagggcaaaattgctgggcagacaaacctgctgcaattgtcagtgcaggaggtggctctggagggggtagatcacagtaccatcttcgtcaggtcggngtatttttagatcttcacttcatcaac

SEQ ID NO: 34572 - DNA, 464 bp, Oryza sativa
  Clone ID: uC-osrocyp007d12a1
aagcacaatacatcacataagtcttttattcatatataatcatatataaaccacgtacatatatagcgaatgtaatacaacacaaataaatgtatacgacactgacagaggtataacggggcactagtgtggtaaacccttggacctagtccaagcacatacacatgcacactatatatgtatagttatatagtgattgaaagaaatatcacccttaggtcttgttcggttcattcccaaaagagagattagagagaattgaggggattaattccacacctcaataaatgtggaattattctcctacaaatctcacttaacttcttgttgagggactaaacgaatagacctaggggtgaatttatcatgagcactgatccaaccatatatccaaggatatattcatatgtagataatatatatcatatgtggacataaactccgatagagccacaagtgcttcc

SEQ ID NO: 34573 - DNA, 319 bp, Oryza sativa
  Clone ID: uC-osrocyp007d12b1
ctagtcacagatacatagtaggacagaggctacaaattaaaatgagcacacaacttgttaagatcgggacatggggtggaaatggaggaggtcgtgtagacctatctgtactcccaaggagcttgaaaagcgtgacaatccgtagtggtgcagccattgatgctattgcctttacatacattggcacagatgggaaggaacatcttgcaggtccttggggtggtggcggtggaaatccaactacgattacacttggatctcaggaattcgtgaagggaatctccggaacttttaccaacgtcgtgacaaaccttaaaat

SEQ ID NO: 34574 - DNA, 387 bp, Oryza sativa
  Clone ID: uC-osrocyp007e01a1
gaggaagcgcggcaataaaacattgcattgaattctgaacgataaacaccaggaaccggcgtttatttgaggcaagcactgcccaaaatctcgcaaaagtactgaaaccttagacatagtacacatccatggcaaacatggatgccaaatgacaactacagaaaattatcaaattcgaatgcagctgacggcttctcctgctgaagatgcatattttcccctccattacttggatgtgctctcttcatcgacagccaatgggacggcgctggccaggctgcggtattttcagagcatagaacattttaatgtaaccggcgagtctcgcgccttttaaggttgctttacgtactttcagaatccatatacacccgtcaagggcattag

SEQ ID NO: 34575 - DNA, 427 bp, Oryza sativa
  unsure (1)..(427): unsure at all n locations
  Clone ID: uC-osrocyp007e01b1
gataattgagtcatggctgccaagctagcatcggcttcacagtctccgcgaacgcctcggtgccaccttctcgtctcatcccaatgagtggattgcactcttctctaggtatgttaaccagggaaagggaatgctccagcgtcaccagctgcttgcggagttcgatgccttgatcgaagctgacaaagagaaatatgctccctttgaagacattctccgggctgctcaggaagccattgtgctgccgccctgggttgcactggccatcaggccaaggcctggtgtctgggactacattcgggtgaatgtaagtgagttggcagtggaagagctgagtgtttctgagtacttggcattcaaggaacagcttgttgatggacacaccaacagcaactttgttcttgagcttgattntgagcccttcaat

SEQ ID NO: 34576 - DNA, 308 bp, Oryza sativa
  Clone ID: uC-osrocyp007e02a1
ctgggtttatatataacaacacgatttattacattattatatattcctactgacaaaccgtgacacactaaaataccaaactatatactgtaacataacaatagtcgtattctcatgacaatacataactcacttaaattttgtaaggtcacctattttttatcttgaatagcaaaagcggttatgtatagtttatgcaactaatcacttaattaattcataaataaaagtctatttttaactttaagcagattttggcgccttgacggtcttgaagcggggtttctttgcatcgaacttctgcttgg

SEQ ID NO: 34577 - DNA, 485 bp, Oryza sativa
  unsure (1)..(485): unsure at all n locations
  Clone ID: uC-osrocyp007e02b1
cttactcttcttcttgctagcttgctagcttctgcatttagacattgcaaaatctgaaaaaacttgagaaattaactaaacaaaatggttgttccggtgatcgacttctccaagctcgacggcaccgccgcagagagggctgagacgatggcgcagatcgacaatggctgcgaggagtggggattcttccagctggtgaaccatggcgtcccgaaggagcttcttgatcgggtgaagaaggtgtgcttggagagctaccgactccgggaggcggcgttcatggagtcggagccggtgaggacgctggaggggctcatggcggcggagcggcgcggcgaggcggcggcgccggtggacgacatggactgggaggacatcttctacctccacgacgacaaccagtggccgtcgaacccgccggagttcaaggagacgatgcgcgagtaccgcgcggcgctgcggnggctcgccgagagggtgatgga

SEQ ID NO: 34578 - DNA, 396 bp, Oryza sativa
  Clone ID: uC-osrocyp007e03a1
ggaagagaaacacgaagatccattatgtacttacacataataaatagatgtttttaacagaatccctttacatttatttaacaaaaaccagacattggtcttataatcacaggatttgcattttttcacaagaagaaacagggaaaaaatatacgcggtccgcaaaatttcccttttatcatacttatataaacaaaagggccccctcttttcttggaaattatttacaggccctttattttacctttttataggtaaaaaatgcatggccctactatctttgcattatcaatgctggatcaaaattgcagaaatgttcttttggcctatgcaactacgggttggaccagacctttacttgagacagcaatgtcttctgtgccattgggtttacct

SEQ ID NO: 34579 - DNA, 568 bp, Oryza sativa
  unsure (1)..(568): unsure at all n locations
  Clone ID: uC-osrocyp007e03b1
cttcggattcaggtgcaatctacaatgttcttgagcttctcatacaatctggaagaagtgcgccagaggctgtcatgatgatgatccctgaggcgtggcaaaacgatgttaacatggaccctgagagaaaagctttgtatgagttcttttcagcacttatggagccttgggatggaccagctctaatctcatttactgatggccgctaccttggtgcgacccttgatcgtaatggtttgaggccaggccggttttatgtgacctacagtggccgtgtaattatggctagtgaagttggtgtggtcgatgttcctcctcaagatgtttcaagaaagggtaggctaaaccctggaatgatgctattagttgattctgagaaccattgtgttgtgaatgatgatgaattgaagaaagagtactccaaagttcgtccatatggagagtggctgaaaagacaaaggatacaactcacagatatcatagaatctgtaaatgaagcagagagaattgcaccgagcatttcgggtgcacttccaattacanaggagaacatagcagatatgggtat

SEQ ID NO: 34580 - DNA, 341 bp, Oryza sativa
  Clone ID: uC-osrocyp007e04b1
gggaagggagggaatgtccacctggagcctccaccgccagtagtgcccgtccccagcgcatccgcagacgatcctcccttccaggctcaaaaccacaccacccccaccctagagagagaaacaaacagaccaacaatcaaacatactagtacaagtcgaggtagagagagaaagctcgagacaagctaaactagctagagagagatcatgtcggtggcggcggaggggaaggagaagggggttggtggttgggggtggttgtgcggttgcgggggcgtgcgcgctgtgcggtgcggcggcgcgggtgttccgcggggccgtcgcgggcgcgctgtgctggg

SEQ ID NO: 34581 - DNA, 493 bp, Oryza sativa
  Clone ID: uC-osrocyp007e05b1
gctctccactcatcgtcacacgttttcgtacgttacaccactgatcgatcaataatcgctcatcacccgatcgatcgatcgatatattctggcaaatctgtatatagatcgagcctcttattctgcttcttcaggtaagtcggcgtcgagctgatttgttaacgggtaggacgacgtcaagagcggtagctcgagctccgttcgcagccatggcggatgagcatgattggtggaatagcccttgctctgcgcgcaccggcgacgacgaagccgcgtgctcgacggcggacgccgatgagtcagcggttgggagtactccgatgagcttcggccatggcggccagcctgctagtttatctgacgccgccgcctcctcgtcgtcgtcatcgttccttcttgccggacaacacatggattattggacgcaggacttcatgggaggtagagcagcggcagcggccaccgcgagcttcgacacgctgctccagcttca

SEQ ID NO: 34582 - DNA, 517 bp, Oryza sativa
  unsure (1)..(517): unsure at all n locations
  Clone ID: uC-osrocyp007e06b1
cccacgcgtccggaaaaaaataatttattttttataggagaaaaaaagaggagaaaaaaaagggaagaaagagatggacgaggcgtgggagagggcggtggaggcggcgctgcaggccgccggagaggggagctcgtcgccggcgaggagcctgacgctggacggcgccgtgaagtgcctgcacggacggctgcccgcggcggagattctggagcggtaccagagcctggagcacctgtcgatcgccggcgtcggggtcgcgtcgcttgccgggttccctcggctgcggaacctgacgcgcctgacgctctccgacaaccgcatcgccggcggcctcgaccacctcgtcgccgccgggctggcctcgctccgcgacctcgacctcagcaacaatcgaatccaggacgtcggcgacctctcgccgttcgccaacctnncgctcgtctcgctcgacctctacgagtgccccgtcacgcgggtcaaggattacagatccagggtgtcggcatgatccgga

SEQ ID NO: 34583 - DNA, 459 bp, Oryza sativa
  unsure (1)..(459): unsure at all n locations
  Clone ID: uC-osrocyp007e07b1
agcaagtgatccttatatgtatgttaaccagttacttttgcactgggttcgacacgcatttcaaggtcacagagggtccatacggtataagttgttggttgggcagtatgatgcgagttacaaccatatgactggggtagtgatgcgtagacggtttgatcaggataatagttggtctgatactaggttggatgtcgcattgaatacatctcaatcagttatggcacgtacatggatagctgaaggcccgttagattatcctgatggaccgaacggtgccgtctattttaattcgagagtaaatcctactgttgaatttgaagtgccttgggaaaatgacgctcgttgttattttgcccgtaacaccaactacaattctacaaatggaactgcccgttcgcaacccgggtacanatttgcgttgcagggtaactcgagtgattatgatcatttagagac

SEQ ID NO: 34584 - DNA, 491 bp, Oryza sativa
  Clone ID: uC-osrocyp007e08b1
tgatagatcatatcagacaagtaaatctagcttgctgtaaacacagttagttcgtaattatcgcatagggccatggggaagtacagtgtgggtctcgtggttttagggttgctggcccttgcgttttcgaccactgtgctggctgaaacacatgttgttggtgactccaacggttgggacttctctgtgtcgtttgatagctgggctgatggaaaggtcttcgctgctggtgacactcttgttttcaactacaaaccgggcgcacacaacgtgctggccgtggacgcggcgacgtacaggagctgcaaggtgggcagctcggcggacttcgtggcggcggcgacggtgaccgcgtcgttcctcctcaagaagggcgtcaactactacatctgcggcgttcgcggccactgcgccgccgggatgaaactccgggtcgtcggcaactgatgaaacttccgcgacagatcaatcccttatttaatgaaactatg

SEQ ID NO: 34585 - DNA, 491 bp, Oryza sativa
  Clone ID: uC-osrocyp007e09a1
caaatacaaataaacctttactacgtacacaaaaataagttatcttcaagagagaaaacaaaactagaggtacaatcattaagacccgcaattcggctagtagaaaattcgaaacaaaaagctttcaaactgcacgggcaaacatccttgttgcccggtgaaacccaacacaacaatccattgcatacattaggaatgccctgatgcgatgccattgtctgaaaaaactgaccgactcagacgacctacactgcacactacctggacagatttcttccagtacaccaattgacttcaccttccgcattgccccatggccaacagccctcaggtgctactgaaaccatgggacgcatgcaaacaatctgcagattacgtttcaatcagctgataatggtacaaatctgcccacaaacttagaagcactttatgtggacgatgcctggaccagattcatcgtatttggccttggagatccacatctgctgaaa

SEQ ID NO: 34586 - DNA, 468 bp, Oryza sativa
  Clone ID: uC-osrocyp007e09b1
tggacgcgtgggtgagcaaggaaataactgcacttgcccctggcagtatgaagatcaaggtagttgcaccgccagagaggaaatacagtgtctggattggtggttccatcctggcttctctcagtacctttcagcagatgtggatctccaaggccgaatacgatgaatctggtccaggcatcgtccacatgaagtgcttctaagtttgtgggcagatttgtaccattatcagctgattgagacgtgatctgcagattgtttgcatgcgtcccatggtttcagtagcacctgagggctgttggccatggggcaatgcggaaggtgaagtcaattggtgtactggaagaaatctgtccaggtagtgtgcagtgtaggtcgtctgagtcggtcagttttttcagacaatggcatcgcatcagggcattcctaatgtatgcaatggattgttgtgttgggtttcaccgggca

SEQ ID NO: 34587 - DNA, 303 bp, Oryza sativa
  Clone ID: uC-osrocyp007e10a1
ccgcaagggtcacttgccagaaaatacaacacctgttctccactgtttaaacacaatttcacatctatatatcactggatagcaattaagctccccaaattattattgaatcaatcagaagtccccaaaaaaaaacagagaatcccaaaacatgactactgtacagaaatcagtcaggagggccactgcaaacaaggcggtttgcttaatgctcagtttcagtcagcacagcaagaccgacgctttttaagttttcacaccaaatccgggtcattttttgggtccagcagccacctccttgac

SEQ ID NO: 34588 - DNA, 554 bp, Oryza sativa
  Clone ID: uC-osrocyp007e10b1
tcagttagttgaagctgctcaacttgcaagggctccagttcagaagttggcagataggatttcacggttttttgtcccaacggttgtggtggctgcatttcttacatggcttggctggttcgtagctgggcaattcgacatataccctcgagaatggattccaaaggcaatggatagctttgagcttgctctgcagtttggaatatctgttcttgttgttgcatgcccgtgtgctcttggactggctaccccgactgctgttatggttgccactggaaaaggtgcttctcaaggtgttcttattaagggtggcaatgcacttgagaaagctcacaaggttaaagctatcatatttgataaaactggaacgctgactgtcggtaaaccttctgttgttcaaacaaaggtgttctccaagataccgctactagagctgtgtgatttggctgctggtgcagaggcgaacagtgagcatcctctatcaaaggctattgtagagtacaccaagaagctcagggaaacatatggatctcacagtgaccatattatggagt

SEQ ID NO: 34589 - DNA, 536 bp, Oryza sativa
  unsure (1)..(536): unsure at all n locations
  Clone ID: uC-osrocyp007e11b1
tctctctctctctctcctccgcatcaccaccaccgccgccgacgagctccggtcgccgccggcgagaggcgccgcgcgatccgggagatgccgccgctcacggggcccaagtccggggacgctctcttcggcagcgtcgagcgcgtcaacgcggagctgttcacgctcacgtatggggccatcgtgaggcagctgctcacggatctggaggaggtcgaggaggtcaacaagcagcttgatcagatgggctacaacattggaactcggttggttgatgagttcctggccaaatcaaatgtatcaaggtgtgttgacttcaaggagactgccgatgtcattgcaaagcttggattcaaaatgttcttgggtgtgactgcaactgtcaccaattgggatgctgagggtacaagctgcagctttgtattggaggacaatcctctngtagaatttggtgaacttcctgatacttggccaggtcttcagtactgcaatgtgctaagtggagttattaggggtgcactggaaatggtgtctat

SEQ ID NO: 34590 - DNA, 482 bp, Oryza sativa
  Clone ID: uC-osrocyp007e12a1
acgtaacaatacgctatgcccaagacaagtcaatactacaacatctgtggcgagtacagaggtacaaaagtcaggcaccgtaagcctttcgattaaaaaccaaactgaaacacgcacgattttttaacaccccacgaaaaacaatctgatacctagctcctttggtggtggaacctaaagagctttatcttcccaaaacatccacatcattatctgtcatgactatatagtttcgatacgtaaaaaggcagcgttcactcagggatatccgccatgtcttcctttcatttaagcccggccaagatgcttcaagccttgttggcaatgttgttggaaagccagtcaagcccctcatacaacccctcaccagaggtagcacatgtgctctggatgtaccagtgccgctggcgcaaggagtgcagaccaagctttgcggtgatctcagcagcgttcatggcattaggaagatcttgtttgtttgc

SEQ ID NO: 34591 - DNA, 578 bp, Oryza sativa
  unsure (1)..(578): unsure at all n locations
  Clone ID: uC-osrocyp007e12b1
ctctccctctccgcccatttctcctctccacctgcgatccatccgcgcccgcgaggaggagggagccggacgccgccgcggggagagcaggggagagaaggagaggaggagatcgccgtcgccgtcgccgtcgccgtcgccgatctcgagcgggagcggagatggggctcacgttcacgaagctgttcagccgcctcttcgccaagaaggagatgaggatcctcatggtcggtctcgatgcggccggtaaaaccaccatcctctacaagctcaagctcggcgagatcgtcaccactatccccaccatcggttttaatgtcgaaactgttgagtacaagaacattagcttcaccgtttgggatgttggtggtcaggacaagatcaggcccctgtggaggcactatttccagaacacccagggcctcatttttgttgtggacagcaatgacagagagcgtgttgttgaggccagggatgagctccaccgtatgctgaatgaggatgagctacgtgatgctgtgctgctgggtgttgcaaacaaacaagatcttnctaatgccatgaacgctgctgagatc

SEQ ID NO: 34592 - DNA, 225 bp, Oryza sativa
  Clone ID: uC-osrocyp007f01a1
ttttggttttttattttttttttttttttttctttttattaattatatcaacccatcccaaacataccccacaacacccacttaagcccacaaaaaccacacgcagttaacaccggcaaggaaacccgctttttaagaagacgcacacgcgcacttaacacattttctcctgccccaaacataccagctcgcaccatctcccacaccacaagttcataagacaag

SEQ ID NO: 34593 - DNA, 452 bp, Oryza sativa
  Clone ID: uC-osrocyp007f01b1
gcctgcggtagcagcgctgatcgacctcatggcgcggcggaggggccagtcagcagccaacgggcccaagcccaccaccctggagctggtggaccagcatgatgaggcaccacaggaggacagcgaggatgatggatacggggccggagacgacctagacttagatgacagtgactacggcctgccaggtgccatgtcagcactggctctggccaagaaggccacaggcaggccagggacagcaggcagcggcagccccattgcagcagtgcagcccgccaaggccaagcccgtgcagggccctgttcgtgtgcggtcctggcctgctggtcccctgccctccgagcacagtgatgacaagagtgagaagggtgtggccaagcctaaggacaagatcaacaggcagattggcctggggcccctactggctgagctcaagatcaagggacaga

SEQ ID NO: 34594 - DNA, 503 bp, Oryza sativa
  Clone ID: uC-osrocyp007f02a1
ttttgttagttaaagtattttacttcaataattcaagacaactcaaacttagttggcacacatgtactccaccccctatcactagagttgttttcttttttgtacaagatcatcctaacattcccacaaggacataaagaaacagcagaaccttcccgggaaaatttcactgagacaggtgcattccgtgcacgtacaataatcatcaccatcatcgtatcatccaacctacaggaaaacgcaaattcaaggtactcttgtccaaacctgtaggtggccagtgatttgctcccatcggctacaactaccagactcaaaaaaactagacacaggtatgatgctaataagcttagcatgatcgactgatggacagacagtaataacaaataggaaacggagggaactatatgtgtcaactcgatgaactctataatatatggatgatttccagcgcccttctggcaaaaataacgcccttgtaaatctatcgtcaccatttaaac

SEQ ID NO: 34595 - DNA, 543 bp, Oryza sativa
  Clone ID: uC-osrocyp007f02b1
tgctgcgcctgctggtaccgccgcgcaattcccgcgggaaacccagctgccattgctgatcctgttggggacagtggtggggatattgctggaatggggtcagatctctttggttcctatgctgagtcatcttgtgctgctcttgtcgtggcttcaatctcttcttttggaattaaccatgaattcactcctatgctgtacccgctcctgattagctcagttggtatcattgcttgtctgataaccacacttttcgccactgatttttttgagatcaaggctgttgatgaaattgagcctgccctcaagaagcaacttataatttccaccgttgtgatgacggttggcattgcacttgtcagttggttaggcctcccatattccttcacaatattcaactttggtgcccagaagactgtgtataactggcaacttttcttgtgtgtggcggttggtctttgggctggactaatcatcggatttgtgacagagtattacacaagcaacgcctacagccctgtccaagacgttgctgattcctgc

SEQ ID NO: 34596 - DNA, 433 bp, Oryza sativa
  Clone ID: uC-osrocyp007f03a1
ataggagcaaaacatttctattaccacaactttttaaggatggaattgagtagcaatactttcaccccaaaatacagtttagcgacaatatcttagaaaagccgcttgctttgccgccatggctggcaagctgagcagagcagcttacacaaagaacacgagatcactataaaccaaacggcaacgaacgaagaaaatacagggtcttttttgtctgaagatacacgaagcggttcgttttcttttatttttagtctcctctcctcctcgatgatgggtgtatggcaatggcaatggcgatgggatcttggcttagttgatgggaaggggctcgccgttccacttctttgaggctgtccagcatggggtcgatgagcttgtcctggctgatgcctaggaacaccttgttgtactacctagcgggtacttgagc

SEQ ID NO: 34597 - DNA, 569 bp, Oryza sativa
  Clone ID: uC-osrocyp007f03b1
ctgctgctccggctggtggtgctccggcataattgcgctaccttctcatgcgtctctttttcagtatcgaatcctctcttctcctcgggcccaccaccaccaccgtagcaatggcgggcaacgggccgatcaacaaggaggacccgctcaactggggcgcggcggcggccgagatggccgggagtcacattgacaaggcgaagcgcatggtggcgcaaatgcgcgagccgctggtcaagatccagggcgccaccctccgcgtcggccaggtggccgccgtcgcacacttcaaggacgccatccgcgcaatacgcccagctcataaatggaggcccgcccgcgcgtcaaggccaggaacgagtggatcctcaactgcatcgcccactgcggcgacatctacagcgtcaccaccggcttaggcggcaccttccaccgccgcaccaaggacggccccgcccttcaagtcgagctcctcaggcatctcaacgccggaatctttggcactggctccgatggccacacgctgccgtcagagacggtgcgggcggccatgctcgggcgcataacac

SEQ ID NO: 34598 - DNA, 461 bp, Oryza sativa
  Clone ID: uC-osrocyp007f04b1
cccacgcgtccgagactatctcctccccctcctcctcctctccccgccgacgaccccgccgagctacatctccgccgtgctgatcgcgtggagccgaggagaggagcggcggccaacgctacgaggagaggagagtgggggaggggaggggagctagccttatcttacccgctccgccgaagcctatggactcggagcactggatctcgcgcctggccgccgccaagcggttctacgccgcgcagctcggccacgccgatcgagcggggatggaggaggtggacatggacgaggaggtgaggccggagttcgcgtgcccctactgctacgaggaccacgacgtcgtctccctttgcgcgcacctggaggaggagcaccccttcgagccccatgcggcgccttgccctatatgttttgataagattgcataagatatgcttaattatattactgtgcaacat

SEQ ID NO: 34599 - DNA, 557 bp, Oryza sativa
  unsure (1)..(557): unsure at all n locations
  Clone ID: uC-osrocyp007f05b1
ccgcatcgcttcctccgccgccacccccatggccaccaccaccaccacctcctcctcctccaattcccaaaaccctaaccccttcaacctcccgccatggctccgcagcctccgctgccccttcaccttcctctgcccgcccccaccgcccccgccgccccctcctcctccgccgccgccgcctcccccgctggaggtggtgtcgccgtccccgcggtggaggcggccggggctgagggtgaccacggagtacgacagcgaggaggccatgttcgcgcacaaggtgtcgtgcaaggtcgcgggcgggctcgccaagctgcggctgtcgttccagagcgacccgtcggggcaggggttggtggaggagggcgacccgcggcggcagctattcgtcgcgcccgtggtcgggctcatcgccaagaatttctccgtgctgtacgacgtcgaggcccgcaacgcgctgctcagcgggcagtgctccctccccggnggngccatccagcttcgcgggtcacacgatgtcaaggagcgacaaggagaagtctcagtgatcacta

SEQ ID NO: 34600 - DNA, 397 bp, Oryza sativa
  Clone ID: uC-osrocyp007f06b1
acattctcgctgagctagcaacggaagcgcggggagtatacaagagggggctctagagccatatctggcgcctatgcgcccccgatccctgatcggcctcacagtgcagtccgagctagtacgcatcgaccacgtacacgacctctctagcctacccgagcactctactaaaagagctattgcggagaactgtagctgtgcgctggctgacacaaaaagtacagacgttgcgtctggcaccggcttgccaggaaatatactcgctggtgcagtcgctcatcattacgctggcgattgtaccggtccatcccacgaggcgctctgagacgctctagatgggacactgatgacgacagacgcgggtacctgagaagcgcagtctcaggaacatcaggac

SEQ ID NO: 34601 - DNA, 454 bp, Oryza sativa
  unsure (1)..(454): unsure at all n locations
  Clone ID: uC-osrocyp007f07b1
ctcggcgagcccgcggccgtgcagcgggaggagggtggtggcgaggaagaggccgaggcacgaggcggcggtgaacagcgtgcggaagctgcagcggcgggagatcagctcctgccgcgaccgggccttctccatgagcgccgcgcaggagcgcttccgcaacatacagctccaggaggagtttgacacccatgatcctaaggaaaacagcttgctactaccttacttgaggaaaaggtcaaaaattattgagatagttgcagcacgcgacatagtttttgctttatcacagtccggagtgtgcgctgcttttagtagagagacaaataggagaatatgctttctgaatggaagtccagatgaagttatccgcagtttattctacaacangaataatgagtcactcattacagtatcagtgtatggttctgaaaatttcagtgccttgcgatgc

SEQ ID NO: 34602 - DNA, 514 bp, Oryza sativa
  unsure (1)..(514): unsure at all n locations
  Clone ID: uC-osrocyp007f08b1
ctaagccgtaagtgagaagttgaaggcgatagaacctcttagaaaccgtttaggaaagttccgcgatgaaaacaatgctatccgggcacagggtgcaggcatatgttcttcaattgaagagcttgagaaatcgatcaagagattgaacgaccgcatatctcatgagagcatacccttggatgaggagaagcggttgatcaaacagattagagagcttgaaaagaccagaccgaaagtcatctccacttctgctaaccgagctcaaatccaagatacagtggtcgaaagagacgccatacaggatcaggttaaaatcatcggggagggcattgatggagtaaagaaggagcgacaagcagtcaggtctaaaattaaggtcctggaggatgagctaaaggctattgacatggagatgggttcgcttcaagaagatttaactgctgccaatgccagaaaggacanggcacatgaatcattggtccaatngagacatgcacgagatgccctatacgca

SEQ ID NO: 34603 - DNA, 484 bp, Oryza sativa
  Clone ID: uC-osrocyp007f09a1
gcaggaaaacacaagcataaaatctgaaaatgatgtctttcggagatgttttcatcattaaaggtcaacaaatgtcatggatcttacagctttaagtgaagcaacacagatatgaggctcaagaataacaactctggtatatactaacatctaaactatgatcgcagctatatatggctagttgaacatgaaaattgtggcaccgagagggggatcaaagagaacaaaagggacaagaaaacaaaaaccatggcatcccagcaatgtcgccgaagaacgtttgtactccataaactgccctggcttcttggccaccaaaacatggctgatcacttcacggaacaagccacacatacaaagtttttcgccccatctgtctaaaccggggtcaatttttagtcacactttatgttcctgtagatccttttcacaaacagtgtcgatccaagatacccgacagcaccgcagagtgttcctaaaccta

SEQ ID NO: 34604 - DNA, 498 bp, Oryza sativa
  unsure (1)..(498): unsure at all n locations
  Clone ID: uC-osrocyp007f09b1
ccgcgctccctccctctcctctcctcgcactcgccgtccctcccaatggcctccgctgccgcccacgcggccaccgccaccgccgccgccgtcctcctcgtcgtcttcctcgccccccttgccgccgcctccgactccgaccacaagtaccaatcggaggagaaggttatgctctgggtgaacaaggttggcccgtacaacaacccacaggaaacttacaactactacagccttccgttttgccatccgtccaataaccccgtgcataaatggggagggcttggggaggttctcggtggaaatgagctgattgacagccagatcgacataaagtttggaagggatgttgacaagggtaccatttgttcaattgaacttgatcctgacaaggccaaacagttatctgatgcgattgagagttcatattgggttgaattcttcattgatgatctgcctctatggngttctggtggagaggcagacagaaatagcgataac

SEQ ID NO: 34605 - DNA, 423 bp, Oryza sativa
  Clone ID: uC-osrocyp007f10b1
ttgacgcgtgggaaaacctcgtggaatgggggagccgccggggaagaccgggcgacgtgacgcgggcgggacggcgccggcggtggaagaccggtggacgcagctcccgccggagctcctcccgctcatctgcaagaagctgccggactcggccgacttcgtgcgcttccggacggtatgcagcgcgtggcgcgacgccgccccgttgtccgacgtcccgccgcagctgccgtgggtcgtcgagcgccgcgggtccgcgttccaggcgagggcccatttccgcttctactcgcctagctccgggaggacgtacggcgtccgtggctacggcggccgctcctggctcgtcatgggcggcgcgtgccaggagcacctcgtcaccaccgtggacctctccacgacggcgctgtacaacccgctcac

SEQ ID NO: 34606 - DNA, 64 bp, Oryza sativa
  unsure (1)..(64): unsure at all n locations
  Clone ID: uC-osrocyp007f11a1
catagcacagcagtacagtaaagcttaggaatcctcttagagcaggccagcanccttttttttt

SEQ ID NO: 34607 - DNA, 186 bp, Oryza sativa
  Clone ID: uC-osrocyp007f11b1
acaacgaattgaattcaattttatttgttgacaaatgtaacaagcaaatccatatttacaatttgtaggctactaggcacacacctaccaaaagaatcgccgccgttgtttttacgattccgcctccgtctccgccgctgtattcaccgcgttctgattaaatgaagtttaccagcgctaggcctg

SEQ ID NO: 34608 - DNA, 270 bp, Oryza sativa
  Clone ID: uC-osrocyp007f12a1
gggaattaaaactccatcatggtcttccgggaacaggaaaacaatcctgaagacaacatcacggagaatcagcccaccgggccgcctgactgaggttcaagacaccaaaccaaatgaaacacgggatcagcgccaaaacaagggagccactggatcagtgggcaaccacagggtggcccctcgtccagggccttcgaccgggggttacagcacgccccccggagggctggatcaggagcccacccccggcggagaaggacccgttgggaa

SEQ ID NO: 34609 - DNA, 456 bp, Oryza sativa
  unsure (1)..(456): unsure at all n locations
  Clone ID: uC-osrocyp007f12b1
tggacgcgtgggggagatcggaagagagagagagagattgaggaggaggaggaggaggagccatggctgcggtggtgcgtggcgtgttgaacggcatccgggagaagggcctctccaacttcctccgccatgcccgcgacgaaggctacttcaaatgccttctggatggaaacctcttgcaaactaaaatccacaatatcggcgccacacttgtaggagtagacaagttcggcaacaaatattatgaaaaactacatgacactcagtatggaaggcacaggtgggtagaatatgcagagaaagggcgctacaatgcatcccaagtgccccctgaatggcatggatggctgcaccacatcaccgacagcactggggacgagctactggagcagaatgcttaagcgtacatcgtggatcacaaggagaacttctncggcgagggtgaggaactgatct

SEQ ID NO: 34610 - DNA, 365 bp, Oryza sativa
  Clone ID: uC-osrocyp007g01b1
caccgagccagcgtccagaaggaggggagcggagcgccatcagccgtccgatcgagcgatcccatagctgtcgctctctccacctctgctgctgctgccgctgccgccgcggcgcgggcgctcgcggcgagggtgacgacgacagggggttacaccgcgtctgcggcgtcgacggcgatgaggcgggcggccgcggcggtggaagggaagggcgctgcggggatgacgcatgcgaaggacgggccgaggccaaacgtcccagatagaggcgagctgaactctcccgcgccgatggcggcagcggccctgtgcacagtcaacgcgcggcacgacgcggccatgatctccacccttctcagccactc

SEQ ID NO: 34611 - DNA, 410 bp, Oryza sativa
  Clone ID: uC-osrocyp007g02a1
accaacttattttctagtgtttcaatcttccataacagtatactttacacgagcaacagagatagcctacccaatatataccatcattattggttcctacaagaatcacagtggtaattgtactacatctttaatctcctttttttggagagcctacagtcgatcagagtctcacagataacttgatatctcctaacaggggcgcttggcaactctgtccatcgctttatggaaacaattgtggtataagtagggaactaactcttgtacaacctagatcatcttaatggcttcgatggtaacttcttaacaaggctggtgttgcccggttaccaataatcgagcgcccttcaccagttcctccttaatcataaaaaggagagcagaagcaaaaacactttgtacgattt

SEQ ID NO: 34612 - DNA, 453 bp, Oryza sativa
  Clone ID: uC-osrocyp007g02b1
gctgttctgtcagccgcactgaccacctgtcttggggagaccagagagagaatcatggcccagctactcacctacccgctccaatcggggtgctgtccgactccgacaggacgctaatcctccaagccggcgatcaaggacggcgccgtccgccagatgtgcctggtggtgaagcatgaagggtgggagcggctgtacggagcactcatgccctcgcttgttggcactgcggcctcccagggtgtctactattacttctaccagatattccggagcagggcggaggccgcggctctccagcgatccacgacaggaatcggtgatggatccgtcgggatgctccaatccctcactgtcgctgcgctttctggatgtgttaatgtacttctcacaaacccaatttgggtaattgttacacgaatgcaaactcacccggaggcatacaaacagcag

SEQ ID NO: 34613 - DNA, 451 bp, Oryza sativa
  Clone ID: uC-osrocyp007g03a1
acttgagtcactagctcattcgctagtgctagctttgttgctatcaacttcattcaaacagagaccagctggcaacagggatacagtacatatatacatgcattctggtgttcatttgccttattaccatgcaccaatataatgccatactcctctctagcttatcataaggactaactaactaattatcccagagcatggcaccaatataattgatccacttgagaccaagcatagtgcacacttgaacacatgcatgcattggcatgcacatagaaccggcttgatcacaaacttaatcatcatactagcttccttggattaatatgaacatatcacatcccttgcaatttgcatgaattcttgcatgctcgatcattctgcctttttctgatcgttgcaaatagtagctagccggattatattaattaattaatttaatgaatactag

SEQ ID NO: 34614 - DNA, 338 bp, Oryza sativa
  Clone ID: uC-osrocyp007g03b1
gctgcgcctgctgcggcgccccgccataactcccgggacctacgcatgctaccatcagccactccaagacgctagctgcattgtggggagatagagaggcagccatggctctttcaccactaacaaaggcggtgacgggggcgcctgcttgcaatgcaccctggatgctggcggcgttaccgtcagcagccgttcctgacgatctggctgacagaagagaaactgctgaacgcactgctgaagatcgtgttccacgagatcagcgccgacgacgcctacgcctccatcgacctgcacatcctggagcagcctttcgacaacatgtgcgacgtcagcta

SEQ ID NO: 34615 - DNA, 494 bp, Oryza sativa
  Clone ID: uC-osrocyp007g04a1
tttgtttgcacaagaagccaaacgtgagagcttgtacaaaacttcagctctcttcaatgttgactacgctaattaaaattgtaactccataaaaactcggctacgccgagaaaactgtaattacaacagatacggcgtagccaattcacgcaatgcgcacccatacggctacagtatggttcatttaacgtctgatagacgatttcttaaggtgctgccgcaggtggcgacaaatactgaaaacagcgaggtaatccaataaagaaataacattggaaatcctctccagcggcaacccaagtctctaaatgatcataatcactcgagttaccctgcaacgcaaatttgtacccgggttgcgaacgggcagttccatttgtagaattgtagttggtgttacgggcaaaataacaacgagcgtcattttccaaggcacttcaaattcaacagtaggatttactcttcgaattaaaatagacggcaccgttcggtcc

SEQ ID NO: 34616 - DNA, 542 bp, Oryza sativa
  unsure (1)..(542): unsure at all n locations
  Clone ID: uC-osrocyp007g04b1
atactgcttcgcagaatgttgaatttttggatcatgctggattttataaagtagatccttcaggtgaattagatgacacatttaaacttcaagatagtgatgatttaccactgaatgagttttttaaaagacctatacaaattgctggttttggatggggtgttggaactccattcgctctcacttttgatccatggtcgtcttattttaataatccccgtgtagttaataggatttctaactacaaattattgagagctaagctgcatgtaaagtttattttgaatggtaatgctttttattatggacgtattatggcgtcttatcatccagcaaagtctttagactcttttggtaatagtcctcttgtgtctgaggatgctgtgattgagtcgcagagaccacatgttttcttggatccaactaacagtcagggtggagacatgattttgcctttttattggcgccataattatatggatatagtaaatgcccgatggngtagtatnggtcagatcgatatgagatctttacctatttta

SEQ ID NO: 34617 - DNA, 170 bp, Oryza sativa
  Clone ID: uC-osrocyp007g05a1
tttggttttttagaactattttttttttattcacataaatcacagctagagttcaaacttcttagaagcactttctggggacaacagaaggcccagattcatcatatccttccttggagatccacattcgtgggaatgccgacaaccgaagccacgatagactcctccaa

SEQ ID NO: 34618 - DNA, 475 bp, Oryza sativa
  Clone ID: uC-osrocyp007g05b1
gatagatcatatcatacaagtaaatctagctggctgtaaacacagttagttcgtaattatcgcatagggccatggggaagtacagtgtgggtctcgtggttttagggttgctggcccttgcgttttcgaccactgtgctggctgaaacacatgttgttggtgactccaacggttgggacttctctgtgtcgtttgatagctgggctgatggaaaggtcttcgctgctggtgacactcttgttttcaactacataccgggcgcacacaacgtgctggccgaggacgcggcgacgtacaggagctgcaaggtgggcagctcggcggactcggtggcggcggccacggggaccgcgtcgatcctcctcaagaagggcgtgaactactacatctgcggtgtccccggtcactgcgccgtcgggatgaaactgcgggtcgtcggcaactgatgaaacttcggcgacagatcaatccctta

SEQ ID NO: 34619 - DNA, 357 bp, Oryza sativa
  Clone ID: uC-osrocyp007g06a1
aattaaaggacccgtgtatagcactataatcagcctctcatttggctataattaatataggagtacattactatatagcggctaataagcatttggaggatcagttttgacggtcacttttggggacggtggccgggccggcgaaaaagcggttgatcgccgggaagacctcggggcgctgcgtgccgaggaatcggcggaaggcgtggtggtgatacttctcccccttgtgggcgttctccagcacggggctctggcgggggcttttgttcacccttacgtccgggtttatgaacaccgttccttgtcaggtggaaacaccccattcctcccaccagagacatcgccacgatcagg

SEQ ID NO: 34620 - DNA, 489 bp, Oryza sativa
  unsure (1)..(489): unsure at all n locations
  Clone ID: uC-osrocyp007g06b1
gtttcaaggcttcgatctatcggatcattcgttgcagtcctagcaagaaacaaaaacagcagcagcgtcaggcagacgaggatcatccatcgatcgacatgggccgttgggtgaagccagatgtatacccgctgatcgtggcgatgtctctggtgggagggatgtgcgtgttccagctgacgaggaacgtgttcatgaacccggacgtgagggtgaacaagagccaccgccagagcgccgtgctggagaacgccgacgagggggagaagtatcaccaccacgccttccgccgattcctcggcacgcagcgccccgaggtcttcccggcgatcaaccgcttcttcgccggcccggccaccgtccccaagagtgaccgtcaaaactgatcctncaaatgcttattagccgctatatagtaatgtactcctatattaattatagcccaatgagagggctgattatagtgctatacacngggtccctttattt

SEQ ID NO: 34621 - DNA, 457 bp, Oryza sativa
  Clone ID: uC-osrocyp007g07b1
acgcaaacatgacgactttcattgcgtaatacaggtcgttgaaagaacaaccaacaaagcgaatgcacctcttttgggttcttttttaattgctaggcggccttgcaactacatcaaccaatataccaccactatatgctcatgctattgtctccatagagactacgctacttatcaactcacacttgcttggaataaataccaactaaatgaattgacttgatctcttctcatacaagtcacagacccgaattgggtagtgaagaatgaatggacaagagaagagaacaaaatctatacattcgtgcatcaatgtacttgaggtgcgtctcttaatgctacattcaaactgctttccattgtttgccaccctagtccaacgttgctgccttgcatcatggctacaaattcggcgtagtcaaatttgcccgtcattggtttgatcaacccttgaaat

SEQ ID NO: 34622 - DNA, 384 bp, Oryza sativa
  Clone ID: uC-osrocyp007g08b1
atgcaaacaacaacaaaaaccacttctcgtgggtagaagagagagagagcgaggcgatttcgaccaagaagatggccgggatcgtggtggtgttcgacttcgacaagacgatcatcgacgtcgacagcgacaactgggtcgtggacgggctcggcgcgacggaggagttcgagcggctgctgcccaccatgccgtggaacaccctcatggacaccatgatgggcgagctccacgcgagcggcaagtcgctcgccgacgtcgcgggcgtgctcaggtcggcgccgcttcgaccgcgcgtcgtcgccgccatcaaggcctgctacggcctgggctgcgacctccggatcctcagcgacgccaaccgcttcttcatcgacaccattc

SEQ ID NO: 34623 - DNA, 368 bp, Oryza sativa
  Clone ID: uC-osrocyp007g09a1
aacatacgcaacatagatcttattaatccatcaagttccagtcacagcagtagataagaggcatagagcagctaagcccatagtaattacacgcagtttacctggcaaggtaaccgctttttaagaggcgcgcacgcgcacttaacacatatctccgcgacaaatataccagtcgcacaacaccacacacagttcataagcaagcaggccctgagactgtagcagcagccccggcggccggcgctagccttacacctcgtcacattatttacgcatatacacacatagttaggttatagatagggatgggtcaagagcacacgatcttcactggtctttcttctccctagcgatgaggtccatcacag

SEQ ID NO: 34624 - DNA, 376 bp, Oryza sativa
  Clone ID: uC-osrocyp007g09b1
gatgttgatgttcccttcagttcaactgctgctgcttttgtgcctgtctttgatgagcctgcgcctgaacctgctgtgactcctgtgcctccaactgttaatgtgcctgctggtaatgcacctgcgtctgttggtgcatcatcatctgatcatcatggcattgacaatctcacagaagagaaactgctgaaggaacttgaggaaatgggttttaggcaggtcgatctgaacaaggagatactcaggcagaacaagtacaacctggagcagtctgtcgatgatctctgtggcgtcagcgaatgggaccctctcctggaggagttgcaggaaatgggctttgaggacactgagataaaccaggagatgctcgagaaga

SEQ ID NO: 34625 - DNA, 389 bp, Oryza sativa
  Clone ID: uC-osrocyp007g10a1
agtatctgaagcagctcagatgacaaaccagtatgcaggacagattttattatatgagcactgctatgcagactagctcacttgtatcattcagaaacaacaaaatagaacacagttctatgcagatcttattttccgatcaaacaaggaggatcagacagacgagatggagcagatatacacctcactctgctccaaggagggcaaggagtatatcctcgtagtctctggttgtatctttagcaacagctcgctccaatgggacactgtttctcttctggtaggcctcctttatcagcttcaggtctacctcggcacgagttgttatgatccttgtaagagagttttcggctgtgcccattcctcctagagccaatcgaatgactttc

SEQ ID NO: 34626 - DNA, 546 bp, Oryza sativa
  Clone ID: uC-osrocyp007g10b1
gaggcataaagtgtgagaccgtgattggatcgatcaccggagcgacgatcaatggcgacgctcaccgtgcccgccgccgtgccgcccgtcgccgaggactgcgagcagctgcgcaaggcgttcaaagggtggggcacgaacgagaagctcatcatctccatcctcgcccaccgcgacgcggcgcagcgccgggcgatccgccgcgcctacgccgaggcgtacggcgaggagctgctccgcgccctcaacgacgagatccacggcaaattcgagagggcggtgatccagtggacgctggacccggcggagcgggacgcggtgctggcgaacgaggaggcgaggaagtggcacccggggggccgcgcgctcgtcgagatcgcgtgcacgcgcactccatcgcagctcttcgctgcgaagcaggcgtaccacgagcgcttcaagaggtcgctcgaggaggacgtcgcggcgcacatcaccggcgactaccgtaagcttttgggtgcacttgtgactgtatatcgctatgatgggccagaggtgaacaca

SEQ ID NO: 34627 - DNA, 448 bp, Oryza sativa
  Clone ID: uC-osrocyp007g11a1
gtcattgacgatgtggaccattcagcataactttgattagaagaatcacttttcacagttcgataacaatgcgttacatgtcatgatcctcttttgatgtaaaaacaaaagggattttacttgccgtttccaaactgtctatttaggttgctcaagtagaaaacaacagtaagtccgaatcacacaacatttttcacactaatttggacacagcaagaacagagacgctgttagttaaacgccgtccactatctagggttgttttatggttaattcagctctcaagtgtagtaccccctcgatgaagaagaggctgtcatcagccatgaacgatgaccatggaattgcaaatagattccggtatccaaccgccttttcaccggtgaaggtttagtagcccttgtacttgctgacaaactcgcctgatggcctggtcttgcggcaaact

SEQ ID NO: 34628 - DNA, 263 bp, Oryza sativa
  Clone ID: uC-osrocyp007g11b1
ccccctccgcctcttcttcctcgcctccgcgggctccttctccttctggaagctgctgctgctgctctcgctagggttagggtttcggcgatggaggcggcggtggcggtggaggtggagaggtgaggagaggaggtcgcgggcgcacgagtgcggtttggttgattggaaggggaggagaggggggatggacccggacttctcgcgggcgatcctgggcccgagcttcgctaacgtatacaacttctgtaacttcttcgacc

SEQ ID NO: 34629 - DNA, 75 bp, Oryza sativa
  Clone ID: uC-osrocyp007g12a1
tgttttttttttttttttttttttttattaccacaaccgctgaaggaaggaaacgcagagcacaacactcacccc

SEQ ID NO: 34630 - DNA, 428 bp, Oryza sativa
  Clone ID: uC-osrocyp007g12b1
cgctaattgagaggaccgtccgcgtcgctccccgcgtgagcgaccgggcgggcgtcaaccctagcgccgccgccgctttccctctccctcccccaccccgccgctgccggagcggccgggcctcggctcagtgtgcaaggacggcggcggcggggcagtttgccgtggaacggcgggcccggtcctgcgcggggaggtcggtcggcgttcggtggtggctgcggcgacccgacggcgagtcactctagcgacggcggcggggtgggacgacgaagagcagcagctccttggagacggcgggaggaagttgaaggccggagaccgaggggacggccagatccggccgtctcctttctggatctggaggtcgtcggcgtgggggtgactggcgcgcgtggtgaaagcgtgaccgcgccagggcttgaaga

SEQ ID NO: 34631 - DNA, 205 bp, Oryza sativa
  Clone ID: uC-osrocyp007h01b1
ttatcgccatggccgcgtcgccgtcgccgccgccgctgcaggaagatactaagatcaggatcaccagacaagatgtcaccgaacaaactacgaggacaaccggcttcgatggattttccaaagctaagatgagtaatgatcagatctacttgtacatcgaagcaaacttgcagtattattatgggaccctgactttggagtacag

SEQ ID NO: 34632 - DNA, 358 bp, Oryza sativa
  Clone ID: uC-osrocyp007h02b1
tttatcattgaggagcttggcatagcaagcagaagggatcaataaatagcatgcatggactcgaccgactactacgtccacgtccgggaaggcgatctcctcgcggacgtgctccccggctaggcactttctgtaactatatataccgaagaacaaacagtataatcgctgcatgactaaaaaatgatttgcgtactgcagctctctctcatcacagtttcgcaatggccaaaaaaacactactgcaggaggtttgcgcggtggcgctggtggcgctgtgcgcgtgcggcgtcgcggcgtcaccgtcgtcgccggcgggagcggtgtgcctgaagcacgtcgcgaggatcacggagta

SEQ ID NO: 34633 - DNA, 454 bp, Oryza sativa
  Clone ID: uC-osrocyp007h03b1
gcggttgtcgccgtgaagaaggtggcgcacgggtcgaggcaggggatgagggagttcgtggcggaggtggtcagcatcggccggctccggcaccggaacctcgtgcagctgctcggctactgccggcgcaagggcgagctcctgctggtgtacgactacatgcccaacggcagcctggacaagcagctgtacgaccagggcaagatcaccctgagatgggcgcagaggttccgcatcatcaggggcgtcgcgtccgggctgctctacctccacgaggactgggagcaggtggtggtgcacagggacatcaaggccagcaacgtgctgctcgacgccgacatgaacggccggctcggcgacttcggcctggcgcggctgtacgaccacgggaccgacccgcacacgacgcacgtggtgggcaccatgggctacctgggcgccgagcttgggcaca

SEQ ID NO: 34634 - DNA, 407 bp, Oryza sativa
  Clone ID: uC-osrocyp007h04a1
tttgggtatttagagatgctgatttacatatgaaggtcgatagataccggctaaagtgacctgaagacaaaatcggaactcctctgcacacaacttaaaagaggagacctcaactcaaaatggaacatagatgaagacgccagaaaaggttccaaaagaaaatgcagggaaagacttcctctccacaccaccactaaaaactcatgtaaattgtctccttgctctcctctctttctctctctcccctcagcacagttactggaaactgctatacaacatggggttaatacattcttaaaaagtgaccaaaatctggaagctctcgctgcgcctttcacctttttcggccttcaggttaatatgataatggcaggttcaggggaaactggaagcaccctctctggctc

SEQ ID NO: 34635 - DNA, 569 bp, Oryza sativa
  unsure (1)..(569): unsure at all n locations
  Clone ID: uC-osrocyp007h04b1
ctaatgcaggagatcaggaaccattccctatgggtacaaacatccgagccaggtcagggagatcgcgagcttcctctggcgaagaaagccaccaggacatctcaatcacctcggttaattgtgacacttctaccaatggagttgatactacagggcctgccaaggactgagtaacacaactgctctggatcactaacccccaaatcccaaatcataacttttgcgacgcggtttccatttcccagttttccgccctttttcccccaactttggttttttttggtatgacccccaatctgtatttattaacttccatgaatgcgggttaccgaagacttggctagattgctgcaacattctgtccctgatggaaacatggatagagagacagagagggtgcttccagtttcccctgaacctaccattatcatattaaccttgaggccgagaaaggtgaaaggcgcagcgagagcttccagactctggtcactttttaagaatgtattaaccncatgtngtatagcagnttccagtaactgtgctgaggggagagagagacagagaggaga

SEQ ID NO: 34636 - DNA, 351 bp, Oryza sativa
  Clone ID: uC-osrocyp007h05a1
acggcgggagcaggagctggctgcggcagggggagggggggcggcagcgggaacggccgagggcatggggggcgacatggcgggccccgtggacggcgttccgggggcgctgtacagcggcagggagctgccgggcgagcccccgtagtacgcctgctccgagcctcgtgaaccgcagtccgaagatcgaccgcacctttcgctcgttccgcgcagggcgtggccagtagcatagctggaactactgcgaattcacaacgaacaccgtgaagcacggcaggactatgattctatagttgccagatttgtttcgcgtagaggcagatgcaccccgtgatgaacaggcttcac

SEQ ID NO: 34637 - DNA, 292 bp, Oryza sativa
  Clone ID: uC-osrocyp007h05b1
ttttcgccgctgctgtcttctctttctgtcttccgaggaagaccttaaccaccaacctcagccgttagaaatgggccgcaggcacaccgggacggcgggccccctggggctgatcgcgtttgggttcacggcgtgcctgatgatgctgagcttcctgtacccgggggcggcctcggggtacatgatcccgctggcgttcatcttcggcggcattgtgctgatcatctgtgggatcattgagctctaccgcgaggacgtcttccacggcacggtgttcgggtgctacgggtgc

SEQ ID NO: 34638 - DNA, 237 bp, Oryza sativa
  Clone ID: uC-osrocyp007h06a1
tttgtgttttttttaaatagaaaaaaaaaaaataaataaataaacaaattttttttttttttttttttaaattaatttattatcgaggccttagaaaatctctcagatggaaagaaattgttattgttttaataaaacaaaatgaaaattgcatttttttataaattttataattttgaaaaatgaaattatagttttaaataaacataaaaaaataaaagtaaaaaaaattttttt

SEQ ID NO: 34639 - DNA, 386 bp, Oryza sativa
  Clone ID: uC-osrocyp007h07b1
atcgccatggccgcgtcgccgtcgccgccgccgctgcaggagctcaccatcacgcggcccgacgactggcacctccacctccgggaaggcgatgtcctcgcggccgtgctcccccacagcgcgatgcattttgggagggccatcgtgatgcccaacctgaagccaccggtgaccacgacagcgcgagctttggagtacagggaggagatcctcagggcgctgccgcctgggagcaactttgtgccgctcatgacgctctacctcacggacaatactagcccagaggagatcaagctcgcaaaaaagagtggcgtggtttttgctgtgaagttgtacccttctggagcaactaccaactcccaagatggtgtcactgatatatttgg

SEQ ID NO: 34640 - DNA, 411 bp, Oryza sativa
  unsure (1)..(411): unsure at all n locations
  Clone ID: uC-osrocyp007h08a1
caaactgcttaactttactcactaaaccacatcatatatatctctttggtcccaagcatctcatagcccaggccattacccacaccatactatcatcctatatcagtatttcagtagctacacgttggcaattcaggcggaccgatgacgagctcttcttcagggaaggcgcatggcttgcccgccgccccgagctccgggcacggcaccggcgagacgtcggaggcgacacccttgacatcgntgcagttccattgcagcttcttggcgtccggcgcgagctgcgcggtgacgttggacatgcagaagccagtggaggggtcggtgggaatcccctccatcctgccggccatggtgacgttctccgcgaacacgtcgcttgagttgatgccggtgaccttccgcagagcg

SEQ ID NO: 34641 - DNA, 420 bp, Oryza sativa
  Clone ID: uC-osrocyp007h08b1
gtctcggcaagtttggcatagcaggcagaaagcaatcaataaatagcacgcatttactggggggttaatataggcagggattgatacaggacacacccgtaatatcctccaccggtctaggcactttctgtatctatatatacgtaagcacgtcctgattcttgttgcatttctcgtcctgatttgcgtcctgcagctctctctcatcacagtttcgcaatggccaaaaaaacaatactgcaggtggtttgcgcggtggcgctggtggcgctgtgcgcgtgcggcgtcgcggcgtcaccgtcgtcgccggcgggagcggggtgccggaagcacgtcgcgaggatcacggagtacggcggcgtcggggacgggaggaggtccaacacggcggcgttcgccaggcggtggcggacctgtcgc

SEQ ID NO: 34642 - DNA, 424 bp, Oryza sativa
  Clone ID: uC-osrocyp007h09a1
aaactcagacgttcggtaaattttgttcaaaattcacaggttttcgagtggtaatgacaaaaatcggcaaaacccctcgaatcagctaataatctttggaactctgcatactacggcatcccatccaatgtccaacaacagaaatgatattacagtttactattggcagacttggtgagactgcccatggcccgggccttctcccggagcacgaacttctgcgtcttccccgtcgacgtcttgggcaaatcatcgaacaccaccgtcttcggcgccatgtaatgcggcagccttttccggcaaaagcttatgatcttgcctttcgtggcgttggcgccatccttgagcttgacgaacgcccccgggggtttcccccagtaattgtttggcctggccacccccgtcgtctccaggcccccccccc

SEQ ID NO: 34643 - DNA, 279 bp, Oryza sativa
  Clone ID: uC-osrocyp007h09b1
gtgggaagggagggggaggccgaaggggaggtgctcgacatggaggccggcacggtgcggtgcgcggcgaactacgcgccgctgacgccgctcagcttcatccagcgcgccgcggcggtctacggcgaccgcgccgcggtggtgtgcggggagaggcggcacacgtggagggaggcgcggcggcggtgcgtccgcgtggccgccgcgctcgccgcccgcttcggcgtcgcccgcggcgatgtggttgctgtcctgagcccaaacgtgccggctatgtac

SEQ ID NO: 34644 - DNA, 487 bp, Oryza sativa
  Clone ID: uC-osrocyp007h10a1
gaaactgaactgtaaataaaatttgctctgcaactttcatcggctatacaaattacaaaaccggatgataaagcctgcacgttagcaacaggaagccgcacgcgtgcacaaccgcaaactaaagcagcaaaagtacatacaagtcctaacgctctacatatatcgctcatttactaaggtggtgttagcgcgaacgaagcaatggactcaaaatctgtacaccgctaacaccagtttttatacaaacatcaatacatacgtacgtatacacatacatgcgtatacacatacatgcgcacgctactatcgtgagcacccaaaaatgactccaatcacgaggatccaactgcacagccacgcatccgcaaaattgcaacccaccaaccaaccaaacatacatgtgttccagaccaacctgaacttggtggatgcaggaaaacttttttttttaccctcgtttaacgagaaaccgatcgtcttgccccag

SEQ ID NO: 34645 - DNA, 419 bp, Oryza sativa
  Clone ID: uC-osrocyp007h10b1
cgtcgacgatctcctcaacaccagcgagctcgcgctgtgttcagtggtgctcatgtcagggctgatcataatcctgagcagcgcggcgaagatcacgcaccaggcgcaggcgctgaccgggcagacgacgaaatggcacgcctgctgtaccatcgagccggtgccggacgaggaggcggagcccgggtcgaaccacagctcgatgctcgaggtggagcccgtcagcgacagcgacggcgagtccagcgaggagaccggcgacgaggacctgctcgagaacaccaagatcatgctgccccaagcacacgtcatctccttccagaaaagacaggctctagtgacctatctggagaacaacagagccgggatcacggtgttcgggttcacgctggacaggtctacctgcacacgatattcat

SEQ ID NO: 34646 - DNA, 480 bp, Oryza sativa
  Clone ID: uC-osrocyp007h11a1
cataaaacaaattaacattcaaaacacaatttccccccaatatgctaaaattgaattgcttcccattccatgcgaggccttagaaaatctctcagatggctcaaatggcgaggcatgtaagccgcgtagccggatgtgtgatactctcattcaggacttacaaaatcgcaaggaaaatataaaatgataaacatcatacatatccatttccctgtcttcaaatcctggcaatccacaaagaacaccgtgaagcacggtaggactatgattctatagttgccagatttgtttcgttagaagtggcatcaggagtaccaccggacgggctttgtttcctttctgcctgtaatgatcgacatagagattccagcttctctttttgattcttgaacttatcaacttgcttcttcattaactcacgctcctcaataactttactagagcaacatctgaattctcacatttactcttcatgaatca

SEQ ID NO: 34647 - DNA, 341 bp, Oryza sativa
  Clone ID: uC-osrocyp007h11b1
cgagagcaacaccaaacgaaggggaaaggaaggaaggagatctcctatctctcctgggtggtgggtccccgtaggcagccaccaatggagggctcgccagcgacgcgcctcccggaggccgactcgctccccgacggcttcgtggagagctccgccgccgaccaggcgccccctcctcccgccgacgccggcgatcccgcgagccgctccctcggcctcgatcaagccgacgcaaccgtgggcggcggcggcggcgacgaaaccctaggggctcctccctcgaccctcgcctccgtcgctcaggacaccctggacgcctattcggcccgcgacgcgctgca

SEQ ID NO: 34648 - DNA, 89 bp, Oryza sativa
  Clone ID: uC-osrocyp007h12a1
ttggttttaggaactgagaataacttgcaaaacgcaatgtctacgtagtacaatacaatcgaatcgcgtacgttgagatggaaggcctt

SEQ ID NO: 34649 - DNA, 506 bp, Oryza sativa
  Clone ID: uC-osrocyp008a01a1
agcaaatgcaatggatcaaaatatcacaaatttaaggatctcagtatttttccaaaagggatgcaatccagtctcaccgactggtgatcaaaatactggtgttttccagcagttaaagcaaaagctgtgaaagacttttcctgctaaacctaagatatggaacccataaaccataagaacaaaatataacaagataattgtctcgtggattgcaccctgtaaaaccagagcgacccagatgtctaaatatttttatttaactgtagaatgaattgtccgattgtctcatgttacgacagctccactccttttaagaggttgcttccttcaggtaggaaataagatcagcacgctcctgtggcttcttcaacccagggaagaccatcttggttccagggatgtacttcttaggattaagcaggtagtcataaagtgtgttctcctcccagatcacagccatgttcttgttggccgtagagtaagaataaccaggggtggtacctgac

SEQ ID NO: 34650 - DNA, 493 bp, Oryza sativa
  Clone ID: uC-osrocyp008a02a1
gcaacagaactacattcaactgatcacagccggcctggagttcattcctgcttgaacaacaaaggtacagagatcatactacacacccagaacactgaagcacttgccatgcaggcagtacttctcttttatgaaaagatgatacagatcagttgcaactatgttacaccaccaccatgtacaacgaccggacaccgaaacatcatcctagtgcagagctgtgaggattgcagtggcgctctcaaccttgaaggttgcaccacagatctcttcttcatttgcaggaacagcagtcaccttgttctttgggttctcatagcacttcaagcctccaagagcattggaatagaagcaaccttgtgggaaaggtgcaagtgacttgccacatgatcctttaagcaggtcaatgtcgttagagaaggcaacagatccatcagcagttatcccccagaacagaggcaccttgccctctggatcagaggccacaaggaga

SEQ ID NO: 34651 - DNA, 534 bp, Oryza sativa
  unsure (1)..(534): unsure at all n locations
  Clone ID: uC-osrocyp008a03a1
tttttggttttttttttttttttttttttttcacccccaattttgacattccacattccaataaaacttggccggcacagtccaggattcttgaaccaaaaggccaaaaaatctatttcaacctactgaccatgactttgtttcccctaatcttttttgcctgggcagattttagctgccaatgaggtctagttggatcaagaattcacatatccttgtcaacgcatttacaaaaggaaaacaaagtggtggaaagatccttccagatttgctcgccaaaggccaagacagcatagctaacaatgctggggttttatgttttccaaagatcgccaagaatgtgtcatatgaactgcttcaggaattcagttgccactaaccgaccacgtgtatttaccgaaagctttagctcactgatctccttgacgatgtcctccataaactgaacaatgaaatctatgagcttatgcttgtgcatgtcctcacagnggtagtttgttatcaggaaactgatatcataaccctgaactggtt

SEQ ID NO: 34652 - DNA, 506 bp, Oryza sativa
  Clone ID: uC-osrocyp008a04a1
acaaaagcttgtggtgtgttctttctcagtaggaaaacatatgtacaagcatgggaacttagttccaagatatatatacttggctctacaactaaagaggcaatcttctacacaaaagaagcctacaattgcgtctgtgtctcttcctgttattgggtattatgtacattgactgaaaccaaaactgcaaattcacctaccaaaaggggctacttttctttcctgtaagttaaaaggattaacctagtttacttacattccattaacaatcaaaatctgcaagaaccagaagcatttacactgatttttcagatgattcctccatgtttgttgaattgagtgagaagtcatcgaggaaattgctgcccgagtcaacctgaaattctttgaacattgtcatgacctggatcatggtaggcctgcggttaggctggtcatccaagcagcggcaagcaatcttcagatactgatagagctccaattcactagatgtcgtggccatcaat

SEQ ID NO: 34653 - DNA, 508 bp, Oryza sativa
  Clone ID: uC-osrocyp008a05a1
gtaatcaacactgcaatttgcctccactttatttcagatcgtagtacagaatacagaccacatctgtagtagttcatgcaaagttaccgctagagtactagctatgacaagcaagttcatgtgtatggagctctgttgttttacaggttgcttgaatcaaaagtaacaaatcctttctctttcaagctctcgatggtctccttgatgctcgtgtgcaggggagtcagttccaggcccaagctttttatcttttcctttgatacctggtagattggcactgatggcttgtcatctgcacacttgtctggcagaggaatattgggatacatctcacgaatgatttggacgagctctgagtagtgcgcaactctttcaaccatgcaatatcttccatttgctgaaggaacttcatatgcaaggatatgtgccagggcaacatccttaacgtttatccagccaaagctgaaattaggatatgtcgaggatgatccattgattagcttcagaa

SEQ ID NO: 34654 - DNA, 425 bp, Oryza sativa
  Clone ID: uC-osrocyp008a06a1
ggcagaaaatttttcatccattatttctccatcttgcattccgcaagaagaccgctagttagggggaaaagagtaaaaaaagaccaaaaacgatcacaacacgtggtcgtactccaacacgtacgtacggtactccactagaacgtaaaacctttttagaagagggaaaccggaccatatatttggtagcactttacaactagggctgttcagatcagccatggttttttgttttttgttcttccaatcattcatcgaaaatttcctttaaccagagcgccgtttgcaattcccgctccagcgctgatgacgatctctcgttgaatgccgagggggttcctcacactgtgtagttctgctggatcgtgtcgatgtccagccccttcagcttcaccaccgattcgacgtggcccttgagagtgttc

SEQ ID NO: 34655 - DNA, 224 bp, Oryza sativa
  Clone ID: uC-osrocyp008a07a1
aattatgaaacagcgaaccataaaccatccgatattatatgaggcgggggtgaacaaaaaaatcactgattatgaccctgggcagaaaacgtatgcaggtctgggccgcagaacactacacgatggaaactaaaaactgcacatcccccaatcaacctgagaggccgccgatccacttataaaatgctgtagagacaggtcgaagtgaagacagagttgggggc

SEQ ID NO: 34656 - DNA, 472 bp, Oryza sativa
  Clone ID: uC-osrocyp008a08a1
aatcatgaaacagtgtaacatattttatcctatattttattagtcgtgtgtgtgcaaatgaattcctgatcatgaccctagacagagaacatatgtgtatatgtgccacaaaaatttacacgatggaaactaagtactccacatccccaaatcagcttgagagatggccgtacgtatcatatcatgctgaagagattggccgtggagatgagagagttggtggcgagtccgatgaacgcgatgaaggaaaaccacaccgcgctgttgatcttcttgttgaacggatccttgccgaagctcgacatccacagatcgttgcgggacgctgccgccgacgaggccgacatgaggagatacgccaacacctgatccaggaagaggctgaagtagtagctcgaggtgctccggaaaagaaacctcggcgaaaccaggcggcgaatctcgccgaacgcttgcgcgatcgagtagatgc

SEQ ID NO: 34657 - DNA, 445 bp, Oryza sativa
  Clone ID: uC-osrocyp008a09a1
aatgtaaattgccatgtattttaatcatgtgattcatgaatattggaattggctgttcttgcaagcttacaatggagtacatctctgcatgaaacaacaaacaaatatcccccttcctcgccaaaatcaccatgaacgttttcctaccagtaatctttacacgagcagaggccatccctgaaatgatgaaacctcgtggcgtcccgcacgatgatctccctgtccgtgaccttggagatggccttgatcgcggcgtggcagtcgttgcacacccgcaggttcttcatgacccgcagcgtcgtcttctccggcgtgctgatgaggccgaacgcgatggcgagcttctcgctgtggcggctcagcagctcctccttgagctcgtcgtcgacgtcgtgcaggacggactgcaggtcgggcacgaacccggcccccttgatctccttcc

SEQ ID NO: 34658 - DNA, 366 bp, Oryza sativa
  Clone ID: uC-osrocyp008a09b1
tatcgatcactcctccgcctccctcctggcggcctacctccgcgacccagcaaggaagacgaccaacaggaggagagagaagaggaggaggaggaggaaaagctctatgtctatctctctctctctctagatgagagtcctttcggccggcgcggtcaacccggacggctgcggccgccgcaatacaatcgatatcgacgctgcgctgcgctgcgctgtcccacccgtcgaagccgaatacgacggatcctacacccgttgaccgtctacgccatcggaggccgcgccgagccctggaaccccgcgccgactgctgctgcctccgccgactacgcctcctatagataccgccccggctcaccgcgg

SEQ ID NO: 34659 - DNA, 189 bp, Oryza sativa
  Clone ID: uC-osrocyp008a10a1
aaaaaagcaagcattgccaaaatgcttttattcatatatagacttacaaagatcacaacaaagggtccaatgataaatatccatgttctctccaccctgggctggtccttacattaaaagaatggagatagctatggacctccttatccaaattaagcgtagcacattgaccataaaatttaacaacag

SEQ ID NO: 34660 - DNA, 484 bp, Oryza sativa
  unsure (1)..(484): unsure at all n locations
  Clone ID: uC-osrocyp008a11a1
agagctcccaacgcagttcttcaattcaaaaagactgcccaaacagaccaagggtatcatcatagcagcaaagttttttaacacgcaacatcaaagagacactaatgcaataagataacttgaagcgcggatcactagcaaatttcgcgcttagtcgacctcctcgatcttggggccagcaccgctgccgcctgccgggggagcatcgtcctcgtccatgccgccggccatgtccgcgccagcgccctggtacatcttggcgatgatggggttgcagatgccctccagctccttcatcttgtcatcgaactcatcagcctcggcgagctggttgccgtccagccactggatggcctgatcgatggcatcctcgatcttcttcttgtccgctgccgggagcttcgaggcgatcttctcatccttgatggngttgcgcatgttgtaagcgtagttctccagcgcattcttggactccaccttcttc

SEQ ID NO: 34661 - DNA, 310 bp, Oryza sativa
  Clone ID: uC-osrocyp008a11b1
ctgttcactgcacattacaatgaataggttgatatatattcatttgggatgtgcatgcttgaaatggtgacatgcgaatacccatacagagaatggcaaggcatggctccatatattcaaaaagattgaggagggtgagaaaccagctgcgttctacaaaattaaagatgcagaagtaagaacttacatagataactgtttagctccagtagagaacagaatgtctgcaacagagctgttgaaaagctctttcctccatgatgatgatcttatctaagtctctctggacaagaatatgtctgaagatgga

SEQ ID NO: 34662 - DNA, 252 bp, Oryza sativa
  Clone ID: uC-osrocyp008a12a1
gttgcacaagaagccaaacgtgagagcttgtacaaaacttcagctctcttcaatgttgactacgctaattaaaattgtaactccataaaaactcggctacgccgagaaaactgtaattacaacagatacggcgtagccaattcacgcaatgcgcacccatacggctacagtatggttcatttaacgtctgatagacgatttcttaaggtgctgccgcaagtggcgacaaatactgaaaacagcgaggtaatc

SEQ ID NO: 34663 - DNA, 301 bp, Oryza sativa
  Clone ID: uC-osrocyp008a12b1
aaagctggaacgcctgcaggtgccggtaccggaccgcagggcccggccagacccacgttatcgtttgacaaagaccacagagagagaacgacacattgaagcgaaaaaggaagagctagagacagtggctgaagcagcgatcgcgttgcaacatgaagtaatggaacaacttctccggaggaatccatattaagggatgaagattgctgacgggcactcccaagcgcgaacgaaggcaaggattggcgcaagacaatgggagagggcgaggacgatagaaagaagccaacacagaacaaag

SEQ ID NO: 34664 - DNA, 446 bp, Oryza sativa
  Clone ID: uC-osrocyp008b01a1
catggatctatcaactattgatgaaatgattcttcacaaatcttgctagacatcaagcaagcccaaacatacgaaatagaaagatagaggcagatggcaacaggccaatacaaaacaaaagggtggtgatggatggttagccgatgtttcccgaataccactacacagttccaatgactacagatattcagcctgacagtaactcattttaccaatttaaactaaggattgccatacgtcaataaattgctagtatgtgtgctggcctcaacttgctcttgaattaacagtttccggacttgagtgccttgatcagccatctaagcagggacctggccataagaattctccttcttggcacatgcccaagctttaagcaggagatccacaatacccagatgttgccctttggcagtatgatggaggggagtgtcgccttcagaatc

SEQ ID NO: 34665 - DNA, 478 bp, Oryza sativa
  Clone ID: uC-osrocyp008b03a1
ccccgtacaataaccaatatatatcatgggggaaccaataatacaataacagaacttactccaaattacaaccagctgaccaaagcgtaaaacagcatcatatcatgcgtacggcaatgagaagttccagggagaagccacatagcatcgagaaacaccacaaaagaagagaccaagctattgactgtatgtcggtatggtttggagctgtatgaaatgcctcacgatgttgtgcgtagggacacgcacacgcccaattgaatttgcccaatggagatctcaagcggaccccttgagcttcttcgcgatgcctgcaaagtacttcccctggtggaaggcgtgctccagctccatttccgtcggccacctcaagccgtcggcggcaaaggtgccggcgccgtacgggctgcccccctgaacttctcccatgttaaacatcttggcaccgaaggtgtacccgaccgggacgaacaccatg

SEQ ID NO: 34666 - DNA, 401 bp, Oryza sativa
  Clone ID: uC-osrocyp008b03b1
gtccgttgcgagcgccaccggtttgcgagctctccggccaccgccgcgtcgcgtgtccatgtcggcgtcgtcgcgcgcgctctcccgggcggggttcctggcgcggcgcggcgggatcgggatcctcgccgccgcccggtgcggctaccacacccggcgccggctgccgctcacggcggcggaggtggtcgagggcggcggcgccgcctccgcggcggggggcgcgtctacgtctgaggaagccgggacggcgtcgagcgcgatggcgcggcggatggaggaggccatcgacagcgccatggcgcggatgtcggagcccgagtggtctccgttgcggaccgggacgtctgactacgcgccgtcgtgggccgacggcgccgcccgtgggttgctggcgctcg

SEQ ID NO: 34667 - DNA, 550 bp, Oryza sativa
  Clone ID: uC-osrocyp008b04a1
gcagatccagtccgtggcggcagcggcggcgcggatcagttccgcggcggcggcgacgacgtggttgcggcccgatgtgacggcggcggtgcggatccagtccgcggtggcagcggcggcgcggatcaggtccgcggcggcggcgacgatgtggttgcggcccgacgtgacggcggcggcgcggacgcggcccgtggcgacggcggcagcacggatccagtcctcagcggcggctgcggcgcggacgcggcccgcgacgacggtggcggcgcgagggccgtctcctgcgtcgttgcttccagttgcagctcaccctttctcgttgcttccagtttcatggtgcaggccatctcttcctcaaccatctccatcatctcagcaagacaagttgatttgcagccattcaagtgctccatcgttgaaggttggctgctcttcggattcacccttcctgttgttccctaacagaagaaaccattgctggtttgtcattcgggttgagctcgaaccatctgccaatttcagttgacagggttgatgttagagctcc

SEQ ID NO: 34668 - DNA, 388 bp, Oryza sativa
  Clone ID: uC-osrocyp008b04b1
tttgtgtgtctcagttggcgatgatcacaatttgctaatttgggatttacgttctcctgtgtctactaagcctgtacagtctgtggcggcacaccagggcgaggtgaattgtctggctttcaacctcttcaatgaatgggttgttgcaactggttcaactgacaagaccgtgaaactatttgatcttccgaagattgatacttccctacacacctttgattgccacaaggaggaagtatttcaagttggatggagcccaaagaatgagactatacttgcatcttgttgtcttggcagaaggctaatggtctgggatttaagcaagattgaccaggaacagacaccggaggatgccgaagatggtccttccgaactcctgttgattcat

SEQ ID NO: 34669 - DNA, 483 bp, Oryza sativa
  unsure (1)..(483): unsure at all n locations
  Clone ID: uC-osrocyp008b05a1
gtgtcgccgaagaacctcttcatcggctcgtactcggcgtcggtggcatggagcagccgtggaaaatcgcaggtaaggtgagagatgacgtgcagcccggcccccacggtgatccccacggcgatcaccttgtggaagttgaggttgtcgtcgaacggcacgacgcgggcgacggcggcgcggttgcggatccaggtgacggtgttccggcacaccgggaggaggatgagcgccatgttgaacttgagcgtctcggcgccgcccttggcgacgcagacgcagtagcccatgacgtggaacacggcgcggtgccggtactggatgaacttgtaggtgaagaggcccgcgcagatggcgagccacaggaggagcacccagacgcggcgccagttgtcctcgaggaagtaggaggcgcgccgncaccaccgtcggagcgggttgggctccgccgtcggccggaggttctggctcagcatctggctc

SEQ ID NO: 34670 - DNA, 473 bp, Oryza sativa
  Clone ID: uC-osrocyp008b06a1
gaagtatactgaacaaacccatctgtttgaatcgattgatcatctgaccaagaaagcatctatttaaaatttgaggatccgatcaagaaagcatctactactacttgaccatctgatcatcaagatcgaacaaacaaccaatacaataaaaatactaataataataatgacagcattaagactcagatttaatttaattgtcctcacaccaaactttacctaagcatcattaatcaagctaccatctatcactgcatcacaagctcaagaagcctctcgcttcacgcgccggcgccggcaaattgatcggccgcggcgagctctcgccggcgagcgctacggcggtggtggcgccgccgccgccctccacgacgcggtcgccgtagatgtgcaccgtcctcgggttcggcccgcgggagatgacgcaggtgtagtcctccgatgacggctccatctgcatctccgccggtgac

SEQ ID NO: 34671 - DNA, 216 bp, Oryza sativa
  Clone ID: uC-osrocyp008b06b1
acgtttacttgaacgagaaggaacagggcgggcactgggggttgaatgcatagcccaccaccagcggggagagagtatatgacagtctgaacggacactgacacgacggtaccaagctgaactggggacgatctgagaaagaacacttgtgaagcaaagagacagaccgtcgcagagtgaaccagacgctgaaaatgtataacttgatccatagga

SEQ ID NO: 34672 - DNA, 241 bp, Oryza sativa
  Clone ID: uC-osrocyp008b07a1
gaacacaagcataaagaatccttactgtattaaaagaactagggcttaccataccatcaaaaggatgcttttacacgacaatctaaagtttcacgatgctagatttgatccatatgagcactagaataacacctcctaagatataaaccctattaccttcatgggcgaggtcttctacgataaacgtatttaatatctactcccatagtacatcagttgagctccatcaaaatatgatggt

SEQ ID NO: 34673 - DNA, 517 bp, Oryza sativa
  Clone ID: uC-osrocyp008b08a1
aagaatgcctaaagaaaccttaatatatcattagcttaaggactagcaaaactgacatttgtttgctaattaacaagtcaagagatagtgacacgtcaatgaagtagacaaaatagaactaagattaacattcataagattccaatcctactcgcctgctcggtaaggcaatagccgcaaaaggtaagcaaacactactagttcattacatcgctaaggctaatttattatctcatcgtcatgtcatatatattttggcagaaggacaaccagcacatgtattagatgggcacaaaatgaagctaacagaagaacctaatcgagcaattcagacattgcgttcttcctgttgaatggatcggtagcagcaagcaaagacgccacagccctattggggaaaatgtcatcagccttcatcctctccttgaatccataaggtggggtctttgcattcagatatgcctcaagaagcagctgatactgtctaatcctcccagtataacccatctgccgcacc

SEQ ID NO: 34674 - DNA, 499 bp, Oryza sativa
  Clone ID: uC-osrocyp008b09a1
aattaattgacacattcactggatttttgaagagaacactagcattggcacaagaccatcaaaatttcaattttcaggtacaatgctaataagattttgcacaacagacgatgtccttgaggacggcagtacaacaagaatatggtcatgctgttgcaaaaaagaacagaaaaactcccctgttattcacctttagggagggagtcaggacggtaaatctacttacgacatgcacgccaatgtgctggtgacaatttacatgtctccaggaattaacacctgctggaaaagcctacagctgggcttcagggatcagtcatgcttgcacatctacatttggtcccagtcaatagaactgttgttttcaaaattataacttggttgctgtagacggttgcgacccaatcggctcatcatggcaagtccttccatgactttgtatagcgatgaccaccacctatcagatggaacctcatactgagcgagtgtatcatcaatt

SEQ ID NO: 34675 - DNA, 518 bp, Oryza sativa
  Clone ID: uC-osrocyp008b10a1
aattaattgacacattcactggatttttgaagagaacactagcattggcacaagaccatcaaaatttcaattttcaggtacaatgctaataagattttgcacaacagacgatgtccttgaggacggcagtacaacaagaatatggtcatgctgttgcaaaaaagaacagaaaaactcccctgttattcacctttagggagggagtcaggacggtaaatctacttacgacatgcacgccaatgtgctggtgacaatttacatgtctccaggaattaacacctgctggaaaagcctacagctgggcttcagggatcagtcatgcttgcacatctacatttggtcccagtcaatagaactgttgttttcaaaattataacttggttgctgtagacggttgcgacccaatcggctcatcatggcaagtccttccatgactttgtatagcgatgaccaccacctatcagatggaacctcatactgagcgagtgtatcatcaatttcggtgttgtgcttccctt

SEQ ID NO: 34676 - DNA, 517 bp, Oryza sativa
  Clone ID: uC-osrocyp008b11a1
gggagaaagtcaaggttcgataaatattgcttcacttgtacaaagtacagataaaaatacattgatacatgacacggagagagccatgcacaccacttatttggacacacagagggcaaggctgcagagaaaatcaagcaacacaagctgaactcacggccccacctgtcagcctctcactggtcgaggccggagactcttgtgaaaaacagcaacaccacgcatgcagaagaagacaaattattacacacacaaatcgacgacacggcggccggcgacgtacggcgaggtcgtcgccgccgccggcgacgttgtgatgaggtcgatcagccgaagaggtggtgcttcttctcgccggtggactcctcggcgctcttgtggtccttcttcttctcgtggtgctcgtggaaggcgtagccgccggcgccgaccgccgccgtggccgcgatctccttcgtgatcttgtgcctgtgcgcgttctccgggtccttcttcgcctcgtgcttctcatacaggg

SEQ ID NO: 34677 - DNA, 537 bp, Oryza sativa
  Clone ID: uC-osrocyp008b12a1
gccccgccttcccgtccgtcgccgcggcgtccacatcgatggcgtcctcggagagcgaggagaggaaggagaccaagctgtggggcgggcgattcgaggagggcgtcaccgacgccgtggaagggttcaccgagtccatctcctacgactggcagctctacaagtacgacatcatgggcagcaaggcccacgcatccatgctcgccgcgcagggtttgataacggctggcgataaggacatcatcttagaggggcttgatcaaatagagaagctgattcaggatggaaaatttgagtggcggacagaccgggaggatgtccatatgaatattgaggcagctctgatcgaaaaggttggtgaaccagccaagaaactgcatactgctaggagccgcaatgaccaaatcgtgacggatcttcgcctgtggtgccgtgatgctattgacaagattttgttccgcatcaaacagtttcaggtgtctcttgttctggtagcttcaaatatgttgacttaatagttcctggttacactcacct

SEQ ID NO: 34678 - DNA, 263 bp, Oryza sativa
  Clone ID: uC-osrocyp008c01a1
gttaaaaccaaaatttagttgctactattatttatttctatattttacacaccaatctaaaatactattgttcctcacaaaattaaagcttgcaaagtcacaaggatacaagatccacacacacaatcccacaaactttacacaggcactttgcaggcttgcagcacaacgcccagttgcagctcaaaagcaagcaaggcaaacggacgtctggcccacatgtcagcctcacagtgaaggtgaaacaccatatgggatagtgc

SEQ ID NO: 34679 - DNA, 518 bp, Oryza sativa
  Clone ID: uC-osrocyp008c02a1
aacagcaaatctcgacattttacatattgttaccgggagaaaagacctcattaaccatcctatctaagttgacccatgaggttccactaggcaccacagccatggctgccctttccttccattccgtggcacgctgcctcacctccttgcctttgatctcctcttccatcacctccctcaccatcctcgccacctcttccctctcgatgtcgtcgccgacctccacaccgacgcgccactccgtgcaagcgtaccggcagtttgtctgctgatcggcggccatcgggtagcacagcatgggtacgccattggagatgccctcgagtaccgagttccacccgcagtgcgtcaggaacgcgccgatggcgtcgtgccggagcaccgcctcctgcgggcaccagctcgtcaagtaacccttccccttcgtcttctccacgaactcggctggtagcacgccggtggggccgtcgccgccggtgaccttagcttggtcgtctctgatcacccacaggaagtcg

SEQ ID NO: 34680 - DNA, 507 bp, Oryza sativa
  Clone ID: uC-osrocyp008c03a1
ggagcatcctcgtccatgcctccggccatgtcagctccggcgccctggtacatcttggcgatgatggggttgcagacgccctccagctccttcatcttgtcctcgaactcctcggcctcggcgagctggttgctgtcgagccagctgatggcaccgtcgatggcgtcctcgatcttcttcttgtcggcctccggcagcttggacgcgatcttgtcgtccttgatggtgttccgcatgttgtaggcgtagttctcgagcgagttcttggcgtcgaccttcttcttgtgctcctcgtcctccgccttgtacttctccgcctcctgcaccatcttctcgatatcctccttgctcagacggcccttgtcgttggtgatggtgatcttgttcttctgcccggtggtcttgtcctccgccgagacgttcaggatgccgttcgcgtcaatgtcgaagcacacggtgatctgggggacacccctgggcgccggcggaatgccggagagctcgaac

SEQ ID NO: 34681 - DNA, 317 bp, Oryza sativa
  Clone ID: uC-osrocyp008c03b1
cacgtttccttgacaacgagaacatcggcatggcggtggaggaagtagcggtgctcgcgttcctcgtcgccgcggcggcagcggcgtcgccagcgcctgcggtggtggcgacactggtggagggcggcgtggacgtgcgcccgacggtggagatgaccccgagagggaggacgtgcctacaacgcaggaggagagcatggagatcctcggcgtcactgcgagggggaggacaagctggctgaggcggccaccggcaagccgtagttgatgaagggccgatcggggcacattgaatgcgacgcgctacaacgcgacag

SEQ ID NO: 34682 - DNA, 507 bp, Oryza sativa
  Clone ID: uC-osrocyp008c04a1
gaacaagacatgctacatactctatacgattgagatgtgtagaaacattttttttccatgtattttgaggaacatgcacatatcaacatacatgtaatacgatgttgaattaagcaagcaaatttaagcatgcagagtgcactgcttagcacacactgcatgtgttgctagctagctagctccatctagttccctctcttctcatcatgattgacacttgataaaattaagcaagatttagctagctagctgagctgatctgatcaccatgcatgcatgcaagcaaggccaattcaatttcaagctcgccggccatacaccacacagcacatatacggtgggtaaaacaaaaacaaaaaggaaatcatacacaacattgattcattcatccattctcttaattaattgacttgaggttgaggagcatatatatacgtgcgtggcatgcatgcatatatatggtacggtggtcgacgacgacgacgacgagcctagcaagcttggatg

SEQ ID NO: 34683 - DNA, 527 bp, Oryza sativa
  unsure (1)..(527): unsure at all n locations
  Clone ID: uC-osrocyp008c05a1
gcgaacaaaactttcgaactcttttttttctccttgttttctatttcatttcattccgatagatagcaacaagcagttcaaacaccataaccaaagcgaactcaattcatggtaacatcacggacgaagaacacctaacactggatggatggatagagggcttctcgactcgagagagccactggacacgataacgactcgactcgatgataagatgattctgacacggatagctaaggataactggccacgatgggccccaccaatcagttcctccagttcccgccggagtcgccgccgtagccgccgccacggctgccaccgtagccgccgccgccgccgccacggccgccgccgtagccgccgccgccaccgtagccgccctcacggcgcccgtagccgncgncgncaccttcttcgtagccgccgncttcacgaccgccgncgtagccgccaccgncgncgncgtagcccccgcctccgccgncggagcggcgggactgggcctcattgacggtgatgttgcg

SEQ ID NO: 34684 - DNA, 488 bp, Oryza sativa
  Clone ID: uC-osrocyp008c06a1
aacatacgcaaactgatattatcacaatgttagccgatgacaatggaaagagtaatctaggtacaagcggatcattgacggtggagacaagacattggctgcaccacaacacccaccagtggcgccaacaaggagcgctatccgttataggacgagagaaaaagtaaaacatcacgatgtgaagtgaaactgaataattctagtagacgatgatgatgatggataggctccttaggacgcccgccgcccttagcgtcttgctgctcccatcttgtccactggaaggctcactcgtcatcgtcttcatcctcttcgctgccctcgtcgtcatcctcatcattgacctcggacttggacttgtcagattcctcctcgtcgtcctcctcttcctccttggcgggtgccttcttggcagtgctctcgcccttgttgtaggcagcaatggccttgttgtactcggccttgagctttgtggccttggctacata

SEQ ID NO: 34685 - DNA, 373 bp, Oryza sativa
  Clone ID: uC-osrocyp008c06b1
cgctgcatccccacatttgtcgttttacagccttgggagctaggtgctaggcgcgccgcctccgcctccgccgcccggctgctacgatgttttccgtacccaaagttgcacctatgacgagatggttatctgtctccgatgtcagccggcttgaggtgtaggctcctaggccgacggacgccgcgaaccccgacaagacggccacactattgcgacggggacctgctcggagttccgcttacctgggcattataagcggcgcgcttacccgatggcggaagaagtcaatgccggtcacatgaactctactcatcgagaccaatctgcagaattgcacgcactgcctgaatagcacgagctgtccaacatacct

SEQ ID NO: 34686 - DNA, 148 bp, Oryza sativa
  Clone ID: uC-osrocyp008c07a1
aaccaaatcataggaggtttcatttttttttcgcaaagaagagcagcatgctccattgttcaaccaaaacgtcaggacaagggataacagaccacaaaccctgcttcaacttgcggtaaaaaaaacagagcggacccccctaacaggg

SEQ ID NO: 34687 - DNA, 470 bp, Oryza sativa
  Clone ID: uC-osrocyp008c07b1
tatggcttctcctccccctctttaccttttcctcctcggttcggttccgtggttcgtctagggtttagtgggttgagatggcggcgccggatgtcgagtaccgctgcttcgtcggcggcctcgcctgggccaccgacgaccgctccctcgaggccgccttctccacctacggcgagatcctcgactccaagatcatcaacgacagggagacggggaggtcacgtgggtttggcttcgtcaccttctcctccgagcagtcgatgcgcgacgccatcgagggcatgaacggcaaggagctcgacggccgcaacatcaccgtcaatgaggcccagtcccgccgctccggcggcggaggcggaggctacggcggcggcggtggcggctacggcggcggtcgtggaggcggcggctaccgaagaggtggcggcggcggctacaggcgccgtgagggcggctactgtggcggcggc

SEQ ID NO: 34688 - DNA, 486 bp, Oryza sativa
  Clone ID: uC-osrocyp008c08a1
aaccaaaacataggaggtttcatttcttcttctcaaagtagtgtagcatctttccttctttcaccattacataagcttaagcaataacagataacaaatcctcctcctcctctaggtaaaatattcaaacacaatacccttataagtacttattattaggaaagtagcgtgcatgggcataaatggcagcggggggcaggttaagaatcacaatgctgagcagcgaggaaacaaaacaccataatgggacagagcaaaagcctccgaaagggagcttttaggcagaaggcttctcccacttgaggggcttcaccacctcccaggtgaagtctgggtcgtcccttccgaagtgaccgtaagccgccgtcttgaggtagcgtccgttgccgcctttcttgaggtcaaggttgatgatgatcatgccaggcctgaagtcgaagttctccttcacaatcttgaggatctccttgtcagggatcctgccag

SEQ ID NO: 34689 - DNA, 520 bp, Oryza sativa
  unsure (1)..(520): unsure at all n locations
  Clone ID: uC-osrocyp008c08b1
tagctattgctagttttgcaggtaagcttgaaaatgtaccagtgataggtaagtatgctaccgctactgctactatagcaggagcgacagctgatgttgctaggaattttggatattgtcgtccacctgtgacggagaatgcagctccccgtagaccgacggttgtttctaacatggcattaaccaacacgccagataatgttgaaaaattaaccactgatgataagcaagagcttagtatagatccaagtattatgaatttaccaggagtagattgtttcaatataaaggaaattgcaaagaaggagagttatttaactacattccaatggtccgatggaggatttggatttttatggaattcacgtgtttccccgatgttgtggcgagctgtggcaggacctcctgcccaagcatggtttcctgcttgtgcgtatgccgtcatgccgtttgagaatnggtcgggatcaatgaagtttagatttcaagttgtgtgttctagttttcataaaggggcgtt

SEQ ID NO: 34690 - DNA, 512 bp, Oryza sativa
  Clone ID: uC-osrocyp008c09a1
atgtgaaactaggttttctgttatgaaaagttcattacgacaattatgactaattggcagcattccaaaatattcctcaacgttgacactccatgccacacaatacaatcgaaatttctagaataggcaacatttccgagcatctcggagacaagaccaacatcaccactcgaatgacactgagggggaaatatacaggggaagaagcaaaaatgctatctttaggtagtcgtttgacgacagacagttaagtgtagtgcacctgttgtagcactcgcttactcccccttgtgctccttatctttcagagcatttcctgtgatttacgaacaatgcgtctaacctttttcttgaaatcgtccctcttttctctccaatccttagccgcttcaatatttgctggagactcatcatttggactagagagcatcgaaatgatgctcagaactatactttcaactgtatgcacaggtgtccaccgttcgctcgcaagctcataaccgttgggatct

SEQ ID NO: 34691 - DNA, 529 bp, Oryza sativa
  Clone ID: uC-osrocyp008c10a1
gcaacaaagagagaactgcgaagttcaattagtacttgtatagaagagaagagcactggttacatcaaacatggaacaaaacagaaatttttgaattaggcaataagatgcaaccctataaatgaactaaacaacactaaactttgagtaacagttctcagagtccacagcacacttagcagtgtagtacaaggagtagaatggcaacactgccttgcacagcaacactctttcatagctggttgcttttgctaagctgagctcactgctatgagtggccagaggggcagagctaggacatggcaagcacagaccctgcagcctagccaactctgtctcagaggacaatgggttcttggagacgaagacctccttcacggataggcgacttggcagcaaaatttccactaaatcagcaatgtagccaagtccatcacccaacaatgacagccccccaatatctctctgaagaaccgtacaccaagatttaggatatggattttctttcagaatcgccccgatgatcttt

SEQ ID NO: 34692 - DNA, 447 bp, Oryza sativa
  Clone ID: uC-osrocyp008c11a1
gtcacctaaattctgcgaggaggacatggatagggagacacactgagccggcgactccttccactgctgcatgaccgactggggatgggtgaaaaactgcacgcccgccttgccacaaaaattcaagtctcctgcaaaggaggctttgctgccggggaaggagaagaacggcaggggtactggaatcggcacgttgatgcccacctggccagcttcaatgtctgatggaaatttccttgcagacacaccagatgttgtaaatatggatgctccattgccatatttgtttatgttcacaatttggatagcatcatctaggctctcagccttcatcaagagaagaactggaccaaaaatctgctactgttctaatttagcaaagttcagttaaaatataatgcatatgcggcgtctaagtatgcaacggctgtcactgcaacatatgac

SEQ ID NO: 34693 - DNA, 303 bp, Oryza sativa
  Clone ID: uC-osrocyp008c11b1
ctcgttctagttcgcgtgcggacgccctggttgatttgtgtttttggcgccgtctatgcctcctcctcctggttgttacgaccctacccatctccatagattgaccgctgacgatctggttatctgcctccgatgccagcgcgctagaggcgcacgcgccatcgaggacgtcgtcggacaacgtccgacacgctcgcgacactattgggaggaggaccggccggatcgaccgtcgccgggcagataagggccgtgctgcaccctaggtctgtcgcactccttgcggttcacctgcactctact

SEQ ID NO: 34694 - DNA, 483 bp, Oryza sativa
  Clone ID: uC-osrocyp008c12a1
tttttggaccacaactttgtaaggatggaattgagtagcaatactttcaccccaaaatacagtttagcgacaatatcttaaaaaagccgcttgctttgccgccatggctggcaagctgagcacagcagctaacacaaagaacacgagatcactataaaccaaacggcaacgaacgaagaaaatacagggtcttttttgtctgaagatacacgaagcggttcgttttcttttatttttagtctcctctcctcctcgatgatgggtgtatggcaatggcaatggcgatgggatcttggcttagttgatgggaaggggctcgccgttccactccttgaggcagtcgagcatggggtcgatgagcttgccctggctgatgccgaggaacaccttgttgcactcctcgccgggggacttgagcttctcgccggggaggaatacgcagccgagctcctcgcggacgaaacggtagagcgggaacgaccg

SEQ ID NO: 34695 - DNA, 390 bp, Oryza sativa
  Clone ID: uC-osrocyp008d01a1
aaaaagagctaaggaaaatatcatcacccacaaaaagggcgccacatgcatacatttaaaacaccatttttttggtgccgccaaaagccccccacttttacttattcagttaaagacttcaggcgaaggctacctttcaccttagggggcggggaccccacctacggggtcttggccgactcgtttttaaacgggggggcccccggggatgactcgccgaaaaccttggcgatcccctcgggggggatggcggggaggtcctgggctccggggaaacccttgtcggccgggggggagaacacctggggggacttttcggcccaaaaggggggggggggcacggggatctgggccccctggggaaacaacggaaggttgttgagccagccc

SEQ ID NO: 34696 - DNA, 524 bp, Oryza sativa
  unsure (1)..(524): unsure at all n locations
  Clone ID: uC-osrocyp008d02a1
cacgtaaatatcaaatcattccattcatttcatttcactccatcaataaaccaaccaatctccaagtccactttgttttttttcctctttaaagaaaaacaaaagaaaaatacattcctccatttccgcgtgaagcgtctggatcgagagtctagaggctaactctagacgacggcgtagaggatgatctccgcggtgtcggcggcggcccggggcatcctcttcgcggcgaagcccgcgcagccgccgccgccgccgtcggccgaaccggcggcggcggaggaagacggcgacgaggaggaggacggcggcgggtggtagtacatcctcgccgtctgcgggcagtgggagtggaaccgcgcggcgatgcgcacccccatgtcgagcagctccacgtacttccccatcgatctatattccccttcttcctctcggatctccttccctgccaaataaaatcaacgaatccctccctggcctgctcctcctacgaatcancagctgtggatgcgaagcgtgggtgg

SEQ ID NO: 34697 - DNA, 344 bp, Oryza sativa
  Clone ID: uC-osrocyp008d03a1
ggagaaacattttttttccatgtatttgggggaacatgcccatttcaacatccatgtaatccgatgttgaattaagcaagcaaatttaagcatgcagagggcactgtttagcacacactggatgggttgctagctagctagctccatttaggtcccttttttttcatcatgattgacacttggtaaaattaaccaggatttagcttgctagctgagctggtctgaccaccatgcatgcatgcaagcaaggccaattaaatttaaaggtggccggccataccccacacagcacatattcggggggtaaaacaaaaaccaaagggaaatcctccccaactttgatt

SEQ ID NO: 34698 - DNA, 348 bp, Oryza sativa
  Clone ID: uC-osrocyp008d04a1
aaataaaataataattgactaaaaaaaaaaaaaaaaaaaaaaagaggggaaaaaaaaaaaaaaaaaaaaaaagaaaaaaaaaaaggcccaatggccacaaccccaaataaacataaaagaacaaaaaaacccgtgaaacaagaactaaaaacaactataacgctgttaacacactaggaaaaaaaaacactaaaaaaactaatcaaaggaccaaagccaagggaaaccaggaccaaaacaaaataagagtacagggttaattactggtaaaccagatcaaaaaggaaaaggacctcggggaacacaaagacttggtggaatcttcaccagcaattaaaaaaaaaccga

SEQ ID NO: 34699 - DNA, 457 bp, Oryza sativa
  Clone ID: uC-osrocyp008d05a1
gttggagcgaaatgtactgtttttaagcatgtaaaaaagattgaaagggtggactgagatgaacagttgagatggaaccttgtacaactccatgataacatagggccagcggaccagcattgaatattgtgagtacagagccaacatggattgagttaggcggttcatacatacaaactttgggctgtaaattaccgtaaaggctgttggccgaaatggctcatccttttctttttctcagcagaaggcctaacgctctttgttgccaactgagaggcaccaatataagctgctgagtccatacctaggattgagttcatttgatcaaatgcgggtaccgtcttgatcctagccttgatagacatagaacctacctattaatcaggctcagtagcagcagtttgttccacccaaacatttagtaactgggatgaattcgtgtacgttgcagaattgt

SEQ ID NO: 34700 - DNA, 455 bp, Oryza sativa
  Clone ID: uC-osrocyp008d05b1
ggtctagaataataattattttgatgggcattaattgaagccgaaactttattgcaacaacacgcacggaaatctgctcatgtacttcaaaaccctgctttaactgtaagagttagaccacatacatgatcctactacacttagcttcaacgtgaacacagctttcctctacactaaatgcactataaatttccaaacgtgtgctacgacaattcatcttggaaagactgctacaataagatggcaactgcatgcttcagttacgcagccttgggcttgggcttcagtctcttcagttgtgagtacaggaaaactccggcaagtgcgatggcagtgccgagggagttgataggagaaacaggagtcctgaagaacaaaaccgatgttacgatgaccacgacacgcttgacacagttgcccacggagtgagtgacaggagacacccttctgaggat

SEQ ID NO: 34701 - DNA, 372 bp, Oryza sativa
  Clone ID: uC-osrocyp008d06a1
tttttggtttttttagggcaaacaacaacatttctaaactaataaccaaaatctatgaaatgtttcagccatatagagatgctgaccatcacaagaagctcatttaacataacattagcaaactcgacaaaggtaacagctgttctagaggaggcaagccccccgtacacattcagggcaaacaaagatgcatgtcaccctcacacttaggggttgggtgccctggggcagatctgctggcttgagtgaaccgagaccatgcggattaggccccgggtcatcaaatcattgatggccctacgagccagggacccgttgatcctgagtctttcagagagaacggagggggtgatctgcttgtacttgggcacc

SEQ ID NO: 34702 - DNA, 360 bp, Oryza sativa
  Clone ID: uC-osrocyp008d07a1
gaacaggctgaatacaatacctttgtaggccaagtccgttaatccgcggaacacgatgatgacagcgaccatccgagatcagaggcaaaagatgagttcacatgctgctattattgacggggccgagatgcttggccttggatctaacttagtgcttctagatggtccacgacggcgacatgggcatgaggcccgaacaccactcgacttggtgacagcaccaccttggtatggttgtacctgcagaaccgcatgatgtccccggacaccgacgcctcgtgggaagtaggctcgccttcctgggaaggaaagaacccgcacggggactggaatcactgctcggacgccctcgtgaccagc

SEQ ID NO: 34703 - DNA, 500 bp, Oryza sativa
  unsure (1)..(500): unsure at all n locations
  Clone ID: uC-osrocyp008d07b1
ttagggttcacttgtttatggaaggcacggccaagagatttacagagcaaacttaggtttggatatctgcaaggaggcatttttgtactccttgaagtatagtatacctcttgttgcataccatgaggaacaatgtttgaccctctttgaacatcctttggttgatttgttgcacacaatccactatgagaccaaggtaaaagtggtgccttcagttgaggacctcttggggtattcatcttttcagaagttgcttttccttgacaaagtggatggggattcatctgtactgagacagcattggtcagaactaacacaaggaagagcacgtgttatcaaagcgcattcaagtatgattgagattgttccacttaatgcttcaagggtggtggtataaggattttacttgatcatcttggaataactgaagattctgatcttgatgctgtgggagactacacangatggctaagcaacatatttacttaaccattcttaag

SEQ ID NO: 34704 - DNA, 518 bp, Oryza sativa
  Clone ID: uC-osrocyp008d08a1
gcaaatacgagaccagctacctttattggcatggcatggcatcccgcgcctatcgattattcttctgttcatttcgcattggtgcatgtgtctatttccatggatgggcaaatgaagaacgtacaagatgcctttcttttttttcacctcacttctgcgaggtgggcatggagagggagacgcgctgagccggcgactccttccactgctgcgtgaccgtcttgatctgggtgaagaactgcacgcccgccttgccgtagaaattcaagtctcctgcaaaggaggctttgctgccggtgaaggagaagaacggcaggggtactggaatcggcacgttgatgcccacctggccagcttcaatgtctgtttgaaatttccttgcagacacaccagatgttgtaaatatggatgctccattgccatatttggttctgttcacaatttggatagcatcatctaggctctcagccttcatcaagagaagaactggaccaaaaatctcctccttgaacattcca

SEQ ID NO: 34705 - DNA, 197 bp, Oryza sativa
  Clone ID: uC-osrocyp008d09a1
atccaacaggaatcagaaaacacaagtgaactcacatcgcatcatcaattcagaaacagataatgatattcacagaggctactactgaaaggtctccaggtgtcaacggggaacaaaacgcatttaatttggataacatggtacccggcggagcttaatttaacttatggatattaccgataaaaggggatgaaaag

SEQ ID NO: 34706 - DNA, 545 bp, Oryza sativa
  Clone ID: uC-osrocyp008d09b1
gacgaccttttcctttaacctgccaatttcttccttccttccatccgtcctgcaacctcctcctctgcttctcgatttctcctcctccactccatcgtctctctctctctctctctctctgcagctaactcctccgaattaggaggttcatcttgatgtaattgactggattcaataaaatttttcattatcttgaaaaagaaagtagcggaggtgcaacgttggcatatggagaagcggaggcggccggcggcggcggcgatgcttctggtgctcatccctgctgcatcgcgcccaccccatgggatcgtagcagcaacagaatccagtgtccagaatagtgagcagagctttggtttcaaccttacacttgccaagactattgtggagtatgcctcagctgtctatatgacagatctaacagagctctatacatggacatgctcaaaatgcaatgacttaatccaagggttcgagatgagacgtctaatcgttgatgtccagaacctgcttgcaggcatttgtggtgtcgatcacaatctcaa

SEQ ID NO: 34707 - DNA, 505 bp, Oryza sativa
  Clone ID: uC-osrocyp008d11a1
accattcaagaaatctccatgacagagactgatgcattatatatcttgttttttggcataaattatttatcaactggccagcatgcctttcagaagcaccaaccaaatcaatctggcatggcgagagaaatcttcacagataatctgaccacaaatcagagctcaagacaagcaaagtaatgttcgcagatagactactcccaacagtttaatattcctgtgtcagaaatctcagaattatgtcttgtatggcgaggatgcgcccccaccaacgctaccgcccaccttcatcaggctgccatcagcatttttctcaaacagatcatcgaagtatttgttagaagaaacataagatggcctgcgagctcctgcagacatcggttgcttagtgctcccgtttatcggcgattgtggcccggcacttcgaagcggaaccccgaaagaatttgattgctgtagaggcctcaaattcagtggtacattaaccggcgaggcggaattaggt

SEQ ID NO: 34708 - DNA, 473 bp, Oryza sativa
  Clone ID: uC-osrocyp008d12a1
tttttgtttttttttttttttaccacaactttttaaggatggaattgagtagcaatactttcaccccaaaatacagtttagcgacaatatcttaaaaaagccgcttgctttgccgccatggctggcaagctgagcagagcagctaacacaaagaacacgagatcactataaaccaaacggcaacgaacgaagaaaatacagggtcttttttgtctgaagatacacgaagcgggtcgttttcttttatttttaggctcctctcctcctcgatgatgggtgtatggcaatggcaatggcgatgggatcttggcttagttgatgggaaggggctcgccgttccactccttgaggcagtcgagcatggggtcgatgagcttgccctggctgatgccgaggaacaccttgttgcactcctcgccgggggacttgagcttctcgccggtgaggaatacgcagccgagctccttgcggac

SEQ ID NO: 34709 - DNA, 477 bp, Oryza sativa
  Clone ID: uC-osrocyp008d12b1
tttccgtatctccccaatctcgcgaggctctcgtcgtcgaatcgaatcctctcgcgtcctcaagatgcagatctttgtgaagacattgaccggcaagactatcaccctcgaggtggagtcctctgacaccatcgataatgtcaaggctaagatccaagataaggagggcatccccccggaccagcagcgtctcatcttcgctggcaagcagctggaggatggcaggacccttgctgactacaacatccagaaggagtcgacccttcaccttgtcctccgcctccgtggtggcatgcagatctttgtcaagactctgaccggcaagactatcacccttgaggtggagtcttctgacaccatcgacaacgtcaaggccaagatccaggacatagagggcattctcccagaccagcagcgtctcatcttcgtcggcaagcagctggaggatggcaggacccttgctgactacaacatcca

SEQ ID NO: 34710 - DNA, 459 bp, Oryza sativa
  Clone ID: uC-osrocyp008e01a1
aggttcaaatccaacttattcataaagcatactgctgtcccacaggaaactgtttcataaaactaacatatcatacggactcgatggtccattaaaccagacacaagtagacatcagcaccacaaatacttgacgaacagaggctcgggatgaccaggcacatcggcagctccaccaaactggctgattactgaccaccacggaggcggagcaccaggtggagggtggactccttctggatgttgtagtcggcgagggtgcgtccatcctccagctgcttgccagcgaagatcagacgctgctggtctgggggaatcccctccttgtcctggatcttggccttcacattatcaatggtgtcggagctctcaacctccaaagggatggtcttcccagtcaaggtcttcacgaagatctgcataccaccacggagacgaagcaccaggtggagggtagact

SEQ ID NO: 34711 - DNA, 525 bp, Oryza sativa
  Clone ID: uC-osrocyp008e02a1
aaaacccgaaaaatcatatatgcaaacctgcaatctgtcactgaattgaacatttacacactgcaaattgcatgccaaatctcgcaattcgcgtgcaaaaacaccaaaagcatcagatacaattacacatgcgaatcaaaatgcaagctcgacatcaatcgcggtaattaacaatggagtgctagtaaggctagagggagaacagcttgcggaggttcatcggcgagatgtacttgctgtcgccgtcgacgatgtacttggccatcaccaggttcgccgcctcgctggggtggtacgggtcccagaacacgtggctcttccggtcgccgcacatgctcgacgccggcccgcacggcaccatcccgtcgtacgtcccgccgttcccgcagcacgccatgctcgccgtctcgaacccgtaggagtcgtagttggtgatgacgtccatgacgaggtcgtagacgttggcgaggcagaacttggcgcccgcgaggtcgccgttgagctggatgaggagctcccggaggc

SEQ ID NO: 34712 - DNA, 515 bp, Oryza sativa
  Clone ID: uC-osrocyp008e03a1
gcatcaagagaaagttcattcccgccgagcaatgctgctcgagtacagctttcagtacccgaaaacaattggtgaattcctcgcaagagttaccagaaaaaaaaatggggaaaaaacctcttgcaatcctacccacaactgtctggttcataggatctgcagggagctaagcaggagaaaactagaactctcaactcaattacaaacattttctttttttacggggttcattctacgggttccaaaattattcactgctgaatcaaattcagtagctgcagggagaagatcataggtttgggagatttgctaggacttaaagaggaggagacagcgcgaatcgcacgctcttggttaacaatgtgaagctgtcaggtgcttcaagcttgagatgtcgaacagctccatgaatctctgatcggtgctcctcgccttcgcagcggcgaagcgctggtactcgtcgaacactgaagacaagcaccatttctgaagcttcctcaagcaccccacgacgc

SEQ ID NO: 34713 - DNA, 466 bp, Oryza sativa
  Clone ID: uC-osrocyp008e04a1
acagccaaaactatatatatagagataccatcagggagttgggttcacaaaacgcactttcaagttgcacaagtacatacgggacgggtacctagccgcaactggtatttccgaaccaacaacctgcacaccgggatctttgacgacgacattgacgccgccgtttttgtcgtcgccgccggcgagttgccgtgcgtgctgcagcaggagcgtttcgggggggctcctgcccaggacgatcctggaggggctccagtcgtcggcctccatgtccactccaaggtatgtcaggggggctgacgcgcttcaaaacaggaccaggacgcttctggagcagtctggatctttgccgctgccgtcgcaaacttgggagactgggctgccattgacttcatgttcccagacctttgttgggaagtgatgggatgtttggtctggaaaaatgaaaaaaaatgggggcaaatgc

SEQ ID NO: 34714 - DNA, 344 bp, Oryza sativa
  Clone ID: uC-osrocyp008e05a1
actcatagaacagctcaaattgccaatcaacttggaagaacaataccgcttttagctaagctttgttttcttggagtttgctacacagcactacagctacacagaattcagagagcaattggaagggagaatcacagaatgaactgatttccgtacgctcggggaacggacaatcaaacgaatgcagcctacgagcgttgccaggtacaatcctttacaacttgtaataaatagatgccaatgttagattctactgcatcctgaatggctagtaacaagtgtaacaaacaccatttaaactggacctggcagccgggggcacaaccgaatttaatgaattgctc

SEQ ID NO: 34715 - DNA, 441 bp, Oryza sativa
  Clone ID: uC-osrocyp008e05b1
tccacgcgtccgaagagaggctgcactccactcgccgccggcgaccgatgctccgcgccgccctcctccgctcaggctccggcctccgccggcctcccatggccgcgccgctctccaccgccgccgccgcctcgtggctctccgacagcgcctcgtctccgcctagggtgcgcctcctcatcggcggggagttcgtcgagtcgcgggccgacgagcacgtcgacgtcaccaatccggcgacgcagaggtgggtgtcgcggatcccgctcaccaccgccgacgagttcagggccgccgtggacgccgccaggaccgccttccccgggtggcggaacacgccggtgaccacgcggcagcgcatcatgctcaagtaccaggagctcatccgggccaacatggataaactggcagagaacattacaaccgaacaggggaggacac

SEQ ID NO: 34716 - DNA, 424 bp, Oryza sativa
  Clone ID: uC-osrocyp008e06a1
gctgctgacaagacaagcatcgtataactaatggtaatggatttaagaatttcacgtggttaacctttgacgtgagaatcactctcatgagatgtgtgcaaatgtaacccgttcatttttgcgatcatacggcacatcatgagaaggtaaagcacgcaacacaactgttcttaccgtgagctaaccaaattagaatcttattctggtaattttcttcgtggatctcaatacaaatcgtagtggaacctttgccttccaaaatctggagtccaaaaatacacaggagataagcagccatttgctcctggaagaatgagagaagcttgcgcgccggtgcctcctggggctcatgaggaggccgtcctggtgattatcttgagccgtcatcgtcggcgtcattagcatcttcgagcacattgcaact

SEQ ID NO: 34717 - DNA, 235 bp, Oryza sativa
  Clone ID: uC-osrocyp008e06b1
cactttcacacatccacactgagggtacactctactcgcgcgagaggagggaggataggcgacggcctactactatcaggctcccgcctccgtcggcctaccatggacaacccgctctgcaccgacatcgacgactagtacttctccgacagcttctcggatgcgtatagcgtgcacgacctcatcggacgtgagctcgacgagaccagggccgacgagcacgacgacgtcacca

SEQ ID NO: 34718 - DNA, 84 bp, Oryza sativa
  Clone ID: uC-osrocyp008e07a1
gttaaatcccgagaagacgtaaaaaccaaccagatgcctgtcacttaatcgaccatttacactctggaaaaagagggcccaaca

SEQ ID NO: 34719 - DNA, 183 bp, Oryza sativa
  Clone ID: uC-osrocyp008e08a1
gttccagctgggccggggcagcagaagctgtcgtcccatcctgctccatgcccggcccctcgccgccggcatcgcctcctcttcgcgagggcccgccgccgtggcggcgcggacgctagggcggctgctgctgctgccgccgccgccgccgatctcgccggaccgaacggggagggggagggc

SEQ ID NO: 34720 - DNA, 519 bp, Oryza sativa
  Clone ID: uC-osrocyp008e09a1
ggttaaacaagatactcagtcccaagggggaaagcataacatccaaaacactacaagtcgttcaaatacaaataaacctttactacgtacacaaaaataagttatcttcaagagagaaaacaaaactagaggtacaatcattaagacccgcaattcggctagtagaaaattcgaaacaaaaagctttcaaactgcacgggcaaacatccttgttgcccggtgaaacccaacacaacaatccattgcatacattaggaatgccctgatgcgatgccattgtctgaaaaaactgaccgactcagacgacctacactgcacactacctggacagatttcttccagtacaccaattgacttcaccttccgcattgccccatggccaacagccctcaggtgctactgaaaccatgggacgcatgcaaacaatctgcagatcacgtctcaatcagctgataatggtacaaatctgcccacaaacttagaagcacttcatgtggacgatgcctggaccagattcat

SEQ ID NO: 34721 - DNA, 98 bp, Oryza sativa
  Clone ID: uC-osrocyp008e10a1
atccggcaaaactatatataaacagaaaatgacaatgatcttggaaaaaaaaacccgctctcaagtagggcatgttcatacgggacggggtacctaac

SEQ ID NO: 34722 - DNA, 405 bp, Oryza sativa
  Clone ID: uC-osrocyp008e11a1
cttgtgcaccatccaagaaccatatctgcatatccatagctgatacagctccatcgggaaaacgttaattcctctacaaggatttgcgtgctactgctaacggactatacctttagacattcccaggttacaataccgggtaaacaagctgcctaacagacattaccatacttgatatgttgtatgatcctgaagggcctagccaagcaatggaagcaaattcggcgaacccaatcctgtttttgccaaagacgaagacggtgtggtatgcagccatgaacacgtctccaagaatccagagagggccgcgtggaggtggcacgtcgaacgccatgaacccgctgatgcaaacagtttgaccttgctgctccagcttcactacgtactgctctggggtcaagggga

SEQ ID NO: 34723 - DNA, 462 bp, Oryza sativa
  Clone ID: uC-osrocyp008e12a1
aatctaacatacgcaaactgatattatcacaatgttagccgatgacaatggaaagagtaatctaggtacaagcggatcattgacggtggagacaagacattggctgcaccacaacacccaccagtggcgccaacaaggagcgctatccgttataggacgagagaaaaagtaaaacatcacgatgtgaagtgaaactgaataattctagtagacgatgatgatgatggataggctccttaggacgcccgccgcccttagcgtcttgctgctcccatcttgtccactggaaggctcactcgtcatcgtcttcatcctcttcgctgccctcgtcgtcatcctcatcattgacctcggacttggacttgtcagattcctcctcgtcgtcctcctcttcctccttggcgggtgccttcttggcagtgctctcgcccttgttgtaggcagcaatggccttgttgtact

SEQ ID NO: 34724 - DNA, 491 bp, Oryza sativa
  Clone ID: uC-osrocyp008f01a1
tttttgttgtgaagaagctcctgagttgtactacaaatgaaggcaaacagatagaaagatagaatgactatttgcggcgactgatcgctgcgggtttaaagtgttggagctcaaaatcttgcttggattcgtcactggccagaggtcgggctcgatgctcgtcctcttcttcatccatggcgttcatgggctggatgacatgttttggtggctcttcgtgaagaaggtcctgtcgcgaggtggatccttcttgctgagttgcagtcgtagcacgcgagaggttgcccatgctcacttctgacgcacttggacctcgcaaacgctcctccttgacttcatcgtcttctgccccatcaatagaggtccggtagtagattggattacgcgacatgtgtagcttgcgattggataattgaaacgtgctcggatccacctttcgcaatgcgttctcgtcgacttgctccttttgaaagagactttgcgtaccacat

SEQ ID NO: 34725 - DNA, 204 bp, Oryza sativa
  Clone ID: uC-osrocyp008f01b1
acgttcagttctccgagctcgtgaacgagttctacaacaacgggctgacctccaacctggccggcagacgcaacccgagctcggactacaggttcaagggcaccgcgatcggcatggcctcctactgctctgagctgcaggtcctctgacaaccccatcaccaaccatgtgcagagcgcggagcagcacaaccaggacgtgaac

SEQ ID NO: 34726 - DNA, 83 bp, Oryza sativa
  Clone ID: uC-osrocyp008f02a1
attattggttttttaatttttggtcgctgtatctctgttggttgtctatttttttttatagtgatgtttttttatatgttgtt

SEQ ID NO: 34727 - DNA, 268 bp, Oryza sativa
  Clone ID: uC-osrocyp008f02b1
ttccatcactccactccccaatccaaccaccccccgaacaaccggagaagagaggctgcactccactcgccgccggcgaccgatgctccacgccgccctcctgcggtcaggctccggcctccgccggcctcccatggccgcgccgatctccaccgccggcggcggctcgtggctctccgacagcgcctcgtctccgcctagggtgcgcctgctcatcggcggggagttcgtcgagtggcgggccgacgagcacgtcgacgtcaccaat

SEQ ID NO: 34728 - DNA, 482 bp, Oryza sativa
  Clone ID: uC-osrocyp008f03a1
ggctgcacagaacaggattacgtaacaatacgctatgcccaagacaagtcaatactacaacatctggggcgagtacagaggtacaaaagtcaggcaccgtaagcctttcgattaaaaaccaaactgaaacacgcacgattttttaacaccccacgaaaaacaatctgatacctagctcctttggggggggaacctaaagagctttatcttcccaaaacatccacatcattatctgtcatgactatatagtttcgatacgtaaaaaggcagcgttcactcagggatatccgccatgtcttcctttcatttaagcccggccaagatgcttcaagccttgttggcaatgttgttggaaagccagtcaagcccctaatacaacccctcaccagaggtagcacatgtgctctggatgtaccagtgccgctggcgcaaggagtgcagaccaagcttgtcggtgatctcagcagcgttcatggcattag

SEQ ID NO: 34729 - DNA, 219 bp, Oryza sativa
  Clone ID: uC-osrocyp008f04a1
ggacagggaaaacgaagcatttttatttttatttttctaacagggccttcaaccaatgtacactggtcaagttaaaggactgatctgatcagtctgctagttcaaggtgggtcctattcctccccaacaagggggggttacattctgattctggggggggttttgccacccatcccagactgttcatcttcactgtaaaagggccaaatacaatgacca

SEQ ID NO: 34730 - DNA, 523 bp, Oryza sativa
  Clone ID: uC-osrocyp008f05a1
gcacaagaagccaaacgtgagagcttgtacaaaacttcagctctcttcaatgttgactacgctaattaaaattgtaactccataaaaactcggctacgccgagaaaactgtaattacaacagatacggcgtagccaattcacgcaatgcgcacccatacggctacagtatggttcatttaacgtctgatagacgatttcttaaggtgctgccgcaggtggcgacaaatactgaaaacagcgaggtaatccaataaagaaataacattggaaatcctctccagcggcaacccaagtctctaaatgatcataatcactcgagttaccctgcaacgcaaatttgtacccgggttgcgaacgggcagttccatttgtagaattgtagttggtgttacgggcaaaataacaacgagcgtcattttcccaaggcacttcaaattcaacagtaggatttactctcgaattaaaatagacggcaccgttcggtccatcaggataatctaacgggccttcagctatccatgt

SEQ ID NO: 34731 - DNA, 476 bp, Oryza sativa
  unsure (1)..(476): unsure at all n locations
  Clone ID: uC-osrocyp008f06a1
cattccgatagatagcaacaagcagttcaaacaccataaccaaagcgaactcaattcatggtaacatcacggacgaagaacacctaacactggatggatggatagagggcttctcgactcgagagagccactggacacgataacgactcgactcgatgataagatgattctgacacggatagctaaggataactggccacgatgggccccaccaatcagttcctccagttcccgccggagtcgccgccgtagccgccgccacggctgccaccgtagccgccgccgccgccgccacggccgccgccgtagccgccgccgccaccgtagccgccctcacggcgcccgtagccgccgccgtcacctcctccgtagccgncgcctccacgaccgccgccgtagccgccaccgccgtcgccgtagcccccgcctccgccgncggagcggcgggactgggcctcattgacggtgatgttgcg

SEQ ID NO: 34732 - DNA, 182 bp, Oryza sativa
  Clone ID: uC-osrocyp008f07a1
gttcatggtaaaagttgtatacccacacattatagaaacggacaatacgaaagattttttttacagctcacacttgccgggcaaatagacaatgtggaccgcataaacgcttcctacacaggatgagcagcttatatagattatagcaactcaattagaaagggctcaacattagataacca

SEQ ID NO: 34733 - DNA, 467 bp, Oryza sativa
  unsure (1)..(467): unsure at all n locations
  Clone ID: uC-osrocyp008f07b1
gtgggtgtgtccctgtctcccctctccttcctcctctcctttcccctcctctcttcccccctctcacaagagagagagcgccagactctccccaggtgaggattcagccatgaagggggccaaatccaagggcgccgccaagcccgacgccaagttggctgtgaagagtaagggcgcggagaagcccgccgccaagggcaggaaggggaaggccggcaaggaccccaacaagcccaagagggctccctccgctttcttcgtttttatggaggagttccgtaaggagttcaaggagaagaaccccaagaataaatctgtcgctgctgtaggaaaagcagccggtgataggtggaaatccctgaccgaagcggacaaggctccctatgtagccaaggccaacaagctcaaggccgagtacaacanggccatngctgactacaacaggngcgagagcactgtcaagaagg

SEQ ID NO: 34734 - DNA, 468 bp, Oryza sativa
  unsure (1)..(468): unsure at all n locations
  Clone ID: uC-osrocyp008f08a1
tttttgtttttttaattaaagctgttcgcatgtctcttattgcaacagataaaacgataaattttcaccaaagtgtacacttgacgggcacatctctatgtgtagtgtataaagtaatcatacaaatgaaaggagcttaattagatcgcgcaaacactcaaaagtgcagccatttctcacgagctcagccgtgccactcccgcagccgccgcggcgtcgccgcctaactccgtcgcggcgccgccggcaatggcacggccggcggcaggcgatcccttcgcgcagacctcgtcggcgtggtcggagacgacgccgtagccctggctggccacgtcccggtagtagcacccgtccgtcgcctcgtacctgtacgtttgcgccgcgcgccacgacgtcccgacggcgtccccttcctgcacgcggacgtccacggnggagtcctgcgcgttgctcagcgaccgggaccag

SEQ ID NO: 34735 - DNA, 283 bp, Oryza sativa
  Clone ID: uC-osrocyp008f09a1
tttttggtttttttaatttttttggttggatccacaaaacagtattacaaaaaaatacactttgccaaaaacaagtaaatactccaacatctggggcaagtacagaggtcaaaaggacaagccacgtgagccgattcttttaaaaaccaaacttacacacgcacttttttataacaccctacaaaaaacaatctgatacctaacagctttggtggcggaaccaaaaaagtttgaatttcccaaaacatccacaggatcttctggaaagactatttagtttccc

SEQ ID NO: 34736 - DNA, 319 bp, Oryza sativa
  Clone ID: uC-osrocyp008f10a1
ggtacaagaagccaaacgtgagagctcagttcaaaactttagatatctaaaaaattaaatatgaaaggtatgcaaggacctcactaaaaacttgacagctataggatataagctcagctatgatcaacgggacactgcaacgtacgcaatgggtacccataccgttacagtgtggttaatttaacgaatgaggtagcttggccgaccgatcgaacgatcatgccctgcactgcttgatgcaggaacatcctccaatagaaaggttggtctcagggccgggctggcagttgtagtaggacgcgcctggttgcgagcactg

SEQ ID NO: 34737 - DNA, 500 bp, Oryza sativa
  Clone ID: uC-osrocyp008f11a1
gggtgttgaactttgcttataacgtttaatataatcatttgcgttccttcaaatcacgcttgcgccacgcaacatcaaaattaagcgttttgtgggagcatgtccacccacatctgaccgtggggaattattgctcaaaccctacgagcaaatctaaagcaccatcttcacaaaatttacggaaacgaagtggttctattcccatctagtagggctccactggtgcacggaatttggctccggcatagacggcagcagcaccaagctcctcctcgatcctaagaagctggttgtacttggcaaggcgctcagatctgcaaggagctccagtcttgatctggcccgtggataaaccaactgccagatcagcaatgaatgtatcctcagtttcaccactcctgtgactggtcatcaaaccccagccaggacgttttgacattttgacagcctcaatgctctcaataacagatccaattttgttaaccttaaggagaagagca

SEQ ID NO: 34738 - DNA, 519 bp, Oryza sativa
  Clone ID: uC-osrocyp008f12a1
aaatgatcaaaagctatattgaaaatgttcatcatgtcatttataacaaggggggcagaaaggactttgcagccgggatatgtacaggtaatttccatcatcagagatggagtaaaaaagttgttagtagcaatgtctcaagagttaacggaccaaaatgaccctgtaatcagattgtccaatccaagatcattccgagaaccagttttttcatttgaaaagaacaactcttcacagatggagccgctacaccaacaatctaccactaaatgagctagtctactgaggatttaatcacaggtaccgttccgtttctttgctgatgggccttcttattacctgtgttttttgaatgccgaacagcatctttgctgcatctgcttcttgccatttcgttttttactgcagatacttgaacctctgctttctgagattttgttgcttgtcggtttggcacacttgctgctacttgctgcgggattacagggcatgattctggtgtgctcgcaagaagctggc

SEQ ID NO: 34739 - DNA, 412 bp, Oryza sativa
  Clone ID: uC-osrocyp008f12b1
tacgacttcgaggcggagttcgagcttttcgaggacgacgacgacgacgatgagttcgagctttccgacgatggcgacgagagtttggccgtgtcatgtgtgtcgtcccccaagtcgaaggcagtaccttcgttttctttttcgtcggatgtctcctcgagctccaggccgtggcggtgcgtggcggcggcggcggccggtcgtcggaaggcgagcaagaagagcaagtacaggggcgtccggcgccggccgtcggggaggttcgcggcggagatcagggaccccaagaaggggctgcgcgtgtggctcggcacgtacggcagcgccgaggaggccgtcatggcctacgaccgcgaggcccgtcgcatccgcggcaagggcgcgaggctcaacttacttcgcgacggcgatg

SEQ ID NO: 34740 - DNA, 343 bp, Oryza sativa
  Clone ID: uC-osrocyp008g01a1
aaaaaaaaaaccaagttaacttttgggaaaaaagggggaaagggatcatgcaaaggtaaaaaaagtttttatggggacaaaaatttttaccccaaaaaaacccccaagggaaccttttatggggccccccaaaaaaatgggccctggagggaactttgggggggcccatttaaacttttaaaaacgggaaaaaaaaaaaatttaaagggcccccgcgggtatgggggggtttttttatgcctgggggccgggttcaaaaaaaaaggggggggtggaattgttgttttcagggccactgaacggggggggaccagggttgttgcggacccgggggttcccccgg

SEQ ID NO: 34741 - DNA, 236 bp, Oryza sativa
  Clone ID: uC-osrocyp008g01b1
cggtccggaattgcagggctggacatcgccagcggtcgttttatgccgctttaccccttgtcgacgcggcgcaggatttctacaagacacttctgccgccgagcgatggattccaatacaagctcctagaccgttctaccatgtgaggaacacaactgctgtcgcacaaagaagaagttcatggccctcggacccgttgtggcgcccgcgcctcacaagctgctgattgtggaggt

SEQ ID NO: 34742 - DNA, 481 bp, Oryza sativa
  Clone ID: uC-osrocyp008g02a1
tttttggtttttttttttttttttttttttttgggacaaacagcatacataacccttcttttcatagcagttttccttggccataagttacaagaggctggacacctttccctaatattcaaactttaaaaaagcatcccccaacttcccccaccggtcatccaattccagtttccaaagaagcacatggcatgagagccctgcatgcagaaatctctccaaatacaacaagattcaaggggcacatgtccgcgcaatgaaaacaaatgggaacctgtacaaacagcctaagcattgccatgagtccaccaaacagttgctaagggccaaagccccttagaaccaaccaaaccttttattttccgggctttagtactccacttcagcaggcgtgacccatggaggaggggctctgatgatatgcacaccgccaagattgagacatactagaactgaatcctatcatcgccatcgaaattta

SEQ ID NO: 34743 - DNA, 512 bp, Oryza sativa
  unsure (1)..(512): unsure at all n locations
  Clone ID: uC-osrocyp008g03a1
gccgccgaggtggaggcgccgaaggaggagacgccggcggcgccggccgaggctgtggccgaggaggcggcgcccgccgaggccgaggtggcggagaccaaggaggcggagccagctgcggccgagccggcggcggaggaggtgaaggaggccgagcccgagccggccgagccggaggccgagcctgccaaggaggaggtggcgccagagcccgccgccgccgccgaggcggaggccaaggaggccgagccggcggcgcaggtggccgaggaggtgaaggaggaggaggcggcgccggcgccggccgccgaggaggtgaaggtggaggaggcggcgccggtcgcggagccggaggccgagaaggccagcgagtgagtgcatgccggggaaggctggctcgccgtcgtcgtacaccgtggagtacatgcatggcccgcgcgcgccgncgncgncggcgactcgccggagttgtacgtacgtgtgcgtgtagcgagtgatgagttgagtgagct

SEQ ID NO: 34744 - DNA, 515 bp, Oryza sativa
  Clone ID: uC-osrocyp008g04a1
tttttggttcgcctaaaactggaaccgaatacttcgattttccaaagaatcggcacagtaaaatgcaccgtagctgtacatggactataatgtatatttacaccctcgatttacagccctatagttttacagctaaaaaactaacgtgtctaatattatacatactaatagaaagcgaaagttgtagaaagagaaattaaggcctgaatattttcatcatcctagatacttgcgtccgacaaaatgggcatcgtgaaaccgaacttgagcatcgattacaaagaacatgaccgcatggtattatagtcatgttgacctccgcattcaggcagacacgacatgaccatgctgacttggcaacatcagcttctctaactgctgcctccgctttctcctgctccacgagtagagccacttgagattctttaagctggtcttgcaaggaaagagtagtctgagaagcgtttcctttgagcatccatccttacccctgaactgaaagcatatcgtggact

SEQ ID NO: 34745 - DNA, 460 bp, Oryza sativa
  Clone ID: uC-osrocyp008g05a1
gatcgaatccccagactttgattgatgtatgtaagttctttattcagatcaagcgattacatgatggcccgtgcgaccaacatgaagaaatgcacttgggacgccattctttccaagccccctaaaccatggaagcacaatttgcacaatgctggagccgttcatggctcgaacaccatgttttaggcctccctgttgatcgattcgaagaggacagaccacaggtagcgctcaccgaagctcgggaagaccacaactacgagcttccctttgctctcgggccgctgcgcgaccctgatggcagcgactgcagcatccccagatgagatcccaaccagcagcccttctttcaacgctagctgcttcgccatgctgatggcttcatcacttgagactcggaccacttcatgcaggagattgacatcaagtacaccaggaacaaatccagcgcctatacctt

SEQ ID NO: 34746 - DNA, 377 bp, Oryza sativa
  Clone ID: uC-osrocyp008g06a1
ggcataatgtaagtgtagccagtctcctttatatcatctgagttaacataaatgtgattgacacgaagatacaagtttgtggcagagatagccctaacacgccaatcagtctttgatgcaaatgcttgttgctcgtatggactggtcgttgtgatgatgagctcatctccatgcacattggtcgtccttgtagtaactgcggtcagctgagtcgtctctctagactgtttctcaatttcagcaatctgttgcctctgctgtgatggtggagctatttcagcaccaagtataatgtcacgaatttcagattgtgtcagcgcagacgtattaacattgtttttttttgcataatcagacaggatgaggtccctgagtgc

SEQ ID NO: 34747 - DNA, 145 bp, Oryza sativa
  Clone ID: uC-osrocyp008g06b1
ttggcgtgtggttgaatttggatttgtgctatatgtcctctggacggtccgacctagatcgacattggatggtgcctgtcgctacggcaggtttgcttgagctagactagctcgaggagtctttggctggagtactgatcaggta

SEQ ID NO: 34748 - DNA, 483 bp, Oryza sativa
  Clone ID: uC-osrocyp008g07a1
atgagtgctaagtgtaaatcaatgacacgaacggtggctaccaggagagaaccaagaagaagaggggaaggccaaaaacggtgaagataaactaattctatcagacaaccatccgataaaagggattagaaacgaggaggctgctgcacatcagctgtgtttatgaacaggatacacctgaaaaattactaggctaacagccgggctgacatgctaaacctgggcaccaagacagaagctcacagggcaaacacactaacacacacatgcacaaccacagtcagccaccaaccaagccgagttgtctggaccaaacacacccatggtgtagcacaacaccaccaatgtcaaggggagagacacaacctgtgccattggacgcagcgccacacccaagctggtgatcccgaccgcgcatttaaagaatttggagcccaaccggaccaaactctgtaagacgcaccagccacgaaaaaccttgac

SEQ ID NO: 34749 - DNA, 428 bp, Oryza sativa
  Clone ID: uC-osrocyp008g07b1
gtatcatcagctcatcaccaacctctctctcgtcgtcttctccctcttcttcttcttcttcttcatcttctacctttgatagtttgattgacgtgttgttcctttgagtgcagcaagaagctgatgattttgatgatagcttaaggatcttgccaaactcttgtgttgggagtagttgcttgcacatcgagctgcaaaggtcccattttgcttctccatctgagcttgcataggttgcgtctgagtacacttctgaggcttctttggtcgttttggcctcgagctccgctcttaaactctgcctcgatcgatcgatctcatctcatctgcgctgttcttgatgctgttgctgttcaattttgagaagaaggtgccgatcgaagtgagccgatcgggttcagtgaaattcacttgcgtttttgagagaa

SEQ ID NO: 34750 - DNA, 408 bp, Oryza sativa
  unsure (1)..(408): unsure at all n locations
  Clone ID: uC-osrocyp008g08a1
tttttggttcttaccaatacaagcctcttattcaaagttacaaatgtgcacgacaagttgacaacaaaaaaagcgagaattatatccttattttgaaatttgaattataggggcagacggtgagcccattttagtttcttgcgaagttgaagttgccacacgtagccctgatgaagaagagggtgccactgaaccctagccttgacgcggcctcgtcgaacagcaaaaagttgttctccatctggaacgcgcccacggtcaccgcgctccgngccgacctcccgccgtcgacgaacgccaagcacgccgtgtagctcgccacctgcgccagcgagttcgaccccaacaccgtccagttccggccgccggacgtcacgaggtcgatcggcgcccccgcgtagccgaccc

SEQ ID NO: 34751 - DNA, 529 bp, Oryza sativa
  Clone ID: uC-osrocyp008g09a1
tttttggggaagtaacttatactattatggatttatcaatgcaatcaatgagatacaagctgaatatccaacacacgcaattcgtcaatacttcatgaaatggagcagatctaaactaatcgcctgtgcaccatgtagttggcacagaagatataggtgagagcttaattactcaggcaccaagctaatcccaattcccaacaaaagtttttttttggaagaacttctgcatgcaactccagtacagttatatcctaacaaaccaatacacgaaattgatctgacgggtgaagttaaatcaaagaccaacccaacccgtttcagaaaaggattaatttttttttgaccaacccaatctagcacgtttaaatccctacgttgaagcaatgctaaaatccctaagcatgaagtcatatacaacccccgtggcctcagcatagcgtcatagcataaattgagggataccacgcagagaaatgacaacggcaatgacagacgggttgctaactggtatgtattacgactgaca

SEQ ID NO: 34752 - DNA, 250 bp, Oryza sativa
  Clone ID: uC-osrocyp008g10a1
tttttggttttttttattttttttttttttttttttttttttttttaccaagaaaaggggggaaattataaatctttttatgggttgtttggagaggtttacatattataaccagatgagctacatggattcctgggtttttattccctcacaggagactaaagaatttctggattctacatttgcccaacagaagaaaacaaatactttcacatgaaacaggcaaagcttgaattccgttttgggtgaa

SEQ ID NO: 34753 - DNA, 463 bp, Oryza sativa
  Clone ID: uC-osrocyp008g11a1
tttttgggggtcacaaggaacatagctgaagggcaaagtgtttacattattatgatagagcccagcttgcaacaagtactaaaagtttctactgaggatttggtggcctggagttggcagtataaaccctcgatccccattccagcagctctttgctgaaggtgaccttgtgcgcgagcacctaaatgaaagcacaggcagtccttctcccccagcgccatcccgaacgcctccgtcagctgctcttcgcaacttcaccttaaaagaccactatttgcccccttcattgtggatggcattcacaaggtcagtggagttccagtttcttgatgaccttgtatggaccccgaatgggactccaccttaatggggtccccgcccgtgttgatcaggaagattatcctgttctgtgcacagccaatcaattgggacaccattctgtgccgccacctggaaacttcca

SEQ ID NO: 34754 - DNA, 436 bp, Oryza sativa
  Clone ID: uC-osrocyp008g12a1
ggaactaatcggtataaccggtaaatacattatgatagttctgtccaactgctatccatgggaaaaaaatgtatggcacaatttacatcttagtcccgtaaaaatatgtttggtgttagactgaattaattagccttgtcatgaataaggagcatcagaattcagaagagtctcgtaaatgcacaacaatctgcatcaatattttatcatgttccctggtttatcttttgaacagaagatggggaacattgtcacaaagtgctcaggaaataacaaaagttcattctgcaacttgatgcataaagcagggcatagcagtcctgaacatggataagggctttcatccaataaaaatagaaatgagactgcactgcatgatatgaaattgggactagcgcgccacagaggaaacccaagccctaactcccattctttc

SEQ ID NO: 34755 - DNA, 511 bp, Oryza sativa
  unsure (1)..(511): unsure at all n locations
  Clone ID: uC-osrocyp008g12b1
ctaaccccggttagccttctcgccgcagatggcagtccccggccgccgcgacgacctcgtcggcgacgacctcgtcgacgacgacgggatcggcgaggagtacatggccccctccgacgacgaggaggcgcaactgcctgacgaactcttccgcctcgccgacgccgcccagtccggcaacgtcgctgccctccgcgccgcgctcgataattattctggcaacattgatgatccaatagaagatggtgatactctgcttcacatagcatgcttatatggccatctaccttgtgttcagctactgttggaacgtcaagctagcttggaatgcaaagatgaagaaggagcaattcctcttcatgatgcttgtgctggaggctttagtgatatagtccagtacattatgaaatttgctgcgaacattgatggctgcgtaacaagaatgctcaacacttngtgatctgaaggcgacactccactccatcatgctgccagaggggaacatcttggt

SEQ ID NO: 34756 - DNA, 369 bp, Oryza sativa
  Clone ID: uC-osrocyp008h01a1
gaatgcaatgatgagattgttgtaaccagtgattttatgaacagtaatctgttttttgtctagtttcgatgctaatcctcttcctttctggaaaccagaaggactcgcagtaaattggaaattgtaacactacgagcagttgcaccatcgaaaccaatcgacagggcagtcgcacctgtgccgtagtcgcggagtcgagaggactccgtgacttgctcgcttcgtcgcaagcccattggttgcaccacaaaacgaaactgccgacaagaacaattgggtcatccaccacgacctcactgaaggaacccttaattaagccccacttagactgaagacagacttcacatgcgggttgaaatgacctattca

SEQ ID NO: 34757 - DNA, 407 bp, Oryza sativa
  Clone ID: uC-osrocyp008h02a1
ttttttgtttttttattttttttttttttttttttttttttttttttttttttttttttttttttttttttttttaatattttaacatttaatattttttatttttaattatttttattttatttaatatttaaacaagaaaaacaaaaccaaatgttaatataaaaaaaaaaaaaggaaccctttgcaaaggaaaacattgaattgggggcccccctattaagaaaaaaaaatggaaaaaaaaaaaatgccctttaaaaaaaaacacccgggaggaacaattgtaaaaagcaaaaacaactggggaaagtaatttttaaccccccacgaggaaaaaaaaaaaagcccccacaaaattaaaaaaaaggaagtaggaatttaaaagaagaaaacaccctgggtttttg

SEQ ID NO: 34758 - DNA, 168 bp, Oryza sativa
  Clone ID: uC-osrocyp008h02b1
cgttccgtatgccctagctctcaggcgccggctgtgcatcgacgagaaaacatcacttttcatggggggcaagggcgagggtgcgggcatcggtatctaccttggtacgacctactcgtgcgtgggcgtttggcagcacgaccgtgtggagatcatcgacaacgacca

SEQ ID NO: 34759 - DNA, 445 bp, Oryza sativa
  Clone ID: uC-osrocyp008h03a1
aaaaaagggggatttataactaaatatccacttgcaaaaggggcaaagacatacaggagaaacactacgattcaagcagttttacttttacaaagatagaaaaaacattaatacaagagaaacgctttgatacaagagttcagtgaaggggtaaacaacttcaggaaaagaatttgaaatcacaccttttcgtagcaaatataccccacattgacattgactctataaaagggttctttcattaacatgtatgaagagattgggaatagacctcaaatttctagtatagtccttatctgctcaggcgagtgttttactaaagaccttgggtcagggtagcaattctttggatccaccactgccttataaaacaggtcataagcttccgccagagctctagccaaaccatagcatgcatcagaacgcaaccttggtacctgcagct

SEQ ID NO: 34760 - DNA, 525 bp, Oryza sativa
  Clone ID: uC-osrocyp008h04a1
agtacaaactggcaatctcatgtagtttcctgtgttaaatgtttcaagtgcaaacgttttcaatcatcctgaattcctgatgctatctgctgcaccaaattacaaaacaaacgagcaaaattgtttgctataagagaatttagcagggccggaaaagaaaacaaaaaaatgtaggaacatccatcgatgtgccaactgttgagacttcgttgcaatcgggcacagatgcaggagaccaggaacaatagtctcccccatgttcctccaggcgaaaaggatggctatggtgtatacacaatgcttaatatcaccattttgacgtcttgagttggtcatggtcagttcttctggcagcgttgtaggtcttcgatcgccttcttccattgccaggcgcgctgttttgcatcctcaaacgatgacaccttctttggcgtgcatatcctgaaatgcgaagagtttgatacttgcacattgagttcacttgggtcatcaaaccacatgatgttccctttagtcaccattttt

SEQ ID NO: 34761 - DNA, 459 bp, Oryza sativa
  Clone ID: uC-osrocyp008h05a1
gatcgaatccccagactttgattgatgtatgtaagttctttattcagatcaagcgactacatgatggcaagtgcgaccaacatgaagaaatgcactcgggacgccattctctccaagccccctaaaccatggaagcacaatttgcacaatgctggagccgttcatggctcgaacaccatgttttcggcctccctcttgatcgattcgaagaggacagacgacaggtagcgctcaccgaagctcgggaagaccacaactacgagcttccctttgttctcgggccgctgcgcgaccctgatggcagcgactgcagcagcaccagatgagatcccaaccagcagcccttctttcaacgctagctgcttcgccatgctgatggcttcatcacttgagacttggaccacttcatccaggagattgacatcaagtacaccaggaacaaaaccagcacctatacct

SEQ ID NO: 34762 - DNA, 512 bp, Oryza sativa
  Clone ID: uC-osrocyp008h06a1
gttgattcaacaaggcgtgaaatatacgaacatccaaaattcaacacacttaactcagtctgggctataataattcaataatgcatcgctacttcagttagattcagaaggttctacccccacaaacctattacatcttaaagtacaataaaaatggagaaagagtttccaccttgtgctagggaaagattctattcaagtgtggtgttcagtactgctcttcatcccatcataaacttaacttaaaccatgcagtatccccgtgtagtatgtctagctgtttgctcttgctaataggccagagaaggatggaacaggggagttcctcatttgttcttgagcttgctttatctcctcgggatctatgttctccatcattttgggcataacgaagaccattatgaccataaaaccaagcatcatacccatagggctcttcaaaagtgacataatggagaaaggctcccttttctcggagtattgctcttctctgagaggttccaacacaagct

SEQ ID NO: 34763 - DNA, 312 bp, Oryza sativa
  Clone ID: uC-osrocyp008h06b1
ctggcgtacgggtgctttgagttcctggggcagacggcgcccgatcggctggagcatatcgtgccggtgcgcgttgtcgtgtcagtgtcatatcctgagccaaagaggccgaagacagagagagagagagagagagtaattgatacgccgaatccggctggggagtgtgagagtgagatttatggccgcggcgaggatttccagacgcctgctacgtcgatcgacgaggcgcgggaggaggcactagctcctcatgatgaggcgcgggttcacgacagcggagggatcagggcccgtcgtgatagacacgca

SEQ ID NO: 34764 - DNA, 324 bp, Oryza sativa
  Clone ID: uC-osrocyp008h07a1
ctataagccttttggaaacaaaatatttccttttgagatgttagacttccctgatctttgaagatttgaaccccaagtgtacaacaattagatcctactttcaaggggaggggatatgaccttctgcagatttaggtgaactggtactccttttaaaatgaaatggacactcctttagcttttattttaaggcgaatgccctgaaaatctgaaacctaaaggcaccaaatttaaaggatgctagtggtttaccacctacttctaaaactggtttggccatttaaaaaataggcagagttcacttggatgctttggaaatagccg

SEQ ID NO: 34765 - DNA, 521 bp, Oryza sativa
  Clone ID: uC-osrocyp008h07b1
ctggccgcctccccggcccgtaccggaacggcatggccgacccgccccacgcgtccgttatgacggaactatcatgacgatctcgaaggacagagataagccttctcccttgccagacagctggaagctgaaggaaatcttcgctaccggtattgtgcttggaagctaccttgctctgatgaccgttattttcttctgggccatgcacaagacagactttttcacggacaaattcggtgtcagatcaatcaggaacagtgaacatgagatgatgtctgcactgtacctccaagtcagtattgtgagtcaggccctcatcttcgtcacccgttctcgcaggtggtccttcatcgaacgccctggtcttatattggtcactgcattcatgcttgcacaactggttgcgacattcctcgctgtctatgccaactggggctatgccaggatcaagggcattggctggggctgggctgggcgtatctggctatacagcattgagttctacttacctcttgacatct

SEQ ID NO: 34766 - DNA, 469 bp, Oryza sativa
  Clone ID: uC-osrocyp008h08a1
gccagtctccgagaagcctctttgtccttctctctttccctttctgttcttagacttccctgctctttgagtctctgaaccccaggtgtttcttttcttgatatatcagcagaagatgggatatgaccttctgcagatttaggtaaactgctactcttctcagaatgaaattgttgctgctttagctctgcctttgatttgcatgccctgctattctcatcttcaaatgcagcagatttatctgttggtaattctctcccagcttctttgcaaacttcttcggtcttttcaagactagggaaagttccgttagatgtctgagaaatagcaggtccagcatcttgaggcaagtgctgtctgccagttagcatttctgaagaggaagacgcctggccttttgaatttgtagtcaatctagttgtaacattattagcagcacttgtaacatctccatcttcataaaagttta

SEQ ID NO: 34767 - DNA, 482 bp, Oryza sativa
  Clone ID: uC-osrocyp008h09a1
aatcatcaaacattcacatctgccacctagcaaaaggtggttaagattaaatatttacaactttacatacatgtgtaatataatgtaaaaaggcactggtatagcagacatattacaagcccacaacgatacacacccagaatattgtctatactctattgctctgtatcaacaacatatgcaggggacaggaaacaacatacccagacacatgaggaacttagagctgttcgcatgcttaggtcatatatacctaaagaatgcttcaaatgaagtaatggaatttgtacgacaatttgtcaactttgaatgagtaagtggtaaatatatataaaaaacaggtcgtcttaggtactcgtgtattactgttgctgcacactcaagcttcaagaagtacaatctaaaggcttcttccatgccacaatccaatttaactcccttgacagcttttacgtggaaatgagtttttgcaaagcaaggga

SEQ ID NO: 34768 - DNA, 500 bp, Oryza sativa
  Clone ID: uC-osrocyp008h10a1
gcaggtggacaaaccaaaatacattacgactggactgaatccagcaaattatgatattcttacacgatccatctcaacatgacagagatcaaatgatggatcgatcaggggtacataaacaccaagaggaccaggttttcatagacttatttgacatcattaacaaccacgaccacgataattgacgacgatattgccgacatgatcgatttcataggactatttgaccagcagtacgaagaccccgtaaaaggagcccacaaattaagagtacataaacttaatatatagttttgatcataagatcggcagtagtacagattcagaatctaattgacaaacacaaacaccgcaatataattcggtaatcaagcaagccatgatatcagctgcaccccatcatcctccggttaaacattcatcaacgacgacgtgattaacaattgagtgcacaaactgcatcaatggaggagtacatcagaaaagggcgccgtcgattg

SEQ ID NO: 34769 - DNA, 526 bp, Oryza sativa
  Clone ID: uC-osrocyp008h11a1
ataaaaccaaccacattatatagtaaacattggcttcagagttcagatccacaaggttcacagccactatagcaagtacagataaggtagaagctaagtaacttgttccagcctcatatagcagttacagatagatagtttcactgccaaatagtacttgagacttcagcatctaagctagacacagcacatactaacatactaacatagctatatagcgcaactagaagcgcccgacagacacatgccgcttcttggatgtccagaatgtttattccatttgtccttatatatacaggcaccagttgctacaccccaaacccctcagtagaactcggccgacacgggcatgtcatcgaagctccaaaggtccatgctactggccacatcctgagatccatcagagctcagaagggtgtcaatcgactcatccgaaccaccatcgatcagaaatttcatgtacggctccaggtcggcaagatcaatgctagcattccccatcacaggaggtaccattgcatcactg

SEQ ID NO: 34770 - DNA, 501 bp, Oryza sativa
  unsure (1)..(501): unsure at all n locations
  Clone ID: uC-osrocyp008h11b1
ttcgtttcttgctccatccatctatccatccaaggagtgtggaacgccacacgtattttttttttatctatgctaatctgatcattagcagaggagagttttagcagtaggattggattaaattggagtagtttcatagtttgtgtgtagtgatcttaattagctttgattagacagacagtacagtagagtagaggatgttggctgtgttcagcggcgcggtggtggaggtgccggcggagctggtggccgccggcagccggacgccgtcgcccaagacgcgggcgtcggagctggtcggccgcttcctcgccgccgccgagccggccgtgtccctgcagctcggcgaccttggccacctcgcctactcccacgccaaccaatccctcctccgcccaagatcctttgcatcaaaagatgacattntctgcctgtttgagggagtnctggacaatctgggcaggctgagccagcagtatggcctgtccaggggcgccatga

SEQ ID NO: 34771 - DNA, 502 bp, Oryza sativa
  Clone ID: uC-osrocyp008h12a1
gcgcctctagaaaggaaaaagaacttattaagttgggaatttagtccccctggatgcatttgaagcacaaggtaagcaaggttaaaaacacacgcacacacccatctagagagagaagggaccggccagggggtgtaatgtacatcacagtacatgcaaacaatactactttttacagttgaaaaatatctaatgcatatcaaaagctgtgataaaccaaaatgtaattataattatgcttcgattggggtgcattaatattgactgcatctagcatgtctagccttcattctgatgtaattaagcacaacaatacctttgcccaaactttttttgtcctctcttttcttttctttcaacaactttgtctcttctatcttggagtgtccttgcacagttaatttgatctcccttttttcatggaggcagatctatacagatctctttaatctttttcttctcccaaccatagtacatacattcttcaagaaagcaatgttgt

SEQ ID NO: 34772 - DNA, 541 bp, Oryza sativa
  unsure (1)..(541): unsure at all n locations
  Clone ID: uC-osrocyp009a01a1
cagaagcaagattaaactgtttctccagaataatataacctttcctgatcttatcactaaaatctgttttacaacacctgatctaatacaaacgatcaagtggcatatagtcacaagtcgcaacacgctcggaagagcatttgaactgatcatcccgttgaggttacactccaaattgaatgatgaggcaacgaataacaaagcagcactcagaaatccatgatggtccaggcatctacaaatgatatatcgcgcaactccatttgagtacaaatgggtccaagccctggcaacaggtgtatggatctcagatgatcaagcctcttaaggggttcttggaatataatgaggaaagacaaacagtattctttcaacaattgtaaaggaagttagaacatgcgccgccggttgggagcaatctcagggttgttgttcctcattatggcgacaaactcctggtagttaattcttccatcatgatcagtatctactccagcgatgatntccttaatcgttttatcgtcccccatatcatactttt

SEQ ID NO: 34773 - DNA, 479 bp, Oryza sativa
  Clone ID: uC-osrocyp009a02a1
aagcacgaattataaatatgatttaggaaacgacttaaataacagaccagtcaggtcgaacagactaccatactgaaacggacttcacaaggtagggtacatatgagttcaactgggcacaacagcccttaaaagcacattcatacttggttggggggagagcggagacttgatggccatttaggtgataacagtcgttgggtttcgacacgaccaccagtttggctggctttagcccatggcggacttatgtgcccaggagcgagcgggggattcatacttggccctatcagggttggacatgtgagcaatcttcggcgaccaacggatcctcggggttcgggtccgtcagcagggaacaaattgacaggaggaccttctctatggtcagtgcaagactccactgttccttgaggatgtcgaggcaaatgctgccattgctattaatggtccggatggaaaaccttggtgcggaaaga

SEQ ID NO: 34774 - DNA, 524 bp, Oryza sativa
  Clone ID: uC-osrocyp009a02b1
tttaatttctagctaacccctcctcctccaggtcccttctcctcgccgcccctctctcccgcggcgccaccccactgcccctcctgcggcgcgatgtctccgcggcctacggcgacgacgacatggacgacgacttcggggacttcgacctcgacgacggggacggcgtgggggacgacgaagacctcgacaacgagcaggactacgacgtcgactacgaccgcctgctcgcccccgtcaaggcgccgccgcgcccgctgtccggggagggcgacgaggaggaggagggggacatcgccatggtcgccgcccagagcttcgtctccacgcaggactccgcctccgacaccgtggtcgactactccgtcaacgaggacgaattccacaagattcgcctactgcactgcgatttttttatccgcaaggtgcctgaccccgacgacgacgtcttcgacttccgggagatgtatgtcacgccgcctgacactgacatctattccatcccaagggttcttgctccgatg

SEQ ID NO: 34775 - DNA, 335 bp, Oryza sativa
  Clone ID: uC-osrocyp009a03a1
tttttgtttgtgtttttttttttttttttttttcgacagtttgaaatctaaaacatttaattgcgggggagcactaaggtgaaacacatttttagtgactggaatacttcacaaaccaaacaggtttatgaggggaatgagccacccagaaggagacacttaaatgatgccctgactttcggaatgctgcctgaaaaaaacaattttagggaccttgagaaaattactaccaccaaataaattacctggaattcccctaccagtcgatttcatggaacgggaaagaagggggtggccggggaaaagagctatgcctttggcgccgccggagccgg

SEQ ID NO: 34776 - DNA, 484 bp, Oryza sativa
  Clone ID: uC-osrocyp009a04a1
tttttgtggaaaaacagagcatccaatatagcgaatgacaatacgataaacaccaagagccggcttctatttgaggcaagcactgtccaaaatctcgcaaaagttctgaacccttagacatattacacatccatggcaaacatggatgccaaatgacaactacagaaaattactcaaattcgaatgcagctgacggcttctcctgctgaagatgcatattttcccctccattacttggatgtgctctctccatcgacagccaatgggacggcgctggccaggctgcggtatttcagagcataaaacatcttaatgtaacggcgagtttcgcgcctcttaaggttgcttacgtactttcagaatccatatacaccagtcaaggtcatcagcctctcagagtacagcttccaggtgtacttctcgtaaatcctctgcagacctccctgtgaaatattgtcccagtaggttgaatcctgcttgcact

SEQ ID NO: 34777 - DNA, 427 bp, Oryza sativa
  Clone ID: uC-osrocyp009a04b1
caaaaatatacttatcttccctttatgatagaaactgattgtgctttgtgaattgtgatcgagaggagaggaaatggcggataaccttcctagtcattcctttgtactgacaatgtttcagtacttgaggaaatctcagtgatgatacctcgtattgacaattaatacctgtgttaatagatggatacaacacatctttgactgaaatttgcatcggcaatgattgtgtccaaggctctttctccgccagctgctgcttatgtgggatggaacccatgtataacttgaggaagagaagtaaatccaccttttgtttatttcattgaattcatcctttttccttttgaacactgaaaataacagcttgtatgtctttaggattggttcaagaaaatgttattatgacagtgcactagcttttcacctt

SEQ ID NO: 34778 - DNA, 278 bp, Oryza sativa
  Clone ID: uC-osrocyp009a05a1
accttcttggcggggtattcacaagggctttccaaagttgcgaattgccaacatgctattggtttttcacaaaccgctttaaattggctgattgccattcttcatgcattacaatttttcccctccctttgatcctcatcaaaagtaaaaacaactttttttccctttgttttcttggcaacattcgcttttttgcaattgccttttttttttccccaaacttttttaaactatgttaccacagactgtaggtttatttggctattaatttggactcc

SEQ ID NO: 34779 - DNA, 334 bp, Oryza sativa
  Clone ID: uC-osrocyp009a05b1
gtcccgttttcagagggatcgactgtctgcacgtgagaccatgtcacgaacaagacgcttaggacatcaacgatgggaacaaggctcgtgtcccaccattctgaagaccatcagtctgaactactaatgccgtttgagattgtgtagtcaaaatacgcacgctcagatgacaagctctccatcgttagaacgcagacgcgtatgactgctaagcaggagatcaaactggcaggatgcacgacatcctcaggcataagaggcatggcctacaagcgcgattatacatgtcgctggtagatcactaaatgatgagactgcttactagacgatagtg

SEQ ID NO: 34780 - DNA, 344 bp, Oryza sativa
  Clone ID: uC-osrocyp009a06a1
gttgatcctatattgttaggggaggcagggaaaagggggggatctccacaaatagtccggcccattatttgcaaggggggcggaaaactccttcccaggaaccattagtacccgcaataggaaggtccctacaaaacaaaagccaccaattgaagaccgaggccccccacttagggtttgttacccaaaaaaagcccgaacacaaggagattttcaaggcaaatgggcccccccggggggcccatgaaaggcgggaggatcccccaactggggggacacaaaaattttaaagtgcccccggagagaatacggggccccccgctggcaagggcctatttggcccc

SEQ ID NO: 34781 - DNA, 493 bp, Oryza sativa
  Clone ID: uC-osrocyp009a07a1
acaacaacaaaaaacacattacaaagtaccacattgttttttctcagctgaacctagtatttcagttcagtccccatctgcatccatcatatccacagctgcttccttccattcttctttacctttgtggaagaaaccagctgaaatagtagtagtagtagtagtaaaaccttcaatcttgtactgctgctacgtgatttcgattgctgctacttacttacttcttcttctccatttgaggcttgttcatcagtagctcatgacgatgagaaggccgatggcggtgacgatgatcgtcgacggcacgccgaagcggaggtggctccagaaggtgaggttgtacccgaagaactgcgcgcgcctcgcctgctcgcagacgatcaggttcgcggctgagccgaggagggtcaggttgccggccaccgtgctcacccaggccaggatcagccaggctttcttctccgatgcaggggagatcgctgcggctgatgct

SEQ ID NO: 34782 - DNA, 362 bp, Oryza sativa
  Clone ID: uC-osrocyp009a08a1
tttttggtgttttatttttttcgctttatatcgttctattttgttttttacaggcggaacggcctacatgatggggggcccagccagtcaccacaataaccgcgaaagcccaacccaaactggctgaggaatgtggaacaaccgggctgcaaaagcacacgacgacgccgacaaggaggaaaacggggactaccggcccaagacatgcaaggagggcccaccgggaccaccgcgacaaccggcggggcgcaagcataaaaccctgatgcagacggggaggccggaatgcggcgccacagcgcggtggaagcgggcgctggccctggggagaccacaaggtgagggggcccccgaagcactgc

SEQ ID NO: 34783 - DNA, 534 bp, Oryza sativa
  Clone ID: uC-osrocyp009a09a1
gcttgatactactgcatatatcacgttttattcatgtgcaaacatagcagagtagtattacattttcgttcaggtacatacacatacagagcatattacgcacatcacacatcctctgagatgtgtgatcaaccttgcatatcagagacaaactgatcaacccatcctgtaaataagagggaatacatacgaaatcctttttagcaaggaccaactgtattcgagcatatttagtacttcagcatcaagagtaccctgattcgctttcctgataagcgataattatctagtagtcgtcagaactggtcttgcctcttccggttgcgtactcatcagtgctcgacttgttgtagccaccagtgtagtcaccggcgtcagacttgtcgtagccaccaccgctgccatagtcgccggtgccggacttgttgtagccgctctcatagttgtccgtgcttgatttgttgtagccgccgccgctgccatattcaccggtgccggacttgttgtgccactctcagagtgttgagcttgatt

SEQ ID NO: 34784 - DNA, 645 bp, Oryza sativa
  Clone ID: uC-osrocyp009a10a1
atgcacgcttaggttggatcctatctcttatagcggcctttttttttttttgggttggtttattttattagaggcatcggtttttctctttatttacaattgttttatgacagcatatgacatacatacatgtttagagctgtccaaattgtcaactgacaattagcctttttgacagccacaaacactacagttgcatatcagcctatcagctattcatcgtccagtacaacgacaacaaccatgtgaactacaactagcagtaaaatacatgaaacaaagtgcatcctggcacaacgctgcaatcgaatgaatgcagcataagcaccctggagcattatttgatatcaaaatacctgagcaaacgacactggaaatgagaggttcacctttgattggtagcagtaaataggggtatcggagggcatcctacaaggatgatggtaaggcgatacaagccagaaagcatcaggctctgatggtcacactgcacagacataatcctggtggcttgagctcagatgtgcaccactctgatcccgttggtgcagcgggatcatacatcagtgtcttatagcagggctcttcatccagagagaacagcagcagctctccatcatgtttgccgaaacaaaaacgagttct

SEQ ID NO: 34785 - DNA, 339 bp, Oryza sativa
  Clone ID: uC-osrocyp009a11a1
ggggaaagccactatattttttatgggaattaattaattataaaacatgtccataccccggtgttttgaaaaatatgtttaaacttaaatctgaactcgtaaaattttttaacaccctatcctttattccaacaatgttgagggtgggtacttattcctgggggacaccttatgctaggtacttaaatacccaattctaaaaaaaacctatgacacattttgatactcccaatttagatatcccattttttggaccaaggggatttattttaaaaatgtgtgggtgggttcaacccccccccggagtgctaactcctttgggcacggggtaccccccct

SEQ ID NO: 34786 - DNA, 382 bp, Oryza sativa
  Clone ID: uC-osrocyp009a12a1
gcctgaattattgttgttattatttatcaatgctatgaacctaaatcatcaatagttactacaatatggaaacctctggtcacccaatacaactaaatatgcacatcagctgggtagtctgcagggtgcttcttgattgtatccctcaacaatcgctcttgctctcttaggttggaaggaacttcatcataaacatcagtgaaaagttcagcgagtggcggttttggcattctttctgctacctgaatggctttaagaagctcttgcttcacattattcctgagttcagattcctattgatcacaccaccagccatttccctgaacccattttctgtacctggaaatcggatctcgcgctggtcgccagtgctcgatctcat

SEQ ID NO: 34787 - DNA, 500 bp, Oryza sativa
  unsure (1)..(500): unsure at all n locations
  Clone ID: uC-osrocyp009a12b1
tcgttatatctgggggagcaaacatggagaaggcatattacattggtaccaggtgtattgccttagatctgagctttgcgcggcatgacgctctgattcctacaagctcgcatgtgggtgctccagattcacgtggatacgagaggtggagagcaaccgcgatctcaacagggtggtgatttgccagtccttagaggcttgcagtgctggagcttgtgggcactgnccacagccagacgatccaagcgccagctggcgctaccaaaagtggcgtagcgccagcttccgcttctctgacgaccacacctgtgccgacgccagctgtcactgggcctgcttcttatgtagccatcaattgctgaggcctctcaccagagaatgcgtcaatccctcagtactatggcggaagagaatacgggtacagaactttctacctgtccaacaatactttggtgtngaccagaggaggtgggaatggcgccattgtgtttcagtctgac

SEQ ID NO: 34788 - DNA, 501 bp, Oryza sativa
  Clone ID: uC-osrocyp009b01a1
aaaaacaggacaaacagcccatgtgtcatggtctaatgggtaccccaagcggtccatcacacccgaaataacacctcgtaacattattatcccagatcagcaaattggaacatacaacataagttggtagagaaaaaacatgctacaatgggcaggtttctggacaaaaaccccccctacgtatgggtctggcagatctcgtgcaggaagggcttcaaaacattctgaacagctatgcttggctgggctcctatatgcggaaggaactgcttgcaactctcggtctcatagcccacaaagaccgcccatagggttagcactctgaagaggctttttactgtcggcacacaggcgggatctttgtttgcataatttgcaaataaaacgctcttttgaccctcataagcacgctgaagggcttgcccaaccagccaagagcatttgacaccttgaatgccagacccgatcttgccaataaagctggggtcaccacaacaatcc

SEQ ID NO: 34789 - DNA, 442 bp, Oryza sativa
  Clone ID: uC-osrocyp009b02a1
aataaacgggggacagagaccaaataataggcgctgtaagcaccacaataattaaatttctcacgcaatttatagttgtcatagagctcccaacgcaggtcttcaattcaaaaagactgcccaaacagaccaagggtttcatcatagcagcaaagttttttaacacgcaacattaaagagacacttatgccattagataacttgaagcgcggatcactagcaaatttcgcgcttagtcgacctcctggatcttggggccagcaccggtgccgcctgccgggggagcatggtcctcgtccatgccgccggtcatgtccgcgccagggccctggtacattttggcgatgatggggttgcagatgccctccagcttcttaattttgtaatcgaactcatcagccttagggagctggttgccgtccagccactggatggcccgacc

SEQ ID NO: 34790 - DNA, 387 bp, Oryza sativa
  Clone ID: uC-osrocyp009b03a1
ggggaaagcgagatgtttttttccccaattttcatgacaaagttttacaagaaaattcagaggctgtgcttatgtggacaggcccaccggacaccaaatttacaactttgatcttatagtctatatatcacactggcacccttaattataccctactaatccacttattggtctggagacatggtttaaattaccaaggggaaaaaaaaagaaaatttaaccagccaaaaaaaaaaaaggcccaaaggaagctaagcttgccacaccaagctcctccaatggcgccacacgcgtttgaacttttaacaccattacctgcaaaccattcttgccgtaccccgtcgaggtcgccggccggcgtcagtacaaggggcaggtgagcccggg

SEQ ID NO: 34791 - DNA, 389 bp, Oryza sativa
  Clone ID: uC-osrocyp009b04a1
acaaactggaaaacccgtaaaacccacatttttattggctggtccaaccatggaaccacctggtatatatgggacaaagtgtcattacggcgggaagcaccaccccttttgatggatgttttttccccaaaagaacagaatggatattgcaaaagtcagactaatctagggacttaactaccccaggagaatcccgaactatacaagggggcaggaataaacattagcatcaccaatgccaaacacctgcaattccatgtagccaaccaaattaggctactacattctggttatatggcagggtggacaagctagtacttggcatatcttcaactcgcatgggcatctaaccgtatgacaaagtaatgaccatcaaagtagcttgatct

SEQ ID NO: 34792 - DNA, 442 bp, Oryza sativa
  Clone ID: uC-osrocyp009b05a1
aattgaaaaaaaattaaagcctgaacccaactgtgacgaccatgttttgttcacagacgccattcggatacacgaggaaggacgtgctgctcatcggcgtcggcgtgacactcttaggctacggcctcaaatacgggctggaggtgacgtctgttctttctctcttctccatcactactccagttcgctgcttcttggctttgacttcatcatcaagtacacttcactgacgaacatgtatgccttccctttcacatccttgccacaactgaacacagctggtcggagtcgatcccttgcaagcaggaaacgccgtccagctgatcatcgtgctcgggatgacggtggggtggatcttgacgtacatgttcagggtggccaacaaggacatgacctgaagtttcttgctctttgttccagaaacgattggggagcttgacag

SEQ ID NO: 34793 - DNA, 525 bp, Oryza sativa
  Clone ID: uC-osrocyp009b05b1
tttagttctagctaactcaggctcagccaactgatcgcgagctgtgacgaggtgatcaccatggcgtcctcgtcgtcgcttcttgttcgtgggagagcgttcgcgctggttgtggctgtagctctggtggctgctcctcgccggattaatggcggcgccgccgggccggcggcgaggacgaacgaccccaactggcacgtcttcagcgtcagctcgctgctgccgagctcggcctgcactgcatcgaaagcggcgtccaactcgtcggctctcggcgtcgtgcaccggcacgggccgtgctcgccggtgcaggctcgtcctcgcggcggcggcggcgctgtcacccacgccgagatcctggaacgcgaccaggccagggtcgactccatccaccgcaaggtcgccggcgccgggggcgcgccgtctgtggtcgacccggcacgcgcctcggagcagggcgtgtcgctgcccgcgcataggggcatcttcctcggcacccggcactacgttgtgtccgtcgggctc

SEQ ID NO: 34794 - DNA, 355 bp, Oryza sativa
  Clone ID: uC-osrocyp009b06a1
tttttgtttgggttattttttttttttctttttttttttttttttttttttgatccttttttttataaaaacccgactccggggtgctgggttcgttataaacagaaaaccccaagaacccagaggccccgaaaaaaaccgggccaaccaacgggcggctggggcccccacgaaaaaggggagtacaaaccccaccctgcggcgaggggccaggggccacccccacccccgctgggaccaaagaaaagcccgcaagaacgggggccccgaccgaggaccccgggggtgggaacccccccccgggccgatagccccccccccttgcggggggggcgggggagaacccccccggggg

SEQ ID NO: 34795 - DNA, 440 bp, Oryza sativa
  Clone ID: uC-osrocyp009b07a1
ctcacgcaattcatagttgtcatagagctcccaacgcagttcttcaattcaaaaagactgcccaaacagaccaagggtatcatcatagcagcaaagttttttaacacgcaacatcaaagagacactaatgcaataagataacttgaagcgcggatcactagcaaatttcgcgcttagtcgacctcctcgatcttggggccagcaccgctgccgcctgccgggggagcatcgtcctcgtccatgccgccggccatgtccgcgccagcgccctggtacatcttggcgatgatggggttgcagatgccctccagctccttcatcttgtcatcgaactcatcagcctcggcgagctggttgccgtccagccactggatggcctgatcgatggcatcctcgatcttcttcttgtccgctgccgggagcttcgaggcgatcttctc

SEQ ID NO: 34796 - DNA, 411 bp, Oryza sativa
  Clone ID: uC-osrocyp009b08a1
agaatagtagaaccgaacaaaccctagcaatatataatttaaaaggcataatggtttacatgtccggacaaactgcaactcatcacactcctgacgaaactcaaaaccagacgggttcaggaatgtgttgtgacggctttgcagaaacttcgactcaggctatacaagtagcaaaatgttgcacaccatactaaaagatgcaaacactacatagtagtagcctgatgaaaaacgcagacttcaaagctttaatccctgttacagacgtagtgatatgatatccgtgaccagtagggaaataatgtgacactggcccccttgaaacctttagcttattgaaccacccgaacaatttagttccccgcacagtgggcacaatttaccacctctgggcaaatctgtatttatttg

SEQ ID NO: 34797 - DNA, 358 bp, Oryza sativa
  Clone ID: uC-osrocyp009b09a1
atcttactccgtggctgttcctcttctgggtggagggggacgggtggatttcttcaattcaaccaaatatcaactactttactttaaacagaacatcatttataactatccttctactataaatctcaatttccaaaaaaaatttgacaaacaatattacttataaccacctatacagatacaacatgaaaaaaataaagaatcatacacaaataattaaaaaactcctactgttcaaaacaaaaccttaaaacatatagactatcaaattaacctttaacacccgtatataacaatactcaagtaaccacttcaattacaccattataataacaagctttatactattataaaaatt

SEQ ID NO: 34798 - DNA, 463 bp, Oryza sativa
  Clone ID: uC-osrocyp009b09b1
ttgatcacccgcgcacacaacacagacacggacgtacactttgcacctctctcaccgcacgtagtcgccatggtcgctgtcaccgtgatgaggaagtcccggaacttcatcgggccggctcctccgacgccgtcggccgagatcacgacgacgctcgagctgttgtccatcgaccgcgtgcccgggctgtgccacaacgcgcggtccctgcacgtgttccgccgccacaagaacagcgggcccgtcgtcgacggtgatagcaggaggccggacgccgtgatccgcgcggcgctcgcccgggcgctggcggactacccggagttcgtcggccgattcgtcggctccttgttggccggcgacgcctgcgttgcgtgcacctgctagggcgcgtggttcgtggaggcatccccggactgcagcctttactacgtgaacggcctttagtacccgcttctgatcttcg

SEQ ID NO: 34799 - DNA, 537 bp, Oryza sativa
  Clone ID: uC-osrocyp009b10a1
gcacaagaagccaaacgtgagagcttgtacaaaacttcagctctcttcaatgttgactacgctaattaaaattgtaactccataaaaactcggctacgccgagaaaactgtaattacaacagatacggcgtagccaattcacgcaatgcgcacccatacggctacagtatggttcatttaacgtctgatagacgatttcttaaggtgctgccgcaggtggcgacaaatactgaaaacagcgaggtaatccaataaagaaataacattggaaatcctctccagcggcaacccaagtctctaaatgatcataatcactcgagttaccctgcaacgcaaatttgtacccgggttgcgaacgggcagttccatttgtagaattgtagttggtgttacgggcaaaataacaacgagcgtcattttcccaaggcacttcaaattcaacagtaggatttactctcgaattaaaatagacggcacccgttcgtccatcaggataatctaaacggccttcagctatccatgacgtgcccatactga

SEQ ID NO: 34800 - DNA, 510 bp, Oryza sativa
  Clone ID: uC-osrocyp009b10b1
ctacatcccaagtgtcttatggaggatttggatttttatggaattcacgtgtttccccgatgttgtggcgagctgtggcaggacctcctgcccaagcatggtttcctgcttgtgcgtatgccgaaatgccgcttgagaattggtcgggatcaatgaagtttagattccaagttgtgtgtcctagttttcataaagggcgtttgcgtattgggtttgatccaacaggtgctcaaacaaatcctgagttgaatgtcgcgtattctcacgttattgatatttgagatactcaagattttaccatagaggttcctcatatgcaaacacgaactttgttaactagggctgaaccgccatttacactggttaccacacaatacggcactactttgttgccaccggtgtccactggtaatggaactattgctgtttatggtgagactattctcgccactcctaatagcacaagtgatgcaccagatgatattaatgtttttatattcatgggagatg

SEQ ID NO: 34801 - DNA, 539 bp, Oryza sativa
  Clone ID: uC-osrocyp009b11a1
aagtatgaataagaagctggcatatacttcggctagtagcattgcaacgcaaacagtatgacaaggtaccacgcattgtttaagagctaagacaaagacaaaactgatgcatccaacgtaccaaaaagaaagcgaacagcagcagtcagatagctatgagaagagaactaggagagggataactagaagggacagaatggcatccatgggtccatgacgtttagtcgacctcctccatcttgctctcgccggcgtcgtcctccagcggcggcatgtcggcgtcagcctcggcggactcgtcctcgtcgatgctcaggccgagcttgagcatgcggtggatcctggtgccgaaggtgttggggtcctccaagctgaaaccggaggtcagcagggcagtctcgaagagcagcatcaccaggtccttcacggacttgtcattcttgtccgcatcggcacgcttgcggagctcgtccatgatggcattctccgggtgatctccatggtcttcttgctagacatgtagcgccatgctgagtccc

SEQ ID NO: 34802 - DNA, 483 bp, Oryza sativa
  Clone ID: uC-osrocyp009b12a1
agaacaaacgctaccgccatcttctcatatacaaatgaaaatatgccctaccacacaaacaagactcaggggatactagatatcccgtgtcaaaacgattacaagaacccaggaaaatttgtctgctctgctctaccctttgccaaagtaatagcttaaagaaaaagtggtgtcatatgtaatatacatgctttatgatcattcatgacgccgtactagaaagaaagctccgcgaatccttgaaataaccgtgccaaatacctgggacttttttcttcatcgctaacaccttatctcatatgatccagcccttgtgatgtagcgaacccactcaacggtgttgtaaccgctcttctcccacaccttaaggaaccgaactcgtaacccagaagcagtaaacataggaacctggatttcatctgaattggcggcctgtccatgatttcttttccccattgagaaatcagctcaacttcggcactc

SEQ ID NO: 34803 - DNA, 418 bp, Oryza sativa
  Clone ID: uC-osrocyp009b12b1
ggcatatccattacctgtgtctcacagccaaaaaaaacacttgttctccgatacatagcgttggcgataagcaacgccgtctttttcttacaaaacttgcagcttctacaatctcaataatggcagtatgcttacgagacaattagctatatatctattgaaaagattttatcattacagccatcctgaacaaaacagaatgctacaaacatattcacgagagacactactttggagcctctaatcagctggttttcttttgccagtttcaccgcatgggtcccataaaccagctgagtgcagcccacaacagcactttctaatattcgaagaagcttcgatatctaattgttataccactgtaagactatacaggtctattgatcgatatctcttgtcccagtaacatcacgagcgg

SEQ ID NO: 34804 - DNA, 522 bp, Oryza sativa
  Clone ID: uC-osrocyp009c01a1
gataaatccaaagtacattatttcatatcgtaatttagttcacaatgacatgatcttgttcggtacacaatactacaatttaacaagccaagtatgtacattatttaagtagtgcaacaaatataagcagagcttgaaaaagagcaaagcacggtgatctgaccataggataggtagagctgaggtgcttaagtcacaaaaggcaaaggtaagcctgaaaacataatgcatcatccagaacttcgtctgacgatctaaccatagtgccacaccatgatgagggagggaaagctcacagcgcagcaacaccatgctaccagacatcaagcatcagaatcccacaaacaatacctcttttgaggcctgcagaaagaagcaaaagctggctgcctgccttgccttccacacccacacaaagtcaatcaagtaacaatgatgataagggccttaccaaagaccatatatacacacattgatgccttcagatttttattatgtgtgagctttagtatcgccactgta

SEQ ID NO: 34805 - DNA, 462 bp, Oryza sativa
  Clone ID: uC-osrocyp009c02a1
ccaccgcaaatccaagagcttcttattaataataataggaaaaataaacgccaaaagttctcacacggaagcaactaacttagcacacaaaagacagacatgaacacacccaagcccctccttttccttgtctaaaacgaagcagcaactaaattaaatcgacctaaaattccgaggcccccaatggcggctatcgacgacgaaaccgaggagctctagttggctgccttgctgatgagctcctgcgcgacggcgacggtgggcagcgccggaatggcaccctttttggtggtgcagatggctccgcacgcgttcgagaacttgagcgcctccctcagcttctcctcgttgaggaagatggagtcgtccttggcgacgttgacgaggagggagccgacgaaggcgtctccggctccggtggtgttgacggtgttgaccgacatgccggggacggagcccttg

SEQ ID NO: 34806 - DNA, 508 bp, Oryza sativa
  Clone ID: uC-osrocyp009c03a1
ggaggtgagctctggtgaagttgctccggcggaagaggaggaggcgtctgcgccagcgccgtcgatgaagcacgtcatctggatggcggtgaagaagctgctacagattccgaatacctatgcaagcttccttggcctcatctggtctctaatcgcattcaagtgtggattctcgatgccaaaaatcgtcgaggactctctgttcaccattcgtaccaccgctgtaggcctaagcatgttttcttcagggacgttcatagcgcggcagtcgcggttcgtgccgtgcggatacaagatagcgtcgttctccatggtcatcaagtttctgataggcccggttgtgatgctgttcgcctcgctcgtcatcggcatgcacggcacacttctgcacatcgctgttgtgcaggcggctctccccctggcagtgacatcatttgtgtacgctgaagagtacaaggttcacgcagacatcatgagcacaggggttattcttgggatatttatatca

SEQ ID NO: 34807 - DNA, 491 bp, Oryza sativa
  unsure (1)..(491): unsure at all n locations
  Clone ID: uC-osrocyp009c03b1
ctcctttctcctcgcgagttcacccgcccgccgcctgcggcgatctccatccagcgagcagcggcgccggcgccggcgtaccgctgcttccgccgcatcctctatctctggagatgcctcgctatgatgatcattatggaagcacacgcttgtatgttggtagactgtcttcgcgcactcgttctcgtgacctagaatatcttttcggcagatatggaagaatacgtgaagtggagttgaagcgcgactacgcgtttattgaattcagtgatccccgtgatgctgatgaagcgcggtataacctagatggcagggatgttgatggaagccgcattcttgttgagtttgctaaaggagttccacgtggtgctgctggtggttcacgtgaatatatggngagaggacctcctccaggaacaggtcgctgttttaactgtgggattgatggtcactgcgcaagagaactgcaggctggtgactggaaaacaaat

SEQ ID NO: 34808 - DNA, 404 bp, Oryza sativa
  Clone ID: uC-osrocyp009c04a1
ggaaaacaaccccataactttcactagagctgggccatttacctattttctagttggccccaaaccggttaagaaaattgatttttcaagaaactaaaccaaacgtttttttccgggggagactccagtaaagctgaaaaacaagggggaaaaagggaattacctgcagctgctaccatcgaaaaggttcctttggataaaaacccataggcggttccgaaataactttgggggacatttttacccagcatctgcaacaccttgctgtttgatgggtccacaaaccttggggtcttgaactggctcaccgcccccccaaggctcaggaaatgatctaggatccccttggaggtcccctttttgaggatccggaccccaagggggccgatcgctttgatcttcct

SEQ ID NO: 34809 - DNA, 163 bp, Oryza sativa
  Clone ID: uC-osrocyp009c05a1
gagggctatcaaacccaaaaaatctttctgcagccctcgggaaatttctttggaaagttccattttccaatgggtatccacccataaagaaagccaacagcaccccatttttggcaggctttcactttttatccccctacattagagccgccctctggggggg

SEQ ID NO: 34810 - DNA, 452 bp, Oryza sativa
  Clone ID: uC-osrocyp009c06a1
aacaggcatcttaacaaaactttgcatagagtagattccataaaacacgttctgatgataagacttcgttttgttgggaacaatatccaaatcgatagggtcaaaacaccagccctgccaggacttctagcaaaaggatctgtctataaactacccatgaataatgcgagtacaagctcatgctgcggtgaaggccttcttgccgccgctgccgccggtggatccagctgggatgaccttcaggacgttgaacctcacagttttcgacagcggcctgcactggccaatgatgacatggtcaccttccttgacacggaagcatggggagacgtgagccggaatgttggaatgcctcttctcatacctctgatatttcttgacaaaatggaggtagttcctgcgaacaatgatagttctgttcatcttggcactgtggcatgtttcagcaatga

SEQ ID NO: 34811 - DNA, 495 bp, Oryza sativa
  Clone ID: uC-osrocyp009c07a1
aacagaacggtttaggcattcagaatgataggattctattcatcacaaaacaatcagtaccgattctattcatcactgctatatgcagtcccgaaataacaaaagaaacaatgaaacaaaacagcggggttcttatgctaagatgtacatgaagggctaggtcaaaccaaagacctgattacactccctgacaattttcaggatatcatcattaagtacatgatacatggcaccggatgagccatttttatgcgacaagggttttggaccttttaaccgcctccaggatgtctgttccaggacaagtagttgtgaccacccaatttccttggttttatgaggtatagcaaggtgaaagcctttccccagaaaaagcagacccctccgactttaacatacgcaaatcctaaaaaatcatttcttcccccaagcccggttgccaccctaaggaccccttttttttttgcacaaagttttttgcctggccccgtcccc

SEQ ID NO: 34812 - DNA, 516 bp, Oryza sativa
  Clone ID: uC-osrocyp009c08a1
tttttgtttgttttcaccagatgctgacatgattgctcataagtaaagctagtattaacacacgcgagaaatcagcaacagcagatgggctacatataagatcaagatgtttccgtccatctcaacggaatagctgctcactgaagttcactaatcttaagctttacacatttaaaaacgtaggattatttgtgtttttcagaaaatggattaaaacctggcctttacatccaacatggatgtacgcagccaacgtaggattatttgtatctagccctcaatcggtcttccaaatagtcgccgctccttataggtgggaacctcggtgggcatgcctcactgcagcagctttccaagcattgaaccactaaatcagggtttgtgtgaagaaagaaagccacctgaaaacacaattagtccacctttgtagcaaatcgccgatattaacaatcagggccccttcaatgtgatgaacgtcttcccaaagctgggggcacctatccttctccctgcata

SEQ ID NO: 34813 - DNA, 450 bp, Oryza sativa
  Clone ID: uC-osrocyp009c09a1
accactaccagcaaggaggaagggctctcctctaatcctctccgtctctccaagaatccaaccaggtagcagctgcttggcagtgggcagagcaacatgtctagcaatccggttggtgtcgataacactttccggaggaaatttgacaaggaggagtacttggaacgagctcggcagagggagcgggaggagaaggaagaagcgcggaaaggcaaggaaaagggccctcctgtgcaaaggcaacctttgaagcatagggactatgaagttgaccttgagtcccgtcttggcaagactcaggtggcaactccaattgcacctttgagtcaacaggctggttactattggaaagctcgtgaatgtgtcgttaaagattcagctaactatttggaccatataaatggcaagaaacatcagagagcattgggcatggctatgcgtgttgagaga

SEQ ID NO: 34814 - DNA, 533 bp, Oryza sativa
  Clone ID: uC-osrocyp009c10a1
aggtatgcagcgatctgcatatgtagaagtttgccatttagcagagttcatgtaaatgtactgaaagataagcgtacgtggtacatttagcttctcaaaaggaagctacatataataatccatacaagtcgttatactaattggagatttggagaactccagagtaataatatgtctggtaatggcttccatcaatttttcatctgatttcttgggcctgcttgaccttaattatgcatatatataatgcattgctgccttaattatgggtgaaagggtggatggtgatacataacgagtgagatggaagaaaaccagaaatgaaggaccagatcgaatagagaatggatcgaaagggaccctgacctagttagtgtacaagaaaaaaagaaatgaagatgtataggtgaaaatgaaatatgtgactacgtactacaaattaatacacaattaattgaactctttcagtagcccccacaagcttctgtggagacatcttgaactaaagctgcatatgaaaaatcagcagcgac

SEQ ID NO: 34815 - DNA, 470 bp, Oryza sativa
  Clone ID: uC-osrocyp009c11a1
cctcagcaatagtaacatattatacttcattactttatctacaaaaatatctcgcattttattcaatggatagcaggtatctcaaattttcaccagcatccatcaaacaatgttctctcatagtatacaccggtcagctatatgcatcagggtactccagttgaacatttttacaattttgagcgccgtatgcattttatcggattgaaagtgccatgctgacgagcaatagaatttatatgcctcccgtttattgatgcagaaggcttgaagtcccagccttctacgttcttggggacgcatacatcgtaaagcatctgacccaacactccatgggggttgttaatgctttccacactgggcatgttgaacaactccggtttcggctcttcgttgctgctttcatgatactccatggaactcggtagcaagacatggtcaatcggatcatctggtgcccttcttagcct

SEQ ID NO: 34816 - DNA, 232 bp, Oryza sativa
  Clone ID: uC-osrocyp009c12a1
ataaaaaaaaaaaacaataaataaaaaaaaaaaaaaaaaaaaaaaaaaaaaaaaaacaacaaccaaacaaagaaagaaaaaaaaaaaaacaaaaagccaaaggaataagggaactaaaaaggaacataaaaacaaaatagagcgccgaatacaaaccatggaacagaaagtacaaagaaagacaagcaaaataatttatatagcctgcgcgatatagatgaaaaagggttga

SEQ ID NO: 34817 - DNA, 272 bp, Oryza sativa
  Clone ID: uC-osrocyp009d01b1
tgtttatttgcttttataatagatttctcgtgtacataaaatctaaaaaaacgggttcagttggttacagaactgccaaatttgcttctgaatgtatatgtaaaattcagctaggtttgctcctaagctcctagatgccagttcgacggaactgcaaattgatattggaacaagataaggtcattgccatattaatccatcattcatgtattccataacaaaaaaaaaaaaaaaagcaagaggagcatctaaaaaacgaaactattaaaatt

SEQ ID NO: 34818 - DNA, 545 bp, Oryza sativa
  Clone ID: uC-osrocyp009d02a1
cgacggaactcaatgtaatagctgtttaattcaaaaacatgttaaggctaaaagtacagtaaaccatttaactatgaaatcataaccaaagctcaataactattgagctccggaattacaccttacatattgggatagcaaccacagccctaaatacccatcgatccatccaaagctcccctagcttatgcaaatcttgttaaaatttaggccttgctggcaatgttgctggacagccagtccaggccctcgtacaatccctcacctgttgtagcacaagtgctctggatataccaatgtcgctggcgaagggagtgcagtccaagcttatcagggatctcagcagcattcatagcggttggcagatcttgcttgttagcaaagacaagcagcacagcatcacgtagctcatcctcgttcagcattctgtggagctcatccctggcttagacaacacggtccctatcattgctgtccacaacaaagatgagacccctggtgttctggaataatgcctcccagaggcctgatcttgtctgaccccc

SEQ ID NO: 34819 - DNA, 478 bp, Oryza sativa
  Clone ID: uC-osrocyp009d03a1
gaaatcaaacatgaaactgttattctcctcccaacacaatcaacagtgttcgaactaagtatcgctgaaacagcaagactattcaccggccaaaattatactctatgtaagctccatcacactacaatgcactccacagtctgtatgagcacaaagccaccccatcgaagtatacatatgtgcagcaaccagtgagacttgccccttggtgttcaatttcaatcgcacattcacacccagttgttgggcaacgagaaattatggaacctgaaggatgtatcccctgccgtgtccctcccctgcaggtctcctctccgcaccggcggaggctcggtgcacgcgaacgagtcctgccttaccagctcgacgccgaacgagtcctgccgcaccagctcgacgccatacgagccctgccgccgcagctcgcctatggcgaacgagtcctgccgtggcagctcgccgccgtcgaacgagtcct

SEQ ID NO: 34820 - DNA, 467 bp, Oryza sativa
  Clone ID: uC-osrocyp009d04a1
aaagttcttgaatcatagtcttataagagattctagcattgtcaagtcagaaagcatcatattatcttgagagaagaccaaaagattgattgatatctcggtgctactactatatgtacaatcgaatccacagctagccattctacgctacttgttcttcgtcgacgggtgatttgatctcttgctcttgcacatgcatctggagatcgtgatcgactcctcttgcttcgatgcacaatgtaattctctgccccttgcttagtagtagagcagatgggcgtagggagacaggcagtgctggtcctgccacgggctgcgcagctgcgtcaggaacgggtcctgcagccagtccatcgccggaagctgcaggctcggcagctggctcaccgccgggagctgtaggctcgtcgccgacgcccaccgtgaccggacgtctgcttcttccttcttggcttcccttggtgcgc

SEQ ID NO: 34821 - DNA, 473 bp, Oryza sativa
  Clone ID: uC-osrocyp009d04b1
caccaccgtagcaatggtgggttacgggccgatcaacaaggaggacccgctcaactggggcgcggcggcggccgagatggccggcagccacctcgacgaggtgaagcgcatggtggcgcagttccgcgagccgctggtcaagatccagggcgccaccctccgcgtcggccaggtggccgccgtcgcccaggccaaggacgccgccggcgtcgccgtcgagctcgacgaggaggcccgcccccgcgtcaaggccagcagcgagtggatcctcaactgcatcgcccacggcggcgacatctacggcgtcaccaccggcttcggcggcacctcccaccgccgcaccaaggacggccccgccctccaagtcgagctcctcaggcatctcaacgccggaatcttcggcactggctccgatggccacacgctgccgtcggagacggtgcgggcgggcatgctcgtgcgcatcaacaccc

SEQ ID NO: 34822 - DNA, 466 bp, Oryza sativa
  Clone ID: uC-osrocyp009d05a1
aaccaaaacataggaggtttcatttcttcttctcaaagtagtgtagcatctttccttctttcaccattacataagcttaagcaataacagataacaaatcctcctcctcctctaggtaaaatattcaaacacaatacccttataagtacttattattaggaaagtagcgtgcatgggcataaatggcagcggggggcaggttaagaatcacaatgctgagcagcgaggaaacaaaacaccataatgggacagagcaaaagcctccgaaagggagcttttaggcagaaggcttctcccacttgaggggcttcaccacctcccaggtgaagtctgggtcgtcccttccgaagtgaccgtaagccgccgtcttgaggtagcgtccgttgccgcctttcttgaggtcaaggctgatgatgatcatgccaggcctgaagtcgagttctccttcacaatcttgaggatctcc

SEQ ID NO: 34823 - DNA, 510 bp, Oryza sativa
  unsure (1)..(510): unsure at all n locations
  Clone ID: uC-osrocyp009d05b1
ttttattggacctgtttgaacagcaagcttctgaggtctctacggttgagctgaaggttgcacgcttaaaccagcaaatcctcacctgccaaatcttcaccgacagagcaggcctcaggcagcagaagattggtggaacaacttttaaacatcataagcactatatcctaccatctaccggtcataaaagaactcaagctgcacgcctgcaaacagacaatggtcaggattcaaaacctaaaccttatccttcagccaagaccctttcatggcatctgtcttcaaagaacagcatttcgacaactggagcacagaaatatacatttacactaagggatactatatcgtataaacctgcatcaaatggttccatgtaccttctaggcaaggacatacctgcttctcccatgcacaagcctctgcaaccgaatgggaacaccagttttgatgcttagacaaatgtttgttcaaaggaccagccttggnttcatgcatatgtcgacatttaat

SEQ ID NO: 34824 - DNA, 499 bp, Oryza sativa
  Clone ID: uC-osrocyp009d06a1
atgaataccgaccattttaagggtcacaaacgaccagcgattttaatttacaacaccacgtctgtgaaacaaataataataaataccagttaacctgcttcagacttgagcacaggttgtgcaacaatggcgtgctccggcctgccaacacgcagttggtgttttgagatttgagattatatggccacacttcttttcatcccaacagcggtctggtctggttagcatccctttgacgggtatagctgcaactttcaaacatggcagcggttcaaaattttctacctagaagtttctccctctgtattgttgcatctcaggtgcataataataaacaggacgagtctgccccatcatcatctgctgcccatactgcaactgtggcccagcaggatgcatgtaaccttggggcgaaggtccaggctgagcattgtacaccataggctgtccaccataggccggtggaaacattggaggtccaagaggtgctgtaggcatg

SEQ ID NO: 34825 - DNA, 478 bp, Oryza sativa
  Clone ID: uC-osrocyp009d07a1
aagcaacatagctagcacaacaatttcatcattatctttctccagccatcacaaagcaaattaatatcgttccaaacatttaaggagctcatgaatccaataatccggaggtttttttaaaaggactcatctcaacatccataacaagcaaacgatagttgtttccgacaccaacattagaccataacgagtcaactgacaaccatagactagaccaaaaataccgcggactgcatagataaaacatcagtgtcgagcagaaggaaccgctcagcacttgacctccttcagcccatgagagaagtaaaggaaggttgggtcggtggctccgtccttgtagtaggcaaacaccaagccgccatcatcatgcatgctctcaccaacaaagaactgaaggtccttgagctttccaagcaagtacttggtggcaccctcaatgttcttcttgaattcctcttgcttttccgcatccagcttg

SEQ ID NO: 34826 - DNA, 357 bp, Oryza sativa
  Clone ID: uC-osrocyp009d08a1
gttttgtttttttttttttttttttttttttttttttttttttttttttttttttttatttaatataaaaaaaaaaaaaaaaataaaaacaaaaaaaaaaaataaaaaaacaaaaaaaaaaacaggcaaaaaaaaaaaaaaaaaaaaccgacaaaaaaaaaaaaaacaatggttttaaaaacgaaaaaccaaaaaggaaaaaaagaacccacccccggaaaaaaaaagaaaaggagcaagtacaaaaaatttaaaaaaccccggcgaaaaaacgggaacccttgaaaaattgagaaaccttaaaccccgggaaaaaaaaaggaaacaggggacgaacgcccactaaaccctcttaaa

SEQ ID NO: 34827 - DNA, 395 bp, Oryza sativa
  Clone ID: uC-osrocyp009d09a1
attcattacagggctacggggcccaaacaaatacaacatgaagggcagccatataatgcaatagaacccccgactgatgtaccctacaaaaaagagaaccgtccaaaaagaccaaggggattaactatagctaaccaaaatgtttaaggcccgactatataccaaacacggaagcacctaggaggccttgaaggagcggacaaccaaacaaacacatagcataggggacccccctgacattggggccagtacccctcccgggaaccgggggagcaaatgacctgttccagcgcacaccctgggacctgccaacgggcaggtaaccttaggccatggtgggggtgaaaatggccaagccagcctagaatttggcataaaccaaaaaacccaaaccg

SEQ ID NO: 34828 - DNA, 504 bp, Oryza sativa
  Clone ID: uC-osrocyp009d09b1
ttgacgcgtgggtcagtatcgaatcctctcttctcctcgtgcccaccaccaccaccgtagcaatggcgggcaacgggccgatcaacaaggaggacccgctcaactggggcgcggcggcggccgagatggccggcagccacctcgacgaggtgaagcgcatggtggcgcagttccgagagccgctggtcaagatccagggcgccaccctccgcgtcggccaggtggccgacgtcgcccaggccaaggacgccgccggcgtctccgtcgagctcgacgaggaggcccgcccccgcgtgaaggccagcagcgagtggatcctcaactgcatcgcccacggcggagacatctactgcgtcaccaccggcttcggtggcaccttccaccgccggaccaaggacggccccgcccttcaagtcgagctcctcaggcatctcaacgccggaatcttcggcactggctccgatggccacacgctgacgtctgagacggagcgtgcgggcatgc

SEQ ID NO: 34829 - DNA, 421 bp, Oryza sativa
  Clone ID: uC-osrocyp009d10a1
gatctcaatcaacagcatcctttctgttcacaaaatcatacagaacattattacggagtctatacatgtactacaagaagggaagtcatataattcaattgaatttctggttgctataacatacaaaaggtgcaactgtaattatctagtttgcagtaactaagttcaccaaaatgctgtggccagtatatataccaaaaaagaaatacattttggccttcttttaacatacaacacacacacacatatcagctttcctcagcgggacatcttctcttctatgcaaccgtggaactgaatgaacaaatgatctgttgcagtgcacaccatggaacctgacaacttgaagctcaccgaatttcttggtttcactcatcatgcataagccagcaaagtagccaacacaatcgaaaataccaaa

SEQ ID NO: 34830 - DNA, 438 bp, Oryza sativa
  Clone ID: uC-osrocyp009d11a1
ggattaaaggaacaaaacattcctattaccacaactttttaaggagggaattgagtaacaataccttcaccccaaaatacagtttagcgacaatattttaaaaaagccgtttgctttgccgccatgggtggcaagctgagcaaagcacctaacacaaagaacccgagatccctataaaccaaacgggaacgaacgaaaaaaatcccgggtcttttttggctgaaaaaacccgaagggggccggtttcttttattttaaggcccccctcctcctcgatgatgggggaatggcaatggcaatggcgatgggatcttggcttaattgatgggaaggggctcgcccttccactccttgaggcaatcgagcatggggtcgatgagcttgccctggctgaagcccaggaacaccttgttgcactcctggccgggggacctgagc

SEQ ID NO: 34831 - DNA, 378 bp, Oryza sativa
  Clone ID: uC-osrocyp009d12a1
gggggaaaagggaaaaagcaattatgcttacctccaaaccattttgggcccttttttaaaaggggacccccggggggggggagcccacccagtaggggtggaacccaaataaaaatatgggggccaaagccttggggcaaaaaaaaaaggggggggggccccggaaaaaacccgggaaaagggtgggggtgttgaaaggggcaaaccccgggggggagcaaagggggcctgtacccccgggaggggtctgattgacccccccagggttgggccggacaaaatacaaaaaggcccccaggggtttggaatttcccccgtattcgaaaaaggcccacagggtcaggtattcccctttttccttttaggggaaaataaggg

SEQ ID NO: 34832 - DNA, 331 bp, Oryza sativa
  Clone ID: uC-osrocyp009d12b1
ttttcccgcagtcttataagggtctagacgctgactcgaatctttgtgcgctcaaatcaaccgcatctgtgggaagaaagaaggccgcaagactatcaccctgctgctgaccgagcctgcgagacacaccgagtttgcataggctgcgaccaaggatacggaggccatgtcatcgggccactagtgactactaataactggaaagcgatggtagaatagaacaaccctagctaactatatcatgcagaaggagtggaggaaaaagattgcaataatgcattagttcgtggatgcagatgtaattcaagactgataccggaatgactatgag

SEQ ID NO: 34833 - DNA, 524 bp, Oryza sativa
  unsure (1)..(524): unsure at all n locations
  Clone ID: uC-osrocyp009e01b1
ctcgattcctattactgttactttctcggtgtgatgcctctgatttccacactgctctaccaccaccttgattcctattactgttactgcctccacggtgtgatgcctctgatttccaaactgctctaccaccacctcgaccgcgattattattcttcctgttccattcacctggtcgggatgatcctgcaatggtgaagttatgtgtgcctgcgctatttgaactataccaacttggtttatcatcttgctgtggtgcacctgagttccgttactcttcgtcttcagttgccttctctggaacacctgaccagtaaattctactgcagtagaatttggggaactccaggtgtttccttcatgccaatttggcttcctcggatgtttttggccagtgctgtgcatccctgccctcctaccctcagattccgtcagaaattcagctttnggtttgtctgtccaggtgatctgattgtttcctttctaacatactntatcctctggaatacaatcaacatcatata

SEQ ID NO: 34834 - DNA, 499 bp, Oryza sativa
  Clone ID: uC-osrocyp009e02a1
aaactacccgctcacattatcagcatgcggaccaaaatgtttaccggggctcattggcagtgcttctctctgttaggctattagcggatgatatatcaagcgaagggaaagttaaagagagttggaaattgaccttagctaaaaaaaacgcggttaacagaaagcaatggagtcgagggtctgaaatctgaagataccaaaaagactaaaggacgtccttgccttcgcactagaagtgttccaaagccaccaacctatgtacttctgttgagtgtgactaacgtaattcacctacttagaacttccaaaagcaccgtaatcagcagcactgcgtggtgcttcccagttcaacgccatgtaacttgataatcttagcagcctccagaagaatgccttgtgttgtagacagccactcatcctttggcattttcgtgaggttgcatccaatggtgagctctccatatgaacttttccatcttgaaagatacaataaggagct

SEQ ID NO: 34835 - DNA, 483 bp, Oryza sativa
  Clone ID: uC-osrocyp009e03a1
gcacgaaccaaacacactgcccatatatgcaaccagcataacaaaattacaactgcactggacggcttatattcttcacaagcaaaaaagtagactcaggtccatatcatcagcatcgttacaacttacaagtaggtagattggaaaacaaaatgcaactcattatcccaactagcattaacagagggggtgggtcctgatgaacaccgtccacgttttattctcagcatagacaaagcataccggtatcttcggctcggcggccatggaataccatggcaagcaaaaggattctactgggccttggccatgtggcggatcaggtcgatgacacggttgctgtaaccccactcgttgtcgtaccatgcgacaagcttgacaaagttatcgttaagagcaattccagccttggcgtcgaaaatgctcgacctgctggcaccaacaaagtccgtagaaaccaggtcttcctgaacatatgctatg

SEQ ID NO: 34836 - DNA, 464 bp, Oryza sativa
  Clone ID: uC-osrocyp009e04a1
ataggatcaaaacatttctattaccacaactttttaaggatggaattgagtagcaatactttcaccccaaaatacagtttagcgacaatatcttagaaaagccgcttgctttgccgccatggctggcaagctgagcagagcagctaacacaaagaacacgagatcactataaaccaaacggcaacgaacgaagaaaatacagggtcttttttgtctgaagatacacgaagcggttcgttttcttttatttttagtctcctctcctcctcgatgatgggtgtatggcaatggcaatggcgatgggatcttggcttagttgatgggaaggggctcgccgttccactccttgaggcagtcgagcatggggtcgatgagcttgccctggctgatgccgaggaacaccttgttgcactcctcgccgggggacttgagcttctcgccggtgaggaatacgcagccgagct

SEQ ID NO: 34837 - DNA, 411 bp, Oryza sativa
  Clone ID: uC-osrocyp009e05a1
gccccagcaacatattaaactgcgccatcttaaggctttttcccccactggggggcggggtcaatccccaaaggaacgtttgtttcgggcagaaaaaataccccaaggccacccagacaagtggtgaaagtctgaaccttgagggagaaaacccggtttaaatgctatcttatttcgggggcagccttccgggtgggaccgctgtcccgctatgtgcctaacccttgaccttagaaaaggtttggcccttccaatattaggcaggggcctgcccttaaagcccattgatagggctggctctcaaggcttcttgagttcccgggttttgggaactgccgcctcttggttaggccaggaagagaaaagggcatttgggagctccattgtgttaacggacaaaacacctaagcc

SEQ ID NO: 34838 - DNA, 384 bp, Oryza sativa
  Clone ID: uC-osrocyp009e05b1
cttcgtactcgcctcttttcgtgccctcctccgccgccgctcgccgccgttcgtctccgccgccaccgccgccgccatgagggagtgcatctcgatccacatcgggcaggccggtatccaggtcgggaacgcgtgctgggagctctattgcctcgagcatggcatccagcctgatggacagatgcccggtgacaagaccgttgggggaggtgatgatgcttttaacaccttcttcagtgagactggtgctgggaagcatgtcccccgtgctgtcttcgtcgatcttgagcctaccgtgattgatgaggtgaggactggtgactaccgccagctctttcaccctgagcagcttatcagtggcaagggaggatgcagccaacaact

SEQ ID NO: 34839 - DNA, 377 bp, Oryza sativa
  Clone ID: uC-osrocyp009e06a1
atcaaaaaggacgtgttccatttgaactgacccacgtcatgttggaaaaaattacaaataatagctaggctataaataaatagcacatcccatattacagttcaaagtgttaaacctaaaaggaaacaaaagaccacgttgacaaaactagctgccatccaaagaatgttcttttccatatatcaagacacgacacagagactaactgacaaatgacgtttggcaccaacctatttttcccatgaactggaggcgaacttgaaacaaattttgaccagtttcaaaaggtgggatgaccagcgggcggttagatgatggggatcattttttgaccgggatagaccccaatggatggcaaaaatagtacactcttttta

SEQ ID NO: 34840 - DNA, 525 bp, Oryza sativa
  unsure (1)..(525): unsure at all n locations
  Clone ID: uC-osrocyp009e07a1
atccgcttaatgccacttgaactttcaaattcaaaaaccacgatttataaagtgccggagatgaagtacacaaattaacattacatcgagttttaataaaacatcatgcgaaaagccagcaaaaacaaaaggcagtatacagctcatgaagctctactggagtagctcgcaaggggcccgacttattttcagtcgcactctactacattccttccgaaagagtgaccatcttctactgggtgttgtacatgtgacggatcaggtcaacaacgcgagagctgtatccccattcgttgtcataccaagacacaagcttaacaaagttgtcattgagagcaataccggcctttgcatcaaagatgcttgacctgttgtcaccctggaagtctgtggaaacaaggtcctcctcaacgtaacccagaatacccttgagtttgccctcagactccttcttgatagctganttaagnggancataggatgctggcttctcaagcctgacagtcaaatcaacgacagagacat

SEQ ID NO: 34841 - DNA, 505 bp, Oryza sativa
  Clone ID: uC-osrocyp009e08a1
ggtttttcaaatatgaatcttattgcctgctgaaagccgaggcttcttagaagcagaatagcacagcaacaacatggaactgattgggcgctgatgcagaattactacattttgttcatcaacaggaatggcaccactgatgctgacctgaaaaattgccacttacacattcagctctaaaccgcacaagcgaaaatcagatttacaataagcccattgcttgaactttacagtgatatcacttcacacacacaaacgggaactaatcatcgaactgaggcctttctcgtctttgctgacttgtgcttgataaagagggtagctagcatgcttttagtgctaactggaaccttttggatttcacgccctctaggtttgtccaatgcattaaatgtcgacatatgcatgaaaccaggctggtcctttgaaccaacatttttcttagcatcaaaactggtgtccccattcaggtgcagaggcttgtgcttgggagaagcaggtatgc

SEQ ID NO: 34842 - DNA, 486 bp, Oryza sativa
  Clone ID: uC-osrocyp009e08b1
aagctgggccgcctgcccggaccggaccggaactgaattcccgggattaatttaccttctcttctctactcctcctccccccgatcggatcggcccggctcctcctcctccgccgccgccacggccgccgcagataggagaagatggccgcacttgatacctgcctctttacctcggagtctgagaacgagggccaccctgacaagctctgcgaccaagtctcagatgctgtgcttgatgcctgcctcgccgaggaccctgacagcaaggtcgcttgagagacctgcaccaagacaaacatggtcatggactatggtgagatcaccaccaaggctaacgttgactatgagaagattgacagggagacatgccgtaacatcggttttgtgtcagctgttgacggtctcgatgctgaccactgcaaggtgcttgtgaacattaatgcatatggccctgacattgcacagggtgtgcacggccactaga

SEQ ID NO: 34843 - DNA, 359 bp, Oryza sativa
  Clone ID: uC-osrocyp009e09a1
acccccaactttttaaggggggaattggagaacaattctttccccccaaaatccagtttagcgacaattttttaaaaaaaccctttggtttgcccccctgggtgggaagccgagcaaaggcgtttacacaaaaaacccgagaccactttaaaccaaacgggaacgaacaaaaaaaaaacaggggcttttttggctgaaaatacccaaagggggggggtttcttttattttaaggcccccctccccccaaaagaagggggtatggcaacggaaaaggggaggggaacttgggttaaatgaggggaaagggcttcccgatccactccttgagggagtcatgcagggggtcgaagagcttgc

SEQ ID NO: 34844 - DNA, 480 bp, Oryza sativa
  unsure (1)..(480): unsure at all n locations
  Clone ID: uC-osrocyp009e09b1
tggacgcgtgggggcgcaccaagggaagccaagaaggaagaagcagacgtcacggtcacggtggcgtcggcgacgagcctacagctcccggcggtgagccagctgccgagcctgcagcttccggcgatggactggctgcaggacccgttcctgacgcagctgcgcagcccgtggcaggaccagcactgcctgtctccctacgcccatctgctctactactaagcaaggggcagagaattacattgtgcatcgaagcaagaggagtcgatcacgatctccagatgcatgtgcaagagcaagagatcaaatcacccgtcgacgaagaacaagtagcgtagaatggctagctgtggattcgattgtacatatagtagtagcaccgagatatcaatcaatcttttggtcttctctcaagataatatgatgctttctgacttgacaatgctagaatctcttataagactatgattcaagaactnt

SEQ ID NO: 34845 - DNA, 390 bp, Oryza sativa
  Clone ID: uC-osrocyp009e10a1
agggggggcccgaccccccaaaattaaaatttccccccgatttcaagttgaacagaagacccccaaggagctctttaatttaaaaaaaccggccaaaaacaccaaggggttcataataacaaaaaaggtttttaaccccccccctcaaagggacacctagggcataaaaaaactcgaagggggggtccctaacaaattttgggcttaatggcccccccccaagttgggggccaaaccctttcccccgggcgggggagaacaatgctccataattccggcgggcattgactggccaacacccgggtacaatttgggaaaaaaggggttcagaaagccccccagccccttgaacttggaaaaaaacccaaaaaacccggggagggtggtggc

SEQ ID NO: 34846 - DNA, 508 bp, Oryza sativa
  Clone ID: uC-osrocyp009e11a1
cacaaaggtaaggtatgttacatagagaaaacattgcttgaggtgcaagcattaagacccgtaatttggattggagaaaattcgaatcaacaaggtttcaaactgcacgggcgaacatacacgtggcccggagcaacccaacacaacaatatcatgggcacacattaggaatgccctgatgcgatgccatgggctgaaaaaactgaccgcactcgccgacctacactggacactacctgaacagatctacttccagctcaccaattggctgaaccttgcgcattgccccatggccaacagccgtcaggtgctcctgaaaccatggcacgcttgcagacaatctgaagatcacgactcaatcagccgataatggtgcaaggctggacacaaagttacaagcagttgatggggacgatgcctggaccagagtcatcggatacggccttggagagccacatgtggtgaaaggtactgagagacgccaggatggaacctccaattcagacac

SEQ ID NO: 34847 - DNA, 269 bp, Oryza sativa
  Clone ID: uC-osrocyp009e12a1
tttttgttttttttttttttttttttttttttttttttttttttttttttttttatggaaaacatgaatgatggattaaaaagggaaagaccttattttggtccaaaataaatttggagttccgtcgaactgggatttaggagcttaggagaaaacccaggtgaattttacatatacattcaaaagcaaatttgggagttttgtaaccaactgaacccggttttttagattttatggaccccagaaatttattataaaagccgattttc

SEQ ID NO: 34848 - DNA, 489 bp, Oryza sativa
  Clone ID: uC-osrocyp009e12b1
ttcggcagcccacctccacgcgctcaccctccgcccccacctcgcgggcaccgaggccaacgcccgcgccgccgagcacgtcgtctccgcgctctcctccctctccttccccacccgcgtcgtgccctactccgtcctcctcgcctacccggtccaccgctccctctccctctcggcgccaggccacgccaccaccccctttgcgctggtgcaggacacataccccggtgatccctatgccgcggtctccgcggaggccgtccccaccttcctcgcctacgccgcgtccggctcggtcgccgccgaggccgtctacgctaactacgggcgcccggaggatttcgcctacctcgccgcccgcggcgtagacgtcaccgggaaggtcgtcctcgcgcgctacggcaaggtgtaccgcggcgacatcgtgataaacgcccggaaagctggcgcggcggcggcggtcatatacaccgatgccaaggactacgc

SEQ ID NO: 34849 - DNA, 398 bp, Oryza sativa
  Clone ID: uC-osrocyp009f01a1
atgaaaataagctgaaatttctcaagcttgctgaggtataaaattgaagcagaataccccaatccatacgaaatgttacgcctaaaccagaccaaacgcaacagataacttcggaccaatcaccaaagctactgttttctccattggattcagagaagagaatcctcgtcagcgttaggaccaccaccaccatcgccatccatggcgactaggacgaggccgaggaggacgtacagggggaggcgtggtcgccccctgtcgacgttggccgacggcttggtgtactcctacatgtcacgtctgtacgccgtcatggactccgtggtcttgctgtatcacgcctgcttattcggctccccgaggtcctttcactttatcgacactagcgttggcagcgt

SEQ ID NO: 34850 - DNA, 524 bp, Oryza sativa
  unsure (1)..(524): unsure at all n locations
  Clone ID: uC-osrocyp009f02a1
ccaatcaggtcctcactgcctgtgtcatgtgttgtgcactttgctagaccagaaaccaattttggcttctgccttttgatcgacccatttaaacttcccgaatcaacagttcgcttactactgcctgcctcatcagacttctttggactactactcaagatttcagggtggggctttttagcaccctttttccctttggatacaggggttttaacactagcaggcgatgttaccaactcagtatcaaccgagtcatctctttttttggccccctcaaccttattttcaaatgagttgatagtttcatctgggtcaacagactgcagtagaagctcatcactgtttttgttgcctttcgttgaatgtggtctactcttagaaactgatctcttgcgttttggtgttgaaaaatctacaggcttgncattactctcttttgcatccatccgctatttctttggtttgctcttttctgattcccccaaattnttttgattgtccaagtttatttctctaaccagtcc

SEQ ID NO: 34851 - DNA, 417 bp, Oryza sativa
  Clone ID: uC-osrocyp009f03a1
tttttggtaggctttttattgagcaccgtgcttccttcagcccatattccaaggtacgaattatcaatcaagaaattatcaaaccatccaaatgaggaacatcgataattttccagtcggacgctaactgattgggataaaacaactatcaggaatgacagattgttctatatatcctttatttgggaggtccggtctacgtgatattaggatgtatggactgcttggatcgacaacaatttgaaccgaggctgtaaaagttcattcagtccagaatgagaactcgaatggtaatggtgatacacccaaaatgactttaaaagaagggaaatgaagcactgaagctggcaagagtatgtcgtaaaaagcttatttgggtgacagtcttgaccggagctccgcaacaaccgcattaat

SEQ ID NO: 34852 - DNA, 470 bp, Oryza sativa
  Clone ID: uC-osrocyp009f04a1
ctggattactctgtgcccctgctggccttgtacgtattcactagttgcatctgtacatcctgcgatacggcattgtgctccagatactccatcgaaaattcacctttcccctgtgtcattgaccgaagagctgttgaatatccaaacatattgtttaggggaacatggcaaaccacaactgtgtcgtcgccttcctgatcatttccaacaatgataccctttctcttggtcatgtcaccggataccgtgccctggaactttgtgggaacttttagttccactttcatcactggttccaatattacaggtctagcagcagcataacactgtctaaaagcatagatagaagctaacttaaaagcaagttcgctggaatccactgcatgtgaagcaccatcagtcaggacaattcgaatatttttcacaggatgccctatcaacgaaccaaaattgcaagcttgcttaaaacc

SEQ ID NO: 34853 - DNA, 479 bp, Oryza sativa
  Clone ID: uC-osrocyp009f05a1
catattcactttagtaatcatctaaagcttgttctggtcctctgtggcatgttctaccataatgcgcctcacctgagctacctccttgcccaatgaactggccaagggatgtatcattcattagataataatcaaagcagctctcatcataactgatatacacaatcgtcaaagtgatttctctgaaatccatctcccaaacattgcaagacacctctccggctggtactctggtgcagtgtgtccaccaccctttaccgtagcgaaggtcaagtcatttgcatatgtgattgtgaatcctgcagactgcccatcgatatgccaggctctccagtcatccacaattgggtagttgagtgatcttacccaggcttgtgtacccaaaaatggaaccacggaatcatggtcgccactgtataccaagacacgatagcctctagatgtaagattttgatggtacttaatactgctctctatgt

SEQ ID NO: 34854 - DNA, 366 bp, Oryza sativa
  Clone ID: uC-osrocyp009f06a1
tttttgttttggtttttttttttcttttttttttttttctttggctttaaaagtggtttttgttctaaaaaaacaaattacgggggcaagatggacaaatcctgggcaaaccgggtttgaaccccccccccagggcacctcccggcttggccacagaaatcccattcaccgaagggcaattgggattcacaccggttacagaggaacaccttggaaaagaacctacctccagatatgaacggggcccggcgggccccacggggagccctcccttttgaacccccccctttgggaccgcaaggggcccaaccagaggggggggacctccgggcctggaaatttgacccgccaggttaccccaggaac

SEQ ID NO: 34855 - DNA, 394 bp, Oryza sativa
  Clone ID: uC-osrocyp009f07a1
ggtttgtttgtttaattacgacttttctattgagttgtccactttgctagatatgattggtttatcatttttacatttgggaggcacaacaggatacaaaacaggggacacactgagatgacatagggaccaaaaattgattccagtaagccgtcgctcaatacaagcttgggaggggagggatctggacatggacgggatccctcgagaaccattggggcatgtggtgtaactacaggcagggtggaggaacacacaaatgcgacatattcctataggggctcccaagattgcaactgagtgccagttggagagaaaaccctcggctttggacttaagcaagagaccgacctgcagagcggggggggggggcaaaaaaaactacaggaaaaac

SEQ ID NO: 34856 - DNA, 496 bp, Oryza sativa
  Clone ID: uC-osrocyp009f08a1
aaggggaagaaaaaacttacatattattattccagccagtttcagaggaagtggcaaccaagtttctagtgcccagcagctactgtatatccaatgtgggtatatctcaaaacatatactccctgccagatgaaccgaaaaaaagcgccggcacacgcttctggaccacggtctcatcatgtacaaattacacatcatgtaataaacacatgtacactaagtctcgacaagaaattaccatgtgaaaaacgcaacaggaaaaagacccgcaaccatccacatctcatcccaaacctaccttctcccaattgggagggtaaaaggtcgtgtcctgtgaatcaaaaccaaatttacctcatgccctcatgtgccctgtgctgatcgaacagcatcattcattactggttcaccgatcaggcaatcaagaccatcttggaggcaaactccacttacccaatttgagcacgctgaacatatgctgtatattctagcctaa

SEQ ID NO: 34857 - DNA, 213 bp, Oryza sativa
  Clone ID: uC-osrocyp009f08b1
caccaccagacgtcgactctaatgtagggggatagagagtgaaagcatgacaataatgggttgctgttggctttcttgatggatggatacacattgtaaaatgaaactttccaaagaaatttcacgagtgctgcagaatgattttttgcgtctgatagcactgtaaaaaaaaaaaaaaaaaggaaagataaaaaaatacttaaaacagaacaa

SEQ ID NO: 34858 - DNA, 487 bp, Oryza sativa
  Clone ID: uC-osrocyp009f09a1
agtcaccaatcaaaatacctgttgacaaaataattgcattcttgcgaaatttactctcctacaattgaaactgaaatagtaggactagttcatagtcatacttctattgacaatcaagtgtgcactcttcgcatattaatctggtatttgcacaaaaataacacgtgcaattgcaagcatagattgttctaatttctaaacaaactggcaatggattgcaaaaaaggacgttggacgagcatatgcatagatgcataatcctcaggcataaaacaatcaatctgtcaccgaagtaacacgagatcaaagaaccttgaagcataatcctcaggcgtcaacaatcagtccgccagcgcctacaaaggcgcgaacgccgccttggagatgacatgcgtcttcttgccgagcccgaacccgatgatgtggttgatgtacacgtcgccatccttcaccgtcgccgacgagccgatccgtgagccggtccgac

SEQ ID NO: 34859 - DNA, 465 bp, Oryza sativa
  Clone ID: uC-osrocyp009f10a1
tgtttttttttttttttttttaatagaaagttcatcgatccattacacaccaatagcaatatagcatagccccaagggcaccaaatcctttcaggtgttaagactccttgatctcgtcttaaaccggaaatataactattacaaccatagcatgaccatccacaagatgaacgccagagactgggattaaatttcaagcttcaggggactcgcttgctctgggcgagcgtgagccgccacggttaccaccatcaccatttccatccctagggctcgggctgccgttgtcccttgggcttcggctattgttgtccattggactagggcttccattgttccttgggcttgggctgcgcccattggcagccacagggctacggtagccgccagatgggctcctgctgttctccctgccccaggggctgtcaccattgggctcatcattatccttgggtggtgggctta

SEQ ID NO: 34860 - DNA, 546 bp, Oryza sativa
  Clone ID: uC-osrocyp009f11a1
agggtaaagaaagaaacatatctttgttattgtgtcgtaggactgcaacgattcgcctcacttgcatttgcaactcaaaaaattgacaaagattttgtgcgtcttattggtgaaaaacatgagcaggaaccaacatatgcatcgaatatggtcctgctcgctgttgggcggctggcagcagcagcagcagatagtaagaaaacaaacacaacaacgtttctgcaactaaaagattaattctacagtgtcttcaggagtggaagactacagctcagaacttcgtatcttctcactgacagtagaaccaaaagctggaccgcccttccggtagcacacaagaaactcaaccgggtaacccttcaatttgtgaggcacgattccgaggtccgaaaaggtgagagcattatcagacactagggtgtctacagaaaatgcattaatctgatctttgttgaaaattgatggggttggcaacggaaagggcactttgtttagcagcatttcccttggagatgcgatagcccttgcaataggaagaggaacatc

SEQ ID NO: 34861 - DNA, 529 bp, Oryza sativa
  Clone ID: uC-osrocyp009f12a1
atatgatcataactatttttatttatattggataaatcatcgaagttacagctcaacggtacatttaaaaaaaaaggtgcaatggcaaaaaaaaactgaagttcacacaattgtctcactaattaaagctatctacggctttctacatgtagaactgattcattggccgtttctcttttcatctgtaatctgtaaatcctttagtcttctatatcctctcacagttgtaggcaagtgaagcctctgctaaacgtctcttttcccctgtgtactcctgatgcttccagttgtcagagtatcatccatcttggctgaagaaaatcaacccaccacatgccgaagcacaccaacctgatgcacatgcgcaggtacatatccatcgagcatttgacaacccgagcaaaaccaaattagatggaacatcctgattcacaaattcttatccaaatgaggaggctgacgatgtcaactttgatatttttgcggggataagtgctgcaaccggcgggtcctcagccactgcggacca

SEQ ID NO: 34862 - DNA, 397 bp, Oryza sativa
  Clone ID: uC-osrocyp009g02a1
accataatactaaagtgtttttctgctttcataaagtttaatccctgcagaggacgcacactcacttgtaagatcattgcacatggagcaaacagcgcaaccatgaatcgcccaatgcaaagcaacccatcccaaggacgtgagaaccaacggcaaaacttatggcatggtcgagcactccaggtactatactaggcgagatggacactgatccggagcagcgtctcggcgccgtcggtgacatgctgcccggtggcgatcagcgggcgcacctcgtggaagccgtaggcgcccttgaacttgccagtgccgccggagatggacagcttgcacatggtggatcccaccttgttgaccccgaataagttgatcgtgtcgccgtactcgccgaccttca

SEQ ID NO: 34863 - DNA, 410 bp, Oryza sativa
  Clone ID: uC-osrocyp009g03a1
tttttgtgcacaagaagccaaacgtgagagcttgtacaaaacttcagctctcttcaatgttgactacgctaattaaaattgtaactccataaaaactgggctacgccgtgaaacctgtagatacaacagatacggtgaatccaattcacgcaatgcgcacccatacgggtacagtatggttcatttaacgtctgatagacgatttcttaaggtgctgccgcaggtggcgacaaatactgaaaacagcgaggtaatccaataaagaaataacagttggaaatcctctgcagcggcaacccagggatgtagatgatcataatcactcgagttaccctgcaactgaaacttgtacccgggttgcgaacgggcagtgccatccgacgaattgtagttggggttacggggcaaat

SEQ ID NO: 34864 - DNA, 524 bp, Oryza sativa
  Clone ID: uC-osrocyp009g04a1
tttttgttactttatcaaagatataaggacctatgtattccacatattactttagcacgtaatatcaaataattaatggtgcacttcacaagctaaacttcttataacttaattaacacacgtatatataattggccaggtcatatatcacgtatttaacacaatacaacaagcatggtattgattggaccctgcaaatactactcataaatagcaaatttattccaacctactacacatataatatatattatatgaaggccttaatctcatcttggaactccttgatacacttgttctccacacactgtgtcataatccgggtccctttctttggcattggtggagcaccaagcactgcgactgccatgtagactgcataagtgaatggtatgatgtgattaggtgtaccccacccatagtctacctcgaagaattctaacctcgttcaatccgtcacaacaagcacattgtgttcaaatgtcaatgcgtagggatcaacttttacatccccctgagcccac

SEQ ID NO: 34865 - DNA, 273 bp, Oryza sativa
  Clone ID: uC-osrocyp009g05a1
atgtaaccctgtgtagtagaattttcaataagttacacaagaaaatccgacaaatataatgtacacctgtgtaaaacaacatgcaggaaatggcttccattgacagcatggcctgcactcactcaaatgcacaagtactgtactgaaactactgaaagttttctaacgcctttctttggggaagccccggagggcaagaatcagtgcaaagaagctgccgtttatcaatcctctcaggatcttttgctttttaatcgggtaaggggggtacct

SEQ ID NO: 34866 - DNA, 546 bp, Oryza sativa
  Clone ID: uC-osrocyp009g05b1
ctcctccgccccgacgcttcgttagggtttttgcctctccctccgccgacgccgctgccgcgaggagaggagggggggagagcacccagccggcgagccagccatgtcgctgcgcccgagcgagcgggtggaggtgcggcggaaccgctacaaggtggcggtggacgccgaggaggggaggcggcggcgcgaggacaacatggtggagatccgcaagagccgccgcgaggagagcctcctcaagaagcgccgcgaggggctccaggcccaggcccccgtccccgcctccgccgcaaccggcgtcgataagaagctcgaaagccttcctgctatgattggtggagtttattcggacgataacaaccttcagcttgaggccacaacacagttccgcaagttgctttctatagagaggagccctccaattgaagaggttattcaatcaggcgttgttcctagattcgtgcagtttcttaccagagaggatttcccccagctacagttcgaagctgcgtgggcacttacaaacattgcatctggcacttc

SEQ ID NO: 34867 - DNA, 560 bp, Oryza sativa
  Clone ID: uC-osrocyp009g06a1
gcaagctacttatatttcatatgctatggcatgaaaagaggttcaggtccgagatatacaaattacgcagacaaaatggccatgtcgagtgttcgtcgtgaaaaaactttgaaaccaggaaactagcagtttaaatacagtaatctaatacaaagaacaacaaatacaattcacaccagctcctgtgaaacaacgccgcatccaaacctacaatagctcatgaactgatcaatttggaaggaacaatgatccttcaattttgtatcacttgagaagagactccatggcttcgaagaagagagccaccatctccttgtttggagttttgaccgcacacttcacgccaggaacaccgactgcagcagtaagctctatcaggaaggggattccacgcggaatctttgcagacatgtacagaacatccttgtttgagtttttcctcttggcgataaagaacacatttgatgctgcaaggtgctcaacggtcgcatctatgctgctgacgacagatgaggggaactctttcgaaaaatcgttgtcatcaggtaaagatttccagg

SEQ ID NO: 34868 - DNA, 541 bp, Oryza sativa
  Clone ID: uC-osrocyp009g06b1
cttactcctgcccaaactctattcgccgccgccggcgtactcgagagaaacatcagcatccatggcgggcaagggcgagggtccggccatcggcatcgaccttggcacgacctactcgtgcgtgggcgtttggcagcacgaccgcgtggagatcatcgccaacgaccagggcaaccgcaccaccccctcctacgtcggcttcaccgactccgagaggctcatcggagatgctgccaagaaccaggtcgccatgaaccccatcaacaccgtcttcgatgccaagcgtctcattggcaggaggtttagcgatgcttctgttcagagtgacattaagctctggcccttcaaggtgattgctggacctggtgacaagcctatgattgttgtccagtacaagggtgaggagaagcagtttgctgccgaagagatctcctccatggtcctcatcaagatgcgtgagattgctgaggcctaccttggcaccaccatcaagaatgccgttgtcactgttcctgcctacttcaatgactcccagaggcag

SEQ ID NO: 34869 - DNA, 456 bp, Oryza sativa
  Clone ID: uC-osrocyp009g07a1
tgtttggttttttgcttccttgaaatccattcatggtgctgctttgttagatatctcagctttattgtttacatgatatgtaaacggaagaacaaaacaaactgagaaagaacggtcctttctatcagaatataaataaatagagctacagttttaggccatcctaaaaaatgctaagggtagttggacatgatgatcaaacatacatctcctctgcctctgcaaaatgtcgacatagcaactcatatacacagttgctattcaggcgcctgaatcaggccaaaagcattgcatggcatctctgacgtagcacgcaccacaacaggaccacacactcaaaagggtttcaaaggctgggtcagtaactatttggccacatttggttagcctgagcggcaggggcagcagagcttaagttgccgtcactaaggttccggtgctcatggcccaagccgg

SEQ ID NO: 34870 - DNA, 377 bp, Oryza sativa
  Clone ID: uC-osrocyp009g08a1
gtccttgatgccgacgaggtcgatgtagtagaacgacggcgtcgcgccgtcggccagcgccgtgaactgcgcgttcgccggcggggcgccgccgagggacaggtagcccctgccgctcgacgacgacggtaggcagtaggtgaatccggggccgtagctcggcgcgccctgcgacggcagcgacaccttctccctgccgaggccgaacagcccgtcgacctggccgaacagcccggcgttctggtcgccgcacccgaagacgaagcccgggagcgtgtccgacgccgagagcgtcagcgtgtcgcgcacgaggttgccgtcggtctgcgactggtcgccgtactggaccttgttccggcacctggtgtccgacgagc

SEQ ID NO: 34871 - DNA, 471 bp, Oryza sativa
  Clone ID: uC-osrocyp009g09a1
gcacaagaagccaaacgtgagagcttgtacaaaacttcagctctcttcaatgttgactacgctaattaaaattgtaactccataaaaactcggctacgccgagaaaactgtaattacaacagatacggcgtagccaattcacgcaatgcgcacccatacggctacagtatggttcatttaacgtctgatagacgatttcttaaggtgctgccgcaggtggcgacaaatactgaaaacagcgaggtaatccaataaagaaataacattggaaatcctctccagcggcaacccaagtctctaaatgatcataatcactcgagttaccctgcaacgcaaatttgtacccgggttgcgaacgggcagttccatttgtagaattgtagttggtgttacgggcaaaataacaacgagcgtcattttcccaaggcacttcaaattcaacagtaggatttactctcgaataaaatagac

SEQ ID NO: 34872 - DNA, 435 bp, Oryza sativa
  Clone ID: uC-osrocyp009g10a1
acagtaagctcattatatatagaagataaccaccaaaataccaatatgtagaagtacatttttagtacctaggctactagtagaacaaataaattttaggcaatgagcgagagaggcaacgaggctgtctttctctggaacaaaaatagctgaataaataacagggtaacatgaaagtttactctagtcctccagaaagtaggtgcaagtgcaagtattttcctaaaccaataaattcccttgatttgccctccagatccaactaaagttaaataagtgaaagaacaaactggtgtccacctccttgaaagcaaccgtagaccaaccaaactacagtcttttgcactttgcaccagatacccaatttgtgtgtgccaggatcagatctggtggtggctctatgcctggttatcgctcttgcgatcactgtgccca

SEQ ID NO: 34873 - DNA, 472 bp, Oryza sativa
  Clone ID: uC-osrocyp009g11a1
actaattgcaacttcgattgacatctgaaccataacagatcataagcacaaaaaatacatatatattgaccagtaaactgatcacccggggtcacaaccaacacttacacatgtaataatacatactggccaatggttttttcccagaactaattaaactttgcaagcataaacaaagacaaaacagacagtttccaaagttcagagagttcagactgctcacagtaaaccaaccaacaaaaacatgtagacgacgtgtagcacactgtcaatcgatcgatcgatcgatcggctgcagtgtcccaatgtgattaagcacactggtagtcggatgggcagatcttgccgcagttgttgaggatgaggctgaggtcgatggggatgttgaggttgaggccgagcacgttggccttgatggcggtgcataggcagacggcggcgtcgaggtcgacgaggccgtcgagcaacgagc

SEQ ID NO: 34874 - DNA, 451 bp, Oryza sativa
  Clone ID: uC-osrocyp009g11b1
tcgttccccaaaccctagccgccgccgacggcgtactcgagagaaacatcagcatgcatggcgggcaagggctagggtccggccatcggcatcgaccttggcacgacctactcgtgcgtgggcatttggcagaacgaccgcgtggagatcatcgtcaacgaccagggcaaccgtaccaccccctcctacgttagcttcaccgactccgagaggctcatcggagatactgccaagaaccacgtagccatgaaccccatcaacaccgtcttcgatgccaagcgtgtcattggcaggaggtttagcgatgcttctgttcagagtgacactaagctgtggtccttgaaggtgattgctggacctggagacaagcctatgacagttgtccagtacaagggtgaggagaagcagttggctgccgaagagatctcctacatgatcctcatcaagatgc

SEQ ID NO: 34875 - DNA, 540 bp, Oryza sativa
  Clone ID: uC-osrocyp009g12a1
acataagctactgaatttccaacatgtaacaagggattacagcttaattctcgaccggccgcgccgtgaaaaaaacaaccggcagctcaaccaggagatcagatcactgagtacaccaactacacttgcacgacgacgtaataccaacgaccttactactactgagtactgactagttactgctactcgcagcagccatggccgacgtctaaaatgccaccgagccatggaagccacggaattcagagaagattacacagctagttgagttgagtgactctagcttgacgaagactactactagtactagtaatagactagtagtagctgcttctgcttgtttatgagaggattgagtcccagtcgatctcccaggacgggtacttgcgcaggtggaatgtctccgactcgtcccatggcgcctccgtgaagtccagcttctccatctccggcaccgggggcgacagcggcttgggcggaggaggggagccggctgacaccgagttcttccctccgtcgacgccgagcacttgggggact

SEQ ID NO: 34876 - DNA, 361 bp, Oryza sativa
  Clone ID: uC-osrocyp009h02a1
tttttgtttggtgaaacagaaagaacaaaatttctttgctgaccactcaactcaactcttatgctacacgaacataacctatattattttagacaacggtgttgactaaataaaactccgcgggtcgcaatccacaaccacaaccgcggaaatggtcctctgcacaacacagggctaaaacttgggcctatgagaagcatcagggtaatgttgctcgatttatcaatgtcacatacactgacagttaccaggctagttgaacttaccaattactctgaacaacttggggtctaccagcttatggactttgaggccccaaccgtaaactaatccttcgaaccagagaacgcggcacataccc

SEQ ID NO: 34877 - DNA, 428 bp, Oryza sativa
  Clone ID: uC-osrocyp009h02b1
attaattttgcttaattattcgttctaccaggatgttcagatcaacagcgctacgcctactcagggagaccaagagagcggttggcccatggatgacgacgatgacgtcgacttcgcctgaaagtctaatcgccggtggattctccacggcggcgagctcccaccagaggttggccggcaaggtggccgtcatcaccggcgccgccagcggcatcggcaaggcgaccgccgcggagttcatcaggaacggagccaaggtgatcatcaccgacgtcaacgacgacctcggtcacgccgcggcggcggagctcggcccggacgccacgtacgcgcgctgtgacgtcgccgacgaggcgcatgtcgccgccgccgtcgactcgccgtggcgcgccacggtcgtctcgacgttatgcacaacaacgccgtca

SEQ ID NO: 34878 - DNA, 431 bp, Oryza sativa
  Clone ID: uC-osrocyp009h03a1
gcgtacaaaaactcagtgcatttaacttttgaactcatcactattacaagaggaaatggaaatcaaagaacaccagaacgtttaaacaatattcacttcactcacacaaactgaattaaatgagctaattaaaccacaatgaagaactctcatccacaggagaaggtaattaattaacatacttaagcactactaattcattcggaactcatttaatttaggccatctcgcgttcttgctagtagtagttcaccttcctgcagttgacgcggacctcgccttggctcccgacgagcgggctcaggctggccatcctcaccatggactcggcgaagtctcgccggaacgcgtccgggttggcggcgtagaacctgacgagcccgtcggtggcgccgaggccgccgccggcgaacagctgctggtccgagtgc

SEQ ID NO: 34879 - DNA, 441 bp, Oryza sativa
  Clone ID: uC-osrocyp009h03b1
gtgattcttgagctcagtcacaggcacagcatggggatctgtgcatcttcagagcatccggcgcatgcacatgagacacaaggcagcattgcgattgtaaaagacgacccatgctgggctgtaagacctgtgttacctgaagatctcgcagagatatgtcttgctcttgatactcggagccagggccctgatatgggttcagtgtccaagaggcggatgccattcctcgagagtaaggaattcattgctgaaaggaaagaggttgggaagcttgtcgagtggatgcatgtcctgactgctgatgcttgatcaaagggggcccattgggaaagtttagggtggttcagggcaaaagcacagccctcttcgacccatgcctgggccaaccaaagctggttttggtgtggatgatctagatggaaagcttttcgtattgctggc

SEQ ID NO: 34880 - DNA, 474 bp, Oryza sativa
  Clone ID: uC-osrocyp009h04a1
tttttgtttattatttccactatatctcagactattaatttcggcttgttgaagctggggcatttgatgctctgatggatctattggttagccatggcagctccattaaccagtacaagacacccagatgcatcgaatctagccttgcactgaagctgctgaactccaagggcattgcctgctttttcagtccacaggatcctgaatgcggcatgtaaaactttggtaaataagcaagtatgcttctgtgcttgcttgatatgcaatcttactacaattaaccgaaattaatagtctgagatatagtggaaataataataataataatgtactactagcttaaataatgaagttcttattttagatggctgcaggctttaggagcttcatttccaatctagtcagatcagcctgctgcctagataagtgggtataaatgttgccaacttttagaatttcatttgggtttaatta

SEQ ID NO: 34881 - DNA, 407 bp, Oryza sativa
  Clone ID: uC-osrocyp009h05a1
gggagtagaaaacttctttattcaaatctcagcaggtatagcaagtgcccatatttaagaggagtccagagtacagacgcattacaatcagaaaaccaatagggggagtaccatgtggaaatgtacatcaaaactacaaaaatctcatattatgctggcgaactggaggccttccttcttgagctcctctatgttggcaacgggcggctgagttttcgcgaccttggcaatggccttgttctcatcaggtgacccaccctccaggaaggcacccaacaccttgccgtccttgatccagtaggacccgaacttgggcttggcataggtcgggtcactgtctccgaacaggatggtgtctccaacgttgtcgccgtagaattgccatcccaggtcgaatgaccgggagt

SEQ ID NO: 34882 - DNA, 495 bp, Oryza sativa
  Clone ID: uC-osrocyp009h05b1
gttcagcctgcggagcgtttttttgttggccgcattggcccaaaaaagtataggatatacagagtgattgtccggtatggttaccgtgatgtacagaaggatgatgtagagtttgagaaggatctagtcagtagtattgcagagttcatccgctgtgcggactctaaccaaaacagttttatggacggcgcaagccattcatgtgaggggctatctttcatcagtaaaggccttccacttgaggaggaggaaggtgagtttgatggatcagattcaacaggatcatctgctcataaggagataaatccaaacacgacggcaccgaagccaaagagggtgaggtttgcacttccaaaggacacaaagatagaccgggaggtgcgcggcgagctgcaggagctgatggaagcaagggaggcaggcatgtccttcataacgggccgctcccatatgaaggcgaaaagcgggtctggtctgataaagcagattgtgata

SEQ ID NO: 34883 - DNA, 459 bp, Oryza sativa
  Clone ID: uC-osrocyp009h06a1
aggttcaaatccaacttattcataaagcatactgctgtcccacaggaaactgtttcataaaactaacatatcatacggactcgatggtccattaaaccagacacaagtagacatcagcaccacaaatacttgacgaacagaggctcgggatgaccaggcacatgggcagctccaccaaactggctgattactgaccaccacggaggcggaccaccaggtggagggtggactccttctggatgttgtagtcggcgagggtgcgtccatcctccagctgcttgccagcgaagatcagacgctgctggtctgggggaatcccctccttgtcctggatcttggccttcacattatcaatggtgtcggagctctcaacctccaaagtgatggtctttccagtcaaggtctttacgaagatctgtataccaccacggagacgaagcaccaggtggaggggagact

SEQ ID NO: 34884 - DNA, 528 bp, Oryza sativa
  unsure (1)..(528): unsure at all n locations
  Clone ID: uC-osrocyp009h06b1
ctcgttttgacacccgaggaggcgtacgccgccatcgacctccccatcctcggcctcctcttcggcaccatggtcgtcttcatcttcctggagcgcgccgacatgttcaagtacctcggcaacatgctgtcgtggaagagccgcggcagcaaggacctcctcttccgcgtctgcgtcgtctccgccgtcgccagcgcgctcttcaccaacgacaccacctgcgtcgacctcaccgagttcatcctcaaggtggcgcgccagaacaacctcccgccgcagccgttcctcctcgcgctcgcgtcgagctccaacatcgggtcggcggcgacgcccatcggcaacccgcagaacctcgtcatcgccgtcgagagcgagatcacgttcggccagttcctcctcggcgtgttcccggcgatggtcgtcggcatcctcgacaacacctgcatnctcctatgctacttgtggaggtacctctccgacgaccgcgaccagctcgagggcggcggtagcgcgcatggtcccgaggtc

SEQ ID NO: 34885 - DNA, 484 bp, Oryza sativa
  unsure (1)..(484): unsure at all n locations
  Clone ID: uC-osrocyp009h07a1
atactgcgtacgggccgccctttttttttttttgtggaatataagagtacaacatagaatagttgtcccctttagtcaagtcttacactatacgatgaatacatgttttatgcaaagcaacgggggtaacaaactaaataacagaaggactcactccacaaatattaatgcggaaattgtcatcaacacaattcaggcatacaggtcctgttcatgaaaagaaaatgtgtaaccttgcttgtctcatcatgttacatacactgaaggctaaaatgcaaattgacctggacaagtagtcacaatggcatggtgccgatcagctgatgaactttgtggccaaagaggcagatgaatccatcgaacaggaggcagaggcacagataacttgagaagttcagagtaaaccccgtcttcttttgtagtcactgacggtcagagttagagcatgccttctttcatcattggcagggnacctgtaacccat

SEQ ID NO: 34886 - DNA, 52 bp, Oryza sativa
  unsure (1)..(52): unsure at all n locations
  Clone ID: uC-osrocyp009h07b1
agtaaagctggccgcctcgcctgcacgcgtaccgganccggacatgtcccgg

SEQ ID NO: 34887 - DNA, 380 bp, Oryza sativa
  Clone ID: uC-osrocyp009h08a1
gtgggtgagattcatgacgtgccctttactttcagtggggctgccattgcaagcggatagtccgcagtctatacgggcgtaccgacaacgagatcaggaacttctggagaacccacatgggcaagattcgcaccaccactccaagaagaagaccaattcaccatcgtcagggccgacagacctctgtcggttaacttgtactcctgtgatcaccgacggggacgatcaacgtatggatgacacgtctgcggctgctgcagagaaagcgagcaggctgagggcggtgacgatcgaggaccgtggaccagcatggtgagcagacggtcaccaccgccggaggagccatgatgttgactatgcgactacaccatggcaccagc

SEQ ID NO: 34888 - DNA, 523 bp, Oryza sativa
  Clone ID: uC-osrocyp009h08b1
cgcccggcccgtaccggaacggccgggccgggctatgctttctgtgattttagagagattcacaatctctggatggggatctgtgcatcttcagagcatctggagcatgttcatgagacagatgagagcattgtgtatgtgaaggatgagcaaggaaggggtgatagggagatgaagagtggggctaggaaggtggacttcctcttctcccagaggggcaagaaaggccctaaccaggactctgtcatcctctgccaggtaccatcttcagatatttactctctgtctctgaatctttgctatgtgtttgatgtgctcagctcagatcaatctgctcaatttctcctcttgatgaggctgcgcacgccaattgtttggttttgtactcaaaagggttcagattagttcagggcttcagggtgttcttgagtccatgatttgagcttccatgagcttattaagccagcagttagttcactaaccttttttttttttgaaggaagagttagtagagtacttggta

SEQ ID NO: 34889 - DNA, 402 bp, Oryza sativa
  Clone ID: uC-osrocyp009h09a1
ggttaagggaataaaaccatggttaatttaacaatgtaatgggataacaaggggaaaagctagggcactggcataaaaacattttcctgaaccaatcctaaagacatacaaggtgttattttcagggttcaaaaggaaaaagggtgaattcaatgaaataaacaaaagggggatttactttttttcctcaagttatacatgggttccatcccacataaacagcatttgggggaaaaagagccttggacacaattattggcgatgcaaatttcagtcaaagaaggggtggttccatctattaacacagggtttaattggcaatacgggggttcatcactgagatttcctcaaagactggaacattggccgttcaaagggatggcttgggagggttttccccct

SEQ ID NO: 34890 - DNA, 530 bp, Oryza sativa
  Clone ID: uC-osrocyp009h10a1
ggaactgaactccggttcaccattttaacaaccaccaaactttccatatccacaagattacatgtttatttaagttacagtctacactctccactagagttcttaaaggaagtggcatgagcaaacatgcagcagcctccaacctgtaggcaaattataagctacagtaacatttacaggttcttcctacacctatgcacatactacagattgcagtggtgaaaaagtttagttttttcactactttagataccgtgtttgcacaaagttcgcttgtccctcgttgcaaacacacagaagcttgtgccctgatgttcttcatatggtcctcagatatctgcattgattccaaatatacggaacttgtgcatgtttggcagctttgctaccactagtaccagaactgcaatggtgttgaggaaaagcattggctgtttgtagtcggtcaagtgtgacgcgatcaggtacagcaccacaggtaccacagtcaagaacttcctattacgagtaagttgctgcccgttatcaat

SEQ ID NO: 34891 - DNA, 480 bp, Oryza sativa
  Clone ID: uC-osrocyp009h11a1
accgacataattgtcttgtctgccgctttgtagtttttattgaggattctgcttagtacaggacttgcctacgaaattcatacctaaaaaaccggagggaaaacttacctaggaaattctgaatccaaggaccacatattcgttggctactcaacaaggtagtgcattcacaagcatcaaacctttcagttttctacagataggctcgctaagtggcatgccttctacctgctacaaaaacctaaagtacacagaattagcctactcgaagatggcgattctcccttgagcaccatggtcgcttcctctaatataagcagctgcaaaattagcaaaataatttctctgctgaatgactccagctactatttcttcagaaccaattcgagtagtcaaagtcgcggagcttcctaaagtgcttctccacatcttgcctcgactttgcccactcctctctttggatcacagtggtcgcatcat

SEQ ID NO: 34892 - DNA, 343 bp, Oryza sativa
  Clone ID: uC-osrocyp009h12a1
accaaaaaaaaatccccccaccaataaatgaacaacacggggtccaagggagatttgaaaccagggccccattttgaacgggggaacatttttgggttccaagcaatagctgcttaaaatatgaatgtcccccgggggcccaaacagggtaaaaaccctctagggggggaaaaaaccccccgggggataaacccctcagccaattttccccaacaaagggtaaatccccccccgttaggggtaaaataatcccagcttttccatgtgaaggattttttggggggcgggtaaactttgataccccaggaggttttcctgatcaagtggggggggatcaactttt

SEQ ID NO: 34893 - DNA, 482 bp, Oryza sativa
  unsure (1)..(482): unsure at all n locations
  Clone ID: uC-osrocyp010a01a1
gacaactaaatgtagcacgtgaaaatgccatatatatttcacacttttccccccctaaggaagtaaggaacccattgtcattcatgaaaaaaccactatatcatgtcggcattcaacaatgtacagttactggttccgtcttttcataacaatgggcttaaaattcccccaaatcaaccccacctatgatacaacatatccagatcatctgagtgactcatcaaatctccttcacaacagtgaaaagaaaaatataccctcatttccctcgcaaaactggccttagtgtcaagagcaatgctttgcagtttccaaccataaaccccaaaacacgatctgctattataaactaatgtatccaacttcatatctaaaatacacttctcatttgttagtccctatgaatgcttccgatgttttctagaaataacatcacctcttaccgnacttcttgtttcaatattctggaagcaaagcagatg

SEQ ID NO: 34894 - DNA, 547 bp, Oryza sativa
  Clone ID: uC-osrocyp010a01b1
gtctgcttagttcatccagctattggtcttggtgtattacttctctcacatgccttccatgcacactccaccctttgcagtttcttagcagcttcatttcgcagtatcactcagaaaaaggatttgtataaatccatgggtgataatattattctgcccgaaaataaacaagatggcctcgagcaacttctgccgatggatgatagcccaacatctgttaaaagttttactgactgccaattggaagtatttgactgtcggcatgggatcatgatcttgcaccttcttgccactctaatgtttgcaccttctcttgttgcttggctacagagaatcggaatgggtcaaaattttccatggtttgtggattcagtactttgtgttggcactattctgcatggactttttggatcaccaccaaatggagctgtatatcttttcagctacctggaaggagagggcgagatgttggactaagctttctctaccttgtagctggatattattcaattgttagctcatggctcttgctccttatagggcgctc

SEQ ID NO: 34895 - DNA, 472 bp, Oryza sativa
  unsure (1)..(472): unsure at all n locations
  Clone ID: uC-osrocyp010a02a1
aatctaacatacgcaaactgatattatcacaatgttagccgatgacaatggaaagagtaatctaggtacaagcggatcattgacggtggagacaagacattggctgcaccacaacacccaccagtggcgccaacaaggagcgctatccgttataggacgagagaaaaagtaaaacatcacgatgtgaagtgaaactgaataattctagtagacgatgatgatgatggataggctccttaggacgcccgccgcccttagcgtcttgctgctcccatcttgtccactggaaggctcactcgtcatcgtcttcatcctcttcgctgccctcgtcgtcatcctcatcattgacctcggacttggacttgtcagattcctcctcngtcgcctcctcttcctccttggcgggtgccttcttggcagtgctctcgcccttgttgtaggcagcaatggccttgtgtactcggccttgagc

SEQ ID NO: 34896 - DNA, 501 bp, Oryza sativa
  unsure (1)..(501): unsure at all n locations
  Clone ID: uC-osrocyp010a02b1
tttctcttctcttctctggtggtgtgggtgtgtccctgtctcccctctccttcctcctctcctttcccctcctctcttcccccctctcacaagagagagagcgccagactctccccaggattcagccatgaagggggccaaatccaagggcgccgccaagcccgacgccaagttggctgtgaagagtaagggcgcggagaagcccgccgccaagggcaggaaggggaaggccggcaaggaccccaacaagcccaagagggctccctccgctttcttcgtttttatggaggagttccgtaaggagttcaaggagaagaaccccaagaataaatctgtcgctgctgtaggaaaagcagccggtgataggtggaaatccctgaccgaagcggacaaggcttcctatgtagccaggccaacaagctcaaggccgagtacaacaaggcccatgctgnctacaacaagggcgagagcactgccaagaaggcacccgccaggaggaag

SEQ ID NO: 34897 - DNA, 368 bp, Oryza sativa
  Clone ID: uC-osrocyp010a03a1
cagagtaatcgcgagctaattcaaaattgtatgttttcagcagatcagagtagtttcatgaccttcccataaatacaagtacaatctccaaatctatgacgataactccatccacgagcttgcttctaataatgatgccactgcagcttcaagctgacaactccatgaggttgctaccaagaacggctctgatgctgcttcaagctcatgcaacgggagcatgtgcatctataaggctagtatgtttctctcattgtcccaataattttgtctgcgtaactattttctcactttatctgtttggtaaaattttctcatggtagtacacttttcacatgatagtagaggaactacccccactaaaacac

SEQ ID NO: 34898 - DNA, 528 bp, Oryza sativa
  Clone ID: uC-osrocyp010a03b1
ctcccggatctcgcgcgccacgaccctcctcccccttccagaagcttctcgaagctccgttcctcaccaccccaacccaatccccactccccactccctccgcgcggatgagcggcggcggcggcggctcgggccccctcccctactcgatgcgcgatgtggacggccgcggcgcctacaacaacgccaagttccgccaccgatctcgcctcaagatggcctctcaggctctgtttaccaatagcagcaagtaccaatgtggaaagttcactgttggaaaatttttgagtcttttaatggtttctggcgtaatatacttacttgtgcacaaaagttcggatggtttttgtatccggtgagctccatgaaaaagtagggaatacacataccaagaaagatttttcaaaattcgtacattttggagaaagccaccaaggctgccgccacgtctttctccaaatgaaatctatagaaacaattcattgcttctacagtctcctcaatctggatggacactcagacagaaga

SEQ ID NO: 34899 - DNA, 464 bp, Oryza sativa
  Clone ID: uC-osrocyp010a04a1
gggctagcaacaaacaaatattaattccgcaccaaatactgtcccaaacaaatgagtagtccatatcccactaaacagtagtattacttcactcaaataagaaacaaatatgaattatgcatcaagcactgttccctgctgttttttagataatggattaagaaaccggcctctacatccaactgttccctgctgttgatcggtgaagtttcatttcgtcgtcagatggaagggctcgagaaatactgctgtcattgtttgcttggccagtaaatagaaggcgcttatttcatcctgttgaatatacaattggcgaactaaatctcctgtgttggttgaacctttattctgtttgttactcgggtaattacaacttggactttgttgattctgcttcacgcagatgtgcgtacatatctgcgatttcttttgcaaagtatgccttagcttgcggtcttttgatc

SEQ ID NO: 34900 - DNA, 395 bp, Oryza sativa
  Clone ID: uC-osrocyp010a05a1
acagtcaagtgatagctttattgattttgcgcctggacactaatgaatttctctcgagatctgagaatattcagcaatgttcttacaattttgtgaaaaatgagactgtaggtcgtgtagtacaatcggtgctaaaaccgaacccaactcattttcttcgtcgatgtacaagcctaatctatgtatcccaaatcaaaacaaaaactgcgagaactgtaattaagcgtgtcctctcttctcaggcattctttgggtttgttctcttcaacctggaatacaggaaaactcctcccaatgcaacaccagttcctgcaggttggcacataaagaaatccaaacaaaaattagttaaacacaagaacagcaaaactttcagctgctgttaagttctgaag

SEQ ID NO: 34901 - DNA, 438 bp, Oryza sativa
  Clone ID: uC-osrocyp010a05b1
tttgatgcacgaagctttgtttgacataaacctcttctcaatactcactatactgtcatttctgctgtctttgcctctgatgctgttctcagaaggggtcaagttcagcccaagatacctccggagcactgtgagtgtttgaaaaattcagataaacagacactattcccaaaaatatatgaacaaatggaatgtcctgtttggcttgcagggccttaacctccaagagctgtgtgtaagagcagcactagctggcttttgcttccatggctaccagaaggtgaggactgaggaaacagtcacctcttctttgggtcaagaaagatttgtgcttgatgattcattgacctgtaaacaaaaggatcattctgtgttcttttttgaaattggcagctctcctacttgatcctggccagagtgtcacctgtcacccacttg

SEQ ID NO: 34902 - DNA, 435 bp, Oryza sativa
  Clone ID: uC-osrocyp010a06a1
caacgaaacagagtcaatcatcgtatacgaaacattaggaacaatcaccaaatttgttacactactcaatatgttttgcatccaaaatggttaagcatcgatcatcacactcgagaagaaagtggaaaagaatgggaaggagacctatgcaaggcgttactatgccgcctgtagctcaatattttctggaccgtgtactctctcctgacaaaaatgaattgagactacctacaagcaaactaaactactactagtacgtttcattccagcctgctattttccagcttattcagcaaccagtggaaagcggctcaagttggatggcaattttcatgtccaattcacatctattgtcttgtcttctatgggtttaacggctcatctttcccagtcatctttacagcttttgttgatctgtggagatcagagacaacc

SEQ ID NO: 34903 - DNA, 433 bp, Oryza sativa
  Clone ID: uC-osrocyp010a07a1
gagtaaagagacgtccgtgttatgctagatcactacgaaccggccacaactaaggggcgatataagcacgctgttatagtctaacagaaatttactccagccagatttggggtggaagcatagccaaacagagcaggtaataacagctctacaacgagaagcaagcgcggccgttttagtgcaacatgattacagataattacatcgtcagttcgccgatgcacgcgaagacaagtttgctcttcggtgacccactctgctggccctgagcttgaatgttgaaaaccacattcattcccaaccgcaccttaccgaacactacgtgctaccgcgccaaccagctggtggacacagcggtgaggaaaaactgggacccgctagggtctctcccagcattggccatggacaggaggcctggtgcggggtgcttgat

SEQ ID NO: 34904 - DNA, 357 bp, Oryza sativa
  Clone ID: uC-osrocyp010a07b1
ctatccatccattttttttttggatccttcattcctgcccggcggcgtgcgagatataggcggaggagattcgagatggccgtgtgcgggtggatggaggatcccggcgagccaggaggtcgatcatgtcttggcctggactaggtgtgcctctggtatcgtgctcgattccgccaccttggtccttgtccagtcgaagaaattaaaggcggattggactgattggacccacaaatgtatacttcaccttcagattgatagcaaaccctcaaaacaggttgggatggtacttttaagaaagactgttcctaatatgggtgacaacttccaagaacttttcacaggatagaacggctc

SEQ ID NO: 34905 - DNA, 428 bp, Oryza sativa
  Clone ID: uC-osrocyp010a08a1
gggccaaaccaaaatacattacgactgggctgaatccagcaaattatgatatttttacccgatccattttaacatgacagagatcaaatgatgggtcgatcaggggtccataaaccccaagaggacccggttttcatagacttatttgacattattaacaaccccgacccccataattggcgaccattttgccgacatgaacgatttcataggactatttggccagcagtacgaagaccccggaaaaggtgcccccaaattaagaggccctaaacttaatatatagttttgaacataagaacgggggtggtccagattcagaatttaattggcaaacacaaacaccggaatataatttgggaatcaagcaagccatgaaattagttggcccccattattcttcgggtaaacatttattaacgaccacg

SEQ ID NO: 34906 - DNA, 479 bp, Oryza sativa
  Clone ID: uC-osrocyp010a09a1
gttgcaataaatttgattgtatatagtaccctgtcaccgaaaaaccagctgcaccagtactataatataaagtgaaacagatctctttctctctatttatatcactctgctatcttttcttatctcatcaatgctatgatatcctttttcttttctgtgtaaaaaggtgaaagtagaaattaaggagaaaaagaatcttcagttggtgtcagcatgtagtggcatcctcctcttttctactgagcaggagattgtgtaatgtcaccaagcatcttcaatgcagggcaagggttgtctattggtaccatgtggccagctcccagtatccagtagaatttgagattcttgtaagatttgaggaaggcttgggtgccagctgcttcaccaccactgcagtagagcggcactctgcgtgagtttgtgaagttcttcagaccatcccacttgagtttctgaatccaatccaatgttcccttggt

SEQ ID NO: 34907 - DNA, 452 bp, Oryza sativa
  Clone ID: uC-osrocyp010a10a1
aatatcacaggattataatctcccttataatatttacagaacttacacaccagttttatagcttcacgttattccttaagcaccattaaggttttgactaaacttgagcaaactactaaagagacattgtcaaatctttttttttcttgaaacctatgttacatcaatttgttcttcaaaatgcttgtgaagaaacagttttgacaccagcaacaaatctgttgcatcaatacgatgaactagccagtagccaccattttttcagctacgaccatctccaacgacaaaacgatagccaccaacgcttcaatggtgaaaggctaaaaaatccacctttcagccctagcctccctcctaaaacccagtcttctgatcctgctctggattagctgaagacagtaacttcgggtgaggctcgatctttttctcgtcttcatgggatagagcaccat

SEQ ID NO: 34908 - DNA, 380 bp, Oryza sativa
  Clone ID: uC-osrocyp010a11a1
ggaaaaccggggaaattgttttttttgggggggggggcggggcccaacccaaaaggaaggcgttctttttttttttttccctctctaggggggggcccgagtactctctcttttggggggggaatcccccttgcctcaagcaaacaaaaccttttcgggcccaaaagggggccccctttgggccaaaaaaccggggaaaaaccggggcaagccaacccccacccggggaaaccccccccccccaaaaacgggccattgcggggcccaaaaagggggaaccgcctaaaatggccggttttttttccccccccccccggggcggggggaaccaaaaccaacaaaaagggggggggggggattgttcccctaaaggggggggg

SEQ ID NO: 34909 - DNA, 306 bp, Oryza sativa
  Clone ID: uC-osrocyp010a11b1
ctgacatgcacttttgtttgctgaccaacaaacccaaccccgacccgcgcctgcgcccgccagcgaggtcgtcgccggcgcctaagctctcattcatggcggcggaggcggcctacggtggcggtggtgggtaccggatgctgccgcaggcggagatgccgatcggtttccggttccgacccaccgacgaggagctgctgctctactacctccgtcacatggctatgttgggcgccctagccgcagtagtcaggcttgtggtccaactcttccaccaacattcgtggtgacggaaccagtcacctt

SEQ ID NO: 34910 - DNA, 245 bp, Oryza sativa
  Clone ID: uC-osrocyp010a12a1
aaaacacaggccaagtttaccttctgttggaacgccaaaattgcatatcccagcatccaacctaaagaaaaaaaaaaccatgttggatacatagataaggggacattttccccagtaacagaagaaaagcctagttcatcctccggatgagctcgttgaatgaaacctcacgggtggcggtatcaccccccttaaaaaagggggtccttttttttttgaggccccccgggggggcctttaacttg

SEQ ID NO: 34911 - DNA, 302 bp, Oryza sativa
  Clone ID: uC-osrocyp010a12b1
tcgtggacgcgtgggtctcgatctcgtgttctctctctcgcaggactcgatcgcgatggcggcggaggtggcgaaggcggcggtggtgccggagtcggtgctgaagaagcggaagcgggaggagcagtgggcggcggacaggaaggagaaggcgctcaccgagaagaagaaggccgtcgagagccgcaagctcatcttcgcccgcgccaagaagtacgcccaggagtacgacgcgcaggagaaggagcttgtgcagctcaagcgtgaggctcggatgaagggtgggttctacgtcagccctg

SEQ ID NO: 34912 - DNA, 469 bp, Oryza sativa
  Clone ID: uC-osrocyp010b02a1
gcaggaacataccccccttgatataaaagtcttgaaaacaagttcacacacaaccagaggtactctgcccactagttatatcacttccatcatctgacatcacggtaacagttacatagttgaaatgcagcatggatcatcacacaaattccttggaacattcgtgaacaaaggcaataaggaacaagagttctggagcatgctgggtcaacttaacctgctgtctcggtcttctccagcgtgttgtagttgagtaacttctcgatgaggtcaacatgggtcatgagcattcgccggcagcagtaacggaccaaacccaatgcatccagagcatccccctctgtgtagccagcctggaggagatccaggtacagatcccacttgttcccaatcaccttcccgcaggtgaagcaccgcaccgggatgatcatctccgatgcgctcccgccgccgccgccgccgccgccgg

SEQ ID NO: 34913 - DNA, 499 bp, Oryza sativa
  Clone ID: uC-osrocyp010b03a1
gtagactcaaaaacattggtttctcatcagaaagcaaatatgcagctggcaagtaatcccaacaaactattcagaatatctgccattgacacaggctaggatgttcacgatccacaactagatagctgtttacttgttgtctaaataaacgggcagcaaaataagtgataatctctactcggcagcagcgacctcctgcccggccatggcctcatcttctgcaggcctatcaagcttcgtaccgatgtcctccttggcatagtcaccatgcacctccatgagcttccccaggtcaaatttcggggcctttagaatcttcactttgcggacaaacacattctgaagggggaaaatactggatgtcgccttctcaatttccttcccaataacttcaggaatgaactttgaaactagctctttcaaatcacagcttgaagcctggttggccatgatttcaaccatcttgcgacgaatctgtctgatctgactcgcttgagca

SEQ ID NO: 34914 - DNA, 430 bp, Oryza sativa
  Clone ID: uC-osrocyp010b05a1
tttttgtttttaaaggcgctgggggcaccacaataattaaatttctcacgcaattcatagttgtcatagagctcccaacgcagttcttcaattcaaaaagactgcccaaacagaccaagggtatcatcatagcagcaaagttttttaacacgcaacatcaaagagacactaatgcaataagataacttgaagcgcggatcactagcaaatttggggcttagtcgacctcctcgatcttggggccagcaccgctgccgcctgccgggggagcatcgtcctcgtccatgccgccggccatgtccgcgccagcgccctggtacatcttggcgatgatggggttgcagatgccctccagctccttcatcttgtcatcgaactcatcagcctcggcgagctggttgccgtccagccactggatggcctgatcgat

SEQ ID NO: 34915 - DNA, 330 bp, Oryza sativa
  Clone ID: uC-osrocyp010b05b1
aacaccgtcttccttttctttcgtctcattggcaggaggtttagcgatgcttttgttcagagtgacattaagctctggcccttcaaggtgattgctggacctggtgacaagcctatgattgttgtccagtacaagggtgaggagaagcagtttgctgccgaagagatctcctccatggtcctcatcaagatgcgtgagattgctgaggcctaccttggcaccaccatcaagaatgccgttgtcactgttcctgcctacttcaatgactcccagaggcaggccaccaaggatgctggagtgattgctggtcttaatgtcatgcgcattatt

SEQ ID NO: 34916 - DNA, 379 bp, Oryza sativa
  Clone ID: uC-osrocyp010b06a1
agttccaactgaacactaataaatgtgcctttatttggttgctccgtcattcaatccatcaaaacgagatcgaaggaaattaaattcagctaaaacttcagacctaatgtatgtactttatcctcgttaggaccacagaccaaacaagggaattcgacaatttcggacttacaaacatgtccagttttatgaacccctttaaataacacgaggttaaagattgcttccccgagatagaatttgatttatattaactccgaccaagtgaagccgaatatcaactattagggtgtgacttgacccggcgctgcatgcaaagcttccactacaggagttgcctgggaacacaatatattgtccttgtctttgacccttggat

SEQ ID NO: 34917 - DNA, 430 bp, Oryza sativa
  Clone ID: uC-osrocyp010b07a1
ttatttggttttttaatattatttgggttatacaggaacaataccccccttgatataaaagtcttgaaaacaagttcacacacaaccagaggtactttgcccactagttatatcactttcatcatctgacatcacggtaacagtttcatagtttgaaatgcagcatggatcatcacacaaattccttggaacattcgtgaacaaaggcaataaggaacaagagttctggagcatgctgggacaactaaacctggtgtctaggtcttctccagcgtgttgtatttgagtaacttctcgaagaggtcaacatgggtcatgagcattcgccggcagcagtaacggaccaaacccaatgcatccagaggatccccctttgtgtagtcagtctggaggagatccaggtacagatcccacttgttcccaaaaacct

SEQ ID NO: 34918 - DNA, 500 bp, Oryza sativa
  Clone ID: uC-osrocyp010b08a1
ggaaaaccaaaatttagttgctactattatttatttctatattttacacaccaatctaaaatactattgttcctcacaaaattaaagcttgcaaagtcacaaggatacaagatccacacacacaatcccacaaactttacacaggcactttgcaggcttgcagcacaacgcccagttgcagctcaaaagcaagcaaggcaaacggacgtctggcccacatgtcagcctcacagtgaaggtgaaacaccatatggcatagtgcagagttcagacttcagacaagctcaaacattcagagttcagttcagcaagatcgtcagtcgagcagaagagaggcctgcctgaccaggtggcctctgcgctcgaacacctgcctcctgcgcctctcgaggtccctctccacggcggcgatctcctccatctcgcggtcgcattcggcgatcatcgccgcatactgcagctgcagcgccatggacaggggcaccatgtttctgctgctg

SEQ ID NO: 34919 - DNA, 507 bp, Oryza sativa
  Clone ID: uC-osrocyp010b09a1
gcggctcggagcgcgggggaaatggcgaggctgatcggcgatgcggataaggggaggaggtggacgggtgttcttgcggaggttgcgtctccctctccccggcgggagctcgccgcggcggcaaggacgacggcgcgcgacgtgttcgcgccggtgactaacccgacgacgacgccggcgacgaacccggtgacggtgcccgcgacgaacccggcgatgaacccggtgacgccgggcatcgtcaccgtgccgtcgaccaacccggccacgggatactccaacaaccccaacctcccgccgctgtacccggagccgacgccggtgacgatgcccgacccgacgacgacgacgacgccgacgccattcatgaacccggtcaccgcgccgaccatgccatccccggtgaccaaccccgccacgacgccggccgtcacaaacccaacgacgatgccttacccgtacccgccgcagcaaggcggcgtcatgccgacgactccgacttaccag

SEQ ID NO: 34920 - DNA, 51 bp, Oryza sativa
  Clone ID: uC-osrocyp010b09b1
tcgttcacgcgtccgcccacgcgtccgcggacgcgtggggttctagatcgc

SEQ ID NO: 34921 - DNA, 124 bp, Oryza sativa
  Clone ID: uC-osrocyp010b10b1
gaccgggccggaattgctgggccgacgcgcgctgtagttttataccgagagcggccgttctagaggtgctattgtttcatacgcgggcctgcgacctcttaggactgttattgactgacctgta

SEQ ID NO: 34922 - DNA, 426 bp, Oryza sativa
  Clone ID: uC-osrocyp010b11a1
gtcagcaggaaactggaagtagatacaacagcagaaaaggatatacctctgcttccccggttaccatatggaaagatttttacgttacagacatacaagttacagcacaagcagttttcatatgcttgaacatctaatgtcagcggtagcacattaaccaaaagtaaagtaaaaatcacatcttgggagcaagccccgtatcatgcttgggaacatcagctaatatcagtcttaaatcacatctcaggaaactgaccggcaagtcatcctttcctactcgctgatcctacagcagctgcttgcagtgacagtcatggtgtggccttgtcagcaagtgagtgggcagccgagctccttcgccgccgcggtgaggaaggcgagcgtcagcccggtggcgcggcggctgtgggcttcccactctatgca

SEQ ID NO: 34923 - DNA, 266 bp, Oryza sativa
  Clone ID: uC-osrocyp010b12a1
accaaatacttgttccaaacaaatgagtagtttctttttttcttaacatgtattattacttcactcaaataaaaaacttaaatgaattatgcatcaagcactgttccctgctgaatttaaaacaacggattaagaaaccggcctctacatacaactgatccctgctgttgatcggtgaagtttcatttcctcgtcagatggaagggctcgtgaaatactgctgtcattgtttgcttggccagtaaataaaaagggcctatttcatc

SEQ ID NO: 34924 - DNA, 346 bp, Oryza sativa
  Clone ID: uC-osrocyp010c01a1
agtgttattgtacagttggagcacccaccatcgaacttataaataaaccttagggctcccatgggccaggggatatacatcgaactggaacagttttaccctgtgccattcaaatgctttggcggacggagattggttttatcgcggaaatggaacgcatgcactgtcaagctatccatatagatttaggggacggcgcccaatgggggcgcgggggggatcattcgcattgcccggctccaaatctgataggcatcaccatccagtgactgaaagtggatctatgggcagtaagtctgttccaactcgttcaaacagagtatatccacctaactggtgggagtga

SEQ ID NO: 34925 - DNA, 475 bp, Oryza sativa
  unsure (1)..(475): unsure at all n locations
  Clone ID: uC-osrocyp010c02a1
actaattcagtgtcattgtacagttcgaacacgtaccatcgaacttattaatataccttagtgctcccattggccaattgatatacatcgaactggaacagtttttccctgtgccattcaaatgttttggcagacggagattggttttatcgcagtaatggaacgcatgcactatcaatctatccatatagtttcatatcatggtgaaaaatggtggcgtgaattggatcatccgtattgtccgtctccaaatctgataggcatcaccatagaatgactgaaatttgatctatagccagtaagcctgtgccaaccgttccaaacagagtatctccacctcactggtgtttttgagcttttgatcgagatgcattcttcctcatcgtccaaaatgctgcgcggtaccgattctgcatcattgatttcatatttgcagngtatgtggtatctatcattttctccacctccatcacaa

SEQ ID NO: 34926 - DNA, 488 bp, Oryza sativa
  Clone ID: uC-osrocyp010c03a1
gatataattcataaatacacaccatttggacttttatattgcttttcgaagcacatcaacacatattacagcacacgctgctagataagtcttgtacattatatttattcaaccccgatggcctaaacgcacgtgcagatatatacctagtactaatttactgactaattatatgctatgcgtacatgcacgtgtacacgacaaaatctggagttttatgcatgtggctgactataggtatcagtaggcagcaacagcagcagcagcatcggcagaggcgagtctgggcttgttcttcaacgggcagattgcccaggtggtaatgccacagataccattcttgttgaggatatcccgctccatgcggatataaccgtactccccccatgttttaccccaagagttcttgatgatccagtattttatgttgtccgtcgtcactccataccccaccaccagtaccacatggttatccacattcggattac

SEQ ID NO: 34927 - DNA, 285 bp, Oryza sativa
  Clone ID: uC-osrocyp010c03b1
gagacaaaagatggactctgcaatctgcacctcaaacggttggtcataatatgtacaatggattggattattgctactcataaccataaccatggttgaacgatggaggatgaggaggggatccaagatcatccccttgattcctccatggttttcttggacaaaaacaccacactcatcatcatcataatcctcacaacaacaacaaattggggagagatagaaagaggagaggagctttacaaactgaccactagctctactgtccttctcttttccttggga

SEQ ID NO: 34928 - DNA, 499 bp, Oryza sativa
  Clone ID: uC-osrocyp010c04a1
acactgatactactacattctactgcaagagtaatttcatctcatctcaccaggataattacagtacaagattatttggaacgacagtagtattaaccaactcgttctcgctacaacaatccaatacaattgaatacagaggttccagctgtttaaatacgacatggcgaaaacaacagttgaatgcatgtccagtcccagcagctgtttgtccggaatgctaagatgtaacacggcaaaacgaacaacaaatgaattcttcaaaaatgggcgctacactgctactacaacatgggcatcgtcaatcgtcattgtcatcttctaacatgggcatgtttcttccaggatttgggttgataggtcctctgtttcatgtttctctgtgagatgtagttggcctcctcctggaaggggtttggtccaccgtagtcttcctttgaatttctgattttcttggtctttccacggacatactcctcgtcccattcatctaacacat

SEQ ID NO: 34929 - DNA, 359 bp, Oryza sativa
  Clone ID: uC-osrocyp010c05a1
ggaagaaagaagcattcggattagcacattccaatttgcaacctaaatgaaatagtactaataatcaagcaaaaaaaaaagggaagggagaaaccaaatgggatggatggatggagtactgactcggtctggcggatcttgtcaaaaaaatgggcgtcgaaaacaccggcggcttcggcaaaggggaccaccccggaaaagtagtgcttttcgacttgggcgagcgcggcgttgcgccgccctcgttcctggccgcccgaccgggttgtcgtcaccacttttagtatttatcttgaccggttgcctttttccttcttggggcccacgttcactaccttgccgtatctgaccccggccgc

SEQ ID NO: 34930 - DNA, 364 bp, Oryza sativa
  Clone ID: uC-osrocyp010c05b1
ttcatgcgtccgggccggcgccgccggccgacggttggtgaggagaccgactgggcgagacaggagaggaggtccggcggccggcggcggcggcgacggcgactactcgagagcaggggagcaaggcggcggcggcggcgactaccgcggggccgatgtgcacttggtcttcggtgaagattgggaagtcgttgtccccgtaggattcgtgcctcccgacgatgcgcctggcttgccgccgccgcggagatcgtcggcaccatgaagttcttcgcggcgcccgaggggcgagcgggcttgggcgccgtcttcctcgtcgccgcgtcacgctgcccgctgttctccttcttcgcgctacttggtc

SEQ ID NO: 34931 - DNA, 484 bp, Oryza sativa
  Clone ID: uC-osrocyp010c07a1
ataggatcaaaacatttctattaccacaactttttaaggatggaattgagtagcaatactttcaccccaaaatacagtttagcgacaatatcttagaaaagccgcttgctttgccgccatggctggcaagctgagcagagcagctaacacaaagaacacgagatcactataaaccaaacggcaacgaacgaagaaaatacagggtcttttttgtctgaagatacacgaagcggttcgttttcttttatttttagtctcctctcctcctcgatgatgggtgtatggcaatggcaatggcgatgggatcttggcttagttgatgggaaggggctcgccgttccactccttgaggcagtcgagcatggggtcgatgagcttgccctggctgatgccgaggaacaccttgttgcactcctcgccgggggacttgagcttctcgccggtgaggaatacgcagccgagctcctcgcggacgaagcggtag

SEQ ID NO: 34932 - DNA, 508 bp, Oryza sativa
  Clone ID: uC-osrocyp010c08a1
gtctggtgcatcgagggcgccgccgtgatggagtggctcggctcgcgcggcgggtggcgcgaggtcggcccctcccccccgggcctcaaggccggcaccgcccgcgccgtctgcgtcggcggcggcgagcgcgtcgtcgtcaccggcgccatcgaggactccgacggcgggtccggccgccacgccctctgggtgttcgacgtaaagaccaagaactggaccgtggttcgcccacctccagagttcgccggattcgccttctccgtcgccgccgtccgcatctgatccgatccgatccgccattgacgacgaaccccgccaagatccaagatctcgatctggatccagctgctccgcctcaaggagatctctactacacacaaccaaatactactctactctactagaacagtagtatgtgcacaaaagaatcacaaggagaagagaaggagaggaagctagtggtgagtttgtgaagctcctctcctctctctatctctccccaatc

SEQ ID NO: 34933 - DNA, 534 bp, Oryza sativa
  Clone ID: uC-osrocyp010c08b1
tcgttgacgcgtgggcggacgcgtgggttcggaggcccaccaattcatctggagaaagctgcgctcctccgcctcgccgccgccgccgccggggaggatggccgaacggcggtacaccgagcaggaggaggcgctcgagatcagctcactccgccgcatcatcgccgcctacgccaactaccacgatgctgcagaaagggatgtcaagagatatgagcgatcattcaaaaggcttcctcctgcccacaaggaacttctttttaaccttggtctgaagtaccaaaggctgagatggtgtatatccatgaatgcatcattcatcatggacatgcttgaggcatttgagcctcctttcgacatgagtcagcatgtagatatggatggtcatgattgcgcagagaacatgcatgacattgtcatgcagattgtgctcattctgtcgataggggtgattgctttagaagttctatctctgtaagcaattcccaggtgcatgaaccagacggttgccccaggaaagacgaccagactcat

SEQ ID NO: 34934 - DNA, 461 bp, Oryza sativa
  Clone ID: uC-osrocyp010c09a1
aagaaccactgaatccatctgcctatcattttcaaatatactcaacgagcagtgccaaccaaatttagatatacagatacgatatcaaacggctgagatcacgatccaaatgctaaacctttgtagcttcaaatccgctaaaaagccttcaaataattgtcatcatgatacagcaaatagtccgaaataaaaagaaaagctaaaactcctcaaaaccgtttaaatttctgactggttaaccaagtgactagctgatataaaaccctccacggggacaactatcagtttcgcagcataggcaagaaaccttggttgctttaagatgctgctggggtacatgaagacgcggaccttcttgcccatggaggtgggcgggaggttggaccggaacttggcgcggacgacgccggagttgccgtgcgggcgggtgaccttgccccagatgcagcggatggtggagt

SEQ ID NO: 34935 - DNA, 385 bp, Oryza sativa
  Clone ID: uC-osrocyp010c10a1
ggggggaacccccccccttttttaaaaaagggggggggaaaaaaaaaaaaatttggggccccttttaaacccgggggaggggggttaaaacccaaaaaaaaaaaggggggaaaacccttttaaaaaaaaatacccccggggggggaaccaaaagggcccccccttttgggggaaaaaaaaaagggggggggggggaaaaacccggggccccccaaaaaaaaaaggggggggggaatgaacccggcccaacccaaaaatttaaacacccccccccggggggccccctgcctttaacacccccaaggggccccagaggggggaaaaaagggctttcgggtttcccccaaaaaaaaaaagggggcttataaccccggggggggggggg

SEQ ID NO: 34936 - DNA, 472 bp, Oryza sativa
  unsure (1)..(472): unsure at all n locations
  Clone ID: uC-osrocyp010c10b1
tcgttcacgcgtccgcggacgcgtgggccgcgcttcctccagggatctgttaatcaaaatagtattcactcacttgtaatgaaaggtgcacaaggagcctcaaataattcggcaaaacacaagaaaagaaagtctgctgtgcagagatggaggccaatctccacagaagccgctgctccaaaagctgaccttaatgagatgtcaggtcctgtaagcaaacaagtggaagagaattcagcctcagatggaacaactaatgttgttattgaagtttccacctacaacgcatccttgccagaaaataaattagccacagaagatactatggaggatgctagcttcaataaggacatagataggtccaatctatctgaaaagtgttcctcttttgttcaggtagatgctcctctgtgcgncttgtgaaaggaaaaggtggaaccatgcagaagcagattgaagatgaaactggggt

SEQ ID NO: 34937 - DNA, 486 bp, Oryza sativa
  Clone ID: uC-osrocyp010c12a1
aagctgatatcagaggaaacttgtattgtatttaaccattacaacagggccaatgcaaactcaaagagaagttcaacaatagctaagagggattccattgtggactagatattttagatcatagaatagaagtggtacactgaaggcttcaacttccgaacactgagaccagaccaaagattcaatcccatgtggccatcgtgctgacaccaactccttacaggaatggtggaagaatcacccatcgccgaggatacttcggcctcccttccttgccatcgaacaacttctttagacggcggtgctttccaagtgcccagttggtcatgatactcgctgccacaacaaggaagatgtaacctgccacagtctgtgtggcaatgttgaacccaagccattggtagatctcagtggtatagtttgcgcatgtcactatgttgaacaggaagccacgaggaatctgatagccaccattaccactcggac

SEQ ID NO: 34938 - DNA, 469 bp, Oryza sativa
  Clone ID: uC-osrocyp010d01a1
gaatgagtctccaacatacttcaaatcatagaccacaccatacagcaaacatagtataaacattgtcatagagagtacagctgatagcagcttgtaatattctagcattactttggtagcatccctctacaaaacatagcagacatcaccagctcttcatcttggccatacacattcaacatggtttgctagtgacagaccacactgaccagaacatttcgtctcctcagtaggcaccagctgccatgagcagctcatcaaggctccagatgccctcgttgcttgccccgtcttgtgtagcatcattttgcagaaggttgtccattgattcatctgagctgctctcaacataaggtaatggcaaatacttcatctcgggatcgaaggtgggcatgttttgtgcgagattaggcatgccatttccctggggcacggcgataccatagttgttcctcattctctttggcgc

SEQ ID NO: 34939 - DNA, 500 bp, Oryza sativa
  Clone ID: uC-osrocyp010d02a1
gttcatggaaagtcgcatgctaccaaattttactgaatcaatgaagccccttatttcttgttgcacaacacatgaaacaagtacaaataaatgagaacaaattctacttcatagccatggtacgaaacatagtgggctccatttttaaaatttcctttacgaaggaaattaagggctggcgtcaccagatccaactccagctcctccaccaccgccactgccaccatattggccttgaccattaccgccaccattgccaccagcatttgcatttgcatatggtccatagtagtagttattagcagtgctagagccatagcccgtaccactgccggacccatgaccattggatggccagtaaccaccggcttgtccggcaccaccaccaacaccagcaccgttagcactggatgacccaccataaccatagtatccattttgtgaagtttggcttgagcctgagcccgtgccgtatccgctaccagatcctgatccaccgc

SEQ ID NO: 34940 - DNA, 489 bp, Oryza sativa
  Clone ID: uC-osrocyp010d02b1
tacacacccaaacccaacctcccaaaacacccacccggtttaccagagatccgcgcccgccacttgtaaacctgctgcacccatggcgcccagagcagctacggtggagaaggttgctgtggcgccacccaccgggcttggtcttggcgtcggcggaggtgtcggagccgggggtcctcactacaggggcgtccgcaagcgcccgtgggggcgttacgcagcggagatccgtgaccctgccaagaagagccgggtgtggctcggtacctacgacacggcagaggaggccgcccgcgcctacaacgccgccgctcgagagttccggggtgccaaggcaaaaacaaactttccgtttgcatcacagtcgatggtcggctgtggcggcagccccagcagcaatagcacggtagacacggtggccgcggggttcagacgcctatgcgggccatgcctctgccggcgactctggacttggatttgttcaccgcg

SEQ ID NO: 34941 - DNA, 459 bp, Oryza sativa
  Clone ID: uC-osrocyp010d03a1
gagatcaaatctattctggtcatcgtcaccatatccatggtaatgtacccatcaacttttggaacaactgaacaagcacacatattttcaggacatgcatgcatgaccgtataatatacgtatacggctacagagaaatacgtacacggctaaaaccttacacttaattacttctcctccatattatcacgtagagtaagtacgtacatgtttgtactatggcgtacaaaatgcaaagaacaccccggaaaaaacgcaaattagatagcagtacatactagcggccagcgtgcatgtgcagcggagggatttaatacgccgccgccgccgccgccggcgcgccgccgtggccgccggacttgtggccgacgaccgacgacagcgcgttcctgacggccaccgcgacgccgcaccctttcacgagccccctctcgcactcgcgctccatgccgaagcacc

SEQ ID NO: 34942 - DNA, 498 bp, Oryza sativa
  Clone ID: uC-osrocyp010d04a1
gctgatggaacgagtagatattgtatatttcctcgtgtatgttgacagtgagaactgtcttctccaaaataacagcaacaaaaataaccccatgcatcattacaatccacatatcaaagcttgaactttatacaagcacacggtcaccacaagtaactgtattctgccgtattacctcagaaagcagatcaccctaatgcatttcaatctcctgcacaggaatatctgtgtggtcagagcgacgagtatcagatgttccagatgagctcgctatctcagatttgcacaatgggcaaagtgcattaatcttcagccatttatcaacacattccttgtggaaacaatgtgtgcagggaagttcacgaagctcatcattgtgtgcatactttgcaagacagatgcaacaaacagcatcctcagcagatagtgaccgctccttgtcagtccctgcagctactatcccaccatcttggccttcagcttcatttcctgaactat

SEQ ID NO: 34943 - DNA, 524 bp, Oryza sativa
  Clone ID: uC-osrocyp010d04b1
ttcttgttacatacacttcaaggctcctctcagaacaattcaactgagccttctgctagtgcatcagagcgtcgaaggaatgctgcacgaaatgcagtgctcgctaatccaaggattaatgctctttttgaccacttcaagatggccttggattgtttctttgctgtgtggtttgtcgtaggaaatgtgtggatatttggcgggcgttcttctgctgccgatgctccaaacttgtacaggttatgtattgtgttccttacctttagttgtattgggtatgccatgcctttcatcctctgtgcaatgatatgctgctgcctgccctgcatcatatctgttatgggatttagagaagatacaaacaatacaagaggggctacctcagaatccatcaattctcttccaacatcaaattcaaaaccaagaaacgccgtcatagttcaggaaatgaagctgaaggccaagatggtgggatagtagctgcagggactgacaaggagcggtcactatctgctgaggatgct

SEQ ID NO: 34944 - DNA, 433 bp, Oryza sativa
  Clone ID: uC-osrocyp010d05a1
aatatgaatatgaaggccagggaaaatggcccttttatttaacacatgtagtttggagtagtactggagtagtagtttgcaataataatgaacaagattgccttcggcatttgggggacaaaaagaaaaacgaaaacttgggttacaaacaaattacagggttttttatgggctgggggaaatactcctcctaatgggatatatgggggattttaccagccgtatactgggttttgtacctgaggcggcaagagggggaggtccaagctatgttgcttggtgaaattgagggggccgggtattgctccggttgacagtttggggggctcattgccagggaagcagtagtgggcgaaggccaacccaccatttaccatgtttgacatgttcgggaacgaggctgatttttccatcttattgggtccacttttac

SEQ ID NO: 34945 - DNA, 477 bp, Oryza sativa
  unsure (1)..(477): unsure at all n locations
  Clone ID: uC-osrocyp010d05b1
tttgttgtgggggtgggaggaggtccaggaggccgaggagtgggagcccatacggatggtcaaggcgcgcctcagggagatggagcggaggcggcagtggcaggccaccgacatgctccacaaggtcaagctcagcttgaaatcaatgagctttgtacctgaagcatctgaggaagttccaccgctagatttaggtgaactcctggcatatttcctaaagcaatctgggccattgtttgaccaacttggtataaaaagagacgtgtgcgataagctggtggaatctctgtgcagcaaacgcaaggaccaccttgcatataattcatttccagcaagtgaaccatccgcattcagcaatgacaatgctggtgatgaacttgacctaagaatagctagtgtcgtgcaaagacaggacacaattatgaaggtggattttggaatgatgggcatanatatgaaacagctgacaagaggcat

SEQ ID NO: 34946 - DNA, 379 bp, Oryza sativa
  Clone ID: uC-osrocyp010d07a1
aaggaattcttaccctcctcggtttattccaattgggggccggcttgatccgttctagggaacagagcccaaaaaggaacccccccccgggggaaaaaccaccccccgggggggtcggcccccacaggcccccaaacaaaaaccccgaggacccaaaccccggggagaaatctcccccccgggggaaaaaaagagagaaggggcccaggcgccagctaacccctcctgagcaagacccctaccggcggaggccgggtgagaaccccacccaaaggggccgccttggggggcgccccccccgggggggacggccccagaccaaccaccgaccaggagggggggggcccttgggcaaccccccccacggggacccccgggg

SEQ ID NO: 34947 - DNA, 475 bp, Oryza sativa
  Clone ID: uC-osrocyp010d07b1
tcgtactgcgttcttcttctcgatttatctttcttggtttcttgatctgtagcttattagcggccatgtgcggcggagcaatcatctccgggttcatcccgccgtcggccgctgcggcggcggcggctgcggcggccaagaagcagcagggcaggagggtcacggccgacgtgctgtggccggggatgctgcggaaggggaaggcggcggcggcggaggagggctttgaggccgacttccgcgagttcgagcgtggcatgagcgactactaggcggaggggggcggccgcgaggaggaagaggacgacgacgacgtggtcgtggtggtccccccgacggcggcggcgaggatcgtcgtccgtgccgcggccaaggcggcgcccccaactgcagaagggatgttgactacaaagcttgccaacatgatggacctactgctagatcagcaaagcacaagaggaaagaatcagtacag

SEQ ID NO: 34948 - DNA, 497 bp, Oryza sativa
  Clone ID: uC-osrocyp010d08a1
ggcaatgtaatagctgtttaattcagaaacatgttaaggctcaaagtacagtaaaccatttaactgtgaaatcataaccaaagctcaataactattgagctccggaattacaccttacatattgggatagcaaccacagccctaaatacccatcgatccatccaaagctcccctagcttatgcaaatcttgttaaaatttaggccttgctggcaatgttgctggacagccagtccaggccctcgtacaatccctcacctgttgtagcacaagtgctctggatataccagtgtcgctggcgaagggagtgcagtccaagcttatcagtgatctcagcagcattcatagcgtttggcagatcttgcttgttagcaaagacaagcagcacagcatcacgtagctcatcctcgttcagcatcctgtggagctcatccctggcttcgacaacacggtccctatcattgctgtccacaacaaagatgagaccctggtgttctg

SEQ ID NO: 34949 - DNA, 501 bp, Oryza sativa
  Clone ID: uC-osrocyp010d08b1
gttcatagagtttgcttgcaatggcaggcaccaagcttgcagctcttgggttcgttgtcctcttgagcattggactagccagtgctgcaagagtagaaagatactccagttcccaaggttcaggtacaggaggtggagagggaggaggatatgtgaacggagggggagctgggaaaggagtcggggctgggtctggtagcagtaactcttatggtgctcatgcaagtggtggaggtggcggcggaggtggtggttacagccaatacggtggatcaggatctggtagcggatacagcacgggctcaggctcaagccaaacttcacaaaatggatactatggttatggtgggtcatacagtgctagcggtgctggagttggtggtggtgccggacaagccggtggttactggccatccaatggtcatggttcggcagtggtacgggctatggctctagcactgctaataactactactatggaccatatgcaaatgcaaatgc

SEQ ID NO: 34950 - DNA, 515 bp, Oryza sativa
  Clone ID: uC-osrocyp010d09a1
agagcccgcgccggccggcgcggccttgtcgggagcgtcaccgtcgccgtcgccggcgtcatcctgctgctcggcgccgcgtggttcgcccacaggtacaggagtcaaaggaggtggagcacggaggacgccgccggcgagaagtcgaggtgggtggtcacgtcgttccacaaggcggagttcgacgaggaggacatcctgagctgcctcgacgacgaggacaacgtggtcggcacgggcgcagcgggcaaggtgtacaaggccgtcctcgggaacggcgcccgcggcggcgacgacggcgccgtcgtcgccgtcaagaagctctgggctaacggcggcgcggcgaagaaggcggcggccatggaagccggcggcggcggcggcggcggcggcaaggacacgttcgaggcggaggtggcgacgctggggaggatacggcacaagaacatcgtgaagctgtggtgcagcctcagcagcggcgaccggcggctgctcgtctacgagtacatgcccaa

SEQ ID NO: 34951 - DNA, 456 bp, Oryza sativa
  Clone ID: uC-osrocyp010d10a1
gtgtgacaacaaatgtatatacagataccccattcgaaccggaagctatggggctacttttgttagaacaccggacacacataccgcgcatggaagcttcgcgtgatatcatgcactaccaaagacacagcaccaggatgcgtggttggaattacacagatgaggcaggacctttaccctggcgcacatggcaaacaaattgggcttgatgggagcacactgcacagggtgactctggttctgaagatccagtattattaacccaacttgaccgccttgaatgtgggccagctcgctctttcatgagagcagatggaaggtcgaacgtgctcagagctggggatgcatgcgatagtttaccctctttgtcatccaaaaagcccttgagacctgctaccaagtccctgatatcagctgctgtgctcagttcattccaaggcaccggcttactgccca

SEQ ID NO: 34952 - DNA, 421 bp, Oryza sativa
  Clone ID: uC-osrocyp010d10b1
tcgtccacctgctcgtcgcggtggggcccgtctcggttgtgtgtgcggcggcgacggcggagtaggccacggtattggtggtcttgatgagatcaagaaccatgcccattatctgtagaacataccgatcgaggaggtgttctaacagcttaaatgtacgctctagggtctatgctcccacgaggggaaccggtgtatcgagatgatcttcctcaacaagctctatgagaataatgagagcaagatactcaagttcttgcagttcatgtggaacccgctgtcgtgggtcatggatatggccgtcatgatgggcatattgctggtcaacggtggggggaagctaccagtctggaatgacttactcaggattataacactgctggatataaacttcaccatctccttatcgatgagaacaact

SEQ ID NO: 34953 - DNA, 254 bp, Oryza sativa
  Clone ID: uC-osrocyp010d11a1
gcggatctgccgctggcggcggcggcggcgggggtgggggtgttggtggtggcggcggcggcggcgtggggcctactaggcggcccttcaagaggacggggaacagggcggagccctaccagccgcccaaggtactaacagcaactgatcgaacgtagggctagggtttgttgcacgccgattgcggaggagctgggcttccgattttcgacggcaaggcggctaaggatgtggatggatggtcgggtggtttt

SEQ ID NO: 34954 - DNA, 537 bp, Oryza sativa
  unsure (1)..(537): unsure at all n locations
  Clone ID: uC-osrocyp010d11b1
gcatcattcttaattcaatatacggtatttaactggcaacattgttcttgcaaaggccactgcgaaaacatgttcaccaaaggaagaagtcaagcagatgacagcaatgcttgagggcaaaaaactgcaacgcagaataaacctcaagcctcaattacaacagaaggagcaaattgaaatttccacatctatcacctaggagctttccacattgcaaacccaaaaaaaaaaaagtaaacctattttgctttatgtaattgaatctgggcaaagaatctaaacgattatttcaattccagttaacctaatgccatctaaatgatgactacaccgtaccatttccaaaatactgaactgatgccattgacattgcctgacaaacatgaccatcgagccagccatcaaaatttgcctctataaggttatgaaatttgttattcaacacctncaatcaagtaagccaacacttnggatgatactcaaataatcaataaactgagaanatcttattgatgagcaacaagatggatggatcct

SEQ ID NO: 34955 - DNA, 490 bp, Oryza sativa
  Clone ID: uC-osrocyp010d12a1
ttttgggtttttgaattttttttgttttttagactcaaaatgtactaatgcattattaacatcccggcctcagacagaaaactccaatcacacagcccaatattacaaaccaccaagaacaagaataatgtaaagaacaaactagtcaaaatcaaataaatttaaacatggagaggggaagaatgaaagaaaaggaaaaaaaggaaaaaaaagaaaagaaaagaaatgcatgcacatggctagcttcctcgaccatcgggtccgaacaccgtcttacaagaggcagccaacaacggcggggagcccggggacgccccagccgacggccctggcgctggcggcgcccgtgggctcggcgtcctccgcgccggcggggccggaggcggcctccggggagccacccttcttgggcttggcggtcgacgcggtgggcgcggtggcgggggccttgacgccgaagagctcgaaggggaggagcaccttgtccacg

SEQ ID NO: 34956 - DNA, 495 bp, Oryza sativa
  Clone ID: uC-osrocyp010e01a1
gtacaaaaagaaatatggggctcacataaatagaagagacttgtttacatacaaacaccaaaggtttcaagtgacaaatcgatatagttttacagaaacaacaaatggaatcgactggcagggtacttgcgaatctgctagagcaaataatgtggttataactggaaaaacaatgccggcaactcatacagctgatatataatcttaaacctttgttcattggatgaaatatatctgcagaatccattgctccctcctgggacttgtcatatgagtcacttgcttccaccattgatcaccaaggcctctggctgtggtggctcagcaatgtccttcaccacctccaccttgggagggcccgaatgccgcctcataggagaaggcggcgccattccagcttggaaggacagcttcttcttcactgaaccaacagaggctactttctccggtggtgtctctgcaccatcggtcactgcagaaccttggaggcgcaac

SEQ ID NO: 34957 - DNA, 367 bp, Oryza sativa
  Clone ID: uC-osrocyp010e02a1
gttaaactataattaaaggggactactaccttaattgtcaaccattttacaaaatacctgcaaatgcattatcatctacagtatgatccctagtacacatcaaagattaaaattcagcgagagttggctgcagaaatgcagatgcagacagaggcgagaaagcagagtctactctaaaattcagcagcagctcttgctccgggcgcaagccctcgccgccggcggctggccgcgggggctgcacggcccggcgccggcgtcggtgagcatcttcaccacgtccctcatcgtcggccgccccgccggcagcttggcggtgcagagcacggcgaccttgagcaccttgatcatgtcctccctgtccctg

SEQ ID NO: 34958 - DNA, 452 bp, Oryza sativa
  Clone ID: uC-osrocyp010e02b1
ttgtaaccaccaccagcacctcctcctccgccgccgacgccgactcctccctccaagctttccccaccatggcgtcgtcgtccgtcttcgctggcctcgcgcaggcgccggaggaccccatcctcggggtgacggtcgcgtacaacaaggatcccagccccgtgaaggtcaatctcggcgtcggcgcctaccggaccgaggaagggaagcccctggtgctgaatgtggtcaggcgcgctgagcagatgctgatcaacaacccgtcacgtgttaaggagtatttgccgatcactggactggccgatttcaataagctgagtgctaagcttatttttggtgctgacagtcctgccattcaagagaatagggtggctacagttcagtgcttgtcaggaactggttctttagggtgggagggaatttcttgaaggcatttcatgaacgcactatta

SEQ ID NO: 34959 - DNA, 514 bp, Oryza sativa
  Clone ID: uC-osrocyp010e03a1
gacgcctccgcagccggcctcatagaagaggggggagaacaagtggcggcggaagctgattaagggcggaggcgttgggcggtggctttgggagcccatagttcaggggagggaaatggggttcctcctgctccagcttgggttcgccatattcgcgctccgaatgctgcggcccgagatcgcgctgcctggctcagagccccggccacagacaacgtacgtcagcgtcccatacagcgacttcctggcgagcatagacaagaaccaggtgaagaaggtcgaggtggacggggtgcacatcatgttcaggctccgtcctgaggttgaggcccgtgcaatggagcagccacaggtgcagcgtggaacagattctgttgctgataatgctggagttccaaggcgaattgtcttcacaacaacacgtccagtggatattaagacaccatatgaaaaaatggtggagaatagtgttgagtttggtcgccggacaaaggtctggtggcttgctcaatta

SEQ ID NO: 34960 - DNA, 455 bp, Oryza sativa
  Clone ID: uC-osrocyp010e04a1
gacacccaaaactataaagatgattttatttctcagcttcattttccatagaagatgcacgtcaagctaaacggaacgaggccgcagattaacaccaaaccatgtacaccaatgctgacctactactgcctcaacacgagcgttaacaactgtacacaacagtacacggctgctacctgaccagtctctgattgtacaaccgaataaatggtgcgaaggatagctaaacctccgttctctactacaggtacaaatgatgcatcacacaaatgatctagtatttcaccagcaatattgcacagaacaacagcacatgcaagcttaaatggtgtcatggaattggatccctctgcgcaccaggtggagctgttggcattgggaaattgaatgggtaataggttcctccaaactgtggggcctccacatatgggctctgagcatgaggagggttaggg

SEQ ID NO: 34961 - DNA, 511 bp, Oryza sativa
  Clone ID: uC-osrocyp010e04b1
tttgtttcgtgggttgacacaaggaggttgcacgagagaatgcaggctgttcaaaaggaaagggaagagaaacttgcagagacactgaaaaaccgactgcacatttacgttcaaggaaataaagaggaatttgtccagcttgctcaagctgaggtgaccagacttagcaatgcagcatatggcactgttatgttaaacactatcggctatgtatattcgagacaagctgcaaaagaacttgggaagaaagcaatattcttgggtgttccatttgtagctgagtggttcagagacaaaggccatttcatcaaatcccaagtaacagctgcagcaggtgcaatagctttgatgcagttgcaagaagacttgaagaagtatcttagtgctgaaggccattacacagaggagaactagaaatgttcatgcaaaaccacaaaaggttatggttgattccttgtgaagcttaacgttgctgacatagaagccaccctatcacgagtcttgcaatggt

SEQ ID NO: 34962 - DNA, 478 bp, Oryza sativa
  Clone ID: uC-osrocyp010e05a1
agggggagcagccacctttgctgctctaaggaaacggcatttattaaaccactatttttattcatgccaaacaccagcactagtccagtgacaaccaaacgacaatcctacactccaaaagtttacatttaggttctcaaatagtgatacatagctttgagagttgaaaccgtcagatactgacatagtttatgaggggcccctggagttggcaaaaacttcacgaagattgtcgcagctctggacgcacaaagtctgcatcagcaggcactgaaatgtcaacggtgggcctcaactgagcacagacttcaatggcactatggacgggatcggagaagaaattgctgatgaggtcttgattaactggagcattcttgtcaacagtcacaaaagcttgttgggtcaagatgtagtccaagcgtggcgcccatttccttgatcccaacccggctgttgtgggcagttatcaaccatgaag

SEQ ID NO: 34963 - DNA, 396 bp, Oryza sativa
  Clone ID: uC-osrocyp010e07a1
ggggaaaagcctccccgggggggcttattaggggattcgaaaacacccctttttttgaatccccagggccaaaactggtcccaaaagcaaggcccccgagtttattacaagggaacttccagggtgggcttagccagcaaacattactggttgaatcctcaaaacactggtgggggtgggtttaaaaagttattcttggggggggggggtatgctaccctcattcactttagttttgggactgcggcatggattgcatctgcaagaagcggaatgggccttccgtttaaaccagccatactggacctcccataaaaaggcatataaaggggggattcctgcctcaagaaagccacttgatccctggtgagcccagggaaagggaacattccgatct

SEQ ID NO: 34964 - DNA, 468 bp, Oryza sativa
  Clone ID: uC-osrocyp010e07b1
tctctcctgctctggctggctctgggctggccgtgccctcctgtcagtcctagctccagctagaatccctccttgttcatccaccaccaccatccacatgattgcatttgtgcagattcctggagaattaagctgtcctctcatgccgatctgacacaccttgttgttgttgttgctgctggttgccgcacaaccgaaaggggggattatttggccctctttctctttcctttcgcaggaagatttggtgattcttcttctgagggctcctctaaggatttgggaggatggggaagaaggggaagtggtttggagctgtcaagaaggtgttcagccctgaatccaaggagaagaaggaggagagactgaggagaaaaatagcagctagtaacccgaacccgtcagatctaaccccttggcttctctggaagtaaatgtttcggtgccaccccttcaacttcttcacct

SEQ ID NO: 34965 - DNA, 514 bp, Oryza sativa
  Clone ID: uC-osrocyp010e08a1
gctccagcggcttcctggccgtgatcacctccagcagcagcacgccgaagctgtacacgtcgctccggtccgtcagctgctgcgtcatgtagtactccgggtccaggtaccccattgtgcccttgacttgggtggtgatctggccacgaccgtcttcgccgagaagcttggacaggccgaagtcggagaccttggcgttgagccgctcatcgaggagaacattgctcgacttgatgtcacggtggatgatcggagggtcagcgagctcatgcaggtaggcgatacccttcgccgcaccgaggacaacccggagccgccgcttccagtccagcctcacaccagatttccctgtgaggctctccttgagggtgccattggggacatactcgtagacaagcatctgctcgccctggtcgaagcagaatccgactaggctgacgacattcttgtgatgaaccctggacaggagctcgatctcagtcctgaactcgaggttgccctgcagggagccttg

SEQ ID NO: 34966 - DNA, 474 bp, Oryza sativa
  Clone ID: uC-osrocyp010e09b1
tctgctacttgtgttaaattaattaattgattctacgagaccaatgtatagtgctaggagcctgcttccagctgaagaacctgctcttgctttcctcttataaatgaggtcaattcttttggtgcaacaaccgacttgagccactcttgaagctcctcgccctcaaccttttcattctcttctaaatatgctccaaggccttccaaaactgtaggattagcacggacaactgaaagagcgacatcaagggctgattgaagaagggcttttacttcccgctggacaaggtcaactagatggccctgatcccttccccatggagagcctccggattcatctagcccaccatttgacaatgttgccaccgatatcggacctatgcgctgattaagaccatactctgctacagccttgtatccatgtcagtggcacgccttatgtcatcaagtgctccagtagaaacacgccctgaca

SEQ ID NO: 34967 - DNA, 487 bp, Oryza sativa
  Clone ID: uC-osrocyp010e10a1
gagtaacgatcgaatctatttctcttctttagcaaccaatgaactgaatggagcaatcctttgtacatctcaaaagttactgtaaaccaaaccatctccacatttacaaattgtttgtcactacgctgttaactagcagtagcacaactaggattcaaccacgctaattaacaaaggaaaattactgaaacaacgaagataaattacatttacattgtctaagctacacctacaaactttgcctttgtatatcatcaccatttctgaaaaaagttcagaactggatcagcttatatcagctatatatagctctagctctagctctagctaagctagaacgggttccacgcctgcgacgccatggcgctctgctgcacgtagccggaggactcctcctcgctccagccaagatggaacccctccgtcttggcggaggcagcgccgccgccgccgccttgtgccatgttgctcagcaggtccctgaagt

SEQ ID NO: 34968 - DNA, 488 bp, Oryza sativa
  Clone ID: uC-osrocyp010e11a1
ggaagttcaccgaagaaagccttttctttccccctcttttttctacaagtatgattaaacggatttaacggtgccctctcatagtttcagcggcttcaacatcaaaacttcttatatcacagacaataacaatacaatgaacattttcatgcggagtactaacctacaacacctctcagatcgaggacaaagcccagagagaggaaaccacccatcgtcttcgtcgcattagatacacacatttgcaataccggcaaaacaccgccaaacgggatgctcctggagcacaaatgtcgctcagcagtcgaagttggcgcagctgttggtggtggtggtctcggagctgccgatgaacgggtcgatcttgacccagaggagggagaagacggaggcgagcaggacagaccagagcacgacgatggtgggcgtccggttctggcgacccatgagacccttgaggaaggggtacaagtgcatgatcacccaca

SEQ ID NO: 34969 - DNA, 239 bp, Oryza sativa
  Clone ID: uC-osrocyp010e11b1
tcgtttctgctgctcgcggcgccccggagcgtctcctttgggggagaggagaggcgaggagaggagaggggggtgagccatgatggagtcgtgggtcccgtcctgcgtcttgtgcggggactactcgcaccccgtctgccgtgcctgcattctcgcgctctgcaaggtctgcctcgtctaggactccgcctagggacgcaccacctgcgcgcgctgttgtctggagtacggtgcgccct

SEQ ID NO: 34970 - DNA, 487 bp, Oryza sativa
  Clone ID: uC-osrocyp010e12a1
tttttggggacatgaagccaaacgggagagcttgtacaaaacttcagctctcttcaatgttgactacgctaattaaaattggaactccataaaaactcggctacgccgagaaaactgtaattacaacaggtacggcgtagccaattcacgcaatgcgcacccatagggttacggcgtggttcatttaacggctgatagacgaaatgttaaggagctgccgaggtggcgacaaatactgaaaacagcgaggagatccaataaagaaataacattggaaatcctctccagcggcaacccaagtctctaaatgatcataatccactcgagttaccctgcaacgcaaatttgcacccgggttgcgaacgggcagttccatttgtagaattgtagttggtgttacgggcaaaataacaacgagcgtcatttcccaaggcactttaaattcaacagtaggatttactctcgaattaaaaagacggcaccgttc

SEQ ID NO: 34971 - DNA, 333 bp, Oryza sativa
  Clone ID: uC-osrocyp010f01a1
gtgatagaaggagaaaatgccgagccattacatacataaaccaaaatatggaaggctggggaacgagctcaggacacacaacaggctgaagatgttttaagtaaatagcaggggatacatccttggggagagacacttgggttgtttaagagaagtttgcaggagaaaccgcatcttaaacatgtccttggattaatctagcgaccatatctggtcctcattatcatggtcttggactcagtacaatctatttgaccatcatcaacagtgatgtgtgctttgcaccatgcatgtgagttttggattggagcacatttcacctactggcttggg

SEQ ID NO: 34972 - DNA, 424 bp, Oryza sativa
  Clone ID: uC-osrocyp010f03a1
acacagatgaatttcaaagagggattttgtatatcaaaaaagtctgaacccccatgatttgacccacgatgttaaaattcactagtcattatacacacaaatttttttggggcagcagtcaaaccagttatttgtataattggattggaacctactgaagggggcagcaaacttaagtagacaactggtttggtcaattgcaatttcacttagccacatgacttgtccatccaaagggggcatgtgagacttttcccctgcaacaaaaggtcaaatgccgggttgatgtccttcaggggaaccttgggaggtatgaacttggccaactccagctccttgttcaaatacttgtcggccaggaagggaatggcctgcttgggtttcacccctccgaagagggaccccattacgcatttgccggtgg

SEQ ID NO: 34973 - DNA, 459 bp, Oryza sativa
  Clone ID: uC-osrocyp010f04a1
agctcaattctgcagcttatttttcatcattttccacaaattgagaggttctccacaaaaaaaaaggcactacaccaattttgtcaggggtcatgcaaaggcccgctaagatttattactcaacagcgttctcacaattgagcattcaagtttcttccttgttccccaattctcagggaggatgttaaccgttgctttttgtgtaagagaagattaagaaaaaaaaaatgtacccatcctttttttccacgatggcaaaaaccatgtgttataatcttcaactaccaggtttcctcacaaacagcttttggacctgctccagtgtcaagaacattatcacattccatgatcccagtctagcaaagtttgggaggaagcctttgtaaaatgccagaggtccatcattcttcagcgttttcacgaaacaatcaatagtacttgtgtaggccgagtcaccca

SEQ ID NO: 34974 - DNA, 115 bp, Oryza sativa
  Clone ID: uC-osrocyp010f05a1
gccttcaattattaattgttttttgaaaatttgtggggtaaacctttttttatctttttcttatatctttttttttttctcaatattcttatattttctcttaattaatattgat

SEQ ID NO: 34975 - DNA, 477 bp, Oryza sativa
  Clone ID: uC-osrocyp010f06a1
gatcaggcgcaccaatattgattacaaaacatgaattgatgtgatgacaacaaaatatcaagacgctgttgcagtttctcaaccaaagttccactgcggtaaagattattcatgctggctgacaagtgtaggtccacaaaatctcgccttttacaaaatcacccatttagtcgccacaatttaccattagcgatacaaacttaaaacagaccataaaattcttctttatttcatacagctgcacgtctgcagcatgaaataaggctctggtaaatcctattatgcctgtgctggcgccgcctcagtagttttgtcttccttcttcccactaaaaagcctgccgacaccataaaaaatacctccccacatagctaagctggctagcacaaattgctcttccttccagttagccgggttcattggttcttgccaaatgttgaccttcggaggcccatggtgatctgcagcgccggcgag

SEQ ID NO: 34976 - DNA, 470 bp, Oryza sativa
  Clone ID: uC-osrocyp010f07a1
gggggataaaacattgttgcatgattcacaggttctcaaaatgattaacggcatacaaacaacacgaagatctagagcttcaaatagtacttcattgtagaatggaaaaaagaacagtactcgccctggacctgagttgaggatagaaattgttacaatcgaggatagaacagtactcgccctgcacctaaattgttacatgcttgtcggaggatgcctggtacatgcatctacgattttgacgagaagaaatgatatttagacatagtactatatcatcgtaattgatgtccttgttgcctgctccagttcttcaaactcagcgcctagcgcttcgcttcctgctcttctttcggctgcccttgtcatcagaatcactgtcagatgcagatgcagattcggagtcagattcagacgatgctgatgatgaggtttcccttctgagcttcttttttggcgcctccttttgg

SEQ ID NO: 34977 - DNA, 395 bp, Oryza sativa
  Clone ID: uC-osrocyp010f08a1
aggacaagacacaagcccaagcccacagggttttattattgattaagaaatggggattttttttcgatacaagcattacttagtctaggaggtggcatatattaaagattaattttttgggcaagggtgcatattcccatacaagcttgtatcagcatacttagggggattggtggcatttgaaacaggggggggcaaagcccgagaacaatacttaagggttttttatccagctggtatacagggggaaaaaatccatcatcatccatggggggtttacttgggggtgtacttgggccccccgggtatatggaacctggagaaaaaggcctcccaaacaaggggctttggggcgaagttgaaccattcatcgtcttggggggtgctggtttttc

SEQ ID NO: 34978 - DNA, 495 bp, Oryza sativa
  Clone ID: uC-osrocyp010f09a1
gtattatactctcacagagagagacaaactgcataccattctgctgtcccgtaacataattattacgttggtacaagaaaccaatgcttctaaacatagaagcgctacaaacacaaccgcgatctgctacgtgtatcgtatgctgatcgcggattgttatggaactggagatacagattacagaccggctacaataacacttaagatgcccccgtgcccacatcaactctgcaccttacgggaggaaacgacgcctggtgccgcagaagcgtgcctatctgccatggatattaccttcagcaatttgaccgggcacttatctatgcaaatatgcaccaggatttacccatgcatctatcgactacttaggctcatcttgatttattaatctccaaataaagtagtgagcagcaggtcttgcacaaatgttgctctgacactcgcttgcttccgtttctgttccctttcttccctagggagggatgagtcaatact

SEQ ID NO: 34979 - DNA, 441 bp, Oryza sativa
  Clone ID: uC-osrocyp010f10a1
ccttcaaaacatattgatcatcccatttaaagagagcaaagcaggcttttcgattgggcagtttacatatgtttggttaaaacaatgtaatgacatttaaaatttgaaatccaccatctttcatttctattctatatataggacctttaaacgaactgaaagaaaaaaaaatttgaagggcctttaggagctcaatcctgtaattttgtatagctaaagaaactagcccttgcaacactgtcagattttgctcgcaacttagtttttacgccgggatggggtcactcaatttccggccgtttgtttccaggggaaagtatgagactgcaccacctgagacgagcatcaccgggatgaatatcaggatggctgcagtttgatggcacgcgtgcaccaaaccaacggccacaagagggcacaagatcccaccgaaacgaggga

SEQ ID NO: 34980 - DNA, 481 bp, Oryza sativa
  Clone ID: uC-osrocyp010f11a1
gggggaacgctgctaattttccaaataataggtacaggtggagatactccctccgtcccaaaaacacatacatcaacctggagatcaacctaggagagatcacatcccctcttaattcttatcccctcttaattctttttgggacggagggagtactgttgaagaagtccgatgacattttttctctactgatcagtatgtacaagcattcacagacgtcctcctcccatatttacaaattgcaaatttgcaacaaatgctccctatacattcgtgtcttctaactagcagagcttccaaacgaacatattcttgggtctaaaatttcgccatctcactccaatatggagagtatacctggagatttcatctatgaatcatcacatacaggcgcacagcaaaatacatgcctagctagctaagctagtctcagttgaaaactatgggccacttcagaacttggccagaagccacccaaatg

SEQ ID NO: 34981 - DNA, 472 bp, Oryza sativa
  Clone ID: uC-osrocyp010f12a1
caagcaaaaagcatttttagttctaattttttgagcagtcaataaaacaattcgacccaccgcctgaggttcaaattagccaccacagatgaaacgaagaaccgacgagacataaaagtcacaatcaccgaaccgactttgtatcagtacaacgtcagaatccacaacgttggaataaggagtgcccaccataaaagataagacatctaaaatttttttcacgcgccaaaaaccaattcaactagggccgttggagtttaatcaacgttgccaccttcaagggctttctggccatcttgccgttttttggcattaggtccagaagagctacggggatcatgatggtgatggtggtggcggtggtggaaacaaaggtgcccggtcttggggggactttaaccatttctcaccttttcatattcaccggcagctgcatcatcggatgactcctccagggagcgactcctacggg

SEQ ID NO: 34982 - DNA, 502 bp, Oryza sativa
  Clone ID: uC-osrocyp010g01a1
gttactgaacgtctcagcgaattgaattcaattttatttcttgacaaatgtaacaagcaaatccatatttacaatttgtaggctactaggcacacacctaccaaaagaatcgccgccgtcgttgtcacgattccgccgccgtcgccgccgccgcatccaccgcgttctggtcaatgaagttgaccagcgcgaggccggcggcccagacgtcgtcgtccatcacggactcctccggcgagtggctcacgccgtcgtggtaccgaacgaacagcatccccaccttcgtcagcctcgccatcgccatcgagtcgtgccccgctccgctcatcagcaccggcgttttgccgccggtccggcgcacgcccgccgccattgacgagatcgtcgaccgcgtagcgcgctccagccgcgacgtcagctccgtgtcgcacggagttgccgcccccgcgtgcttctgctcgacggcgcagtcgaccaatctgtcgtcgcatctgtgaagaac

SEQ ID NO: 34983 - DNA, 483 bp, Oryza sativa
  unsure (1)..(483): unsure at all n locations
  Clone ID: uC-osrocyp010g02a1
gagcaaattgagggcatatttaggttcaaatccaacttattcataaagcatactgctgtcccacaggaaactgtttcataaaactaacatatcatacggactcgatggtccattaaaccagacacaagtagacatcagcaccacaaatacttgacgaacagaggctcgggatgaccaggcacatcggcagctccaccaaactggctgattactgaccaccacggaggcggagcaccaggtggagggtggactccttctggatgttgtagtcggcgagggtgcgtccatcctccagctgcttgccagcgaagatcagacgctgctggtctgggggaatcccctccttgacctggatcttggccttcacattatcaatggtgtcggagctctcaacctccaaagtgatggtcttcccagtcaaggtcttcacgaagatnttgataccaccacggagacgaagcaccaggtggagggtagactcct

SEQ ID NO: 34984 - DNA, 380 bp, Oryza sativa
  Clone ID: uC-osrocyp010g02b1
cgtacggctgaaggagcaacatcgtgccttttcaccgaataccaatacgttggcgttttcatgtcgatattcgcggtggtgatcttcctcttcctcggctccgccgagggattcagcacaaagacccacccctgcacatacagcaaggacacggagtgtgagcctgctctgttcaatgccctgttcagcaccgtctgcttcctgcttggagccatcacctcagtggttactggcttcctcgggatgaagattgcgacttacgcaaatgcgcgggccaccctggaggcgaggaagggtcgtggctaggccttcatcaccgcgttcccgttgggagcggtgatgggattattgctggcatcaaatgggcttctggtgcttta

SEQ ID NO: 34985 - DNA, 448 bp, Oryza sativa
  Clone ID: uC-osrocyp010g03a1
gggaatgtcacctatttgaccacttaaaactgagattcagatatacagattaggggctacccatgagcacagtcgcagatctctgtttcacatttgctaaacttccaaagttaaaagttgaaactaaaggaattctcaaatcgttgtgtggacctcttgttatgtagtgtacctaagatctacctatacggtcttcctcgttagggccagaagtaccactgctacattgttgatcttgtcttcctggaaacactggaaacaggtttactggcaaagtggccgttggtgttgggtaccttgcctggggccgtgttacatggtcagaaatcccgtgttcttgtgacggttcgctgtcttcgctgctcgcagactcagggaagagctgaagttctcttggcgtggcggcatagtgctgctcgatgataaccggttgctgctgaggaaatgc

SEQ ID NO: 34986 - DNA, 467 bp, Oryza sativa
  Clone ID: uC-osrocyp010g04a1
gacacaagggtagattcattgctgcaaacattatagcataggttcaatgtcaaaatattacaatcatcagttcatcacatcacaaaccagcacacatgtgctctccaagaattacatcaaatcggattgttctcttccacccttattagcaaggagcactggagatgaacacatctcacataagactagacaagattacaacacacattgcttattaatggtctagattaatgaaaacaacatgaagcaaaccataattaaacataataagcatcatcagacacaaccacagaggctagtactactagttgtaatgcagctgcaaccatgccattgatgccaatggccatggcgtgcgagctctccatggtggctcagaactggaaggcgtcggccatggcggtggcgacgatgggctgggccgcgaacggcggctgccatgggcggagcagcgggtcgtcggggat

SEQ ID NO: 34987 - DNA, 497 bp, Oryza sativa
  Clone ID: uC-osrocyp010g05a1
gtaccaaaaaaagatactgataatatatcatctgcagaagatcctctgccatattttacaggtatgagctagatcgagcaccagaaactaaagtcctcctgcaaacatgaatgcctgcaggaggaataactaagaaaaacaaaataagactcgtgattattttctgctgccttcatattcccttcacccataataacgataagcatatgctatttgcactagatatccagtcttgtagtgattccggaaaacaaacaattggtcaggaattcccttctgtggtggtggacaatatctgaaaaccgtccatctaaatttgtagcaggcacccatagcatagataaaaaactgtagttacttttgccctagtatagaagctgccaatctaagaggagccaaacccaccggattgtccagaattgttgccgccaaagttgccaaaactgcctgagccagagttaccaaatcccccaccaaacctacctgagccagaatct

SEQ ID NO: 34988 - DNA, 471 bp, Oryza sativa
  Clone ID: uC-osrocyp010g06a1
ggactggacaccggggggggaaatgcccacctgaatatattacttcgaacgatcttacacaggacaggcttcacctgcgtaaatgcaggagccctggaggataataagaaagaatacacggggatatatagagaagagaatacagacgcatcacaacctccccaccacgcacacagaggcacagagataaactgagaagctttgacgtttgccacctgcaaaaacgcccgatcaaattccaaatcaaactaatgctagaaccctaattgaacatcatccacatcgcatgcagacttgaaacaccaagaatcgaaggtgccggagggcctcattgccacgcgcaggccggctcagttctctggcagtcgaaagactgtggatatcgaagaccacccgtatcaagccgtcagaaatacgacttagtcatgttgctgcttgaatcaatgtcccccaacgtctattgggggaagg

SEQ ID NO: 34989 - DNA, 446 bp, Oryza sativa
  Clone ID: uC-osrocyp010g07a1
ggcacataaactgcaggggaaaaccatctggtcactttatacaagccgagcatcagctaaaagaagttcacgatgcctcagggctcaggcagacagaaactgaaaacgacgcagcaagttaaaaacaaattacaaaacctacatgagacaaaattaaatcgtagagatagtgtcccactaccaccaaagcaacattatttgcagaggttcctttttttcagcccacatgatcccgtggtctagttattattcgaaaatctccgtgcgtcctcaaattcgatcgaattttaaatctctctctcctagaagagcttgaatagaactcctccgtgcgtggcgaagaatggcgcgaacaccagcgactcgacgggcatgagcttgatgaggatgttcagcgacgggcccgacgtgtccttgagcgggtcgccaatggaggcgccgatcac

SEQ ID NO: 34990 - DNA, 487 bp, Oryza sativa
  Clone ID: uC-osrocyp010g08a1
gctgaaagaatgtatattggatggacgctatagacaacattggtcgtcaaaaagtaaaacctcattgtaatttgtacgcttgatcaagtagaaagaaagggggtaattacaaccagatggagatacacactgacagcttaagcaaatgactatcttttcttatcttatccatcaaactttcacccaaagtgcttgccaacatactaatcacaattcacagccactgaagtagatatgcaacgggcaccatctgcttttttctccaaccatatcttgcaaacctgatgcgctccaactccggcacaccacctttattttacctttttgaaaaactatgttatgcacttcctgtgctgctctgctctataaatcacacctgcaaacatggagcttgcaaaagaatgacaataacttctctgtactatgcctgtttcttcagacattctccactgccttaggagcaaatttcttcactgcgtccccgaca

SEQ ID NO: 34991 - DNA, 498 bp, Oryza sativa
  Clone ID: uC-osrocyp010g09a1
gaaacagtcggggtaatatctcggttttatttgctctagtatgaccaatgaaatatacatcttgattctcaaatgaaccatgtgcacaaccatccatcaatctacactctacactttttccatggccatcgaatgcgaccgccgcgcgctactccgatgtaccggaactcgagagagctccaaactttgaattaaaatttatgcaactatgctacgtatatgtacagtttttgcagtgtcgtacactacacacgtcacgtttcagaagacgaggcaggacttgtcgaggtcatagcccatcttctccaggcccggccgcaccgtgcactcgaccatcgccggcggcccgcacacgagcgcgagcgtctcgccgtcgcccggcggcaggtgctccctgagcgtccgctcgtccaccctccccacgctgtacttccacccgtcctccggccgcgccaccttggtcaccacgtaccacaccttgagccgcgccgggtgcgc

SEQ ID NO: 34992 - DNA, 471 bp, Oryza sativa
  Clone ID: uC-osrocyp010g10a1
cctcaataaataggtacaaaaaaacatgacatttcatttgagtaattctcgaaataaattacaattatttcaggtgccttaacatgcaacctctgatagctgtttgatgtttatggcagcaattaccgtgggcacacaaacaaaaaatattatttatacacatgcaaacctccatttgcaggtcatcatacatttcgtcaagcaaagcatgttgcgagtgtccatcgtaacataaattatttaagcattatttactcttcgtatatttacaagatgcaccaacggtttgcttcattagtactcgccgatcacagcatcacctgcgctgctgctagccttgcaattggaaccctgaatggggagcaagaaacgtagttcagcccaaccttcgcgaaaaatgcaactgaagaaggctcaccaccatgttccccacaaatgcccacctctaaatcaggccttgccttccggccc

SEQ ID NO: 34993 - DNA, 491 bp, Oryza sativa
  Clone ID: uC-osrocyp010g11a1
atctacagaagtgctatagatatgcccaatacttttatgaaattagcgacagtcacatatactgtagtaagttcagagacaacggggatgtgtaccgtagctttcatcctccattggtttatctcagcgaagggattaaccacatgtacctctgtccttccggcctgcgccggacagcgtgaggctctggatgaccgtgggcatgggcgggctcaagagcttcgacgagctccttcgtcctgttctccaggttgaatgcgcacaggttgctgtaggagtcaatgaagtagacacaattcgacttcaggttgagatgatccttcgcccggtaacagaccgagctgtagtagctgacaaacagcgcaaagtccccgatgttatcaaccttctcccaggaaaatgtccccttgtccagaatccagaccacaaacttatcatttgattgccgcttcaccctcattagatcaccagctggggactccaccaaacag

SEQ ID NO: 34994 - DNA, 489 bp, Oryza sativa
  Clone ID: uC-osrocyp010g12a1
gttactcatgacaaatccgtgatagatattgtaagtatacttacacttacataatcacaaacattgttttaagactagtatcaaaggcctattgtatctacatctttacattaatccgtaaacaaatatgtacaaaatttagttttacgaaaaatgcatttgtttcatatgaatggatagttgggactataccctgaagcgaatgtaatcagggccataaaaaaggtgaaatacaataggtatatcacacactatcttcttcaggcttgtctgaaggcctgataagaggagctaccctttcagaaatgatagccttaccattctcatctcgtttgacagggtacagcacatagtgttggattatgaataagatgtcgaagaaaacgacttccaatgaaagaagggttttcccaatatttccatagaagttcactagcgtgtgttgatctattgattgcacacccatctggccaaagtttagcacccctc

SEQ ID NO: 34995 - DNA, 548 bp, Oryza sativa
  unsure (1)..(548): unsure at all n locations
  Clone ID: uC-osrocyp010g12b1
tcaagcgcaagagtgttgtgggtctgaactttgattttctggtgttgaacttgacaaagcactcatcctacctcatatacaatgctgctctattcttcagccccttcatccagagacagtatcatgagacatatggtgataaagagatgattcctgtcgcggcaaatgatgttgccttttctgtacacgcggttgccttgacagcttttaccctttttcaagtattcatctacgagcgaggaaaccagaaaatctccaaagtctgcatatcaatcactgctattgtgtggacagctgctattgtttgccttattgtagcttggccaaaaagtaactggctctggcttatagatgtgttcaattcaatacaggttgggatgacagcaatcaaatacattcctcaggccatcatgaacttaggaggaagagtacaattggttggagtattggcaatattttacttgatcttacaggaggggtgctaaactntggccagatgggtgtgcaatcatagatcaacacacgctagtgaacttctattgaaatat

SEQ ID NO: 34996 - DNA, 402 bp, Oryza sativa
  Clone ID: uC-osrocyp010h01a1
gggaaacaactagaatgtgacagaatttcatttcaggcaaataaccaacaattgcttgcactgaaaaacacataacctgcaattcactgaaaaacagacagaactgccgcttggtagttccctgttttgaaaaacacaatctgcagtaacgctgctaattttccaaataataggtacaggtggagatactccctccgtcccaaaaacacatacatcaacctggagatcaacctaggagagatcacatcccctcttaattcttatcccctcttaattctttttgggacggagggagtactgttgaagaagtccgatgacattttttctctactgatcagtatgtacaagcattcacagacctcctcctcccatatttacaaattgcaaatttgcaacaaatgc

SEQ ID NO: 34997 - DNA, 249 bp, Oryza sativa
  Clone ID: uC-osrocyp010h02a1
gaattattggggttttttttttttttatttttttttttaatggtttttttttttgaaaaaaaaaaaacgggcaattcacagggtaagagacattgcaaccccatcggaataacaggggtcccaagattggtttagaggtttcacaactacaaaaacaaaaaatgggtgggggccgaggaagactaaaaccggccccaaactggttaacaaggggggatcgacatggtagggcccgttgcgaggggtcgc

SEQ ID NO: 34998 - DNA, 469 bp, Oryza sativa
  Clone ID: uC-osrocyp010h03a1
gaatgactgagaacatatgtgagagcaaagtaagacaggcaagctccctgatattatatcaggctcacaatatttgtgcatacaaactaaaataatttctcaacactgcttgatctacctatcatctccctttgtattcatgtgccgtgctgaaatcacaatgtcacattattttatcaatgctttgcccacacacatgaaaaacagctttcagatcaatggccatatttcttcaatcctaccaagtaacaacacaaatggtggctgctgagctgctttgatgagaggcggaagagaattcgagtactgaaaggcacatttagacatctgatggaagaaatgggtagtcagtgtatccaataactggatcagagatgtagaaagtctctctgttgtattttgtgagaggagcatctatttcaaacctctcaggcaaatcaggattagacaaaacaagcgcccataagca

SEQ ID NO: 34999 - DNA, 457 bp, Oryza sativa
  Clone ID: uC-osrocyp010h03b1
ttctttgctccgtgattatcatctcgtcctcgcatcgtcggagttgtcattagtctagtcgtctccctcgtctccggtgagctagctggtggtgtggtggttggttcttgggagcaatgggggcgtgcgcgacgaagcccggtgacctcaaggtgaagggcggcgaggcgccgctcgtcaaggaggacgccgccgtggcgccgtcgacgccggccgctgaggagaaggagaagaacgtcgacgaggctcctgatgacggggctgctgctgtggtggtggcagccgtggagggcgagccggctgaagccggtcgccggaggtctctcagcgacttgctcaatgaggatgcagagagcgagggatcataggcggctccagctccaagtgcagaggcaaccaaggccgttggaactgaatcttccgctgcgctgctgaatcttgaatagcagcaccagca

SEQ ID NO: 35000 - DNA, 504 bp, Oryza sativa
  Clone ID: uC-osrocyp010h04a1
gtcgtgtcggtcgacctggccgggctgcgccgcaggcggctggggcgcctggcgccgcggttcgccgtcgacgggctgcgcaacctcacgcggctcgaggccttcagcgcgcccgggttcggcctgccaggctcccttccggcgtggctcggcgcggggctcgcgcccaccttccagctcctcgacatctccggctgcgccgtcacgggggagatccccgcctcggccatcgccggcctcagcaacctcaccactctcaacctcgcggggaatctactctcggggcagctccctggcagtgctctcgccgggctcgctcggctcaagactctcaacctctctggcaatgccttctcaggcgagctacccaaggcggtctggtcgctcccggagctgagcgttctcgatgtgtctcggaccaacctcaccggcgcattgccggatacagggctcgcgcttccatccaatgtacaggtggtggatctgtccgggaacctcttctat

SEQ ID NO: 35001 - DNA, 478 bp, Oryza sativa
  Clone ID: uC-osrocyp010h04b1
ggaacgaacatttctgctatgatcaacaatgaaacaatcaattacagtagggaagaagaaaaagaatcagctcgccattctttctttttaatcaagaggggaaagaaaaataacaacattgccaagccatttgtccagatcatgcattgggcaccaaccactaatccactatacgatcgcttcccagtccaccccgaaaaatggtacccctgatgccagtatgctgcctgtgaagtcaatgacatgcaggaaattcacgcttcgatctgtcagctgaaagaattcaatcacaaggtagcagcagcgcttcgacagctgccacccttcatggacttctctttgcactaaaagggtcacaagacaaaagaaagcccttaatcctcggtgtcacgtgaaccagatggctcagggaagatctccttcgattgcctcctgcgggaggaagaatggtcaccattgctccctccggatgatttga

SEQ ID NO: 35002 - DNA, 466 bp, Oryza sativa
  Clone ID: uC-osrocyp010h05a1
gataccattatcaccctggtgtatatatataaaagcggtttaccctcgtttacaacacaaagaagtgaaaattgcagactagtaaactttgatctttcaggaagtgaagtccaaaacagaatcaagaaattgtatagatggtggtggctggcaaccatcatatggcatctgaaaaattctgaaaccagtagcactatatcatgatgatgcctgtttcctgcccagggtgagagctcactcctttccatcagcagcacggagggagccaagctgcaccggcgcctgagtctgcactaccttggatgacccgtaggccgacaagtcgacgccctcggccttctccttctcgagctgctccttgatccagaagtatgtgatcctcagaccatccttcagcctcatggttggagcccagccaagcttctctttgatgagcgtgttgtcggagttgcgaccacggacaccc

SEQ ID NO: 35003 - DNA, 518 bp, Oryza sativa
  Clone ID: uC-osrocyp010h05b1
tgttatgaatctacctcccctccccaaatctcgctcccacgcctcttccttccgacttgtgacagaatggcgctcaatgaggagtacacatacgtggagctggagaaggagccttactggccatttgagaagctgcggatctcgattacgggagctggcgggttcatcgcatcccacatcgcgaggcgcctcaagagcgagggccactacatcattgcttctgactggaagaaaaatgagcacatgactgaggatatgttctgccatgagttccatcttgttgatttgagggtgatggacaactgcctcaaggtgaccaccggggttgaccatgttttcaaccttgccgctgatatgggagggatgggattcattcaatccaatcactctgttatcatgtacaacaacacatgatcagctttaacatgcttgaggccgctaggattaatggtgtcaaaaggttcttttatgcttcaagtgcttgtatctaccctgaattaagcagctggacactgtag

SEQ ID NO: 35004 - DNA, 316 bp, Oryza sativa
  Clone ID: uC-osrocyp010h06a1
gtaatgatcattgttactttttttatcagtggtttctttttttttctttttcataaagacctcacaacttggcatctcatggacaatcttattggcacgggcattctggagacactgttaaacttgaacgacacgaggggaccaggggatcggtgacagccctaaaagatgacgcttttacagtgggttgaggacctattcaccaccatagatggggaattggccccctttctcaatgttagcaacagtaaccttggggctgtaagtaaggagcgcttcccggttaaaacgaataccatttgcttcctccgaaagg

SEQ ID NO: 35005 - DNA, 419 bp, Oryza sativa
  Clone ID: uC-osrocyp010h07a1
ggctactgctattactacccttggcattgcttccacttccaggggaagggggctcgttttgcgcgccaaacgattcaaacatgccagactgcagtgcattctgcaaccactcgaagaactcctcttcatcgattccgccatccatgtttacaccattagggatccctccacccctctgcgccgaggtgctccccttgccactattctgctttaacaagctggcattgacatggaagctcggcttgtgagtgttcgcggggcatctcattccctgacaggtgaaccactcggtgacatcgaaaatgatgctttcagcacaaacatatgcatgaggcaattcaggcttgtgcagcaacccaaatagaactggttgaaaagactgctcaacccatccatccccatctttagcttggtgaaat

SEQ ID NO: 35006 - DNA, 389 bp, Oryza sativa
  Clone ID: uC-osrocyp010h08a1
gccaaaactctcaaagattggtgcaagcaagcacgacatatttgaaacaatctcagacaatccaaatgtgcatccaggtagtagtatctctcagaaacaagaaaaaggaaacaaaacaaatgtcttcagagttcagagttcagaaaacgctgaactcgcggaagcagaagcgcagaggcgtcagttttcatcaggcgccgccggagctgaaacatcagcagcagcttcttccttgctcttctcctcctcatcatcatcagctgatgatggtggtgatggtgttgatgatgccgcggctgcaacctgaaccgagtcaggatccacgcgcttttcctcttccggtaccttctgcgcgccggcgtggtcgccttcttgggcagcctctggtt

SEQ ID NO: 35007 - DNA, 177 bp, Oryza sativa
  Clone ID: uC-osrocyp010h08b1
tttttgtctttgtcttagctcttaaacaatgcgtggtaccttgtcatactgtttgcgttgcaatgctactagccgaagtatatgccagcttcttattcataaaaaagaaaaaagactgaacgaacaaaaatgaaaaaaaacaaaaaaaaaaaactgaactaaaaaacaaaaacatag

SEQ ID NO: 35008 - DNA, 394 bp, Oryza sativa
  Clone ID: uC-osrocyp010h10b1
atcgtgttcaaacgcgcacgtggaagcgtgggtgccaatcgtagacggcgttcatgcctaaggacgaatacttttctgtcagagttggctcgtaggaagagtctctaatcacacttttcagcctattgggtaggctccaatttccagcaccaactaagtcactgaaacctgcacttatgagccaatcggttcgatgtggctactctatcatctcctaggttactagagaccgatgaaatcccttccgccggagtgactacacgggttgctgctagaaatgcatttaaagcatgaactgacggaattgaaatccatagagcttatggctatatgctcgaaccggtccttaatgaccttgccaatgaacgttctgaccaattatggtcaaagctta

SEQ ID NO: 35009 - DNA, 492 bp, Oryza sativa
  Clone ID: uC-osrocyp010h11a1
gtatcaacattgctataattgatttaggcgagtacacaggctacaaacaaaagtataaagagttctccaaaagcggtaatgatacaaatagcccagccccgtatgacgattctagtaacacaatatttcaggtgaacaacaaaggtgtatcagaatttattggaacccaaattccacaatgaactgcgacacaaataatggtgaaacccaactattaagtatgctccagtgacatctttcgccaaatgcgatgcagcagcttaggcctggttcttcttgggcacttggaggcgctcccggaaatcatcttccatgagcaccaagccatcacgcagaacgatcttgggctcccaccccaaaacttcctttgcctttgtaatgtctggcttcctctgacgaggatcatcaggagtgttctcagtcattgtgacggtaacctctgggttgatcaactccttcacattctcagcaagttccagcatggtgaattca

SEQ ID NO: 35010 - DNA, 491 bp, Oryza sativa
  Clone ID: uC-osrocyp010h12a1
tttttgggacacagatttctaagggccattccacaggtaaattcatggttcagattttaggacttcagatgagaaactactagatacacatccatcagatggatggatgaaatcaacagtcgagacaacttactagcaaaatatccagttctagaacacagaaacagagtacttcactaacaatctactactacatgtgagtagtattagcaccattcacgacaccaaataagagttcagcagcaaaagcaggaagtagtcacagatgaaacaccagagcccctcccagagatgagaaagcctaagccctctcaccacggatcctcctagccagctgaatgtccttgggcatgatggtcacacgcttggcatggatggcgcacaggttggtgtcctcgaagagacccaccaggtacgcctcggcagctttctgaagggcaagcaccgcatggctctggaaacgaagatcagttctaaaatcctgggcaatc

SEQ ID NO: 35011 - DNA, 447 bp, Oryza sativa
  Clone ID: uC-osrocyp011a01a1
cttcgtaactaagatgaagtatttttgaaactgttcattattgaaaaccaggcattttaacgcccttcattgattgtggatacaagaacactaacactaccgatctcgggagcagctcaatatccatttgagccggttcgcacagaaaccacacaaattgaaccattcaattcattctagtgagtggaacctacaccgatgaccaagaaattttccctcgctggattccaggaaataatttaccttaacagcatatgggggtaataacatgaacccacgcttgctttatcactgatatttgatgacattcctttggagcctgacatttatgccttctcttgcttacggaagagattcattgaatcgctgtataaagcaacataatttgttaggacagtaagcaccatcatggctacaggccagatcttggcactcttggatgcgatt

SEQ ID NO: 35012 - DNA, 474 bp, Oryza sativa
  Clone ID: uC-osrocyp011a01b1
ctctttgcgacgtcgtccccgacctggagctcgacaccacccacggcaagatccgcctccacgacttcgtcggcgacgcctacgccatcatcttctcccaccccgctgacttcacgccggtctgcacgacggagctgtcggagatggcgggctacgccggcgagttcgacaagaggggcgtcaagctcctcggcttctcctgcgacgacgtcgagtcgcacaaggactggatcaaggacatcgaggcctacaagcctggccgccgcgtcggcttcccgatcgtcgccgacccggacagggaggcgatcaggcagctcaacatgatcgacgccgacgagaaggacaccgccggcggcgagctccccaaccgggcgctccacatcgtcgggccggacagaaggtgaagctgagctttctgttccccgcgtgcacggtgccggaacatgcggaagtgctgcgcgcgactgacgcgct

SEQ ID NO: 35013 - DNA, 466 bp, Oryza sativa
  Clone ID: uC-osrocyp011a02a1
aaaagcaggcaatgatcagtgttcatttaccagtctccaaagcaaggtaggcagcatttagcatgtcattacaagaaaaaccatggtgctactgactaaaagttacagaactaaagatggcaacaatgttttaagtgggatggtcaatggagatcatcatggcattgcagccaacacatatgaccgatcacaacgttttaccaccaccaccaccaccacttgacatgagtgaggcggcagcagcgcctgcagtcgggacgattccagtcgaattgcctggtttagagagatgcagaagcggtgctagatattcacagaacgaagtgacggctgaaacgacatcgttgtaattgtcagcagcagcaggggccgtgatttccactagctgtattgcaggagtgattggcacagctttcttggtagcatggagttttgtcatcttgctaacagaggtaacggtcacagt

SEQ ID NO: 35014 - DNA, 462 bp, Oryza sativa
  Clone ID: uC-osrocyp011a03a1
gtacaagttacaacgcgaatataccattgagtttgatctaatctgtacttacaaattgcagaattcagctcatcaggcacatagatatcctctcaagtagaagtacgaaattgctcaccatcagtgaaaagcacttctcttccaccgacagctgcttctatgttccaccaaaacaaaatcaaccagatcaactccctaattgctcactaaccagagcaattttcccatttactggagcaaaaaaaaaaagcaaaatcattttgctattcacctcatgagaagatgaagttttacattgtcatgtatggctcctgccccagcagcgaacgagacgcccggtcgcggatcctggccgacgccgagcgtcccacggccatctcctgctggacctcgtcgacgttcggcgacggggtgggcgccggcggcgccgccgaggaagtaaacgtggagaccatgctgtgc

SEQ ID NO: 35015 - DNA, 459 bp, Oryza sativa
  Clone ID: uC-osrocyp011a04a1
ggccgtccttttgtgaatcatgccttttcatgattttgcgaaggatgaatcggtgtgatgcagtgtaacggggaagtgaaacagattacaaatcggagcaccaaacatagcaacgattcaacgaatgtaccaccaccacaccaaaaccaaagctaaaagagtcgatgatgatttgggtatgcagtaaaaatctgaactgtaaagcgacgagccggtgatgatgagcgtgagatttggcattggtttctttataggaaagcgtccatttcgagcaccttgaggacctcatcctggttgttcagcttggccacctcgatgggggtcttcccgtccagattctggggcgtgacagcagcgccatgcttcagcagaagatccacacattctttccgaccatatccagcagcgtaatgcagtggggtgttcttgttcttatccagtgcgtttacagcagcacct

SEQ ID NO: 35016 - DNA, 539 bp, Oryza sativa
  unsure (1)..(539): unsure at all n locations
  Clone ID: uC-osrocyp011a05a1
ggccgcccttttttttttttttgggcatacgaaaacaaggaatattttttttggagggtgggcatccatctccagatacatacataacacaaccataaacaaaattaagatcttgttagcgaaatgacgcccaacaatcttcatcggaccaagaagggattattccttcttttttgacgaactgcctcgattagctgctctgatttaagcttattccatcctaatcagcaacatcatggtcttgtgcaccaatggtctctgcaaactttattaccacttatgtaccaaatctagcggcaagcagcatctccattcctggaactctgatccttactggccttgatgttggcagcatgccggcatgtcctactgcttaatcaatcagtttcaagttcacggaatggtaatgggacagtcttcactgctctgaacttgccaacgtgttcaaatgttcattctccaatnctaaaagttccaatggcctcgtctgattatctctagtgaagcgagcgagaaatcagtaagcgcgactcacctta

SEQ ID NO: 35017 - DNA, 360 bp, Oryza sativa
  Clone ID: uC-osrocyp011a06a1
aaaccagaaattatccatccctttaatttttctgcacacagtttccatgtccagcctacaatataatagtggatggaaatataaaaccacagtttgattaacccagcgacaatgcacaaacacaacctttttgtttttaattaagtcacataattaacgactgatgcatgcatgacacgtctaaaaagatcatcgtcgaagtgacaatgtatgaacttggggtagaactttcttcttccttggggggctaaaaaaaaaactttggcagaaactggttcaatcatgggggcctatgagtagaacttgaacttgcagccccatgagattcctatgatgaacatgtaatctacgagtagaact

SEQ ID NO: 35018 - DNA, 522 bp, Oryza sativa
  Clone ID: uC-osrocyp011a07a1
tttttgttttttcgttcaaatacaaataaacctttactacgtacacaaaaataagttatcttcaagagagaaaacaaaactagaggtacaatcattaagacccgcaattcggctagtagaaaattcgaaacaaaaagctttcaaactgcacgggcaaacatccttgttgcccggtgaaacccaacacaacaatccattgcatacattaggaatgccctgatgcgatgccattgtctgaaaaaactgaccgactcagacgacctacactgcacactacctggacagatttcttccagtacaccaattgacttcaccttccgcattgccccatggccaacagccctcaggtgctactgaaaccatgggacgcatgcaaacaatctgcagatcacgtctcaatcagctgataatggtacaaatctgcccacaaacttagaagcacttcatgtggacgatgcctggaccagattcatcgtattcggccttgggatccacatctgctgaaggtactgagagaagcca

SEQ ID NO: 35019 - DNA, 503 bp, Oryza sativa
  Clone ID: uC-osrocyp011a08a1
tttttgtgtttgcaaacgacactagatagatattgacttaatctcggttttcatgatctcactacattcctcctgaaggtgatacacttatacacaccagaactttggatcgctttgatagcgcaccaacctaaacgagcattcaaatcaaatgagccctaattatgattcaccttctctcaagaagataacacacatattaattagacagttcaccagcaaatgtgataagctacagccctactactcgaacttgttgatacgggagaggtcgcatgagcatcttgtcgatctttgtcgctgccggggtcgccaacgaacctgccgacggagcggagggagggcacgagggcggaggcctgagacctggggtggggacagacgttgccgagggtgcatagatggaactcggcaaggccgtagccgctcagggtgtccctcacctgcctaaccgggttcggtatcttgtaccgattgaaccgtttaacgtactgcagcgattt

SEQ ID NO: 35020 - DNA, 524 bp, Oryza sativa
  Clone ID: uC-osrocyp011a09a1
tttttgtttttttttttttttttttttttttttttacaagaaaaaattcgttggttcattcattattccggggacaaacccttcacataacatatggaaggaataaaaaaccacatacacccaacagcaaactggaaaataattgatcatctattcaggactgatgatatataatacccccagagaaggccacacattatccttgaactgatcagacagagaaaggcggtaggaaagaacattgataaccccatattttgaccctgcagtaggggggacaccccacaatattatttccatcaattcttttcatggcagacgagtagcatttgcgaccgatgctgtaccaagagcagcttggggattatctgcagtatagattgcacgaatattaagttctcgaacagcatcctcgctggtagagcttgggtccgttgtgaactttatactgccatgggccattgaaaattctccagttccaccaataacagaccactcaccactgtttgcagcaataatcccca

SEQ ID NO: 35021 - DNA, 332 bp, Oryza sativa
  Clone ID: uC-osrocyp011a10a1
gcatccggaaagcacttttaaagtgcttgatgctaattgataatgtttcacggctcttcgaaacatttgtttacaattaccaaacacccagctttaaatttacgtatgtattacaaactgctcccagattgatttaaggataaaagagaagagtagaagatgttcagagaaatttcacagtaccctcacaagcctcattataagtgcaaaggtaactgttttatttatcgaacaaacagctatggagtggcatgatacttctcagaaaaaaaaactaatggccagaaatctcaaaaaccattatgatggtgggaacactgaagttaggctca

SEQ ID NO: 35022 - DNA, 470 bp, Oryza sativa
  Clone ID: uC-osrocyp011a11a1
tttcttgaccccccaaaggccctttgggaaattttgggttttagggaaaacaacaaaaaacatctccttatccattttcagttccctattttccaacaaccataaacaaaattaaaatatattgagcgaaatgacgcccaacaatcttaaccagacaccatgccgattattccttcttttttgactaactgactcaaataaataatctgatttaagcttattccatcctaatcagcaacatcatggtcttgtgcaccaatggtctctgcaaactttattaccacttatgtaccaaatctagcggcaagcagcagctccattccctgaactctgatccttactggccttgatgttggcagcatgccggcatgtcctactgcttaatcaatcagtttcaagttcacggaatggtaattgggacagtttttactgatctgccggagccaacgttgttcaatgttcattctcca

SEQ ID NO: 35023 - DNA, 422 bp, Oryza sativa
  Clone ID: uC-osrocyp011a11b1
tctttagaactcacccatatgagacctgtactagtggccaacaatataagcatctggcctatgtgatctcctttctcccatacttctggagagccttgcagtgtttaagaaggtacttggaggaaggacatgatatcaaccaacttgctaatgctggaaaatatgtatcagcaatggtagcagctgctgttaggttcaaatatgctgcaacaccaacaccattctgggtgtggatggtcatcatttcatcctcaggtgccacaatttaccagctctactgggactttgtcaaggactggggcttcttaaacccaaaatcaaagaaccgatggcttcgtaacgagctcatcttgaagaataaatcaatctactacgtatccatgatgctcaatcttgcacttcgcctagcatggactgagagt

SEQ ID NO: 35024 - DNA, 58 bp, Oryza sativa
  Clone ID: uC-osrocyp011a12a1
tttttggggtatattgttttttttggtttaaccaaaccaggaaaaatccatcccttga

SEQ ID NO: 35025 - DNA, 333 bp, Oryza sativa
  Clone ID: uC-osrocyp011b01a1
gggaaggtgaaaaccttttataacccttgtagcatttgattggaaaaacagatgttcacaagtagatccagagctcccgaaactggaaaaacaaaaacccgggggaagggacccaaggaacataactgaggggcaaagggttaacatttttatgattgggcccagtttgcaacaagtactaaaaggttttactgaggatttgggggcctggagttggcagcaaaaacccttgatccccattccagcagttttttgctgggggcgaccttgggcgcgaccccctcaatgaagcacaggggggcctttttccccagggccatcctgaacgccttc

SEQ ID NO: 35026 - DNA, 507 bp, Oryza sativa
  Clone ID: uC-osrocyp011b02a1
tttttgtttttattaacagcattacttcactatattccacagtaatttcggaagggataaataaaaaacatacggttacattttacatacaaatgacaaacataatccgttcgtcactttcaggcaacagaacagcaaatgcaccactacacccaaacagcagattacacataactagagtacttaccgaatgatcgatcgatcaatcgaagcagcacgggaaacacacacgtggaagcatctacgtcgtgcgttggtttattacacacgaaaccgacggcccagatctctccctccctccctcaccatcagtctcagtccacctgggtgaagcggaggtagcacttgttggagggcagctgggcggtctcgaacccggccgggaacctcgccttggcctcctcgtcggagacgccgggggggatgacgacgcgctcgccgggcttccagttcaccggcgtcgccacccggtgcctcgccgacgtcagcagcgcgtccgtcgcgcgc

SEQ ID NO: 35027 - DNA, 450 bp, Oryza sativa
  Clone ID: uC-osrocyp011b02b1
cttctcctagctcgccaagatgaggatttccatggctctcgcggcggccgcgctgctgctgctgctgtcgctggcagcggcggacatgtcgatcgtgtcgtacggggagaggagcgaggaggaggcgcggcggctgtacgcggagtggaaggccgagcacggcaagagctacaacgccgtcggcgaggaggagcggcggtacgcggcgttcagggacaacctccggtacatcgacgagcacaacgccgccgccgacgccggggtccactccttccgcctcggcctcaaccgcttcgccgacctcaccaacgaggagtaccgggacacctacctcggcctcaagaacaagccgcggagggagaggaaggtcagcgacaggtacctcgccgccgacaacgaggcgctgccggagtccgttgactggaggaccaagggggccgtggctgagat

SEQ ID NO: 35028 - DNA, 415 bp, Oryza sativa
  Clone ID: uC-osrocyp011b03a1
attaacagcattacttcactatattccacagtaatttcggaagggataaataaaaaacatacggttacattttacatacaaatgacaaacataatccgttcgtcactttcaggcaacagaacagcaaatgcaccactacacccaaacagcagattacacataactagagtacttaccgaatgatcgatcgatcaatcgaagcagcacgggaaacacacacgtggaagcatctacgtcgtgcgttggtttattacacacgaaaccgacggcccagatctctccctccctccctcaccatcagtctcagtccacctgggtgaagcggaggtagcacttgttggagggcagctgggcggtctcgaacccggccgggaacctcgccttggcctcctcgtcggagacgcccggggggatg

SEQ ID NO: 35029 - DNA, 454 bp, Oryza sativa
  Clone ID: uC-osrocyp011b04a1
cttcctttttttttttttacgacacaccaccaacttggatatttactgtgtcactaattactgatctaaagtgattccgacaaatatcacaagattgttaccacaataaaaactccaccaatctactcagaaatacattgccctaaaaacaaactgtttcgtcgtcgtcgtcatcatcgtcgcgcaccaccacctgggtacgaaatgaccagtgtacccccgccgcgatatcaaatttacaagctagtacccctgacccctcctcgcaactaacaacaaagagaagagaaaaaaaaacagctaagaaaacaaccatgaagccctagattgctcgctcgccggagagagagctctacttcttcgccttccgggcgggcaccttcctcgccggagcggccgcctttttcgccggcgcggcccttttggcgggcgcctttttcgccggggggggggg

SEQ ID NO: 35030 - DNA, 456 bp, Oryza sativa
  Clone ID: uC-osrocyp011b04b1
cctacttagggatagctggacgcccgtgcgaccggcccggcattcccgggcttcgtactcgcctctctttttgccctcctccgccgccgctcgccgccgttcgtctccgccgccaccgccgccgccatgagggagtgcatctcgatccacatcgggcaggccggtatccaggtcgggaacgcgtgctgggagctctattgcctcgagcatggcatccagcctgatggacagatgcccggtgacaagaccgttgggggaggtgatgatgcttttaacaccttcttcagtgagactggtgctgggaagcatgtcccccgtgctgtcttcgtcgatcttgagcctaccgtgattgatgaggtgaggactggtgactaccgccagctcttccaccctgagcagctcatcagtggcaaggaggatgcagtcaacaactttgcccgtggtcactacaccatt

SEQ ID NO: 35031 - DNA, 504 bp, Oryza sativa
  Clone ID: uC-osrocyp011b05a1
gcgtggccgccctttttttaaaagaattattctttattttctaacaagcatagacaacactcttcagcatccagggggaaatgattcaaaattcagtctatttgggacaatatgagtggtagataagtccagcagggagaaacagcagggctcaccacaaacttttggggttacattcaaaacccagcatataaatttcaccttctaatagctactaaagcgaactggagcaaacattcctggggctaccaacagcatagtctgtcttgatgcttaaacctcctggacagtcaaacctgaaaaaagaaattcacaatcagtaacagctaacaatggctggtcaattcaacaaaagaaattttgtaccttatgtgtcagtgataaaaacagtaaagcacagaaggcaatgtaaaaaacatatataaattcaggatgaactatagacagctcaattgtgtgtattacagggttgtaagttggctggtctttaggctgcaccaatcc

SEQ ID NO: 35032 - DNA, 110 bp, Oryza sativa
  Clone ID: uC-osrocyp011b06a1
taatcctccttagcggccgtccttttgtgagctcgactcccaagtagccagaccggctcctgcatgcgtaccatgctatccctatagagagatcaattagagcttgagca

SEQ ID NO: 35033 - DNA, 434 bp, Oryza sativa
  Clone ID: uC-osrocyp011b06b1
ctgtctagcacccaaatggcggcgccggtgaggtcggtcctccccgtcgtcctcctcggctgcggcggcgtcggccgccaccttctccgccacatcgtctcctgccgcccgctccacgccaaccagggcgtcgccatccgggtgctcggcgtcgccgacagctcctctctgctcgtcgccgacgacctccactccaacggcttcgacgacgcgctcctcgctgatctctgcgccgccaagtccgccggctcgcccctatcttccctgctcgctcgagggcaatgtcagctattcaacaacactgaggctaggaggaaagtcattgacactgccagcgttctagggaaaacaactggtcttggactaagtgattgttctgcaacttatgatactgttggcatgctaaaggatgccgtggattgggatgttgtgtt

SEQ ID NO: 35034 - DNA, 471 bp, Oryza sativa
  unsure (1)..(471): unsure at all n locations
  Clone ID: uC-osrocyp011b07a1
tttttgtttttttttttttttttttttttttttttttttttttttttttttttttttttttttttttaaaaaaaatccgggcaacaatcggaaaaactggggggtttttaccccggaggtggccccaagcaattttccatcaaaaacagagggggaaggggtagtccatgaaaacgggtcaaaaaacaaaaacccctggggggattgggtcgatttcccccccaaaaaaggggggggggacaaatgggaaacgaaaaaactcccccccgaaatcccgaatttgaagaacagattttaattggggccccagcaaacgaggggaaccccctttgggattttttccccctccgacctttttgacctgggggccctgccccacccggnggtgggaggggaggacccccccgcgcccccggtttgggacaacagggaccccgggacggggcggccggagacctgtttggggggggg

SEQ ID NO: 35035 - DNA, 510 bp, Oryza sativa
  Clone ID: uC-osrocyp011b08a1
tttttgtggatgtgtacgcagctagctagctagcagctgttacatatatatatttatatagtactgatcagagattgagatgcaactgcaagttgcgctatagaacgagttactaacatgtatatattaattcctccatcgatccctatatgcaagctagtaattacagtaattagcagctgtagcaaggatgtaacaattgagatgagctgagtactcccacatgattaggaggcatcgatcgatcgagttgatgtagtcgtcatcgtcttggcggctgatggatgatatatactatccccagagaggtagcgaataatccgagcagaagaaggcgtcatcgatatcccagagcggcgaggcgggcatcggcggcggagcgacgacgttggtgctgctgctccagcagtcgacgtcgacgatgatgtcgtcgttccagagaggatgaaggaacagttggcgctggtcctcatgatgttgggcctgcaggctgccactggccgacgactc

SEQ ID NO: 35036 - DNA, 484 bp, Oryza sativa
  unsure (1)..(484): unsure at all n locations
  Clone ID: uC-osrocyp011b08b1
ccttgacctcctcccctctccgccgcctcgccctcaagccctcctcctcccgcgccgccgccgccgccatgtcgtccgccatcgccgcgccggtcgagcacatcgtgctcatcaaggtccgcccggaggcggcgtcgtcgggcgccgccgcggcgatggtgtcatcgctgcaggcgctgtccacggcggtgcccgggctgtcgtacatccacgtcggccccgtgctccgcctccggtcgccggcggcggaggcgctgggtccgacccacgtcctccactcccgctacgccaccaagcccgacctggcggcgtacgcggcgcacccggcgcacgtcgccgccgtgcaggggcacgtnctccccaacgcgctcgactccaccgncatcgactgggtcaacgccgccctggtgccgtccccggtgaacccgggctccgccgtgcggctcttcctggcgaagttgaaggagggtgtggaggcgcacca

SEQ ID NO: 35037 - DNA, 454 bp, Oryza sativa
  Clone ID: uC-osrocyp011b09a1
tttttgtttttttagatgtagtatttttttaaattgttttttattgttaaccagggggggggaccacccacctatggtagagaaacaaaaagggaaaccaaacaaaaaagcgcaagcaccttgaaaccaaaccgggcaatttaacccagaacacaatgcaatggaatgaccagaacaaagcgaagggcggggagccaaggcccgacccaacgaagccttggactaaaccaaaccacacgaaaccgatgctagaacggaaccgaaacggaaagggaaccgggacgcgaggacaggccagacttggaccgaacccaaccatttgcacaggaccgggccacaaaacaaacccgacaacaaaaccaagggcaggggggggggactgcacttcaatcaaccaaaccaaaacaccgctggggaatacaacacgccaagcaaaacaaccggtggcccttac

SEQ ID NO: 35038 - DNA, 493 bp, Oryza sativa
  Clone ID: uC-osrocyp011b10a1
aaaagaattattttttatttcctaacaagactagagaacactcttcaattaccaaggtgcagtagtctgaaaaaacaaaaaataggccttcgcttagcctgctagacatttgccatatgctgataaattatctatcttcacgtgggtagactaggaatcacgaactggaatctatttcaggagcggtttcgacattgaatcgtatctgagggagcagccgagcctcgcttcttggcttctgagctgcagatgctcacagtgcgaaagggactcaaaagaagagactacttggggttggggtcctgtgagcctcctggttgccacaatttcttccggattatgaagatcatttcattctcctcagattctggacttgactcggcatctacagttgttactgcttcccagtgaagtgcgttgaggtatttcttgatgaattcgatgacagtgtccttgtctctcacgatgataaatccactaggcctaacgatgc

SEQ ID NO: 35039 - DNA, 450 bp, Oryza sativa
  Clone ID: uC-osrocyp011b11a1
gtgggctcgacttccaaagtagttcagaacgccttctgcgtgcagtccaaatattgatatggctggtcaagatttatttaggtaatactgtgaccaaaagaaccccacaagtcacgactcacaatcaactctgcggttcgacctacaagacatagatttcaagccgttttgtggaagagatcctggagatcaagtatgtcagcaagaactccagctgcagtggtatcattgccagctccagcgccctgaatcaccagagggggcgctctcgtagcatctgctgtatatctccaccacattgtcactttcttttaacctttccagtgcagagtttttcgggagttcttcaaggcccacttggcaccctgtgctttcaatcttacagacatagcgaagaacattttctttcaaagatgctgcctttactctttcttcaatgcttttatcaag

SEQ ID NO: 35040 - DNA, 405 bp, Oryza sativa
  Clone ID: uC-osrocyp011b12a1
gagtggccgtccttttttgaaacaagccagtacaagatattgcgacggttctattggtatggaagaaaaaaaatgcaagattacaatcctgggagactgcagtcaggaaaaagaaaatacaaccacaccgcgcgtctacgtctgatcccactgcagaaacccagcaggtacacaacacgaatggaacttataaacgacgcctccaaggaggaagcgacgccaaagagcaccgccgtcgcccgtcctagaacaggatgtggttttcacctaaaggaccaaaggaggaaagcgcaacaacgccccgcaggcgtcgccgttgccggcccgaaggctaggctttcacccattgctttcctcctcccccgcgtcaacgagtgctcgtcagaatcaacagccaccaccagc

SEQ ID NO: 35041 - DNA, 51 bp, Oryza sativa
  Clone ID: uC-osrocyp011b12b1
atgcgacatcatagcctttgctatagagtgaccgaaataaagtgaacagga

SEQ ID NO: 35042 - DNA, 473 bp, Oryza sativa
  Clone ID: uC-osrocyp011c01a1
gggacataatttccatatggtttggtattggatgatccactgaatgcttacgagcgaaacaccatcaacactagctccagaccgaccgggtgatataccagtatgacaccctgatgatcttaggctcggtacaatacagattctgtggaccaataatgtcacttcggtgcgaaaaacccaacaataagaaatgttatgatcagtaatcctcgatttgccttggaacagccaaaagaataacagccagtacttggtaacaggatttagaggccgaacatcaggtccataactttggacaatactgattttgtgggtgaagcaatggcccccgaagcaccacggccactcccgttgccgattccatttggcatagaattgctaggcaaaggtgctagtgcatttctagttgtaaatgaacttggtgctacatgctgtgatggaaatggatctgttgcaccaacttgaaagttctc

SEQ ID NO: 35043 - DNA, 420 bp, Oryza sativa
  Clone ID: uC-osrocyp011c02a1
ctccccgtacaataaccaatatatatcatgggggaaccaataatacaataacagaacttactccaaattacaaccagctgaccaaagcgtaaaacagcatcatatcatgcgtacggaaatgaaaagttccagggagaagccacatagcatcgagaaacaccacaaaagaagagaccaagctattgactgtatgtcggtatggtttggagctgtataaaatgcctaacgatgttgtgcgtagggacacgcacacgcccaattgaatttgcccaatggagatctcaagcggaccccttgagctttttcgcgatgcctgcaaagtacttcccctgggggaaggggtgctccagctccatttccgtgggccaccttaagccgtcggcggcaaaggtgccggcgccgaacgggctgcccccctga

SEQ ID NO: 35044 - DNA, 470 bp, Oryza sativa
  Clone ID: uC-osrocyp011c03a1
atgcgcgcgtacgtgcgccttggctcctgtttggcggccgtcctcggtcgtcctttttttttttttttttatttttttttcagctgaattttacatatccattcagaagcaaatttggcagtggtttgaccaattgtcccccgtttttacagaggtttattagcgcttataaacctattgtaaacctataaatgcttggcgggcacggtagccccccgggcgtgcgaatcgacgacgaatagcaaccacgaggaccatttgatgaagcaacctcactgtgtttggacggtctgatacggttctgaaattgctcaagcgctgttctttttgccgttgccaaacaagaaagacatgtttggctttgccagggtacgcttaaaagccttcactgccaggggactgtccttagccatgaggcaggttccctgctgaacattgcagatggggtactcttgagggcagcagctgta

SEQ ID NO: 35045 - DNA, 277 bp, Oryza sativa
  Clone ID: uC-osrocyp011c06b1
ctctcagctcagattccggctcgagctgccatggcggcggcagttactggcggtggcggcggcggcttcaggcggtggctgcgcgaggggtggagccagcggcggctcccctccttcctcccagatccggtggaggcggaggtgaagggtggaggcggcgcggagggtggatgccacattaacaattccattcctaatagacgccgacacgaggctagctagtagataacatgttacagatcggtgagaccacactatatggtagctgattgatcta

SEQ ID NO: 35046 - DNA, 379 bp, Oryza sativa
  Clone ID: uC-osrocyp011c07a1
acagtaaaccaattgttttattaggccacaaaattggcatgatatcatttaactgtgaaacaggggacatgatactatattaaataagacaagaaattgccacctcgttgtttccagaaacgaagagattagacaaattttacatgagactattgatttaccacacaaaaaggttttccacaagcacgatcaacttctttaaacacgcgccgcgtgggaacatctctggctcatgaaaggttagtgcggagcttgatcttctggacgaatatgggaaagacacacgggaggggtggaccgccaagggctacttgcaaagataggacacattggacggtggatttgggcctgtcaaaaggcatgggccaaccagaaattg

SEQ ID NO: 35047 - DNA, 464 bp, Oryza sativa
  unsure (1)..(464): unsure at all n locations
  Clone ID: uC-osrocyp011c09a1
caaaatcaattgccattgctaaccacaggccacagcacacccaatcacaaggattgtattattctcaaccgatcaaacaaggcaactagagttttcgaaccaaaggcaaacctctcagaggttggccggcgccggagcctccgcggcggcaggtccgacgacgaattccagctcgagcacgtcgtcgagcagcggcctgactatggccttggccgcctccaccttcccgtccccgtccaccgcgtcgagcccctccacgctgtcgaacaccgccaccatcccgaactggtaccccttggcccgcgcgggggagaaagttctccccgaagctcaccttggcgcccttcgcctccccggccgccgccgtcgccgnggcgagcttctccgcgagctggtgcgcctccacaccctccttcaacttcgccagggagagccgcacggcggagcccgggttcacccgggac

SEQ ID NO: 35048 - DNA, 366 bp, Oryza sativa
  Clone ID: uC-osrocyp011c10a1
gaggtagaacccattcggtaggttcggaggttctgaactgttaacaaattgtcaggttacacttgagatgagatggatgaatgcccaaggccattacaactctggaggttgccacacgcttgtgtagtgcagagaacattgtttgagctttgttgtttgccacatggtgaactcactctaccaatcggcgaggggctctcttcaggcctagatagactgttacaaaatacagacttactacttagtatgggactacttgccttcatctactctatcccaagttcgaacgacagctataggcgcgacttgttgttgcccagcatctgcatacggttctgcacatgatgctattcgtagcttgattgc

SEQ ID NO: 35049 - DNA, 300 bp, Oryza sativa
  Clone ID: uC-osrocyp011c11a1
aaaaaaaaagcccaattttttttttttttccaagaaaaaaaaaaacccaaataaaaaaaactccgaaaaaaagcccccctttccaaaaggggttttttttggggccaaaaaaaagattccggggggatggggccctgggggaaaaaaaacttttccgggggggggaataaaggggccccaccccccccggttgaaccccacgaggggaaaacatttggccccgggggggagggccccccagggttcttttttagggggcggggaaaaacttgatcttttttttccgaaaacccccaaggg

SEQ ID NO: 35050 - DNA, 257 bp, Oryza sativa
  Clone ID: uC-osrocyp011c12a1
caagccactccagcttggaaatttactgcgtcactaattactgtagctaaagagatcacacgaaactgacaagattgttaccacaatacactctctaccaaaatagtcaaagattcatagacctagaaacacactgtgttggatagaagcccacacggacagaccataggatcggagtactaattgaccattgtccaggcaccaggcaagaaccctgaccctctctagtacttgtcaccctcatgacccttgtaacc

SEQ ID NO: 35051 - DNA, 480 bp, Oryza sativa
  Clone ID: uC-osrocyp011c12b1
gggcggaccagtgggacttcggcagcgacccgccgccgccgtcgtcgtcgtcggggaagaggagcggcggcggaggaggaggaggagggaagaagggtatggagaagacgaaggcggcggcggcgagcgggctgaggaaggtgaaggaggggacggcgcatgggttccagtggatcaaggacaagtaccagcagaagaagtccggtggcaagaagcacggcgaccagcagagcttggagatcgccggcctactgatcgttgataccacatcatatcgttgatgatgatttgaggtgttcttgcgtgtagataggtcgatcgggggtcattctttggaccgatcgatatatggacgttaatttgctcgtctttgtgtggtatttgtatataggagatgagatttactccggtccaataaaaagtaactcgaggtaccgatacctcacggtaccaaattgtttccgatcgttggatctagct

SEQ ID NO: 35052 - DNA, 375 bp, Oryza sativa
  Clone ID: uC-osrocyp011d01a1
agaacatcacagatttatttatgcactcaagtgagcagatttatctgaatggtttcaccacaaacaatagttcagacagaaaggtaactgactgtaattaaaggtagtaaaacagattaacgacccacttagccatcagctttggcttcagaatttcagatcctctcatgacatcgacttgcgccatttcggcgtcggcgtccgcgcggcggcgccggcggcgccgcccctgcccttcttcccgctcgccggcgtccgccgctcgatgccgctctcggagtcctccacccgcgcgacgttggcgctcatgccgccgaaccagaacgtgctccacttgaagaacccgccgccgccaccggtggcgccttcggcggg

SEQ ID NO: 35053 - DNA, 372 bp, Oryza sativa
  Clone ID: uC-osrocyp011d01b1
ctcgccgccgcgccgctattcacccatttccaagtcgtcggcggcgtggttcgtggtggcggctgccgtacggaagcggaagcgcaccggcgccactagaccagttctctaagagccagatccgcttcaccgagcgccttgttccgttagggcctttttaatgacattagggtagcttaagagaagatacgtggacgaatgtaagcggcaacaagagcttcagaattaactgggtattcgccgaacctttaagcttagagatagaaagataaaattctttgagaggcgaaagatcgcgaggttgatcaccgcgcttgtgtaggggccccgttcaaatgccgatgatgccagcaataaacctgtaaaaattaa

SEQ ID NO: 35054 - DNA, 502 bp, Oryza sativa
  Clone ID: uC-osrocyp011d02a1
gttcttttttaaaaacatgagctggccgatcctatgctttatggttctgctttatagcggacacatgctttcgaagtttcgagtgctttagagctttacaataaatgtcactgcggttccttattaggggtaaaaggagaaaaagaagacaaaaaaacattggtcatgagaagatgtcacccctgcttgtaatcacgtcctggctacagaacgggcatatagaaaccagaatccaaaaatttaacttgtacagaacttaacaatgaagagatcttatgaagccgactccttggcgatcttctcagctttagcaatgacttcctcaatgcctcccaccatgtagaatgactgctcgggaaggtcatcatatttcccatccaaaacaccctggaaactgttgacgctctccttcagttccacgtactttccaggagcacccgtgaaaacttcagccacatggaagggctggctcaagaaacgctgatcttccttgcgcgagcga

SEQ ID NO: 35055 - DNA, 405 bp, Oryza sativa
  Clone ID: uC-osrocyp011d02b1
ggttttgtttaagactggagcaccctgtgcctcagagcgccttgccaaatacaaccagtttattaggattgaggaggagcttggctcggctgctgcattcgatggggccaagttacgagcactcggggagcgcttctaaacttgatggtgaatatcatgcggtttatgcccactgttatgtgcatgggtttggtgaagacaggatgctcatttttatccggattttacttaccagtctaactgtagataaagagctcgttgagcctagaaagacattcttcagtgagtgagcagacatgtacccgcaatcttgctccaatcttggtgatgagtaagactgagcttgggtgttttatgaccctgttggagcgtggatacacagagtctggcttttgataatattgc

SEQ ID NO: 35056 - DNA, 455 bp, Oryza sativa
  Clone ID: uC-osrocyp011d03a1
acatatatcagctatgtatgtactgtatttcacaaagcagtacagtagtagtagtacaattacagcagatagctgctctgtcaggctatacaggcaatcaggcagctactgcttagaatttcagataagcagatctacatacttcacatgctcaaaacacacgtgaactgagtaactgaccacaaacccaaccacaccagctgcctcaaccacacttacaagttacaacagacatcaccatgttaagtatcatacaaaccaggcagcattttattttgggatacacaaagtcacaaagcttgcacatatacagtacatacacagcatatattggtgtcccgattttgtcacaaatacacagtagtccagtgtcacaaactcacaatgccatgagtcacgggctgcaggggatgccggcttcagagaaggtggtgacaagcttcggcaagagcttg

SEQ ID NO: 35057 - DNA, 417 bp, Oryza sativa
  Clone ID: uC-osrocyp011d04b1
cgctcacccacagtgtggtcgtatccgctgcagtttgctagcttcacactgcgatgcctcctcgcccgtagccgtgtccagctgctgtgcgacactatggtcggtgtaacgacaagggcggtggctgcggcggtgctggaggtggtcgtggtcgtggctgctgccgagctcgagggcgctgagccgccggcgagcgagcggttggcgcttatggagctcctgcacacaacgccgtacgagcggactctgggatggaactgatctacaaggtggtgcggttgggtcactgtgacgtgccacccccggaaacccacggtggtgcacgtgcgactcccctgaactactctatatggggccatcccggcgggtacgcttgggcgactaaccaacctgcaggtgctctccctgcgctccacc

SEQ ID NO: 35058 - DNA, 314 bp, Oryza sativa
  Clone ID: uC-osrocyp011d06a1
gtactgcaaaagaagccatgtatgattttccttttttatgtatctccaaagcacagaaagacaatgaacaactaccaagtgccaacactatggctgatcttcacacaaggcaaaaggtagtgacagttcaacctgcatacaatgtatattcgccagactattcaaacattccttttatcagttatatctccataaactctcaatactttaacgtagcactcatctgtgattttgccaacttctattcggaagctcatgatgaatcggtttgaaactctattaaggcactttcctcaaaggaactctggtactgc

SEQ ID NO: 35059 - DNA, 485 bp, Oryza sativa
  Clone ID: uC-osrocyp011d07a1
agtaggccaaaccatgcaaacttacataaggtttaagtgcagtcataacacaatatacactagtttgataaacaaactttattcagcagcaagtaaataaggtaacacaaagcgaatatctgatcctcagtagcgcgccaggctagacaagttcggatcatagagcatcgccatcgagaactaggccaaaccttcaaaacaatgtacattgttggcctcacaatgcttgcagtgaccaccagttcgagcactggtaaattcagcaacagtccacgagaaagattcaacgaggtttggcttatctcggagcggcagcaagtggccatgaagacacatctgttgcgcaatactgccagcatatggaatcccactaggtcatcagtatcagagtcctctagaacggttctggacttagttatgacagtgggaactgcatgctggttttgaagcaagccaccgtattagcagcagcggtaatcataaca

SEQ ID NO: 35060 - DNA, 502 bp, Oryza sativa
  Clone ID: uC-osrocyp011d07b1
cgcacggccgcgccgccttcgtacgccgccccaagtcgtcgtcggcgtcgtccgcgggggcggctgccgaacggaagcggaagcgcgccgccgccgccaagaccgtttccctcaagaaccagatccgctccaccgagcgcctgctccgcaaggaccttcctaatgacattagggtagctcaagagaagaaactggaagaattgaagcggcaacaagagcttcagaatcaactggctattcaacgaacagttcagctgagagatagaaagataaaattctttgagaggcgaaagattgagaggatgatcaggcgccttgagaagcagcaacgttcaaatgccgatgatgccagcaataaactgtcaaaattaaaggaagatcttgagtatgttaggtttttcccaaagaatgagaaatatgtctcactgttttctggagggaataccccagatatgttagagaagaggaataagtggcgtaaacagattaaagaaatttgatg

SEQ ID NO: 35061 - DNA, 514 bp, Oryza sativa
  Clone ID: uC-osrocyp011d09a1
tttttgggttttaaacgggttttcatatatcagctatgtatgtactgtatttcacaaagcagtacagtagtagtagtacaattacagcagatagctgctctgtcaggctatacaggcaatcaggcagctactgcttagaatttcagataagcagatctacatacttcacatgctcaaaacacacgtgaactgagtaactgaccacaaacccaaccacaccagctgcctcaaccacacttacaagttacaacagacatcaccatgttaagtattatacaaaccaggcagcattttattttgggatacacaaagtcacaaagcttgcacatatacagtacatacacagcatatattggtgtcccgattttggtacaaatacacagtagtccagtgtcacaaactcacaatgccatgagtcacgggctgtaagggatgccggcttcaaaaaaggtggtgacaagctttggcaagagcttggctagcattatcttgaaaccggttgaggagtttttga

SEQ ID NO: 35062 - DNA, 427 bp, Oryza sativa
  Clone ID: uC-osrocyp011d10a1
aagggccctgaaacatttttatttccccatcctttttattcattccccccaaagagacggacccctggaagttttcttgccctcatcaggcaagcagagcccccccccccgggggcaggggaattgttatgaacaagacccttatcaacatccagggctaaaacaaacaaggggatcaaagcaaatcccgaaaaaaaaaacccaggggaaaggccacattttttttttgtccccaacccctccgggtcacccccccgttttggggatttttttttaccctgttctattcgctcagggggccacgatctcgccgtcgtcctttgaccccaggatcaactccgggggcgccgcccccggcggcgtttttttgaacgcgcccccaatggggtttggccggcccagcgcctttagggccaggggccccccc

SEQ ID NO: 35063 - DNA, 374 bp, Oryza sativa
  Clone ID: uC-osrocyp011d11a1
caagagagttggtccgaccagggatttagttcatttgttatccaaattagcatccatcactcaagcggtttcaacagttgacaaagctatttctgttcttcacacagcacaaatggtaatgacagcacaaaaagcccacaatgatattggacagtttttcaaacattccattttcggttatatcccataaaatccgatactttacggagcgctcatctgtgattttgccaacttctattcggatgctcatgaagaatcggtttgaacctctatgggggccccttcctctatggaaatcttgggtctgcttgccctgaaaccaagcacgcctctaatgcattgattggacctgccccaatgagcccaaagggact

SEQ ID NO: 35064 - DNA, 491 bp, Oryza sativa
  Clone ID: uC-osrocyp011e01a1
cttgagagtaaatagggaaaccttggtcctctatttgagctgagagaggaacctaactatcaactgcctgaggtgacattgtaccgaacacatgtacacatctggaccccaaattctttacgaacactggctcggtgatgaccaggcacatcggcagctccaccaaactggctgtttactgaccaccacggaggctgagcaccaggtggagggaggactccttctggatgttgtagtcggcgagggtgcgtccatcctccagctgcttgccagcgaagatcagacgctgctggtctgggggaatcccctccttgtcctggatcttggccttcacattatcaatggtgtcggagctctcaacctccaaagagatggtcttcccagtcaaggtcttcacgaagatctgcataccaccacggagacgaagcaccaggtggagggtagactccttctgtatgctgaatcggcagggtgcggccatcctctagctg

SEQ ID NO: 35065 - DNA, 496 bp, Oryza sativa
  unsure (1)..(496): unsure at all n locations
  Clone ID: uC-osrocyp011e01b1
cttctatctctcaattctcaagcacacacacaatccaacaagcttctcgaaattctcgatcgaggtggagtggtggtgtatgcgcgatggggctggatgtgggggaaatcggcgtcggcgcggcggacctgagcctggatctcaagatgttcgccgccaagagcttcggccgcgtcaggggcaaggacaccaccaccaccgccatgggtgactgcatccggaggctcgaggaggagatgggcaagatcgaggtcttccgccgcgagctccccctctgcgtccgcctcctcgccgacgtgattgatgtgatgaaggaggaggtggagaagaagggtggtgatcgtaaggaggatgangaaggacgccgccggcgacaagagcaactggatgagcaccgcgcagctctggactgggaattccggcgggccagacgccgccgccgctgatccagagaagcaagtcaaggtgaggatctcgtcggaggcgaagtccacgg

SEQ ID NO: 35066 - DNA, 494 bp, Oryza sativa
  Clone ID: uC-osrocyp011e02b1
ctgattggcaagaccatcaccctcgaggtggaatcttctgacaccatcgacaacgtcaaggccaagatccaggacaaggagggcattcccccggaccagcagcgtctcatctttgccggcaagcagcttgaggacggcaggacccttgctgactacaacatccagaaggagtcaacgcttcaccttgtcctccgtctcaggggaggcatgcaaatcttcgtgaagactctgaccggcaagaccatcaccctcgaggtggagtcttctgataccatcgacaatgtcaaggccaagatccaggacaaggagggcattcccccggaccagcagcgcctcatctttgctggcaagcagctggaggatggcaggacccttgctgactacaacatccagaaggagtccaccctccaccttgtgctccgccttcgtggtggtatgcagatctttgtcaagacccttacaggcaagaccatcaccctggaggttgagagctc

SEQ ID NO: 35067 - DNA, 294 bp, Oryza sativa
  Clone ID: uC-osrocyp011e03a1
catggcaaagaccagcatgcattcagttaataatcggaactttttggatggttactgtaaaacaaatgagtgattgagtgaagagcgataggagattcattttacatcgagagagggcgcacaaaatcagcaacttcctcagggcacacatgttggctccattcttttgatagtaaccagccttagtacacactttggtgcgggaataaaattaagttccaccttacgctccaaaatattcatgccagcttttttttcttccgatggcttcttttgggacgtggtttatgagcc

SEQ ID NO: 35068 - DNA, 457 bp, Oryza sativa
  Clone ID: uC-osrocyp011e04a1
aaaactaaaatcagattgtcatagcattcttcatttactcgccctatttgcaacttccgactctgaagaaaaacactgaaaatgcaggttgcttagcctgctacatctgcatccttctcaatcaccgtctgcttagcgacaacaaaagagcaagggcacagacgcagcagctggcatagatacacacaaaacacacacgagttttacaggacaagcctattttagaaattttacatgtactctctcttattgatccaaagggttcgttcatctatctccttcttgtacgctaccttatgctgctgtcagcttcttcttcttcttcttcttcttcagtaactggtgacgatgagcagcccgatcgccgtgacgacgatgggcgacggcaccccgaaccggaggtggctccagaaggagaggttgtagccgaagaactgagctcttctagcctgctcgc

SEQ ID NO: 35069 - DNA, 211 bp, Oryza sativa
  Clone ID: uC-osrocyp011e05a1
aaaggaaggttaaaaaaagagaagaaaaaaaatacattacttggaagaatgaagcctgagaaaaatacaatttgatccaacaaagcaatacccaggaaaagaaactgaagaagagaagagaatgagaaaaaaaattggcaaagaacagagcattggcatacaggcagccaaagaacctatgcaatttttaaactttacccctgaccaagaa

SEQ ID NO: 35070 - DNA, 377 bp, Oryza sativa
  Clone ID: uC-osrocyp011e06a1
gcctgcacgcgggcgcctgcttggacgctcgttctcggccgccctttgtttttttttgtgtattctggttcttgggactcaataatcagaggtggccctacatgagtttataatccgtatcatcggtaactttttttacaagagcatcacatattcgaggtgcaacatttgtttcagaggttctatgcactaggtttaactttccgctttcagtggggtccgcggacagcttctttgggtgcatttcttaacacaaagacaagggtggccataaccaggtaccgcaagaaaaatttaactaacttgaaatgaaaagaaaaggatatggacttaatacccgtctataccatttggcctttggggggacatacaatatc

SEQ ID NO: 35071 - DNA, 509 bp, Oryza sativa
  Clone ID: uC-osrocyp011e07a1
cgtgtgggcggggtagcattcatgctatcaacaaatgaaccccccttgtaacaaagtgaaagaagtaattgcaaatagttcgaaataggacttatctgtaacgattgatttcacataaaggtgcgctaaaacccctaagttctcagttggcgctgtacgcgtgatcgagaaagatggggacgtgcttgatccgatctgtccctttcctgctttctatcagaagcagatggacttgatggaggaggggattgctggctcttcgaggaaagagaaaatcatctactgaatttggaattaagcttgtggatgggcggatctttggtggactctagcgccgaaggtgttagcagcagcttatgtctctgccacagcacctctgaaaaggcaggctttgagcatagctcatgtgctagctctggagatggaaattgtgaagctggcatagattttgggcaagatgatttggttgtcatgaaactggaaggctattgctgagtgatgcatgtctg

SEQ ID NO: 35072 - DNA, 449 bp, Oryza sativa
  Clone ID: uC-osrocyp011e08b1
aaacagaaccgtgccgattgaacaaataaataagggaagataatgagctcgagtatgcatacatacttcgagcgacaactttcgataacatctcttcggatgttcaacaaacggagcaaacagtgtaacaaagaacaagacacgtggtcacaaatcaaaataataaaggcataagcggtaaaagttttgcattttgttgataaccaacagcttacgagttggatgtatcaacagatgattaagaagctagctggttgtgactccatagtgagaacatccccttgtactttgcagccacaaactggcgtgacagaaagctcaaaggctgctccttgcagcagctggagctgcgtttgatcggctccaatgtcttcagcacaggaacggtccctgcaagtgatgcactctcagatgtcaccagcggagatagcttgctacaatgaggaacg

SEQ ID NO: 35073 - DNA, 509 bp, Oryza sativa
  unsure (1)..(509): unsure at all n locations
  Clone ID: uC-osrocyp011e10a1
aggacaccagagacaatattttataatatccggatcaaaagaaatattcggatcaaaagaggcaagaatttttttgaaatggcaaagattgcccctggctccatcttcctccacctgaaatcacacacacacacaaaaatagcagggagcagctgccggcgaggttgtcgacggcaagggagggagcgcgaggccggcggcgtggagcgcgagcaggaggcggccactgtcgtcgccgtggtttgagccgccgtcgccgcagtccaaagcgtcgatgccttgccgtgccgttcctccttcgccgcccaaccataccacagccaccacgtgtgagcgccgccgtcgtcaaccaatccatggacagagctccacttttctccacacaaaaccgagctctctctttttntctttctcttctcatgccgggtaaagccagctgccggccgatctccttccttggagccccgccggccataacctttcaccattagccttgcctcgccgaggag

SEQ ID NO: 35074 - DNA, 491 bp, Oryza sativa
  Clone ID: uC-osrocyp011e11a1
gaaaccatattatgaggatatcccttcatagaagggacctctttatcatatataggaacttgcaagttgcaacaaacaggcacacagccacacaggggcacattcgggccattattaagaacgcacaaagcatgatgtataacatgcagccatgcacgcatgcatatgcaggagcatgacagacccagtgtcagccactccagtacatagggctacaattacaactatttatacgcgaccaatccctaaaccgcgcaagctatatgctgctttaggctgcagagacacccacatagttttaattaattaagggattgatctgtcgccggagtttcatcagttggcgacgacccggagtttcatcccggcggcgcagtggccggggacgccgcagatgtagtagttgacgcccttcttgaggaggaacgacgcggtccccgtagccgccggcaccgagtccgccgagctgcccaccttgcagctcctgtacg

SEQ ID NO: 35075 - DNA, 498 bp, Oryza sativa
  Clone ID: uC-osrocyp011e12a1
gcatactggcacgtcatagctcattaattttcagcggcaagacaaaagtttatcatcacattacaacaatttcaaattataaaagaacatcacatatagatttgcatttcgtcattttagatgttatatgcactagttctcactttcccccaccactgggctttgcgaacagcttctttggtagcttctccagaggtgttgttttcagaaggaaaagcctggcagcacgctcttgtaaggtgccaccacattttagtccacgattctgcaactctagcttgagtctctccatgccaagtacctccaattctgcagctgaactgtaaattgtcaggtccagtggttcctgtgaaagaggagatatatttccattggcaggttcttctactggaggcgcctctaggtcattaagatgtgatgtggctgaagcagaagcgtgttatcctctgcttttacatctggtttcaacacttcttctgaaagagcactaacaccatt

SEQ ID NO: 35076 - DNA, 495 bp, Oryza sativa
  Clone ID: uC-osrocyp011f01a1
cgcacttggactagatccattgcaatctgccgcgtaccttctttacttctcttttccctgtgaacttgttcagtatagttacaagaccaaaccaaatacaccaagcccatatgatgtagttctagtagttacagccaagaacatggcaagaaactatggagatgatgaagatgatatgctacaactcgacggagacgtaggtggcggagtagtccggcatccggtgcaggctccggagcacgctctcggcgacctgcttcgtcgcggcgtcacccttgtggaacgcgctcaccagcgcgctcggcagcgcgcggtccgccgtcacgtcgcgcacgcaccgctcgccgccgtgcgccaggaacctctccacggcccagaagcagcgccgcgacaccgcgccgccggtgtccccgccgccaccgccgacggcggagacgtcgcggtgctgccgtagcgcgcgcaggacgtggcgcgccgcgtcgtgctcgcgagcgc

SEQ ID NO: 35077 - DNA, 428 bp, Oryza sativa
  Clone ID: uC-osrocyp011f01b1
tttgagaacaataagtgctttttggtcgactgtgggtctgcttcatcactacctcctggtcgactaacacaagtggaggagagaaaagctcctggtgccctttcagcagcttaactccttcttctacaaccgctaccaaccacttgaggcctccgcgccccaccactttgcccgcgatcatccatcccccacctcctcctgagccagccccagtaaatagtgcccggaagtccctgcgtcgattgagcggcgagcgcctagttgcaggtcttttcaaccagcccggcgtttttctctgggtccgctcacgaactcagcgcttcagtagactaggaagttcctccttggctctctgggaggccgactttgcgcgccttcgtgtcaatggcagtgctaagactgctcttccaaaggaggaccttggaaga

SEQ ID NO: 35078 - DNA, 216 bp, Oryza sativa
  Clone ID: uC-osrocyp011f02a1
gaaatgtcacttccttcattgactgcatttggatccaaagtttggatctaaacacagcctgaatccattttgcaattccgacaaacgaaccgtacaacacgaccataaaaaacttttggggatcaaaaaaaaacacggaggtgggaaaaacaacttgtgccggggagtgttctgttacacccccaacactttttttctcccaaaaaagaactgaaa

SEQ ID NO: 35079 - DNA, 520 bp, Oryza sativa
  Clone ID: uC-osrocyp011f03a1
gggtaaaattctcagggcgaaaactgtagctctgcccgaatcctttaaccggcaaaactcgccgcaaaactgtagctagtatcatctctttcgatatacatgacaacaaccaactcaccatcagtttcatctcaagcactcaaggctcgatctcactgtatacaaacacctacactagtctctcctctcaaactcctccctgaagatctggtattatttttcatcgccgcgccgcaattaacctaacccaccaaagctgtgatgaaaatttctgatgcaacatcatcttggatcatttccagccatagctctcagacctgccatcctcctcctcgcagctgaccgtcgccgccgatgagccgccaccggccatgcctgagcctgagaaatggagaggaccctcaggggatccagactgggagctgctttgctcttgaggaatgtaacagagcccttgcatgagcacaatcggttgttcacaatgttgagctggcactcttcgccgttgtgcagcgtactt

SEQ ID NO: 35080 - DNA, 479 bp, Oryza sativa
  Clone ID: uC-osrocyp011f03b1
gtgcttgtaaaaaatatctagtatccaattagtatacccatttgctcagaagattgcgaatttcactgatcaaattccatgctctgcattaattatctaatatttggtgtaggttccaggagggtggatcctcaatgggcagaagcgatggccggccaacggcagttttgcggatgtgttcgtcgttcttgcctgcaataccagtaataatcagattaacgggttcattgtgaatggtgggtccccagggcttaagatcagcaagatcgagaacaagacgtcgctgagggttgtccagaactgtgacattctgctggaggacgtgttcgtccctgacgatgaccgtcttcccggcgccaactctttccaagacctagtgaaggccctctctttctcttgcgtcatcgttgcctggatcagcatcggcattgcagcaagggtttatgatgcatgcttacggtatctgggggagaggaagc

SEQ ID NO: 35081 - DNA, 199 bp, Oryza sativa
  Clone ID: uC-osrocyp011f04a1
gaaatattgggtggatggctcaattaaccaatgagttcgttcccgttcacaatacatcagcgattctccgcccaaaaaagctacaggtatagcaacccttttagaaacctaataaaccaggggtgggtaagatgtcaacttccctattacatgaacataaaaaggttagaaactagatggagatcaaaatctacatttt

SEQ ID NO: 35082 - DNA, 409 bp, Oryza sativa
  Clone ID: uC-osrocyp011f05a1
tttttgttttttttgggggacataaacctacatgatcatgtaattcaatcaaaactcatgaatagccaccacagatcttagtagccataccatcaatttgttccataacacaaaaaacagcagcaacagcacaaaagtagtctttctttgctttggcttccaacacaacaggagataaaaaaagaagctaacactttagatagatagcaagaagccaagaaccctagctcccgagtacctaggcggtgaggaggacggcgccgccggcggccttgatctttttctcggggaccttggagatgagcttggccttgacgacgatgggcctctctggggggagcatccccttgccgagcaccttggtgtagccgaactgcgtgacgtcgatgacgggggccttgccggggcc

SEQ ID NO: 35083 - DNA, 428 bp, Oryza sativa
  Clone ID: uC-osrocyp011f05b1
taaccatcagtagcaaattaagcctcgaccagctaatcaattaattgagcttgtgctgttagccgtgtcatctatagctcgctagcttgccatggtgtcctctgctatggcggcggtggcggtggcgtttgctgtagtggtggccgcgacgacgagcagcgcgcagcttgacccgcacttctacgacggcttgtgcccggcggcgctgcccaccatcaagcggatcgtcgaggaggccgtcgcggcggagccccgcatgggcgcctcgctcctgcgcctgcacttccacgactgcttcgtcaacggttgcgacgggtccatcctgctggacgacacgccattcttcacgggagagaagaacgcggcgcccaacatgaactccgtccgcggcttcgacgtcatcgaccgcatcaaggacgccgtcaacg

SEQ ID NO: 35084 - DNA, 437 bp, Oryza sativa
  Clone ID: uC-osrocyp011f06a1
ggaacacacggttaaccagtttcaacaacgctaaacagtagggcaaagtacaatcatgccaattacttagtagttcccaacttcccattttacaaacgggatcacaacttcacaggcataattgcatccccgatcttcttcccaacttaaccatgcacagatactgcacttattactttatgattcacaactgtaacaactgcttttttgaagaaattttgaacaacggccataccatttcgccaccagactgaagaagtccagaaggactgacaggagaagccagcaaattgtaggggagggcttcctcgcctatgaggggaggatggggggcatgtaatccgacttggcgcccaggacgcgggcccgtgtgtcagggaagtactccatcccgggcaggtcagtcaccacaccattgttggcgacgccaatggggt

SEQ ID NO: 35085 - DNA, 372 bp, Oryza sativa
  Clone ID: uC-osrocyp011f06b1
atagaaagaaagagagagaggctcaagctaaccaatgaggttggtgccgactccaatagacgagataggctaagcagcaaaaaaacgacgggtgtgggaacgccggcgccaacctagacaaccggagggggctaagactgggacttcccatgagtggcagcaagaaccgcgaggcggcggccaaggccaaaaatacgggcttcgaggagaccattgacctgaagctgaagctgcccaccgccggcatggaggaggccgccgccggcaaggcggaggcgccggccgtccagaaggccaagaggccggcggaggccgtcgtcgacgacgccgagaagccacctgctcccaaagcgcaagcagtgggttggccac

SEQ ID NO: 35086 - DNA, 571 bp, Oryza sativa
  Clone ID: uC-osrocyp011f07a1
ctatgcccttgcatgcagcgcgtacgtctgcttggcgcctctctttggtcgcccttttttttttttttttagtttgaaatgtcactttcttcattgactgcatttggatccaaagtttggatctaaacacagcctgaatccattttgcaattccgacaaacataccgaacaacacgaatatcatgaacaagggtttatcatgttttatcacggatatctacaggcagcttcagtagcagaaacgtagcattcagtcacgtttagatattttagatacaggcttcaagatagaatgaacatgaactggcatcactgaagcacacagcagcgaagccagcaaaccacccatcaagcagaacgaacattcagctgctaccgtcagtaggacgcgacgcagttgggtacacctgagaactcgcaaacccgacaaaagacgccacccttccgaatcgagtccccttgcgcaacttattctagttcttctttggcttcaccgggcccctgggtatcttgctcaaaaccttggcatccagcacctcatagtgcttgcaggccctagagtgagcccttc

SEQ ID NO: 35087 - DNA, 477 bp, Oryza sativa
  unsure (1)..(477): unsure at all n locations
  Clone ID: uC-osrocyp011f08a1
ataaantttttttgggtaaaggcctcagggcgaaacctgttttttagcccgaatctttaaccggtataacttgactcaaaaacatttatctgtcataattatcgcaaatatgcaggtggcaagcaatcccaacaaactattcagaatatctgccattgacacaggctaggatgttcacgatccacaactagatagctgtttacttgttgtctaaataaacgggcagcaaaataagtgataatctctactcggcagcagcgacctcctgcccggccatggcctcatcttctgcaggcctatcaagcttcgtaccgatgtcctccttggcatagtcaccatgcacctccatgagctttcccaggtcaaatttcggggcctttagaatcttcactttgcggacaaacacattctgaagggggaaaatactggatgtcgccttctaaatttctttccaaaactttaggaatgaactttgaa

SEQ ID NO: 35088 - DNA, 561 bp, Oryza sativa
  Clone ID: uC-osrocyp011f09a1
ctatgatcgtgagatgcacgcgtacagtgcgccttggctcctgtttggcggccgaccttggtcgtcctttttaggttcaaatttcacgtgagtcataagggatactgtggtcctatctgaaactgagagaggaacctacatatcatactgcctgagtgacttgatcccgatttcatgtacacggctggctacaaacatccatggcaaaactgtgtcactgacacactgagcatttggtagtttgttactttcttacatcatggaagcagggtggtgactctcatagggggcgttccactactattctttgtggcaaagagaatgtacattggggaacaagaatcttaatatcttattaccgctccgagttaaaaattgtcgctgttctcaacaaatgtcaacaaatacctaacgactaaccgcctatgatcctcgttgctttctttaccgctcaattctatcatgcctttcattacccgggtgcaaagcctttcgagctgtggcacgccatagcctgtggtgagttccatgaagcgtcgcttcacgacttcagttgttcag

SEQ ID NO: 35089 - DNA, 482 bp, Oryza sativa
  Clone ID: uC-osrocyp011f09b1
tctctctcgcgccgccgccgccgccgagcgcctggagcagcgtcagccatggccgtaggtaagaacaagcgcatctccaaggggaagaagggatccaagaagaagaccgtcgatccctttgctaagaaggactggtatgatatcaaggccccgtcggtgttcaatgtgcggaacatcggcaagaccctcgtgtccaggacacagggtacaaagattgcttctgagggcctaaagcatagagtgtttgaggtctccttagctgatctccagaacgatgaggatcaggcgtacaggaagatcagacttcgtgctgaggatgtgcaagggaagaacgtgctcaccaacttttggggcatgtcgtttactaccgataagctcagatcacttgttaagaagtggcagacactgattgaggctcatgtggatgtcaaaaccacagacggctacatgctgcgtctgttctgtatcggcttcaccaagcg

SEQ ID NO: 35090 - DNA, 501 bp, Oryza sativa
  Clone ID: uC-osrocyp011f10a1
accataataataatagtctcattgataccctttacttcacaatcacacaaacttaaattaacaacattggaataaaatcatcaagtagatcttgggacacacggtaggggacatcacataacaccaatccagctacacacaaatagattattgcttctggtccataaacaaattaaacatgacaactcttccttcttttaatccagctaaacaagtaaaaccttatatttctaaggaaaccataacacactgcaagaacaccattcttatggcaccatgctcagcatcttaatactgcaacattttcagctcttgttcttgcacttgtcctttgctcttggtgcaagaccaatggcttcggaacccttcatgatcctcaagcgtttgcatgactcgacaaacatctgccacgggacatctccaacaagcatccagtcaccatccttgtcttcataagttgtaacagcatcagagccattcacctcattcatattggtccca

SEQ ID NO: 35091 - DNA, 446 bp, Oryza sativa
  Clone ID: uC-osrocyp011f11a1
cacaacaaatcacgattcatttggcccttgattgacgtccgtccggccacagttacaacaatcggagatttcatctcccaagatacaaatttgtccctttggaaattaagtaaacaaacaagggttataaccctgcacacatgacaaattaaaagaaaatcaaggaaaaatctttggtttttgtaaaacaaatccagaaatgacgacgaaacgacgtacgaacaatcagtacaacagtttgtccaatttgcacgcacgaatgcatgtaaaatgtgtgagatcgatcgatggatcgatcagaagagcagcatgaggacccccgcgaggaggaagagaagcgagccggcgagcgaggtggcgagcatggaggcggcggcggaggacggcggcgacggcgggttgacagcagagcacttgtgcctgatctcgccgtggaagtggtgagc

SEQ ID NO: 35092 - DNA, 464 bp, Oryza sativa
  Clone ID: uC-osrocyp011f12a1
attaacattattactttattatattttacagtaattttggaagggataaataaaaaacatacggttacattttacatacaaatgacaaacataatccgggggggactttcaggcaacagaacagcaaatgcaccactacacccaaacagcagattacacataactagagtacttaccgaatgatcgatcgatcaatcgaagcagcacgggaaacacacacgtggaagcatctacgtcgcgcgttggtttattacacacgaaaccgacggcccagatctctccctgcctccctcaccatcagtctcagtccacctgggtgaagcggagggagcacttgctggagggcagctgggcggtctcaaacccggccgggaacctggccttggcctcctcccccgagacgccgggggggatgacgacgcgctagacgggcttccagttcaccggcgtcgccacccggtgcc

SEQ ID NO: 35093 - DNA, 376 bp, Oryza sativa
  Clone ID: uC-osrocyp011g01a1
aacttgtaaatttatgcccaagaaggggtaactgatacatgtgattgcgggcaacctacatgctcaagtatttgtacatttgaagagttgttcatttactacactaacgagtcactgcttactagacatcggagacgccggacacaaaaacgacgccggctagcagcctccggaacctaaaaaaccaacacaaaaagaaaaggatctacacaagaacgaacatataatccatcgcctcgccgccgcgcagaatgcctaaaacctcatctgcgccggccggcaatggcgggctatggaggagaagagctagttattgttgttgagcagcgagtcccagtcgatctcgtacgacgggtacttggtgagcgcgaacccc

SEQ ID NO: 35094 - DNA, 426 bp, Oryza sativa
  Clone ID: uC-osrocyp011g02a1
cccgtaatcatggatgtttaaaccatctttgtgtttgggttttgatgtcaccacatcgtttactcaaaaaagactgtttgcactcccaatcgggagcttgggcattatcaagacctaattggcccagacacacactctcacaatgcggataaggagcttcatggttttagatggtgatggtaatgatgttccaagcatgggggatattgttcatatagtagtaaggtggcaactcgctcacagacaacagggaacacactcaactacaactatcagtgaagtgagcggctcaggaagaaaacctctcaatcaataaggaactggcagagcacgacatggtacactgcgcggtcctcagattcgcggtggtgcaaccatgcatgggcctaaaccacgaagtcatgcgattaagttgcagaagaaagt

SEQ ID NO: 35095 - DNA, 458 bp, Oryza sativa
  Clone ID: uC-osrocyp011g03a1
gtcctttttgcaaaaccgttatattttcttgaccaacctctcattgtcttctacagagaaaagggaaaccctaacaaaagatgagatgagagaaagaccatggactgattgatcgatcactagaaacgaaacgactgatctaacataaatagcaaatgtatcgggccgggcgtggcgcgcgcgcttcgcggcagtgcatcgtccggcggcggtgcggtgcggatggaacaatggggggagggatcgatcgatctcaggcggacgcgtcgccggcgccgagcttggcgaggagtgcggcgacgagctggtggcggcgctcctcgcgctcctcggcgcgcgcgcgccacgcgtcctcgcgctcgcgccagcgtcggacgagcgcgaggcgctcctcgccgagcgcgaccatggcggtccgccactcctccttcggggcgcggcgttcgggcttgcgcgcc

SEQ ID NO: 35096 - DNA, 386 bp, Oryza sativa
  Clone ID: uC-osrocyp011g03b1
cggaatgaatagcaaatcttaggaataacatgtcaagtttatcagaactgtctttattagaaatctggagtcatgagcgcacaccatgatgaccaattcacttcctactttgatgtattggatctgacgcaacatggttcactgaaatcactagcagaagcaaatagatcattttcaaaaaggaacaggaaaattgtgttgttgctaatgccttacaccagcaaagtgaaacctggcatgcatgaagctttagggggtcgaagtacatctgctacaaaacaggggtgttcacgtcgaatctcaacatgctagcggctgatgggggtgtgcatacgctcaacaattctattgatagcattccgcgtcattacaagagtgtcatgttg

SEQ ID NO: 35097 - DNA, 542 bp, Oryza sativa
  Clone ID: uC-osrocyp011g04a1
tccaccggcgccacgggcaccgggtacatgtccctggcctctccggcgaaccccggcgatgccggtgcgctcggcggatcttccgacctcaccctttgcttgtgcagcaggtgcaccggcgacgagccgcggctcggcgtcgtgtcgccgctcatctgtgctaggaactcgtcggcgtcccggagcttcttcttctccctcgccgtcttcctccagttcatcagggccttcatcgtctgctcctcgaagatggtcttcttcatgtttgatcccatctgtgtgacgagtgcgtagagagggaaggtgctgtagctgcataggaactgaatgaatatccccactacaactttcatgatactcaagcccatgttttcatggaagcatttcttcaggccaggggttgccagagtccacacgaaatgtgccatctgaaatgcgttctggaacagtatcaagtgtatgaagaacaagacccaatcaggccggttaaaccagaagtacttgttgcttgtttcaacgaccggtgctcccttgatcacagt

SEQ ID NO: 35098 - DNA, 452 bp, Oryza sativa
  unsure (1)..(452): unsure at all n locations
  Clone ID: uC-osrocyp011g05a1
gtctgccattgttaacaaccctcttcctccaaactaattgttctcaagaacaatagaattcaatacaaactcagagaatagaagagaaattgagtgagaagaagtagaggaagcttctagaaatggcagtgaagaggaacacgagagagtaagaaagagatagagatcgacgaggttcaaccgaaccaagccgccgccgtggccgaagccgctgatgcctgatctgttcgttgcttgaagttctcctgctgctgccttttgtatccctctccttgtttgtttggcccttggcatggattagcaattgagtcagcccatgtgcagcccaatgggttcctgacaatctcctctccttgaaactctgacttgtccataagttgatgacaagtaaacttcagaaatggcaaacctccactttgatttctctagtattcttgcatcgntccaaaagc

SEQ ID NO: 35099 - DNA, 172 bp, Oryza sativa
  Clone ID: uC-osrocyp011g06a1
cggtcgccctttggttttttttgttttttttttttttttgttttttttttttttttttttttttgggttcaaaaacccagggcattaaacttttgaacccatcacctttcccagggggaatggaaattcgagaagaccaaaaacgacgaacccaaaaacaccttgacccccc

SEQ ID NO: 35100 - DNA, 447 bp, Oryza sativa
  Clone ID: uC-osrocyp011g07a1
ttccgcgccgcttccccccaagaacttgcctgctgtctgtttgaatgggtattctactcttttggctccagcaaatgaagtgctgattccacaagaactttaatcaaaaagaaacttagcacacccaaaaggagggagagttattcacagctcaggaatggaacacacacacaaactctgcatcctacaaaacaaaatcggcatttccatcaagtatggaaatagtggttcttggtttggttctttactttcccttttcgttttctttgtgtggtatgcacgctagaaggtgttattgtgtcagcacaccaatctgctgcagagctgacttcatgtcatctgtactgtaaccctcaatgccaatgatatttgagctgtccagggcgacgacatcttgtaacggatatctcctgacagtatggattctgttcgcggggatgttgaact

SEQ ID NO: 35101 - DNA, 340 bp, Oryza sativa
  Clone ID: uC-osrocyp011g07b1
catctacgcctatttgtactcttcacctgacatccatccgcgcccgctaggatgagggagctgtactccgcccatttgagagctgggtagagaatgatatgcggagatcaggattaccgtctccgacatcacagggtttcattatcactagcgttgattgctctaatattcacgaaactaatcatactactcttgtactataatgatatgaggatccttatgctcgtgatttatgcggccggtaaaaccaccatcctctagaatctcaagctcactgagatcgatacaactatctccaccatcagtcataatgtcgtagctggcgagcacaagaacatta

SEQ ID NO: 35102 - DNA, 118 bp, Oryza sativa
  Clone ID: uC-osrocyp011g08a1
tttttgtgtatggttttttttcccgtaatcatggatgtttaaaccatctttgtgtctggtttttgatgtatccacatggtttacttcaaaaagagatgttaggacttcccaatacggg

SEQ ID NO: 35103 - DNA, 532 bp, Oryza sativa
  Clone ID: uC-osrocyp011g09a1
cgcactaggactagaaccatggataatcaccactcaacaataagaagatttatacagtatgacagtaccaggaatctcaatacaagagaaacaaaaaagtggaagtctgaacatcaatgtgcataatacattccaaaacctcgctagaaataaccgcttgtgccaaattgagggtaaaaataatatacacatggatggacaagaaccagaacaaagctcggaacaatgtagtgacgcccttggtgctgcatagagcagaccatgtacaaataaagaataccctgtaaaacttgggataacggcagagtaagccaccggccaatcgtcttcgaaacatgaccaagattgctggcaaacatggcctctcacgtaccatgtcaccaatcaagcaaaactagtaaacatgcagcctttgtagtgggaaagagattcatgcttcagaaaagatcatgcttccttttctgtagttcttgtttccaccctggctgctggtagaactctttcttcgttataccaaatacagtctggaatt

SEQ ID NO: 35104 - DNA, 501 bp, Oryza sativa
  Clone ID: uC-osrocyp011g10a1
ggttcatcagacaatatattgaaaaggaagtcaaaacaaaacatggtgcaaaacagatccctattccacagtatccatgagctcagtactggagctactacatagatgggtaaattaagcagaagtactcaggcagattaatgcctttcaaacagccaaaaagaacactagggtgataccacagtcgtttaccagaacgcgataactaaaacaacactccccatctctagccggcgtagctgaaacctgagatcttgtagatcctgatggttccatctgtgtaaccagcatagagggtgcttccatctgcgctccagttcaagcttgtgcagtagagcatctggttcttggagacagggatctcgggcttaaggtcctgcacaatgtgctttgactcaagatcccagatcttgatagagtcctgggtcgccgcgcagagccagtagcggttgggcgagaagcagagcgagtgaatgatggaacccgcgtcaagcgagtaca

SEQ ID NO: 35105 - DNA, 515 bp, Oryza sativa
  Clone ID: uC-osrocyp011g11a1
gattgtgttgaataattcattgctgactaatgaggaacaaaacaatatttagatgggcaccctgtacacactctgctaatgttattcttgctgtacatacagagtgaaattaattgattaatctttccgtgtgataatggtaacaagggacgctctttgacagtgaaaggtacagcaattaagatcaatttggccaaacaagaaacacacgtacattaagattgaagactgactaggcaaaacaaaacaaactaataaaaggcatctactgtacacggggatgaacacaagaagaagaatatagggcgtgacggagacatggacgacgatattcgtgagcggattatggttggagcttattgttggagacgtggttggcgccgacgtggacgtcgtggtctccgatgaatcggcgccagaaccagtgggacttccagacgagcaccatctcctcgatggggacgttcttggtctcggggaggaagagggcgatgaagacggtcatgatgacgacc

SEQ ID NO: 35106 - DNA, 509 bp, Oryza sativa
  Clone ID: uC-osrocyp011g12a1
cagcatctaatgtgtaaccttcccccttttatttatctcacacaggtgattattacattttacaaagcacaaacgattaataatatatcacaagttcacaacactgctaaacaaatcaggacacaacagttcacacaatcacaccatagttttcacacccgaaggattaagaagagaaggcacttgtcagatggttcgaagcatatgcttactgaaatggagagagcagaaggcggttcaaggctctacagccagctgccccgcaccgcagagttaccggtcaccatgccattggtggatttcgagttgcgaggtgcagaggtgctagcctctgcttggttggcgggatgcttccccaaactcatgccatttgcaaacattgacaggatgttgccaccatgcacccgaccctcgtcagctggagctgccacacgacgaggagcctccataggatgcgagaaaatgctgcacctgcttgtttcagtgtttgaaggccgatctccctgaaa

SEQ ID NO: 35107 - DNA, 432 bp, Oryza sativa
  Clone ID: uC-osrocyp011g12b1
cccagcgccgccgccgccgccatcctccccgagccctagctctcccctatccctcgccgcacgcaccaccaccaaccatggccggcgcgcaggagtctctggtgttggccggcgtgatgcacggccacaacgacgtggtgacggccatcgcgacccccatcgacaactcgccgttcatcgtctcctcctcccgcgacaagtcgctgctggtgtgggacctcaccaaccccgtccagaacgtcggcgagggcgccggcgcctccgagtacggcgtgcccttccgccgcctcaccggccactcccacttcgtcaggacgtcgtcctcagctccgacggccagttcgcgctctctggctcctgggacggcgagctccgcctctgggacctctccaccgggtcaccacccgccgcttcgtcgccacgacaagacgt

SEQ ID NO: 35108 - DNA, 402 bp, Oryza sativa
  Clone ID: uC-osrocyp011h01a1
gggaagcgaccgaggcagctttattcaacttggccagaaccacttttttaccgactaccacttttgcatgggtaaaattaaccaggtaccacgggttgattgtacagtatttctcaatgggacacagacatgccgaaacatcaactatttccccctcactctcactactctccatctcaccgtttttcaaaaccttggcaaaatctggcgttggagctgtcaaacatgtaagccgtcaggtcccgtctcctccatggtaaacaggcacaagctggcatgcctttttttcactactatgaaagccatgaacagggatatggcatcatcggccacaaagttggtagttgcactcttgagctgaaggttgcattcagtcggggtaactggggtgttttccgtaac

SEQ ID NO: 35109 - DNA, 436 bp, Oryza sativa
  unsure (1)..(436): unsure at all n locations
  Clone ID: uC-osrocyp011h02b1
cggacttcgtgggcggacgcgtgggcccacactctcgtgctcctctttctcatggcgatctcgaaggcttggatctcgctgctgctcgcgctcgccgtcgtgctgtcggcgccggcggcgagggcggaggaggcgccggcggcggaagaagaggcgccggcggcggaggccgtgctgacgctagacgcggacggcttcgatgaggcggtcgccaagcacccgttcatggtcgtcgagttctacgccccgtggtgtggacactgcaagaagctcgctccagagtatgagaaagctgcacaagagctaagcaggcacgatccaccgattgttcttgctaaggntgatgccaacgacgagaagaacaagccacttgctaccaagtatgagatccaggtttcccgaccctcaagatattcaggaaccagggcaagaacat

SEQ ID NO: 35110 - DNA, 405 bp, Oryza sativa
  Clone ID: uC-osrocyp011h03a1
gattgtagtttacatgcatctatatatggcttgaattttgcttatgttttccctttacatttgtgcaaaagaaagcaataatttgaaaactggattaattaagctcagtgtaagaacaaccatgtagatgatcatcagttaataattaattgagcactgcacaattgcgacgaatgttgccttgcgacccggtcttgaccccaacccggcccaacttggtcatagccgtgacgaaggcctggttgaaggcggcgctgctctgggcccaagaatccacgatgggcctggaccgtgggtccgagtacagcacctggtcagagcccagaaagcccatcccgttctgcaggttcttgaagtactggttgtcgaagcccgcggcgtcacccggtccatggtcacggcgat

SEQ ID NO: 35111 - DNA, 525 bp, Oryza sativa
  Clone ID: uC-osrocyp011h04a1
tttttgttaagcagagggatccctctttagcacatagtacaaaggtaatatgtcttagttgcatattacatccatcccataagttttttaacgtcagaaataagaggctgaaatatcaaggcagataaagtagtaaaccttaattgaagtcaatcagttgatgccagtcttaaagcattcatggcatgcaagccaaagagcagacggtcaagcacaggcatcagggtctagctcctgctacggcggtacctgccaccatctcttccatcagcataaggagaaccacctcggccacgtggtgacctgctgtagctgcgcccacgaactggtgaaacactgcggcgccttggagagcgatcacgaggactgtagctttttctaccataggtcgggctcttgcggtattgagggctgcgactgcggctgcgactcctgctacgacgctttccactacccagacctccaggaccaatacgcaaacgacattcacgagcaaagtgcccagtttcaccccactcatagcac

SEQ ID NO: 35112 - DNA, 503 bp, Oryza sativa
  Clone ID: uC-osrocyp011h05a1
aattcgcatcttcacggctttattgatctataattctatattatcaaatacaatgcttttatggagatgcatattcaggctacaaccagcaataaggtgcacataatttttgtctatactgtcaaggaacaacgcataggtagcttgctccagcacctcagtaatttacagttgctttgatagcgtccaggaccttgttctttgtgggcatgtaaaatgtttcataaacaagagggaaaggagtgtccaggccgcatactcttgcgacgggcgcttctaacctttggaagcagcgctcggtgatggatgcggcaatttctgcaccaaaccctccggtgattggagcctcatggctaacaagaagttttcctgtcttgctgacagaggcctctactgtttctttgtcccatggaatcagtgttcttagatctatgagctcacaagatattccatcctttgctgcatcttcgcatgcttcttccagtactgaagttgagctcccc

SEQ ID NO: 35113 - DNA, 513 bp, Oryza sativa
  Clone ID: uC-osrocyp011h06a1
tttttttttttttttttttttttttttttttttttttttttttttttttttttttttttttttttttttttttttttttttttttttttttttttttttaaaaaaaagggttataaaaacccttttttttaaaaaagcagcaaaaaacaaaatggaaaaatcccgggagcaaaatttctggggggaaccccaaagggccgggggggggcccccaaaagcttttggtaaaaagaaaaaacagaaaaaacaaacaacttgatgggggggggggccccagtttccccccagggggggcccccttttttggcccaaaaaaaaagtttaggggaaaaaaaaggggttttaaaagccaaaatttgggcagggttgggaaacacaaatttttggaggggtttaggggggggttttaattgggaaaaaaccaaaattggggggggtttgggcccggggggcaaaaaaaaaaaaaccggggaaattgcttttcaaataaaaaaaggggccctaatggcccct

SEQ ID NO: 35114 - DNA, 480 bp, Oryza sativa
  Clone ID: uC-osrocyp011h06b1
ttcactccgtgatttagatggcaagaatggatggagagttgagctctcacggaactcaagtagccgcggaggtcgtgatcgacatggtgggtctgagatgaagtgctatgagtgtggtgaaactgggcactttgctcgtgaatgtcgtttgcgtattggtcctggaggtctgggtagtggaaagcgtcgtagcaggagtcgcagccgcagtcgcagccctcaataccgcaagagcccgacctatggtagaagaagctacagtcctcgtgatcgctctccaaggcgccgcagtgtttcaccagttcgtgggcgcagctacagcaggtcaccacgtggccgaggtggttctccttatgctgatggaagagatggtggcaggtaccgccgtagcaggagctagaccctgatgcctgtgcttgaccgtctgctctttggcttgcatgccatgaatgctttaagactggcatcaactgattgact

SEQ ID NO: 35115 - DNA, 277 bp, Oryza sativa
  Clone ID: uC-osrocyp011h07a1
ttgcggccgtcgactagcgagctttggtgacccttgtggtttcggctctctccaaaaagccgggccatagtaattaactgatgtctaaaaaaaagttcactaagtgtttcgagtgtacttttaatcaactttcaccttttcaaaccaccgcagtccagctccgaggctccaaacactactggtttcggttacataccggtgctgcttttactatcggtctcatgcaacacacaaaatgtcaaaattgttgtacatcgcaagtgtactctagcactta

SEQ ID NO: 35116 - DNA, 214 bp, Oryza sativa
  Clone ID: uC-osrocyp011h08a1
tttttgggttttttcacataacaatagaattaactcatgtaagtttatcagagtgttaatacaaaagaatgatcaaatacaatcaaatagcttgtaaccaaacagatgttttcaacttttcacacatagaacttttttggcttagccctacaaactggaagacttaaatctgatggtcggggaaacctgataaagggctttggaatgaaatatg

SEQ ID NO: 35117 - DNA, 524 bp, Oryza sativa
  Clone ID: uC-osrocyp011h08b1
actagggttagtgtggtgaaggggggcgattttgctcatcgccctccgcctagatcgaatccgaatcccgcctcctcctcctcctcctcctccccccgcgccgatcttgccccgctccctcgccgcagctgcgggcttgccctagcccgccgcatcgccgacgtactacgcccgctcggctccaggctccagatccggcctccagggcgtgcccgctgctggacggcgctctcccgcgtgcgtggctacctcctcctccgggtttgcgttgccgtcgccgaagcgatccgttggtggattgtgtgtagctctgtaacaaaggatcttggtccataggagtgaaccagaaggtacaaacttcttggctattatgacatcggtgggtctagtagattcttcatcaggtttcccggaaacgagtactagtggagccactgatcgtctgacagatgatatcagcgagatgagcataggagatacggaagttgaagctgtagtggtcagtggcaatagtatggacatag

SEQ ID NO: 35118 - DNA, 90 bp, Oryza sativa
  Clone ID: uC-osrocyp011h09a1
gatacagggaattgacagtagttctattacaggtagggcccgaattttgattacaacaaccttctacatttgtgcaaaagaacattggaa

SEQ ID NO: 35119 - DNA, 508 bp, Oryza sativa
  unsure (1)..(508): unsure at all n locations
  Clone ID: uC-osrocyp011h09b1
cttcatcaccggccactctgcctagagcattatcatcgatcgtcgtctacctagctagcttcacttgtgctccactgcaaccagtacaccacattaacttaattcacacctagcttagctcactatatagcttagcttcgcttaagcttaagctgatctcggagaagacgtacatgatggtggtggtgatgaggcggcggatggcggcggcggcgatgctggtgctggtcgctatggcgggcggcgccaccgtgtgcgcggcgcagctccggcggaactactacgccggcgtgtgccccaacgtggagtccatcgtccgcggcgctgtggcgaggaaggtccaggagacgttcgccaccgtcggcgccaccgtgcggctcttcttccacgactgcttcgtcgacggctgcgacgcgtcggtggtggtcgcgtcggcggngaacaacacggcggagaaggaccaccccaacaacctttncctcgccggcgacgggttcgacaccgtcat

SEQ ID NO: 35120 - DNA, 473 bp, Oryza sativa
  Clone ID: uC-osrocyp011h10a1
gacatcagaagatatacaagaaaaattaccagagttgcaagtcatagcatttgctcacaaaatgcacttgaagcaatgttatccatgaacgttgacaggaaggaagctaacacgcagtaaccagatgcatcggcattcaaaattgattctcacttaacattatgcaatactttaacatggagctacttaaacagatctaccaaatacattacataatgttaagtaactcagttttcctccagtagctgacgaatgatgatccgcacatttcctaccagccagtaggtgccggagcactgccttcctcccatccaggggcggcaggaggtgcaacagcagcagcagcggcaggaggaacagcaactgcatcccacccttctgcagccacaggagctggagcagcaccccattccccagtcggtgcagcagggagggcaggaggctggacctctccaccccattgctgtcacccc

SEQ ID NO: 35121 - DNA, 476 bp, Oryza sativa
  Clone ID: uC-osrocyp011h10b1
tctagaggggagagagagcgcgccgagatgttcggtgaggaggaggagaacgcgtcgagtctcaagatcggggaagagttcttgaaggccaagtgcctgatgaactgctaggtggcgattatcctggagcacaagtacgagcagatccagcacatgttggacggtgacccgtcgtcggaggtgtctcacgtgttcgagaaatctctgcattacgtgaagcggttcagccggtacaagaaccccgacgcggttaggcaggtgagggagacgctgagccggtacggactcgccgagtttgagctctgcaccctcggcaacctatgtcccgacaccagcgacgaggcctgcggcctcgtgccctgctttcgttccggcagtaggtttcgtagcgatccacgcagcgagaagatcgacaagatgctcaacgacctctgccttataagaagttcgagtagtacgactgtagcttatcaaat

SEQ ID NO: 35122 - DNA, 489 bp, Oryza sativa
  Clone ID: uC-osrocyp011h11a1
gaacgaacgaacttgactcagctttctggtgtgaaggcagaatgcttagtcattttatctcatcatcagtagtctatcaatgtcacaacaattgtttcacttcattctcgtttgttattattgaactcatcctaagaaccccttcaaaaaaaacaaacaaaattactctgccaccatgctggcgtgacaattctatgtgggtaaaaaactcaaagcaccctagaattccaaaattgttggaaataaacctaccactgatgttactttctatgacttctgctttgatttctgcttcttcaactccaaggaagtccctaatcctactggggtggaaccaccggactttttagacgatggcccgttggtattccctgcagtgccgttttgtgggggtccattcgattgctgaccttcagatgcattttgagtgctggcagtagcggaagtagcagcggcagtggctggagtgctaccagaagcagtaggcgc

SEQ ID NO: 35123 - DNA, 513 bp, Oryza sativa
  Clone ID: uC-osrocyp011h12a1
agtgaacctagcataacttgtctgggcccaagccacatgttcatgactggatatctcacaagtttctttgacttcaaatccacccttttaggtgtgttgctattgcacgaatcagctgcagctaccttcatggaaacttcagagctagtctgttttctggcgttgactcgttcaagtcctgatactatattgttctcgcttataggaagttctttcaccgttttgtcatcttgcttgatggatttttgcaagccacacaccttctcactggaaattggatccctgctactaggtacaacaccatttgaaacaatagcatccttagttgggaaagtttgtgcagcaagccctgcccctgtgtcctttccatgggaagctggcatagaaaatggattttgatgctgggatgtttgtttatttcgctcagacaatatcgcattgccattgcccagggaagaggtatcggttaagccatcaacctttggttgcaattcctgcgacggaaccatggcc

SEQ ID NO: 35124 - DNA, 399 bp, Oryza sativa
  Clone ID: uC-osrocyp012a01a1
agcccacagcgaaacgcggtagcagaatcacgcttctggatactctccttaaagaggacgcgcctaaccacgtcctcaacatcattaatcagacgaagacaatgatcactgcgtctgttctagtcaactcggtaagcgtccgaacgtcaactagcagccgagttccgcctctctgatatcaagattatcactagccaagcctctctgcacggcaccagccaagcctcagcgttgccgcatcaggatctaatcgcaggagcagggatcatgctgaacgctctgttcattcgttagctgacaggcacagggagtaccacgtagagtagccttgctcgccacgtcaccggcaacccatcgatcttcacgatacaatcaaccgtcaccatgcagaaagaggca

SEQ ID NO: 35125 - DNA, 399 bp, Oryza sativa
  Clone ID: uC-osrocyp012a03a1
ggacatcgaacaaacaggaccattcactcatttcaatagttaacctcgcaaacgctactcgatcattattccttaattattccaacttgttgtaactaacggcgaggaaaaagaagaagaactggctgaggatgacggccggcatgcggctagctgcgatcgatatatgtatatggccggctagacggtggggtagaatggtgagacggcgaggccgcacgtgccatgcggctgcaggacgtccttctccagcaggatgtagccctgctgcccccacgtctttccccacgagttcttggcgacccagtacttcttccccgacgcgccgtcctggcagtaacccaccagcgtcaccgcgtggtttgacgacgccccgcacgggcccgggaacaccccgga

SEQ ID NO: 35126 - DNA, 356 bp, Oryza sativa
  Clone ID: uC-osrocyp012a04a1
agaaaaaaaagagacattttgattcgaaggaagccagggacttcatctttttttttggcctggcttccaagggtttttgatctttataattatctttatacccctttcatttttatgtaccaacaacagggttttttttccaccattattcccttggttctaatcactaaaaattaaacaccttcagaagaagaagaaaagaaatttattggggcttaaacaataagcacttacaatgttatacagacaagagccttcaagaactagctttggaatacacacttgcatgggggctcatgggggtgggctgctcgaacatgaagacccccaccttggccggggcttttttttttttt

SEQ ID NO: 35127 - DNA, 394 bp, Oryza sativa
  Clone ID: uC-osrocyp012a05a1
gacatctcgcaaccaaagcacagatcactcttacagttacagaggaacttagtatacatcttcctaggattagatacgtagaacaagtgacaacaacttattgcactatagaccccagctaaagtactagtagtagcttattcgggcacaatcacaaaggtggcaagctaaggttcttacaataaccatacaaggccatgcttatgccccagggatagataggaaggtatacacagcttgacatatttacaatcacgcaggatgcaaggggatcacccactgagggcagtcagaccttctttcagcaagggaatagtaggcaagaacctgagcatgggtatccacacagggttctccatcttctgtcatatgattaaaacttttagggctcgga

SEQ ID NO: 35128 - DNA, 224 bp, Oryza sativa
  Clone ID: uC-osrocyp012a07b1
tggccttctcaagctttcgctcagcggacggagacatagcaaagcgactgggactttttagcctcgctttgctatcacctccggctgcgcgaatagcgagaccatacacagtgagccaggactagaaacctgagtttgcgccatactttgtaatgccaggcggcttaaaaacaacctgccaaaccactcgactcaagtcacttgtgaaggctgcaactccatct

SEQ ID NO: 35129 - DNA, 403 bp, Oryza sativa
  Clone ID: uC-osrocyp012a09a1
tttttggttttttaggttcaaatccaacttattcataaagcatactgctgtcccacaggaaactgtttcataaaactaacatatcatacggactcgatggtccattaaaccagacacaagtagacatcagcaccacaaatacttgacgaacagaggctcgggatgaccaggcacatcggcagctccaccaaactggctgattactgaccaccacggaggcggagcaccaggtggagggtggactccttctggatgttgtagtcggcgagggtgcgtccatcctccagctgcttgccagcgaagatcagacgctgctggtctgggggaatcccctccttgtcctggatcttggccttcacattatcaatggtgtcggagctctcaacctccaaagtgatggtct

SEQ ID NO: 35130 - DNA, 421 bp, Oryza sativa
  Clone ID: uC-osrocyp012a10a1
ttttgggttttgttgatagtgtagtatttattcacttattacttcattgaatccaaattatgtgcagaaacacacatattttaacacaacgaattgaacaagaccgatcgatcgatgtacaaacagaaaactggcaaacccaacgaatcactcctttgcaatttatatacgtgtcaacacacacattttcaatcgatcgtgtatacacaaatctacaaatggtccgtagtcgtcgccgtcgtagtgccatttttctcagttgaagacgtcacactgcttccggatgttgcccttgccgccggacttgaccccgacgcggccgagcttgacgatggcgttggcgaaggccttgaagaagtccggtgtgctggccgccagcgagtccaccgtccgccgcgtgcgggtgtcggggtagagcagc

SEQ ID NO: 35131 - DNA, 427 bp, Oryza sativa
  Clone ID: uC-osrocyp012a11a1
cgcgcgcgcacgtacgcgtggaccctattttgcgcgcgccctttttttttttttgggtttgataaacaaagggggtatcactatgactaagacgctggcacttactttgcctagtagcattgtaacgcacacagaatgacagggaaccacgcattgttcaagagctcccacataaacaactctgatgcatccatcgggccacaaagaaagcgaacagcagcatacagatagctatgagaagagacactaggagagggataactagaagggacagaatggcatccatggggccatgacgtttagtcgacctcctccatcttgctctcgccggccacggcctccagcggcggcatgtcggcgtcagcctcggcggactcgtcctcgtcgatgctcaggccgagcttgagcatgcgggggatcctggtgc

SEQ ID NO: 35132 - DNA, 370 bp, Oryza sativa
  unsure (1)..(370): unsure at all n locations
  Clone ID: uC-osrocyp012a12a1
gtaccacaactttttaaggatggaattgagtagcaatactttcaccccaaaatacagtttagcgacaatatcttagaaaagccgcttgctttgccgccatggctggcaagctgagcagagcagctaacacaaagaacacgagatcactataaaccaaacggcaacgaacgaagaaaatacagggtcttttttgtctgaagatacacgaagcggttcgntttcttttatttttagtctcctctcctcctcgatgatggggtgtatggcaatggcaatggcgatgggatcttggcttagttgatggaaggggctcgccgttccactccttgaggcagtcgagcatggggtcgatgagctgccctggctgatg

SEQ ID NO: 35133 - DNA, 395 bp, Oryza sativa
  Clone ID: uC-osrocyp012b01a1
atgaataagaagctggcatatacttcggctagtagcattgcaacgcaaacagtatgacaaggtaccacgcattgtttaagagctaagacaaagacaaaactgatgcatccaacgtaccaaaaagaaagcgaacagcagcagtcagatagctatgagaagagaactaggagagggataactagaagggacagaatggcatccatgggtccatgacgtttagtcgacctcctccatcttgctctcgccggcgtcgtcctccagcggcggcatgtcggcgtcagcctcggcggactcgtcctcgtcgatgctcaggccgagcttgagcatgcggtggatcctggtgccgaaggtgttggggtcctccaagctgaaaccggaggtcagcagggcagtct

SEQ ID NO: 35134 - DNA, 70 bp, Oryza sativa
  Clone ID: uC-osrocyp012b02a1
ttttttggggtttttttaaatttttttggtttttttatcttttttttattttattttattttttattttt

SEQ ID NO: 35135 - DNA, 287 bp, Oryza sativa
  Clone ID: uC-osrocyp012b02b1
ccctctgtcctcgcacgtatgccgtaactcctccatcgtggctgcgcgtccgtcaatgcgcgacgttcgacgcccaatcgcagcatgagtagtagcagagaggcacgcgcttctgctcgcgttcgtcgtcgtcgccgtcgagctgctgctggtgtctccgagactccacttgagccaacaggatcacgcgctgctccgagggaaggcttcctatgaggcgaagagcggcgcgctagactcgtggcgggcgtcagacgcgacgccgtgccggtggctcagcatttgtc

SEQ ID NO: 35136 - DNA, 328 bp, Oryza sativa
  Clone ID: uC-osrocyp012b03a1
gggggcccactaaaaatcattcattcattcatttgatcaaagcaaaccagacgagctttttttttgcgatcaaaaacacaaaggggcaaccccccagttaacacaaactagatagttccccacaaaactaacgattataaccatcggatgatgatgatgggagctcgattagatagatagaaaacttggccaagagggccccaccggttaattcctccagttcccgtcggagttgccccccccgcggttgcccaaacccccgccgtagccgccgacaccacgggcgccaccggaaccaccgccaccggcgtaaccccccgacccctgg

SEQ ID NO: 35137 - DNA, 279 bp, Oryza sativa
  Clone ID: uC-osrocyp012b04a1
aagccatccagaaacaaaattattttttggaaagattatgcccatgtgcatgtggccggacaatttgggtacataatttttcaaaaaattcccccgcgaaaagaaatttttaaaaaaaagttttaaaacagcattatgcactgacgggtcccaaacagttaagctggtcgtcatttccacgggtggaaagccatttttacctcattggagttgggcatttgggcaagcggggcatgttttggggcccgcaaatttttttctgacatcaaccaatggggg

SEQ ID NO: 35138 - DNA, 411 bp, Oryza sativa
  Clone ID: uC-osrocyp012b05a1
ggaagtggccagtgccatatatcgatctttctgtaatccctccttattacatgaaaatggagaaagttttggatggatgaatacaaatccaatccaaaccataccaaaaaaaaaacaacaactaattaactttctttctttttgacaccaatagacagagaatgcaacaacacaaaagctactatacaccatgaattctcgctgtactggtgttctcacatacacatgcgcgtagaattcaacacaaaattaaaccaattcaacacgagatcgacgagcaccaacaaatcaaaaaaaagaacaagatacccaaaattaaacgacgatgatgaaccaaccatgcgaataatgaaacaaagaattattgaaaatgaggatgcagatgagagcttaagatggaaggcttgatgt

SEQ ID NO: 35139 - DNA, 267 bp, Oryza sativa
  Clone ID: uC-osrocyp012b05b1
gctccacactgcctcgccttctcaatttccgctacacacgaggcggtgcgtggccggtgagcgagaaaaggctacgtacccatcgatagcgagaaattaagttgccggagaggaggaggatgacgatgaggttgtcggcagcggtggtggtgatggtggtggcagtcgtcggtctctttgcctggatgggaacccctctctgatgcataccacaggcagatttttgccatgatggccaatatgttgaagctcaatgtggtcatggct

SEQ ID NO: 35140 - DNA, 400 bp, Oryza sativa
  Clone ID: uC-osrocyp012b06a1
gggagaatagaccttttttagatagagtaagtagtttaacgagtacaacctacaggggggaggcattctgaaccaccgcacacatcgaaccaaaaaaaataatatgcacatggcgggcacacgaattgctatgaatacctaaataaatacgttaagtttggaacggtatgtagttaacctacatgtatcttaacaaaacaccagatataaccaaaaactacaaaaaaaagtatggtcacaactgcatccgtgcaataaccttcataacttccggccggggctggtaacctccataacttccgcccgcgcccgtaaatcttcagttagcaggaaccttcctgtttggctcaaaaacatacttaaccaaagaatccttgatggacagtagctcggggaactt

SEQ ID NO: 35141 - DNA, 403 bp, Oryza sativa
  Clone ID: uC-osrocyp012b07a1
ttttgggttttttttttttttttttttttttttttttttttgcaacctgaactatgaatattgctgccaaatggagtaatatatacagcaaaggaaagtaggagcatgaatggaaaaggaaaaaaaatggggcaaaggttccaaaaaaaaaaacattctgactacacaacacacaacccattatgatcatgactgaatggatttgatatttgggaattctaactggcgaatgcacaataacaccttgcacagccaaagtaattcccaagggaatgaaatccaaactgaaacttttatttgaggggatatatcatctctaaagccgttaaacctggaaagccaaatagtttggcaactcctaaaagggcttcccttgcacccattggtcagggagtcctggggt

SEQ ID NO: 35142 - DNA, 404 bp, Oryza sativa
  Clone ID: uC-osrocyp012b08a1
tttttggtttttttttttttttttttttttttttttttttttttttttttttttttgggaaacaaccaacttaggggaagattaatagcaaggaaaaaggggggcaaaccatgcaaacttacataagggttaagggcagtcataacacaatatacccttgttgggaaaacaaacttttttcagcagcaaggaaataagggaacccaaagggaatatttgacccccaaaagcgcgcccggctagacaaggtcggatcatagagcattgccatcgagaactaggccaaaccttaaaaacaagggacattgggggcctcacaatgcttggagggaccaccagtttgggcactgggaaattcagcaacaggccacgagaaagattcagggggggttggcttaactcgg

SEQ ID NO: 35143 - DNA, 488 bp, Oryza sativa
  unsure (1)..(488): unsure at all n locations
  Clone ID: uC-osrocyp012b08b1
ctcatcctctccattgaccagacggcggcgcaggcgcaggcgctcacctccctcctcctccgcggcatccccaatcgaccagctggctcccctgcctcctccgcgattttgatcctaatcacccatgtctgctgaagtcagcgaggaatatccttatttcctctcctgctacttctggttcatatattgcataaaattccgagatttcacttgatacaagtggatcacctggagttttgtgctaatacttcctatcatgtgaatcagttgtagttagcataattggcaagactcaagttttctctcatctgggttcagaaacatttgtcggttgagtgctcgatctaaactctgcttgagtcttgccgaagattgtttctcaacaatcacgtcttctgttctctctgaggctggaccaatctcccttttggtctgatcaacctnctgatctcccttagtgaaccgtnctgctgtgttcacgcaataca

SEQ ID NO: 35144 - DNA, 405 bp, Oryza sativa
  Clone ID: uC-osrocyp012b09a1
tttttgggccgaaagatggcaacaacagccattccaattttaaatcgacactgagtccaggttcacatagacatttaactcatctgaagtatttttgaaactgtacattattgtaaaccaggcattttaaagccatacattgcttgtggatacaagaacactaacaatacagatatcgcgagcagctcaattcgaatttgagccggttcgcacagaagccacgcagattcaaccatccaattcattcgagtgactggaacctcgaccgctgaccaagaaatcttcgttcgctggattccaggaaataatttcccttcacagcatctgtgtctcataacatgaagccacgcttccttaatcactgatatttgatgacattcctttggagtctgacattcatgcctc

SEQ ID NO: 35145 - DNA, 495 bp, Oryza sativa
  Clone ID: uC-osrocyp012b09b1
ctggcgatctgtctggctctgcctgctcttgctggcttcagatccgggaggggactgagcctccgaagctatcaggagagtgaaagacataatggggatcagcagcgaatcgccgaatgggagccagcagattgtacaaaaggaaacacgagatgagacaacaccacttctgccggtcaaggcggaggaggaggggctccatgagatcaatggagcttcattttccggggcggctctcaatttatcgaccactattgttggggctggaattatggccttgccagccagtatcaagatgttgggcatgatcccagggattctgatgatcatcgttgtggcgtcgctcacagaggcatcaattgacatgcttgacaggtgcagccaccagggcaagattacaccttatggttggctaatggctgaggcttacagacagtggggaagaatggcactgcacgcctgtgtcgtcaaaacaacattggggtgacgataggc

SEQ ID NO: 35146 - DNA, 417 bp, Oryza sativa
  Clone ID: uC-osrocyp012b10a1
gccgacttgagctcggcgatgttgctgagcgacgcgaacatccggtccttcctgcccgccatcaccctgttggagtccaggaatgtagcgctgagcttgccatgcatgtcgcccctccacttgtgcagcgacgacaaggggtcggccgccgccgcgagctcgccggcgccatgaccgtgatcggcggccttccgtgctgccgcgagctggccgtcgagctccttggcgcgcccgcgcgcctcggcctcgctggccttgaggctctcgttctcctgacgtagtgcctccatggcgctctccttctccgcgacggcgtcctgcagcttggagttctcgccggtggcgagctcgagcgactcgttcgccgcgttgacctcctcgacggcgcgctccagagcgcgacgcaggctgccgttc

SEQ ID NO: 35147 - DNA, 418 bp, Oryza sativa
  Clone ID: uC-osrocyp012b11a1
tttttggtttttggaggtcagatggacttattcccatacataatggaccgataaatcggttcatttcgtcggcccatcagagtgcatgggccggaatttcgagcctaccaaacaagcccagaagtatcaacaggccttcctggatttgtacttcatggcacagctcgtaaacaccacaagattgaggcaaccgagcccagccatcatccagaagaagcgatcaaggtgcccctcgttgaggtcgtcggggatccaccccggccggccgccggtcgccgtcgcccacgacacggccgtcacgacgagcgagctcaggtactcccccgccgcgacggagatgaacccgagcgccgtgcaccaccgtcttcatggccggcggcgcctggctgtagaaaaagtccagctgccccacggtggc

SEQ ID NO: 35148 - DNA, 395 bp, Oryza sativa
  Clone ID: uC-osrocyp012b12a1
ggacatgaaatttataatctttattatcacgagttttccacatgggaaccactggggggcggttccaagatgcctgacagcccttgcaccagccgtctttgatcaattcttgtcgaacgatccattgctgatcataccaacgtacataccaatatctggttcaatatctggttaaatatcacatgatgtgatgtatctatttccaacttagcatgtttacacaggctagaccccaaggaagaaccgatttccgcaacaggccgcggcaacacaacagtacgtccatccaaaaaccagagttggaggataacataaaagctctcgttgctgtcctagactgtgactcaatttttcaagcaagtgggctgacatttccttggcgtgaacagggttgg

SEQ ID NO: 35149 - DNA, 142 bp, Oryza sativa
  Clone ID: uC-osrocyp012c01a1
caaatatgccttagcacaactttatgatataaaatttcggggttccgaatgtttgctttacatttacagagcgcttcctgtcagactcaaaataagcaagctgggacaaaatacgctccaagatgaatcctgtaaaagagga

SEQ ID NO: 35150 - DNA, 379 bp, Oryza sativa
  Clone ID: uC-osrocyp012c02a1
attataaacttcatcgcttgtctccacatatccctcaaattggggacgatctgtttgttattaagaagcaccaacaaaggcttcagtttttcaccagaggcttcattcagtcaaagcttgggaacaagcctccttccatgggaacgtctaggaggtaggtccaaattcttcccactctggatcatcgactttggaaaaatatttttcgaccacctcgtcgtgcacctcttccaaccttggaggcatccactttgggtttcgatctctatccaacaatatatgccctgcatccctcaaagaagtctctactgaagtcaccacgcattacatggcaaaccattctatattctcgacgtaagcattcaccaacagtttgtgt

SEQ ID NO: 35151 - DNA, 123 bp, Oryza sativa
  Clone ID: uC-osrocyp012c02b1
gggtgccactcgtgctttcttgctccgtagctgcgagaggctccacgccagagggggagggtcgggcatgggacgcggcgttgcggcgggccaacacggatgagcgacctttctgacacgtcg

SEQ ID NO: 35152 - DNA, 398 bp, Oryza sativa
  Clone ID: uC-osrocyp012c03a1
atcagcacaggttcatctgaatattcagagtctggcagtgcactgaacaagaagtcaaaatcagtttaaagagcaaatacaacaaattgtctcaagtaccggcaaacttctacttacaacaatctcttgaatttttttatttatttactgacataacacttacaggctgtaaaattaactgggaaagagactaacatacagaggagaacaattttacagctcagaatagggctttacccagttggccaaataaaatgaaagaacaacaatggcctctctgcagatccggcattttcagcagttaagcatacaaaatctgactgtttgaaggtgtcagatcaccaaattccctaggaacatccacatcttgccactgaattaagtagcttgagctccta

SEQ ID NO: 35153 - DNA, 385 bp, Oryza sativa
  Clone ID: uC-osrocyp012c04a1
atataggggagagaacgtgacatccttttaattactttgggggtgaattgaagtggaacaagcaactgctggagagatagtacacctggcacacacgcacaatttgacggcagagactgatgcacaagcgggacacgcacacgcccaaaattagcaggctccagccccggaattaacagagcgagcaatctacgtaccccacacgaaccaccaagcaaccaaagctagcgccactcccccgtgcacgcgcgcgcgttttatgtaactctttccggcgtgtacgaagcagcagtgacacgacacaaaacacacacaaagacgtagctagggatgacgagaccgagatcgactggtaatttttcgagtaagaggacacgatcgacga

SEQ ID NO: 35154 - DNA, 393 bp, Oryza sativa
  Clone ID: uC-osrocyp012c05a1
agggataatttaaatacttaatagtaatagactctttgatggagtattacaacatgcagcagtggcattaatacgccagtacattaattaagttacacatatgcaggctccattttggtttcttttaatttatcgtattacagaatttctgtagccttgcagatgatcacttggatatcatgtactagtaattaacaataggatgcatacaaaagatggcccaacgacaacagaagatgcgtgcatctgacattgtctggccttatttgttggtagtactccaattaattaacaagagatgatgcattcttgtgccttagtttcttcacatgcttggcttcacgttgagcctattcgcaatcttcacccccaacgactcattacactgggaga

SEQ ID NO: 35155 - DNA, 408 bp, Oryza sativa
  Clone ID: uC-osrocyp012c06a1
ggggttaaaaagaagcttcggacatccattatttcatcgatgattacaacgcgcgcaaaagaaaatcgatttcaaacaaacagcttgtgctagtctctctctctctctctctctctctctctctctctcctccaaatctttggaaagaagaaaaaacagtggaattaaaggctaataaaacaagaggagaagagagaaactttgaaggaccatcatatgtatgatcctcatgtgttgattcaattgagttatttagtagtaggagtttagttgtccttgggggggtaagaggccatcttgttgatgccacatagaccttcacccttgccagggcccctcttcatgcggatgtaccccttctcgccccaatgtgggccccatgagttcttcaccaagatgtaatcttgg

SEQ ID NO: 35156 - DNA, 561 bp, Oryza sativa
  Clone ID: uC-osrocyp012c06b1
tatagtgtaaagctggtgcgcctgccggtaccgagtccggaggtctcgggctttagcactatttgtttttacggagaagaggaaatagtcatacagagatcgacatggcgactaaggcgaccgtgggtgtcgccctcctgctgctgtagctgtgcggctgggtcgtgtgggtgggccgccgcaccgggggcgagctctcgattgtccgctactcgcgcgtggtcctggccgtcgcacgacacggatcccgagctcggtggagcgggaggcggaggcgcacgcgacggctttcgcagccttggaggagaaggacagcgaggatccaggtggtgatggacgccacgaggaacgaggaagagatgagcaagaaggtgaccagctactggctggggctcaacgagttcgccgacctcacccacgacgagttcaaggcgacctacctcggcctcacgccgtcgtcgacgaggtcgaacagcaagcactactcgtcggaggagttcaggtacgggaagatgagcaacggcgaggtgccgaaagagatggactggaggaagaagaacg

SEQ ID NO: 35157 - DNA, 290 bp, Oryza sativa
  Clone ID: uC-osrocyp012c07a1
aaaaaaaaaaaaaaaaaaaaaaaaaaaaaaaaaaaaaaaaaaaaaaaaaaaaaaaaaaaaaaaaaaaaaaaaaaaaaaaaaaaaaaaaaaaaaaaaaaaaaaaaaaaaaaaaacgagggggcccggggaagaaagcaaagagaccaaaaaaaaaaggaaaagaaaaagaaaacaccaaaaaaaaaaaagggaaaaggcaaaaaaaaaaaggaggggcccctaaaactagtggagtggggggaagggacaaaagggggaggggaggggagggaataggaaaggcaaggaca

SEQ ID NO: 35158 - DNA, 177 bp, Oryza sativa
  Clone ID: uC-osrocyp012c08a1
ttttggggtttttttattttttttttttttttttttttttttttttgggcacatgagttctatacatccatttttaaacaaggtcaaccaaacaagggtcaaatcatgatcatcaaaaccccttttaatttggaccatattttaccccacaaccaaactacatacacacccccccaa

SEQ ID NO: 35159 - DNA, 467 bp, Oryza sativa
  Clone ID: uC-osrocyp012c08b1
gtttgcaccatcgtcgtcaagcccgccgagcagacgcccctctccgctctgtactacgctcacctcgccaagctggctggagttccggatggagtgatcaacgtcgtcccgggattcgggccgacagccggtgcggcactctcctcccacatggacgtcgacagtgttgctttcactggctctgctgaaatcggccgtgccatcatggagtcggcggcgcggagcaacctgaagaatgtgtctcttgagctcggcggcaagtctccgatgatagtcttcgacgacgccgatgtcgacatggctgtcagtctgtcatcccttgcagttttcttcaacaagggagagatttgcgtggacgggtcacgcgtctatgtgcaagaagggatctacgatgagtttgtgaagcaggccgtggaggctgccaagaactggaaagttggagacccttgtgatgctgccaccaatat

SEQ ID NO: 35160 - DNA, 288 bp, Oryza sativa
  Clone ID: uC-osrocyp012c09a1
aaaaaaaaggggttttttaaaaaaataaaaaaaggctccttggggtttggggccaaaaaaagggaaaaaaaattaaaccccaaaagggggtaaaatttggggggaaaaaaaattttccaaaaaaaaaaaaatttccccccccggggggtttttttaaaaaaaagaatttggggtcggtttaaaaaaaaaggggattttaaaaaaaaaaaaaacgggggggtttaaggttaaaataaaaaacccccgcattttaaaaggggggggccaaataaaccccccaaggggccc

SEQ ID NO: 35161 - DNA, 424 bp, Oryza sativa
  Clone ID: uC-osrocyp012c09b1
ttatgaatatttacggtctctttcgaggaggtatacgattaaaaaccataacacagaaactttcagcagatggaccattcatacctggagcaacaccgaatggtcaatggtattcaacaccatcaactgatgtaatgatcatgggtaagttgtttaataatgtatcagtagattacttaaacattgcaaacaacataaccaaagcaactggtaacaattgtgttggacaagttggtattgaattttctgatccagttagtaattatacaaatttgctacctggtttcactaattcttcttcaactacttttgttgatcaacgcatagagggatgtgctgagtttgaaataccttattataattcaacacatattactcctgcaattacatctgttcaaagtgatcctttggtacctgttacgag

SEQ ID NO: 35162 - DNA, 328 bp, Oryza sativa
  unsure (1)..(328): unsure at all n locations
  Clone ID: uC-osrocyp012c10a1
ggaacaaaacatttttattaccacaactttttaaggatggaattgagtagcaatactttcaccccaaaatacagtttagcgacaatattttaaaaaagccgcttgctttgcccccatggctggcaagctgagcaaagcagcttacacaaagaacacgagatcactttaaaccaaacgggaacgaacgaagaaaataccggggcttttttggctgaagatccacgaagcgggtcggtttcttttatttttaggctcctctccttctngatgatgggggtatggcaatggcaatggcgatgggatcttggcttaattgaagggaaggggc

SEQ ID NO: 35163 - DNA, 95 bp, Oryza sativa
  Clone ID: uC-osrocyp012c11a1
tttgggggtttttaaaatttttttgtttttattttttttttttttatttttttttttttttatttttttttttattaaaaataaaaaataataaa

SEQ ID NO: 35164 - DNA, 347 bp, Oryza sativa
  Clone ID: uC-osrocyp012c12a1
gctgccaaggagtaccgatgttcaatcaaaattcaagacagattcaccaaaccttttattttttccatctagcatctcacatgcttaaccataggccatattgtaccagaaaaggagtgaactacgcccacaacacaggtacatgatcaagaaggagaatgtcacacagttgctgcagattctaaaacacaaaaacggaagggaaacatgaggcttaggtagggagttgcatatagtgattgccacggctactgtcagtttgtcatgcatgagtgctgcgcaagatcccatggatgtaaccaccgaccatgaccaaggagacgagggaaacgacaccagctgggaat

SEQ ID NO: 35165 - DNA, 400 bp, Oryza sativa
  Clone ID: uC-osrocyp012d01a1
gaagcatacccatttgccaaagtgagaattaacgtggcagaaaatttttcatccattatttctccatcttgcattccgcaagaagaccgctagttagggggaaaagagtaaaaaaagaccaaaaacgatcacaacacgtcgtcgtactccaacacgtacgtacggtactccactagaacgtaaaacctctctagaagagggaaaccggaccatatatttggtagcactttacaactagggctgttcagatcagccatgtttttttgttttttgttcttccaatcattcatcgaaaatttcctttaaccagagcgccgtttgcaattcccgctccagcgctgatgacgatctctcgttgaatgccgagggggttcctcacactgtgtagttctgctggatc

SEQ ID NO: 35166 - DNA, 371 bp, Oryza sativa
  Clone ID: uC-osrocyp012d03a1
tttttgggggggttttttaattttttggcttttttccttttttttttttaaatacttcagttttttttttttttttttttttttttttaccaaaaaaaggaaattttctgggagggggtaaatcataaaaaaagtaggggaagaaaaaaaaaacccaaaacggaaaaaacaaaggaaaaaaacacaccccaaaaaggggggggccccaaaaaggcacaaaaaaaaatccagggggggaaaattaataagggggaaaaatttttctgggggcaaaaacggaagagggggaaacaaagcccccccaaaaaaggggttccaggaagggggcccaaaaataaaaggtgggaaaaaactttaggggggggcccccc

SEQ ID NO: 35167 - DNA, 377 bp, Oryza sativa
  Clone ID: uC-osrocyp012d04a1
gggctccaccaatcatcaattatcatttttttttctacaattggcggtaaatttggtgttcaatatttagaacaatgatcatgaacatcttataatccatgtgaatgacatatctatcagacaactacagaatattatgagacatgtagacaactgtggaatgtaatgaggcaatggaaacatgtgtatccaagtttttttagctataacaccacaatgactaaccacaccatcctacagttttgtttgttgtgaagccagtgtgtgatgaatcagtgtcaggaccaggagcaggcttctgctgccttggttttagcaggatcaaccgaaaatacccatccctcccgaaactttgcgttaatctcccgccgagcatt

SEQ ID NO: 35168 - DNA, 86 bp, Oryza sativa
  Clone ID: uC-osrocyp012d05a1
ggaaaggaaattaaactgatttattacttggtccattaaaaccatcacactcgggtccgtggggaaaccgggaaagttaaaaaaca

SEQ ID NO: 35169 - DNA, 407 bp, Oryza sativa
  Clone ID: uC-osrocyp012d07a1
tttttgggaacataaaccctccctcctcttgttaaaagctattctacacccatgaaaataaaaccataggagagaatgcagaaacacaatacacgatttacaagggctactctgcagacgactgactgactatacaggggattggtgagacttgagaggtacaaagaattagttggcttaaccagccatcattataataagatcctacaacaacccctactaatttacacaatctacgcgaacccgccgcttgccatagacggtagcagcgctctagcactatagcaacaagactacactaccaaatactgacgatgttgatggcatccatcctcatcttcgtcgatgttgggccatctttgcctgagcctgctttatcctatccgcatacatcgggaggcgcgtga

SEQ ID NO: 35170 - DNA, 396 bp, Oryza sativa
  Clone ID: uC-osrocyp012d08a1
gatgagggctcaaattatgaaaagtcacgggtgtttcatactcctaaaagagtagacacaaatatgattctgctcaaaaaattatggctcaatagaacttctcggaatgcctcgaatatttacagcggaattgctcttcacaccaactcagatcagctcctcatacaaaaggagccaaccaaaaggggaaaaaaaagagaagcacacatggcctaaattaaaccatggtgcctggtgaatctcggagtcccttcctcagatccgtcctttctctgcttcgactccgaccagatccatccatcggcacagcggccggccagacatgagcaagaacaactcctttatcacatcttgcaagctcacgctcgtctacctaaggtatgcagctcatcaaca

SEQ ID NO: 35171 - DNA, 383 bp, Oryza sativa
  Clone ID: uC-osrocyp012d09a1
atgtacacattttacacatcatgtgaattactacagcctaacacgtacagatcgctatagtttcatttccacgtatattacatcttccggtacctcatacatcacgtactaacagttcaccacgtgcagcgtatgtatgtctttctttccttctgagaccacctaccaaacggtgactgcattcatgctgccattttcgtagctacaaatccaagcctccacttgtactgtgattcgatgcgcagacccaagacgcaagcagcagagacgaatcagtactggcggtgacatgttgggatggaccggcgtgtgtgttacttgctgttccttttcctgggcacccagcagcagtgcaagccgtagggcagcccgtacgggaactt

SEQ ID NO: 35172 - DNA, 399 bp, Oryza sativa
  unsure (1)..(399): unsure at all n locations
  Clone ID: uC-osrocyp012d10a1
ggcacactaagattcattcattcattcatttgatcaaagcaaacgagacgagctttcttcttgcgatcaaaaacacagatgggcaaccacacagttaacacaaactagatagttccacacaaaactaacgatgataacgatcggatgatgatgatggtagctcgattagatagatagataacttggccatgagggccccaccgctcagttcctccagttcccgtcggagttgccgccgccgcggctgccgtagccgccgccgtagccgccgccaccacggncgccaccgtagccaccgncaccggcgtagccgccttcacggcgctggccgtagccaccgncgncgncaccaccaccgtagccgccgccaccgtagccttcgcctccgccgngctggcc

SEQ ID NO: 35173 - DNA, 442 bp, Oryza sativa
  Clone ID: uC-osrocyp012d10b1
gttggcttctctaccctttcccggttcggttcggttcggttcgggtccggttcgatttcggtttttccttcggttcgggggttggtgggaaagcatggcggcgccggatgttgagtaccgctgcttcgtcggcggcctcgcctgggccaccgacgaccgctccctcgaagccgccttctccacctacggcgagatcctcgagtccaagatcatcaacgatcgggagacggggaggtcgcgcgggttcgggttcgtgacgttctcgagcgagcaggccatgcgcgacgccatcgaggggatgaacggcaaggagctcgacggccgcaacatcaccgtcaacgaggcccagtcgcgccgctccggaggcggaggcggcggtggctacggccagcgcggcggaggcggaagctacggtggcggcggctacagtggtggtggcggc

SEQ ID NO: 35174 - DNA, 391 bp, Oryza sativa
  Clone ID: uC-osrocyp012d11a1
cgcagggaaaactcaattcattaatcacactggaaaaaaaggcatgtcaaattacagaacactgaacatcaccctatgaaaaatcagaagagctactgatttaactggaatggaacaatggtaatgaccaacagatcactactgggagaattaaatcccaaaaaaaattatctaaagaagatcagaaatcagcagaaaaacctcactaaagcaagcggctatcaactttgctgaagctctctataagccagtaactatgcagcctagctagcagctacctttgctaaacaatggcgctcatggcgctgcagattcatccttctgcttctcctccgggggtgttcttgacccggagtaggaattccggatctcaacgatcctcctgatcacc

SEQ ID NO: 35175 - DNA, 319 bp, Oryza sativa
  Clone ID: uC-osrocyp012d12a1
gagagaaaaagaaggggtccctatattttagcttaaggcaaacaaaaaattggggggtttttaaaaaaaaaaaaattttaaaaaaaaaagggaatttaaaaaaacccccgaaaccaaaagtcccttacccaaaaaaaataaaaaaaacttgcccaaaattttgaacccccgggtttcttcccgggagaaaaaaccggaatgtttttgtaaatttcacccaagggggggcaaacccctaggggaaagctgggcttatttgccaaagggaagggggaaaaaaaaatttgggggggggaaaattttggtggtgaaacaaaag

SEQ ID NO: 35176 - DNA, 510 bp, Oryza sativa
  Clone ID: uC-osrocyp012d12b1
aaccaagacaggtcaacttgattgatatacaatatgacaaggtatcaaaacaagtcgatgttcatgccttgaaagaagtgctctggaatcacatcaatacatctgctgacactgatgacctgcaggaagacaaggacacagaatcacccctgtgcctatcgaaagtattgcaagatcttccaagctgcaaccctgatgctgcagcaacagaaatttcaccgcacctatatttcatttgcctcttgcatttggcaaatgagcacagcttgaccttacgtgatcgtccaacattggatgaaattgacatatacattcctgcttcatctctcgtgaagtaatcctgtagttcaatatgttgtgcatgtttgttttattttttgttggttagggacttctcgttctcggtgtattattagattgccttgtatgttgaagattatgtattatgtaatgagcagcatattattggatcgcgctaagctaatatataggtaacctatcatttactct

SEQ ID NO: 35177 - DNA, 399 bp, Oryza sativa
  Clone ID: uC-osrocyp012e03a1
ggcttcctacgagcttacctccctcggcttctcttcggttgctggcgccttctctggctcagcggcagcggcggtttcagttgtttctggtgaagtgcttggggcaccatcttcaacagggacggtcttcttgacggtaccgaccttcacgtacttgcccataaacttgtactcccagtcctgcaatgcgtcgagttcaaatgggccaagaccagagatgtcaccggtcaaatcctggggctcgaaggacatcttagcgagtgctctgctggcatctttgccagcgaatagcgcataaggtccaccaggtccatagaacatcctgcatatggccgtcaaaatgtgaatggtaattagaaacacagttaaaaaatatttaagtatccactttcaaaacag

SEQ ID NO: 35178 - DNA, 397 bp, Oryza sativa
  Clone ID: uC-osrocyp012e04a1
gaagaagatgttactaggatgtgaaaagagaacgtaacgctctctgtcctctactacacgataattgtccagtaaagtaaacatcatcatcatatcaaggtgaaggccatcagtcatacaatacacacacacataaaaaagggctgtgctgctgctacactcgtgcctacgcattcatctattctcagacaagggcaatctaaaaaaacagatggatgccgtgccgcctcctcttccttggatctggctaactcgcaaagggcaacatctagaacttgaagtctttcttcttcgacttcccgtccttctcctgcttcctcttcctcttgcttgcgttctccgccaccatgtcgctgaaatcttccttctggttccggagcttctcctcctcccgggc

SEQ ID NO: 35179 - DNA, 538 bp, Oryza sativa
  Clone ID: uC-osrocyp012e04b1
tttccatttttccgccgccgccgaggtcgacgcggtccccgacctccccaacggatcctccgccaccgccacaaccgacaagaagaagtcgcgggagagcgagcgccgccgccgccgtcgcaagcagaagaagaacaaggccgcgtccaacgccgcagatgcggatgcggccggggacgccggggccgtcgacgacgccgccgaggagaagcctgatgtcaaaccccaggtggaggtggaggtggagtacgtcccggagcaggcggacctggacgacggcctcctcgccgacttcaagagcatcttcgacaagttcaccttcaaggattcctctgccgacgccgaggatgacgagaagaaagatgaggctggcactgatgccgcaaagaaggctgcagggtctgattcggacgacgacgagcaggggacacagcataagaaggaagggggcttgtccaacatgcaaaagaaactacaacgaatgatgaagattgcagaactgaaacagatatgcaatagacctgatgttgtggaggtc

SEQ ID NO: 35180 - DNA, 132 bp, Oryza sativa
  Clone ID: uC-osrocyp012e05a1
aatatcagtggggtaagcatccggaacaacaagagtaatatttccttaatctgatattcccagtgtttaaaccacttcttgacattgcttttcaaggttcaagactaccaaaatcatatcttaaaaataaag

SEQ ID NO: 35181 - DNA, 533 bp, Oryza sativa
  Clone ID: uC-osrocyp012e05b1
tttctaaactgcagagatactcatgaggtgaaacttgagccagggcttcaagtgcttaagattttcaaggaccatgtctgcaagacgtcgttactggatgactttgatttctatgataatcgtgagaagatgatgcaagagaggaaggcaaagcatcaacaactgaagaaggaaacagctgaggtagagattgatgtcttaaacaaagagcctcatggtaaagcaggacaagttgatgggaaagagaacggtgtgttggccgtttctgtaaatggtgttaccccagaagatgttcagttgacaaacgagaagttggccagtttgagcgtctgttaagttttttctcatcatttcagccattgaggggtggtgtaaggtgaagggctatataggttgtgaaggcagcaatcaaggcaattcaagatccatttgagtctccttgtgagtttctccgttgcttttgttaggacttggaggtggtttcataggagagctagaagttagctgattgtgcctgtgagatgtgcgatagc

SEQ ID NO: 35182 - DNA, 396 bp, Oryza sativa
  Clone ID: uC-osrocyp012e08a1
tttttggtagaataaaatagttgcattatgctcttataaatgtaagtccaacaaagccacaaggcgtcctctattcaaagagatcggcatcatgaacaatatcgactctcttcagctgtaggaaacaacatatgcaattagctgctatattcttcctcttatttgtccaggacagctacaaggtgtcgtaatatccacaagaagaaatgctgcctcataaaagagtgtacaaggcccccggttccccctaataaaatcttctgtgtccatcgttgcatacaggcccatttgtttaatttccaagtatagcaagtgttcatcgcttggagaacagtccttgagttaatgatgaaaaatcatattctttgcctgattgagaggggagggaagaagagg

SEQ ID NO: 35183 - DNA, 390 bp, Oryza sativa
  Clone ID: uC-osrocyp012e09a1
ttttgggtgttctaaaacttatggcttactactactgaatttaactgaactgaactcatgattctcatctatacaaccacatatatccctgcacctacaattctttgccaaaccctcctgtccctctcaaacttttccttattattcacaacccaattagccatcaatcatatgttcccaaatcctccaaatccccacacccccaccacttcccaatccctttcaacaccacagcaacacaaactgtttcgatgctgacgccgacaaatcataaccaaacaaaattttgtgcaccttactacgctcttcacgccggtagtcatcaatcaacccaccaagaacactagtagctaataagaacgataatgaccacgtatacttgtgtgcgac

SEQ ID NO: 35184 - DNA, 396 bp, Oryza sativa
  Clone ID: uC-osrocyp012e10a1
gacaagtgcacaaagccaaattaactttattaaaagttcaaaactgattgcaagtttggagcaatgaggtaatccggcatgcgtacttgagtcactagctcattcgctagtgctagctttgttgctatcaacttcattcaaacagagaccagctggcaacagggatacagtacatatatacatgcattctgctgttcatttgccttattaccatgcaccaatataatgcatcctcctttctagcttatcataagtactaattaactaattattccagagcatggcaccaatataattgatccacttgagaccaagccttgtgtacacttgaacacatgcatgcattggcatgcacatagtacgggtttggtccaaacttaatcatcatactagctt

SEQ ID NO: 35185 - DNA, 400 bp, Oryza sativa
  Clone ID: uC-osrocyp012e11a1
gttaaaaaaaatatcacaatatcacgtccagtttgcgcgatgtatcgcaagcaaaaggagccaatgcaaccaagtcatgcattacaacccaactagacaggcctacgagcttaggtgtgttttcgtatgacaaaacttattacaacgcgcaaggtcctagtatcccggtctcttccaaaaaactactagctgctatctctaaaagcagggcaactgttagcacatgcggtttcacttcttgacctcctcgtactcagcctctggagcctgctcgcctccgccctgagatcctcctgtctctgaaccgcctgcgccaccaccaccaccagacatatgctgcccaatctttgaaacagcctttgtggccgcttcgatattggccttgatcttctcgatgtca

SEQ ID NO: 35186 - DNA, 389 bp, Oryza sativa
  Clone ID: uC-osrocyp012e12a1
gatcaaattgtctctttgaacaccctgaagttacaagaaatgggttatatctctactaatgcactcagatgaagcaaaaaaaaaagaacaaaaaaaatgtaagttctagttcttcctgaaaagaaatacagaaaacgtcaaacagtgttagatggcacacgcagtggtaaaattgatttaatctatccatctcatttcgccagttttggccactcaaaaagagtctcactgagacatcaaagcactcccccaggcccaacgctatgatattggctttttttacatgtaaacgagtttttgatcaactaatgtgcaatatcgtcaattctgatggccttagcaaaacctttcagcaaagcaacgtcttcaggtcttaagcaatggatcct

SEQ ID NO: 35187 - DNA, 318 bp, Oryza sativa
  Clone ID: uC-osrocyp012f01a1
acacaaatgaactggtcatataacaccaggaaaggtgatcgaatccccagactttgattgatggatgtaagttttttattcaaatcaagcgactacatgatggcaagggccaccaacatgaaaaaatgccctcgggacgccatttttttcaagccccctaaaccatggaagcacaatttgcacaatgctggagccgttcatggctcgaacaccatgttttgggccccccttttgatcgattcgaagaggacagaccacagggagcgctcaccgaagcttgggaagaccacaactacgagcttccctttgttctcgggc

SEQ ID NO: 35188 - DNA, 354 bp, Oryza sativa
  Clone ID: uC-osrocyp012f01b1
tttccatcttcctttcctctcgcagccgtcggcggggggagtggttagttggttactggcttgcagagttttcagagagatttaggcaatggcggaatcaggccaatcgattgcgagtgatgtgactgcactgatcggcaatactcccctggtgtacctgaacaaggtggtggatggatgtgaggcccaaatggctgccaagcttgagatcatggagccctgctccagtgtcaaggataggattggttatagcatgattacagatgcaaaagagaagggtctcattactccaggaaagagtgttttgattgagcctactagtggaaatactggtattgcccttgctttcatggc

SEQ ID NO: 35189 - DNA, 111 bp, Oryza sativa
  Clone ID: uC-osrocyp012f03a1
tttagccgccctctttttttttttggggcatttaaacaaacgtgttagctcgcacaaaacttcatctttcttcaatgttgactacgctaataaaaatctgtaatcttcata

SEQ ID NO: 35190 - DNA, 516 bp, Oryza sativa
  unsure (1)..(516): unsure at all n locations
  Clone ID: uC-osrocyp012f06b1
atcgcattctccactcttctgcttttgccgttgcgtttgcgttttgcgtagcaagggaagggagagagctcgtgcttttggattggccgcgatgagctgcgggggcgccgggcagagcgggtggctgctcgagtacgggctggtggaggaggagatccagggctccgacttcatctacatggtcgacgaccccgcggccgtctccagcgtgctactgggcttcgacgttcccaggaaggaggacggcagcggcggccaggacaactctgcctccaagaaaagatctcgtccagaatcgagcgcaccgtctggcaccaaggcttgccgcgaaaagctccggcgagacaggctcaatgaaaggttcaacgagctcagcgcgatcttggagcccggcaagccgccgagggccgacatggtctncatcctgagcgacgccgcccgtcttctgagccagctgcgcgccgaggcccagaagctcaagagctcgaacgagtcgcttcaggactccatcaagag

SEQ ID NO: 35191 - DNA, 398 bp, Oryza sativa
  Clone ID: uC-osrocyp012f07a1
tttttgggaagaatagaagattcgcaatcactgcgatagtaaacttgtattactagatgtttatatatatttttctccctgcaatcgccatcgatgttattcagcatgaggattgcgaaaccgtgtgtcagcaaggtctattacatctggtgcacagacagggtcgatgcgcatcactgaatcactactgtaattcgtcttcagttacacatttcgcaaggaccgctggccggcacgctgcaagcgaggccaacgatcaatgaaagtcacagaataatatggccatcgtttgcaactacttttgatacctctaatttcttggcctggttacagttgatcctgacgttctgtatgtactaagtcagacgtatgcatcattacccatcacgagtagaact

SEQ ID NO: 35192 - DNA, 396 bp, Oryza sativa
  Clone ID: uC-osrocyp012f08a1
cacggtgcaagcatagccatctgaccacaaaaaatgttgagccactgcacacggtgcagtgtcagttgtagcattcacaacataccgagtttctttttaggaggtaaaactctacgagtctcacagcatagtaaaacgtagccagctattactagatacgagtagcattttttaagtcgcaaacaaaagggatacagtcccggcttaaggggtgtaaaatcagcttcactatcttcatgttcgccgcaacgggaaacagagcacaatcatctttgggtccaaaaatttacggcaaacctttgcgacgacgttgatttgtgaaccaatgacgagtttcctagatgacatactctgcttactgttgcgcgcactgaactctctgggcacctccaggca

SEQ ID NO: 35193 - DNA, 332 bp, Oryza sativa
  Clone ID: uC-osrocyp012f09a1
aaaaaaaacttatttttttttccaaaacaaaaaccacagccccaaaaacttggcttggccactatgatttttttgacaaacttagggcccaaaaaacattggaaaaagaaaaagaaaaacataacataccccctataacttaccattctttaaacctaaaaaaatttctttccaaatgctaaaagggcgttggagtttttaaggggggaactgaaaattaaagggccccagcaaattgattttgccgggggaaaaaacccaaaaaatttttttccaaggccccaaacttaaaggccctttaccccaacgtggattactttagcaaggtttta

SEQ ID NO: 35194 - DNA, 501 bp, Oryza sativa
  unsure (1)..(501): unsure at all n locations
  Clone ID: uC-osrocyp012f09b1
tgtggttttagcgagcgcgtgggaggccggaggcgacgactactaccgcgccgccgtcggagaagaaggccgcggaagcaccagtaccagcacccgtatatgtcttctagccccttctccgatctggtggtagtcgtgctcctcgtctgcgccgtcgtcgccgcagccgtcctcctccccctcgtctgcgcccgccgatctatgcaccagaggctccacggctggaacaagtccacgtcgatgctcagggacgggttcggggtcaagtattccgggttcctccacataaggccgtgtggtttctgtcgaggagattgacggattcgatcgattcgtgttcgtctccgtcaaatttttgcacatgagaaaaaaaaaagtttcccccttttagagtttttgcccttcagttttgtcagttttggtgaggaattttagagttcttttccggcagagttagaagatgagagaaatggcccncttcaagcagcagcagcagatgct

SEQ ID NO: 35195 - DNA, 394 bp, Oryza sativa
  Clone ID: uC-osrocyp012f10a1
tttttggttttttttttttttttttttttttagagctcccaacgcagttcttcaattcaaaaagactgcccaaacagaccaagggtatcatcatagcagcaaagttttttaacacgcaacatcaaagagacactaatgcaataagataacttgaagcgcggatcactagcaaatttcgcgcttagtcgacctcctcgatcttggggccagcaccgctgccgcctgccgggggagcatcgtcctcgtccatgccgccggccatgtccgcgccagcgccctggtacatcttggcgatgatggggttgcagatgccctccagctccttcattttggcatcgaactcatcagcctcggcgagctggttgccgtccagccactggatggcctgatcgat

SEQ ID NO: 35196 - DNA, 370 bp, Oryza sativa
  Clone ID: uC-osrocyp012f11a1
aaaggaagagaaaataatagaattacaaagcatttcaaaatgttcagggcattcgccatcattggacaaattccacgaggaaacagaacaaaaacagaaacaagagcacagtgttcatcccgcacatttcaaacattttattgggagtaaaacagatgcagtattctagggttcgaggtgacctgaggcgcgcagatcactcggcctgggcctccccggaggccagctcctgctgctggaggcgctcgagcgccttctggggcgcccaggtctcgagggtgaggtcgggcttggcgttgagcccgacgccgaggatgaccacggtgaggaacgaggtgacgtaacagggcaactcccagtcctcccactt

SEQ ID NO: 35197 - DNA, 400 bp, Oryza sativa
  Clone ID: uC-osrocyp012f12a1
ggtcccaagggggaaagcataacatccaaaacactacaagtcgttcaaatacaaataaacctttactacgtacacaaaaataagttatcttcaagagagaaaacaaaactagaggtacaatcattaagacccgcaattcggctagtagaaaattcgaaacaaaaagctttcaaactgcacgggcaaacatccttgttgcccggtgaaacccaacacaacaatccattgcatacattaggaatgccctgatgcgatgccattgtctgaaaaaactgaccgactcagacgacctacactgcacactacctggacagatttcttccagtacaccaattgacttcaccttccgcattgccccatggccaacagccctcaggtgctactgaaaccatgggacgca

SEQ ID NO: 35198 - DNA, 348 bp, Oryza sativa
  Clone ID: uC-osrocyp012g04a1
aacccgggaatctactatagcattatatattatcagggccacgttacattttaccactcacacttttatctaatctaaaaactcatttaacttttatttttcaacttgcatccaaggggcaagggggaaggcaagaaactagcgaagcccttttacagccacaggacacagggggaattgcacagataaacaaaagggtagcacaccagcgaagcccggagcgagggcgttctcaacaggtgggggcaggacccccaccggatcaccgacttggggaccgccacatccaggggctcgggcttgccggggccaaaggggggggtccccccggtggacaagcccaaggcc

SEQ ID NO: 35199 - DNA, 408 bp, Oryza sativa
  Clone ID: uC-osrocyp012g05a1
tttttggggtttttaaaaaaaatcaaacagtgcatgtctagataaaaatcaaacagtgcccttgccaatcgaagggtcactcatgttatcatgtatgtacatctcaggttaacaggaaggtttgtattagcgccacacgagcgacgcggccatgctcttcaattccctactgggcaacaccgcaccaccagtttggatttagcgtgtgaaaaaaaaagaatcacattacgaatctcgcacctaaaacgctacatgtcaaccaatcagaacgtcgaggccaagacgaaacgaaatcctcatagtctagtcatcatcctcatcatcgttattgttgttcgcatggtatatcttttgtgcacggtacatatcagcaacttgctcagatgtggttgcctgttctggattttt

SEQ ID NO: 35200 - DNA, 390 bp, Oryza sativa
  Clone ID: uC-osrocyp012g06a1
accacaaaaatggggtgcactatataggaacaaacttcatgccccaggacaactaaggaaacaacagatttgcatcattgcggagctagcagaaacagctagcatgatttctgcacactcggagaactgaacactatcaattatgcaaatatggtacactacagaagacactcagattagctttcacaagagcctcttgtttataaaggaaaaaggaaaacctagaagcacttcatttcgtggtatgacgggcatcaaccaaactgcaacaaaacacccaacctacaaacactctgccctggcagctgatcggacacttcagttaccctacgtggcgggctatggccaagagacctctatcttgtaatttggagacaggttaacagagta

SEQ ID NO: 35201 - DNA, 382 bp, Oryza sativa
  Clone ID: uC-osrocyp012g07a1
aactaaattgaacactattaatacatagtttaagttacatcatgatttattatgactggcaaagacccaaaaaaaaaaaaaactctcacacaatgcaaacaatagtagagtttagatgcagtctatacctgactagaaaggattatgtagtagctgcagaaggtcgacgagcgtgacaaactgtaaccatatacgacgcatacacgacgtatattatgtatcacaaacgacgtagaaaattaacagatacggtacaccatgacttaatcaaagaaagctgattactatgctggttggacacttgctaaccgcaggggaaacttaagggtacagggacgacattagttaaatttagggcaacttaaacgtaaaagggtatttt

SEQ ID NO: 35202 - DNA, 334 bp, Oryza sativa
  Clone ID: uC-osrocyp012g08a1
ggaaatcccaacgcaattttacattggggaccccaaggggaattggtataaggccatagtttataacatttcataacaaaaacaaaataattaacccttaaaaaaaaccacaggggcccagacaaaaaacccttttttttttaaacccaaaatttttataaaaagaggtgtaaaaaaaaaccttaggggcgccgcaaaaaaaagccttgaaatttttaaaggcccccagagaaaaaaaaagggggagcctttttggggccaaccacagtttaattaaaaggttattttcccaggggggggggtttgtttaaaactggagaaattgcccgggggg

SEQ ID NO: 35203 - DNA, 492 bp, Oryza sativa
  Clone ID: uC-osrocyp012g08b1
ttccatctctcgatccatttctccccccaaattcttctccaatcaggtcgattccgtcctcttcgagcagatcagctcccgctgatcgaatcggtgtcgaattttggttgggggtgccggtcctggggtggatcctggtggggagaaagaacgtgacttttggtggtgggatttgggaggaattgtttgcgcttgaagggggagatttagctctcttggccttggttgccccggcgcgcacagaaaaaaactctgtgagctataagaagatcgccactcacgtgcgccggtcctgtttcctccactcgttctgggttgtctccctctactggttttatgtgatctcataattctgggggaatcatcttctccgcgtcaatccgccattgttactagtagtagtagagctctcttgttgatggtcttctgcttcgtgatcttgttcggctgattaaatgatcgtagcagcagaagacgcagctgtttgtagac

SEQ ID NO: 35204 - DNA, 404 bp, Oryza sativa
  Clone ID: uC-osrocyp012g09a1
tttttgggttttttgatttaatcatctccctgcagttcaacatcaacaatttcagacatcttaacacaaatcagggagtgaggttgttcatggaatatgtagtgtcacagcctacttatttcattgacccagagtgggatcccaggctatgaaccacagaattatctcatcactacgacatgatctcaactacggctcgcccaacgatcttgccacggtcaagatcctcgtaggcgctgttcgccttttcaaacttgcatttccttgatatggtgttcttaagattgaaggccccactctctgcaagcttgactatctgaggaagatcttgcctggcccttgcaccatacgacccaatgatcttcacctgtcggcgaacaagacgggttatattcacctccccc

SEQ ID NO: 35205 - DNA, 512 bp, Oryza sativa
  Clone ID: uC-osrocyp012g09b1
tttaatcttaagaaaaaaagagttttaagcatacaaatataagcatcaatctgatctgcattcgacactttggtcactagttgagttgagttgagagttgctgacaaagcaagcggctttccatgtctatcacctccgcttcccgccgcgccggcgccgtcgtgctccccatcctccgacgaatcggcggcgcgttccgccgccccttctcgtcggagccggacccggcatcctccccggggtaccacgtcgccggcgggcccagcttcatgtcgcgcgcggtgttctgggagcccggccgccctctcaccctcgaggacttccgcatgccgcgccccaaggccggcgagctcctcatcaagaccaaagcttgtggagtttgccactccgatctccatgttctcaagggtgagctcccattctccagcccctgcgttgttgggcatgagatcacctgggaggttgttgaccatggtactcacacccctgctgagatcatcaacaggttccca

SEQ ID NO: 35206 - DNA, 412 bp, Oryza sativa
  Clone ID: uC-osrocyp012g10a1
gccccacccacacaaaccctccaccaccaccacccacccacccatccgttggccaccggcggcgtgggcggagggcggcgggccggcggccatggggaagaacctgcgtatcaagaccggcaaccgcgccccgctcctcgcccagggggagacgtcgagggcgctctccgatctcgaggaggggagcaacgtccagccggagaacgtcgggttctgccgcgtcatcaagttggcgaggcatgacgcggggaagctggttattgccaccatggcgctgctcgtcgcttcgctcagtaacattctcgttccgaaatatggtggaaagataattgacattgtttcaagagatgttcggcgtccagaagataaagctcaagccctagatgatgtgacgggcacaatattgtatatt

SEQ ID NO: 35207 - DNA, 254 bp, Oryza sativa
  Clone ID: uC-osrocyp012g10b1
gccggataaaaatccccccttaaagggtttattactttttttaaaaaaataagggattttattttgtaaaaaaaaaaaaacctttggtacaattaaaatttttttttacttttgcgcggaacttgatggattttttaaaggggtttcttttttttccgtttacttatagtggatcttaaaaaaacgggttccaccttcccggtgaagggcaaaaaattaagttttttgcaaaagaggtttttttttttttttgg

SEQ ID NO: 35208 - DNA, 369 bp, Oryza sativa
  Clone ID: uC-osrocyp012g11a1
acttctcccagcacaaatgcaattcaccagatcgtccgatcaatggagcaaccggagcgacacggcgagctggggaggacgatgacgaggatgtcgtggcgtcaagaagccgcttcagggcttccagatgatggtggtctcggcgatcatggaggtgacgatgtaagggtccatgttggacgccggccggcgatcctcgaagtagcccttgccgttctgctccgtctcccggccgacgcggaccgaggcgccgcggttggcaactccccagctgaaggtgttgatgtcggcggtctcgtgcctgccggtgagccggcgctcgttgccctcgccgtaggcggagatgtgctccttgtgcctgagcttgag

SEQ ID NO: 35209 - DNA, 396 bp, Oryza sativa
  Clone ID: uC-osrocyp012g12a1
gttataccaagattgggctatctcaatctataaggaaagataaaaagtacttgatcattactgatgatcataaaataaagtacacttcaggaagaaggaatgacctaaaatggctccttcaacagaggaagaatagggctagacaaggtacacaaaggtaggcaaggccattgccgtcatcgttaacgttggcctcgatcagctgtctccgttctgctgcccgaagctgcatgatcctgagggcaagaaggagaagggattctcagagatgtcaaatccaggtcgagtgaagtcatcaagcccaccgaagcaaggatcaaagctcaatggcgagaaatagcgtggatcatcggccatcttcatgtcaagatttgggatgtcgtccgatgagctacc

SEQ ID NO: 35210 - DNA, 100 bp, Oryza sativa
  Clone ID: uC-osrocyp012h02a1
caaaaacacagggtatttttttttgcattggtttaccaacggtcttgccaccctttacaagttctaaaaaaaagggtgattagcccctgatcacatattc

SEQ ID NO: 35211 - DNA, 353 bp, Oryza sativa
  Clone ID: uC-osrocyp012h03a1
aactcacatttgtgctatatatgttacaagtcacaagattaattacaggcttaatttacagcagccaggaccctccagcacaagacgatgcatcgtctggattctgaatgaccagccaacaacacctcaaggtccaccttgtaactcacataccgataccgtggtgttattgttggattctcaatttgccatatgcacacttttaattttacactccaaactagctgcattcattcatattcggggtgattaattgatccaaatatacacgaacagctttgtgtatggagaattaactcgtcgttgagctagaagcagaatttctttttacgaaacttgatcatatcttgctt

SEQ ID NO: 35212 - DNA, 139 bp, Oryza sativa
  Clone ID: uC-osrocyp012h03b1
gttgcacatggatttacatctgctttcccttccattattgaagaaagcattcctgttggtgacaaggttgtggatgatggatggggcagtcctagagctagttcatcacccttgagaagtttgcctatcacatttgatg

SEQ ID NO: 35213 - DNA, 382 bp, Oryza sativa
  Clone ID: uC-osrocyp012h04a1
aaataagaatgtgcagcattttcaaacttgcaactcaaataaaacatcaacaggaatgagatgcaaatgagcaaattgagcacatatttaggttcaaatccaacttattcataaagcatactgctgtcccacaggaaactgtttcataaaactaacatatcatacggactcgatggtccattaaaccagacacaagtagacatcagcaccacaaatacttgacgaacagaggctcgggatgaccaggcacatcggcagctccaccaaactggctgattactgaccaccacggaggcggagcaccaggtggagggtggactccttctggatgttgtagtcggcgagggtgcgtccatcctccagctgcttgccagcgaagatc

SEQ ID NO: 35214 - DNA, 392 bp, Oryza sativa
  Clone ID: uC-osrocyp012h05a1
ggggattacgaaacaatgggctatgcccaagacaagtcaatactacaacatctgtggcgagtacagaggtacaaaagtcaggcaccgtaagcctttcgattaaaaaccaaactgaaacacgcacgattttttaacaccccacgaaaaacaatctgatacctagctcctttggtggtggaacctaaagagctttatcttcccaaaacatccacatcattatctgtcatgactatatagtttcgatacgtaaaaaggcagcgttcactcagggatatccgccatgtcttcctttcatttaagcccggccaagatgctttaagccttgttggcaatgttgttggaaagccagtcaagcccctcatacaaccccttaccagaggtagcacatgtgc

SEQ ID NO: 35215 - DNA, 398 bp, Oryza sativa
  Clone ID: uC-osrocyp012h06a1
ggtaaatgtttgttataatatattcgtaaaaaccaataaatagtttttgaaccacatctctaagtaatacaattttcatccatcaattcttttttgatcttttatccatcataaatggaaacaatggtgacgacgaggacgacggcaaccacgatcggctgcacaacgacggcgatgacgacgggagcagcggcggcgcaacgatggtgacgacaaggatgacggtgaccacgagcggctgcgcggcgacgatgacgagagcggtggcagtgcaatgacagcgacgacaacgggagcagcggtggcgagacgacagcggcgacgaggacgacggtgtaacactccaggtagccacctacctagagtgccacaccaaaatacactcaaaaaccactaat

SEQ ID NO: 35216 - DNA, 408 bp, Oryza sativa
  Clone ID: uC-osrocyp012h07a1
gttcggcaacacatgagagttgtcttgcatttctttagaagggccttgtcaccggggacagttcctatcaaaaagggtgataagcagttgatcacatattcagtcatcattacgatgcaactattcggaccgagattcatccaatacgccataatgttacaggaaacgaactaatgtagctgctccactattacgaatttgatcgaacggctgaacggctcctgattcacctcacacacttgtatgccaactcgatctttgccacccatcactagtctgctagtttgggaacttcattttgtactgctgagcagtcataaaggtcgctgtaatcatctttcctgcgaaccatctaccatgcaatgcgcgttgagcagctgtcgcagctgctacactgtcgaaatgaag

SEQ ID NO: 35217 - DNA, 509 bp, Oryza sativa
  Clone ID: uC-osrocyp012h07b1
tcttcctctccctgagcgtcgccgcacggaggaggaggagatggtgagggagctccagaaggagcgcgaacgcagcgaccgtaaccgtgactaccgtgaccgcgatgttagacgtaggaaagatgacggtgcatagccagaagctgatccagaaaggagatcaaaggactgtatttgccttcagctatctttgaaggcagatgaaagagacgtctatgagttcttctcaagagcagggaaggtccgtgatgttcgccttattatggacaggaactcgcggcgttccaaaggagttgggtacattgagttctatgatgctatgtctgttccaatggcgatagctctaactggtcaggtgcttcttgggcaacaagtgatggttaagccctcagaggctgaaaagaatctagttcagtcaaacgtggcatcaggtggaatagcttcaggtggagcaagaaaagtgtatgttggcaacctacattccaatatcactgaggatcaattgagac

SEQ ID NO: 35218 - DNA, 374 bp, Oryza sativa
  Clone ID: uC-osrocyp012h08a1
ttttggttttttttaatttttttgggtttacaaacatgcaacaagggataccagtttaattatcgaccggccgctccgtgaaaaaaacacccggcagttcaaccaggagatcagatcactgagtacaccaacgacacttgcacgacgacgtaataccaacgaccttacttctactgagtactgactagtgactgctactcgcagcaaccatggccgacgtttaaaatgccaccgagccatggaagccacggaattcagagaagattacacagctagttgagttgagtgactttagcttgacaaagactactactagtactagtactaaacctagcgtagctgcttttgcttggttatgagaggattgagtccca

SEQ ID NO: 35219 - DNA, 371 bp, Oryza sativa
  Clone ID: uC-osrocyp012h09a1
ttttggggttttttttttttggggaaccggaatttccacaaaattgtaattaccaaaaaggcagtttcatatctatgggatggaacaacagacagctacagatattttcaagcaaagaactaaagacaatttttaaggggaagtcaaaatttacatgctacaacaacacaaaaaaaaatggcctgcttatttttcttaccactttgctgctttcctcagcaacaacccagggcaggccaaactaagcagcttttgattccacggaagacttatactaactaaatttgcaaggcaaaaaacttattgagattggtgaccagacttctccgagggcggactctcaggttcctgagacactttgatggccgaac

SEQ ID NO: 35220 - DNA, 403 bp, Oryza sativa
  Clone ID: uC-osrocyp012h10a1
tttttgggcacaagaagccaaacgggagagcttgtacaaaacttcagctctcttcaatgttgactacgctaattaaaattgtaactccataaaaactcggctacgccgagaaaactgtaattacaacagatacggcgtagccaattcacgcaatgcgcacccatacggctacagtatggttcatttaacgtctgatagacgatttcttaaggtgctgccgcaggtggcgacaaatactgaaaacagcgaggtaatccaataaagaaataacattggaaatcctctccagcggcaacccaagtctctaaatgatcataatcactcgagttaccctgcaacgcaaatttatacccgggttgcgagggggcagttccatttgtagaattgtagttggtgttacggg

SEQ ID NO: 35221 - DNA, 384 bp, Oryza sativa
  Clone ID: uC-osrocyp012h11a1
aaagacgggccacaactaattcagcaattgcattaaagatgaaaaaaaacccaacatttccgactgattactctcatttttgctggtccttcctagcaaataaattatctgaactagacctaactttcatcatcatcaccaccggaggaactccatgctcagcagcacatttcgagggcattgtaatatgagtgcccacagggggctaaagcataaggtccactccatctaaaagaaaatactataaggatacataaccagggaagccaactatgactattagttagtagcagcggttggggaagcagaatcactctcgggcagcgcttttcaatgccaagccgtttgcacccttagaaaccacctgacggatggcgacacacg

SEQ ID NO: 35222 - DNA, 306 bp, Oryza sativa
  Clone ID: uC-osrocyp012h12b1
tcttcctcatagggaagggaagagtaaggaggaggaggaggaggaggaggggaggtggtagatgctcggagggtcgccccctcctaggactaccacccctatccttctcaccacttactatctgtcaaccaactccccttcatcctcgatcatgacatcgctccgtatctgtccctcataaaccactacaacacctaccatattcctctacactgcttacatatacctgcagccactccttcatccatgactctgccccggtggcctgtatccatacaatccacctcaccacctacattaaccttt

SEQ ID NO: 35223 - DNA, 282 bp, Oryza sativa
  Clone ID: uC-osrocyp013a03b1
ttttaatatggagaggagaaatatgagagagagggacgtgtctaaaaaaaggcatggttgcactggagcttaatagcgaaagcagagatggcatgaccttagctaagagcaaggaattggtggtggcggcatgtgtgatgcatggctggctgatgctaggcaggaagaagaaatggatctggcttaagtcgcttaacttagctatgggtgtccatgccatgccatggatgggtgataacgccttgctgatgctgctgatactgctggcgctggagctgagga

SEQ ID NO: 35224 - DNA, 217 bp, Oryza sativa
  Clone ID: uC-osrocyp013b02b1
tagctgaggcttgggttctaggctggcttacctatagctagatagcttacatgatggccggcggcggccacgctgccgcggggcaccggatacagataccagctggcccggcgtcgcaatcgggaccagctgatcataaggcggtcgccgcggcgccgccttatccaagaatataacttttttcattttaatgcggaggtcgcaaggacagccaaag

SEQ ID NO: 35225 - DNA, 61 bp, Oryza sativa
  Clone ID: uC-osrocyp013b05b1
ttagcttccgccgcagccgcagccgcagccgggcgtggtctcctccgcccgcgagctcctc

SEQ ID NO: 35226 - DNA, 476 bp, Oryza sativa
  Clone ID: uC-osrocyp013b07b1
agctttgtcaagggtattgttgattctgaagaccttcccctcaacatctcacgtgagatgctccagcagaacaagatcctgaaggtgatccgcaagaaccttgtgaagaagtgcgtggagctcttctttgagatcgctgagaacaaggaagactacaacaagttctacgaggccttctccaagaatctcaagcttggcatccatgaggactccaccaacaggaccaagattgctgagctcctgaggtatcactccaccaagagtggtgatgagttgaccagcctcaaggactacgtaacccggatgaaggagggccagagtgagatctattacatcactggtgagagcaagaaggctgttgagaactcccccttccttgagaagctgaagaagaagggatatgaagtcctgtacatggttgatgccattgatgagtacgctgtttgtcagctaaggagtttgagggcaagagctcg

SEQ ID NO: 35227 - DNA, 310 bp, Oryza sativa
  Clone ID: uC-osrocyp013b08b1
gtgctgaggcttgggttctaggctggcttacctatagctagttagcttacatgatggccgccggtggccacgctgccgcggagcaccgcatacagataccagctgccccggcgtcgcagtcgggaccagctgatcataaggcggtcgccgcggcgccggagaagtggctgaattactttcttcgcttgctcgcggtgatcgaaagcgtgggcaacgccttcggcacgctggccttcacctgggccaccgtcgtcctgctgggtggctacccaaccgttctcaagcgcgattttggtattgcgactgcgat

SEQ ID NO: 35228 - DNA, 450 bp, Oryza sativa
  unsure (1)..(450): unsure at all n locations
  Clone ID: uC-osrocyp013b10b1
caaccttactgagagttatgactctgatgtcactgctcataagccaatgatgtggtctccatccccaaatgctgcaaaagcccaccccttgacatttcagcagagaccccctatggataattggatgcagttgggaaggcgtgaaactgactttaaggatgtccgttctggctctcaatcttttggtgattccccaggcttctttatgcagaattttgatgaggctcctaaccgtcttacttctttcaagaaccagtttcaggatcaaggttctgctcggcacttctctgacccatactactatgtatctccacagccttccctaactgttgaatcaagcacacagatgcacacagacagtaagggagttacatttctggaatggtcagagtacctgggtatgggtaattcgagagaccaaccacagaantttcagattcgaacagaact

SEQ ID NO: 35229 - DNA, 364 bp, Oryza sativa
  Clone ID: uC-osrocyp013b12b1
aatgaagtgatgccacaaatcaggcgttcaagattcaaagttattaggaagattgttgatctattattcacaatatattctaacaaatctgcattacagcagctatacttgtctagtctgcactttgcggtgcaccggcttgacatagacttatcccgttcttctaccagaaactctgaacctatctggttcagttctctacaaaagcaccaagcagaaactgcaagaacccctgtcatcaagtatgatgtctgaacttcgccatgtacatcgcggcattcgtcgctgtcatgtgttttggcgtctcaaaacgaatgggacattgcaaaatgttcaaccttgcaactgcctagctaagcatgct

SEQ ID NO: 35230 - DNA, 472 bp, Oryza sativa
  unsure (1)..(472): unsure at all n locations
  Clone ID: uC-osrocyp013c02b1
ttctcttttcttcttcatcgcaagctagtaagagtgaatcgaagatgatgaagaagctggtgaggttgctgatcatggtggaggtggtggccatggcggcggcgccgcggcgagcggcggcgctgagcatggactactacgggatgagctgcccgttcgcggagatggtggtgaggagcgtggtgagccaggcgctgatgggcgacccgtcgctcgccgccagcctcctccgcctccacttccatgactgcttcgtccagggctgcgacgcctccgtcctcctcgactccaccccggacaacaccgccgagaaggacgcgctcgccaacaagagcctccgcggcttcgaggtcatcgaccgcatcaaggacgccctcgagtcgcggtgccccggcgtcgtctactgcgccgacgtgctcgccctcgccgngcgcgacgccgtcatcatggcggngggcccgtactacggcgt

SEQ ID NO: 35231 - DNA, 386 bp, Oryza sativa
  unsure (1)..(386): unsure at all n locations
  Clone ID: uC-osrocyp013c05b1
ttcacgtttccggaaagccaataattacgggccgcaggtcagccaaatcagttactcctccttgcatgtctcgtgaaccagttaggcggttaacttgtatatcaaacagacgccgtgcgcgcgagcagttcgtcgtcgtcttcgctcgatcgtagtagttgccggccggcatcggcatgggcgacggcggggagaagcaggcggcggcggcggaggggtggcggctgagcgtcaacgacttccagttgccggagcggcccaaggacccgcacttcgtaagagggtcatcaagcgatgccacggaaagcatcggaaaattgcaaaatactacaagaagcangaaaatttcctgaaggatttcagcgagatggaaaccatgaatgaga

SEQ ID NO: 35232 - DNA, 373 bp, Oryza sativa
  unsure (1)..(373): unsure at all n locations
  Clone ID: uC-osrocyp013c07b1
ctaattcaaataaagttttcccggcaactaccaagggtgttgggcacttggctggcattttacatgactttctggagaaacccaacagtgcggttgatggtgccaacgatgctatgctatatacacttcctaaggaagagttgttagaattgtttctaactgtgagcagccaactttcacttctatggaatgctttcttgaaatttcataggataaataaaaccaagatattggactacttgcgtgatatttgnggctcttgaccggaaatcaaaatggtcaatatgggactggttcacttaaaaattgagatcccacaccggtatttaacgtagtaccgacgatgaagtcatttaccggcattcccttttga

SEQ ID NO: 35233 - DNA, 448 bp, Oryza sativa
  unsure (1)..(448): unsure at all n locations
  Clone ID: uC-osrocyp013c09b1
tgtactgccggtttgctagccgcctcgctgctccggctccgcctctccacccatcccgccgccaccgccgccgccgccgcctcatcctcctctctacccgcgccgccgcgcctagctatctctaggaagggaggagaaggggccgggtgcgcgcgcgctcgctcgctcgctcgtctcgccggatctacagccgccgccgccgcctccgggtgttctctgttgggatctatctcgtgagccaaactgngcccggccgtcgcgccgcctcaggtccggtcgtcgcgcccgcgcccgctgctgctgctgctcctcctgccccggctcctgccgacgccgccaccgctgcccccgtgccggatcaaacacgggatctgctgcagaaggtgtctttggattcgcagcccagggcggtggatgcggccaccgagcccgcggcgctaagaggggc

SEQ ID NO: 35234 - DNA, 276 bp, Oryza sativa
  Clone ID: uC-osrocyp013c12b1
ttttcatcaatcacgtgatgacacactcttagattagcttagctaagctgagctagagctattccacgagcaggaataacctggtcgcgagaacgaccatcgctggcctgtacgctggcggtggtggcggcgatcctcggaggcagccgcgacgcggcccacggcggcggcggcggcggcagcagctggctgctgcatgacagagataatcagcctggcattgtgcctgggctacatgtcccggaactcgacagcatcctagccgtcctgctgcac

SEQ ID NO: 35235 - DNA, 347 bp, Oryza sativa
  Clone ID: uC-osrocyp013d06b1
ctgggggtcgctgatacttccctggaagcacgatacatcacccttcatgtctgcgacctcgttgcagagagaggtgcacgcttagctgctgctggtatatatggcattctaaagaagctgggcagggacagagtgccaagtgacggtagtcaaaagcagaggactgtcattgctctggatggtggtctctatgagcattacaagaagttcagaacctgcctagaagcaacgcttgcagacctgcttggagaggaggctgcctcatcagttgttgtcaagttggcaaacgatggctctggcatcggaactgcacttcttgcagcatttcacttccagtatgctagcgt

SEQ ID NO: 35236 - DNA, 283 bp, Oryza sativa
  Clone ID: uC-osrocyp013d10b1
aggggtaaagcagctgccagctatacatatagcttgcatgagttgcatttcaacttaatttcctttgtgtcatcaatacaacagctatcctacactgaacaagatccctcttgttttacacataacctaagctaactctttacagcaccaaagggaaaccgtctcaggacatgcatcacatgtcctcccattgcctgccttcttgaggcgaagagatggcggacgacgactgagacctccggagctttgtttatgtcctcccattcccagccttctttgaggc

SEQ ID NO: 35237 - DNA, 286 bp, Oryza sativa
  Clone ID: uC-osrocyp013d11b1
ctcgtcgcctacctagggtttcgtgtttgggagatctgagagggggagggggatggaggtgagggcgactaccgtgcccggcgcactctccccgcgccgcctcctgggttcgcgggggacaaaatgccggactgttccgaagctgatcggtgacctgaccttccccgcgcggggggatttctgccgccggaaggctggatctttgattcttgaggcaaatggtggtgcaagcgaggagggtgaaagtctctactctctccttccttacttcctgcagcacctgccc

SEQ ID NO: 35238 - DNA, 388 bp, Oryza sativa
  Clone ID: uC-osrocyp013e04b1
cagccacgagctcgaggagagggagaggtgtacttaaaacggggttggctatggcacccctcgtccggaggatgctgctgctgtgcgcggaggcggactcctgctactactaccttctagtactccacacgcaggcctccgtgccgtcgagctactactggaacgcttacggggacgaccacacacgtgtctggaaggacaccatcctcagcgaggcctaactcgacccgctctgccccgacagcacgaacaactgggcgcccctaaggctcgccgtcaaacggtacgcctgcaaagggttcctcacagaacacccctttcgcctcccgtaccacacacaaattaaatggttccctgaagggcactttacatagctaacaaattgaac

SEQ ID NO: 35239 - DNA, 405 bp, Oryza sativa
  unsure (1)..(405): unsure at all n locations
  Clone ID: uC-osrocyp013e11b1
tgcaaacccaaacccacccacctccgctccgcggccgtcttcttcttccctttcttccaccgcaagaagaagaagaaaccccacccgagccaagccccacacacaaagcgagcgactcggcggcggcggcgatggccacggtggcgatggacatctccaagccccctcccgcggcgggcggcgacgaggctgcggcggcgaaggggaggggcggcgccggagaggaggnggaaggggggctgcgggcagtactacctgcagcacatccacgacctgcagctccagatccggcagaagacgcacaacctcaaccgcctcgaggcccagcgcaacgacctcaactcccgagttagaatgctcagggaagagctngcagttgcttcaagaacctgctcataggtgtga

SEQ ID NO: 35240 - DNA, 464 bp, Oryza sativa
  unsure (1)..(464): unsure at all n locations
  Clone ID: uC-osrocyp013e12b1
gtcttattttaataattctccgtgtagttaataggatttctaactacaaattattgagagctaagctgcatgtaaagcttattttgaatggtaatgctttttattatggacgtattatggcgtcttatcatccagcaaagtctttagactcttttggtaatagtcctcttgtgtctgaggatgctgtgattgagtcgcagagaccacatgttttcttggatccaactaacagtcagggtggagacatgattttgcctttttattggcgccataattatatggatatagtaaatgccgatggggtagtatgnggtcagatcgatatgagatctttacctatttacgaagtgtgaatggatcaaatgaaactatttccattattgcgtatgcgttggtgtgaagaatttgagttctcttgtattacacagtttgagcctgcaacaatcggcctcagtcaggttccg

SEQ ID NO: 35241 - DNA, 376 bp, Oryza sativa
  Clone ID: uC-osrocyp013f03b1
tacatcaccccccttctcggtgccttcttggctgatgcctacatgggcaggttctggaccattgccagcttcatgatcatctacatcctgggtttggcgttgctgacaatggcgtcgtcggtgaaggggctggtgccggcgtgcgacggaggagcgtgtcacccgacggaggcgcagacgggggtgggtgttcttggcgctgtacctgatagcgctgggcaccggcgggatcaagccgtgcgtgtcgtcgttcggcgcggaccagttcgacgagaacgacgagggggagaagcggagcaagagcagcttcttaactggttctacttctccatcaacatcggcgcgctggtggcgtcgtcgtgctggtgtacgtgca

SEQ ID NO: 35242 - DNA, 437 bp, Oryza sativa
  Clone ID: uC-osrocyp013f06b1
cttatgttaccctcgttttctttgtcgcagggacgcgagctgctgggcagggggccccttcctggctccaaggggctatctgtcttggtcatgacgccaccaaaggagcagactatgggttgtggcatgtgaaccgtgccaaacatctgctctgctctatttgcactagagctattatgtgatgaatgttctctactgccttggtgaaactctgaatgttcgtcggtaaatatgagtgttgtctgatatgggatcatgatggacaatggaaactgcaacctgtttctctgaattctgttgatcgtgtgcggacgttctgttccgtatggaccgcttgcgtattctgtcattctgaatagcattcgaagacgtggtcaactttgtgttggttagaaaataattgcaccattgggaatataccgtccagtataatatat

SEQ ID NO: 35243 - DNA, 463 bp, Oryza sativa
  unsure (1)..(463): unsure at all n locations
  Clone ID: uC-osrocyp013f09b1
cacagatttcttggcgttttgtctggttctgcctgctcttgctggtttcagatccgggaggggactgagcctccgaagttatcaggagagtgaaagacataatggggatcagcagcgaatcgccgaatgggagccagcagattgtacaaaaggaaacacgagatgagacaacaccacttctgccggtcaaggtggaggaggaggggtttcatgagttcaatggagcttcattttccggggcggttttcaatttatcgaccactattgttggggctggaattatggccttgccagccagtatcaagatgttgggcatcatcccaaggattctgatgatcatcgttgtggcgttgctcacagaggcatcaattgacatgcttgtcaggtgcagccaccagggcangattacatcttatggctggctaatgggtgaggcttacggacagtggngaagaattgcact

SEQ ID NO: 35244 - DNA, 448 bp, Oryza sativa
  unsure (1)..(448): unsure at all n locations
  Clone ID: uC-osrocyp013f10b1
gctcacccacgcacgcagccgtctcggatcccttcttctctctcctctcctctcttctccggcacaccacaccccaatcctcccccgatctccccaatccgagagctccggaggagcagcgcggaggcggagatggcgctgcggcgagcgctgctcagatctgccgagatctcccccgatcgcagggctgcacttgggtccctccattctctatcgagagcacaggctactcgatctctaacaggtgctggcctttattctgctggcaaatcattcagcactcaggctgctactacatcaagcacaccacaaccttcaccaccacctgcacctccggagaagactcattttggtgacctcaaagatgagggaccgcatttttaccaacctctatggtcagcatgaccctttctnaaaggtgcaatgagaaggggtgatggncatagaa

SEQ ID NO: 35245 - DNA, 368 bp, Oryza sativa
  Clone ID: uC-osrocyp013g02b1
ttccgtttgcgtattgtggagaaacataagaatgcatggtgggcggggactagggggcgcacatcggcgtacaccttgatatgacctactggtgcggcggcgattgccaatacgaccgcggggaaagcatagcgaacgaccagggaaatcggaccaccccttcctacgatggatgcacccactctgagaggctcaccggagatgctcccaagaaccaggaagggatgaactcaatcaacacctgatttaaagcagagcgtctcattgtcacgagaggtaacaatgcttctgttcacagacacactaagctctggaccttgaatgtgattgctggacctggtgacaagcctatgattggtgcgcagtac

SEQ ID NO: 35246 - DNA, 461 bp, Oryza sativa
  Clone ID: uC-osrocyp013g04b1
gttggatgctgaggagggaaaggttgaggatgttgatgaggagaaggaagagaaagagaagaaaaagaagaagatcaaggaagtctctcacgagtggaacgtgatgaacaagcagaaacccatttggttgaggaagccagaggagatcaccaaggaagagtacgctgctttctacaagagcttgacaaacgactgggaggaacatctggctgtcaagcacttctctgtggagggtcagcttgaattcaaggccatcctgtttgtaccaaagagagcgccatttgacctctttgacaccaggaagaagcaaaacaacatcaagctgtacgtacgccggggtgtttatcatggacaactgtgaggagtttgatcccagagtggctcagctctgtcagggcattgatgattttggagaccttcccctaacactcacgtgagatgctccagcagaacagatcctg

SEQ ID NO: 35247 - DNA, 218 bp, Oryza sativa
  Clone ID: uC-osrocyp013g05b1
acttttacatcgatacacgcagtgcatccttgcggggacgggttgattacattggtgtggcagagataatggctgctgttcatactagcgcatggattgggcatgatttacatagcgagaaaacggtgactgaaagaatgcgcgcccagactccactttgtgaagttgaccacgattatggctccaatgttgagagaaaaaaagtgcgagggcttata

SEQ ID NO: 35248 - DNA, 376 bp, Oryza sativa
  Clone ID: uC-osrocyp013g10b1
gtgcttaaacgcacttgctaaagttgttcctggtcttcttggaggaagtgctgatcttgcatcctccaacatgacattgcttaagatgttcggtgacttccagaaggatacgcctgaggagcgcaatgtccgatttggagtcagggagcatggaatgggcgccatttgcaacggcattgctctgcacagcccaggactcattccatactgtgctactttctttgttttcactgattacatgagagctgccatgaggatctcagccttgtgtgaagccggagttatctatgttatgacccatgactcttattggtcttggagaagatggtccaacccatcagcccattgagcacttggtgagctttccgtgcgatgc

SEQ ID NO: 35249 - DNA, 475 bp, Oryza sativa
  unsure (1)..(475): unsure at all n locations
  Clone ID: uC-osrocyp013h04b1
taagatgatcgcttgtttatttagaggaacaacgcaggaagtttctgggagcgtttcccaggacaaatataggaaaatagacaaggtggatcgcagatcaaatgaagatatcctgtttgagttttctataatacagatcaaatggttatctgctgaagaagtaagcagaatattcttgtttactatgcaaaatgcccttctaatggccactattggatagttggggtagggcttttataaagaataagtgcggagcacacaagatggaataaaaaagaggacacgattacagcagcggatacggcagcataagcgaatatacggcagtaagagcacttccaatccaataaatctaagctaattgcaagtttagatgacatgttggtgaaagcttctcaatgcttttttttcaagggaagagaaaaaacgcangataaccatttacgtctaagttggcctagattaactgatgtcg

SEQ ID NO: 35250 - DNA, 421 bp, Oryza sativa
  Clone ID: uC-osrocyp013h05b1
tcgaattccattcctcgcgattcctctcccctggcctgctcgtcctccccctcccaggggatcgccggagaggaatcgcgcggaggaaaaaaaaagaaaagggcttccccgtcgtctaagttaaaaggaagccatggagcacaaggagactggatgccagcagccagaaggcccgatcctttgcatcaataactgcggcttctttggcagtgcggctaccatgaacatgtgctcaaagtgccacaaggagatgataatgaagcaggagcaggccaagctggcagcctcctctatcgacagcattgtcaatggtggtgattccgggaaggaaccaattattgctggtcacgctgaagtagctgttgctcaagttcgaggtgaagaccgcttgttgcgcagcctgctgagattgctggtccta

SEQ ID NO: 35251 - DNA, 362 bp, Oryza sativa
  Clone ID: uC-osrocyp014a01a1
tttttgtgtttgtatcgagaaagatatcgtccgattctccttctattgattcttttccgatcgagatgtatggatccatgtgtctacatacctagattctggtcatggattaacgaaaaagagcaagagctctatttgcctctgccattctatgagtcgcttgctttctgggattggcccccccaccccctttggcagcatctactaattcggaacttaatgtgaaagccataattcagggcctgacgctcaccggatgcttctaatgaccgaccacatggcaggtgctcttccttgcttagatcctatttcaatcggaactttccgcgacgatccttttttattacgtcttgtttttactc

SEQ ID NO: 35252 - DNA, 429 bp, Oryza sativa
  Clone ID: uC-osrocyp014a02a1
ttttgtttttttttttttttttgtttttttacgggaaaccacttgataaaactgattgatatattccagataggagaggagggcatcgatacttatcggcgctaaattaaatgggagcaccggctaaacacatgagacatccctcgatttaaaacagattacaaacacatggatgttcacttcacacacaccagaagcttgaagaggagcatcttgtgaaacaaaacgaccaggggcgaacttaattttttttgaaaagggagaatcttaacacgggagaactcatcatggatcatcatggccattgtttaatcaacgccttccaatcattattccccaacaatggtttgtataaccccttgatatcacacgttggtcctgaaggaaccaagggccttgatggcaccggcccggaggatgtactggtgg

SEQ ID NO: 35253 - DNA, 406 bp, Oryza sativa
  Clone ID: uC-osrocyp014a03b1
atttatgtgtgtgacatgtatgtcgagttcgttaaccaactcgtctgcaatggaattctgtgacgatttgctcgtggagattctctcgaggctcccgttcaagtcgcttgcaagattcaagtgcgtctcccgctcatggcgcgcgctcatctccggcggcgacctccgccgccgactcccgctgctcgccgccggcttgttcgtcggcgacggcggcggcggcgagccgaggtacgccaccgcgtgctccggcgatggtgttgagttctgcgacatgagcttcttcccgctggcggagacggcggcgagggtcgtcgacgcgtgcgaggggttgctgctgtacaggtcgctcgccgcggcgtcggcgatgtacgtcgcctgcccggcgacaggaggtgggcggcgc

SEQ ID NO: 35254 - DNA, 437 bp, Oryza sativa
  Clone ID: uC-osrocyp014a04a1
cagaactgtgatttcatttcatgttatcatcagaatacccgccctgcttacatttgacaagggtgacagtagagatatgaagagactcaagtgaagttcatataacagttttcaggcatacgctactaccattacattcggaggctgatcaaccaagacatttggacgtgccaggaatctctacccatgctacgtgtgtggccgaattacaagccctcagtaccttgcctggaaaaaacctgtatctttgctgtcataggaacgcatgccaaacatggccacccatttccaaccaaaactgtgcacatcagcaagtacagtccacttgcaagcctgcttatagttagcctattttcttatagaccatcaacgtgtggtttttttcagcatgcttcgacgactcggcaggggatttctgcagcacagagtgctcacgt

SEQ ID NO: 35255 - DNA, 296 bp, Oryza sativa
  Clone ID: uC-osrocyp014a05a1
ttttgttttacaatcaaatctggctcattgaattcgttttgggtacaaactatcagaaggcccctgccatacatgctttgtcaaaacattggaaggatcccaccacccaaggataactgctggaacaaaagatgaggtagtagccatcccaatttccggtggggcaaacaagcggacaaccagccaaaattttcactattccaaaagccacagggtgagaaaaacaccgacctaacaaacaagctaaaggggggcaaagacttcctctcttggccttcctggatgggatatgagac

SEQ ID NO: 35256 - DNA, 421 bp, Oryza sativa
  unsure (1)..(421): unsure at all n locations
  Clone ID: uC-osrocyp014a05b1
ctttgaggtgggttggtttctcctccccctctttaccttttcctcctcggttcggttccgtggttcgtctagggtttagtgggttgagatggcggcgccggatgtcgagtaccgctgcttcgtcggcggcctcgcctgggccaccgacgaccgctccctcgaggccgccttctccacctacggcgagatcctcgactccaagatcatcaacgacagggagacggggaggtcacgtgggtttggcttcgtcaccttctcctccgagcagtcgatgcgcgacgccatcgagggcatgaacggcaaggagctcgacggccgcaacatcaccggtaatgaagcccagtcccgccgctccggcggcggaggcgggggctaccgcggcngcggtggcggctaccgcggcngtcgtggaggccgcggc

SEQ ID NO: 35257 - DNA, 432 bp, Oryza sativa
  Clone ID: uC-osrocyp014a06a1
ccatccgctcaaaccttttgaaaaaattcctatggattaatgtatgttaacattgttattcctccacttttcctattcctatggattcaaattcctccaaactgaataagccttaaaagccccctttgaatcaaaggattcatgaagggatttcataagattgaaatcctatagaaaattttcctatttggccctttgattcaaaggattggaattttctaaatcctatacaatttcaatggaatagctcattacctataggttttaaaggaaatttagcaagaggcccaggaaaagtcatccgattcctatgttttctctggggcccaatcaaacaattattcatgtgttttgcaatcatctgttttacacttacattctctgcagaataatgtgttttcctgttcctccactatttggctactacaattc

SEQ ID NO: 35258 - DNA, 429 bp, Oryza sativa
  Clone ID: uC-osrocyp014a07a1
cagtgaaaaaacgctttgccaaatggaaaagttctagaagattgatgctcagttgtggtactagcggacatctgtgagatgtacaagcttgatctcctcctggaaaaaaaaaatcatctttacttcttcactaccgacatttttcaggttggcagccttgtattgtaccgtagtatgcaaatggaacagtaagtaatcattcagaaaactgtacaacattgcattcagggcttcaggccaccgttttgtaataaaggttggccaccggatggatgccagtatggctgcacatgagatagatccaaagcatgttgacgatctgcagtgcacacgagtcagagtcatgctcttgtcttgcacactgttttcttcagaatgttcagttgattccatccaatggatttgttcgtttctgcagaccaacctgcc

SEQ ID NO: 35259 - DNA, 387 bp, Oryza sativa
  Clone ID: uC-osrocyp014a07b1
gccatcgagagtgtctttggattccgggagaagttggatccagaagttctagccgagggacaaatcgaagagtccagcggtggctgccagtcatggaaaggatccaggaaagccaccaattgatgacgcgccatctagtgcaacaaaacagagggttgccgcggcaaaacaggtcattgagaatcattacaagacccagatgaagtccctgcatgataggaaagaaaggcgctggatgttggagaggaaactacaggatgcagaggttgctgtagaagagcaaaataattattctaaagcatttggagaaaaaggagaccgaatatatgcgggtggagagacataacatgggggttgaagatttgaacttttgacaattatcggaag

SEQ ID NO: 35260 - DNA, 436 bp, Oryza sativa
  Clone ID: uC-osrocyp014a08a1
tgttgttttttttttttttggcgctgatgaagaatagcacactttcgttattaagaaaagacaatcagatgtacttttgtcaagaaataaaatagcaagattacactgcccgctacaccatcaaaatgacaaatttggagtaaattcttagcaaaagggtgtgaaatcaaaatcatttgtaagctgctacttcctccttaaaacgtgtgatgatgtcatcaatgctcactgtggctagttcagctttgtcccttaccctgacgctgacctgtccagtctctgcttcttgtgcaccaacgacaagaatgtagttgaattgggctaattgagcctcccgtaccttcttctgtattggcctgtctgtctcatcgatggcaacatgaaaaccagcttcatgtatcctagcacggacctgtttagcgtattccactgaatt

SEQ ID NO: 35261 - DNA, 446 bp, Oryza sativa
  Clone ID: uC-osrocyp014a10a1
acaatcaaatatggctcactgaattctcattgagaagcagttatcagaatgtgagtaacatacatgctatgtcaacatcttggaaggatcacaattataaagtatctatactgcattaaaagaacttgagtataccataacataaaaaggattatttcacatgacaatctcaggtttcaggatgcttgatttgatctctttgtgcgggagaataacaccgccgttggtatagacctcatcacctacatgtacgtcctctcctaggatagtcatattttctatccgtgcccattgtccaacagttgagtgccatccaataatgctgtttgatatgcaagcatgcttcttaatacgcacgccacgcatcaccgtgcaacgggaaagcctcacaccatcctccacgacgcatccaggaccaatagcaacatcaggaccaatcagacagc

SEQ ID NO: 35262 - DNA, 345 bp, Oryza sativa
  Clone ID: uC-osrocyp014a11a1
ttttggtttttttttttttttttttttttttttttttttttttttttaaagaaaatccaaacccctccaagatttgcgttttgggaacatagtaatagattcagtccccagagataacggttttgacaaagtatgagctagtagtattccgaatttccgatgggccaaacaaggggacaaccagccaaaattttcactcagccaaaagccacaggctatataataatctgatctaacaaacaggcagaaggggggcaaagcttccttttctaggccttcctggctgcggatctgagactcaggctctttcttcactggttcttccttctctgacaggataagctc

SEQ ID NO: 35263 - DNA, 420 bp, Oryza sativa
  Clone ID: uC-osrocyp014a12a1
ttttgttttggtggacaatacatttgcaagcttcattgaacatttatgtagcgaacaaacagttcattgacaacattttgcaaagtaggtaggggtgctcaatcatagcagtagcacatggtgtccaaaccatttacacgaatagcattaacacacgtacaaagacttgggcacaatcaaatagagtttatgtccctaggagatttggcgaagctaacataacaagacacctttttttttaactttcacaatagcaaaccatgtagtacagaccataaggcagactccatcttaaaactgttagacttcttggttttcagaaaattccctacagtcatttgatctccatcttgcttttgactgtggggcagaaaccattctagttgcggtttttggacttatcaactgcccttggagcaa

SEQ ID NO: 35264 - DNA, 432 bp, Oryza sativa
  Clone ID: uC-osrocyp014b01a1
gccgcccttctttttttttgtggattgttcatgcatacatatctaaactagtgacatgcatgattgttttacaatctttcctatacagtaccacaattataccatctgctaactgtagcatttctggcaagcttactatacttactactatcatacatggcctccatgccacaatacaaactgacactacttgtagaccttgggtactgtagcatttccggcaaactagctagctgcaattttaagttcacaaagacgcggccacgaaagacgtcgagtatacggtatgttattattgagttgcatgcaccaaccagttaaactcaaaagcttaagctaaagagctaaggcgggcaattcaggacatatagattgttggtatgatcaaggagtgtcagttgacgaccctgtaagatgtcctgacctcgccgg

SEQ ID NO: 35265 - DNA, 422 bp, Oryza sativa
  Clone ID: uC-osrocyp014b01b1
cgacgacccgcggccttcttcgcgccgacctcctcgccgccggcggcgccgccgtctccgcagaatctgatcgatggcgccgtcgtcgacgtcgtcggagggtgcctccgacgagtggttgccacccagccggcggccggagctggcggacgtggtccccgtgacgcaggacgacgggccccaccccgtggtggccatcgcctaccgggacgagttccgcgaggtcatggactacttccgcgccctctacttcggcggcgagcgcagcgtccgcgcccttcacctcaccgccgaggtcatcgaccttaatcccggcaactacacggtgtggcattttaggcgtcttgttctagaggcactggatgctgatctgcgtgaggaaatggattttgtggaccgacatgctgaatgtcacccaaaaa

SEQ ID NO: 35266 - DNA, 472 bp, Oryza sativa
  Clone ID: uC-osrocyp014b02a1
actattatagaggagctaggacgtaggctggccgccgacggcagggaggctcttgttcggccgccctcctttttttttggggtttttttttttttttttttttttttttggggaagcaactctttttttttttttcatgggaaaaaaaccccacgtactcaattaacccagggaagatgggccctcccaagcacacatcttgaaatataccctccggggggcttgaaaaacgtttgtacattcataaccggggggaaaactagcttgccggcatccagtttttaagaaagatttatgggtgggccaggcgggccacaggctttggacttgccggctggtacaccatgccgtattcttaaccgttttttttccactgtaggagccggttgatgggccctaataaacaagttttgactctcccttaaccacttcggggtttggaaagggaagagaatgtttcagtattatttct

SEQ ID NO: 35267 - DNA, 189 bp, Oryza sativa
  unsure (1)..(189): unsure at all n locations
  Clone ID: uC-osrocyp014b02b1
ctataggtaaagctggctcccncgccggcacgggcccggacggaccgggcgccggacccacgcgttgttgggcatggcatctggcggtggaagccgggcgcttcgctcgctcgctcgccggcgacccgaatccggccaggagggggggcggttggccggagctagggtggtcgggcggttggacgcacc

SEQ ID NO: 35268 - DNA, 418 bp, Oryza sativa
  Clone ID: uC-osrocyp014b03a1
aaacaaaagcaaattatttaactaaacattaggagtaaattatgtcataagtcgtcagggaaattaacagattttcacactggccactcagcacacacaggagtggtcgaactaatttcagctaggcagtctagctagtggattgatacaactacaacacatagtagcaggttaaaagctacatagttaagaaagaggacacggcgctctctccatcagtggatatatggtacctggtactgaacctgatagccattaccatagtatgttgtgtgggcaggtgacatgccatagggagctgagcttatcattgttgggtgatgatgggcctcagcaccatatacatactgcctctcgtaagggtaggaatgcctctgtggcgcagcggcctggtagaagcttttgtcagaaaagctag

SEQ ID NO: 35269 - DNA, 411 bp, Oryza sativa
  Clone ID: uC-osrocyp014b04a1
gccggggcggcgacgacgacggtctcctcgatggcctccaccgtcttgctggtgccttcatcctcggtgaccacgacggtcttctcctccgtttccggctcggccggcttggcctcctccgccgacgcctccgccttgggctcctcctccttggcggtctcctcggtcttgggctcctcggcacttgggctcctccggggcgggggcctcagcctcagcctcgggctcggccttgggctcctcggcggcgggggcctcggcggccttgggttcctcctccttgcccggctcctccgccttggccggtgagggcagccgccgctgtggaaggtcaaactcatcagcgggaagcgcggcggcgactagctccatgagctggtcgagcgcgactcgctccggctcagggagctc

SEQ ID NO: 35270 - DNA, 63 bp, Oryza sativa
  Clone ID: uC-osrocyp014b04b1
ttgacgcgtgggccgcagccgcagccgcagccgcgcgtcgtctcctccgcccgcgagctcctc

SEQ ID NO: 35271 - DNA, 444 bp, Oryza sativa
  Clone ID: uC-osrocyp014b05a1
tgttgtttaaaaaacttgggtccgaaacctttattagggccaacagcttgaaactgagcaaccgaaatgcaacgtccacttcctacaatctgtaacctatcaccggcacttaagatggctactgttttgcctttacacatggatatccacattgcacattgggaggtgacaattctacgcaacgggaaaaggcgctacattaaaccaatgatggatctatcagttaataatggaacacatctctacaaggtaaggggaggagggggctgcacaaatggggaaggtgagagagactgttgttaccctgccattctaaaagctaaatccccatgattcggtctgaacggcgtgagtaggaagaaaaaagaatggcgtctgactaaaacctccaaaggaaaaaaccaataccctctgcctacaattccttggctagcctaggaagac

SEQ ID NO: 35272 - DNA, 424 bp, Oryza sativa
  Clone ID: uC-osrocyp014b06a1
ttttgttgtttttttatgtttttgggcttattttttattcttttccgttatacacagaggccggggacatttgccaaattctttgccagggccacgggtaccagggcctttgcttggggggtcaatggggtcaggaaactagaattactgttcttcgcgcacaaataatggggagattaggacaacatcaactttgagccttgtgccctgccctagccgaccgtcatataaagcacacaccttcataagccgtcgtgtatacacagactgccgggccacgaccacatgggccgtgtgcaacctggtgaccatgggggaagtaacggccaccagtttgacaagtgcgcgatcggagacaactgccaactgttgaggcttgcgatccacttggggggcttagatgaagcaggactgggcgatcctg

SEQ ID NO: 35273 - DNA, 373 bp, Oryza sativa
  Clone ID: uC-osrocyp014b07a1
ggaacaaaaaaggggcgggcccttttttttcccagctgaacaaaggcgccgccgaaattatccgggatcgggacaaacaaacggggatcgggaaaaaacattattttttcgtttccgctcaacaactcaggggagcgtgggaaaagggaagactaaaaccaacgggccatcactaactccccctttggaatctttaagcctttgacataaactaatcgaaaaaaaagctgcgaccgggggggatccaactttgggtttctcccttctcgaggggttttcaggcggggaagcactggccaacctttccttgggctttggtgggagaattttatttttgcctcgggcaccccacaagagacgggccggattagga

SEQ ID NO: 35274 - DNA, 388 bp, Oryza sativa
  Clone ID: uC-osrocyp014b08a1
ggagcagcaactcttttttttttattacatgggtaatataatgcacatatgaatatcccactgggtgactgtttcctaccccaccacaggtttgtacatttacaatatggggggtactactactggtactatatttttacacgggtgcaaaacttagttgccgttaccgagtcgtaagcacccaccagggcttggacttgactggggactaactaggagtaactgaactgtaactaaaaaccgaagctgaaaagtaacaaacaagctataatatgtatgggacgtggcttactgcttttgcccttttccgggattaccccggccggcctccgggaagggaagcgccgggctcgccgccattccggggcacacggtcattgggattggc

SEQ ID NO: 35275 - DNA, 423 bp, Oryza sativa
  Clone ID: uC-osrocyp014b09a1
agcacacacaatgatccaaggaaaatggattaacatcaatggcagtcgttttcagcacgcggaactcaggaggcagatcggcaaggcgatcgtcgtcgtgagtagtctgaagctctgaaacgaactaatcgacgagcggcacatacaggagaagataatcggtggagagagatctcatgagctgttgctatcgcattcaagcgccatgaccagtacgccgttgctatcggttttggggaggctttgcaacctccggcaacggcgtcgtcggcgtcaacagcggtggcggcgcagtcggaaatcctcctcggggtggcgctcccggacgacatcgccttcccggctggaggtggagcacggcgatgggatcggggcggccaccgcttcagctcccgccggctgccaccactccagcccccgccc

SEQ ID NO: 35276 - DNA, 399 bp, Oryza sativa
  Clone ID: uC-osrocyp014b09b1
ctctccccacccttccttcgccccgagacgacgagacccagcgagcgatcccgagggaagaaagagatcgagagggaagggaagggagaggatcggagagctttccgccggccatggggttctgggtgaccacgctcatcttcctcctcgccggcttcgtcgcctccctcttctcgctgctctgctgcaaccgcgggccgtcgaccaacctattccatttgaccttggttattacagcaacggtttgctgttggatgatgtgggcaatcgtctatcttgcgcagctgaagccactgatcaaccctatcctaagcggcgagtgagctgtgttacaatttgaagtctgctcatgctgtatcactatttagttgaagatttctattcattttggcacgactg

SEQ ID NO: 35277 - DNA, 446 bp, Oryza sativa
  Clone ID: uC-osrocyp014b10a1
tgtttttgcaaaaaactacttcctgaaacttttattaggtcaaacagctcgaaactgagcaacagaaatgcaacgtccacttcctacaatctgtaacatatcactggaatttaagattgctactgttttgcatttacacatgaatatccacattgcacattgggaggtgacaattctacgcaacgggaaaaggcgctacattaaatcaatgatggatctatcagttaataatggaacacatctctacaaggtaaggggaggagggggctgtacaaatggggaaggtgagagagactgttgttaccctgccatctaaaagctaaatccccatgattaggtaggaaaggtgtgagtaggaagaaaaaagaatggtgtctgactaaaatctccaaaggaaaaaaccaataccctctgcctacaattccttggctagcctaggaagacgt

SEQ ID NO: 35278 - DNA, 450 bp, Oryza sativa
  Clone ID: uC-osrocyp014b11a1
tgttttttttaaacgagaaagccagtgcagtaacaaccatccataaattgaaggtaaacgggcgcattttccagcaccatgccaaccaggctgattacaaatcccaacacatcagatgttttcagggaaatcaatagaatatgatcgttgctcgcgacagccgggaatcagtatcagtcccacgaactagttgagccttgaccaccaccatagccaccgccatatccaccgccccctccataaccgccgcctccatagccaccaccgccaccaccataatccgccgccgcctccacccctattgtcgcggcggaagtcacggccaccaaaacgggcaccgcctgatcggcggtttctgccaccaccacctccgaacgaagaacgggccgagtatcgttcaagccattgaggaacctcctggtttgcttcctgcattagctcacataacgg

SEQ ID NO: 35279 - DNA, 374 bp, Oryza sativa
  Clone ID: uC-osrocyp014b11b1
tcgttcgcagccaaagccgagccggccaccgacgtgcatgcggcggccgaagccgactcccaccctcgagactgacactgcgacgccggcatagtgcaagccgacagtcgaaggcgactgccatcacagacacttgtactacgacgccgccatcctacaagccgcagaccaagccgaacccgccacccacgtacaagctcgcagtccaagccaaacccgtcacccacgtacagggcggcgccggcaacctacaagccgcaggctaagccgaacccgccacccacgtacaagccgaaggctaagacgactgccactgcctacactacacccacgtacaagccacaaccgaagccgcttccagtcccacttgcata

SEQ ID NO: 35280 - DNA, 377 bp, Oryza sativa
  Clone ID: uC-osrocyp014b12a1
gccttatgactcatattacatccgataccgtaatacacaaatgacgtggcggctgccaaaacactttgccagggccaccgatgtgagggcctttgcttgagacatcaatgatatcaggatactagaagtactgtactatgctaataaataatgctcacgtttgaaaaacatcaacttggcgcaatatggcctgcgctgaacaaggcatgcaaagcacacaccttgcgcgcactcctccatccacagactgccgggccacgccccacatgggccaggtgcgacatggtgaccatggggtagaaccaggcaaccagcttcacaagtgcgccaccacatacaagccccaactgttgaggcttgtgatccacttggggcct

SEQ ID NO: 35281 - DNA, 243 bp, Oryza sativa
  Clone ID: uC-osrocyp014c01a1
cattaaaaattggaggtcccatacagagagcccataaaaacacaccccatttaagtttaccgcggagaatttcctgtaacatttccaacaagacaagaaatactgccaactcaaataaaaaggaactactcgtgcctatcatattaacatagacagatggtgctaatgcaccccaaatatacaaggaaataggacagtgaattacttgaaaaggaatttggctaaataaatccacccaaagcc

SEQ ID NO: 35282 - DNA, 425 bp, Oryza sativa
  Clone ID: uC-osrocyp014c01b1
ttgttggccactccaatggatcactccacctccctgctccggctcatcttcctcgccctcggcgcagccctcgtcgtccttgtcgttcgctccacgttccgccttcccggcgacatcgacacgaccacgacctctctgttcgatgatggcaacggcggcagctgcaccaggttctcgccgtgggcgtgccggcaagggcggggcgacccgaggtcgaagccgtccaacccgcggcgaccgtcgcacgagtccgacgtgccgcggcacccgctcgacccactcacggtgagggaggtgaaccgcgtccgcgagctcctccgcgcgcacccgctgtttgcgtcggcgccgtcgtccctgttcgtgcactcgctggagctcgacgagccggaaaagtccgtcgtcaagagctggcggaaggggcgccg

SEQ ID NO: 35283 - DNA, 304 bp, Oryza sativa
  Clone ID: uC-osrocyp014c02a1
gggttaaataacacaagactagctttatttatttatctccttgaaaggccaaatcataaacacctagccattacaggaattaaaatagtactgcacaaccctgggcggttaaggaaaaaaaagaaaacagcacaagagaagagatatttaaccaatgtgcctattcaatacagacaactgcccagagtcacctttgaacaggttaaccctcgatggtggattcaaccttgagaatggcgatcacatggacctcgtccatggctgactgagccatgattcccttggggcacgttatggacagaag

SEQ ID NO: 35284 - DNA, 420 bp, Oryza sativa
  Clone ID: uC-osrocyp014c03a1
tttgggggtttttttaattagagagggctatccttcattttttattatttttttttagtagaacattttttttttttttttaggggaagaaaaaaagcacggcaacaattcaacagggggaagaacaaaaaaaaaacagaagagaagaccacgacaaaccacaagagaggagagcaaagcatggcaaagcaagggagctccacaatgccaaaacaactaaggagggcactgcctacacatgggtcccaaccacccaaaaacacaaagacgcaatattattcgcagtcctgctctgctaccttaggctcaaaggcccagagcaggccaacaaaaagcagaatggccggcctctgggaggggagcccggcggtgcagaggaaggcgaaccgcaaggcctccataaaaagcctctccagcccg

SEQ ID NO: 35285 - DNA, 428 bp, Oryza sativa
  Clone ID: uC-osrocyp014c04a1
gtcagcgactgactagcacatatttttttagataatgtccatgctgatcaagtatatatactatacatgcataattacatatatatatataaactcctaatttttcgtatgcataatttcaatccgccgcctacagagaccagcaatttctcagagcaacatcacaacgcatgattcccaaatttacacaaatagaaacgaacttcacatgagatcgacggacaggagcagcacggcgagggcagcggcggcgaggcgagcgccggaggcgccgccgtcgcggtggccggcgccgccgtacgggctgaaggcgctgctgggcccgaacgacgagccgctcccgttgaagctccccggcgggccgaaccccgacggcggcgtgccgaacccgcccagcggcggggtgccgaagccgcccgccggcgggg

SEQ ID NO: 35286 - DNA, 438 bp, Oryza sativa
  Clone ID: uC-osrocyp014c05a1
ttttgtgtttttgaggaggacgacaactttaaatattgctcaataaaacactatctggagacaacacacacgagagtcatatccagaggaaaacaatcagcccagacggaccactagcaccaaatgcaatggaatgggaagaactaattcgaccgctaccaccctagtgaaaaccagagaagcaggaggaaggggggacaggaagaaaaacgttgtagtcaaacaggagaagaatgcatccagcatggtgacagccagatgaggcatctccatcgatggactccaataacatgcggaaccatatgacgatcgatcttcccattttactggccctccacgcacctgccctctggagattgtttcacctaatcaccaccgaactgctggcggacgcccgacacgaaccacaggatggccctaaggagctgcatgatcaaa

SEQ ID NO: 35287 - DNA, 422 bp, Oryza sativa
  Clone ID: uC-osrocyp014c06a1
attggtggttttttttaaaaaaggacaagatatataactttcttgttcttccttcttttccttcgattattgctttccttttgttcatcatggacactgctgctatataccaaagtggtacgggtaccctcagagctttgatgctgtcttcaagtctttgctcggatcaaactggcgctttgcagccatacgttccttcatcttgaaaatgacctcatggacttcatcaaaatgagggcttgcggctttcttcacattctgaacccaactgtggatttttctcatgaggtccaagaatccggacgcggtcactatcacccaggacctccaattgcattattgcacaaacaaggcttagatccttgagaccgcactcagggttgcccaataagaactttgcgttgccctccagcagcatatag

SEQ ID NO: 35288 - DNA, 432 bp, Oryza sativa
  Clone ID: uC-osrocyp014c07a1
acataccaaagaaaattcccttctcaagaatctcaaaaaaaccagccccaattggcttctcaccccaccttttccttgttcttttcttgcttgtaacacatcactgacaaacttaatatcacacaggtgcatggactagagagagaggaagagagagagagagaggaggcaaaaaaggtaaagagaaaaaaaaaacaggttgcaaaagtacccacatctcccttaagtagatacacccaaaccctctgcaggcagtagcagttgttgtttgcagcatcagcagcaatctcaccacaggatttttacacaaggggaaaactggctcagccaattgtctctgtcttcttgtctggatctcaccctcattacatttccttgttttaactcctctcttcacctctggtcctggtggttttctgctcctgatgatgc

SEQ ID NO: 35289 - DNA, 429 bp, Oryza sativa
  Clone ID: uC-osrocyp014c08a1
aacaaatccgtgtagtactaccttacaattaacgattaatccatgatgcgtggaccatcttattacaactgggcctccaccaaatcccttttgaccaatcgtgtcggcccacacacacaaaacaaaagcaaaaaaaagcccattgagcaacgagcccatagaagtagtaacaataacaaagttcacatttcacaagcattttacttgtcgaaggccttgatctcctccttgaacgccggcaggtggtcgtcctcgacgcactgcgtcatgatccgggcgccggtcttgggcaccggcggcgcgccgatgatggcgacggccatgaacgggtagtacgcgaagggtatgacgtgcgacggcggcccccacccgtagtccgcctccaggaaccccagccgcgtccagtcggagacgaacagggaatcgtac

SEQ ID NO: 35290 - DNA, 423 bp, Oryza sativa
  Clone ID: uC-osrocyp014c09a1
gagagagagctatcttccatgtgtcatgactcaatggtagtagtaacattgttagtaaggagcaggtgtagcaaagctgtattgcaacatctcaacaagtggaagaacaaaaaagaaacaaaaaagaagaaaaagatatatcccagcagaggagagcagagcatggcaatgcagtgaagctccactatgccaaaacaactaaggagctcactgcctacacttgcttttcaataacccaaaaacactagtagtaatattatttcagtcctgctctgctaccttaggctcaatgtccttgagcaggccaacgatctgctgcatggccggcctcttggaggggagctcggcggtgcagaggtaggcgatcctcagggcctcctccatctgcctctccagcccggtgtcgcggatctttgggtcgat

SEQ ID NO: 35291 - DNA, 448 bp, Oryza sativa
  Clone ID: uC-osrocyp014c10a1
tcgtgatgtacgccatgcacctcgtggagctctcggagcggtcgtcggcgatcaccctggtgcagcgcgcccgccgcaacggcatgccgttcttcaactccggcgacaaggccgagcagatggtggtggcgttcgaggcgttccagcagctgagctcggtgcgggtgcgccccatgacggccatctccgacctggacaccatccaccgcgacgtcatcgacagcgccaccgccaagcgcgccgccatcgtcgtcatgccgtaccacaagatgctccagcacgacggcacgttccagtccctcggctccgcgtaccacgccatcaacaagcgcgtcctccgcgaggcgccctgctccgtcgccgtcctcgtcgaccgcggcctcggcggccacgcccaggtgtccgccaagaacgtggccttctccgtggcggcgctcttcttcggcgg

SEQ ID NO: 35292 - DNA, 451 bp, Oryza sativa
  Clone ID: uC-osrocyp014c11a1
gccgctgaacgcttgcaactgatcagtcgcgtcgatgccacacgaaatcgggccgcgcgcataaatctcagctttcatctgatcgacaccggaaatggagttgtagtcaccgaccttgaaaacggtatagttctgaatggggttgcacccgccgtccggtgagcaggtaccgcactgattgaacggcgtacagtcctgattctgagcctgataattgttgcaggtctcatcgggaatgccgttgtcgtgagcataggcatagacaggaatgtcgtcaccgccgtcacaggagccggcgttaccgcagtcgatgacgttctgagtcgacaggtaagccgaaggccacgcacctccgcgcttgatattgatgcggtcagccaaagccgaagtgctgccgaacgcccaacacgaaccacagtattgaggaatgtgctgattgcgtgaagtgctg

SEQ ID NO: 35293 - DNA, 428 bp, Oryza sativa
  Clone ID: uC-osrocyp014c12a1
ttttgttgtaatttgatccgcaacgattcagatgcagatgaaacactgctgattcccactcagattacacacaatacaaatacaccgacaaactgcctcaaaaaccaccaaattgattcaaaagtaaaacgggtatgagggatcttcccaccgagactgactaaacctaaccacagacaattggatccactggacccagattattcaaaaacagatggctatgacggcatcgtcctcgcaaccgaagggaacttgcagctatggatatcctcacttggcgctggcgagctgggtgcggatgagcttggcggccgaaaccatgttggtaagggcgggcttgacctcgttgtacttgcgggtcttgagaccgcagtcagggttcacccagagaatgttagtgtcgagcaccgcgagcatcttgttgacgc

SEQ ID NO: 35294 - DNA, 437 bp, Oryza sativa
  Clone ID: uC-osrocyp014d01a1
ttttgtggtttttttagcagggacatctatctcatgaatatattatttttattgcgacacagctagcctattctgaaggattatcaagaatgttaagactatagtggtccctatcttttgaaagaaaaaaggaaaccgactgttatcaaaactctatactatgagactatgacgcactccattccaatttggaacaggcactcttgactgacaagagatattttgacacaatcgacgataccttaaccgtcgtcgtcaggtattacacactcggtgtcagtttctaagactgctacatgaggagggcgaacgaaggttgccatgtgtttgaccggcctgcatcagattgcagtgatctgcctcatcatcccggatattgacagattcatcatacaggacttcaattttagggcatctagaacatgggactcttgctg

SEQ ID NO: 35295 - DNA, 476 bp, Oryza sativa
  unsure (1)..(476): unsure at all n locations
  Clone ID: uC-osrocyp014d02b1
tgctgcacacatccatccatccatccatctatccagagagcacagcaacggctcatatatagtacccctctaccaaagcacaacaaccagaatctcctgagctcgatctagctactagcttgatctatccgatcaatcgactgccccgcgaggatcgatcgagactcgaaagggagggattttgatccggatcggtcgacgatggacatggcgcacgagagggacgcgagcagcgaggaggaggtgatgggcggcgacctgcgtcgcgggccgtggacggtggaggaggacctcctgctcgtcaactacatcgccgcgcacggcgagggccgctggaactcgctcgcccgatcagcagggctgaaacgcacaggcaagagctgccggctccggtggctgaactacctnncgcccgacctncggcgaggcaacatcacgccgcaggagcagctgctcattctggagctgcactcgcg

SEQ ID NO: 35296 - DNA, 423 bp, Oryza sativa
  Clone ID: uC-osrocyp014d03a1
gaatcagtctccaacatacttcaaatcatagaccacaccatacagcaaacatagtataaacattgtcatagagagtacagctgatagcagcttgtaatattctagcattactttggtagcatccctctacaaaacatagcagacatcaccagctcttcatcttggccatacacattcaacatggtttgctagtgacagaccacactgaccagaacatttcgtctcctcagtaggcaccagctgccatgagcagctcatcaaggctccagatgccctcgttgcttgccccgtcttgtgtagcatcattttgcagaaggttgtccattgattcatctgagctgctctcaacataaggtaatggcaaatacttcatctcgggatcgaaggtgggcatgttttgtgcgagattaggcatgccatttc

SEQ ID NO: 35297 - DNA, 337 bp, Oryza sativa
  Clone ID: uC-osrocyp014d04a1
tttggggttttttttatttcttggggtggattttttttgttttttttttttttttctcctaaatacagtttagcgacaattagttaaaaaggccgcctgaattccccgcgggcatgcccagcacgcagagggggggacaccaagaacaccaggccaaccaaacggactgaccagcgaacaagagaaatagaggggccccggtgtgccaagcatcacgaagggggaacaacccgattgtagcagacaacatgaaaggaccaggatgggggaatgccaacgagatgggcgatgaagaccgcggcttggggggcgggaaagggcaacgctgtgaaacccc

SEQ ID NO: 35298 - DNA, 390 bp, Oryza sativa
  Clone ID: uC-osrocyp014d05a1
atctcaagctggtattggtattatcacatcaaaggtaattaaaccctgaaagtagggaaacccacgggagtatttacacatggaagatgtttacacacaaacccacttttttgggttgtccctagcccttgataggagccagcaggctagcttacacgtaccggtctttggtagtactaacagagaccgcaagcttcttggaacagagtaacaagataagattgccacatactagataattaattacgtattagataaccccaaggaccagcaaacatggcgtgacagaaagatcgaccagcctccgatcaatgggattattcagtccaacgatggctggtcctggtctcgtcggtgtacaaccaatagtaaaactggggggaattcttc

SEQ ID NO: 35299 - DNA, 420 bp, Oryza sativa
  Clone ID: uC-osrocyp014d06a1
agctgcatccatcacaaattggttaatgagagattttgaactctgaatgttaaggtgcataaacagtcagtacagccattattaacctcgccagaagttttaggcccatcattatatgccagacaaaccattacctatatgatgagatcagattaaaaagccctaattctcatcgtgctcatttgctcattacatctgcattgcaccatccaagatccatatctgcatatccatagctgatacagctccatcgtgaaaacgtttattcctctacaaggttttgcatgctactactaatgcactatacctttagacattcccaggttacaataccgagtaaacaagctgcctaacaaacattacaatacttgatatgttgtatgatcctgaaggccctagccaagcaatttaagcatactc

SEQ ID NO: 35300 - DNA, 431 bp, Oryza sativa
  Clone ID: uC-osrocyp014d07a1
atcaaatcattccattcatttcatttcactccatcaataaaccaaccaatctccaagtccactttgttttttttcctctttaaagaaaaacaaaagaaaaatacattcctccatttccgcgtgaagcgtctggatcgagagtctagaggctaactctagacgacggcgtacaggatgatctccgcggtgtcggcggcggcccggggcatcctcttcgcggcgaagcccgcgcagccgccgccgccgccgtcggccgaaccggcggcggcggaggaagacggcgaccaggaggaggacggcggcgggtggtagtacatcctcgccgtctgcgggcagtgggagtggaaccgcgcggcgatgcgcacccccatgtcgagcagctccacgtacttccccatcgatctatattccccttcttcctctcggatctc

SEQ ID NO: 35301 - DNA, 469 bp, Oryza sativa
  unsure (1)..(469): unsure at all n locations
  Clone ID: uC-osrocyp014d07b1
tcgtacagatttgacttcgatcctcttgatgtcaccaagacatggccagaggatatcatccccctgcagccagttggacggatggtcctgaacaaaaacattgataacttctttgcagaaaatgaacagcttgctttctgcccagcgataattgtccctggaatccattactctgatgataagctgctccagacaagaattttctcctatgctgatacccaaaggcaccgtcttggcccaaactatttgatgcttcctgtgaatgcaccaaaatgtgcataccacaacaaccaccacgatggctccatgaatttcatgcacagggatgaagaggttaactacttcccttcaaggtttgatgctgcacgtcatgctgagaaagtccctattcctnctcgtgttctaacaggctgtcgggaaaagtgtgtcattgacaaggagaacaatttcccacaggcttgtgagagat

SEQ ID NO: 35302 - DNA, 429 bp, Oryza sativa
  Clone ID: uC-osrocyp014d08a1
cataagattaagatatatgataaatcattcattcattgcaattgcatctgcaccttcttcgcactcaacccctttacattcacagacatgactgtgaagactatggtcagaatgaaggtgatactgcagtagatgaacagcatcacgtagggactcgtcattgagttagtcacgaaagaaaaggctatgatggaggaaccagccagtatccagtttacaactgaggccaccaccacacctttcgtattcatcatgaagcttatgtacggccacacacttgaacccaaagacatgccgaacgtaaacatgaagaacataatggcgatacaggtcaccaatagtatcttatcctttgcatcagtgttcgctggatcttgctgctaatagagatacaggaatatgccgatcattgcatcaaggaaggccagc

SEQ ID NO: 35303 - DNA, 437 bp, Oryza sativa
  Clone ID: uC-osrocyp014d09a1
ttttgtttttttttgaagcgcggcaataaaacattgcattgaattctgaacgataaacaccaggaaccggcgtttatttgaggcaagcactgcccaaaatctcgcaaaagtactgaaaccttagacatagtacacatccatggcaaacatggatgccaaatgacaactacagaaaattatcaaattcgaatgcagctgacggcttctcctgctgaagatgcatattttcccctccattacttggatgtgctctctccatcgacagccaatgggacggcgctggccaggctgcggtatttcagagcatagaacatctcaatgtaacggcgagtctcgccctctcaaggttgcttacgtacttccagaatccatatacaccagtcaaggtcatcagcctctcagagtacagcttccaggtgtacttctcgtaaatcctc

SEQ ID NO: 35304 - DNA, 429 bp, Oryza sativa
  Clone ID: uC-osrocyp014d10a1
aacggacgattgctgattactattactggttgcaatgtaacacttcggatacaatagtacattacagagctagctaaatgcgaagccacaataccgtcagcgcaagacgatcataaataaagcttacacaacatagccaacatgcaaaccattcggactgaccagagatgagggttcttgaagctgccgtggtgtgccatgcatcacaaatgccgaacaactagattgtagcagccaacatgaaaggaaaaggcatggataatgcagcaaagatggatgatgaagaccgcagattgtgacgcttcgttcaccaaccatatgaaacccctaaattttgtcaagtttctccgccttcaccaccggattagccttggcaatagcatccctagcagcggtccgatagtcaaactggcagtcatgcttatcgga

SEQ ID NO: 35305 - DNA, 432 bp, Oryza sativa
  Clone ID: uC-osrocyp014d11a1
gcacaagaagccaaacgtgagagcttgtacaaaacttcagctctcttcaatgttgactacgctaattaaaattgtaactccataaaaactcggctacgccgagaaaactgtaattacaacagatacggcgtagccaattcacgcaatgcgcacccatacggctacagtatggttcatttaacgtctgatagacgatttcttaaggtgctgccgcaggtggcgacaaatactgaaaacagcgaggtaatccaataaagaaataacattggaaatcctctccagcggcaacccaagtctctaaatgatcataatcactcgagttaccctgcaacgcaaatttgtacccgggttgcgaacgggcagttccatttgtagaattgtagttggtgttacgggcaaaataacaacgagcgtcattttcccaaggcacta

SEQ ID NO: 35306 - DNA, 482 bp, Oryza sativa
  Clone ID: uC-osrocyp014d11b1
ttagagttgcagcaactaactcatcaagaaactcaaagatgagtagtggcggcgctaaggcctatgcggccgttgttctgatcaggatcatgtactctggtatgcatgtgatgagcaagatcgccttggatcaaggcatgaaccccttggtgtttctgttctatcggcataccactgctgcactcgtgctgatccctattacttttgttctagagaggcggaaagctaaaccggtgacgttaaaaattgcagggaaaatgtttgtacatgccttatatggggtgacagcttgtggcgacttatttaaccttggtcttaattatacttcggcagcatcatcatcagcattgtacaacgttcaaccagtggttacctttgtccttgctgttgtatttgggatggagtctatgaacctaagaaggtccatggaaatggtaaagcggcaagtattcttgtctgcattcgcggtgtacaaattttgg

SEQ ID NO: 35307 - DNA, 408 bp, Oryza sativa
  Clone ID: uC-osrocyp014d12a1
tgtggttttgagagagcaaacggatttagccatcacctttttctttactcagatttagcaattgtttgagcagtgacagacataaacattatcatccattgacaccattgacagcatcatagagtagtgacacataaactaaacatcatagctaaaacatgccgacgaagacgcgacggaacacggtcacatatgtatatgtgcgcgaatcaacggatctatcacacggcacatcatgacacagtagtaataattcaaaacagcaagcagcagcaagcacaccggagcgagcggcggcgggcggtagtagtagcagattcgggtgatgatggattcgattgcggttacttcttgaggctgccgcggacgccgggctagcgcttggaggaggaggcggcggcctcaccg

SEQ ID NO: 35308 - DNA, 414 bp, Oryza sativa
  Clone ID: uC-osrocyp014d12b1
tcttttggcttctcctccccctcccggttcggttcggttcggttcgggtccggttcgatttcggtttttccttcggttcgggggttggtgggaaagcatggcggcgccggatgttgagtaccgctgcttcgtcggcggcctcgcctgggccacctgacgaccgctccctcgaagccgtcttctccacctacggcgagatcctcgagtccaagatcattaacgatcgggagacggggaggtcgcgcgggttcgggatcgtgacgttcttgagcgagcaggccatgcgcgacgccatcgaggggatgaacggcaaggagctcgaccgtcgcaacaatcaccgttaacgaggcccattcccgccgctccgtaggccgaggcggctgtggctactgtcagcgcggtggatgcggaagc

SEQ ID NO: 35309 - DNA, 482 bp, Oryza sativa
  Clone ID: uC-osrocyp014e01a1
gtcagctgggaggctcttgttcggccgccctcctttttttttgggttttttaaagcaaccgagactaggtttcaattggctttcaaacaaagaatatgggcattcacactagcaccacttacttgacactatgtcataatactaatggcgacaacggggggaaaatgacgaatgtacgctcgttatggagcctgatcactagggcaacaggaccgcagagctcatccctttcacaaacacaacctccacagcaattttgcaatttttgcttcccacaagcccatttaatcatcatcataccctcccgcttccctcgccggaatcggcaaccgcactcatgcctttggctttctccatgcccagcctcttctcgactttcattgccttcagatgcccagcagccttcagcgccctgatgttgctcacattaccaaagatcagaacaatgatgccgaggaagctgcctaggaacgcagcagcaa

SEQ ID NO: 35310 - DNA, 430 bp, Oryza sativa
  Clone ID: uC-osrocyp014e02a1
gacagcaacttgaacttaatttattcactaatcagaaacaacaacagtaggaggagcagtagtactactggaaaggaaacatggtgccagaaaaagcagagatcacacactacgtggatcagagagcacccaattgctatcttggataaattgcagccaccagttcaccggtgaggaggagtaaagagatctgtgtgcacacgtcggcctcgacaatctggaggcatgcataagcaaaacagcagctttggtttgatgacagatcttttctgtcacatcgttttaattttggttttagacctttgctgcatcatcatcaggcacttgagcctcgctgtcatgcagctccagctccaggccggttttgcttgcaccaatcttgttcatctcgtccttctcctctatgtttttcccccacagaacattgtac

SEQ ID NO: 35311 - DNA, 433 bp, Oryza sativa
  Clone ID: uC-osrocyp014e03a1
agttcataattttgccgagcttgaattattggggtgcaagggttgctcattgaacaagtgctaacaccgataacagaaaaaaaaaatcctcaaattaaacatggcagttcttggaatctaatagactgcaacaaccaaaagatgcgcatgcgccaagatgtttttcaactcatctcaatttcatctttgaaatgtaagtacaccctgagaaaaatcaaggcttgagggccaccgcaatgccgacctttgagctcttgtcaatggccttggtgtcaacttctgctgagatggtccacacagactttggcctccactcgtgctggagcagcgcgctggccttgccggaattgttgaagcgggccttcacgacggtaagcgggtcgagagtgtgctgggtaccgaaggtgagggagttctcgttgctcgagaagct

SEQ ID NO: 35312 - DNA, 475 bp, Oryza sativa
  Clone ID: uC-osrocyp014e03b1
tttttcgccccccatttcgaagcccaccgaattccattcctcgcgattcctctcccctcgcctcctcgtcctccccctcccaggggatcgccggagaggaatcgcgcggaggaaaaaaaaagaaaagggcttccccgtcgtctaagttaaaaggaagccatggagcacaaggagactggatgccagcagccagaaggcccgatcctttgcatcaataactgcggcttctttggcagtgcggctaccatgaacatgtgctcaaagtgccacaaggagatgataatgaagcaggagcaggccaagctggcagcctcctctatcgacagcattgtcaatggtggtgattccgggaaggaaccaattattgctggtcacgctgaagtagctggtgctcaagtcgaggtgaagacgccttgtgcgcagcctgctgagaatgctggcctagtggggggtcacggtgaccccaggggaggga

SEQ ID NO: 35313 - DNA, 435 bp, Oryza sativa
  Clone ID: uC-osrocyp014e04a1
ttttgggtttttttttttttttttttttttgaaaaaaaatgaagtttattcatatgatcatgatgagcacgtacttggagaaaactttgttacatacatgcatggctcgctttttaaacaaaacaattaattaatgaagggattgaaatcaagaaaaaaaaagaagggacaggtaaatcttacgataatgatctacatggaaattaattataagatggtcacggccggaatcaaaagctgaaatccataatcacagtctcggcgagcagctgatgatatatgacgataattaagagagatgattagttaaccacgttgcacttcttcctgatctcgccctggctgccggtgagcactttgacgccgcccattttgaccatgggggcggcgaagtcggcgaagaactcgtccttgtagccgccgccggcgtggcgc

SEQ ID NO: 35314 - DNA, 430 bp, Oryza sativa
  Clone ID: uC-osrocyp014e05a1
gtactgcaataattttctactatattttattctaatcgaagaacatgtctatatctcacatcaaaggtcttatttagatgcaacatactaattccacaacaccttatcgaagcctaccatactgcatcacatatatcagcaaccataccgtatatacacatcataaccttaccaaatcaggtcacatgcagagtcatcttcacatcataagttcaatactaaccaaaattacacaataccaagtttccaatgatgctatgcataacaataaagctgctaacgatagtaattacggataattggaccctcaggccccgccaacttcttccacacaggcggacacagcatggaaggcacggacacgggttccacagcccgatcgcttcttacgcttgcctgaaatcatcgtccacattggctccggagcaag

SEQ ID NO: 35315 - DNA, 432 bp, Oryza sativa
  Clone ID: uC-osrocyp014e06a1
tttgtggtttttttttcttttttttttttgttgtttttttttttttttttttttttctttttttcttttttttgtctttttttttttttttccgaaaaaaaagccgccctgaacgacgggctgagccgggcttctcccgcggggggcacgccctcaattttttccacccgggggcccacgggcacaccgggggttttttttgccctgttttacacccctcttaacccaagggggaacaagggggggccgttgcttcaccctggtggccgtatggccccgcccggggcaatggttttttttttttttcccaaggaacggggggggccgttccactgcttgaggcagccgagcatggggtcggtgagcctgccctggcttccgccgaggaactttttgtcgcactccccggcgggggacccgagccactcgccg

SEQ ID NO: 35316 - DNA, 448 bp, Oryza sativa
  Clone ID: uC-osrocyp014e06b1
ttttttttgcagggaaggagatccgagaggaagaaggggaatatagatcgatggggaagtacgtggagctgctcgacatgggggtgcgcatcgccgcgcggttccactcccactgcccgcagacggagaggatgtactaccacccgccggcgtcctccttctcgtcgacgtcttcctccgccgccgacggttcggccgacggcagctgcagcggctgcgcggtcttcgccgtgaagaggatgccccgtgccgccgccgacaccgaggagatgatcctctacgccgtcgactaaagttagcctctagactttagatccaaacgctttacgcggcaatggaggaatggattcttcttttggttctctttaaagaggaaaaataacaaagtgcacttggagaatggcttggttattgatggagtgaaaagaaaccgacggaatgatttggt

SEQ ID NO: 35317 - DNA, 435 bp, Oryza sativa
  Clone ID: uC-osrocyp014e07a1
aacaaagaaccatatcatcagttacaattgtcttccaagcaaagaataacacattaacaactagcacacttcctctaccactatgtcatcatcatcatgcatccaaggggggcaaagcaccgaattaacagtgtcactgaaacatgaacaagaaagaaacaagaaagaagaacaaatccctctcacaaacacaacctccacagcaattttccaatctttccttcccacaagcccatttaatcatcatcataccctcccccttccctcgccggaatcggcaaccgcactcatgccttcccctttctccatgcccagcctcttctcgtcttccattcccttcagatgcccagcagccttcagcgccccgatgttgctcacattaccaaagatcagaacaatgatgccgaggaagctgcctaggaacgcagcagcaaa

SEQ ID NO: 35318 - DNA, 429 bp, Oryza sativa
  Clone ID: uC-osrocyp014e08a1
tgtggtttaaaaatgaagggagctgaaaattattactactaaagagtaaggttcattatcaaccatttgtacatggatgggcggacttcagcttgcaacaagtaataccgactactagcattattactaattattattacacatgcattggaaggaaaatagaattacaagaactagtctagtagtagaaggagacgatccaaacccgctaaaattaattacgacaagtggagccgcgactacggcgcctttgttccaccttggactggccctggcccctacacacaaaggatgggccttgcacctaggatcctttcctctcctgctgctactgctccttctccttcaccagatataaagttctagaacccaaggacccttacttcactggcagatcgtcctctacaggaatgacttgaatttgtttct

SEQ ID NO: 35319 - DNA, 432 bp, Oryza sativa
  Clone ID: uC-osrocyp014e09a1
acaaagaacaatcaccggcaacttttattccacgtgcatggctcccaacaaattctgctcttaacatacaaaatgtgtacacgtactactacatacttgtacagccaactgaactcctgcaattacatcatattacaggataatttcgaccaattttttttatgttctctccctcttcttcaccatctcaacttggccgggaaatacttttcgatgagtgacatgtagtagggcttcaccttctcaacgtctatcctctcattgctcttgctgtacaggtcgtatttgttgaacacacgcagccatttgaggttctccttgtcctcatcgttcatcagatgcatgtaggctccatgcttgtgcagggggtagaatgaatgatatctgatgatgaacaagcctgcagaaggaagagtggtcttgttctccttt

SEQ ID NO: 35320 - DNA, 315 bp, Oryza sativa
  Clone ID: uC-osrocyp014e10a1
caaaaacaaaaaaaaggggggggaaaaaacccaaaacccacaccccaaaaaaaaaaaaggggggccccccccaaagaaaaaacccgggaaaaccccacccgaggggggcccccccccccccccatttcaggggggggggggggaaaaaaaacaaccctgttaaaaagggttggccccgggaaccccaccaaaaagagggttctgccaaaaatacactggccgccacaccatgggaggcacaaacaccgaaaaaaaaaaacggatcgctacttacgcttgccggccacaaaagaacacattggctccggagcaagc

SEQ ID NO: 35321 - DNA, 423 bp, Oryza sativa
  Clone ID: uC-osrocyp014e11a1
tgtgtttttttttttttttttttttttttttttttttttttttttttttttttttttttttttttggacgggggggctttgtttttattaccgggttttaaaaggggacagaaatcctggcaaacctacaaaggtaagttgggacctacaggggggggaggcctggttttcctcaaaaagaaggggtaaaatttaacgggcaaactttaataacagcagggccaaccctagttaaacgggtccactttaacttttttttttttcccctcggaagaaaaaagggggaaagaaacggaaaaaaactggacctaaaaaagccggggagctaggagaccaaaaagggcaccggggggggagtaattttgttttaatcccacaaaagggtgttttttttctttgaatgcgtttttccgccccattacc

SEQ ID NO: 35322 - DNA, 428 bp, Oryza sativa
  Clone ID: uC-osrocyp014e12a1
attaccacaactttttaaggatggaattgagtagcaatactttcaccccaaaatacagtttagcgacaatatcttagaaaagccgcttgctttgccgccatggctggcaagctgagcagagcagctaacacaaagaacacgagatcactataaaccaaacggcaacgaacgaagaaaatacagggtcttttttgtctgaagatacacgaagcggttcgttttcttttatttttagtctcctctcctcctcgatgatgggtgtatggcaatggcaatggcgatgggatcttggcttagttgatgggaaggggctcgccgttccactccttgaggcagtcgagcatggggtcgatgagcttgccctggctgatgccgaggaacaccttgttgcactcctcgccgggggacttgagcttctcgccggtgag

SEQ ID NO: 35323 - DNA, 424 bp, Oryza sativa
  Clone ID: uC-osrocyp014e12b1
tcgtggacgcgtgggttcggttcttccctcttcccatttccgcgcggcgcaacaccttctggacgtcggcatggcggcggtcgcctccgcctccccgctccccgccgcggcggcgccctccacccgctgctcgccgccgcccgccttcctccctctccgtgcgcaccgcccccgcgtcggcaccgtcgccaccaggagggttttccgcgcggaggcgatgaggacgcagcgggagaaggagcagaccgaggtggccgtcgaggagtccttccccttcagggagacggctcctcctgacgagccactggtcaccgccgaggagagctgggtggttaagctcgagcagtccgtgaacattttcctcacggagtcagtcatcacgatacttgatggattgtaccgtgaccgcaactacgcttgattt

SEQ ID NO: 35324 - DNA, 383 bp, Oryza sativa
  Clone ID: uC-osrocyp014f01a1
ttttgtgggatcctgaataaaagctttgaatgtatcaaccaacatacaggcatatatgatctgaacagcagtaagtaagccgtacccaaaagaaaggggaaaaaactaagaagaacaagacatggatcgataatatgtgcatgacaagcgctagctacaagggctagaagatatgtaaccacctaaaccacagcgatgtacagcaacatccggcgagctaatccctcatcaacaaatcgaaagaaacaaaagaatccatccgtccatactggaagcagtgctggctaatagtaatccccaaatgcgaagcggaaccaaccatcgaaatcagaaccagactttgcagtcggtgcgctgggatgcgggggcgttgggggcggacg

SEQ ID NO: 35325 - DNA, 517 bp, Oryza sativa
  unsure (1)..(517): unsure at all n locations
  Clone ID: uC-osrocyp014f01b1
ctcctcctctcttccattttcgctggtcgctttctccccctcttccacgaaagagggcgtctcacattggtgggtacccccgcaagggccccaaaagggagctcaagtgtgggctgtggagtctctgtgatatgaagagcaccgctgaggatttggagaaggttgcgaccgacctcagggccagcatctggaagcaaatggctgacgctgggatcaagtacatccccagcaacaccttctcgtactatgatcaggttcttgacacggctgccatgcttggtgctgtcccagagcgctactcatggactggtggagagattgggttcagcacctacttctcgatggctaggggcaatgccactgtccctgccatggagatgaccaagtggtttgacaccaactaccactttatcgtccctgaacttggtccaacaccaagttcttctactcttccnacagggctgtgaatgaatacaaggagggctanngcgctcgcgntgacaccgtgccagtactt

SEQ ID NO: 35326 - DNA, 437 bp, Oryza sativa
  Clone ID: uC-osrocyp014f02a1
ttttgttgttttttttttttttttttttttttttctttttttttttttttttttttttgttgaaaaaaaaaaaggattcgctgttttcaaatcccccattcatttttgggactcgcatacgattcacaggaccttggcttacattactactacggtgggtcgtcttacccaaaaggggggaacaatcccaaatttcttttcaataaacccaaggccccaagggaacgactgcatccaaaggtttggggaaacacctttttccctcacaagcttgatagcagttccccctcattcattgggctttcaagcccccaaaatgccctgttcaatgcaaaaggtcagatttttggataagagcaaccatgcgggccacactaaaattctcaaggtggggaaagaggacaactggggctgcatctaacagacaaacttgctgt

SEQ ID NO: 35327 - DNA, 347 bp, Oryza sativa
  Clone ID: uC-osrocyp014f03a1
cagaaaacccccatgaaataaacataattgatgatttggcctcaggccggtaaatgttacatcggggctgcacgaaacaaatatatatgggggggtctttctttgaagactcgctgcctctggatatatatcatcactggctctagattaaaacttgagcatcttcttggagtccttgaacgggcctgcaaaaggggacaccctgccttccgacaccacccaaagctaatccacgctccccgttatcaggggctcggcgggactcaccattagcactcctccctggaaaacgagtaaaccctggatcagcgcctccacagaatccaaatcaagatggttagaaggct

SEQ ID NO: 35328 - DNA, 440 bp, Oryza sativa
  Clone ID: uC-osrocyp014f04a1
ttttgtttttaaagaagcgacctttggatgctagttcactccaaatcgcccacaactaagaggcgatataagcacgctgatatagtctaacagaaatttactgcaaccagatttggggtggaagcataacagaactgggcaggtattaacaggtctccaacgagaagcagtagcagtagcttcagtgaaacatcatttcagctgattacattgatggattgtctctggacaccttgacagctcttgtgtcagaagacaccatctcggtcgcgctcagcttcaatcttgttaaccacattcattacatgcagtaccttgccgtacactgactgcttgcgatctcttaaccttggtaacaaccttggaggtacagaaacccttcaatttggattgccaatcagcagtggcataggtctaaatattggcatcgtaggagagtt

SEQ ID NO: 35329 - DNA, 461 bp, Oryza sativa
  Clone ID: uC-osrocyp014f05a1
tttttcggccgcgcctcctcagcgcgtggtctaccctcggcgacggcgccctgatgctgccccccggcctgccctcccagctatcagcgctaatgagtctgagtcaagctcaacaagccacctcgcaccgctcgtccctctcgggctccggctcagtccacaccgcggagactgcgtgtcagaccgaaggccctgctgtcatcctgccctctctcgacacagcgatttccatgggcagcgggaaccacatcccagaactctctccgctgcagataggcgttctctccacgatcagcgatgtctcctggccacgggtcccatgatgggtcgagcaccagcgcctcgccgaaccacgagcacccctaccggttcccgaccgcgaacggcgagtggaaggtgatgagctcggggggagtcaacgctgttggagttatcagaccgtccaaacgcgcgctcctgct

SEQ ID NO: 35330 - DNA, 430 bp, Oryza sativa
  Clone ID: uC-osrocyp014f06a1
attgatccactgcacaacaacatatatataaatctacaaaacaaagaacaatcaaaattgaaacaatcaccgttcacaatcttgtttgtgcagttttttaaatactcgcaaaactgaaccagatagtgtcaatgaagggaacgtgccactctacacgcaaatggattcagatattctgttccgtcgtttctattgcaatgaacgtatcagtcctagagatgtaacaacgggatgctactccatcttcagctccaaaagcagagcacatcacataagaagagatttggtcaagtgctctcttgctgttgttagggcttgaactatagtctgctcagcgagtgaagtagcaccttctattccatgtgctgacaccttttcagctatcacacttacttctgtttccaggacaatccctccatcaacaatttca

SEQ ID NO: 35331 - DNA, 447 bp, Oryza sativa
  Clone ID: uC-osrocyp014f07a1
ttttgtttttaaagcatatacttactgtccattcatttttatgtttgtgaagccaagaaagatgagactagtccatgttcaaaaactcattagtccaaaacaaaaacatgacgcccatggctagcactcagaaaaaactggagaacactttgctcaatgcttatatcattttcatcaagattatgatcccaataagatctactcaacacttggctcgacaagaaggtacacaccattttctccccaaaattatatactctccgaacagcgccagcaggagagttcttcagtcactatgctctcagagacctcaaggtgccatcgtttcagatgattgtccccaagcaggaacatgacagcactggaaaacactgaagatggtgcattgcccttgttactttgcttcttgcagcgaccaatgcagatcatgtggaagctgacctttca

SEQ ID NO: 35332 - DNA, 443 bp, Oryza sativa
  Clone ID: uC-osrocyp014f08a1
tgttgttttttttgaacaaaagagtctcatgctcccattgcattacgaattatttgcttattcaccagattacatcactgtctagccagacccaaaaaaactgtgcataaataagattcagaccgccgccagcaccaccatagcgaaaaagaatggcaccacaagggcaaacatcccttggatacagatgtttttttgttcatgacccaacagaagaacagaaactaagacagaataaacccctagagctcagcttgtagtttcaggaatatgaaacaagaacccactaagggtttgcgtgttgaaacatgcctaatccgcacgagattggccagcgcgggatgacaggatgatgccgacgatgagcccatagagagcaagcgcttcggcaaaaatgaggatgaggatcatacccacgaacagctttggttgctgggcgttcg

SEQ ID NO: 35333 - DNA, 378 bp, Oryza sativa
  Clone ID: uC-osrocyp014f09a1
ttttgtttttttttttttttttttttttttttttttttttttttgacacaagcccaagcacacagggtattattattgattaagatatggggatttttttccgatacaagcattacttagtctagtagttgacatatattaaagattaattttttgagcaagcatgcatattcccatacaagctagtatcagcatacttaggtagattgctggcatttgtaacaggggggagcagagccagagtacaatacttaagtctttttcatccagctgttatacatgatgatataatccatcatcatccatgtgggttttacttgaggatgtacttgagccaccgggtatatggatcctgtagaagaagccctcccaatcgat

SEQ ID NO: 35334 - DNA, 429 bp, Oryza sativa
  Clone ID: uC-osrocyp014f10a1
aaaggaagcattaatagggtttattaaatctgagatggcaatatgatgtgaatgaaacaatttttctacaatctcttaaatgctcttcctactgcgcgagcagctcttctgatccaagaacgtctcttgcggagtcttctgatgtcaccagcaacatggcgagcagcaccagccaaacgacgaccaccaattctgaagtctctcatgcattctctcttgaaacctccacggaacttgcgacagaatctaccagcacggacgcgcaatctacgggtccattttctggccttaccagctggcttcttgtggaatttcttgacaaagagagatctcttaaccttggtaacaaccttggaggtacagaaacccttcaatttggattgccaatcagcagtggcataggtataaatattggcatagtaggagagt

SEQ ID NO: 35335 - DNA, 432 bp, Oryza sativa
  Clone ID: uC-osrocyp014f11a1
tgggttttaactcttttttggctccttgattcctatttcatttcattccgatcgattgcaacaggcagttcaaacaccataaccaaagcgaactcaattcatggtaacatcactgacgaagaacacctaacactggatggatggatcgagggcttctcgactcgagagagccactggacacgataacgactcgactcgatgataaaatgattgtgacacggatagctaaggataactggccacgatgggccccaccaatcagctcctccagtttcccgccggagtcgccgtcgtagccgccgccacggctgacaccgtagccgacgccgccgccgccacggccgccgccgtagccgcctccgtcaccgtagccgccctcactgagcctgtagcactcgcttctgccttctccgaagccgccgcctccacgac

SEQ ID NO: 35336 - DNA, 429 bp, Oryza sativa
  Clone ID: uC-osrocyp014f12a1
gcagccttgaagcctgctcctttcaggttctcaattatgttcataccactgcagtgcacatacatccgctcatacatatatagagcaacatagatagccagccatggctagctccaaatccgtagatgtaccgatacattctttcactatgaacaatccatatcagtagatcgatacaccgaagcatcgaccatgcacgcacacatgtcggtgatccgctgtcgtctcaagaggtcgtggcagcggcggcacacaccggcaggtcgttctcctgggtcggacgctgccctaggatggggttgctctcaaagaagttcactggcttaaggtcgaagctggacgacaccgtgggcatgatggggaagtcctcctggcacgggacatggtgaaaccccagcgtgtaccacagcaccaggtccttgttctcga

SEQ ID NO: 35337 - DNA, 290 bp, Oryza sativa
  Clone ID: uC-osrocyp014g01a1
gccgcccccctttttttttgttgtttttttaatatttttggttacaatcctttctttttttttttttttttttcttttttcatctttttgttctcctcatacgtttttcgggcatcccctcgggctatttacccaccaacagagccccccacgtcaccagaggaaagaacaaccccgatctctggtgtccgaaaaaaaaactttcccctctggggacccggttacccccaaccccatgtaacaggtgaagaaaccccacttaaaacccaaccccccccttctcttaccaa

SEQ ID NO: 35338 - DNA, 398 bp, Oryza sativa
  Clone ID: uC-osrocyp014g02a1
ttttgttgactattgaaaacaggttttacttccatttccgctgttatttttggttataccgtaacacaacaataccatactccacaaatcaccacgggatcgacgtacgctagacagtacaaattcgagcaacacacaacacatgatacacatcacatctagagagggagcgagctagcaacattggcactcaagcatgcattattctcctcgcaacattggccctagctaattaattagctataggtaattaaaggcagcgcagctcggcatgcacagcaatcttcacggaaggaagagcctctttggcctctcgcacaactctggtcggacggtcacctccttttgtcggaacgtgactgatagtggcggaacacaactagtacggcggcggcggg

SEQ ID NO: 35339 - DNA, 440 bp, Oryza sativa
  Clone ID: uC-osrocyp014g03a1
caaaaccaccatcaaagtccgatttaattgagagttgagacaactggtacacacgatggaccttgccgacgacattgagagttttttgcctcttggcagaaaattttcaagaaaaagcaccttagtaaaggtctccttccttgtgagtatggatgacgcagtcggacttagggtaggagacacatgtcagcacatagccttcttcctgctgcgcatcatcaaggaatgatccatccgactggtcgacggagccagcctcgatcttaccggcacaggtagagcatgctccagcacggcatgagtagggaagctctactccagcggtctcggcggcatcaaggatgtaggtgtcatccggagcctcgaactcgtgctcttgcccttctggtgtgatgagcttaaccttgtaggtagccattgccgagacgtcaagcttcttg

SEQ ID NO: 35340 - DNA, 436 bp, Oryza sativa
  Clone ID: uC-osrocyp014g04a1
ttttgaagaaatggctgaaggtctctaaagctggaagcaggaatttatcttgagcaaaccttggaagattgaatggacaaggtgatcgatccgattattgagaatataacctaaccgcatacactaataacagtgggcattctatgaagaccaaaggaagctgtccaaaatctcacaacaattctttatttcattcgtgccaaaatgaatagaaatcctgaactaaatagagacacagcatgagcagacttcaaattgtaacacagctcactcgccgattaggatagggttgatcaatggcttcagctgcgcaggacattcaaccgccaagatgatacaacaaggcacctcatgatgagtataccgccagcaaatgtgatgatgcgagcatatgcaccaccaatcatctacagcaaagcacagcagcatgtgatca

SEQ ID NO: 35341 - DNA, 431 bp, Oryza sativa
  unsure (1)..(431): unsure at all n locations
  Clone ID: uC-osrocyp014g05a1
gtcagaggggggaaaaattcatgcttattatactagatcatcaattaatttaccagggtatcctctcagcggccgggatcagtacacacggtactgtatgtataacgaatcaaatgaaatcaatcggggccgggcatcgtacaaaaccggaacaagattatacattcaaatgctacaacagcgtatgatcaagccacgtggggaaaaaaatgtgtaacaattacacaagagatattagacctcttnacacttttttttttaatactccatttgattgactatcattaagcctggctctgttactgtcaggagatgctaataggaactccaaacagcttggcctcaagcttgaacggctgccccatggaacatgataatgacagttgtgtagagtagggcgagctgttcatccccatgtaagagctgtcttg

SEQ ID NO: 35342 - DNA, 423 bp, Oryza sativa
  unsure (1)..(423): unsure at all n locations
  Clone ID: uC-osrocyp014g05b1
ttaagacttcacactacatacattcagaagtgctttctttcgcttcgagcctcttcctctcttttctctcgtctcttccatccacattcttctctctctctcgattgcttcgcactgggaatggcgatagaccatgcgtcccctttctcgctgaagaacagaggcgacatgggaggaagggggtatgaggagggnagaaggtggagaaccagcggtggccgccgtggctgaagccgctgctgtcgacgagcttcttcgtgcaatgcaggatccacgccgacgcgcacaagagcgagtgcaacatgtactgcctcgactgcatgaacggcgcgctctgctncctctggctctnccaccaccgngaccaccacgccatccagatacggagggtcgtcgtaccacgacgtgatccgggtgtcggag

SEQ ID NO: 35343 - DNA, 423 bp, Oryza sativa
  unsure (1)..(423): unsure at all n locations
  Clone ID: uC-osrocyp014g06a1
ttttgttgagttaaaaccaaaacatgaccatcttcccggaggcaactcaagagcgtaccaaaatgtcaaaaaagagaaacattctctctttatactccgtcaggttacataagtcgaaaattagaacagaacctgatgcaccaaaacagagttgggcgcaatttggatgttggcaataagccaacaaactgttccatgttcactagatattgatagttacagcctcccaaaatagacaggatttattcaatttaccacaagataatcaagcctttattttactacaaaaagtaaaacaataatacattcactcatggacttgctttcgagcanagcagaaagagaaatgaatggggcatacaaagtcatgtgcttataattatcgcagccgattgtgccatcatcaaaccctatgtttcagga

SEQ ID NO: 35344 - DNA, 434 bp, Oryza sativa
  unsure (1)..(434): unsure at all n locations
  Clone ID: uC-osrocyp014g06b1
ttgtttccagctgcgtggtccgcgacgttcacgatgaccaacaattgcggctacacggtgtggcctgggctgctgtcgggtgccggcacggngccaatgcctctactacaccctgnagcgctggcgcacggngcnncacacgcggtggacgcgccggcgagctggtcggggcgcatgtgggcgcgcacgctctgcgccgaggacgcgacaggcaagttcacctgcgccacgggggactgtggctcgggtggcatccagtgcaacggcggtggcgcggcgccgcccgccacgctcatggagttcacgctcgacggctccggcggcatggacttcttcgacgtgagcctcgtcgacgggtataacctggccatgatcatcgtgccgcagggcgggggcgccgcagcgccggccggaagtggcggcggcagcggcgg

SEQ ID NO: 35345 - DNA, 408 bp, Oryza sativa
  Clone ID: uC-osrocyp014g07a1
tgttgttttttttttttttgttgttttttttttttttttttttttttttttttttttttttttttttttttttttttttttttttttttttttttttttttttttttttttttccaaaaaaaacaaaaaaccggggggttttttaaaaggggcttttctaaaaatcaaaaaaaggaaaaaatttttttttcccccccccaattttaacccaaaaggggggacgggcccccctttatcaaaccaaaaaaacccggggggggaaaaaaaaaaaaaaaaggggaaaaaaaaagaaaccccaaaaaattggccccttttcccccaaaaaaaaaaaaaaaagagggggggggggggggccccccccttgaaaaagaaaaaaccaaacccccctaattaaaggttttttcacac

SEQ ID NO: 35346 - DNA, 271 bp, Oryza sativa
  Clone ID: uC-osrocyp014g08a1
ttttgtggaaaatcaccaaagaggggcaataacattggaagttgagacttcagccgcaccctgtggacacacgtaagacaacctaccaagccctattgcaaaggtgataaagaaaacaagaactaaaacccgaaaacaggaggggaatcaacaaggtgaccacgacacgtcgtcacttatgatcccaccaaaacggttcggcactacgcaacgcaccgcgtgtcaaagcgggggattacgcgcgctcgccgcggatgcggcgggcgagctg

SEQ ID NO: 35347 - DNA, 441 bp, Oryza sativa
  Clone ID: uC-osrocyp014g09a1
tgtggtttaataaactagcaggtttaaatataaaacggaactgtctgagcaaacaccacgaaatgttcaggcgctaagatacgggaatatccgattcatgcagcatagcaaaaatggcgaagagcacagagtcagataaagctatatagaactagggctccaggagatgggggccgaatgacaacacatggcgcttagacgacctcctccatcttgctctcgccggcgtcgtcctccaccggcggcatgtcggcgtaagcctcatcagactcgccctcgtcgatgctcaagccgagcttgagcatccggtggatcctggtgcctaaggtgttggggtcctcaaggctgaagccggaggtcaggagggcagtctcgaagagcatcatcaccaggtgcttcacagacttgacgctcttgtcagcatctgcacgctagcggagc

SEQ ID NO: 35348 - DNA, 425 bp, Oryza sativa
  Clone ID: uC-osrocyp014g10a1
gtatgaatgcaaataatcattaatggagggttgtctcttcagctatacttgcttcattgcttggctgtcttgtactaagcactagcacacaagagcaccagcccctttgacaaattactactatttctttcaggtacaccgacaaaacctgattattgtccgacacttgggatcccaattctttctagattggccaaaccgggccttgttgttaacttacccaaaccaataatgttaatattcagaagtcagatgcacaaagaataaataataataccgtcaaacatcaagcccacagagaggatcattcacccccaaggatgataaaacaaggcagatcatgacaggcataggccagcagcactgatgatcccagcatatgcatcaccaatcatctccagcaaagcacagcagcatgtgatcag

SEQ ID NO: 35349 - DNA, 429 bp, Oryza sativa
  unsure (1)..(429): unsure at all n locations
  Clone ID: uC-osrocyp014g11a1
aaaaaagctagtaacttttcacattatgtgcatggtggttattcacatgaaagggaaaaaaaaagactagaagtgctttctcttctttctttttttttcttttttcttaatctgatctgaaagcaaaatttagacccgatccagaatcccttggtcctcctcatttgccatggccttgtcccctttcttgtactccccatagacgtaggacgagaaggcccagaggcagagcagcatggccaccgccttctccggcccgaactcgtcgccgaacaccaccacgccgccggccacgttcaccgccaacagcgccgtcatgcagatgccgccgtgcagggacgtcgtcaggaacaccgttccggcggtgccaagaaagcacagctgccagctaagcaccgccgccccgaccaccgngtagtaggccgccgg

SEQ ID NO: 35350 - DNA, 483 bp, Oryza sativa
  Clone ID: uC-osrocyp014g11b1
tcgttaaggggcaagtgtgagcaggcggcggcggagccatgccgatgccgtcgcgggcgcggcgcaggtccaaatcccggtggcctctcggcgagccccctcccggcctcttccccgctagggacgacctcctcctgcgtgctcgccgtcgtctccatcgccgccgcagcagccgctgcctgcagccttctcaaccgccgccccaaacccttgtgcgacagcggcggcgccgcctatacccaccatgattcatgccaaccatgccctccccatggacgatgcgtagacggaaacctggagtgcgtccagggattcaacaaatatggcaacctgtgcatagaggatgggctggtcagccaaactgctacccagatttcacagttgctagagcggaggatctgcgatcaatatgcccgtgctttatgtggcccacctggcaaaatcttgttcaagaactcgatatcttaaacatggctgatgagc

SEQ ID NO: 35351 - DNA, 427 bp, Oryza sativa
  Clone ID: uC-osrocyp014g12a1
atctggaataacatacgatgcacaagaacacaatattggagtaatatcagtgatcagttatgcccaaggaaagttcataacaaatgtagctaggcacctcaacgcccagaatcacacgaagatagaagatatctccattatgacctcatggaggccactgcatgcttcaggtttgagaagaaatagtggtcctgtaccaggaccagtaatttatccgcaggggatcacatctctgcaatattgagcagattgcagtcgcaagatcagcatctactgcttcatctgcttcaggatcagagttctttattgcttcgatagttcctttgagttcatctgaaggttgtaaaccaatttgaagaagatcgagcagcaagctcaaagcaaatacgcatgtcgaatcatgtttcaggaccttgagacaaacata

SEQ ID NO: 35352 - DNA, 367 bp, Oryza sativa
  unsure (1)..(367): unsure at all n locations
  Clone ID: uC-osrocyp014g12b1
cttcttcatcgctttgctagtaagagtgaatcgaagatgatgaagaagctggtgaggttgctgatcatggtggaggtggtggccatggcggcggcgccgcggcgagcnncggcgctgagcatggactactacgggatgagctgcccgttcgcggagatggtggtgaggagcgtggtgagccaggcgctgatgggcgacccgtcgctcgccgccagcctcctccgcctccacttccatgactgcttcgtccagggctgcgacgcctccgtcctcctcgactccaccccggacaacaccggcgagaaagacgcgctcgccaacaagagcctncgcggcttcgaggtcatcgaccgcatcaaggacgccc

SEQ ID NO: 35353 - DNA, 322 bp, Oryza sativa
  Clone ID: uC-osrocyp014h01a1
ttgtatcctcttatttgccgcccttccattttttgggtggttttttaatacgggggggtttcttttttactttttttacttttctcgttttacggtgcatgcattgtcatttgaccacaaaaaatgttgagccactgcacacggtgcagcgttagttgtagcattcacaacataccgagtttcttttttttgaggtaaaagttttcgaggattacattatagtttaagccttgcaggatttactagataccagttgcatttttttagtcgcattcaaatggggtgcagtcccgggttaaggggggcaaaatgagctttactt

SEQ ID NO: 35354 - DNA, 269 bp, Oryza sativa
  Clone ID: uC-osrocyp014h02a1
tgttgtttaaaacataaggaaggaaagcacatttaatggcaccactacgggcgaataacagcgaacactttatggtttgatcacggaatattttgctccactgagcaccgggcacacgatagctagctcatctacaacataccgagtttctttttaggaggtaaaacggtacgagtctcacagggtactaaaacgtaagctgctattactagatacgaagtagcattttttaagccgcaaacaaaatggatacagagccggcttcaggg

SEQ ID NO: 35355 - DNA, 282 bp, Oryza sativa
  Clone ID: uC-osrocyp014h03a1
ttttgttggttttttgagaatgatggcaacaaactcaattcgtactgctcatcattttactatgacatcacgaatccatggtgctaatcctaacacttatggaggtacattgcaatttgcaaagctcattctgtgcctcccattaatacaacgatcttgcccgtgacatggacttgcatgcacttagcccaagccttctgtgctctgctcaaagggtccttggaatctatggtggtcttgacctttcgttgcttggccatgtcgaccagccactccatctac

SEQ ID NO: 35356 - DNA, 396 bp, Oryza sativa
  Clone ID: uC-osrocyp014h03b1
ttccttcagtccctctctccggccccctcctcccccaccggcgacgccgcttcccctacccttcagccagcgcgccctccctctccccccaccgacgacgtcgcttcccctaccactcacccagggcgcccttcccttcccttggcagccggcgtctcagccgcggtgccctccccctggctcctcggcggcgtcctcaccctcttctccgccacaacacaacggacggtatcgacagcctcggcggcggcaccctcctcgtagaagcggcgtcctcgcctcccatgaccagtggcgtcgcttatttagttttttgttgtgcagtactgtgctgggctggtgggctgcttctcctccgctctgggggctcgctggtgggctgcggctgctatctgg

SEQ ID NO: 35357 - DNA, 439 bp, Oryza sativa
  Clone ID: uC-osrocyp014h04a1
ttttgttgatcttttgactaacatgtgtatataaattcctcacatccatccctatatgcaagctagtaatcacagttattagcaactgtagcaaggatgtaacaattgacatgagctgagtcctcccacatgatgaggaggcatatatcgatcaaattgatgcaccacgtcatttgacttggcggctgatggatgatttatactttccccagagagggcgctcatatccacggccaaatggaagagaaatagctatccaaaaaatgtactggcgtactatagctggctagcaacgacaatgtggcttgtttgctcgccacccaggcagctcatcaaacccgaggagaaaccaagcaaccaaaacctgacgacatggggctcaattacgagcttccacgagcttaccatttgcttactactcatctcacagcttgccacc

SEQ ID NO: 35358 - DNA, 419 bp, Oryza sativa
  Clone ID: uC-osrocyp014h05a1
gaaaatccctttatattatgggacggagggagtatgttacaagctaattaagagccctgggaaggcagaacaaaagaggggtgaatttaattgcaatacacatgcccgtcagaaatggtagcaagtatacactagctgtaacctgagacccatcatcaccgaagctgtaacccaaacacacggggaaccaaacaaacatcgccgcgtacagcaaacaccactctttggacagaggagggatttttgtatgaagaatttgagaagagaaagcatcggttagaatttacaaagcttggacgggaaacaagatcaaaaggaaccaatttttttcttgttttaattatctgtgttttacttttgaaaacctccttatcctatttatgtcgaggttggtattgttctggtggaatggtggagtg

SEQ ID NO: 35359 - DNA, 321 bp, Oryza sativa
  Clone ID: uC-osrocyp014h05b1
cggacgcgtgggcggacgcgtgggctcaaggaatataaacatctgctagaagaggctaagaagcgtgatcataggctattaggacagacccaggatctcttctttttccatcaacttagtccaggaagctgcttcttccttccacatggtgctataatatacaacaaattgatggattttttgcgacagcaatacagagatagaggatatcaagaggttttgagcccaaatatttacaatatgcaactctgggaaacctctggacatgctgcaaactacaaggagaatatgtttgtttttgagattgagaaacaggaattt

SEQ ID NO: 35360 - DNA, 483 bp, Oryza sativa
  Clone ID: uC-osrocyp014h06a1
tgctgccctccttcatctggtagcctctttttcagcggccctcctttttttttgttgaatatccccacatatggggggacggcgggagtatgtaacaagctaattaaaagccctgggacggcccctcaaaactgggttgaccgtaattgatatacaccttccggtcagaccaggcatcattgtttctctagttgtgacaatgtacccctcatattggtcactttctaacctgcacaaatccattctaagataggtactccacaaacatcatatatctagtatgggcaagcaccttgttcgtttgagttggataactgaggatcgatcgtcttgacaaataccaacagttgagaccatgtgtacctaaaaatggcttaattatgcctcacctgtaaaaactggcaccaatggactataaggggccagtgccttctatcaaagagcaactgccacattccatgatcaattttcagagcgagagat

SEQ ID NO: 35361 - DNA, 409 bp, Oryza sativa
  Clone ID: uC-osrocyp014h07a1
gaacagcaaaggaagaaatgcatatttagatgcacaactctacgagtctcacggtgcaagcatagccatctgaccacaaaaaatgttgagccactgcacacggtgcagtgtcagttgtagcattcacaacataccgagtttctttttaggaggtaaaactctacgagtctcacagcatagtaaaacgtagccagctattactagatacgagtagcattttttaagtcgcaaacaaaagggatacagtcccggcttaaggggtgtaaaatcagcttcactatcttcatgttcgccgcaacgggaaacagagcacaatcatctttgggtccaaaaatttacgggcaacctttgcgacgacgttgatttgtgaaccaatgacgagtttcctagatgacatactctgcttact

SEQ ID NO: 35362 - DNA, 365 bp, Oryza sativa
  Clone ID: uC-osrocyp014h08a1
tggtggtaacaccataaccaaagcgaactcaattcatggtaacatcacggacgaagaacacctaacactggatggatggatagagggcttctcgactcgagagagccactggacacgataacgactcgactcgatgataagatgattctgacacggatagctaaggataactggccacgatgggccccaccaatcagttcctccagttcccgccggagtcgccgccgtagccgccgccacggctgccaccgtagccgccgccgccgacgccacggccgccgccgtagccgccggcgccaccgtagccgccctcacggcgcccgtagccggcgccgccaccttcttcgtagccgccgtctccacaa

SEQ ID NO: 35363 - DNA, 454 bp, Oryza sativa
  Clone ID: uC-osrocyp014h09a1
ttttgttttttagtaattaaaatttacttatgtttcttcttcttcttcacagttcacatggaaatcagaaggaagtagcaaaaggaagagctgttctacactcgacagagtaacaaactaagagagcaacacaagtaacaagaggagagatttagtctcttttctggtgttctgcaaataaaactctcccctcttgctacccctaaaccccaacccaaggtagtagtaagtcaccccactaaaagtaaccggccatctcttacaaaaattggctgtctcctttgaatcaatcgaatcagatcatcatcatcatcatctacagctcgtcatgctcgtcgtcgacgccgccctcgccgtcggcgccgccacccggggcgccaccggtcctctggtagacggcggagatgatggggttgcagacggcctcgacctccttgagcttctcctcgtactc

SEQ ID NO: 35364 - DNA, 303 bp, Oryza sativa
  Clone ID: uC-osrocyp014h09b1
gccgccgccgcccgcgggcagtatatagggaggcgacgtagccccaagcggcggacagaggccgaggaccacaccgacgcaccggagccagcgccacacagacccaggggagcgccccatccacatggaccgcctcttgccagacgcaagacgcctaacgcgccgtcgtcgacgacgtgctcaccctcttcttcggcagatacaccgacaacattctcgcagaatacatcgtcgtaccactcctggatgagcaacaccaggaccaagcacgtgatgacttggaggcctatcttggtgatgata

SEQ ID NO: 35365 - DNA, 438 bp, Oryza sativa
  Clone ID: uC-osrocyp014h10a1
tgttgtttttttggcaaaaacacgacgttattatcattacaccatcacccatgtgatcggcaactccaactctaccaagaaacactaagtcacaacacctatccgacccaaaccaaagcacaattcaaaagggcttatgttatcgttgccacacgccgccaccatccatttaactttttcttcaaaactgcgttttgatatatgagttctgaagcaatcaaatcgaaggtcaaatggaaaagaaatagcagaaaaaaaatatactagtatactatagctagctagcaccggcaatctggcatgcttgctcgccacccaggcagctcatcaaacccgaggagaaaccaagcaaccaaaacctgacgacatggtgctcagctcccagcttccacgagctcaccatctccttcctcctcatctcacagctcgccaccttcc

SEQ ID NO: 35366 - DNA, 406 bp, Oryza sativa
  Clone ID: uC-osrocyp014h11a1
ttttgttttttcggcaataacacggccctattatcattacgccatcacccatgtgataggcctgtgaaagtctaccaagaaacggtagaacacaactgctatccacccgccgcccaagcacggttgcaaggggcctatggtagtgcgaggtgacaccgccatcctccatcgatgttattacctattcacacctggatcctgatatacgaggtcggaaacagtaaacaccactgtgtggtcgaaaggaggttgctcgaataaagaatactagaatactatggctaggtagcacctgacatctggcgtgcttgctccccaaccaagcggctcatcaaccccgaggggaaaccatgcatccaaaacctgacggcatggtgctcagctcctagcttgcacgaggttacca

SEQ ID NO: 35367 - DNA, 500 bp, Oryza sativa
  Clone ID: uC-osrocyp014h11b1
tcgtgtgcctcggcgccatctgcggcgtcggcctcgtcaaggcgttccagagcgcctacttcaacaggtacggcggcggcgccaacaccctcgccgccggctactccaagggcaccggcctcgccgccgagatcatcggcaccttcgtgctcgtctacaccgtcttctccgccaccgaccccaagcgcaacgcccgcgactcacatgtcccggtcttggcgccgctgccaatcggcttcgccgtgttcatggtccacctggcgacgatcccgatcaccggcaccggcatcaacccggccaggagcatcggagcggccgtcatcttcaacaacgagaaggcgtggcacaaccattggatcttctgggtcggcccgttcgtcggcgccgccatcgcggcgttctaccaccagtacatcctccgggccggcgccatcaaggccctcgggtccttcaggagcaacgcgtgatataaggggttcgagagccattgttggggatat

SEQ ID NO: 35368 - DNA, 430 bp, Oryza sativa
  Clone ID: uC-osrocyp014h12a1
gtcatcacgtaaggatacatgtccactgtttgcgatcagttgcgcaagaacgccaaggccaagccctgaacactgtatagaccgagatgaatctcacacgtttgtacagcccaatcatgattgtatttgaagtagtgagaatgtgggcctcccattgttcacttcctaagctgaacgaatccattctcggttaggtactccacaaattcatctattaggtagggccaagcaccttcttcgtcgtagttggataactgtggatcgatcgtcttgacaaattccaacagttgagaccatgtgtccctagaaatggctttattatgcctcacctgtaaaaactggcaccaatggtcgataaggggccagtgcctttcagcaaagagcaactgccacattccaagagcagtctccagtgcgagagatttttgac

SEQ ID NO: 35369 - DNA, 496 bp, Oryza sativa
  Clone ID: uC-osrocyp014h12b1
tcgttaaaccaatccattttttctatatacatacgacatgccaacggttaaacaacttattagaaacgcaagacagccaatacgaaatgctagaaaatcggccgcgcttaagggatgtcctcagcgtcgaggaacatgtgctagggtgtatactatcaaccccaaaaaacccaactctgccttacgtaaagttgccagagtacgattaacctctggatttgaaatcactgcttatatacctggtattggccataatttacaagaacattctgtagtattagtaagaggaggaagggttaaggatttacccggtgtgagatatcgcattattcgaggagccctagatgctgtcgcagtaaagaatcgtcaacaagggcgttctaaatatggggtcaaaaagccaacaaaataagtgattcgtttttagcccttaaaaaagaaaacggattcttgaacctctttcacgctcatgtcacgtcgaggtactgcagaaaaa

SEQ ID NO: 35370 - DNA, 442 bp, Oryza sativa
  Clone ID: uC-osrocyp015a01a1
tctcattgcttgtttgtgagcctgcttcttcttcctttccagtgccagcttgttcttttctatctcttcctgtctcttcatctctttcaattttgcttcatctactttaggttttgccttctcctttgggggctcatcatcatggacatctggaatatcatcaatatcaagaggttgttttgcctttgcagctttggcaggtgctttggcacgaatctcatcctttggagtaacatctgcacgtggagcaggagcctccttcgcctgcttcgccggctttttcagtggagcaggctcctgttcagcaggtggtgccacttgtgtttcgagaacgataggcttctcatcaggattcctcattcgtccatctcgactcagctgtcggctgttgagggaaacgagtatcctcttctcataatcctctctaaaggacttgctgctg

SEQ ID NO: 35371 - DNA, 254 bp, Oryza sativa
  Clone ID: uC-osrocyp015a02a1
ccaaattacagggggggcctaaaaaaagatggcctaaccccgcataactaacagaagggggcccaaaaccccatcagattacttttaaggggcctcaataatgggaacaacccccacaagagcgctgagtattacaggccctaaaaacacgggggggtgcatataaatgacacaccttaactgtaacatctttagcaccttctggccaagaggggcggtccttaagggccttttcctggtggctaatggggggg

SEQ ID NO: 35372 - DNA, 465 bp, Oryza sativa
  Clone ID: uC-osrocyp015a03a1
agggtcaaatccaacttattcataaagcatactgctgtcccacaggaaactgtttcataaaactaacatatcatacgggctcgatggtccattaaaccagacacaagtagacatcagcaccacaaatacttggcgaacagaggctcgggatgaccaggcacattggcagctccaccaaactggctgattactgaccaccacggaggcggagcaccaggtggagggtggactccttctggatgttgtagtcggcgagggtgcgtccatcctccagctgcttgccagcgaagatcagacgctgctggtctgggggaatcccctccttgtcctggatcttggccttcacattatcaatggtgtcggagctctcaacctccaaagtgatggtcttcccagtcaaggtcttcacgaagatctgcataccaccacggagacgaagcaccaggtggagggtagactccttct

SEQ ID NO: 35373 - DNA, 487 bp, Oryza sativa
  Clone ID: uC-osrocyp015a03b1
acgtgtttgtcccgaatctcgagaggctctcgtggacgggtcgaatgctatcacgtgctcaagatgcagatctttgggaagacattgaccgggcagactatcaccctgtaggtggaccgctctgacaccatgcttaatgccaagggtaacatccaagataaggaggggatgctcgcggaccagtagcgcgtcatctacggtggcaagcagctggaggatggcaggacccttggtgactacaacatgcagaaagagttgacccttgaccttgttctccgtctccgaggtggcatgcagatctttgtcaagactctaaccggcgagactatcacccttgatggggagggtgttgacaccatacacaacgtgaagggcaagatccaggacaaagagggtatccgcgcagaccaggagagtccattttcgccgctagcacctgaagatgcgacgacccttgctgactacacactcaaaggagtccaccctc

SEQ ID NO: 35374 - DNA, 453 bp, Oryza sativa
  Clone ID: uC-osrocyp015a04a1
ggtaagtcaccaagtcagggtaacaatacaactaggtccaatacgagactccagaacaatgtttagcatccaaataatctgcccacagagattctgctctgctgtgtttgcactagcttaccgatttgagtcgatacagtaaggtaaaagagtcgcacaagcacttgaagggtacaagcctgggttccgcaccagaggatataaccaatatttgaaaggaacattctaaatggacaagaaattagaaacctactagagttattacaggactgggttacacagatagtcacacgattcagctccttggagcacagctggccaagtgagtcttgaagttctccagctctgcaagaacttcatcttctggacggtatatcaggtcactcatgcgccatatctgcaatgttccacctccaccagtactctcaccatcatcagacacactcacaatag

SEQ ID NO: 35375 - DNA, 256 bp, Oryza sativa
  Clone ID: uC-osrocyp015a05a1
atgcccccctgtccttagcttggatcctttttttcggccggccttttttttttttttggtttttttttttttttgggtttttattttttttaataggcgctgcaagcaccacaataattaaatttctcacgcagttcatagttgtcatagagctcccaacgcagttcttcaattcaaaaagactgcccaaacagaccaagggtatcattatagcagcaaagttttttaacaggcgctgcaagcacggacgcgtggg

SEQ ID NO: 35376 - DNA, 305 bp, Oryza sativa
  Clone ID: uC-osrocyp015a05b1
tcctttcgtccgtgcttgcagcgcctgttaaaaaactttgctgctatgatgatacccttggtctgtttgggcagtctttttgaattgaagaactgccatgggagctctatgacaactatgaattgcgtgagaaatttaattattgtggtgcttgcagcgcctatttagaaattgactaaatacaaaaatcataaacatgataaaaaaagatgagagggcatgccggtttctagatggattccaaagtcttatcgtacgacgtagcatgacgacgtgataccttctcatatagtgaaacctaaatt

SEQ ID NO: 35377 - DNA, 426 bp, Oryza sativa
  Clone ID: uC-osrocyp015a06a1
gcctggatgggctaatctgattatacgatgaaacaaccatccagccgatgcaaaacaatgtaaaccgggctagaccttagactggccaatggcaagtgaaaacggttgtagaaaaggtagaaaagcagtaagaactctagatgtacgcaagttgcaccataccatgtacaccttgggaccttaccctgcctatcaacagggcacccgaccaaactaactcaatccatgaataaaaaggtccttttatctgaacacaagctagtagggttcatcatcaacacaagctagtggggttcaacatcacaactaaacgcagcaggcaaaattgtttgctcctcacaccaagatctgcaggagtggctatcttgtctcctgcggctttattttcggttattgtttatttatatggcgaacaaagggaggctg

SEQ ID NO: 35378 - DNA, 418 bp, Oryza sativa
  unsure (1)..(418): unsure at all n locations
  Clone ID: uC-osrocyp015a07a1
agatgcacaactctacgagtctcacggtgcaagcatagccatctgaccacaaaaaatgttgagccactgcacacggtgcagtgtcagttgtagcattcacaacataccgagtttctttttaggaggtaaaactctacgagtctcacagcatagtaaaacgtagccagctattactagatacgagtagcattttttaagtcgcaaacaaaagggatacagtcccggcttaaggggtgtaaaatcagcttcactatcttcatgttcgccgcaacgggaaacagagcacaatcatctttgggtccaaaaatttacggcaaacctttgcgacgacgttgatttgtgaaccaatgacgagtttcctagatgacatactctgcttactgttgcgcgcactgaactctctgggcacctncaggca

SEQ ID NO: 35379 - DNA, 516 bp, Oryza sativa
  Clone ID: uC-osrocyp015a07b1
ttgcggacgcgtgggcggacgcgtgggcggccaccaactttgacccgtcctcctcctccgcatcccccatcccctcctccccggcggcggcggcggcgcggaggcggcggcacgggagcggctagtggtttcgtcggcggaggcggaggcggggccaagatgttcgggcgcgcgccgaagaagagcgacaacaccaagtactacgagatcctgggggtccccaagaccgcctcccaggacgacctcaagaaggcgtaccgcaaggccgccatcaagaaccaccccgacaagggcggcgaccccgagaagttcaaggagcttgcacaagcttatgaggtattgagtgacccggagaaacgtgaaatctatgaccaatatggtgaagatgccctcaaggaaggaatgggtggaggcggatcccatgttgatccatttgacatcttttcatcattctttggaccttcttttggtggtggtggcagcagcaggggcagaagggcaaggaggggagaggat

SEQ ID NO: 35380 - DNA, 483 bp, Oryza sativa
  Clone ID: uC-osrocyp015a08a1
tttttgggccagcacttttgagtgttggattagaaactgatgaaaggtaaggtacagttactacattagttgcaaatcacctaccaaatcacaatctttttttttctactgctgccatagcagagcagaactaacattaggaaagcctaagacctaatcagattacccgtttcagccaacaatcatgggaatagttttgacaagagcactgagttttagaggccctaagttcacaggacaatgtatatcaatgtcacaacttcactgtatcatctttagctactttctggcagagagtgctgctcttcaggggcctcttcctgttgctcttgaggctgctgccacacatacgtcaccgggtgaccttgctgtccaccgtacatcattcctgatccaagcccctgctgcgctggcacgtagtaatatggataaggggctgctgcgccccccacaataaggggggaggccaaccttcggaagccc

SEQ ID NO: 35381 - DNA, 423 bp, Oryza sativa
  Clone ID: uC-osrocyp015a09a1
aattaaacataatttattaactcaacacccatacgatcagttacattaattggggggcaaaacatttaatcgggcttgccacaaccaacgcgtttgacaaaacgactggtaacagaaaaaaacaagttaatgccacgcaacacacaacctagcaaaacatgcacaaacgggcgggatgggtaggaattaattaattatgtccatgaacagcatgggttttatttattaactaaacctgtccgtacgttgcagtactttaaaactgcacccaaaagggagagtagggggcacccaaaaaccaattggacggggggacctttcaaggcgggaccttttggccgttgtttagctgcacaatgaaagacaggcttttcccggggaggtacgcgttgctttgccaattggggccccaatttctggtta

SEQ ID NO: 35382 - DNA, 390 bp, Oryza sativa
  Clone ID: uC-osrocyp015a10a1
ataatggtgttttgaaaaatttgggggtttaaatttttttttttttttttttttttttttttttttttttattttcccttttttcccttcccacaaaagagggacaaaaccagcaaaccacccagacccaccggcccaagccgacaaaaaaaccggcaacaaagaaaaaggaaaaaaaaaaccctggcccaaaccaaaaaggaacggcccaaaaaaaaagaaccggcccccaaaacaaaaaaaaaccgcgccaacccaaaggggaccccataaaagaaaaaacaaggaccaagggggcaggaataaaaaacgggaaaagaaaaccgctggggggaaaaccacaaggggaaagaaaaggcggcaaaccaacccggggccaccaaggggggg

SEQ ID NO: 35383 - DNA, 456 bp, Oryza sativa
  Clone ID: uC-osrocyp015a11a1
gcgttatgaattcatcttatattgtatccaagtcagcatccaataactagttggcgagccaaaagttacgttaaattttcttgcgcaattaactgtaaaccactgaaagatggatgccacatgataaaccgctggaaaatacaatgccaattgtcgcacagttaccctaaaaataaacccctcgcatcttccattggaaacatggtgaaacaaataccagcttcttccatgtgaccagagaggccactactctactgaaaagccgcatctttattactcctttgatgttataaccagcaggcccagcgcgccgatcagaaggtacttaataattggcttctcagtcatgataattgtaacccatccaacatatggcagaaaaccaacagctcgccccataatatgatgttgctgaagccaaagctgcccatgtgcatacagaagtcggtcatcccc

SEQ ID NO: 35384 - DNA, 454 bp, Oryza sativa
  Clone ID: uC-osrocyp015a12a1
tttttggaaacatgtaatgcgtggacatcatcacgatttcaagctgattcaaggctacgtcaacaactatggagagaaggtaaggtacatggccaaacgcatggtaaatacaacagtacacaaactagataaatctaaccaatggggactatagttagttttgttgtgtatcctttggaggcagagaggccattcggtagcctaaaccagagttgtcacctgcagctgatgagctcctggtgatgcatctacatacaaacaacagtagccttggatgaacatgcgggtctaggtggtcattttgccgtgacacaattccacagcaaaatggtacacgttatgggagaactcctgttcctctgaatatattagattggaggatgctgctgctgctgccagaagttcctttggtacatccaatgagccttaactatcagagtttggaaggtaaata

SEQ ID NO: 35385 - DNA, 538 bp, Oryza sativa
  Clone ID: uC-osrocyp015a12b1
ctcttcactcgtgttgttattgaaataaatcgcggtcaagataaaaaaaaaaagaaaaaaaaagaagaaaaaaatcgcggtctcctcctcatcgagccgcgcggctggatcgaggattcgagcaggttgatttcagagttgagtgccactgattcagctccaaagttagcatgagtactgtcagcggcactcggcgtgccccaaggaggcaatcacaagatggtcctggtgataaagtcgttgtgaacctggacgcgatctcctccccagtggttggaagccgtcgcgcggtgccgacctccactggtgcgcgcgcctcccccattgatgtggaagctctggatgatgaagtgcagacattgtccgcttcgcaagtgcctcctccgagaaggaaccggagaactaggaggcagcctgtggcagcagttgatctggaagtagatgctagccgggaagggaacaaacgtaaagggttgcacctgttatacactgcctctctccagaaggggagatgggtccagcttgaaactagcatgag

SEQ ID NO: 35386 - DNA, 435 bp, Oryza sativa
  Clone ID: uC-osrocyp015b01a1
gagcacatatttagggtcaaatccaacttattcataaagcatactggtgtcccacaggaaactgtttcataaaactaacatatcatacggactcgatggtccattaaaccagacacaagtggacatcagcaccacaaatacttgacgaacagaggcttgggatgaccaggcacatcggcagctccaccaaactggctgattactgaccaccacggaggcggagcaccaggggggggggggactccttctggatgttgtagccggcgagggggcgtccatcctccagttggttgccagcgaaaatcaaaccctgctggtctgggggaatcccctccttggcctggatcttggccttcacattatcaatggggtcggagctctcaacctccaaagggatggtcttcccagtcaaggtcttcacgaagatctgcatac

SEQ ID NO: 35387 - DNA, 528 bp, Oryza sativa
  Clone ID: uC-osrocyp015b01b1
gcagatctttgtaatgttcactgaccggcaagaccatcaccctcgaggtggaatcttctgacaccatcgacaacgtcaaggccaagatccaggacaaggagggcattcccccggaccagcagcgtctcatctttgccggcaagcagcttgaggacggcaggacccttgctgactacaacatccagaaggagtcaacgcttcaccttgtcctccgtctcaggggaggcatgcaaatcttcgtgaagactctgaccggcaagaccatcaccctcgaggtggagtcttctgataccatcgacaatgtcaaggccaagatccaggacaaggagggcattcccccggaccagcagcgcctcatctttgctggcaagcagctggaggatggcaggacccttgctgactacaacatccagaaagagtccaccctcaccttgtgctccgccttctggtggatgcagatctttgtcaagaccctcaaggcaagaccatcacctggaggttgagagctcggacacatcgacacgtcaa

SEQ ID NO: 35388 - DNA, 494 bp, Oryza sativa
  Clone ID: uC-osrocyp015b02a1
gcgccgctcccgccggggtccgtccgctccgcgtgcctcgcctccgccccctccccgcgccgcttctccgtctccatcgccgccggccgcgccaggagccccatcattgcgatggcttctgccaaggaaggaaatggtgccccaacgaagaggacaacccttcatgatctctatgatctccagggtcagtccccgtggtacgacaacctctgccgtcctgtcaccgatttgctgccccttattggcagcggcgtccgtggagtcaccagcaacccatcaattttccagaaagccatctcgacttccaatgcatacgatgaccagttcaagcagcttatattagctggaaaggacgcagagagcgcttattgggaacttgtcatcaaggatatccaagatgcgtgcaaacttttcgagcctatctatgaccagaccgatggggcagatgggtatgtttctggggaggtctcccctaggctggcaaatgataccca

SEQ ID NO: 35389 - DNA, 328 bp, Oryza sativa
  Clone ID: uC-osrocyp015b02b1
ggaaaacaacttgcccaacaatttttcaaaaaatgcatagcagttcgcaagccatatgcctcagttacacaaatagcagccaggagcgcctaaaatacaaaagctgacccaaaaattcgggagcagcacatcacaagagagtttgagagagggagagagcccccaagggagagcatttatttaggaatcgttcacttgccattgccagggttcaaaacattttagctatttttgcacctacagggtcacggtctttttgagggaattggccttttcctccaagctcacaagcaggctgtcgaaggccttcttgaaggagtccacacct

SEQ ID NO: 35390 - DNA, 445 bp, Oryza sativa
  Clone ID: uC-osrocyp015b03a1
tttttggggtacaaaccaaaatacagtacgactggactgaatccagcaaattatgatattcttacacgatccatctcaacatgacagagatcaaatgatggatcgatcagtggtacataaacaccaagaggaccaggttttcatagacttatttgacatcattaacaaccacgaccacgataattgacgacgatattgccgacatgatcgatttcataggactatttgaccagcagtacgaagaccccgtaaaagtagcccacaaattaagagtacataaacttaatatagttttgatcataagatcggcagtagtacagattcagaatctaattgacaaacacaaacaccgcaatataattcggtaatcaagcaagccatgatatcaggtgcaccccatcatccttcggttaaacattcatcaacgacgacgtgataacaattg

SEQ ID NO: 35391 - DNA, 347 bp, Oryza sativa
  Clone ID: uC-osrocyp015b04a1
gtgatgaaactacagccctgaagttgctcgtgtgagactgttcggtagcactgcaaacttggttattgaaggccgcatacccaaaacttaagtgccgcttataatttatttggtggtttgcccccccatttaaaatccttttggttctgccaaaagtaaaacctggcatggttcaagggttacagaaaccataaccccattggacaaacttttcaaaggccattttccagggttgaacccaacccccaagtgtggcttgataataggcgaggacaccggtcctgtggtccatgtgggactctcacagtaggggtgaaaccttatggggtattgtggcggtgtcacac

SEQ ID NO: 35392 - DNA, 429 bp, Oryza sativa
  Clone ID: uC-osrocyp015b05a1
gttaaggattcaagggtggaaaaggcacatgccttcagaagctggaacaattacattagtattgagtacattcatcagtgataaacatgggagatcattaaaatcttatcctaaacaggaacagctggtagctctctcaggatcgcagatttgtacagtctcatcgcaaaatatagactttcttcctctttttacacctaaccgacttatacaaaacgcctatcttttttgcagcgtcatcaggtaaataaactctgagcctcacccctgacatgactataagcaaaaactacaaaatgtacaatcttgttagtacaacacgtttatttttaaagttggcttgtagcagcccaaagcaggagacacagggtagatctggctagccatggttagctgtacattgtcattttcatgccattatgaaagata

SEQ ID NO: 35393 - DNA, 401 bp, Oryza sativa
  Clone ID: uC-osrocyp015b06a1
aatgacaatgcaacaatttttttggaccatgatgactgtacatcaacagcagcaggtacacaaactgaaactttaatggcacaaagtcagaaatttatttcaagttcacaaacagcaccttttaacaaagtttcagttcaccaagaagagcaaacaagatgaaaaagatcaagctacaataataattcacatcaatgctacaacaaaaaaaaaagaaaaaaaaagaagaggacaggatcggtgtaaccaacgaacaatcagaaggcacggggatctacatgatgatgacaggcaccaagagtatggacatggagatttttctgcagcacagcatcggccatatgcatcaagcgtccgggccagtcggatgcggcttgtcagcgtagttgtgctgtttgctg

SEQ ID NO: 35394 - DNA, 443 bp, Oryza sativa
  Clone ID: uC-osrocyp015b07a1
aacataaaacaatggattgaagtattatttacagtaccacgtacttatgctttggggtgaagttgagagttaagttgttgtattgaatcattgaacttcgcaagtgtggccagtggtgtagatgcaagtccttatggcatcggaaattggtcttccgtaaaatctgaaatcacccaaagaaaattgaccttccctcccgaaaatagcgttaggacgattaaaatcagtgggacgttccaaacaagcgctaacactgggtcgtagcgtggttgtttgtaagtcatactcatgccaagtaactgttactcctggccgggtgttggtttgtacgcaagccacgttggtgttcataatagtccagtgggtccacctgttctttccgactgaaagtagatcgaaggaagataggaacgtagagttactgatgcggaaaggaaatttgt

SEQ ID NO: 35395 - DNA, 319 bp, Oryza sativa
  Clone ID: uC-osrocyp015b08a1
gacatgcaaattttattttatttttaatagcaaaaatgatgcctatcgaaggggcacattgacaatcacaaacattacaacactttccacgaccggggaacacattagcatcagactagattttttttttcgttgagagaatcgatagtacacgatgatacagtaaatttccaatatcccccatgttgtcctaatggttcttgctttgacaaaaatcaggaacagatctcaatttgcaactaacttgaaacacgcaacaacagcgggcaccggggaccccattcttctccccctagtttcattgggggtcacttttatg

SEQ ID NO: 35396 - DNA, 488 bp, Oryza sativa
  Clone ID: uC-osrocyp015b09a1
tttttgggttaaataaattgtaccaatttaacccactttcagaaccactcaacaacgggattatagtactccaccccccactgaataagcgcgaaacgcaacgcaccaaagccagacatggtctttgcaacttgttgtctttgccgctaggtttttttctggcattttcgacgatactataaacggagtcttagagcgagctaaaaaaaagcaaaccgaaaacgggaatacggcaaaagaaaactaggcaaaactaactagccaactgctccccagtagcagccaagcagcaggatcttgggcccgtgctgccagtttcacagataagagttttccagaccatcagttccttgggaccacatgcctgttgagttcttcaggaccgtcttgttcttcatggctagctagggaacatggggtatgtgatccagttaactagctttgacggtgccgttggcaagggcaggcttctcagtcgctgctgtttg

SEQ ID NO: 35397 - DNA, 508 bp, Oryza sativa
  Clone ID: uC-osrocyp015b10a1
tttttgggaatggtcaaaacaaccgggataacatatggctactgccatgtagagattattgtaagcttacaaaaattccaatatatgttcggtacaccatagaaaacattactgaggctaactgtgacaagatgggagatgaaaatatatagaggatgaacttaaaacaatcactaacttctaaatacccaactcaagagatagaagttcacagtgccaacccaactatacactgttgctagctttaggccactgagaaaatggtagaaactcataaaacgttatctttttccaatgcaaatggttcgttcgaccgaatcgaagactcggtcggattcactggcatgagacgacaatttaactctcctcccctcagacaagcagtactgatgcttttggtgaaagaggcatggggggccttgagaccgcgaagcagtaagtgttaggggactgaagctaacaactgcatcccccagcctgtgcctgagactgggatgagttggcgttg

SEQ ID NO: 35398 - DNA, 527 bp, Oryza sativa
  Clone ID: uC-osrocyp015b10b1
ttgattccaagctatatcagagactcttccgttgctgtcatcgtatttgatgttgcaagcagacagtctttcctaaacacttcaaaatggatagaggaagttagaactgagaggggcagtgatgttatcattgtgctggttgggaacaaaactgatcttgttgacaagaggcaagtctccatagaggaaggagagggcaaagcgaaagatctcggtgtgatgttcattgaaaccagtgctaaagctggttttaacattaaggcgttgttccgtaagattgcggctgcacttcctggaatggagaccctctcatcagcaaagcaggaagacatggttgatgtgaacttgaagtcaagcaacgccaactcatcccagtctcaggcacaggctgggggatgcagttgttagcttcagtcccctaacacttactgcttcgcggtcttaaggccccccatgcctctttcaccaaaagcatcaatactgcttgtctgaggggaggagagttaaattgtcgtctcatgccagtg

SEQ ID NO: 35399 - DNA, 392 bp, Oryza sativa
  Clone ID: uC-osrocyp015b11a1
tttttgtttttgaaattttgggggtaaaagctcttttctttataattttgaaccatttcttttgttttggagtcctttattagtgaaaaacaggggagatcattaaaatcttatcctaaacaggaacaggtggtagctctgtaacgattgcagatttgtccagtcaccacgaaaaacatacaagatgttcctgtttttacaccaaaccgacttatacaaaacgcctatcttttttgcagggtcatcagggaaataaactgtgggccttacccctgacatgactattagcaaaaactacaaaaagggcaatcttcttagtacaacacgtttatttttaaagttgggttggagcagcccaaagcaggagacacagggtagatctggctagccat

SEQ ID NO: 35400 - DNA, 396 bp, Oryza sativa
  Clone ID: uC-osrocyp015b11b1
aaagagcccaagccccagcccctctaggaccttcattcgatactacaccacaggccacaccgggacccacagcatccaacctctcaaccagtattaattcaacgaggtgaacccaacaagcacacggcccattgctagcaaaacttaacgcacgatggaccgaagagcgaagcccgtggccaacacacaagcaccgcccacaaatcccaaatgcaaacgaaataaccaacactaacccatcgtgcatggccagaggtgacacaattgccacgggatccactacactacctgcataagactgtatagcatccgtctgcaactcgctttgctcccatgccacgacagaaggggtccagcatggaagctactttccccaacccaatctgaatcaatgcc

SEQ ID NO: 35401 - DNA, 451 bp, Oryza sativa
  Clone ID: uC-osrocyp015b12a1
tttttgtttttttttttttttttgttttttttttttttttttttttttttggaacacaaaccctccctttttttgttaaaagcttttttacccccatgaaaataaaaccataggggagaatgcaaaaacacaatacacgatttacaagggttactttgcaaacgactgactgactatacaggggattggggagacttgggaggtacaaaaaattagttggtttaaccagccattattataataagatcctacaacaacccctactaatttacacaatttacgcgaacccggcgtttgccataaacgggagcagcgctttagcacttttgcaacaagactacccttccaaatactgacgatgttgagggcatccatcctaattttgggcgatgttgggccatttttgcctgagcctggtttatcctatccgcatacatgggggggcgcggga

SEQ ID NO: 35402 - DNA, 339 bp, Oryza sativa
  Clone ID: uC-osrocyp015c01a1
ccccggccaataaccaattttttttaggggggaaccaataatgcaataacagaatttactccaaattacaaccagttgcccaaagggtaaaacagaattatataatgcgtccggaaatgaaaagttccagggggaagccacatagcatggaaaaacaccacaaaagaagagcccaagcttttgcctgtttgtcggtatggttgggagcttaataaaatgcctaacgatgttgggcgtagggacacccacacccccaattgaatttgcccaagggagatctaaagcggcccccttgggttttttcgcgatgcctgcaaagtacttcccctgggggaaggg

SEQ ID NO: 35403 - DNA, 454 bp, Oryza sativa
  Clone ID: uC-osrocyp015c02a1
gatcaaagcaaacgagacgagcttttttcttgcgatcaaaaacacagatgggcaaccacacagttaacacaaactagatagttccacacaaaactaacgatgataacgatcggatgatgatgatggtagctcgattagatagatagataacttggccatgagggccccaccgctcagttcctccagttcccgtcggagttgccgccgccgcggctgccgtagccgccgccgtagccgccgccaccacgggcgccaccgtagccaccgccaccgccgtagccgccttcacggagctggccgtagccaccgccgacgccaccaccaccgtagccgccgccaccgtagcctccgcctccgccgcgctggacgtagccaccgccgtcttcgtctccggagcggcgcgactgggcctcgttgacggtgatgttgcggccgtcgagctccttgccgttca

SEQ ID NO: 35404 - DNA, 421 bp, Oryza sativa
  Clone ID: uC-osrocyp015c04a1
gttggtcgaatatggtctacaatatatgactgtcaaagaacaaagtgtaaaagatacaggtacagttccagtgttacaaagaaccaaggaagagctagacctatatctgtatgactgtatgtatggctatgtatcactcgcttgctctgtacaaaagcaggaacaaattaaacaatagcggcacaaaacgaatcaacgaatagtgtgtttcgactgaatttcactccctagacaaaaactctctgacggatcggatccatgcagctgctgaattacgcggtgagaagccggggcttcttgaaggcgagggggctctggacctcctcctcctcgtcccacattttcttgcccttggagcacggccgccacacgaactccggcacggtcgggaggttgaggtcgaacgcccgggtggcggact

SEQ ID NO: 35405 - DNA, 358 bp, Oryza sativa
  Clone ID: uC-osrocyp015c05a1
gttctatgttggccccgcaatttgagccactggactaaaaaatggaaataggcccttctggacaaaaaaaaggaatttacggccctgtcaggggctctttgaaaccccaatgggggggttacctacccaaccattcgggaaaagattccctgcccgggggtaatacatggccttatgatcttatattaacaagaaagtttcagtttttgggtacccattttcctccttggacagaaaaatttttttttggggccaactaaattgccccactggaactaatcccggggcacctcatgcaaaaataggggtgggtgcgcaagtagaaaaaccccccatggtcttgcccattttcattttg

SEQ ID NO: 35406 - DNA, 406 bp, Oryza sativa
  unsure (1)..(406): unsure at all n locations
  Clone ID: uC-osrocyp015c06a1
ttttttgtgtttttaatttttttggtttttttttttttttttttttttttttttttttttttttcttgttttttttttttttttttccattttttttattaaaaatcattttgtctttattaattcataagagaggggtcggaaaaccaaggaaaacacaaaagggggggggacagagggggccaaccccacaaaaaaacccctnnncagggggccccccacaaatgtaaaaaacaagaggggggggggggggtaaaagacccgaaaaaacccnnnncgggggggctgttcgcctccctccggggaccaccccccgggggcaacgccagcgccttctccagcgaaggaggggggtgaaaaacgacaaacacaaaggggggaggcaacccccgggcccggggccaac

SEQ ID NO: 35407 - DNA, 498 bp, Oryza sativa
  Clone ID: uC-osrocyp015c07a1
gcccgccgtcgctacctcctcctcgagccagcggccggcaccaccaccttcccacggagccagcgaccggcgctatgttctcacggagccgggcgcggtgccatcttctcgcggagtcactggcccgcaccgccgctaccttcttctcctcatagagccagggatgtcgacaccatcgccgtctgtgtccgcttcttcgcacagctacgccagcttgcggccactactacaccaggatttgggtgtgggtggagcaagtgtgccagccactgcaccgccgtccactcccatgagaaagtcagctccatcaagatgaacgaacatccagccacttgcgcgctcctccatttgctgccgtatgaggatgaggcaggcagctccagttaggtcactactctgctgaaaaaagaaaactgagtcctgaagaaatgcacagactgttttacaaggcaaacatattgaagggttgttctatctcgaccaaagtttctcagatta

SEQ ID NO: 35408 - DNA, 341 bp, Oryza sativa
  Clone ID: uC-osrocyp015c07b1
caaaaaaggttcaaaaggggccaaaacggaaaaatttcccatctttaaaaagacccctacaagtatgaaggcgaggcccgtcttatcggaagacgccctcaagaagttgattccaaaaccaacccatggtttgattccatcccgattaattaccagttttgggaatggcaaacaaatgggaaaaaaagccatatgagccccttttggatacctggttcgcccagaagggacccgccaatagattgaaatcctcatcaggggcggggggggccgtcgctctcaccccggatttggaggggacccgggttggcacggtgggacacaagttggcgcggccggac

SEQ ID NO: 35409 - DNA, 415 bp, Oryza sativa
  Clone ID: uC-osrocyp015c08a1
tttttgtgttttttttttttttgggtttttttttttttttttttttttttttttttttttttttttggggacccacgggggaatttcccgccgctttgtttttggggcctctaaaactcccaaccagtggcccaataaattggggctagtaaactggaagccccccttttggtttcccatcccgcccttttttggggacataaatttttggcccctggttggcaaaaataatgggtgggggggaggacaaaaccccaaatgtttttttttcaaagcccctaaggtactgggggaaaaaataaggggaccgcccgcccaccgaaaagaaaaaacgtcagggtggtgtttttttttggccaagctattgggggggggcactggaggaccccgccttttgaagcttcaaactgggggt

SEQ ID NO: 35410 - DNA, 463 bp, Oryza sativa
  Clone ID: uC-osrocyp015c09a1
gaaaaccaaaatttagttgctactattatttatttctatattttacacaccaatctaaaatactattgttcctcacaaaattaaagcttgcaaagtcacaaggatacaagatccacacacacaatcccacaaactttacacaggcactttgcaggcttgcagcacaacgcccagttgcagctcaaaagcaagcaaggcaaacggacgtctggcccacatgtcagcctcacagtgaaggtgaaacaccatatggcatagtgcagagttcagacttcagacaagctcaaacattcagagttcagttcagcaagatcgtcagtcgagcagaagagaggcctgcctgaccaggtggcctctgcgctcgaacacctgcctcctgcgcctctcgaggtccctctccacggcggcgatctcctccatctcgcggtcgcattcggcgatcatcgccgcatactgcagctgc

SEQ ID NO: 35411 - DNA, 303 bp, Oryza sativa
  Clone ID: uC-osrocyp015c10a1
tttttgtttttttttttttttttgtttttttttttttttttttttttttttttttttttttttttttttttttttttttaattttttatttttttttttttttttttttttaatatattattttttttaaaattttattatcttttaaaaaacaaacaaacgggggcccctggacaacggggtcgtccccggcgaagggaaacccaaggggcagcctgggaacttggcggcccggggggagacaaaaaacccggggccgcccaaaaccagggggccgaacgggaaaaaaaaccccgggaggcc

SEQ ID NO: 35412 - DNA, 509 bp, Oryza sativa
  Clone ID: uC-osrocyp015c11a1
gttgaacagggtgaaaaaaaatatcacaatatcacgtccagtttgcgcgatgtatcgcaagcaaaaggagccaatgcaaccaagtcatgcattacaacccaactagacaggcctacgagcttaggtgtgttttcgtatgacaaaacttattacaacgcgcaaggtcctagtatcccggtctcttccaaaaaactactagctgctatctctaaaagcagggcaactgttagcacatgcggtttcacttcttgacctcctcgtactcagcctctggagcctgctcgcctccgccctgagatcctcctgtctctgaaccgcctgcgccaccaccaccaccagacatatgctgcccaatctttgaaacagccttgttggccgcttcgatattggccttgatcttctcgatgtcatctgaggtcatcacagagcggagatcggcgattgctgtctcaatctcagtggcaacctctgcaggaatcttgtccctgtactctcccagacttttctca

SEQ ID NO: 35413 - DNA, 397 bp, Oryza sativa
  Clone ID: uC-osrocyp015c12a1
tttttgtttttttttttttttttggtttttttttttttttttttttttttttttttaggaaaactggtcatgggtattttttttacccatgaaacacacaaacagccttcaatttgatgtaatcgatcgaactgggtttttttatccttaccacgcaacaaaacccaaaaattaaagctggtaattcctttaatttctcctagctaaaaaatccttcacaactttaacttggtcaaataaacaatggcgccatggggatcaaaaaaaccaggtgtcaatgggcggctccacctcctcctggtgccttcctcccggggggaaccttatcccgttgcccccccccggggggaagggaaaagaataccacccccacctgcggaacccaccgcccgggttg

SEQ ID NO: 35414 - DNA, 397 bp, Oryza sativa
  Clone ID: uC-osrocyp015c12b1
gaaagatcaagatttatatcaagaagagatcgagaggatcgaagctgtaatctccgtagagatggcggcggcggcaatggatgactcgttcaggagggcgggggcgataccgttcaagtgggagatctgcccggggacgcccaagcacgccaggagcgcgagcgcctccgcggcgtcggcggcggtggtgtcaccggtgccgccggcgctggccaaggtggcgacgaggcagcagctggcgctgcctccctgcatgacgtcgccgcgcgcctcgccgtcgccgtactaccactccccgcgcctctcctccgccgccgcgtgcaggtcggcggcgtcggcctcgccgtgccggagcaggtacgccggcggcggcagcgcgtaccgtccccgccccacc

SEQ ID NO: 35415 - DNA, 427 bp, Oryza sativa
  Clone ID: uC-osrocyp015d01a1
cacaaactgccacagaaaatgcggcactgtacaccacactacacataagcatcccacaatggcgaggaagcgcaatatttacaattttgttccttcccgtcacgccttggagggtacacggagtgaaggaaatacaagtaattttttcagtacttgaaaacgaaaagatcccgataaacggagcaggaaggacctagtaaatgctaccatagactttacttattaatctggcttcaatccaggcccttgcaaagctatctacatgaagccatccagatgattatttacaggtgatcatgtagtgtccagctactcgggtcgaacgcttatcaggttggggagcaccgtcgcctgcagcttcttcacctcacttgtcgtgaccctgcaggaatcaagcgacagcgagcgcaggttctgcagatccttc

SEQ ID NO: 35416 - DNA, 294 bp, Oryza sativa
  Clone ID: uC-osrocyp015d01b1
tgcaatctcctccgtcgcggtcgcagctgcgggagtgaagccgccccgcggagctagctaaaccctagccactgcccgggcggggagctggggtttgggttggtggcggtgggccggtggcggctcggtggcggagctccggtgtggggtggtgtggaatggagtggaagttcttcagcgatttgccaagatccagggtaggacacacctggttgcacgggtggtccacggtcaccatggcaggggcacctacagagtcttcggagagcatagccagggggctgggcactgttg

SEQ ID NO: 35417 - DNA, 375 bp, Oryza sativa
  Clone ID: uC-osrocyp015d02a1
atttgtgtgaaggtgtgcgcgggtgggatccatcaatgaaaatcgatgaacatggggggacacagtgagaggcgctcttattagcattacgtggctaaccgtgacaagctttaacatgagtaatctgcatatgaaagccaatgggatcaaagtgggaaccatagggaaccatagcataacaaacacatgaaagctcgacaccgtctggcaccttcaggaaggtacagagaggattctcaacctgaactatgctggactcagctgggaccattgccgacctctgacgacaacggaaaacaatgggcacagttgcacgcacctccagggccctaatgctgactataccggatgatcctgcttgaactggctggaact

SEQ ID NO: 35418 - DNA, 391 bp, Oryza sativa
  unsure (1)..(391): unsure at all n locations
  Clone ID: uC-osrocyp015d03a1
ggaaaccaacaaagaaatcataatattggcaatccaatcatcagtctggggggggtgaacaatccctccatatacctttcgggctggaaagggtacaggaaagctttttgccaacatccccgtaggagtagggatggatcaatttatttggcccgactttaaagaattcaacaagctagtagtcaccctgatattcccggagctttattgttcgggtacagtttcaggaagagagagcgtgttggaacctttgtacttgctttgggcgggagtgttccggcgagattgacccttggtcggnacgatcaccttcttcattccgacattcttggatattgacatattggcctcctcctccctgcctttgaacaccgggggccggtacccattg

SEQ ID NO: 35419 - DNA, 367 bp, Oryza sativa
  Clone ID: uC-osrocyp015d04a1
ggccccttcaatgctaatgatttccattaagcaattttccaaaatgacaatgcacctgacaaggtacattaaccacgatacattatttgaagaaaccaaaccaatattttaaaagccaaacttttttgttcaagtgataaatgggcaagggcataattcctttgcataactaacatgacttgggggctacatatttcatactacagcatcaaaaatttgcaaaaataaacttggcaaggcccaacactccaaaatatgctttattttaacacgggcaaaggtggataattccataacctcaaaaaccgaaggaagaaaccatccattttgtctgccattggacaagcatttaccttcagctggtggg

SEQ ID NO: 35420 - DNA, 435 bp, Oryza sativa
  Clone ID: uC-osrocyp015d05a1
atggatgaatataatatttcaaggtgatatggatacttccaaggctgaagaatgtcattgtttcttcaaaccttcaattggggggagttgatgctgatgcctaccttgaattttcatcgatttggcacccgtggaccttgatcttacataccttgattacatggaccattacacagggattcgggatgttaccacttgggtctcctgataacacaggtattcgggatgttcccaaaatatacatataatcttatttggtggggcgacacacccgtgacatgctaacgagcatccatatattcacaaattcatccttctgatgatcctagaacaatgctgtcatcttcagatggcaaatcagcttagacatcaacaacttccggttggtattatactgtttcgcggaagcgactggtgccttcaatcaatttttag

SEQ ID NO: 35421 - DNA, 433 bp, Oryza sativa
  Clone ID: uC-osrocyp015d06a1
gaatcagcctccaacatactttaaatcatagaccacaccatacagaaaacatagtataaacattgacatagagaggacagatgaaaacagctggtaatattttagcattactttgggagcagccctttacaaaacatagcagacatcaccagcttttcattttggccatacacattaaacatggtttgctagggacagaccacactgaccagaacatttcgtctcctcagtaggcaccagctgccatgagcagctcatcaagggtccagatgccctcgttgcttgccccggcttgggtagcatcattttgcagaagggtggccattgattcatctgagctgctctcaacataaggtaatggcaaatacttcatcttgggatcgaaggtgggcatgttttgtgcgagattaggcatgccatttccctggggcac

SEQ ID NO: 35422 - DNA, 470 bp, Oryza sativa
  Clone ID: uC-osrocyp015d07a1
gtgcaccaactattatcagtactttgcttttatggcaaatccttttgtcatttacatgatagctacatatataaagtacatagatatatactagctccttatcattaaagaaaaggactagatacgtacttgatcacttgatccctacccaaatactactactcttgcatccttgcagagtcaaactcagaactactaccttttgacttgacctaatcagggatcattactaagtaatcacctaatcccctttgattaattaatttatacatcacacacactctccttaattaggtggggactcatatacatccacccttactaatatttttccatccaaggaaaaaccataaaaaagaggttaagactaggttaaatgattaataatccacctaatatactagacgtgtggttcgaacccacatgtcagtgacgcatattgacctcgtgaacacccttctcctgctgct

SEQ ID NO: 35423 - DNA, 474 bp, Oryza sativa
  Clone ID: uC-osrocyp015d08a1
gatactacaattaataacttcacatatttctcacattttctcttctcatacatcctgcagcattggtacacagtgtcggttacattgcagaagccagacattacaggggacggcccaacctacagataactctattttatttttcaaatttattctccactaatctacatacataaaataattcatgtctctggtagtttgcaagctagcagtacttgtaaaccacattattgaaagggactaccgctgctttaaataataccgtcatggtctatacatatgacatgtgcatagatgtatggttttgaatagaaccctgatgaaccctgaagggcgttagagtcttgattttgctggtgagcccatcacaatcatcactttaccaacggccttcctgtctctcagggctgcgaaagcgagatgtgcctcagggagcctgtaagtgtgggaaatctggattttatcacccctttg

SEQ ID NO: 35424 - DNA, 534 bp, Oryza sativa
  Clone ID: uC-osrocyp015d08b1
ccacgctggcccccggcggcgaggcctccccgttcgcgccggtcaccggggaccacccggcgccggcgctcgcgtcgccgacgtccgtgcgggtgcgcgtggcggccaccagcctcaacttcgccacctacctgcaggtacagggcaagtaccaggagcgccccgcgctaccgttcgtcccgggctccgactacgcggggttcgtcgacgccgtcggccccgccgtgcggaggttccgccccggggaccgcgtctgcggcctcgccgccgtcggctccttcgcggatctcatcgtcgccgacgagaagcagctattttcggtgcctgatggatgtgaccttgttgctgctggagcattgcctgttgcatttggtacatcgcatttggcccttgtacacagagctgaactaaaggctggccaggtgctacttgttctgggtgctgctggtggtgtcggggcatctgctgtacaaataggaaaagtttgtggtgctgttgttattgcagttgctaggggaactgagaaattgcagt

SEQ ID NO: 35425 - DNA, 219 bp, Oryza sativa
  Clone ID: uC-osrocyp015d09a1
gaaactcatccttgctaataaaattggcggtgttcctgtctctctttggagcaaattacacggaaaaatacagaaaaagctgcagctacaacaaccattaccaaaccggggacataacatttgaactcagcattttggactgtcatggacctcctaccaagctaccgctaatctaattattggtatttttcatctgctaacttccttactcattgtagc

SEQ ID NO: 35426 - DNA, 493 bp, Oryza sativa
  Clone ID: uC-osrocyp015d10a1
gctgaaaatcataatcttttacatgtatgatgtattccatttttacaggattctttaccccctataaacccccacctgctaaacttaattatattacatttcatgctatacccccctcttctgtaccaaatgcaactacagctaacaatttccatgctttctgaggcatgttattctggcactacaaattacaaatgctccccccaggcaaatcttgcctccatgtatttttggtattttgagcatcttaggccacaaaatcatgcattagaggcgacggttcgaaccgttgcctttgatctatttggttcgtggattcgtagtccgaagaggaagctgcagcgacaccgagagaagcggtggagttgtaaatttcttctccagcaccggcgaaacctggctgatgagtgttctgtaccgaaagcctgttgtcaggatgctgtaagccaagtgtcaatgacacattgctgttcccgtatcttccgagccccga

SEQ ID NO: 35427 - DNA, 337 bp, Oryza sativa
  Clone ID: uC-osrocyp015d11a1
aggaacaactgacaagggcagggtttttgcaacaaaactaccttcaactgatcacaggcggcctggagttcattcctgcttgaacaacaaagggccagagatcattctacacacccagaacactgaagcacttgccatgcaggcagtactttttttttatgaaaagatgataccgatcagttgcaactttgttacaccccccccatgtacaacgaccgggcaccgaaacattattctaatgcaaaactgggaggattgcaagggcgctttcaaccttgaagggtggaccacaaattttttttttatttggaggaacagcagtcaccttgttctttgg

SEQ ID NO: 35428 - DNA, 486 bp, Oryza sativa
  Clone ID: uC-osrocyp015d12a1
cttagaaaagccgcttgctttgccgccatggctggcaagctgagcagagcagctaacacaaagaacacgagatcactataaaccaaacggcaacgaacgaagaaaatacagggtcttttttgtctgaagatacacgaagcggttcgttttcttttatttttagtctcctctcctcctcgatgatgggtgtatggcaatggcaatggcgatgggatcttggcttagttgatgggaaggggctcgccgttccactccttgaggcagtcgagcatggggtcgatgagcttgccctggctgatgccgaggaacaccttgttgcactcctcgccgggggacttgagcttctcgccggtgaggaatacgcagccgagctcctcgcggacgaagcggtagagcgggaacgaccggctctcgacgatccggttggcgacgggggcggtgccgttggcgacggcgacgcgggcggactcgatcttccggggcagc

SEQ ID NO: 35429 - DNA, 497 bp, Oryza sativa
  Clone ID: uC-osrocyp015d12b1
agtatcgaatcctctcttctcctcgtgcccaccaccaccaccgtagcaatggcgggcaacgggccgatcaacatggaggacccgctcaactggggcgcggcggcggccgagatggccggcagccacctcgacgaggtgaagcgcatggtggcgcagttccgcgagccgctggtcaagatccagggcgccaccctccgcgtcggccaggtggccgccgtcgcccaggccaaggacgccgccggcgtcgccgtcgagctcgacgaggaggcccgcccccgcgtcaaggccagcagcgagtggatcctcaactgcatcgcccacggcggcgacatctacggcgtcaccaccggcttcggcggcaccttccaccgtcgtaccaaggacggccccgccctccaagtcgagctcctcaggcatctcaacgccggaatcttcggcactggctccgatggccacacgctgccgtctgagacggtgcgggcggtcatgctcgtgcg

SEQ ID NO: 35430 - DNA, 426 bp, Oryza sativa
  Clone ID: uC-osrocyp015e01a1
ataggatcaaaacatttctattaccacaactttttaaggatggaattgagtagcaatactttcaccccaaaatacagtttagcgacaatatcttagaaaagccgcttgctttgccgccatggctggcaagctgagcagagcagctaacacaaagaacacgagatcactataaaccaaacggcaacgaacgaagaaaatacagggtcttttttgtctgaagatacacgaagcggttcgttttcttttatttttagtctcctctcctcctcgatgatgggtgtatggcaatggcaatggcgatgggatcttggcttaattgatgggaaggggctcgccgttccacttcttgaggcaatcgagcatggggtcgatgagctcgcccctgctgatgccgaggaacaccttgctgcactccctcgcggggga

SEQ ID NO: 35431 - DNA, 221 bp, Oryza sativa
  Clone ID: uC-osrocyp015e02a1
gggccaccaggaccatataacggacgattgctgattactattactggttggaatgtaacacttcggatacaatagtacattacagagctagctaaatgcgaagccacaataccgtcggcgcaagaggatcctaaataaagcttacacaacatagccaacatgcaaaccattcggactgaccagagatgagggtttttgaaactggcgtggggtgccatgca

SEQ ID NO: 35432 - DNA, 440 bp, Oryza sativa
  Clone ID: uC-osrocyp015e03a1
gtgacgaaaccagatgcgggacagattttattatatgagcactgttatgcagactagctcacttgtcttattcagaaacaacaaaatagaacacagctctatgcacagcttattttccgatcaaacaaggaggatcaaacaggccagatggagcatatatacacctcactctgttccaaggagggcaaggagtatatcctactagtctctgggtgtatatttagcaacagctcgctccaatgggacactgattctcttctggtaggcctgctttatcagattcaggtctacctaggcacgcgatgttgtgatccttgtcagagagttctccattgggcccattcctggtaaggccaatcgaatgactttctcaaagcatgtggcagggcaagcgaagcatcttatgatcgcccttagtgaccaaggaactcggcttagga

SEQ ID NO: 35433 - DNA, 473 bp, Oryza sativa
  Clone ID: uC-osrocyp015e03b1
tttttagtgagagaccgtgattggatcgatcaccgatgcgacgatcaatggcgacgctcaccgtgcccgccgtcgtgccgaccgtatccgaggactgcgagcagctgcgcaaggcgttcaaagggtggggcacgaacgagacgctcatcatcttcatcctcgcccaccgcgacgcggtgcagcgccgggcgatccgccgagcctacgccaaggcgtacggcgaggagctgctccgagccctcaacgacgagatgcacggaaaattcgagagggcggtgatccagaggacgctggacccgacggagcgggacgcggtgctggcgaacaaggaggcgaggaagtggcacccggagggccgagcgctcgtcgagatcgctgacacgctcactgcatcagatctctttactacgacagaagcgcaccacgagcgctttaagaggtcgatcgaggaggacaccgcggcgcacattacc

SEQ ID NO: 35434 - DNA, 403 bp, Oryza sativa
  Clone ID: uC-osrocyp015e04a1
aaacctgtagggtgttcttttatttatataggtttttgagtttaaagtggttttacttcatttgttattttttttctgaaacggaaaaaaaaaagggcgtgttattctataacttgtaaaaaacgtgcctataattaataaattgagagaaattcataaacaacaggcgccaacaacttgtaaaaattccacccaaaaaacgggcgggtgaaaaactacgaagccctctggatgaccataccctctttttgggggacggttttctaacccacctttagggacctaccctgaaaagaaaaaaaatttggtttaaacccaaaggggaggcaaccccaaaaggccccaatctccccggttttggataggatctgtatcacgcgggaaaaaactccgggctcctgca

SEQ ID NO: 35435 - DNA, 522 bp, Oryza sativa
  Clone ID: uC-osrocyp015e04b1
taatgttggagtgagggatgagtgctatggcgatgtcgtcgctgaacccgaacgcggcgccgttcatcccggcagcgttcaggagggtggaggacttctcgccggagtggtgggagctcgtcaagaccacggcgtggttccgcgaccactggttcaggcagcaccagatgtacgaggacgctgcggcggaggaggaccaccaccgccaggtgttcgacgacgacctcgccgcgctcctgcccgacgactcgctcgacctcctcgacatggtcgacaccgacgacctcttctacacccccgacccccccgtccaccacaagccgacgacgactcccaccctcgacgccgacgtgctcagggcgctcagcctcaactcgccgaggttgggcggcgccgggatggtgaggcacgccgagaagccggcccagttcgtcgtcgtcaagggcggtgccgtccgccacgtcatccaccagcctcgctagagcgccatgggtgagtggtgatgctgctgctgctgctgtc

SEQ ID NO: 35436 - DNA, 450 bp, Oryza sativa
  Clone ID: uC-osrocyp015e05a1
gaaattcgggaaaaaaacacatcacaattattaccgagcacctctatgtacattgtacaggatgggttccgttccatatggacataactctccattgaaggaaaacctcaatctacagttgccctaagaaaggtcgaaagaaagggaaacatctcaaagaccgccagatccgcataaataaacagcttcaaagactgacaaactctgcaccctaacgcataaaaccggttacagtagggcggctaagccaagcgaacaacacagcagcaaacataaacatttgtgcctctgatatgtgcaagctaacggctggaaatctggaatccccttgctgccctttgggtcctgtccagatttcttaatctgcgtacctgctctggtgcataattttattctgcacttgtggtattccacctgctgatgagattgccaggtgcattgctctctcat

SEQ ID NO: 35437 - DNA, 467 bp, Oryza sativa
  Clone ID: uC-osrocyp015e06a1
ggatcattatctaaaaaaatataaattatttttttccttaatatgctgtacggcatattatcagagtatattcaaaagatgggggcctgatatcattcctagaacctcccaaaagcacattcagccatagtattttctcaccagtcaccacatcattacattacattacactacacactcgggtacattgtgtagcgtacaatgtttccttttcagttctctcgagtggtcagagaacaccatctaaacacccctaccctttttccctctttggtgaaaagaatttaaatcaaatgaatttccactagagtccgtgtcatacaccggagttagaatattagatagctgtacaccattgttaccagcaacacagccaaatgcttctgccaatgaaacctccatcctgaggagatgttgtgagcgtcaacagtgcatgccgcccctgtctgttcatccttaattttaat

SEQ ID NO: 35438 - DNA, 465 bp, Oryza sativa
  unsure (1)..(465): unsure at all n locations
  Clone ID: uC-osrocyp015e07a1
gctcccgtgcgcgaacggctgcggcttcttcggctctgccgacacccgtggcctctgctccaagtgctaccgccagaccgtgatgtcccaggcctccgcgccgtcggccgcagcacagtccgcggagcacgaccaggtggtgttgccggcgccggagggcgtacccgtggacgagggggcgatgccgccgccgccgccgcggcacggggcgaagacgaagagcaggtgcgctgcgtgcgggaggagcgtggggctgatggggttcgagtgccgctgcggtgccgtgttctgcggcgcgcatcgctactcggacaggcacgactgcggctacgattacaggggcgccgggcgcgacgccatcgcccgngccaaccccgttgtgagacccgacaaggtggagaagctctgaaaaaaaaggaaaagctacaactggtcgatcttgccaacattgccatgcccgaacca

SEQ ID NO: 35439 - DNA, 418 bp, Oryza sativa
  Clone ID: uC-osrocyp015e08a1
atcaaattattttttaacattaacaaaccggcacgagacggtgcgaatatcaaatgatttgagtcctatattgattgatgactggtatgtttccctcaacctgaaaataaacttattccagtgtctagctctattaatgcttgattgggtacacgataagagctgtcaacgatcaagcttgaagcatacaagcaaatttaactggccctggcagtgaccatggtgatgccggcgcggtggccgaacctggcgacggcgcagtcggcggagaagatgtcggaggcgacgtagcttggtgcgccgcccatgaccggcatgctggcgctgacgctgagcttgttgacgtagtcggagcggtaggtctggccgagcacgccatggacgtcgtcggagaggtcgtagaacttgaagccgatgt

SEQ ID NO: 35440 - DNA, 480 bp, Oryza sativa
  Clone ID: uC-osrocyp015e09a1
aggagattaaaatgttcatcacggaaacatgccataccatgtgctcaaatgtcgaaacaaaagcgggtcgcggaacatatcatattcgttacagggttcattttgatttgaagttttaggctaccagaaaataacatttggaagccaaccagctgacgatcgatatcagcatcttaagcagtgcgcaggatgatgtgaacaccactgtcagtgtccacagtgtcactcatctcaccaaccttgagagcaaatgtcgcatcttcgaagggtttctgcatctgcctcctcccaaaagtgcccaggtcgccgccacggcgcgcggaggagcagtcggagtggcgggcggcgaggtcggcgaagttggcgcggccggagaggatctggtcgcggaggtcggccaggcgcgcggcggcgtccgcgcgcgtggtggcggagatgacgcggtcgtctggatccttccaggaggccttgcggcgggag

SEQ ID NO: 35441 - DNA, 442 bp, Oryza sativa
  unsure (1)..(442): unsure at all n locations
  Clone ID: uC-osrocyp015e10a1
gaaacaagaacctgaaatgtgcactgcgatatatataggattatgagtataaagtgggtttacaacatttgctatatatgaactgaattggaaatattgtcttgcatcttattctataacagtactataactgcctattattaattatctagagtcattcatctgcaacagccaccaacaacttgcccacattcctcccagaaaacatgccaatgagagcctccgatgccttctcgatgcccttgacaacatcctgcaggacggtcaccttaccttcctttagggacctagccatctcatcctcaaacctcgggtataagccgaagtggttgaatacggcaaatccctccacccggatggtcttggataggatctgtatcacgttgtgcatcccttcgggctcctgcaggttgtactgtgagatcatnccacacaccaccac

SEQ ID NO: 35442 - DNA, 348 bp, Oryza sativa
  Clone ID: uC-osrocyp015e11a1
accgggaaaaggtgaaaacaaacccccaaatagcggaagcccatgggccggagatgggttacaaccattcaaagggcacacatttttttacataaacgggtcaacaaaaaaacagggggcgccatgtccgtaccccggcagggagtcccatccgatccggccattccatgcacaaatggggcctgccccgttttttaaggtttttttacagagccccacttgcagattccggggtggtttttttttaccggggccctccaggacgggaagaacttcctttggggctccaggacgcttttttgggggaccaccccattgtcgcccgattggtgtttcgcgagggggctg

SEQ ID NO: 35443 - DNA, 490 bp, Oryza sativa
  Clone ID: uC-osrocyp015e11b1
ccactggtgaagagcatcaatgtcagtgggcacaagtatggccttgtgtatccaggtgttggttgggtcatttggcgaagcaaagaggatttgcctgaagaactcattttccatataaactatctggggacagaccagccgacgttcactctgaacttctccaaaggttccagccagataatcgcacagtactatcaactaatacgcctgggattcgagggatacaagaacatcatgcagaattgcatggagaacacagcaatactaagggaaggcatagaggcgactggtcgattcgaaatcctctccaaggaggccggtgtgcccttggtggcgttctcgctcaaggacagcggcaggtacaccgtgttcgacatctccgagcacctgaggaggttcggctggatcgtgccggcgtacaccatgccggccaacgccgagcacgtcgccgtcctccgcgtcgtcatcagggaggacttcaagccgagcc

SEQ ID NO: 35444 - DNA, 485 bp, Oryza sativa
  Clone ID: uC-osrocyp015e12a1
aagcgcggcaataaaacattgcattgaattctgaacgataaacaccaggaaccggcgtttatttgaggcaagcactgcccaaaatctcgcaaaagtactgaaaccttagacatagtacacatccatggcaaacatggatgccaaatgacaactacagaaaattatcaaattcgaatgcagctgacggcttctcctgctgaagatgcatattttcccctccattacttggatgtgctctctccatcgacagccaatgggacggcgctggccaggctgcggtatttcagagcatagaacatctcaatgtaacggcgagtctcgcgcctctcaaggttgcttacgtacttccagaatccatatacaccagtcaaggtcatcagcctctcagagtacagcttccaggtgtacttctcgtaaatcctctgcagacctccctgtgaaatattgtcccagtaggttgaatcctgcttgcactttctcaagaa

SEQ ID NO: 35445 - DNA, 286 bp, Oryza sativa
  Clone ID: uC-osrocyp015e12b1
ctttaccgagttgtgcttggcatagagaagctcctcaattaactgcagattattgagaggtaagccgcctgctaaacgtattcagaatggtaatgctttttattatggacgtattatagctgttttatcactccaccaacagtttttagaacgcttttcagtaattactccttcttgagtgctcacgattccgcagattgaagtctcaacagacacacactgttgttctttgtgatccaatctaacatatcaagagtggaagacatagatatgtgccatattctat

SEQ ID NO: 35446 - DNA, 323 bp, Oryza sativa
  Clone ID: uC-osrocyp015f01a1
gtgagggggaacccccgggccccaaaataggcccccattttttggggaaaaaatttacattattagggggcgccaatttttggggcccaccaataaaggaaatttttcttgaaacaaaaaggttcttgggaaaaaaagggcaaaaaaaaactggttacaaaaaaaaatatacagggggggaaaaaaaaaaccctttttattgggcacttttagggggctttgggggacctatttatctggaaaggggggggttttggtcaaaagagcccccgggggatgggtggaatttaatagggcacttaagggcgggggttgggggcttc

SEQ ID NO: 35447 - DNA, 418 bp, Oryza sativa
  Clone ID: uC-osrocyp015f02a1
ggtaaaacgaaacgcaatgctaatgcgattagcccataacgaacttgaacttagagttacacaggccgcggttcaaacacggtggggaagaacagtctcgggcagaagtgtagaaatccggcaaatttctcaatcatcctaaattgggaaatcttattaagtcaccacgagctgacgaccagctcattaactatcagggccagcaatatgtacttaatgaaggacgggaaaagcacactagaggagttcgaatcaggaggcctgaggtggctgatccccgagcagcagcgacttgacgatggtgtcggccatcccgtcggcgagagggaacatgtggccggacttggggagctcgtggtagacgacccaagggagtttctcgctgaggtacctggacaggctgaccggcacgatcaga

SEQ ID NO: 35448 - DNA, 467 bp, Oryza sativa
  Clone ID: uC-osrocyp015f02b1
ttgtcgcgtgggtgttgcttggctcctctcttctgccactccctcgcgaactcgatcgcttgctgcctttgctggccttggcaaccgccgcatggcggcctccggcgtgaagcggccaccgaggccggccccggcctcctccggcgtaaggaagctcattctagctctggccgtgttcttgccggcgctgctgtacagtcagctccagcctccgcctccgaagatctgcggctccccgggtggccctccgattacagggacaagaacacggctcaaagacggtaggtatttggcctacctggagtccggcgttccaaaggagcaagccaagtacaagatcatctttgttcatggattcgactcgtgcagatacgatgcactccctatttgcccggagctggcgcaagagctgggcatttaccagctgtcctttgatcggacgaggtacgccgagagcgacccaacct

SEQ ID NO: 35449 - DNA, 378 bp, Oryza sativa
  Clone ID: uC-osrocyp015f03a1
gtataggatcaaaacattggtattaccacaactttttaaggatggaattgagtagcaatactttcaccccaaaatacagtttagcgacaatatcttagaaaagccgcttgctttgccgccatggctggcaagctgagcagagcagctaacacaaagaacacgagatcactataaaccaaacggcaacgaacgaagaaaatacagggtcttttttgtctgaagatacacgaagcggttcgttttcttttatttttagtctcctctcctcctcgatgatgggtgtatggcaatggcaatggcgatgggatcttggcttagttgatgggaaggggctcgccgttccactccttgaggcagtcgagcatggggtcgatgagc

SEQ ID NO: 35450 - DNA, 534 bp, Oryza sativa
  Clone ID: uC-osrocyp015f03b1
ctaccttatgctccggttcttgttcagtatcgaatcctctcttctcctcgtgcccaccaccaccaccgtagcaatggcgggcaacgggccgatcaacaaggaggacccgctcaactggtgcgcggtggcggccgagatggccggcagccacctcgacgaggtgaagcgcatggtggcgcagttccgcgagccgctggtcaagatccagggcgccaccctccgcgtcggccaggtggccgccgtcgcccaggccaaggacgccgtcggcgttgccgtcgagctcgacgaggaggcccgcccccgcgtcaaggccagcagcgagtggatcctcaactggatcgtccacggcggcgacatctacggcgtcaccaccggcttcggtggtacctcccaccgacgtaccaaggacggtcgcgccctccaagtagagctcctgaggcatctcaacgccagaatcttcggcactggctccgatggccacacgctgtcgtcggagacggtgcgggcggccatgctcgtgcgcatcaacaccct

SEQ ID NO: 35451 - DNA, 452 bp, Oryza sativa
  Clone ID: uC-osrocyp015f04a1
gacttacagcatacacattaattcttcaagtctcaacttggattacagcgagattaacgtgcgctcctccctaacacctctacgtcacatcccgtagttaaccggacgtagagagagagagagagagagagagagagagagagagagagagagagagagtacatctattattcagatattattccaatgtgtttctggacaagtagcctaaactccgatcagtctcgagaagcctgcccgtgtgtgcaaaatccagaaatcacccaggacaaatttacatgatcccaaccgtatttgaggccattaacattgattaaagtcaaactatggccgttccgactccgaaggcgctatcatagttcctcaccatgttcttcgtcgagggcataccagcaacaacatcttgttcgatgccacattcgtttgtgccccttatgatcttgaagtaccca

SEQ ID NO: 35452 - DNA, 395 bp, Oryza sativa
  Clone ID: uC-osrocyp015f05a1
ggttggacacaaaatcaccaggtgatttatgacactcaaactgggtctaaacccaggaattgccaatggggggccggtgagatgataaaggccaggaattacttttgacgaccggcacaaaggtcatttgggtatcttattaagcggttgagctgcattacactgaaaaagttttttatttcaatgcatgcacttccagtttgaagttgcttatgataagatgcataggaatgtaacaatacactggaaagttttttgctgactttgcctgcccaataaaccatcaaacgaacattattacaacttcagggagctcatcggtggaagaacagaaattgtggtagatctaattaagcacagacaaaccccaagtcctgacctcggatctagtgggg

SEQ ID NO: 35453 - DNA, 490 bp, Oryza sativa
  Clone ID: uC-osrocyp015f06a1
gtagcagaaacgtagcagggagtcacgtttagatattttagatacaggcttcaagatagaatgaacatgaactggcatcactgaagcacacagcagcgaagccagcaaaccacccatcaagcagaacgaacattcagctgctaccgtcagtaggacgcgacgcagttgggtacacctgagaactcgcaaacccgacaaaagacgccacccttccgaatcgagtccccttgcgcaacttattctagttcttctttggcttcaccgggcccctgggtattttgctcaaaaccttggcatccagcacctcatagtgcttgcaggcctcagagtgagcccttgcagcaaaggggacgaccttatcctggtacttgacatacaagatcggcaccgtgtggagcatcaggacggcaacatatatcaaggtgaggaagtcgcagcagcttcctacttctgagagaacccagagagcaacaatcacgcccagaaactt

SEQ ID NO: 35454 - DNA, 356 bp, Oryza sativa
  Clone ID: uC-osrocyp015f06b1
ttctttcgtgctatgggtggcggccatatcctatccgatttcaccggagacagggtgcccgcgggggtgaacccctgcgggctactgcgggtgaggtgcgttggacgcgccgtagacaggagaactacccggcaacaccagcgccacctcgacttagaaggtgtgttcgagatctccgaggacgacgacgacgacgatgagccggagctttacgatgatggggaagaacacctgcccgcacaatgcttttggtggcgcaaaaactagggaggacctatgttggaatgacaagaagacatctgctgtagctacaggccgcggaagcgcgatatggatgttgttcgcggtgcttgatt

SEQ ID NO: 35455 - DNA, 446 bp, Oryza sativa
  Clone ID: uC-osrocyp015f07a1
tttttggtgccaaaatgcacgagtattttgtttgcaacatcgttccttcagcttgctttacaacaaaatttgagcctatgaattgaacgaatgacgacgaatcctttacaacagcggactcaactctcaaattcgagctccctctacatacatacaagaaacaacaaacaccatggaatccaattacaaactgccagcagcaacaatctacttgaagaatatgcccttccttcttcctttactcttctcaactgccttcattctgaacagcctcaagattagaacaatggtatctcgtgatggcgcattctctgcaggcttgagattgtattcagcaccatcagcagccaatatagaaaattcagtaggacgcccatatgggatattgatagcagtggcttgctggaatttttctgtaataacaacaccacgctggccattacact

SEQ ID NO: 35456 - DNA, 431 bp, Oryza sativa
  Clone ID: uC-osrocyp015f08a1
ttttgggttgtttctcgaaggagatcgggatatttcatatttctggtgaattacatcatatccacgcttacatcagctattactatcacggaacccagcgccgcactaactgcggcagtaattctggttaattttttctgcgaaaggaagataaaattgagccatacagcaagattggtatgatgttttccattgttacatccacacaaagacaagaagtcgatatgagtcagaactataccctgtatacatatgcccccctaccaaaatcttatgtaccgaaactttgctctaaaaatgaagcaacatctaccctaagggggcattcacacccaacttaaggaaattcaatagcacgcaccattggcccaaagcatggtggaaaatcatgaaaaaattgcattatgaaccatgaaatcaagggcactttt

SEQ ID NO: 35457 - DNA, 484 bp, Oryza sativa
  Clone ID: uC-osrocyp015f09a1
tttttggttttttaaaatgtgtctgtcaatatggcactttcttgtggggaataggatttatacagaaactgaaaacaacagattggcaggcagacacagacacaatgcagaggtggttgctacggggatggacctcacccaatattcgttgggttccccactttcacaacagattactccagatcaccaacccattaataacttctccatatttatatgcaaatgcaaccaacccccaccaccagtgaatcattaggtaccttattgtagtcaaacgattggattgatgggaaacgctaaccgaagctgattgacacaggtacatagcggtaagggatgggtaaagagtactatttgacgcaagtacagtaaaccggatttgggtgcttcatactgcataagcaatcacacgcattcatctatttgtatgtgaagttgatgttatgctcgggcccgtacatgcagccaggtacatgaccagcca

SEQ ID NO: 35458 - DNA, 473 bp, Oryza sativa
  Clone ID: uC-osrocyp015f10a1
tttttggttttttttttttttttggagcccaacatagggtgtcgataccaaatttgaccaagagcaatataggaggttccgactttgcaatctgtcatcgttgccgagcttaccgccaagcgacacagcagctccgactttagaatacaacatcgatacctaacacgctgccataatgatcaagcggcctcaacatcccacaatggacatcagcccaagctgcctaagcgccacatcctattcatgttcagcaacaacacccctagaaagaaactgtagtgtgtcatcgttacccagcttcattaccacaacgaagcagctccgacttcacctagcaaaatcaaacaaggagcaaaggtcgcccgccgcgaaacaaaaagtgaaactagaagagcaaaggcctcgtcgaaacctaggactaaaaagcttcgaagccaatgcaaagaccaacgatatccttgtacgagaaagct

SEQ ID NO: 35459 - DNA, 488 bp, Oryza sativa
  Clone ID: uC-osrocyp015f11a1
gttacaaacgaccactttacaagacaagtgttaaatggttaacatagttaactcagtctaggcattaatccaggaatgaacaaagggggaaagggaggattatgtcatacaagaattacttctgtttactggtacaaagaacggctagctaccctattcaatgattcatatgcattacattgtacattagctatctttacaatgctgagctgcagttggtatatggtttaataggggcccccgagtttcttctcctcacatgaaatccatggagtcgtttagggactgaccactcagcgactggccgccatttgatgagctctgctgatggcttggatggcgttgctgagcatggtggccgcctaaataaggcatctgttgctgctgctgctgctgttgcgtgtaatagggcggaatctgctgttggagtccaccattgaagggattcccgttcatgtttggagcttgccctgctgctatcttaagtc

SEQ ID NO: 35460 - DNA, 367 bp, Oryza sativa
  Clone ID: uC-osrocyp015f12a1
ccccaaaaataaatagatggatccacttgaccctatagttggctgtataaaatatggattcatgtccaccgggccagtggggctccaaaaatatggattcatgtccaccgggccagtggggctccagtaacactgataagcccgttaaatacaattgctggggggactatttgggttttgattagttataatcgggcacagtagacaattgcaatttatttccaaaaataatgactcaggggaactcaaatgtcccccttgcgtaagatttggagctggagtttccctggaaatagctttccaaagtccaaactgggcgtccactccatcaccttggcaaaatggcagtgtcaaaccccaccttttt

SEQ ID NO: 35461 - DNA, 407 bp, Oryza sativa
  Clone ID: uC-osrocyp015g02a1
gcacaagaagccaaacgtgagagcttgtacaaaacttcagctctcttcaatgttgactacgctaattaaaattgtaactccataaaaactcggctacgccgagaaaactgtaattacaacagatacggcgtagccaattcacgcaatgcgcacccatacggctacagtatggttcatttaacgtctgatagacgatttcttaaggtgctgccgcaggtggcgacaaatactgaaaacagcgaggtaatccaataaagaaataacattggaaatcctctccagcggcaacccaagtctctaaatgatcataatcactcgagttaccctgcaacgcaatttgtacccgggttgcgaacgggcagttccatttgtagaattggaggtggtggtacgggcaaaataacaac

SEQ ID NO: 35462 - DNA, 342 bp, Oryza sativa
  Clone ID: uC-osrocyp015g03a1
agtagtagtaaaatgagcacctctgtttttattacattaagaacaaacaacagcatcgttcaaaataattaagaatctatggatcacaagatctaactctggcacctaagatttctgtggatttccacggttctaagtggtattttctacacatttcataccttgagcatcgataacaacaacgaaatgctgatatgtaaaaactcatgatgctttggcccctcggaggtaaacaaaccagggcgccagacatcatgatggtacatcatgtacaacaccaaccaaagttcctgcaagttatcggaaatactcctgaacctgaagtgcttttacaggaagcga

SEQ ID NO: 35463 - DNA, 408 bp, Oryza sativa
  Clone ID: uC-osrocyp015g03b1
tcacctttcttcctcgcgcaacagcagcggggcgggggcggggcgcggcttggcgcgacgccgagtggtgcatcccgtgatttcgccgacgtattcgccgtccgcggggcggggggcagcagcaggaggaggaggggggaggcatggggaacgcgagcgggcgggaggaggaccccgcggcggcggccggagagggggacgtcgaggactcgtcggtccggtcctcggagcgcggcttcccgtcgtacggtggagggggcaaccacgtgcggcgcgcgtgctcggtgggcgtcgtctggggcggcggtggcgccggatcgccggccgggagccccggtcggtacctctcgccggggatgttcgtttcccaaacacctgtgccttcactccaaagagcaactgatgtaa

SEQ ID NO: 35464 - DNA, 431 bp, Oryza sativa
  Clone ID: uC-osrocyp015g04a1
tggagtctcgcgtgcggaggcaggcaggtgccgcaagccggagacggacgacgctcttgacgctgccgttgagcaggcccagcgggagctctatcttggcgagggactccgagaactggtgcatgctcttgatggacatgatcatgatcttcttctgggggaccttgacctcctgctagaggttgacgcggatgaccggtggattatccaccgagcttttggacatggcgccaggggagttcgccctcgggctggcgctgctctggacggtgcggaaggactccaccttcgcgtcggtggggaacgaggcggccttgtccttctgctgcgacgacgagacggcattgcccgaggagacggactggggggcggccgggaccgacctggaggtcagcgactcactggaggacacgctgctgaccggggtgtca

SEQ ID NO: 35465 - DNA, 375 bp, Oryza sativa
  Clone ID: uC-osrocyp015g05a1
acagggaaaaggggaaaacaaacccccaaatagctgaaggccatgggacggaaaggggttacaaccatacaaggggcacacatttttttacataaacaggtcaacataaaaacagggggggccatggccggaccccgccggggaggcccatccggtccgggcatcccatggacaaaaggggcatgccccgtttttaaaggtttttttacagagccccacttgcagattccgggttggttttttttaaccggggccctccaggacgcgaagatttcccttttgggctccaggacgctttttttggggaccaccccattgtcgcccgattggtggtttgggagggggctggaaaactttaacacctgggcccaaagg

SEQ ID NO: 35466 - DNA, 483 bp, Oryza sativa
  Clone ID: uC-osrocyp015g06a1
gaaaaccaaaatttagttgctactattatttatttctatattttacacaccaatctaaaatactattgttcctcacaaaattaaagcttgcaaagtcacaaggatacaagatccacacacacaatcccacaaactttacacaggcactttgcaggcttgcagcacaacgcccagttgcagctcaaaagcaagcaaggcaaacggacgtctggcccacatgtcagcctcacagtgaaggtgaaacaccatatggcatagtgcagagttcagacttcagacaagctcaaacattcagagttcagttcagcaagatcgtcagtcgagcagaagagaggcctgcctgaccaggtggcctctgcgctcgaacacctgcctcctgcgcctctcgaggtccctctccacggcggcgatctcctccatctcgcggtcgcattcggcgatcatcgccgcatactgcagctgcagcgccatggacaggggcac

SEQ ID NO: 35467 - DNA, 377 bp, Oryza sativa
  Clone ID: uC-osrocyp015g07a1
ttttgggtttttatttttttttttttttctttttttttttttgagacggtccaacaggacacccaagcgctgcataacttgcataattcgataacattgcacaggcggtgttagcaataggcaggaaactttttggttatacacaacaatcgagggcctgtgaaaggaatttagatcccggacctgacaaggtaacgattcaatgagaaaacgctatccgcggctagcgaaaatgatcccagtcggcgtttatttgagaggaagaaacccttggggggggtgcatagaagccgcccatgccattgtcgaaggtgtcccactgggttgccactgaaccagcattgttttgatcgctgccgggactggcattttttgcc

SEQ ID NO: 35468 - DNA, 428 bp, Oryza sativa
  Clone ID: uC-osrocyp015g08a1
tttttgggtttttttttttttttttttttttttttttttttttttttttttttttttttttttttttggaagctagaaaagaaaaaaatttccgttgggaaaaaaacccgaaaaaaattttattttaaaaaaatccccctttggggctcgaattaatcaaacaaataaggaggggggaaaaaaacggaaacaggggggggggggagaacaagtttaaacagcagggggggggaacccccggttttttaaaaattttaaatttagaacccgaggggggggggggccaacccaccgggaaaagaaaaaagggggaaggggggggaaaccggcccggggggtcttttccccggccctgtgggcccaaaggggggccccgacacccccttggacggggcccccgggggccccggtttgggggggcccggggc

SEQ ID NO: 35469 - DNA, 404 bp, Oryza sativa
  Clone ID: uC-osrocyp015g08b1
tttgcgttcatctctcccactagcgcgaatctgaaggcacttctgcctcgtcttgaccggcgaagagaccaccacgaccaccgcatcaatggcccgcctcgccgacgccgacggcgccgtcgcgctcgtcgccatcctctccgccgtggcggtgacagcgcagagcccgagcgctgccccgaagatggccccgctgtcgtcgccgacgaagatggcgcccctgccggctcccccggcggccaaggcccacaccgtctcggcgccatcgccggtgacggcggtctcgccgacagccccggcgatgtccccggactcgtcgtcctccgacacggcggctgcggatccaggccccgcacgacaccggagccgagaagtcccgagcagcggcgtgtacgtgcccgcac

SEQ ID NO: 35470 - DNA, 342 bp, Oryza sativa
  Clone ID: uC-osrocyp015g09a1
gcgtacttgagtcactagctcattcgctagtgctagctttgttgctatcaacttcattcaaacagagaccagctggcaacagggatacagtacatatatacatgcattctgctgttcatttgccttattaccatgcaccaatataatgcatcctcctctctagcttatcataagtactaattaactaattatcccagagcatggcaccaatataattgatccacttgagaccaagcatagtgtacacttgaacacatgcatgcattggcatgcacatagtacggcttgatcacaaacttaatcatcatactagcttccttggattaatatgaacatatcaca

SEQ ID NO: 35471 - DNA, 487 bp, Oryza sativa
  unsure (1)..(487): unsure at all n locations
  Clone ID: uC-osrocyp015g10a1
gtaggtggagtggcataggtacattatacatacaagttacaacaaagccctcctcagaaggaaaagacaaaaatagttacaacgtacaagcccactacttacataagttgttgacggaggtgattactatacaatatcaagctatcaaattgtaagataatatataccaacagcttaaagttgagataagttgactaattatctcaagggagatgtgggacaaggaggagcttctccttgaggtgaatagttatcccgaaagtctctgtcatatcgatgcctccatttgctgcttgatctattggtagcttccaattgaagcgatacacaaggcttgctagcatgacctcgatggcggcgatcgcgaagttcatacctgggcatatcctccgaccagttccgaatggcaagaaattgaaattatttccattgtacccagccattgtgttgctaaggaacctctctggcatgaactcctcngcatttt

SEQ ID NO: 35472 - DNA, 537 bp, Oryza sativa
  Clone ID: uC-osrocyp015g10b1
aaatttgaaggttgctagctctagcgagcttgctctgccttggaagctaggccactaatacgtagaacgtagcaatggcacaaatgctagacggcctaaggcatgatgagcaagcatcgctgcatgctccacaggaggccagcaccatgccgacgatgtcgtgctctgatctcctgctcgccatgatgtgccctcttatcctcctgctcatcatcttccgttgctatgcctacgcaacaaggtccggcgggatgctcagcagggtcccctcgccgccgggaaggcttccggtgattggccacatgcacctcatcagctctctcccgcacaaatcactccgcgaccttgcaactaagcatggtcctgatctgatgctcctccacctcggcgcggtgccaaccctagtggtttcgtcggctcgtacagcacaggccatcctacgcactcatgaccgtgtgtttgcgtcacggccctacaatactatagccgacatcctcttgtatggcgcaacagatgtggcattctcaccatatggtg

SEQ ID NO: 35473 - DNA, 326 bp, Oryza sativa
  Clone ID: uC-osrocyp015g11a1
gggggggaaaaaacccccccaaaaacggggggggggggaaaaaaaaaaaaaaaggggggcccccccccccgggcccccgggaaaaaaaaccccctttcccccccaaaaaaaccggggggaaaaaagaccccccccgcccaaagggctttttcaccaaaaaaaaaaaaaccccggggggaaaaaaaggggcgcaaccccccccccaaaaaaaaggggggggaaaaaaaccaaagcgggccccccagggggttcccccccccggcagggggggggggggggcccccctttttttttatggggccacccccaaaaaaaagggggggggg

SEQ ID NO: 35474 - DNA, 465 bp, Oryza sativa
  Clone ID: uC-osrocyp015g12a1
atggccaaagaatgattcttgaattcattacgaacttaaaagaaagagtaaaggaggttccaagcgacatgacagattttctccacttttcactaataaattcaactgatgaaatacattgggtttggaagtttgaaggatctcgtagccattggcaatcccaataaatcactccactgatccccagaatttccaagtatcttgaatccctcagcttccagtgctgctcgtctttctgacttgtactgcacggctgtcttgccaatatcaggggattgcctcaggatgagtttttcccatgaatggtagcctgcaaataaaagattcacttgtgtggcgttacgttggaattcacttcgaccggtcaagaggatgatgtggatcccaagaccctgaagctcattgtacagtttcaagctggctggtaatgcaagtgcctttgctacatccacccattcatcaaat

SEQ ID NO: 35475 - DNA, 408 bp, Oryza sativa
  Clone ID: uC-osrocyp015g12b1
tcgttcgggcccaccaccgtcacctgctactcgacgcccctgcccaaatttgccggccggttcctgagacctcgccggaggtgagccggcaccctctcgacacccacgatgcgctgactgctactcctcgtcctcgcgctcctcgcggcggcggcggcggatgccgagcccgttctccgcacggagacgggcgtccccacggaagtgtcctccggcggcggcggcgggggtggagaatcttccgacgagctgtactgcaacggctggaggctgtcggtggagacggggaacgcggggccgtggaccgccatccccccgcggggcctggagtccgtgcgcgcctacatggaaggggagcgctacgcctccgactccgccgtaggcgacgcggactacctcgccttcgcc

SEQ ID NO: 35476 - DNA, 386 bp, Oryza sativa
  Clone ID: uC-osrocyp015h01a1
gcaagaaaacatcgaagtctaaaaaatggcatttgtttttacaattggcaatggaataaaaatcaagcccctggcaaataaaatttttgccccaaatttttggggcccatcagttggaaattgggaaaattgaatccaataccccacctacctccccgggatttcccagatctgaacttttgaagccgggttaattttcaaaatcaacgggccgaaaaaacaggcaaacaaaatccccacccaaatcaacttgggggattagcagagggcccaccctccaaacgggggggggggggggcccaccaacagggtaagcccccaggggggagctgggagcctgggacgggcaacggggccccccttccatgggttcaagccccgggggg

SEQ ID NO: 35477 - DNA, 505 bp, Oryza sativa
  Clone ID: uC-osrocyp015h02a1
ggttacgcttacagttgtgaatcactatatgtcgactgtcaaacaacattaggcatagtgttcgactgggcatagtgttcgacggagattaaattgggaaattgaaatgtatgccttttgcatgcaatatataccctacgatgccgaagcagccctatatgaattcccaacaaactgacaatcacacaacattaccatacagttttattatatatacatgaatcttgaatgcttcggctatcaaattgcgagaataccatcaagctatcaaattctcacatgtaattgcgagaataccatcgatcttcaggagaccatttgtcttcataccttccgagcgagtaccccacagcaggcatatcaacaagatgcagaggatctggttctatgccatagtctgtcagtggtcggtgctcaagatcttatcatgatcaatcacgaaatctggaatttcaacttccccctttctgatgtccccccaaagatactccagccgactaacata

SEQ ID NO: 35478 - DNA, 471 bp, Oryza sativa
  Clone ID: uC-osrocyp015h02b1
ttcttgaggtgcggcggcggcggcggccatggcgctcgcgcagggcaccggcgacttctccgtggtggtgctgggctccgacttcgcggtcgacaccagcgccgtgctcctcaacccggccgaccgggaggagtggcacgactgcctccccgacctctccgcgcccgccgacggcgaggacttctccgacctcgaagagctccaggtcgtccgcgtccagagcaccgacagggccgggaggcgcatcgcccgcgtcgtcggcaggatcttccctgctcctgtcataggtggtgatcgtctgaagaagtctgttcttcacaagctgcgcaccgaattgccagaggggccattctgccttttgtacatgcacagcactgtgcattcagatgatgacaaccctgctatggcaaccttgaagggggcctatgaagatcttgcacctgaatacaacgatagactgcagatcgtata

SEQ ID NO: 35479 - DNA, 325 bp, Oryza sativa
  Clone ID: uC-osrocyp015h03a1
atgtagagctagccccagccggcgagctctcccacctcctccatggcgatggcggtgctgctccgcaaggtgtggggctccgtgctggcccgcgcggcggcgggggcggtgccggcggaggcctttgccggcgtcgcctacccaagccgtccgcaagccggcggagagtacggctcgttgggcgcgctcgacgttatcctgatcgacgtgctcccgcaaatcctgtgcctgctccgccacgccgacgccgcgcggttcaccgacgggtgccaagcctggcgcctggtggccttcgacaatggactgtgggacttctcaattcttt

SEQ ID NO: 35480 - DNA, 488 bp, Oryza sativa
  Clone ID: uC-osrocyp015h04a1
tttttgggacacacaaacaataggggaatttattagcaaggcaaaatttcttgaaagaataccatcgactcacttgggtctacaagccttgagttatacttcttgcaacacagacaacactacagataccatacattcattttacctgtttcactcgcttttaggacgttctataacctcacatctggcgctaccatgctgaccggaccaaaaccttgttttccattggagggaatggaatgaagctctctctctctctcttctctagctcactagctgctgactgccatagacagggtaggctccatatgcagcagcatacatgttagggtgcgggacgggggaggcataaccgtatccaccgtagaatggcgtcccatagtacatattgtttcttcggctgccagaatcagccctagactgtttatgtgatgggctgcggccccatgaaaggcgaactgcctgctttccaatgactgatccattca

SEQ ID NO: 35481 - DNA, 488 bp, Oryza sativa
  Clone ID: uC-osrocyp015h05a1
gcagagggaaatgtaggaattcgtgttatcacaaacagttactatattgtattttgggacaactgtcatgcaaccctgtagaacatctctgctgtctcccccataagaaatgtacaggagaacgaaaaatgtgatgacaagtgtatattgactgtaatctatagctatgacaatgctgagtttctagatggcaaatctacggcttcagcactaaacgaagacgccaggcaaggtttcctttgtatatcatacctgcatcaccagaaaaacttcacagaagaaattgtcatataaatcgcaggtcacgtactatttctcactgccatccttctcgtctaatgctccattaggcttctcagaccttactggaagaacgctgcgccgctctttgccacctggtttagctgatgcattcccataccatatcatcccaacaacagcagggatcatcccaaggactacctgaaaattcagaccttccttgccaa

SEQ ID NO: 35482 - DNA, 371 bp, Oryza sativa
  Clone ID: uC-osrocyp015h06a1
ggtgtaaaaaacagcaggggggcgaaattgcattaccactacataggcagaaatgaccaaagtctgtattatgactatagccatcgcatcatctactgatgaaatcctgaccgcagaaggatacataaaaccaggtgagctgggattaagcatctcaacatgactgggacagactacccactgatcagaacacccgcaaaaatgaataacttttggacaaactataattgtgcaaactcaccccgtatggcctcagcttttggtctttctaacatccttcaaaattgccgtgggtaaattcattggccctgtgaaaagacccccccatggccttacgcagggggcagcctcatctgttgtgggccctggag

SEQ ID NO: 35483 - DNA, 512 bp, Oryza sativa
  Clone ID: uC-osrocyp015h06b1
tctcttggctgccgtgcagcgactcctgcgggcgttcgcctccggtggcgcggcggctgctgcggcggctgcgaggaggcgcatgtccacggcggtggcgccggagcagacgcctgcggccgtggtgttcccgttcgcggcggctgcggatgagggcgaggcagcgggtggcggatgagaggaacgtgcagtgggtgttcctcgggtgccccggcgtgggcaaggggacttatgccagccgtctctcccgcctactcggcgttccccacatagccaccggggatctagtccgcgacgagctcgcttactccggccccctatctgtgctgcttgctgaaattgttaatcaggggaaattagtttctgatgaaattatcatcaatctgtgatctaaacgtcttaagaaaggagatgagcatggggaatcgggatttattctggatgggtttccacgtactgtaaaacatgcggaaattcttgatggagttactgacattgatatggtggtcaat

SEQ ID NO: 35484 - DNA, 378 bp, Oryza sativa
  Clone ID: uC-osrocyp015h07a1
ggttcgaactcttttttttctccttgttttctatttcatttcattccgatagatagcaacaagcagttcaaacaccataaccaaagcgaactcaattgatggtaacatcacggacgaagaacacctaacactggatggatggatagagggcttctcgactcgagagagccactggacacgataacgactcgactcgatgataagatgattctgacacggatagctaaggataactggccacgatgggccccaccaatcagttcctccagttcccgccggagtcgccgccgtagccgccgccacgggtgccaccgtagccgccgccgccgacgccacggccgccgccgtagccgtcgccgccaccgtagccgccctcac

SEQ ID NO: 35485 - DNA, 323 bp, Oryza sativa
  Clone ID: uC-osrocyp015h08a1
ttttgtgttttttttttttttttgggtttttgttttttagggaaacaaaaaaaaagaggaaccatctttttttttaaattctttaggcgaagtttcctgaacctttgcatgcatgaccggcacaaaaccaatatgggtacttgaggggaccaatgacgtaaaaggtctggaggatgcaaaccaatggttcgatctcaattcgtttaaaaaaaggattgcacacgggtggttgggggaacctggacggggaaggtgcccataaggattttgaacaagccccctgctagggctcgtcggaatccacagcgccggtgttacaaaag

SEQ ID NO: 35486 - DNA, 382 bp, Oryza sativa
  Clone ID: uC-osrocyp015h09a1
ttttgtggttttttttttttttacggcacaagcatttgattcgattattactacagggcaatggcaacattgtttagcagcattttcctcagtatgattcaggactagcacatatagggaattccaaacaatattggcactttaactgagacaattcataaagcatcttgacttgaagaaactaacatgagggtggcttgcagaaataaaaaaccataacggtacgaaataccggcatcatcaacataagatgacgattaatggcagcaacctgagatcctgacactgaagcctcaggtatttcccattctttggtgaaacaaacccaaatattgggccaccccggaatatacacgatggagggaagacaagtattcacagg

SEQ ID NO: 35487 - DNA, 545 bp, Oryza sativa
  Clone ID: uC-osrocyp015h09b1
cccccctactctcgctgtacatccgggccccaccacgtcagcctctcatggccttcgcggcggagccgatggatctggaggtgtcgccggattcctcgccggcggcggcggcggcggcggcggcgtgctcgatctgcctggacgcggtggcgtgcggcgacggggtggcggcgaggtccaccgcgcggctgcagtgcggccacgagttccacctagactgcattggatctgcatttaatgcaaaaggggtgatgcagtgcccaaattgtcggaatattgagaaaggtcactggctctatgggaatgagagccaaccatgtagccattctgatacaggtgactggctgaatggtgaaacctttgactacccgttctcatttgaatttgggtggtgtcccttcaatacaccattgacctctgtttttggggaaagcgaatctgagccaaatccttttttggagtatatagggtctctgcatggttttcaccatccaatgtatgcgccttctagttctactgccagtactgaaagcataccattccat

SEQ ID NO: 35488 - DNA, 325 bp, Oryza sativa
  Clone ID: uC-osrocyp015h10a1
atgttctgatctgtggacaccatctgacctgggggcaaaattaactgcgcaattacatgagaaccagatacatgtgcagcaaagggactcaaacaatttcttgaagtcaaggcgtgtgaaaatggcagctgcatattcactaactgcagaagaagcagaagtcgttctcgtagatgccctctgcctttgtaatataaacggagggagagaaaatttttcctggcttcttttttttttcctggggaattttacggtgtacatattacgtgttggagatatgtgcaggcacatccttgggatatttggatgtggctttttttttttt

SEQ ID NO: 35489 - DNA, 373 bp, Oryza sativa
  Clone ID: uC-osrocyp015h10b1
gtattttccaggtacttttcggtgtcgtcaaacagggcaatggaagaaaccaagggcgcaagccgtgaactggagcataaacagaccacacaaacctggcacaaaaaaaaaaaagcaaaccaaaaccccccaagaaaacgcctgcacaaaacaccaacaccgaattggaccaccataaaactcccgagggaaaaaacaggaacacaggaaaaaggctatcgccgaaggcccgtagcacaaagggaaagggcaccaaccaaaccgacatccgcttacaggggacttgatgaatagcaaggtcctatagaaacacgccgaacccccaaaaaatggggggagcccccgggccgccaatgacccccgttccccggga

SEQ ID NO: 35490 - DNA, 459 bp, Oryza sativa
  Clone ID: uC-osrocyp015h11a1
ttttgggtatataagggagagaacgtgacatccttttaattactttgggggtgaattgaagtggaacaagcaactgctggagagatagtacactctggcacacacgcacaatttgacggcagagactgatgcacaagcgggacacgcacacgcccaaaattagcaggctccagccccggaattaacagagcgagcaatctacgtaccccacacgaaccaccaagcaaccaaagctagcgccactcccccgtgcacgcgcgcgcgttttatgtaactctctccggcgtgtacgaagcagcattgacacgacacaaaacacacacaaagacgtagctggtgatgacgagaccgagatcgactggtaattttccgagtaagaggacacgatcgacgacatctcgtcgtcctatcacacttggatgctctgcatctcgtcgacgtcgtcggcggcgatggact

SEQ ID NO: 35491 - DNA, 481 bp, Oryza sativa
  Clone ID: uC-osrocyp015h11b1
cttatcctaccttttgtactcgcgtgctgcacaagttgctcagctagatcgagcgtcagaaatggccagcaacaactcgagaacaaactccagggcgaactactccaacgagatccacgatctctccacggtgcagaacggcaccatgcctaccatgtactacggcgagaaggccatcgccgacttcttccctcctcacctactcaagaaggtcgtgtcggaggtggtggccacgttcctgctggtgttcatgacgtgtggagcggcagggatcagcggcagcgacctgtctcgcatatcgcagctgggacagtcgatcgccggtggcctcatcgtgacggagatgatctacgccgtctgacacatctccggcgcccacatgaaccccgccgtgacgctcgcgttcgccgtgttcaggcattttccctggattcaggttccgttctactgggcggcgcaattcaccggagcgatatgcgcg

SEQ ID NO: 35492 - DNA, 500 bp, Oryza sativa
  Clone ID: uC-osrocyp015h12a1
ggccgcccttttttttttttggggattataatgctctggggggataatcataaattttatacaaaaggggattaaaattaaatagagatttgggggaggacaacacaacaaccccatcttcttccttcctgcctctttccatccaacttccaacctgaaccaccactacaacaacaacatcatcatcatcatattgttcttcctttgcttgatgcatcttgagtcacccatctcatctccttttcttttgcttgcttttttttcccctttcacctttaagaagctctcaggaaaagaaaaaataataccctcaactttaatttttaaaaggaaagacgaagaaaaaagaaagaaaaaaggaggaaaattcaggttggtttccccttgtattatccttttagaacctaacgatcttggcggcgcggacgacggggttctccctggcgatggcgtccctcgccgccgacttgtagtcgaagctgcagtcgtggcggtcggag

SEQ ID NO: 35493 - DNA, 343 bp, Oryza sativa
  Clone ID: uC-osrocyp016a01b1
ataaaggagcaccatcctttatttatcagctaataataatacataaaccatagcattacatcatattattgcattttacaagccataacatgacaaaagcatactataattttcttctttcattttagatgtagcaaagcatactccctctaccgcgttgcaagtcgtaagagggcacatcacaatctctccatcggtccgtccatttttgcttgaaaccattaatggcaatgatccaacggctgggaatgtttcagccacgaacaccagagggcaaagatcgcaccgccacgtggcagcagcagcattctagacgtgaatctccaggtttcacctgtacatt

SEQ ID NO: 35494 - DNA, 189 bp, Oryza sativa
  Clone ID: uC-osrocyp016a02a1
ggtacactaagcaaatacgggtgacagtacagctttatttatttattcatcggatttattctcaccagcatacgtacgtatattatacgtacacatatacgatataccatatgacactacatgtccatacatgcataaacacgtagcatagcatacgatatgattaattagtgagtgtgataatataat

SEQ ID NO: 35495 - DNA, 415 bp, Oryza sativa
  Clone ID: uC-osrocyp016a02b1
taagaaactgaacagctgacaaagaggatacagaatgctggaacagaggtggcggaggcgaaagctggtgctggctccgctaccctctccatggcctacgctgctgccagattcgtcgagtcatctctgcgtgcacttgctggcgaccctgatgtttatgagtgcacattcgttcagtctgagttaaccgagctgccgttctttgcatccagagttaagcttggaaagaacggtgtcgagtccatcatttctgctgaccttgagggagtgaccgagtacgaggccaaggcacttgaggcattgaagtctgagttgaaggccagtatcgagaagggcatcgagttcgtccacaaacagcagacagcagcggcatctgtttgaagcaagcagaatggaatcaatacaaggaagataa

SEQ ID NO: 35496 - DNA, 186 bp, Oryza sativa
  Clone ID: uC-osrocyp016a03a1
aaggagcatcaagaacttaattaactaataaactgataattccaagagctaacacagataaactagataaatacctatcttagttaacctcaatatagactaacagtgtctgttggatacttggacgccatcatattacaagctaaaaaacctatcctctgctgtctgctccatgcgtgaaactgg

SEQ ID NO: 35497 - DNA, 179 bp, Oryza sativa
  Clone ID: uC-osrocyp016a04a1
gtggaaaaatatatatggattacaagtagaatgctgaacaaaaatatacatttcccttttatgatccttgctactggaacatatacatcttgtcccccgaatatgaactaacaaaggtacaggtcaaaaagcctccaagcaccatgatatcctggcttaattccgaggcaaaaatagac

SEQ ID NO: 35498 - DNA, 180 bp, Oryza sativa
  Clone ID: uC-osrocyp016a05a1
ggggggatcatttctgtttccaaaaaagaaccctcttttattcctatatgcacccaagcattacaggatacgtattcacattacagtttacacttcgcattacaggttacactatttggtgggagcatgggaaaaattggaagggggttgctctctgggattgcattgaagatgattaaa

SEQ ID NO: 35499 - DNA, 321 bp, Oryza sativa
  Clone ID: uC-osrocyp016a05b1
tgatgatcgacctctcctctccgcgtcggggcgtggtggtccattgatccaaggtgtctttcctctgccggggagtggtgcgaccgggttgtattggtgggagtgcctgtataatttttggttggatgttcagtcggagggatcggcgattggctgcacggggtccaggcacgcgttccggggtggcgaccggagcggcaagacggcgaacgcgcggagccattccggacccgacggcgtgcaccacaccgtctcgctgaagtcctgcacactgtgtatagctcaggcttgagcgggaccgggacgaggagatgatgaaaa

SEQ ID NO: 35500 - DNA, 197 bp, Oryza sativa
  Clone ID: uC-osrocyp016a06a1
ggtgtagaaacatttttttgccatgtattttgaggaacatgcacatatcaacatacatgtaatacgatgttgaattaagcaagcaaatttaagcatgcagagtgcactgcttagcacacactgcatgtgttgctagctagctagctccatctagttccctctcttctcatcatgattgacacttgataaaattaagt

SEQ ID NO: 35501 - DNA, 446 bp, Oryza sativa
  Clone ID: uC-osrocyp016a06b1
ttgttcgcgtgggttcgccaccatggtggtgggcagctaccttcggaacgccgggatgttcaagcacctggggcgtctgctggcgtggaagagccagggctgggcccgacctcatgtgccgcgactgcggtcgcaccgccctcggcagcgccctcttcaccaacgacacctgctgcgtcgtcctcaccgagttcgtcctcgagctcgccggcgagcgcaacctccccggcaagaccttgctactggacctcggctccagcgacaacatgggctccggcggcacccccatcggcaacccccagaacctggtcattgcctttaatagcaagagcaccttacccaaggtcctcatgggaattctcccgggcatgcctcgccggatggccgtcaacatggtcatgctgctctgcatgaactggaaggagctgggcgggagggccgagctc

SEQ ID NO: 35502 - DNA, 203 bp, Oryza sativa
  Clone ID: uC-osrocyp016a07a1
gtcgcgctcacgcgcggctacaaccgcgcgctggggccgtccgtggcgcggagcttcccggacaacggctgcatctcctgcatgtgccacaacaccgacatgctctacagcgcgcgccagaccgccgtcgtccgcgcctccgacgacttctaccctcgcgacccggcgtcccacaccatccacgtcgcctccgtcgcctacaa

SEQ ID NO: 35503 - DNA, 195 bp, Oryza sativa
  Clone ID: uC-osrocyp016a08a1
tttttggggtgttaaaacaggcaggggtttgggcgttatcgccctcatgtattctgaagaaattagcaatggcaatacaatgcaaatagtctggagcctttccctacgcgtcgacaagagaaaattctagcctggaaactaaaaggtatcaagagcctcttccgtttattatcttccttgtattgattccattct

SEQ ID NO: 35504 - DNA, 195 bp, Oryza sativa
  Clone ID: uC-osrocyp016a09a1
tttttgtgtgaaaaaacatcaacgggattaagcaggaacagatctagggaataaaccccattacatatccaagcaaaagagccatccttaagaaaggagagttaactgaactacgaaagcaaccttcctgaaataacctaacatcagaacagaaaaaggagcaagtcgacagggatctgcggcgaagccgcgacg

SEQ ID NO: 35505 - DNA, 211 bp, Oryza sativa
  Clone ID: uC-osrocyp016a10a1
gggagccacggggccgaggccggcgccggggtgcacggcggtcagcgctgtgatcgagaagaaggaggacgggccgggctgccgctgcgggcacacgctcacggcggtgccggccgtcggggaggaaggcacgccggggtacatcggcccacgcctcatcctcttcgggggcgccacggcgctcgagggcaactccgccacgccacccttc

SEQ ID NO: 35506 - DNA, 195 bp, Oryza sativa
  Clone ID: uC-osrocyp016a11a1
gagaagaaagcataaaggggatcattacagcaaccaatattgttacttcatcagtcctagtatgaaacagtcgtgtaattcccctgtacacgttctacgctaacacaacaccctcaagcatctcacaaaatcacactacagatcccgcaaaaaagctcgagattttcagcaaagcgggcagcgcacgagcccatt

SEQ ID NO: 35507 - DNA, 197 bp, Oryza sativa
  Clone ID: uC-osrocyp016a12a1
ttttggggttaaaaattttttgccatgaattttgaggaattttttcccagaaaaaggcaagccaacccttgcaaaaggattaggtatccttccccatcctaaaccacattccaattaacaaactgaatcccttgtttttttgctcattcccccaaaaaggaaagaggaaagcttctattacaattctgggagtttac

SEQ ID NO: 35508 - DNA, 191 bp, Oryza sativa
  Clone ID: uC-osrocyp016b01a1
ggggaccaagaaatgatgcccattcacacctccatttggctccaggccagggaaggtgataaaaaatacatcgctttgaatgacagtcggtcagaagagaactcaacaaccgaaggcgcaaggccgatatcctatgtagttgtagtagtagtcataacatagaagaaaaatccaacgggagtgccacgttt

SEQ ID NO: 35509 - DNA, 188 bp, Oryza sativa
  Clone ID: uC-osrocyp016b02a1
gttagttacatccactggattatgctacattagttgcaattcttagatgctgtaatcaacagcataaataaagtgtgtacggtgcctcctctacattaatatcatatacacaacgatgaggtcataggcaaaatcaggatccctggcacaggccaagatggaaacaaacttaccatgcaaacgtcaga

SEQ ID NO: 35510 - DNA, 189 bp, Oryza sativa
  Clone ID: uC-osrocyp016b03a1
ggtagtctccaactataaccttttttatttccaggctcagcacatggcaaatcaaacatcgatatgcacaaagtccatcccgtcatactatggcctcttattccaaacgatcagaacagatgggcgtgtcatgcgtatgcgcatattacattacagcttggaaggggatttgtaccatccccacggctc

SEQ ID NO: 35511 - DNA, 186 bp, Oryza sativa
  Clone ID: uC-osrocyp016b04a1
ttttttcgtgtctttacaccctcttgggtttttattttttttttttttttttttgaaaacggaataccccccccaacccccctcaacgattagtgggggataaaaagtaaaaccacaaaaatgttacaagttacaaaggtttttaaatccggggtatcccaattatcattcttagatcgaagtttt

SEQ ID NO: 35512 - DNA, 150 bp, Oryza sativa
  Clone ID: uC-osrocyp016b05a1
gtgggttcaacgttgttgatttatttataatgctataattatttcttgaaactttggttttgtttttttattttttttgttgattattttactactaacttattacacaaaaacatttctgcaagaaccaacattcgccccccccaataa

SEQ ID NO: 35513 - DNA, 431 bp, Oryza sativa
  Clone ID: uC-osrocyp016b05b1
gctgctgtcgaacaccacacctgcgtccatggcgggaggcaggggagcccgcgccagcctccacctccacctcgcctggctctgcgccttcgcgaccacccgcgtgggcgcatggcggtggcggcggcgggggcgattctgacgccgacgccgacggcggcggcgaggggaagccggacctgcgggcgcgggggctggtggcggcgaagctgtggtgcttggcggtggtgttcgccgggacgctggccggcggcgtgtccccctacttcatgcggtggaacgatgcgttcctggcgctgggcacgcagctcgcggagggagtcttcctcggcaccgccatgatgcacttcctcgccgacgccaacgagactttcgccgacctcctgccccgcaccgactacccctttcgggtcatgctcgcctgcgccggc

SEQ ID NO: 35514 - DNA, 195 bp, Oryza sativa
  Clone ID: uC-osrocyp016b06a1
ggggagcttaatcaaggggtcataatattatttccccacaaacaagaaccacagtaaaagaagtacataacaacagggacaacagaagtaaatacagaactgacagaaagtgcctaatatagagaagcctaattcagatattggctatcctctcttgcagctcagttcatctcccttagatcggcatgcctttgg

SEQ ID NO: 35515 - DNA, 194 bp, Oryza sativa
  Clone ID: uC-osrocyp016b07a1
tttttggtttttttactagcaggggttttacattttttataaattacaatcaaaccaggctggagaaggagactgtactgtccacgaggggccgataccaaaaacagctagtaagcagggcggattcccaaatgaacaggcccacataataaacaagtgcgctctggtttgaagcgcacgtttgcacaatggaa

SEQ ID NO: 35516 - DNA, 186 bp, Oryza sativa
  Clone ID: uC-osrocyp016b08a1
attaaaccttcagtggtacattgacattcatccatgaagattattagcaacagaatcagtttaaaatccacccaagctatgctctactttctgctacgaacagaggaacatcatcaccagtaactaacatactcacgtctgtgacaaacagcatacataacccttcttctcatagcagttttcctt

SEQ ID NO: 35517 - DNA, 188 bp, Oryza sativa
  Clone ID: uC-osrocyp016b09a1
gggaagtaaaatgcgccggctactgaaccagtacaacaccattgcgacatggcactctgcatctgcacaagcagaagcagaagcagagccaagctgcaaggtgacacgacaatcttaggacactcagctcactgatcagctcagctgagatcattacagcaacacaaagaagaagaagaaaaaaggag

SEQ ID NO: 35518 - DNA, 198 bp, Oryza sativa
  Clone ID: uC-osrocyp016b10a1
tttttgggtatgccacgccgggggtcactagtaataagaaaaatatcaactgttacaagtgcggacctgtcagagatgactatctctcaaaacagtccaaaagttgtgatccgttgatgatgactataacccaacatttcctcacatctcggatcgatctgcgtttacgaatattcgagcaagaacgaatttgtcgtt

SEQ ID NO: 35519 - DNA, 197 bp, Oryza sativa
  Clone ID: uC-osrocyp016b11a1
tttttgttaacaaaaacaatggtgccccagcgttgatgatatattcaaagctataaataatcctgaaactttggttggagtggcacaaactttacacatgctaatttcacgacgaacttactacacacacacattcctgcaagaaccaacaaacgtccgaaatcatgagcggcatcaggtgtcccagatcatgacga

SEQ ID NO: 35520 - DNA, 425 bp, Oryza sativa
  Clone ID: uC-osrocyp016b11b1
ctaccactctctcctctccccttcgtggcggcggcggcggcggcggcggcgtgacgaggaggagcaatggcgatggcctcctgcgcctacgccccagcggggcggcgttggcacccactccgcgccgggcaggatcaggccgccgcgcggcctcggcttctccaccaccaccaccaagtcgaggcccctcgtgctcaccaggcgtgggggaggcggcggcaacatctccgtggctcggctgaggtgcgcggcgtcgtcgtcgtcggcggcggcgaggccgatgtcgcagccgcggttcatccagcacaagagggaggcgttctggttctaccgctttctctccatcgtctacgaccacgtcatcaacccgggccactggacggaggacatgcgggacgacgcccttgagccccgcgacctctaca

SEQ ID NO: 35521 - DNA, 188 bp, Oryza sativa
  Clone ID: uC-osrocyp016c01a1
tttttggggcagtaaccaataggggtgatgggggaaccaataatacaatgacagaacttactccaaattacaaccagctgaccaaagcggagaacagcatcatatcatgcgtacggcaatgagaagttccagggagaagccacatagcattgagaaacaccacaaaagaagagaccaagctattgact

SEQ ID NO: 35522 - DNA, 205 bp, Oryza sativa
  Clone ID: uC-osrocyp016c02a1
ggcggcgtcgccgccggggccgccgacgaagccgaggacgacgacgccttcatcggctgcgcgcgcgggccgagcgggccggcctgcgccgcctgccgctggaggtggaggcgggcctggatgtagtgcatctgggccgggctgagctctggctgctgggccagcccgccaccgtacgcgaacgcgtgcgggaaggagaatggcg

SEQ ID NO: 35523 - DNA, 190 bp, Oryza sativa
  Clone ID: uC-osrocyp016c03a1
gggcatacgcaacatagatcgtattaatccatcaagttccagtcacagcagtagataagaggcatagagcagctaagcccatagtaattacacgcagtttacctggcaaggtaaccgctttttaagaggcgcgcacgcgcacttaacacatatctccgcgacaaatataccagtcgcacaacaccacaca

SEQ ID NO: 35524 - DNA, 192 bp, Oryza sativa
  Clone ID: uC-osrocyp016c04a1
gagtagtaattgagtatattgccatggctgtgttctttgatgaaggacatagaagcttttgagcattgaaatgttgtgtatccaactcaaacatacaaaaaccatacatatgtttgggttaacttatgttaatcgtcaatctcctcccagggaaaaattgaagatcttggtcgcatcgatttaggcacttat

SEQ ID NO: 35525 - DNA, 178 bp, Oryza sativa
  Clone ID: uC-osrocyp016c05a1
aggatcaaaacatttctattaccacaactttttaaggatggaattgagtagcaatactttcaccccaaaatacagtttagcgacaatatcttagaaaagccgcttgctttgccgccatggctggcaagctgagcagagcagctaacacaaagaacacgagatcactataaaccaaacg

SEQ ID NO: 35526 - DNA, 199 bp, Oryza sativa
  Clone ID: uC-osrocyp016c06a1
tttttggtggcatgattttccactgatcatcacacacacctactattagctgcaatgatgcactgtaataatttgcaaactgaacaacaatattcagtcaaacttcacacccacagcaatacatacgctctctctctctccaatccaaattccaaattcaaaagatcttcaaattctaaattcgaatgtatcgcaacaa

SEQ ID NO: 35527 - DNA, 407 bp, Oryza sativa
  Clone ID: uC-osrocyp016c06b1
cgctaaaggactcgagtcgccgccggatttgggatttttgagcgcgcgaggtaaccaaagttctttttccgatggctcgtactaagcaaactgctcgcaagtcaactggaggaaaggctcccaggaagcaacttgccaccaaggctgctcgcaagtctgctcccacaactggaggagtgaagaagcctcaccgttaccgacctggaactgttgctcttcgtgaaatccgcaagtaccagaagagcactgagctgctcataaggaagcttccatcccagaggcttgttagggagattgcccaagatattaagactgatcttcgtttccagagccatgcggtgcttggccttcaggaagctgccgaagcgtacctggtgggtctcttcgaggacaccaacctgtgcgcc

SEQ ID NO: 35528 - DNA, 194 bp, Oryza sativa
  Clone ID: uC-osrocyp016c07a1
tttttgggcaagcggatacaagccaaataatattattgttctctgaatgcacatgaccttcattgggaaaaaactgtaaagaccgcgcaaagaaagacatggtgctctggagcaaaagcaagaagatcattatttatctctggaaatttctcaaaggactaatattctgaatcttcatcctctacagatccaga

SEQ ID NO: 35529 - DNA, 392 bp, Oryza sativa
  Clone ID: uC-osrocyp016c07b1
atcctgggcgataagacgagggaaattactaattaagggatgggattaaccggtcatggcctctggagctggagagctttgctataaaagagctccaatggcgtcccttacacctccccgcccaccattcccactttcgcccacacacacacccagatccacagccatcctcccaccgccgccgccaccatctccaagcccacgaacacccacagccaccgtgagctcgagcgaggtaagaaaagctttagatctgagcgacttcgagcgtctttaaggtaaagttttctcgaaaccctcttcttcttcttcctcctctggctcccccacctgttcttctacggattcttggttaggttgcttgcagagagcgagagacccagggcctttta

SEQ ID NO: 35530 - DNA, 195 bp, Oryza sativa
  Clone ID: uC-osrocyp016c08a1
tttttggttttttttggagcagggggctcatctttattacaggcaagcacgaatatgaacaccgggagcaccatctcctactaccattccccccaccatctgtgatatacatatatgtacatctaccatatcaaacacagagtaactaaaagagtaataaagacctataaggtttcagcaaaacttagtagttat

SEQ ID NO: 35531 - DNA, 388 bp, Oryza sativa
  Clone ID: uC-osrocyp016c08b1
ctcaccacctctctttgatactatggcaccaccgctctcttccgtcgatgcgggtcacggatacacagctctctacccctcctcctcggctccgatctgtacgatcgatctagggttgggtcttatgtcgggggatggaagttgctctaccgcgcgaacgatcgacgccgcggcctgagggttagaggggtatgcgccctcccggcgcacgcccgaacccccacgatgaccggccggagctcgccgatgaacgaggggctcgcgcaagcgtcccgacaagagagacgtcgacctcaaagcgaagcatggcaaaactcttaagagggtcggagggaatgagcaaagaccacaagtcagccagaacttatccgctctccgggccaagatt

SEQ ID NO: 35532 - DNA, 168 bp, Oryza sativa
  Clone ID: uC-osrocyp016c09a1
ggaaaacaaaggaaaacaaatgacatagtcactttataatctgttcattatacacgacatttagagtttttctagttgagatgttgcgtaccattcaaaatggtctaaatagcattcagcttgaaacaacctttacttcaggaattggcagtttggcactgataaact

SEQ ID NO: 35533 - DNA, 381 bp, Oryza sativa
  Clone ID: uC-osrocyp016c09b1
ctgacgcgcgggtcgcccacgcgtccgcccaggggtccggttctagacttgcatcacccgcatctgcgcgtccctctgcgggggcggcggcggcgacggccgccatggggctggagatggaggggatggcggcggcgaccggcgtgtctgtgcccgtgctccgactcctgctgtgcatcgcggccaccatgccgacgggcctcatgtggcgggcggagcccggcgccgcggggcggcacctttacgctgagctcaccggcgccgcgctttcctacctctggttcggggccacatccaacctcctattcggcgtgcccatggcgtgcgggtaccttgccatgcttctctgggcgcggattcgcggggcttgtaaccttcctc

SEQ ID NO: 35534 - DNA, 199 bp, Oryza sativa
  Clone ID: uC-osrocyp016c10a1
tttttggttttttttttttttttggtttgatccaccaaatccacatattacattataatcataattatgaatactttccttgaagagcatcattacacaaaatcctttgcctccccttttgcatgctcaagaaaaacctaccaattttctcctccctacccttaacaaccaaaaccagccccacctaacacattgccaa

SEQ ID NO: 35535 - DNA, 459 bp, Oryza sativa
  unsure (1)..(459): unsure at all n locations
  Clone ID: uC-osrocyp016c10b1
tcttccttctcctccggctcttcttcagtatcgaatcctctcttctcctcgtgcccaccaccaccaccgtagcaatggcgggcaacgggccgatcaacaaggaggacccgctcaactggggcgcggcggcggccgagatggccggcagccacctcgacgaggtgaagcgcatggtggcgcagttccgcgagccgctggtcaagatccagggcgccaccctccgcgtcggccaggtggccgccgtcgcccaggccaaggacgccgccggcgtcgccgtcgagctcgacgaggaggcccgcccccgcgtcaaggccagcagcgagtggatcctcaactgcatcgaccacggcggcgacatctacggcgttaccaccggcttcggcggcacctaccaccgncgcaccaaggacggccccgccctccaagtcgagctcctcaggcatctcaacgccggaaatc

SEQ ID NO: 35536 - DNA, 198 bp, Oryza sativa
  Clone ID: uC-osrocyp016c11a1
tttttggcgaactcttttttttggtccttgttttctatttcatttcattccgatagatagcaacaagcagttcaaacaccataaccaaagcgaactcaattcatggtaacatcacggacgaagaacacctaacactggatggatggatagagggcttctcgactcgagagagccactggacacgataacgactcgact

SEQ ID NO: 35537 - DNA, 198 bp, Oryza sativa
  Clone ID: uC-osrocyp016c12a1
tttttgtttaaaaaagaaacaaggcattcatgccaagatctttgaacatttgacacagtttttctaagttccattccacaggtaaattcatggttcagattttaggacttcagatgagaaactactagatacacatccatcagatggatggatgaaatcaacagtcgagacaacttactagcaaaatatccagttcta

SEQ ID NO: 35538 - DNA, 190 bp, Oryza sativa
  Clone ID: uC-osrocyp016d01a1
gggaacaaaaatggcgttggatattggcatgtaacatgaacagaagaacctacaaattacgaccaagttcacatccaactcccaaacaaaagaggacgacgcaaagttgccaacaacacacatgaactgaagactccgcagcatagggaagcccctgcagggcggtaaatctagtcagtgacccacgcgc

SEQ ID NO: 35539 - DNA, 178 bp, Oryza sativa
  Clone ID: uC-osrocyp016d02a1
gaacaatcatggccaacgaggggctaacaacagtttagcacagtacaaaaagtaaacacacataacaggaatatgcaatgcaatggaaccggagtatactgacaaaccaatcattaaccagagaactacttattaaccagctactaatagtcttctccatcgtcgttctcgtcgtctg

SEQ ID NO: 35540 - DNA, 497 bp, Oryza sativa
  Clone ID: uC-osrocyp016d02b1
tcttaaagacaagattgctttcctagagcttctgtaactgaggattctgaatacaagcaaagatggcccgtacaaagcagaccgcccgtaagagtactggaggcaaggccccaaggaagcagctggccacgaaggctgctcgtaaatcggctcccacgactggtggagtcaagaagccccacagataccgcccaggaactgttgcccttcgtgagatcaggaagtatcagaagtcgactgagctgctcatccgcaagcttcctttccagaggcttgttagggagatcgctcaagatttcaagaccgatcttcgcttccagagccacgcagtccttgcccttcaagaagccttagaggcatacctcgtcggtctctttgaagacacttacttgtgcgcaatccatgccaagcgggttacgattatgccccaagacatccagctggccaggcgcattcgtggcgagcgtgcttagatagttgagcaagattttttttaa

SEQ ID NO: 35541 - DNA, 189 bp, Oryza sativa
  Clone ID: uC-osrocyp016d03a1
ggacgaacaaaaaattgatgagatatatataccaaatgcaggagaacaaaaaagagcacaggaacaaagcagccatctttacattatgatggccctctctaatccccttttctttacacgaaagtacacatttatactcgattacgattggaactcaaacaaagcagatcaagaacaagaaatctacct

SEQ ID NO: 35542 - DNA, 442 bp, Oryza sativa
  Clone ID: uC-osrocyp016d03b1
tgaaaaaaatattataggaaataaaaaataatttcctggttagaataaacacatttttaaaaaaaccaagaaaagattttcctcttctgttacattccttcttccttctccggccaccggagccgtagccgaattgtgcctcttctccggcgaggggagagggagagagggggtgtgagttttgctccttccggcgagtggtctcctccccgcgcggctgaggagatctctcgggacatcggggttggggcggcgtgcatgatggggttctcgctcacgccgatgaagatctccacgaggcttctgtggagcaccagcttcttccgccacatgatcgccgccaccatcggggcctccttctccttcttaatagatcatctttttccgcacagcaatttgtaaatatatacacatcgaacgcgacaagcgcgtttgattgatt

SEQ ID NO: 35543 - DNA, 197 bp, Oryza sativa
  Clone ID: uC-osrocyp016d04a1
tttttggtgtttttatttttttttgtgttttaattttttgttctgtttgctccttatttatttttttttttacgcattttattgttgagaacaatgggggccaacatttttgcaaaggggaaaagggcaaaaacagaccaagggtattttcataccaaacaaacccggacaccgggggcttccaagaaatcccaaaa

SEQ ID NO: 35544 - DNA, 193 bp, Oryza sativa
  Clone ID: uC-osrocyp016d05a1
gtatacacagaactacattgccatccacgactttaaagaggtacaacaggtaatggtaatatagtcaacaacagttgcggtcaactagtacaatctgaataaatcaggttccgaaagagaaaagaaaggtaaaataaaaaggaaacaggctcctagtttatggaaaattgaagccaacctgcctgtcaaattc

SEQ ID NO: 35545 - DNA, 178 bp, Oryza sativa
  Clone ID: uC-osrocyp016d07a1
ttttgggtttttttaatttttttggtttttttttttttttttttttttttttttttttttttttttttttttttttttttttttttttggaaccaaacggggccctacccaaggggactaaaaacaggggaacctcaaatctcaggggtgggcaacaaattaccaccagcggcccccg

SEQ ID NO: 35546 - DNA, 187 bp, Oryza sativa
  Clone ID: uC-osrocyp016d08a1
gcagctgtcaaggtgacaaccaatatgattattgtatacacacgagggtcatttgaaaaatcttccaaagacaccccttcagcaatagtaggtccggacatgaatctcagtgcttgacaattctagctgatgaggtctatgcttctgcccttgacgacatgcctgcatggctggaaaaacctgctgt

SEQ ID NO: 35547 - DNA, 249 bp, Oryza sativa
  Clone ID: uC-osrocyp016d08b1
atctcgccggaggcgatgccggtgacggaacaccagggctcgtcgtcgtccccgtcgaccttgtccttcggccgctccctcctctctctgcgccgcgaccacgtggccatgccgacgggcgaggaggccgtcctggaggcgatccagcgccatttcgcggcgagcctcggcgagctcctgcctggggaggtggaggggggaggcggcggtggtggtggtggccggaaatgaatataaaaaggccttcca

SEQ ID NO: 35548 - DNA, 183 bp, Oryza sativa
  Clone ID: uC-osrocyp016d09a1
gtgccattgaaaagagtacttgcctccatgcacttattgctacccccatgttcttcaattctcgtacatcaccatgacagatttgattcaccgatgtgttaccctaccataccatgcacatgcatacacctccttccttctcatagccgatcgaaactcaacattacagacaaagaagcggaa

SEQ ID NO: 35549 - DNA, 441 bp, Oryza sativa
  Clone ID: uC-osrocyp016d09b1
atggtgctcatcccctgcccagatctacagtcggagtatctgcagagggttcccaatggcggcgaaggcctatgtcgagtactactctatgtatggacacgtggttaaactagctgcagagatcaagaagggtgctttatctattgaaggtgctagaggctaaaatatggaggggtcctgaaactctccatgaagaagtacttggaaagatgggcgcgcctcctaagccagatgtgccaacgatcacaccacaggaacttactgaggctgatggaatcctgtttgggttccctacaaggtctggttttatggattgacagctgaaagcatcctatgatgcaccccgccatcctgggagtgagcagagtcttataagaaagacccgccggcatcttctttaggactggaactcaaggcggtggtcaggagacttcaccgttg

SEQ ID NO: 35550 - DNA, 198 bp, Oryza sativa
  Clone ID: uC-osrocyp016d10a1
ttttgggaataaacgtgggacagggaccaaataataggcgctgcaagcaccacaataattaaatttctcacgcaattcatagttgtcatagagctcccaacgcagttcttcaattcaaaaagactgcccaaacagaccaagggtatcatcatagcagcaaagttttttaacacgcaacatcaaagagacactaatgca

SEQ ID NO: 35551 - DNA, 198 bp, Oryza sativa
  Clone ID: uC-osrocyp016d11a1
tttttggtttgacagagtaagctgattaaatatagattcatttttaccacagtgcactcaacacacagtacaacttcttgtaccagttggcttatagtatatataaagctattacccagtaagacgaaaaccgtaaatgactacaaagcttcaggttgcagatatttgaagtatcccctagcagctagaatgaaatat

SEQ ID NO: 35552 - DNA, 190 bp, Oryza sativa
  Clone ID: uC-osrocyp016e01a1
ggttacgagacatcaaatggcacaaaaaccaagaaaatagtaggcacaagttatatcatcagaatacatagcaactgcgagtgcttaaaaattgtgacaaagcatcatcttgtccacagaaaactgcaccaattaccgaagaaaaactagcagaaccatgtctatccatcacaacgacaaacacttcctc

SEQ ID NO: 35553 - DNA, 190 bp, Oryza sativa
  Clone ID: uC-osrocyp016e02a1
gggtaatctatagtagtctgtagtctatgtatacacatgaatgtctgaacgagatgtagctgcacgacattgtgttcacagcataaatgttagatacagttacttatgcaaaccgtgaggactctaggctattcctaacaatccacaactatagcgagtactgttgtctcccttcaccctttcttgggaa

SEQ ID NO: 35554 - DNA, 183 bp, Oryza sativa
  Clone ID: uC-osrocyp016e03a1
ctgcaatacaaatatacaattacagctccaggaagccaagcaatggtcaaaaatcaaggtacaacttattgtacgcaacaaatgaagttagaaactaagtttccgaaaccctcttcaagtttccccttcctctagcatcatcggtcagaggggaacaaaattgtagaacaaaaacaattaatt

SEQ ID NO: 35555 - DNA, 89 bp, Oryza sativa
  Clone ID: uC-osrocyp016e04a1
gggggggaaaaaccccaaaaaaaaactacaggaggggttttgggcccaacccccgggggttttaacaactgggttccacccccccccct

SEQ ID NO: 35556 - DNA, 165 bp, Oryza sativa
  Clone ID: uC-osrocyp016e05a1
atgaataagaagctggcatatacttcggctaggagcattgcaacgcaaacagtatgacaagggaccacgcattgtttaagagctaagacaaagacaaaactggtgcatccaacgtaccaaaaagaaagcgaacagcagcagtcagatagctttgagaagagaact

SEQ ID NO: 35557 - DNA, 192 bp, Oryza sativa
  Clone ID: uC-osrocyp016e06a1
gtgagaaaggtacatatagttacataagctactgaatttccaacatgtaacaagggattacagcttaattctcgaccggccgcgccgtgaaaaaaacaaccggcagctcaaccaggagatcagatcactgagtacaccaacgacacttgcacgacgacgtaataccaacgaccttactactactgagtactg

SEQ ID NO: 35558 - DNA, 89 bp, Oryza sativa
  Clone ID: uC-osrocyp016e06b1
atcgcccacacaaagaacaccgattaccagggggcgattatataaagcctaccctcccttcccccccccagaaaaaaagcaagagctac

SEQ ID NO: 35559 - DNA, 192 bp, Oryza sativa
  Clone ID: uC-osrocyp016e07a1
ttttggtaatcggagaaaatattgttagtttattatcttgcatgattgcattctcacaactggtagaaaactagcaacggatgcatctatccatcaatctcagccgtccgtgtcttcatccatggacagatagacactagcactgtatatacttaagaaaagccagccgggcacacgaacgcggattaaacc

SEQ ID NO: 35560 - DNA, 195 bp, Oryza sativa
  Clone ID: uC-osrocyp016e08a1
tttttgggggacttgaaatcggggggttcaaaactaggaaaactaatcttgctcgagcccccaacaaaaagggcatatgcttgtgccaccgattttacacactcaaaaaccttacctgacccctaataacatgtaaactgtgtccatacgttaaatttattggaacgcaacagcatccaaaagcacctaatatgt

SEQ ID NO: 35561 - DNA, 193 bp, Oryza sativa
  Clone ID: uC-osrocyp016e09a1
ttttgggtttttttttttttttgggttttttttttttttttttttttttttttttttttttttttttttgttttttttttttttaaaaaccaaaattgagaaaaaaaaaaaacccccccccttgggaaacccaaaacaaaatttacccccatgctttggggggtagggaaagggaaaacaaaaaccacaaaaa

SEQ ID NO: 35562 - DNA, 422 bp, Oryza sativa
  Clone ID: uC-osrocyp016e09b1
caactccaacgtccggtactgctcgggcctctccgtgccagagagtttgactttttgcggagaaggaaaaaccggtggcgcgcgcgcagtcgtggccggggttgggaagatccgagaggcaaggggcaagggcggcgtgcggttctgcaggatcaggatcccgaaaagctagcccgcggcgaagtaataataactgctcctctgaatctctccgatcctctcgaaccacgagaagctcagcagtttcggctccgcgcgccgcctgcctctcggtcgacagcacagtaaattccgtcggcgcgtggtgcagctttgccggcagcgtgccgctcccacggccatttactttgccttcttttctgaagcaggcgcgcggctggagaacgggaagacccgtgaggacaggatgatggtgccggccg

SEQ ID NO: 35563 - DNA, 197 bp, Oryza sativa
  Clone ID: uC-osrocyp016e10a1
tttttggaaaatcataagaaaactttgtatagatgacattcaaagcaaggccataaacctgagctttttggaaattggataccattgatctatgcagtctggaccactctttaacatcaaaagtctggtaagataccactgatctaggaagctttaaacacccattaacatcaaaatatcttgaaggagcctgttta

SEQ ID NO: 35564 - DNA, 197 bp, Oryza sativa
  Clone ID: uC-osrocyp016e11a1
tttttgttctatgtttttttttgggaacatttttcatgaataatgtcttacacccttccccatatataacttgggtccaaaatggtagtagtggtagccaacttaaccatgcaactcaccaagtctgtaccaaccagaacaacaatgtttggcttcaaaacacatgacaataccataacagacggttccaaaacact

SEQ ID NO: 35565 - DNA, 439 bp, Oryza sativa
  Clone ID: uC-osrocyp016e11b1
ttttctccaccccaagaacaccaaagccacatcccatcccatcccagtccacggtgaggttgagcgatctgaaaaaaatcatcagcgacgagcagcaacaggtttgttctctgaacttctctgatctttttagaagcaggtaacacacaagaaaggtcctgtcccaagaaggtacttctttcgggtttattagatcgaaagaggagttcttgtgcgtacaggttctttctcatcccatcaacttctcctaggaggaacagagatccagagaaccttttttctcttctggattcttgccgatttttaagcttcctttgcttttctaaggccagaaagggttgttttgcaatacccttctagttcatcctctcaaatttttcttttttctattcaaaagctctttctttcttttgcaccctttgttctctacttttattga

SEQ ID NO: 35566 - DNA, 198 bp, Oryza sativa
  Clone ID: uC-osrocyp016e12a1
tttttgtttaaccagcgcgtccatgtttcgctaacagtagcaagaaaattacaaatatgtacagctctgagcaagctcgcatgagaaacgcaagtttccatcactcctacaatcctacacgatcctgtgcactaaaattctctcaagtctacgaaaaactgtacagatgcatcattcgcagattcagcacaattcaag

SEQ ID NO: 35567 - DNA, 208 bp, Oryza sativa
  Clone ID: uC-osrocyp016f01a1
gctccagcggcttcctgggcgtgatcacctccaggagcagcacgccgaagctgtacacgtcgctccggtccgtcagctgctgcgtcatgtagtactccgggtccaggtaccccattgtgcccttgacttgggtggtgatctggccacgaccgtcttcgccgagaagcttggacaggccgaagtcggagaccttggcgttgagccgctc

SEQ ID NO: 35568 - DNA, 197 bp, Oryza sativa
  Clone ID: uC-osrocyp016f02a1
tttttggggactgtgaaaaaatgagggggtattaatttgtttatgatcgatgagaccaaacagtttcagtaaatcatttggggtagttgttgtcagagggggacgagggtttcatgaatggacatgaacaatgagattctccgaagagaaatacaacattggtaggctaacaatacaacctatggctaaagattgat

SEQ ID NO: 35569 - DNA, 189 bp, Oryza sativa
  Clone ID: uC-osrocyp016f03a1
ggggaaaaacgaccagactggaattgcatcagtgctaacgaaaccaacaagaagacatatagtatcatatatgtaaaataaattggttcacagttccaatcaattttcacatcccttaattgagaccgacaccacagtaaactaacaaaccagctgtatatacaaccacaacgaacacagcacaaggag

SEQ ID NO: 35570 - DNA, 375 bp, Oryza sativa
  Clone ID: uC-osrocyp016f03b1
ctgatcttccattccccattccacaccggcgggggcggctcgagcagcggatgagatcggcggctactatgtcggctacgacagcggcggttcccttctggcgcgcggcggagatgacctacatcggctactccaacgtctgcgccgccctggtgcgccggtgcctcaaggagccccacacgtccgaggccgacctccgcgagaaggtccacttcgccatctccaagtgggccgacggcaagcaggagaagccgactgtccgcacagatgatgaaacaacatttggtgccatggagacataattctttctacagatgttgcacaaatgttcttgcctttcttgcgaagccgtgcacctgaaacttgctgatatct

SEQ ID NO: 35571 - DNA, 190 bp, Oryza sativa
  Clone ID: uC-osrocyp016f04a1
gtgaattaacacccgctgggtttatgtatgccttttcaatctgcttataaccattggcacatgaaacattttaaagaatgtctgaactcaaaacactgtcgcagtaatggttcaagaacttggagaggcgtcatacagattacacataactcttcaagaatcctattctaattattattggatgggctat

SEQ ID NO: 35572 - DNA, 488 bp, Oryza sativa
  Clone ID: uC-osrocyp016f04b1
cgctccgacgctgtgctcgcctcctcctcctcctcggcgcctgtgcgccgttgtctcagccatggtgaagtactcgagggaggcgaacaaccccaccaagtcctccaaggccatgggccgggacttgcgtgtgcacttcaagaacacccgtgagacagcttttgctatcaggaagttgcctctgggcaaggccaagaggtaccttgaggatgtgattgcccacaagcaagctatccccttccgtaggtactgcggtggtgttggccgcactgctcaagctaagtcacgccattcaaacggtcagggacgctggcctgccaagtctgctagattcattctggatcttcttaagaatgcagagagcaatgctgatgtgaaaggtctggatgttgataccttttatgtgccccacattcaagtaacccggcccagaagctaaagcgccgtacctaccgtgcttatggacccataacccttacatgttcttc

SEQ ID NO: 35573 - DNA, 166 bp, Oryza sativa
  Clone ID: uC-osrocyp016f05a1
agaatcaggcaatccaatactacactgctaactggtacagactagagacacaagaaaacacagaaatgaacaagaaaaaaaaatacagcaaaggcctacacaacctcaattaccgagcatgtttttattactaagcaatttaggtcctccagtttaagggatgatg

SEQ ID NO: 35574 - DNA, 255 bp, Oryza sativa
  Clone ID: uC-osrocyp016f05b1
actgtttgtcagaggaagaagctgtgtctgtgtgtttgtctgtcagagagacagtgcgctgggggcgcgggcgctgccgtcgacagagcggccgggtggggaagatgagaccgaggatgacgccgtgatggacgggcggatcccgctgacgccggcgagcggaggggggcgggggcaccaccggcgggcgcactcggagacgttcctgcggctgcccgacgcggacctactcctcgacccggagggggacttttt

SEQ ID NO: 35575 - DNA, 191 bp, Oryza sativa
  Clone ID: uC-osrocyp016f06a1
ggttatacagggtcgggcgggtgcgaagcgtaataccctactcctgtgtttttgtggatttgtgtatgaatgagctacaaagtgtgagccaacttctcccccgttctaagctctaaatctggaaaagaatcaaaaaaaacccccttctctatgggcaaggtcctccttttatacttcaaggggataccaca

SEQ ID NO: 35576 - DNA, 196 bp, Oryza sativa
  Clone ID: uC-osrocyp016f07a1
ttttggggctttgaaaaattgcgggaatttctagtagatcagattgcatcaaagatgacagtgatgatgtacaatgggctagtatgctagtatcagaaggccgcattttactagagaatcctaccattctattcatcgatctcctttacagcatcctttgcaagtcgtgttacatatgtagcagcaatggctgtaa

SEQ ID NO: 35577 - DNA, 190 bp, Oryza sativa
  Clone ID: uC-osrocyp016f08a1
ttttggggttttttttttttttgggcatcctccaacatgtatttttctattcgattgccacgacgcgaaataaacaatgccaccacccttaagacccaattgaccttttctacagtttttatccatcacacaagggcagaaagtcataacagataataatacaacacggagaaaaagattaaagagaatg

SEQ ID NO: 35578 - DNA, 286 bp, Oryza sativa
  Clone ID: uC-osrocyp016f08b1
atataaattaaccaagaaatcctcttaagaaggatactgacagtgcacgccagctagctaatcactccaccagtttcggggaaaaaatatcaaggatttcgagatcctagctcgctagcaggtgatcgatcgatcgatcaatggccctggtgcagtcggcgcggcgtgccgcggggccggcggcgagccggctcttctcgactgcgtcggtggcggcggccgggcgctcccccgtggctggcctgccgaaggcgctgccgcggccggccatatcgtcactgtggat

SEQ ID NO: 35579 - DNA, 172 bp, Oryza sativa
  Clone ID: uC-osrocyp016f09a1
ttttggggtttttaaatttttggggtttaataatttttttttttttttttttttatttttttttcttatatatatttttttttttttttttttatttttttttttccgggcaaaaaaaaaattaattttttaggggtccccccaaaaaccccacaaaaaaaaatgttgtttt

SEQ ID NO: 35580 - DNA, 282 bp, Oryza sativa
  Clone ID: uC-osrocyp016f09b1
ctgacgcgagggctagccctagcgccgccgctggcgccgacatgaagctcagcatcgtcgaccggaccaccgggtgccagaagaggctagcgatcgatgacgagcagaagctccggccatattatgacaagaggatctcccaggaagtcagtggtgatgctccaggcgaagaagtcaagggctatgtatcaagatcatgggaggctgtgacaagcaagggtcccccatgaaacagggtgtgcttactcgtggacgtgttccgcttctactagacaggggtac

SEQ ID NO: 35581 - DNA, 192 bp, Oryza sativa
  Clone ID: uC-osrocyp016f10a1
ttttgggtgttttttatttttttgggttttttctttttttaaagaaaatccaaacacctccaagatttgcgttttgcgaacatagtaattgattcagtacacagagataacggttttgacaaagaatgagctagtagtattccgaatttccgataggccaaacaagcggacaaccagccaaaatttttactc

SEQ ID NO: 35582 - DNA, 194 bp, Oryza sativa
  Clone ID: uC-osrocyp016f11a1
ttttggtgtttttaaaagcatgggggcctaataaattcatcaaataggtagccactacattgggaaaacaagtaggggaaggcaggggatcaagctcaggaattacaacaactgaagattttttatgtttttagtaggtgatacagaccgggaaagccagaattgcatatctttaggagaagcttgttgcacaa

SEQ ID NO: 35583 - DNA, 396 bp, Oryza sativa
  Clone ID: uC-osrocyp016f12b1
attttcccggcttgcgtaccttggaacaatggtgaattacccgaagacgcgcattcactattgcagagccaggggctgcaaacgacaccgcctgcataaggttgtgcagtacaaggtcggtaagcccaggttgatggcccagggtaagcgccgttacgacgccaagcagaaggggtttggtggtcagactaagcccgtcttccacaaaaaggcgaaaaccacgaagaagatcgtgctcaagctgcaatgcaccaagtgcaagaagatttcacaaactattctgaagcgttgcaagcattttgagctcgcggagcgcaaggctaagggcgggcggtcggagccgagctggtaaaactgccgtgggttgcgcacagaaaaccttccttgatgtctgct

SEQ ID NO: 35584 - DNA, 186 bp, Oryza sativa
  Clone ID: uC-osrocyp016g01a1
aattcaccatcaacctgtctctgtaactgtaacgaatggagaacgaatggatggcaaaatgtacatggatcaagaagaagaagaagacgaagacgaagacgaacaagaacaagaagcaattacaaatcattcaagaactcatcaatggaggatttgttcatcatcacttgcggtagcactcggcgg

SEQ ID NO: 35585 - DNA, 195 bp, Oryza sativa
  Clone ID: uC-osrocyp016g02a1
gggacaagaagccaaacgggggagcttgtacaaaacttcagctctcttcaatggtgactacgctaattaaaattggaactccataaaaactcggctacgccgagaaaactgtaattacaacagatacggcgtagccaattcacgcaatgcgcacccatacggctacagtatggttcatttaacgtctgatagacg

SEQ ID NO: 35586 - DNA, 539 bp, Oryza sativa
  unsure (1)..(539): unsure at all n locations
  Clone ID: uC-osrocyp016g02b1
tgcgagactgagacgagacgcgagaccaaaccctcccctccccgaccgcgccccgcccagatctcgccgccgacgagatgcatcgccgcggcggccaccacctccacctcctcctcgccgccgccgtcgtcctcctcctcaccgtcgcggggctgcccctcgcttccgcctccgagtccgaccacaagtacaaagctgaagaaacagttaaactctgggtaaacaaggttggcccgtacaataacccgcaagaaacttacaactattacagcctcccattttgtcagccatctgaaaaccccgcacacaaatggggtggtctcggagaggtccttggcggcaatgagctgatcgatagtcaggttgatataaagtttttaaaaaatgtggagaagggtcccatttgcacaattgaacttgatgacaacaagattcaacaatttactgatgccattgaaaggtcatattggtttgaactcttcatagatgatcttncattatggggttttggtggtgagactgacaaaaacaacgaaaat

SEQ ID NO: 35587 - DNA, 194 bp, Oryza sativa
  Clone ID: uC-osrocyp016g03a1
gtgagcgtaaaatgaatcagatacactggttctgcttgctcctcttgattcgggagcaaagagcaacacagcaaagttacatatatatttgcagctccctaaccatctgattaaagaaaagatgctatcgagggcgttcaaatgaatattacaaatacgttggagtgagcaaacagtagtaacatacgtcgaat

SEQ ID NO: 35588 - DNA, 143 bp, Oryza sativa
  Clone ID: uC-osrocyp016g04a1
accaattagactaactgaactatcaacaatgaaattttacaacagaaggggatatacaactgggggttaaatgcccccctacacaaaaaccaagttaacattttggtaaaatacaaatcctttgggtttcaaacatgggaatt

SEQ ID NO: 35589 - DNA, 191 bp, Oryza sativa
  Clone ID: uC-osrocyp016g05a1
ggatcaatcgagatactggggagtactgtatatgtgataagtaacgtttgatggtcagactctaccgtgtctgcgttacacaagacagaactagtcgacttgttcgatcatccatgtccatcgccccggtttgcccagttgcccgtgtggctaaccccaacaacggcgatgctgatggatatcgagtccac

SEQ ID NO: 35590 - DNA, 188 bp, Oryza sativa
  Clone ID: uC-osrocyp016g06a1
gcagaagtagacatgcaaaattatccagcagttatgatacatcagtcacaaaacgcccgaccgtcattgtgtagtgtgtacactgtttacaccattgcattactgaagtatcaaattaaaccaccatcatttcagtcatcttggccaacagttctgcatattactgctagcaacaagccatattggcc

SEQ ID NO: 35591 - DNA, 489 bp, Oryza sativa
  unsure (1)..(489): unsure at all n locations
  Clone ID: uC-osrocyp016g06b1
ctttctccgccgttgtcgggctcgagctctctctcctctccaccggttaaatcgagcttccgcctccactccttttctagtcgtcatagccggcgtgaatcgaggtgccgctgcttggcttggacctctccggtgatggtgcgctcttcccgctccggcgatggtgcctatgacaagctccctctctgccgctgtgatgggctcccaccggcctctcttccctccccgctgctgccacgagctccctccccacagaggacgacaaaatcagcggcggcgagctccatgtggtggcactcgatctcgagctctctctcctctccaccaccgagatcgacctaccaccgnctctccttcggtcacctctatcagcatggatcaaggctccctcccggctgctgcgatgggatctcaggcaacgcggccatgacgaggtgtggccacgcagctcatggacttcgagcttgccggatccagcctcatgctcac

SEQ ID NO: 35592 - DNA, 200 bp, Oryza sativa
  Clone ID: uC-osrocyp016g07a1
ttttgggtttttttatttgcctggggtgtttagcaccgtcaaaagagagagttgtacgtacaatacagcagagagagaggcatcagttgttcagccattacagacgcagagccgccacaacaatgtgttgcaattccgcccggccatgcatttctaacgacaaccaagtgcagagcctacttgaaaattaccgaggcacc

SEQ ID NO: 35593 - DNA, 199 bp, Oryza sativa
  Clone ID: uC-osrocyp016g08a1
ttttgttttgatgaaaactcagaccaaaggctaaataataatcatgtcgaattcatgtttcaacagtacctgcaggggaagaaatagaacttcacccattcaggccatatatatctaacttgaatgtattagtttgcatatactacaaggctatgccaaaattggatgtatagcgattcataagaggggcaattctagc

SEQ ID NO: 35594 - DNA, 198 bp, Oryza sativa
  Clone ID: uC-osrocyp016g09a1
ttttggggttttacgaaattttgggacaactcaagatttgaaactctaggcacaagccaagcatgaacataacaattcagtcagctaattattacagttacaggcagagcaaatatgcttctacagagcaacctgttaaaaaaaacaaaagaaaaggagaatgtagggatacagatacaacacaacagcatctacaaa

SEQ ID NO: 35595 - DNA, 383 bp, Oryza sativa
  Clone ID: uC-osrocyp016g09b1
tgtaatggatgagctgctaaaagcatttcagtggtagctcatgagagagaagagagagaaatagaaactgcccaaacatgggggtttctccatggattatcatctctttgttgattgctcttgtgcaagcttttgtcgcttcggccgatacgaacgcacaggacacttttggacttaacgggcttgcaggtagctggggcagcgcaccatcgaattgggctggcaacgatccatgtggagacaaatggattgtgataatttgcaccgggaaccgggtcacatccataagactgacaagtttcggactgtccgggacgcttttcggggacattcagtccttttcagaattgcagtacctggacttatcctacaacaagaacttg

SEQ ID NO: 35596 - DNA, 196 bp, Oryza sativa
  Clone ID: uC-osrocyp016g10a1
tttttgggattccatacttaccacgattcattcatattccatgacatagaatacaaatgacaagaagtcctacagcaggaatgctaactttcgaatgtaaaatggattgattaagaacaatagttctgacccggaaaacaaaatttgtacatatgatttgacttcgctaacaaaatggattgcgcatctacatcgc

SEQ ID NO: 35597 - DNA, 450 bp, Oryza sativa
  Clone ID: uC-osrocyp016g10b1
tgtttagtcggctacaagctggatcaaattaagaaggaaaaaagaaaaagaaacttcatcgccttcgatctccaattggacagattgaggctgcttgttgactctgccgctataagtaccgtaccacatggtggtacatacacactcgcgttgagctgtgcggtggagatggccagagggggagcgatggtcgcggcggcggatgccggcgccggcgccggcgtggcgcccgggtacagcagcgagatcacgttcaccgtggtgatgagctgcctcatggcggcctccggcgggctcattttcggctacgacatcagcatcacaggtggactgacgcagatgcagtcgttcctcgaggcgttctttccagacatctgggcgaagatgaacaacgccgagcaggacgcgtactgcattttcgacagccaggtgctcaccaccttcgtcttc

SEQ ID NO: 35598 - DNA, 190 bp, Oryza sativa
  Clone ID: uC-osrocyp016g11a1
ggagggtaacctaaggatgacaattatcaaaactagggtagcacaccagcgttgttgagttatgacaacagccaaacatgttgtgaaatataatcctattcccaacaaaaataagaaataaatagaacagctgattgactgactactccagttactaacacaatcagactcaataaggaacaatagatta

SEQ ID NO: 35599 - DNA, 195 bp, Oryza sativa
  Clone ID: uC-osrocyp016g12a1
tttttggagtcagacatgcatttgcttttattgagctcacctactcagaggatgccactactataaaacatcaaataggtatcggcactctagatgccagaagtgctaaaaccggtacctataggcctttttcctacttccgccggttgaaatcgtaaaaaagatacctttaaagaactataggtgttggttcta

SEQ ID NO: 35600 - DNA, 195 bp, Oryza sativa
  Clone ID: uC-osrocyp016h01a1
gatgacaatatcctttgcgtgtaaatagtatcactgagttcgatgcaacactatatacagagattcgatgaaactaaattctcctcagcgtggcgtagccactgggtgggtacatagttacatacaaaatgctgatattttttcttgtactatatctgcttggtcctaattagtattactcatgtccaagatgca

SEQ ID NO: 35601 - DNA, 250 bp, Oryza sativa
  Clone ID: uC-osrocyp016h02a1
catgcgcgcgtacgctagctctgtgtcctctattttgggcgccctcttttttttttttgggcagtatgggttttggtgcaaactcatctccaccagctgattgtgattggtgagacacgtcctcctggaccaggtcccccgctggcaggactcgcagatgcttggaataaggaatgactgaccgtccgacccgtgccaatgcctaacactacgtgccaacaccaaccacgccgattaaccttatgagaca

SEQ ID NO: 35602 - DNA, 196 bp, Oryza sativa
  Clone ID: uC-osrocyp016h03a1
ggttagaacggggaaaatcatacaaaatattttattgaaatggatttattgcgtccatcaaatacattcatggagcaagtcatctcaatgtgtaacacaagtatacagaagtccaacaccacactctcagatcattccatatcgtgtttcagttccctagaccaggagcaacttccaccgaataaacgaaagacta

SEQ ID NO: 35603 - DNA, 449 bp, Oryza sativa
  Clone ID: uC-osrocyp016h03b1
tctttacagatttcttggcgatttgtctggttctgcctgctcttgctggtttcagatccgggaggggactgagcctccgaagttatcaggagagtgaaagacataatggggatcagcagcgaatcgccgaatgggagccagcagattgtacaaaaggaaacacgagatgagacaacaccacttctgccggtcaaggtggaggaggaggggtttcatgagttcaatggagcttcattttccggggcggttttcaatttatcgaccactattgttggggctggaattatggccttgccagccagtatcaagatgttgggcatcatcccagggattctgatgatcatcgttgtggcgttgctcacagaggcatcaattgacatgcttgtcaagtgcagccaccagggcaagattacatcttatggatggctaatgggtgaggcttacggaca

SEQ ID NO: 35604 - DNA, 189 bp, Oryza sativa
  Clone ID: uC-osrocyp016h04a1
ggcaatgctgaagcagatgctgaagttgaacacatgaaaaatattacaaagagatctagcccttttgtgtctagctttaaggccaatctgccatctggagtgttgaggtaaataatttcctcttcaaagtgagatttcatttactgacagcaccacatggtaagcaaaaagaaaaaaaaatgacccaca

SEQ ID NO: 35605 - DNA, 545 bp, Oryza sativa
  Clone ID: uC-osrocyp016h04b1
atcatggcaagcttttttgattctttcttagcggatcttgatgaactttcagacaatgaagcctatcctgaggaagaaaatgctgaggcagtgggcacggaagagattggtgatgatgatatgcctgacctcgagtctcttaattatgatgaccttgatagtgtttcaaagcttcagaaaacacaacgttacaatgacattatgcaaaaagttgaaaatgcacttcagaaaggtacagatttttccaatcaaaggtcgatcctggaggaagatccagaataccagctgattgttgattgcaatgctctatcagtagatattgagaatgagatcattataatccataatttcatacgtgacaagtataggctgaagtttcctgaactagaatcccttgttcatcatccgatcgattatgctcgtgttgtccaaaagattggatatgagatggatttaacgctcgtagatctggaagggcttttaccttctgcaattataatggtaatttcagtgacagcatcaacgacaaagtgggaagccgtttt

SEQ ID NO: 35606 - DNA, 191 bp, Oryza sativa
  Clone ID: uC-osrocyp016h05a1
ggttgaattgtagctgcatgcattgcatgatatatttgtcaagtgctcaacaactggagcattcccaatcatagcgtctctgcacatttccattattcataaacacagagtgcttgctgaaaatggcataataacacattaacacacgagtaatctactcaggcagaaggattaatgcatagaaggatcaa

SEQ ID NO: 35607 - DNA, 191 bp, Oryza sativa
  Clone ID: uC-osrocyp016h06a1
gctacacaaatattgctgtattactagcactctggcatttccagggaggtgctttaacagcttgtttttacagagctacagatgttactagggaagagcattacatacaaaaagcattagtgattacttcttttttttctctctcattcaaatgcaaatagcatatgaacagatgtcaacagattatttct

SEQ ID NO: 35608 - DNA, 368 bp, Oryza sativa
  Clone ID: uC-osrocyp016h06b1
tctctcttctctggtggtgtgggtgtgtccctgtctcccctctccttcctcctctcctttcccctcctctcttcccccctctcacaagagagagagcgccagactctccccaggtgaggattcagccatgaagggggccaaatccaagggcgccgccaagcccgacgccaagttggctgtgaagagtaagggcgcggagaagcccgccgccaagggcaggaaggggaaggccggcaaggaccccaacaagcccaagagggctccctccgctttcttcgtttttatggaggagttccgtaaggagttcaaggagaagaaccccaagaataaatctgtcgctgctgtaagaaaagcaaccggtgataggt

SEQ ID NO: 35609 - DNA, 200 bp, Oryza sativa
  Clone ID: uC-osrocyp016h07a1
tttttggtaaacacacgctcaaggggcaatcaacaaaatacagtacggtatatcagtacttgcacaacgatttctttgaaagggacatgattttcatggctcaccaatgtgatcgagtctagcacagtaaacgacacgaaattgataggtcccggtatcctcagaactggaacatggcatacaagcaggttgtaaaacag

SEQ ID NO: 35610 - DNA, 300 bp, Oryza sativa
  Clone ID: uC-osrocyp016h07b1
ttgttcaacaagagcttccaatcacccgcgaaacccgcatctgagaagctgactcctgagctgacaagatcacctagcaaagccgcacgcatgttttcagggacacatgagaagtgtgccacttgcagtaaaacagcgtatcctctagagaaggtgacagttgaaggacaggcctaccacaagtcctgcttcaaatgatctcacggtggctgtgccatttcgccatccaattatgcagctttggaaggtatcctatactgtaagcaccatttcttccaactttttaaggagaaagggagc

SEQ ID NO: 35611 - DNA, 199 bp, Oryza sativa
  Clone ID: uC-osrocyp016h08a1
ttttgggtttattggagaaaatcgggcaaaatttttttttgtaatttttttatttttgttcattaaattcattttttggacaagttattttaatgtgtaacacaagtttacataatttttactccacactttcagaacaaaaaaaaaaaagtttcatttttttagccaggaggaacttccacttaaaaaacgggggact

SEQ ID NO: 35612 - DNA, 200 bp, Oryza sativa
  Clone ID: uC-osrocyp016h09a1
tttttggttttttttttttttttggtttttttttttttttttttttttggggaacaacagccattccaattttaaatcgaccctgggtccaggttcacatagacctttaactcatttgaaggatttttgaaactggccattattggaaaccaggcattttaaagccatacattgcttggggatacaagaaccctaacaat

SEQ ID NO: 35613 - DNA, 172 bp, Oryza sativa
  Clone ID: uC-osrocyp016h10a1
ggggaacaccaactgatgcttatctttgtttcagaaattctagacgcaaaactagcaccttgtaagaaacaagagggattacactttaaagatgagatgacagataagataatcacctaccaaaaacagtaaattgtgttgaacgcaaagacggcatcagatcaaacgcagc

SEQ ID NO: 35614 - DNA, 191 bp, Oryza sativa
  Clone ID: uC-osrocyp016h11a1
gtatgaaccgaaaacattgttttggaaccgatatcattatgatccgtctttgaaagaaagccaacacggggacagggatttctttagagattcacaaacaataattaaaagcagcatactgtggattccagttttaggtagaaaataccatggaacaacccacaggtccaaaaactattcactagctgcat

SEQ ID NO: 35615 - DNA, 445 bp, Oryza sativa
  Clone ID: uC-osrocyp016h11b1
tttctaccacccaaaccatgggaacgtgctggaacttcatctggtccagcgcctttcaagcccccatccgggggtagcactagtgatatcgtcgaagcttctggcacagcaaaacctggggaagttgtttctgccgcagagagcaatgttgcttccaatgtgaacagcaccatctctaggcctgtgcccccacggccttggcagcagcaaggatacggaaattcttatggaggttatggctccagtatgtatagttcgcttggcgggtttggtggaccttatagtagcggcggactttacggaaataacatgtattcaagttatggaggaggttatgggggtatgttgggaagttctggaatgtacggtgggtccatgtataatagcgggatgggaggcccctatggcggctatggtatgggcaatggtgcttacaacccagggc

SEQ ID NO: 35616 - DNA, 191 bp, Oryza sativa
  Clone ID: uC-osrocyp016h12a1
gttaacatacgcaaactgatattatcacaatgttagccgatgacaatggaaagagtaatctaggtacaagcggatcattgacggtggagacaagacattggctgcaccacaacacccaccagtggcgccaacaaggagcgctatccgttataggacgagagaaaaagtaaaacatcacgatgtgaagtgaa

SEQ ID NO: 35617 - DNA, 237 bp, Oryza sativa
  Clone ID: uC-osrocyp017a01a1
tttttggaggtcaaagcttaaactgtttcagagcaagttcaggtaaaaccatacggcgatacacacttacaaaagcttcatcgcacgaaactctcgacggctaaaaaacacaggggatcacacgacgccagccacatcacacggttcagactcccttccagccggaatcacgtaggaccaccaccagcttaatcgacctcctcgatcttggggcctgcaccgctgccacccgccggc

SEQ ID NO: 35618 - DNA, 427 bp, Oryza sativa
  Clone ID: uC-osrocyp017a02a1
gtgcaaaacactacaaggggttcaaatacaaataaacctttactacgtacacaaaaataagttatcttcaagagagaaaacaaaactagaggtacaatcattaagacccgcaattcggctagtagaaaattcgaaacaaaaagctttcaaactgcacgggcaaacatccttgttgcccggtgaaacccaacacaacaatccattgcatacattaggaatgccctgatgcgatgccattgtctgaaaaaactgaccgactcagacgacctacactgcacactacctggacagatttcttccagtacaccaattgacttcaccttccgcattgccccatggccaacaacccctcaggtgctactgaaaccatgggacgcatgcaaacaatctgcagatcacgtctcaatcagctgataatggtacaaat

SEQ ID NO: 35619 - DNA, 402 bp, Oryza sativa
  unsure (1)..(402): unsure at all n locations
  Clone ID: uC-osrocyp017a03a1
ttttgtgtggtttaagaaggaggggtttaaacacccataacacaaatccatccccaacaaacaacaattatttccccccacacatgccggccactccagcggggaatgcacacgtaggcctcaatccgcgaaatcgtccaccaagtggaataggcccccaacacactggaacaactgctacccctaagggccaaaagcacgccaaatcaacaacttggacattgactgccaacagtgctgatccttctggaagagagaacagtgccacccaaagcccttcgggtgagcaatgaccttttcaaggggttccagtgcaccgggaaacggagtcgtcccgagagcccccctttggaccacccaccttccacccccctaccccatttnnncccctccccctccctg

SEQ ID NO: 35620 - DNA, 426 bp, Oryza sativa
  Clone ID: uC-osrocyp017a03b1
ttccgtcccctggagggcggcaaaccctagatctcgccgtggcgaggcgacatggaagcgccgtcggcaaaacctagatctcgccgtgccacgcatggatatatggtcctggaccgcatagtccgttgctggagcggagttggaggggacgacgaccccacggcgtcggagatcgcctacacctgcagcggccaccccatccgcgtctccctccgcgtcgccgacccccccgccgtctcccgcctctacgtacaccgccccggctggccgcgcgtctacgacctgggcgacgccgaggtcatcgccgcccaccgcggctccatcctcctctcggcgcgcgttcctttcgccgacctcgacaccatcgcgccgggccaatttcccctggactacttcgtctacacggccaggcccggcgaggggttg

SEQ ID NO: 35621 - DNA, 358 bp, Oryza sativa
  Clone ID: uC-osrocyp017a04a1
gaagataagtacaattattatatattctagtagtaattacaagattgtagcaattgcttaattatcccctctctatatgcgaattattactacaagtagctgtacacctgaaccatgcagctagccacaagcatggcactgtacgtagtaccaaaaaaaacacaggcatgaaaattaagtaagaaaaaggtcaaattaattcgtactgtaaatacataaaaccactggtggcaggcatatatgcaagattactccgatcctcactcgatcagttgagctgagcttttaattatatagcttcttcatcagggctgtgcttgtagaaagtagatcgatcatttagcaagcaattatatat

SEQ ID NO: 35622 - DNA, 282 bp, Oryza sativa
  Clone ID: uC-osrocyp017a05a1
ggggagcaaaaaagaacggggaacaaaatcatttccatcatacaaagccaccgaatgttcttgtaacaatttggtctttcgcaggtggtgaataaaaatggaatttacaggatttacctcccaataaaactggttaggtcacttgcaccaccagccttcaaatgggtggtcagagactctgaggctctacccaaaacagcttcacaaaccaccactgttaccgcccttcgtgaagatcttcagagaaagccgttctcgatatgttttcagtctcaaaggggc

SEQ ID NO: 35623 - DNA, 429 bp, Oryza sativa
  Clone ID: uC-osrocyp017a06a1
ttttcgggcgcgctcttttttttttttgtttttttttttttttttggtttttttttttttttaacactcatcaattatcaaacaaatagtattaaaacatttgactagtcattgaccacaaacacatatggtaacttccaacaagaggcatttgatgtcctccgatttatggatgaaacaacatatgtaatgcttgaaatgggtaaaatccattaaatcaatccgcaatagtaactaatagcagagcaatcaacaaccaactaaattccttcatcattttgggggctcaatgaaaaacttgttgatagctggcatgatctcaggggtcttggcgcgcacatagttttttagcccatgctctgggtagcgccttccctcctcatggtttttgagcactccagctgccctccctaccttgttaaccctgac

SEQ ID NO: 35624 - DNA, 373 bp, Oryza sativa
  Clone ID: uC-osrocyp017a07a1
ttttgtggttttttttttttttggttttttaggtgtcatagagctcccaacgcagttcttcaattcaaaaagactgcccaaacagaccaagggtatcatcatagcagcaaagttttttaacacgcaccatcaaagagacactaatgcaataagataacttgaagcgcggatcactagcaaatttcgcgcttagtcgacctcctcgatcttggggccagcaccgttgccgcctggcgggggagcattgtcctcgtccatgccgccggccatgtccgcgccagcgccctggtacatcttggcgatgatggggttgcagatgcccttcagctccttcatcttggcatcgaactcatcaacctcggcgagctggttg

SEQ ID NO: 35625 - DNA, 448 bp, Oryza sativa
  Clone ID: uC-osrocyp017a08a1
tttttgttttttttttttttttggtttttcagccaagatgtaaagagtttttagtaatcagtaataattcagtcccccggggggggcctgacactacaggggggtagttaacttatgctatatctgatgaaattgcccacaaaggggcatttcagtccaatacactgggacgaatgatctcatgaggcaaaatagaccaaattcagcattggagatcgactgccaacattgctgatcattcaggaagcgagtagagttacaactcaggttcttcaggtgagcatgtgcctttgcaaggggcatcagtgcaccggcaaacgggttgccccgaaagctcccatccattgaacccacgttccagcaccatgatgttctttgttcctgattcttccttggtctcagatagatagccggagaacatcttggcacacgatggacctcgaccttg

SEQ ID NO: 35626 - DNA, 403 bp, Oryza sativa
  Clone ID: uC-osrocyp017a09a1
tttttgtttttttttgcgggttcaatataaaaccatgtcgatagatagatagaatagagcactacatatttttctcagcactagtgatgttcattcaaacattaaaccacaggtaggtctgaaaaggcttaaattactagcaaaaagtatagtcctgccaaacagcgcaagagctttagcacaatgacatgggatcaccactcaacggttggccttggcaacacgctcgatctcatccttcttcttgatggcatagctgttggatgagcccttggcggcattaataagctcgtcagcaaggcactcagcaatggtcttgatgttcctgaaggcgctctccctggcaccagtggtgaggaggtagattgcctggttgaccctcctcaagggagagatatccaca

SEQ ID NO: 35627 - DNA, 370 bp, Oryza sativa
  Clone ID: uC-osrocyp017a10a1
ttttgggttagagctcccaacggagttcttcaattcaaaaagactgcccaaacagaccaagggtatcatcatagcagcaaagttttttaacacgcaacatcaaagagacactaatgcaataagataacttgaagcgcggatcactagcaaatttcgcgcttagtcgacctcctcgatcttggggccagcaccgctgccgcctgccgggggagcatcgtcctcgtccatgccgccggccatgtccgcgccagcgccctggtacatcttggcgatgatggggttgcagatgccctccagctccttcatcttgtcatcgaactcatcagcctcggcgagctggttgccgccagccactggatggcctgatcga

SEQ ID NO: 35628 - DNA, 499 bp, Oryza sativa
  Clone ID: uC-osrocyp017a10b1
tgtccgactcatacttagtttattgctgaaggtagctagcgagctgactgctcactcactagatgcccttcctttcctaccatacctgggaaaggttcctgtcatacgatacgaccttggcacgacctagtcgggcgtgggcgtctggcagcacgaccgcgtggagatcatggccaacgaccagggcaaccgcaccaccccctcctacgtcggcttcaccgactccgagaggctcatcggagatgctgccaagaaccaggtcgccatgaaccccatcaacaccgtcttcgatgccaagcgtctcattggcaggaggtttagggacgcttctgttcagagtgacattaagctctggccctcaaggtgattgctggacctggtgacaagcctatgattgctgtccagtacaagggtgaggagaagcagtttgctgccgaagagatctcctccatggtcctcatcaagatgcgtgagattgctgaggcccaccttgccacca

SEQ ID NO: 35629 - DNA, 373 bp, Oryza sativa
  Clone ID: uC-osrocyp017a11a1
ttttgtggttgatgacagacaggcgtattcttattattctcgaaataaccgtcacacaacagaaatgagaacgaatttgtccagaaatgcactcaattacaacatcatccttgcagttacagcatacaagatggaaactttactgaactataccacgtttcgctccatccaccgtgttcttcagcaacatcgccaccgtcatggggccaacgccacctgggactggagtcaggtgaccagcaaccttgctcacctctgcgaaatccacatcgccgacgagtctgtaccccgatttcctggttgggtcactgatggagttcgtcccaacgtcgatgacagcagcgcctggtttgatccagtctcctttgatcat

SEQ ID NO: 35630 - DNA, 396 bp, Oryza sativa
  Clone ID: uC-osrocyp017a11b1
accacacgcgacgattaatagaaaaaaaaaaaagaatctcgtctcacccccaatgtcgcagatcatcgacgggaaggcggtcgccgccgacatccgccgcgaggtcgccgccgacgtcgacgacctctcttacgcccacaacctcgagccggatctgaaggctgcgatcgtattgagcaagaaggactcgcatacttacgtgcagatgaagcgcaaggcgtgcgccgaggtcggcatgcgctccgtcgacgtcgacctcgccgaggacatctccgaggcggcgctcgtcgtcgagggccaccgcctcaacgccgacccagccgtccatggcatacttgtccagctttcattgccaaagcatattaatgaggaaaagatattgaacgagatcagctt

SEQ ID NO: 35631 - DNA, 219 bp, Oryza sativa
  unsure (1)..(219): unsure at all n locations
  Clone ID: uC-osrocyp017a12a1
ttttgggtttttttattttttgggggttaacatctcaaacnnctttttttttttttaacntttatttttcctttttttttttttttttttttaccatattactttttgttttttttttccattaggcaggggaaagcccctagttgcttatcaaacaaccttttaaatggttgaagggggcacaaaccattaaatcttctggggatagataaccaacgg

SEQ ID NO: 35632 - DNA, 479 bp, Oryza sativa
  Clone ID: uC-osrocyp017b01a1
gataaggaaagataaaaagtacttgatcattactgatgatcataaaataaagtacacttcaggaagaaggaatgacctaaaatggctccttcaacagaggaagaatagggctagacaaggtacacaaaggtaggcaaggccattgccgtcatcgttaacgttggcctcgatcagctgtctccgttctgctgcccgaagctgcatgatcctgagggcaagaaggagaagggattctcagagatgtcaaatccaggtcgagtgaagtcatcaagcccaccgaagcaaggatcaaagctcaatggcgagaaatagcgtggatcatcggccatcttcatgtcaagatttgggatgtcgtccgatgagctaccggggaagttatacccagcgctccccaccatggtgttcatcgcctcgctgccttgaggttgctctgatgctcctgttactttgatatcatccatagggagtgcaggcgtgtg

SEQ ID NO: 35633 - DNA, 493 bp, Oryza sativa
  Clone ID: uC-osrocyp017b02a1
ttttcggccgcaagaggggcaagcccgacggtgcgaacggcgccggcgggaagcgcgcgcgagaatcggagtcatttcaaaccggtgtaggaagcaaatcgaagccatgcaccaaatttttcaggttataatccaacttaaaatgaactccacctggtaacatttattatgcatggttatttcattaaaattttgcttctgttttttttcctaaaagaattgtattgttgctaacacatgaatcaagtaaagattgtgatacaggttgtacctaatccaagcttaagaaacactcactggagtaaaattggaatgcgcacagttgcgcgaaatcactttgaacctgtgaaagatgcaacagtataaggaattaaggatatgtaactccttgtcagatgaacaacctgtcagtaatatcatgatgcagcttcatctgctcaaattgagaaaagaagattgaatacatgacttgggaactgcaactgaactcaca

SEQ ID NO: 35634 - DNA, 542 bp, Oryza sativa
  Clone ID: uC-osrocyp017b02b1
ccaacaatcaacgagactgctcactttgccagagaaacagtcacagtagcattaattttatgaaaagcatagtaatcatcaaccacagtaggctttaacatcgcaggagaaaagggataacataatcacataaccaggcgtacgagaaatagctcaaaaataaaatgcaataaagaatccagaggtaaaacaagacagcacataagcctaaacggtcagaaaattcagcatcagccctcaaagtttcgagttacaatgactaatcgctacaaaccacaatggatctcaagcagcagctgatttccgaagctcattttcaccatgggcaaaatggcacctgtcgccaaaagtgcacgaccctttggtgaagttctcgcacagcttggtcttgaagttgcttccggggcctcccccgcggtgggatcctcccacaagtttcttgccttgtggaggggcaccgccaccgatgctgacattcagctccctcaccattgcactagcgttcttgatctgatcaaatgtgccctcaagctcaatgtttt

SEQ ID NO: 35635 - DNA, 475 bp, Oryza sativa
  Clone ID: uC-osrocyp017b03a1
gttcaagcatagccatctgaccacaaaaaatgttgagccactgcacacggtgcagtgtcagttgtagcattcacaacataccgagtttctttttaggaggtaaaactctacgagtctcacagcatagtaaaacgtagccagctattactagatacgagtagcattttttaagtcgcaaacaaaagggatacagtcccggcttaaggggtgtaaaatcagcttcactatcttcatgttcgccgcaacgggaaacagagcacaatcatctttgggtccaaaaatttacggcaaacctttgcgacgacgttgatttgtgaaccaatgacgagtttcctagatgacatactctgcttactgttgcgcgcactgaactctctgggcacctccaggcatctcatcgtcctcatcatacgcctcctgagcagcttgggctttcctgcgcatctcttcctcaatgttgttgacatcccgggaa

SEQ ID NO: 35636 - DNA, 337 bp, Oryza sativa
  Clone ID: uC-osrocyp017b04a1
atgaataatggtttacccccttccccatttataacttggggccaaaatgggggtggggggggccaatttaaccatggggcttaccaagtttggcccacccagaacaacaatgtttgggtttaaaacacctgacaattccataaccgagggttccaaaacacttgggcttgggccccccccattaaaatcaagtaaaccctgttccgaaaagagaagaccttcaaccattttttttaacaccaggatttgccggcgaataccctattgggacaataaatagggttcaagggttgacgggtgcacacaaaaccggtagcaacggttggggtttcccttt

SEQ ID NO: 35637 - DNA, 381 bp, Oryza sativa
  Clone ID: uC-osrocyp017b05a1
gtaatctaacatacgcaggctgatattatcacaatgttagccgatgacaatggaaagagtaatctaggtacaagcggatcattgacggtggagacaagacattggctgcaccacaacacccaccagtggcgccaacaaggagcgctatccgttataggacgagagaaaaagtaaaacatcacgatgtgaagtgaaactgaataattctagtagacgatgatgatgatggataggctccttaggacgcccgccgcccttagcgtcttgctgctcccatcttgtccactggaaggctcactcgtcatcgtcttcatcctcttcgctgccctcgtcgtcatcctcatcattgacctcggacttggacttgtcagattcctcctc

SEQ ID NO: 35638 - DNA, 434 bp, Oryza sativa
  unsure (1)..(434): unsure at all n locations
  Clone ID: uC-osrocyp017b06a1
atataaactccttatatttcttaatatatcacagtaggagcctctcatgctgtttctcgtaaaaaaaaagtgaatgtaattatttgtcatcgtcttggaagagactacggttcaacttgtggtgagcctcccgcatctccattttctcacacgtggtggtggccgccgcctcctcatcctgtgacgtattgctggcattggtgccatgtgtggtgagctgagggttgtgcattagctcttcgccatccacaaccacatctttcatcatctgccagtccctaaaatccgtcctcattataaaatggatgttttttacctttccactagctatgtcttctgccgttggtgcatttcttgggtatacaatatgacggccatcaccatccacagttatttgtacccttccacattaacangatttgacaaagtattta

SEQ ID NO: 35639 - DNA, 304 bp, Oryza sativa
  Clone ID: uC-osrocyp017b06b1
ttctatctgtcgccattcgccctccatccctgcctccgtcgccgtccatctccgtcgccggctgcgacggacgatggggagccggctccccctcgagagccatcgccaagtccgctccctcactgccctcgccgacttctcccgcgccagcgcccctccatcgacgtacgactccccgcctgccccggtatcggcggcttccctccgtagaagcccttgctcgacgcccatgccgccttctactacgaccgcgtctccgcgccggcttgtaagcccccagcattgtcgtgcttcacactagccc

SEQ ID NO: 35640 - DNA, 469 bp, Oryza sativa
  Clone ID: uC-osrocyp017b07a1
ttttgttagaattggcccgtcgtaattcataagacaaatcaaccaaactggctgattacaacagaagggaccaatcagaattcagaagaacaagaaacacattgcaagtttgcaacacagctctgaactttgtgacagacgtttgtcacaagtcacacgacccgttgaagagtcgtggacttgtggtaagaggcagtggaaaatctgtgttcaccagaggccaaatcagaaaaccataatgtacagaattttaacggcgttgcttcttcctgagcaccaactgaatctgatcccttttttacttcttcgtcctcctgggctcctcctggtcattctgcgccgcagaaaattcggtgatcctcgcctgcttatcgcagcccagatcggattcctgctgaatgatcgcgttgtattcctgatccttgaatgtcccccacagcaacatgtaaaggccgagtatgacaaccac

SEQ ID NO: 35641 - DNA, 522 bp, Oryza sativa
  Clone ID: uC-osrocyp017b07b1
tagtattgtagtgatggctcttcatgtactagcatcgatgggagatctatggagaaggtacgcgccgcacaatctgatgatactgtcgcagctgtgctacacgctcatgtacttcatcaccgaggccgcgttcaacaaggggctcaaccctttcatctacgtcacctaccggcatctcgttgtcgccgtcttcctcgcgcctttcgcctactaccaagagaagaaactgaggccgagaatgacgttgatgctgtttctggagatcttcgtgctctcacttctaggggtgagcctaactctgaacatgtacttcgcgagcttaatgtacacatccccaacctttgtcacgtccgtggtgaacaccgtcgcctcgatcacgttcgtcatcgccatcgtcgtcaggatggagatcgtccacgtgaggagcatacgagggctcgcgaaggtcgccgggacggtggtgtcggtcgcccgggtgaccaccatgaccctgtaccaaggcaccgtgatttcagcccctgg

SEQ ID NO: 35642 - DNA, 429 bp, Oryza sativa
  Clone ID: uC-osrocyp017b08a1
gctctagaaatcacgaattgaataacacaaacaggacagaaaatgtggtcaacacaattcacatccattgaaatttctggctaaaaacggatggacaaaaggatccgtccctcagacagctcgaataaatgttaagccatgtatttgaatgctaagccagcaattaaataaagcaagtattgtacaagagataaatcgatgcaacgcggtgttagctccatctcagcttgttcaatttggatccaaagcacccgcaaacttccaaagtctgataaattgcagggcaggtgtacagaataagcgggtttaaataattccatctaatcttcatcagcagcatgttcaagaaggtaatttgctgcgagttgctcgttcctgtcacaggcgaagaatgcttcgatgacacgtgctctgtcaaatcccatgcct

SEQ ID NO: 35643 - DNA, 424 bp, Oryza sativa
  Clone ID: uC-osrocyp017b09a1
ttttgtgttttttttttttttttgtttttttttttttttttttttttttttggttaatttcaaaactgttatttttcaacttttatctgaacactgggcttttttcggaacccccctttacattatagatttaaacataacaaccccaaagttttgatcttaaacaaaacagggtgatcctaggtagggactggttaactacatccgggtgatgggaacgggtcatcatttacctccagagagggcaaagaaggggcctgccctgggggatgtcatcgggtaggacatgacgtaggggtcgaacccctggtcctgcatgagcgccagcatgttgaagctttggtacgtcggggacaggtccggcaggggcacgttgccttccagggactggacaagctggcttgtccccggccgtgcgccgggc

SEQ ID NO: 35644 - DNA, 447 bp, Oryza sativa
  Clone ID: uC-osrocyp017b09b1
tctttaagcttgggcatttggtgaggcactgattgaagctcagcactaggcgaagtgcagggcatggtgcttcccaaaccagaaatgccgttctttgtcctgctcctcttcctcggcctcggctgcctccgcccggcggcggcgaccgacgagcggttcgtcttcaacgggttcaccggcgccaacctcagcttcgacggcatggcaacggtgacctcgaacgggctgctcatgctgaccaacggcacgaaccagctcaagggccacgccttcttcccgtcgccgctccagttccagagggggcccaacagcacggcgatgcagtccttctccacggccttcgtcatcggcatcatcggcgcgttcgaggacctgagcagccacggcatggcgttcatcatcgccaagagcaagaacctcacctcggcgctgccggggcagttcatg

SEQ ID NO: 35645 - DNA, 451 bp, Oryza sativa
  Clone ID: uC-osrocyp017b10a1
tttgtgtttttttttttttttgattcacatactgcaaattcatttttatatgctctaatcagactgcaaattcatttttatatgctctaatatacaactgaatggcttttgcatgcactacccctgagaaggcacattttaggaagagggccttttaattgtagcgtacatcggagtaggatgtgaagaaaaaatgcaactgattcagcaagaactcatcttggaaggcagaactagtatcagcaaggccagaagctggagaattgttaggcagaggaagatttggtccaagctgtgatacatcttgttagttttttttccccttcacaaccgattgttgccaacttctcttactgcggtttgctaattgctcccaacttgcgaaacagatgtttcacctgcatcttaatgccatgaccaaggttcaatacatgcccactattaccagctt

SEQ ID NO: 35646 - DNA, 381 bp, Oryza sativa
  Clone ID: uC-osrocyp017b11a1
ttttgtgtttttaatttttttgggttttttttttttaaaaaaataaatcgtgaatgtgggtcccaccataaacactgacaaaaaaatttttgtgagggcaacacaaaaggggcccccctaaactgtgggagaaacagaagccttttcatcccacatctggaggggggggcttacaattattaaaagcccaaatagtttatgtggcacgattcttaaccaaaatcccggggccaaaaacacaaatgattcatcccaccaaaaacatgccacggccatatagcctttcccaaaaaaaatcctcctaatcacaaggccgtagcggagattacaatgaccgggacgatgggccggtggacgatttaccaccgttagctccttggc

SEQ ID NO: 35647 - DNA, 392 bp, Oryza sativa
  Clone ID: uC-osrocyp017b12a1
tttttgtttttttcagaagacagagattcaccaccaggacggtatgtttctgctactgattacacgagtacagattgtgtcgattttagcacagttaatactcgcacaaccacacattcactaactttggtcttttacacataactgtcgatcaaagacttcctcatgtcatcaacaatcgcggcaggctgcccttctctcagcttgaagacgctctcaatgaccgatagctcagtagccgtagtgtctgagccacagaaagcagtccagtcattcactgtcatgcccgcagcaatgacctcgctgcctcggttcacggttccagcaacaagagggacttgcaggagcgtggacagctcatcaagatcttcaatggatgtatgaggatggac

SEQ ID NO: 35648 - DNA, 364 bp, Oryza sativa
  Clone ID: uC-osrocyp017c01a1
aatcagaatggttacaacacgtaagcatgataacattataaatggtgaaattctgatctgatagttctattcatacatgtatttccacttccatacactctagctgagcatttttttggctattgctcagatatcacaactctctactacactgacaaagtgacaagtgactacctgtacaatgtctaccatgctactgatggagcagagatagctccgaatttattatattttttacatacaggttttgctaaaaaaaagaaaagaaaagaacaaccgtgtgtatacctttaattagtcattccttccgaacaaaaaaagacacaagacgtttggtttcctgtggtttctgcttattaaccct

SEQ ID NO: 35649 - DNA, 411 bp, Oryza sativa
  Clone ID: uC-osrocyp017c02a1
gaagaataacatgttggttgcattgccatcgactatgtcatcctgttctgttccttttggtatctgtctgatcacaacaaatcatatacaattgccaagctagaacttcaccaatcgtgattaattacttactacaatctgaatctacatgatttataaacgtgcctgcactgcaaatgctatctgccttcctcctctatcaacgtgacgttgcccatgcagtacgactcgccgaaggagctggacgacacggccaggctggagatcctgacgttgaagtacgccggctgcctcggctccggcaacgtcagcccctcgctgccgagcatggcgatcacgtcggacatgttcggccggtcgtcggcgctgtcctggacgcacagcagctccacctgcacgcactttatcacc

SEQ ID NO: 35650 - DNA, 315 bp, Oryza sativa
  unsure (1)..(315): unsure at all n locations
  Clone ID: uC-osrocyp017c03a1
ccaaaaccaaccagttgtaaacttggtttattatactctcacagaagtagacaaactgcataccattctgctgtcccgtaacataattattacgttggtacaagaaaccaatgcttctaaacatagaagcgctacacacacaaccgngatctgctacgtgtatcgtatgctgatcgcggattgttatggaactggagatacagattacagaccggttacaataacacttaagatgcccccgtgcccacataaactttgcaccttacgggaggaaacgacgcctggtgccgaaaaagcgggcctatctgccatgga

SEQ ID NO: 35651 - DNA, 430 bp, Oryza sativa
  Clone ID: uC-osrocyp017c03b1
ttctcctcacctcacctcccgataaggcacgaggagactatctcctccccctcctcctcctctccccgccgacgaccccgccgagctacatctccgccgtgctgatcgcgtggagccgaggagaggagcggcggccaacgctacgaggagaggagagtgggggaggggaggggagctagccttatcttacccgttacgccgaagcctatggactcggagcactggatctcgcgcctggccgccgccaagcggttctacgccgcgcagctcggccactccgatcgagcggggacggaggaggtggacatggacaaggaggtgaggccggagttcgcgtgcccctactgctacgtgtgaccacgacgtactttccctctgtgcgcacctgagggaggagcacccttttgaggcccatgcggcgcctttgcct

SEQ ID NO: 35652 - DNA, 466 bp, Oryza sativa
  Clone ID: uC-osrocyp017c04a1
agtaaaaagtacattttatatatggtttcaacattttgacgtatcaaagctttacaggttacaattttaccactgccttccctcgtcttgctaagaagcaaaacttgttcactccagttgcgccggggtacatatacttttgcaaaaattccaaatttttacattatgcaagccaatagcgtggcggggatcacacacaccagggctttgcactaggatatgatcattcctccagaaaccgaccaggcccataaagatttgctgcaaatctatgctaacgtcgcaactgaccacagaccagttctctaaactatttctcgaacatatagatgaatcagacatattgcgctcacataaactctgcgaatcttctcactttgacatcagtgcaagggaagacggcatgacatgataacagaaaaaaggattcacttggatttcataagcattgcttgtcaatgtatat

SEQ ID NO: 35653 - DNA, 147 bp, Oryza sativa
  Clone ID: uC-osrocyp017c05a1
gtcaagacggtgaactcggttcattttatttggggtgggcgtttccaccatcagattgatataatacaccgcgaacaagcagaaacacttcggcaacaattttcgtccaggcaaacaccgagggcctattaactaaagtcatgcccg

SEQ ID NO: 35654 - DNA, 330 bp, Oryza sativa
  Clone ID: uC-osrocyp017c06a1
tttttgtgtttttaccatgacaactcttgacgatcttttattattaactaatctgaatacacggctcaagcttttgcacaaggacgagagcgaggaagaaaaggaagcttgagaaaatgggatgatctctgaatcaagcaagaagggtaaagggtaactaaaaacaagggcagggctgggcaggacggggaagggttttctgatgtgtttttttggtcaggcgtgcattcgtcgccgtcttcttgaagtcgatctttgtcgaccttgacctcgccgtcgatcagctcgtacaccgtagacgaccacgcggaggccgtcgatgtccatgag

SEQ ID NO: 35655 - DNA, 297 bp, Oryza sativa
  Clone ID: uC-osrocyp017c06b1
tgaaatatagaaaaaaaaaacagagatcccccacaacttccgaatccgatcggcggtcgcggcggcggcggcggcgtcggcgacggcgacggcggggagcttcttcccgatcccctcctgatcgcccgcaggatcgatcgagctctccccccctctcactcacctcggggggcgcggcggtggggggctagggatttgagccggatcgcggcgagcttgaaggggcgcggactgaggcggcgagaggagcgggtttccggttcgggggaaggaggggaggagtgatgaaggaaagga

SEQ ID NO: 35656 - DNA, 403 bp, Oryza sativa
  Clone ID: uC-osrocyp017c07a1
atcaccgccgacgaggagcgcctcatcctccacctccactcccagtggggcagccgctggtcccgcatcgcccgcagcctccccggccgcaccgacaacgagatcaagaacttctggcgaacccacatgcgcaagatcgcccaccacgccaagaagaagaccaattcaccatcgccggcgccgacgacctcctccggttccttgtcctcctcgctcaccacggcgacgacgacgatggcgacggctgcggcgctgcaagaaagcagcagctgcggcggcgacgacgaggccgtcgaccagctggtggcggcggccaccacgccggcgagccagctgctgacgatggactacaccatggaccagctctggaacgacatcgcggcggcggaagccgatacgagct

SEQ ID NO: 35657 - DNA, 465 bp, Oryza sativa
  Clone ID: uC-osrocyp017c07b1
aattgcaaaccactgcttacactgaatatatgacacatagtacaatcatagtacatataccatgaaattaaagcaatatacatatagcacttgatcccatcagtcttaactactaatactctctcccctacatgtacacaagctaggcatgctgattgatcaagctatagctagatatatataaagcagagttgtctgacaagcaatgcataatacgtgcatcatcaggtgtaattacagtagacagatgcaaggatatgcagtgcaaatatagatttcgcagttcgttcatcagatgatgagagtcgtcgtcgatcgatcgtcagctaattaagctaagagcagcaattgaattaaggcgttgcttgtttgcaatttgagtagtactattgcgaggcatcgagcatcttcttgtagtactcctcgtcgtcgatcctccacagcgagtagtcggtgcagaattcc

SEQ ID NO: 35658 - DNA, 409 bp, Oryza sativa
  Clone ID: uC-osrocyp017c08a1
tttttgttttttttttttttttttgttttttctttttttttttttttttttttttttttggcaataaactgggtgtccccaaaaactaaaaaaaaaaaggctttatttgtctttatcaacctcgcccaataaagtccgctaatttggagaccccttctgttacaaactacctggaaaaactaggttaccttacaggggggggctttggcttttgaaaggaagggccccacagtttgttacatactttacactttttttaaaaaccaccaccaacatgcgggacaaaaaaattggggattttcttccctcaacatccctataacttttttgccttggacccacccggacaggaacctcccaccgccaaaccgggttacacccagatgggccttacatgggtttggggggg

SEQ ID NO: 35659 - DNA, 431 bp, Oryza sativa
  Clone ID: uC-osrocyp017c09a1
aggatcaaaacatttctattaccacaactttttaaggatggaattgagtagcaatactttcaccccaaaatacagtttagcgacaatatcttagaaaagccgcttgctttgccgccatggctggcaagctgagcagagcagctaacacaaagaacacgagatcactataaaccaaacggcaacgaacgaagaaaatacagggtcttttttgtctgaagatacacgaagcggttcgttttcttttatttttagtctcctctcctcctcgatgatgggtgtatggcaatggcaatggcgatgggatcttggcttagttgatgggaaggggctcgccgttccactccttgaggcagtcgagcatggggtcgatgagcttgccctggctgatgccgaggaacaccttgttgcactcctcgccgggggacttgagc

SEQ ID NO: 35660 - DNA, 441 bp, Oryza sativa
  Clone ID: uC-osrocyp017c10a1
ttttgtttttttttttttttttggttttttttttttttttttttttttttttttttttttttttttttttttttttctttttcttttttttttttttttttttttttttccgggacaacccccgggggggggtaaaaaacaaatgggttttttttgcaacccgccacagtccccccgggggggccccttttggggggccacaaaccctggcaaaacaccgggaaaaaaaattcatccgggccgggggcccgggctttttccccccccgggggggggtgctccccggggccctggggggggacccccccaatccccttttggaccccccccccgttttttcccccgtcttgaacccccattagggggggggcccgggaacctaaaccccccgcccaacggaacaaaacctgggggcccccacttgccccccctggggggggg

SEQ ID NO: 35661 - DNA, 304 bp, Oryza sativa
  Clone ID: uC-osrocyp017c10b1
cttcagttgaatatagtcttgcacatgctgtaagctcgacttcgtacaaactaccgttgcatcatgccacgggctttgggatcatcctcagctaaacagcgcattgtacatcttgagcatgatagccctctgttgaaccggtcggagcatgaaaacattgatcagtcttttggaacaaacacggaagatggaaaactgtgtatggtccatgaactagcaactcaaggctcttcggctgctctatattaataatacgcgtttcaggactcacaagtctcagcgttcacaaggcaccttttgaata

SEQ ID NO: 35662 - DNA, 470 bp, Oryza sativa
  Clone ID: uC-osrocyp017c11a1
gcccaaactacagcgggaaatccatctaattaaacatcaagactcgtctcaacaacaacctgccacaattcacaaacagcaggctgctgcacaagacggtgtacacggttcattttatttgggtgttcgtttccaccatgaggattgatataatacacagcgaacaagcagaaacattcggcaacaatttctccaggaaaatcgcggcctatttcgtcatcattcccgagcgagcgttatttggaagagggagtctttttcagacaggcacagcctcaatggcaggagcgagtgaccaacgtcgacgtcggcgtcctagtagccaccctggatgtaggcgttgagccggttcagctcttcccggtgctcgctgaccacggcgcggacaatgtctccaatggagaccatcccaaccatgcccgtgccgtcgatcaccgggatgtgcctgatgcgcttctctgtcatcagct

SEQ ID NO: 35663 - DNA, 407 bp, Oryza sativa
  Clone ID: uC-osrocyp017c12a1
agcaggctctactactgctgctgctggacaaagtttgaattcttaactacttgcgaatacagcgagtccagctttcccacaaggacgagagcgaggaacaaaaggaagcttgagaaaatgggatgatctctgaatcaaacattaagggtaaagggtaactaaaaacaagggcccggctgggcaggacggggaagggttttctgatgtgttttttggtcaggcgtgcatcgtcgccgtcttcttgaagtcgatcctttgtcgaccttgacctcgccgtcgatcagctcgtacacctagaccaccacccctgagcccgcgatgtccatgagcaccaacctcgggttcacgttccaggtgatgctgctgtaggcccccgtggcggaacccgggttgatgacccctccccc

SEQ ID NO: 35664 - DNA, 246 bp, Oryza sativa
  Clone ID: uC-osrocyp017c12b1
ttttccgcccgctctacgtctccacgggctccgccgtgtcgtcgccgcgcggggcgttggagatggcggcggcggcggcggcgatggggatggggctgtcgtcgctccgggtcgtagtggttcacgccgcgattgagctctcccgccggttcactcacctgcgggggcggcggggggggcggctcgtggcctgagccggctagcgtgccgcttgtatggctgcccagtggggccgggaacgtacac

SEQ ID NO: 35665 - DNA, 303 bp, Oryza sativa
  Clone ID: uC-osrocyp017d01a1
ggaaaaaaagggaccccccttttctatggaaaagccaaaggaaccgccaaaacaaccccagggtctatgggaaaaaaaacattgcacagggaattacacagctccttggtgaaatggggaataagggggtggtctaacacacaacgcagtctttgggaggtggcccccgcggcaacaggaaactttttgggggatacattctccaacctgggctgggaaagaaattggtaaaaaaaatgaaacccccccccgcccaaaggaagaggaagcctcagttgaaaaaggtgcaggggccgaaaaacc

SEQ ID NO: 35666 - DNA, 158 bp, Oryza sativa
  Clone ID: uC-osrocyp017d02a1
aagaaaacctgaatccatatccatttagggagaaaaaaagtgaaactcccatgggggggatggggaaaaacttaaccctaaaattattgtcaaatggggaaaaataaaaccacccaggtccaaactacaaaataccacacatgttttgcctcactacc

SEQ ID NO: 35667 - DNA, 520 bp, Oryza sativa
  Clone ID: uC-osrocyp017d02b1
gttatcgatgggagtttgcttctcatctttgtcagagctaattatacaattgagactgtagaggcagagaggatatctgctgatcatgttgcccatctcaaaccatctgatggtggctctgcggcgactcaattggctgctcatctgacaggaatacacagtgccatcaagatgctcaatagcagggtccgtgttatccatcaatatcttgtttccatgcagaaaggtgatatgccactggacaattcgctgcttaggcaagtctcaagcctagtaagaaggctaccagcaatggagtcagaaaaattccaagatgacttcctaatggaatacaatgacaccctcctcatgacttaccttgctatgttcactaactgttcaagcacaatgaatgagctggtcgagaagtttaacgcgacatactagaggtcgactgccaggagaggaggccgaggtgctttcatgtagattttcccccttctgcatctgcagctggttctctgctgagattttggaaata

SEQ ID NO: 35668 - DNA, 412 bp, Oryza sativa
  Clone ID: uC-osrocyp017d03a1
agcatgtcaagagtagtatctttattgagaagcaaaagcaagcggcaaaaccattacacactgcttgctgggcaccgtcccatggccgaacgtgaaaaacatagcccaagagagtagtacaatttacagcagcagtagcatatttccctcaattatacactcaccactcatcgtcacagcacaagcactaggtttttggtcatgctaaggaatgaaatttctccagagctagcacctaaaacctttttccgtttcggaggaaatcagctcaggttttctgacgtggcatggttacaacaagggttcttgcttgtttctgcaagagaaaccagtcatgggccttatggagtttaccaaatttacaatgaccggcttggaggccaccagaatatgtcggcgaaggctttttttt

SEQ ID NO: 35669 - DNA, 535 bp, Oryza sativa
  unsure (1)..(535): unsure at all n locations
  Clone ID: uC-osrocyp017d03b1
ttcctatattatatctcactcttgtgatagcactacagaacaattagcactatgtgctgctggagttccgcagagacttgttaaccattttggaggctccatgaatctacgggatgcttgcttagattctttgactgcaatcataagaaataactgggaagttgcttcaagatttgcactgctggaccatggaaaagctttgcgctcaatagttgcattaatacatgatcggagcccacgcacaagactacttgcttgtttgtgcttgattgcgcttagccatgcttctccctgtcactttcaagacagacaaattaaaaccaagttgatcctggtcttacttgagctcatcgaggaacctggtcatgtaggagatgatgctccattggcattgacaaccttgatcaaagacagtgtggaactgcagaaacaagcactctcaacaaacgcagttcagaagttaagcaaccatcttatagcaaattcgttggagtcaaggcgtgcagtgaccatatngcttgtttagctgaacttg

SEQ ID NO: 35670 - DNA, 418 bp, Oryza sativa
  Clone ID: uC-osrocyp017d04a1
aataataaactcatctgaattttttggccacaccagcctgcctgacataacaaaacaacactgacacgctacatagtgcggacgtgacagttttatcttgtcacactaaccaaggtgagtattatgatcattcatttaccttggctcgtatctactgagcataaccatcatcactagctcatttttggatgtggattgaactttgactacgtatttcgcttaccaaaacaccatgcatacgtactcggggtgtaacctaccccctccatcccaaaaagaggctaatcctagctaccaacctggatacatgcgtgttcaaattcgtagctagagtttgtctttttaggggacagagaagtagctcatttcagaattcctgcatcatgtatgcacttacactcattctgttgtcaaacaa

SEQ ID NO: 35671 - DNA, 425 bp, Oryza sativa
  Clone ID: uC-osrocyp017d05a1
tttttgggtttactgaaataatttggtactatattttattctaatcgaagaacatgtctatatctaacatcaaaggtcttatttagatgcaacatactaattccacaacaccttatcgaagcctaccatactgcatcacatatatcagcaaccataccgtatatacacatcataaccttaccaaatcaggtcacatgcagagtcatcttcacatcataagttcaatactaaccaaaattacacaataccaagtttccaatgatgctatgcataacaataaagctgctaacgatagtaattacggataattggacccttaagccccgccaacttcttccacacaggcggacacagcatggaaggcacggacacgggttccaccagccgatcgcttcttacgcttgcctgaaatcatcgtccacatt

SEQ ID NO: 35672 - DNA, 399 bp, Oryza sativa
  Clone ID: uC-osrocyp017d06a1
aagaggcacaggggaaatgatggataattaaatccatcgatttagattacgaaatgatacaagtaccacaactaaaacttgactttatagtccctaatcagcagagcgaactggagcataatacatcatactaacctaaacagaacgttgtactacataggattgaaaggggtccgacaattagctacttgtctgaacggcagattgaactgcagctagccagctacataaatacagctaaagtacaactaagatcgatctcttgtagcagatcagagggattccctcttcttcttggtcttggcttgctttgccaatagaactgagagcccagtcaatgcgaatttcttcctcttccctgagacccttttgggaacagccgtcttttctttggacaaa

SEQ ID NO: 35673 - DNA, 481 bp, Oryza sativa
  Clone ID: uC-osrocyp017d07a1
tttttgtttttttttcagtcaaaaaaaattctggaggaaatacatcatgatttcacttgataatgtgactttacatccaacgtgtatgtacagacaatttgagtcgtggcaccaaacagagaatcagaagtaatgcctaactagatatcatatcagcatacctagagtcaccctgtttagtactactcagtactcgtaattcttcctcactacacctaattgttaaactgaaaatgaaacagacaacaaatgggacagaatacactcccgcgacaaattggaacatggcttttatagctcatatgcactctcccctccctacacatatgattgcttttgtagctcgtacgcactctcccctccgtagcatatgactccagacatttaagcttcgtgtcacctaaatactcatgtattcaccgcaactaggctactgccgataaaacagaagattgacaaacaggagcaatgctacataact

SEQ ID NO: 35674 - DNA, 280 bp, Oryza sativa
  Clone ID: uC-osrocyp017d07b1
tctactggattattccgtattcgttggatatgagtactccaaacaggagatgctttttagcctccccactagcctgcaccaagtggcttggcaaacaaacaataggtgatgctgacacctttcgatggcatcagcacaagtgcacaacacatgttgagttttgagattgtctacctcatccatttttttcttgggagcctgttcaacttattatagatgcattgcatgtatatatgtctgaataaaaaggtctgaccctgttatttcgtgctttttcacc

SEQ ID NO: 35675 - DNA, 467 bp, Oryza sativa
  Clone ID: uC-osrocyp017d08a1
tttttgtttttttttttttttttttttttttttttttttttttttttttttttttttttttttccaccaaatttccgatttgtcctcccgaaaatcctccaattttccatactgtccctaacaagcagggtaaaggaaaaatgatttcctcccccatggtttttttccccccgggctcttttttttttcccaattttttgagaattcctccaaactttttttaagaaaaatcaaaaaatgggcaaaaaatcgggccgggttaaaattttggccattgattggcctaccggggttttactaaaggggcccttcctggtgggggcaatcagtttcaattttagccaggaagactgttaggggcaattgcccctttgccctccccgggagatttaaaacattttccccccttttccgggcccgggaaagaggttatcttttctgcatcttcctgggaatagcctcctttg

SEQ ID NO: 35676 - DNA, 408 bp, Oryza sativa
  Clone ID: uC-osrocyp017d09a1
gatgaaactacacgggttggtaactagtatataacatgacaaatgctgtctctctaagtaccagtactctttcatctgcaaaggagtaccagtacatacaccagtactcttaataatttgctctcgattgaatgcgtactgatatagtacctagatatccagatgtatactagaaaatgtacatcaagtcactcgaaatctgctgccaaaggatagtgccatatgctcaacctggaaagaactgctagcacaccctactcactctagttcctgatagcaatctcttcaaagttccagtccctgacaagatcccttgaaacagcacggcttcgttgaagtcgaggagcgccttcagtgccttggccagcagccattagaggaaaaggtgtcaccttcgacgtccctaca

SEQ ID NO: 35677 - DNA, 565 bp, Oryza sativa
  Clone ID: uC-osrocyp017d09b1
ctctctctctccatcttcatagtccaggcgtcagcttcagcccggggcttaagcgaactgcgggatttgctatcccgggcgcgagatcaaattcacgaagagaaagcaacgacagcaatttcagctgcatcataaccatgagtctagcttgtctagtatgccatggcatgagcagcccctcgcactcgtttaggagctattcggtctcaagttcggaggaggagaacaggtgtggagctgttgttgcctgcctaacacggcgagtaatgcctgctggaaccgctaacactgtagggacgtcgaaggtgacaccttttcctctaatggctgctggccaaggcactgaaggcgctcctcgacttcaacgaagccgtgctgtttcaagggatcttgtcagggactggaactttgaagagattgctatcaggaactagagtgagtagggtgtgctagcagttctttccaagttgagcatatggcactatcctttggcagcagatttcgagtgacttgatgtacattttctagtatacatctggatatctaggtactatatcagtacgca

SEQ ID NO: 35678 - DNA, 334 bp, Oryza sativa
  Clone ID: uC-osrocyp017d10a1
agtcgcaaatgaagatgtgttttcacgtttcgatcaacgcgaccaccattacagaaagatccgtgtcatgtagcatgctagtatttgcaaagctactacgacgacaaacctgagaagattcacaccgtatcaacaaaatgcaaaagaacttgtattcaccataaaacccagttgaagtgcggctctgtcataatacgtagaggcaatagccgcggtggttttttcttatgtgcaaagcgggaagagaagctctcaagacctcttcttcctcttcttctcctccgacttgtcagacgcgttcttgagcatgatgacaggatccggacagggacgg

SEQ ID NO: 35679 - DNA, 439 bp, Oryza sativa
  Clone ID: uC-osrocyp017d11a1
tttttgtgctactatggacaaaacacctctacacacaccacgcaaaaataaaaataaagcggagatcatcggatttacagtcccataagattatctctctctcatgagtaggaatagcccatttgggattctgcaagactccaagtagaatgcatcttgcagtgttcactacaaacttaaatgagtgaatatggccggcaccaggtcgaccactgaccatgcaaggctggcgtactgaacgaaccttatgccggtgtccacatcgcacgccttgtgtggaaagagggcgaacaccttctggagataaccgccctgcttctcgtgggacttgaccttgcacttttcggaagcctatcccgctggaacatagcaggtcgatacaataggaatgcccagggcgttgcacatcaccgcgtgaagccatttcgagagagcttta

SEQ ID NO: 35680 - DNA, 457 bp, Oryza sativa
  Clone ID: uC-osrocyp017d12a1
ttttggttttttatttttttttgtttttttttttggctgcatctatatgcaaatatttttttctccaagcaaaaacaccaatccacaaaagacactttttgaaacaaattatacatacatgaagaaaaagaaactactacctatgtcaaagacagtatataatcttcccctgttataacaacatgtactggtggcattgcatctgcagggggctttcttttcttctctttcccctgtgaacttgttcagtatagttacaagaccaaaccaaatacaccaagcccatatgatgtagtcctaggagttacagccaaaaacatggcaagaaactatggagatgatgaagatgatttgcttcaactcgacggagacgtaggtggcggagaactccggcattcggggcaggctccggagcacgcttttggagacctggttcggtggggggttcccccttggg

SEQ ID NO: 35681 - DNA, 475 bp, Oryza sativa
  Clone ID: uC-osrocyp017e01a1
ggaaatcaataagcgtccgacatatgttttgagtaaaaataatccagatagtagcattcggcgaactaccaaaaacccaagggaacaagaccagccacagaaggccacatgaagtgcatagtttgatgttttcattactacaaattcatagtatcaaatttaatggagcttcattgcaccacagctaagattcggatgtaatcggacatcaaggaccagcaaatagccgtacatgagaagtccgtgtcactgctcacatcagcatatcacttctattcagatttcgcatcaggagaccgtgaacgagatgggctcctgcttgggctccgtttcttggggcttgatgcttcaccatttgcaggagacgcatttggagatttggatcttgctggtgatcttgatggagagcgcccttttgatgctgaccgtgaacgggaagaaacagaccttgatcgagatcgagatcgggatgctg

SEQ ID NO: 35682 - DNA, 357 bp, Oryza sativa
  Clone ID: uC-osrocyp017e02a1
ggtgttaaaaaaaaaagggtaccacattgtatatgaggatgaatgcatcctaacgcgaaactggctggattcccctaaaccccataggtgcgttatttggggcttataggcgaacttattggacaggtgacggtctatagattctacaacacggtttctaaaaattatactgcacttgacctgtgggagaacataggccctggtgtgtcctggacgattgacctcaaatctaaagaggctgtatatcacagtgttccctgccacagtataccccccgagagtcatactggtgatgaggcccttcgggctgccacctgtcctttaaaaagcataggggcctgatgcaccaggacacga

SEQ ID NO: 35683 - DNA, 306 bp, Oryza sativa
  Clone ID: uC-osrocyp017e02b1
atcgcgagcgggccgttcatctctttcctgttgttaagatgtagatgtttgtgttgacattgatcggcttgacttttatccctgatggtgtatttttttgacaccagcgagaatagaaagggttagaggcaagacaaggagggcatgcacccggaccagcagggtcttataatacctggcaagcagccgtaggacggcaggaccctcgctgaccacaacatccaaaaggagtccacccttcaccttggccttcgtccccgtggtggcaggcagaactttgtgaagactcttgccgacaagactatc

SEQ ID NO: 35684 - DNA, 317 bp, Oryza sativa
  Clone ID: uC-osrocyp017e03a1
ttttgggttttttggcgaacaagggtttcaaactcttttattcctcctggttttatcttagatttcattccgggggaataaaccccgcgggataaacaccataacccaagcggactcaattcatggtaacatgacgtacgaagaacacctaaaactggttggatggatagagggctgatagactagagagcgccactgggcacggatagcgacttaccggggtgataaaacgattttgagacggcttgttaagggcaactgggcacacaggaccctacctatctgttacttcatttcccgtcagattcgtcggcgta

SEQ ID NO: 35685 - DNA, 284 bp, Oryza sativa
  Clone ID: uC-osrocyp017e04a1
gtcgtctggcaaattagtcgcaatctgcgtaattagtttttttttagcctatatttaatattttatacaggtgttcaaacgttcgatgtgacatgttaaaaaattttagggtgggattgcggaagggaggaaggaaatagttaggagtataagttacttgggttggagttggggctaccctggattcctggggcaggaaccacagggttcctcttgatcatgacggtcctttctaatggcaaaaatgtctttggctttcccaaattgcccaggaacgagtactt

SEQ ID NO: 35686 - DNA, 241 bp, Oryza sativa
  Clone ID: uC-osrocyp017e05a1
gcaagcggtggcggggaggcgccggcgcgccagcgacccgaggcaccgcgcggccctggaggactgcgtccagcatgatggggctcgcgcgcgcaccgctcgccatactcgcagggttgcgacctacagaccaacaacgtcctctacctgctaataactgaactgctggttgctgacgaatgtcatgccgaagctccaccagctgggccacgacgttgttgcatgtagagcgtcatggccc

SEQ ID NO: 35687 - DNA, 291 bp, Oryza sativa
  Clone ID: uC-osrocyp017e06a1
tttttgggtttttttttttttttggttttttttttttttttttttttttttttttttttttttttttatctgatttctgttcatttgttcttggattaagaacacagggaataaattccaggaaggggaaagacatacacccctaaccaaaccggaatatggtgggctataaaaaagactactacggggggactgacacatacccgaagtggaaaaaaaaacccccccaagggagggacggcaagagaaatcacggggggcccgggggtttgcctacttaggcggggcccc

SEQ ID NO: 35688 - DNA, 506 bp, Oryza sativa
  Clone ID: uC-osrocyp017e06b1
ttcgtgcccgggctgcgcctcgtcggctgctgtaacgagctcaacgccgggtacgcggccgacggctacgcccgcgcgcgcggcgtcggcgcctgcgccgtcacgttcaccgtcggcggactcagcgtgctcaacgccatcgccggcgcgtacagcgagaacctgccggtcatctgcatcgccggagggccgaactccaacgactacggcaccaaccgcatcctccaccacaccatcggcctcccggacttctcccaggagctccgctgcttccagaccgtcacttgccaccaggcggtggtgaccaatctggaggatgcgcacgagcagatcgacaccgccatcgcgacggcgctgcgggagagcaagcctgtgtacctcagcatcagctgcaatctcccagggctgcctcaccccacgtttagccgcgaccccgtccccttcttcctcgcccccaggttgagtaacaagatgggtctggaggctgcggtggaggccactgtcga

SEQ ID NO: 35689 - DNA, 491 bp, Oryza sativa
  unsure (1)..(491): unsure at all n locations
  Clone ID: uC-osrocyp017e07a1
tttttgtttttaaatgaaatcatggagtccattgaagagtgggttgtcaacatacttacaccaaactgactggatacagctgaaccactagatcagttattctgggtttctaagcgaacttcttggcgaggtgacgggctatgatttcagatacgggttctaagaagattacttgacttgaccctgggagaacatggccctcggcttcctggacgatgtcctcaatctcagagtctctattcacagattccctgcacagtatacgcccgatgtcatacggtgtgaggcctcgtgctgcacctttctttaaaagcatggtgctgatgcacaggacacgagcacattttgcagacagctcccacccatggaacttgagaagcttgatgtcctcttcagcgtctagtgatttgatgaatgcaacggtttcatcactgcatggttcacgagccatgggncagtacagccactcaaaggtacaatcttcaaacttc

SEQ ID NO: 35690 - DNA, 388 bp, Oryza sativa
  unsure (1)..(388): unsure at all n locations
  Clone ID: uC-osrocyp017e08a1
gcgaacaaaactttcgaactcttttttttctccttgttttctatttcatttcattccgatagatagcaacaagcagttcaaacaccataaccaaagcgaactcaattcatggtaacatcacggacgaagaacacctaacactggatggatggatagagggcttctcgactcgagagagccactggacacgataacgactcgactcgatgataagatgattctgacacggatagctaaggataactggccacgatgggccccaccaatcagttcctccagttcccgccggagtcgccgccgtagccgccgccacggctgccaccgtagccgccgccgccgacgccacggccgncgccgtagccgccgccgccaccgtagccgccctcac

SEQ ID NO: 35691 - DNA, 352 bp, Oryza sativa
  Clone ID: uC-osrocyp017e09a1
aaaaaggcagctatattattcacccatatagttattaacagagacttaacaaaaggggaataaaccccaggtgatctcatgtctaatactcccagtaacaactaataataataagcactagcacctccagctccaggtcctatgtgctagtgcagattgcacatccaattacacaaattattgctgcaatggggattactggagtgttctaactttctttggcgccttcatcaggtgcagcagcggcaacagcatcctccttttcttttacttcctccgagcttacctccctcggcttctcttcggttgctggcgccttctctggctcagcggcagcggcggtttcagttgg

SEQ ID NO: 35692 - DNA, 183 bp, Oryza sativa
  Clone ID: uC-osrocyp017e09b1
tcgaggaggcgagaggaggaggaggaggagctcgtcggcggcgagcgatggcggcggcggtggcggagctgtgggagacgctgaagcaggcgatcgtggcgtacacggggctgtcgccggcggcgttcttcaccgccgtggcggcggctgcttttctttacctctttcttgcttgtgatcttc

SEQ ID NO: 35693 - DNA, 354 bp, Oryza sativa
  Clone ID: uC-osrocyp017e10a1
tttttggtttttttttttttttttgttttttttttttttgcagggttaaaacttttttccttgttatacacacaaaacctgaattaatgggttattatgcatttatgctttacaatttcctgtgaatcaaagaaagaaacaactcgttccaaaaaacgaaaaaagaaaagaaattaatgatcaaaccacattactggggcagctgacgcttggtttccactggacctgccttgtctccatccaagccaagaacttgtacaccttaccaaaaatgcacaggaacaccaggccggccacgagagcgtacgccgggacgcttgccggggggccctccgcgaacgcccacccggggag

SEQ ID NO: 35694 - DNA, 469 bp, Oryza sativa
  Clone ID: uC-osrocyp017e11a1
ttttgtttttgagttcaaataatgaatatatttgacgaattcaagatgtacatacatgtacaattaatccaaaaaaagtactaacaaattaatttcccagcttgagatcatgcagacgaacaaattcctctccctgctaataactgaactgctggttgctggtgaatgtcatgccgaagctccaccagctgggcacgacgttgtagatgtagagcgtctggccgccggtggatgtgacggcgaaggagagcgcctggccgacgagccccgagttgcactgccagttggcgccccagttccggttcagcgtgatccaccccgtgcttccccccttcaccgacaccgacctcaccgacccgctccccgccacgttcgacaccagcaccagctcgaagaagttgaaccctcccatcgtgaacctgatccctccctgcctccagcacttcacctgttggtagaggacggggat

SEQ ID NO: 35695 - DNA, 541 bp, Oryza sativa
  Clone ID: uC-osrocyp017e11b1
cagaacctcggttacttcctgatcagtgttcgattctctgctctatcgtctcgacggagatggagtacgcgatcttattcgccacgtcgttggtgatcaccgtgctagcagcatccggcttcgcgccggcgcatggctggaacaaagggacggcgacgttctacggcggcgccgacgcctccggcacgatgggtggcgcgtgcgggtacgggaacctgtacacggcggggtacgggacgaacacggcggcgctgagctcggtgctgttcaacgacgggtggtcgtgcgggcagtgctacctgatcatgtgcgacgccgccgcgacgccgcagtggtgcagggcgggcgccgcggtgaccatcacggccaccaacctgtgcccgcccaactgggctctccccagcaacagcggcgggtggtgcaacccgacccgtcctcactttgacatggccgagcccgcctggctccagatcggcatctacaggccggcatcatccccgttcttaccacaggtgaagtgctggaagcgggagggatcagg

SEQ ID NO: 35696 - DNA, 422 bp, Oryza sativa
  Clone ID: uC-osrocyp017e12a1
ttttgttgttgtgaaatagaaaatagcatcatataatgagaattgagaagttgagaacatgcagcaacagactactgttcaactgttcaagtatctagttacacatgaatcatttcccagtaacctcatagacatccacctcttcccaaatcgagactatgttgatctattcaaaagactactatgcctgtactgacttaaaatcgtcgctaaattctttccctttttaagttttggaagagaagtgtattcacgtagaaccagtttctttgcctacttacaatgaacaatcacaacgaaccatgccggatgcagtcacgaagaaatggcaggtgaaactgctcccgagtggctggcgacaatcttactgcatctactgataccttcgaacgcctgcacgcatacttcggaaaaccccatca

SEQ ID NO: 35697 - DNA, 520 bp, Oryza sativa
  unsure (1)..(520): unsure at all n locations
  Clone ID: uC-osrocyp017e12b1
ctggatatggttactcttggcaaaacactagagaaactttatgaagaggagcaaaaactctacaagttagtcaaggatgaagaatttgcaaggctccagtacagaaagaacacctcgttgctacaaagactagaatcaggtgaccatgataaattgcatgcagagaaagtgcgagataatatagaggaattgcaagctcggataatctctttggaggaagctgttggtttgacatgtttgtccatatcaaagctcagagatgaggagttatatcctcagattattgaattatctgcagggcttgtgcatatgtggagaaacatgtatgagtgccatcaggttcagaaccacattgcccagcaagccaatcttctaggcaatttaccagggaatgaaccaacaactgacactcattgtcaggcaacatctcagctggaagttgaagtttctgcatggcatagttcattctgcaatctcatcaccttacagngtgactacgtaaccattcttaaccagtgga

SEQ ID NO: 35698 - DNA, 454 bp, Oryza sativa
  Clone ID: uC-osrocyp017f01a1
cagacaaaaaaaaatgctagtttgctatcacagagaaattacataaggtttgtttcatgttgtagtattacatttcaacaagaccattgaggattacatcagaatcatgtcttcacttggtagttcttttaacaaccatatgataatacacagtgctaaactagttctgggagttcatgccccacttgtcccagatcaccccaaaagaatgaacaaaactttactgagagcagaagaatttacgaaaatcaaacggccatagttccctaatccacctttgtcaagtgcaaaatagaaaggcggcaggaactggtctgcaggatcatagagtaaaggagtagaatcgcttgcgacctttaggcttaaattcctcagcaggggcataaatcttgacactgaatagtcctgtgccatcctgtgctatatcaaaggtaaaatcctaaaatatccttgc

SEQ ID NO: 35699 - DNA, 442 bp, Oryza sativa
  Clone ID: uC-osrocyp017f01b1
tggttcgcgtgggcggcaaaataccgaaatttctggcacatcgtcttttcccatcatcaaggttctcaatctggttagacagcaaattgcgattacaaaacgatcctatccttatcctagagtattttctttggcggcatggctatgaatatgctatttccaatcattatgatcgacactgtgtttgggaggaagtggcacagaacaaaaagctgaacaagttcaaccatacaataattgatcagcagtttgagttttaccaagcagatggactgacaaagttcaacccatcagatcccaacaagctgctaccaagctatgtccctgaaggttctttcatcgtgagggaacacacaccaatgtccaacttattctcatgcctatggttcaatgaggttgatcgattcacacctcgtgaccagctcagttttgcatatacata

SEQ ID NO: 35700 - DNA, 259 bp, Oryza sativa
  Clone ID: uC-osrocyp017f02a1
tttttgggtttttttataggggcaggggcaacttattcataaagcatattgctagggaccaggaaactgtctcataaaactaacatatcataccgactcgatgggccattgaaccaggcccaaggtgacatcagctccacaaatgcttgacgaacagaggctcgggatgaccaggcacataggcagatccaccaaactggctgattactgaccaccacggaggcgagagcacccggtggggggtggactccatatggat

SEQ ID NO: 35701 - DNA, 456 bp, Oryza sativa
  Clone ID: uC-osrocyp017f03a1
gatatgatgatatcggaattaataacatatatatatatatataagggtagaatataataacaagaaggaataattagggaagaattaatgggtataggagtagctagctaggaggagtactggacgaaggaacggtagaaggtgttgggcgtccagttgagggggatgacgtcgggtgccaccaacgtcttgccggagtcgctccggatgcggatggagaatggcgcccgcaggcggtggttggagtccagcctccacaccgacccccacgactcccgcatcggcgtccaccttcctcctccggcgccggcctccttgaggtccacctgcgccacgtctccgtcgccgttcttgtactccaccagcaccgccaggtacacggggctggacccttcctccacgtggaatcccaccttgaaggcccggaactcgcacggcacgcgcgcgaactgcacg

SEQ ID NO: 35702 - DNA, 223 bp, Oryza sativa
  Clone ID: uC-osrocyp017f04a1
aaaaagaaaaccccccaattaatggggggaaagggggagaaaaaaaaccaaaaaagggaacccgggcaacaaaaggggggaacccaaaacccccccaaattttccaaaaattttttttttttttttttaaaaggggaaaattttccaaaaattttttaaaaaacgggttaaaaacccaagggattttttaagggtccccggggagaaaatttttaaccccaaa

SEQ ID NO: 35703 - DNA, 378 bp, Oryza sativa
  Clone ID: uC-osrocyp017f05a1
caacctcaccgaaggagggtagatctagcttcttacattcatttagactgtacaatatacatgcatcaacagacaaacctcaaaaactaaaagccaaaaaaacatccgtcaaactagcaagagcagcctcataaacttgctcctcgaatcaaaggaacagatacacataacagatcatgtcacaccaccttgataaacaagcagaagaccttgtttcgtgcaaatgggcaaaaaaaagccaggctgcttcgatgctcctttggagggtgttggcttggatgcagcatgatcatgcacgagctaatcctacaatcctacaatttgcagttgatttggtctttgcactgctgaagacgatattgaggagattaccgagca

SEQ ID NO: 35704 - DNA, 106 bp, Oryza sativa
  Clone ID: uC-osrocyp017f06a1
atataaaaaaaacaaaaagtggttgaaagtttcttataacccttaaaataaacccagaaaccaattttcaaccaacaaaaccgcagaacggatcacgtccccccac

SEQ ID NO: 35705 - DNA, 424 bp, Oryza sativa
  Clone ID: uC-osrocyp017f07a1
tttttgttttttttttttttttttttttttttttttaaacgacggaattagaaacaatttaatctaacatacgcaaactgatattatcacaatgttagccgatgacaatggaaagagtaatctaggtacaagcggatcattgacgggggagacaagacattggttgcaccacaacacccaccagtggcgccaacaaggagcgctatccgttataggacgagagaaaaagtaaaacatcacgatgtgaagggaaactgaataattctagtaaacgatgatgatgatggataggctccttaggacgcccgccgcccttagcgttttgctgctcccatcttgtccactggaaggctcactcggcatcgtcttcatcctcttcgctgccctcggcgtcatccttatcattgaccttggacttggactt

SEQ ID NO: 35706 - DNA, 436 bp, Oryza sativa
  Clone ID: uC-osrocyp017f07b1
ttcttctcttctctggtggtgtgggtgtgtccctgtctcccctctccttcctcctctcctttcccctcctctcttcccccctctcacaagagagagagcgccagactctccccaggtgaggattcagccatgaagggggccaaatccaagggcgccgccaagcccgacgccaagttggctgtgaagagtaagggcgcggagaagcccgccgccaagggcaggaaggggaaggccggcaaggaccccaacaagcccaagagggctccctccgctttcttcgtttttatggaggagttccgtaaggagttcaaggagaagaaccccaagaataaatctgtcgctgctgtaggaaaagcagccggtgataggtggaaatccctgaccgaagcggacaaggctccctatgtagccaaggccaacaagctcaaggccgagt

SEQ ID NO: 35707 - DNA, 385 bp, Oryza sativa
  Clone ID: uC-osrocyp017f08a1
ttttggtaggttcataacattatttggccatgcattattgcccacttcttgttcacacttttacactgctgcatgcactgcaggcatcttttacatattccacaaaaacaggggaaaaacttctctcctctccctcttttctggagacaaagaaagcagaggagaagcaaacagatcagtcgtagtactagtacaacattagcacactctccctccagctagcgcatgtaatataatacaccagctgcgccatatacatatactatcagttcatcatcgatcgcatcgtgtacgtacactacaggttgggtacgtacaaggatcccctcttctgctaagactttttgcttgatcgatctactacgtacacgtacgtatattatac

SEQ ID NO: 35708 - DNA, 332 bp, Oryza sativa
  Clone ID: uC-osrocyp017f09a1
cgggcgcccttttttttttttgtgtttatggatataaaggtatattattacgatatgaaacaaaattgagcactataccggttagccactttagcccaacccccctgaaacagctacatggacggagaggcggatggaaaccatccctctaaaaacaaacggaggactgtcgtctcccaccgcgttacaaactcccatccaccatttttgctctcccctgcgatcaatccagttgatcgaactatctcgatgtagacttccccgttgatccggcgcgcgaagagcgcattcatgatggggagcttcctaagggaggccatcaggcaaccctg

SEQ ID NO: 35709 - DNA, 451 bp, Oryza sativa
  Clone ID: uC-osrocyp017f10a1
tttttgtgaattgaaaatttgccaaattttggttggctccgaatggaattctgaatttctctgcttgtcacgaaaaaaaattatgtgttaactaagggtgagatttacatggccgaatctcttgtgacccgtgaggttgcaaattaattacatcgctctcaactccggcgaactcgccgccggcgccgccgcctacaagagggacaacggcgtgggttgggggaagaggtcggcgaatcgctggagggcctcgcgcatccaccagtgcgggcaccggtccatggcctgctgcggggagacccagctgcggcgcctggccgccatctccggccaccggtcgagctcgtcggtgacccggagcgggaagacgaagccctcgtaggtggcgtcgtagcggcggctccggtagcaccaccgccccagcgaggcgccgatctcgccgagcaccccg

SEQ ID NO: 35710 - DNA, 452 bp, Oryza sativa
  Clone ID: uC-osrocyp017f10b1
ttctcaagcaaagattcatccatcgatccaactgatccaatccaaactccaaaggcaaagcaaagaaggtcgcattcgattcgattccagcgatggcggcggtgatggtggcgaggcaggggagggagctgcagaggtacagcgacaacacgggggggaggatggtggtggggtgcatcccgtacagggtgaggggcgacggcggcggggtggaggtgctcgtgatcagctcgcagaagaagggcgccgccgccggcgacgtggtgatgttccccaagggcgggtgggagctggacgagtccgtggacgaggcggcgcggcgggaggccctggaggaggccggtgtgctcggcgagatcggcgcctcgctggggcggtggtgctaccggagccgccgctacgacgccacctacgagggcttcgttttcccgctccggtcaccgacgagctcg

SEQ ID NO: 35711 - DNA, 403 bp, Oryza sativa
  Clone ID: uC-osrocyp017f11a1
gacaaataaaggacatgcaatgcctggcctgtattctcaatcataaccagcccatggaaaacgctaatacagcgatactaataatgtgctgcaaatacaggaagtggttgaaagttgctaattaactagtaaataagtcacggaagcaatgtagtgcacataaactgtgtccactgggtacttcagctcgacacattttgacatacgcagccctaatcttatgattccacatagcaattgatcctagtacatcttatgatccagtaatacagcaggtagctgagtaaatggactcagaaatagacttcaggacagattagtggccctctccttcaggcttcgctgcttccttgatctcgtcaccaccatcctccgcattgtcagaggtccagagagtcagatt

SEQ ID NO: 35712 - DNA, 416 bp, Oryza sativa
  Clone ID: uC-osrocyp017f11b1
ctctctctccggttttttactccctccgctcctccgctcctcgcctcttttacccgctcttccccccgatctccccggactcccacagccgcagcgaacaaatcccgcgcgggttgggaagagcgagctcgtgaggagagcacagggaaagcgcgagggggaaggaggaggaaaggtgcacaaggtcagactaagtttgcgttgaagaacaaaggagaggaaaaatgtcgcctgctgaggcatcgcgtgaggagaatgtgtacatggcaaagcttgccgagcaggctgagcgttacgaggaaatggtcgaattcatggagaaggtggcaaagaccactgatgttggtgagctcaccgttgaggagcggaacctgctttttgtggcttacaagaacgtgattggtgctcggagggca

SEQ ID NO: 35713 - DNA, 381 bp, Oryza sativa
  Clone ID: uC-osrocyp017f12a1
ggccgcccttttttttttttgtgttttttgacaaaaacgggggaagcttagaacattgaagcttcctaagcaatacataaaatttagtacccgtgtatggacactgggtgtaacaagtcacaaacccatagggaagggaactgttgaagggaggaaggaaactgttgggtgtctaaggtaccaggatcggaggcatacttttaaagacgtacgagaaccatttaattctttactttgagccaccatctcacaagaaagaccaaatatagttactccacaaatcattctattgtagtggcaaagtacattgccgcaagttctccccagaaggccagttcaataaatgcggtgatgacacagacccgaaagtcgaattacatt

SEQ ID NO: 35714 - DNA, 384 bp, Oryza sativa
  Clone ID: uC-osrocyp017f12b1
ttcccaaggctcccgcccctcctcctcctcctccccctccgttccctcgcagaggcggcgaccgcgccgcgccgaggccgcctctcggctgggctagggggttcccccccaacctcccgccctaactaccccgcgccaccatggcggcggcgacggcctccgcgtccgcgtccgcgtctgcggcggcgttcctcctcctccccctcctcgccgtcgccgccaccgcaggccacggggtctgtccgaggcagcccgccgccgccgccgtcctgccgcgccaggcgcccgccgcttactcctacttctcctccttctcctgctcctgccccgcggcggagacgccgggccaccgggcgcaccacgtgggcgtcctggaaggggatg

SEQ ID NO: 35715 - DNA, 438 bp, Oryza sativa
  Clone ID: uC-osrocyp017g01a1
ggaaacaaccggcggtttcgttaagtgttcaactgttcatacaccaaggcaaggaaccagctacagttgaatagtgccctcaaggacaagctttctagaaattttgccagacatgatccagaccacgagttaccagatgcaatcccaggtctgaattgaaaggtactaaataaaagccaacacaataatacaaaggtgtcccatgggctttgtctgagcccttaagacagaatgtacgaatcaaaagttccatatccagcatgtgtaggggaaactgagttactgttccaatgtaccctcgactccatacaattaacatttcaacatttcatgttcatatgagaacgcaggagatgccaccatccacatcaggattaaagagcgtgacaagatcatggcatggcatgttcccaaaattaattctcttctacaggacca

SEQ ID NO: 35716 - DNA, 462 bp, Oryza sativa
  Clone ID: uC-osrocyp017g01b1
tatttaaagcagcagcagcagaagcaagaaccatcagagagctcatcagagagaattacaatgaagaacttgcctaacccttcaaatcaggatcagcgtaaaaccttgaagtttggcttctccaaaatggctccttccaaggctccagttggcaatgtaagcaagaaacctaaggttgctacaaaaatgtcatcggtttttggcaatgaaagtgacgaagaatcatgatctttgcccgcccaagagtgattgcactgaaggaaatggtcctgtagaagagaattaattttgggaacatgccatgccatgatcttgtcacgctctttaatcctgatgtggatggtggcatctcctgcgttctcatatgaacatgaaatgttgaaatgttaattgtatggagtcgagggtacattggaacagtaactcagtttcccctacacatgctggatatggaacttttga

SEQ ID NO: 35717 - DNA, 315 bp, Oryza sativa
  Clone ID: uC-osrocyp017g02a1
ccggaaggggggagctctgcccttatattaaaaagttggtttcacactcccattcaagggttttccctggaacaaaaagcaactgggctttccccataaactccattgcttagcgaatttagttggcccgtttattttttggtaaatttcctgcaaatagaacctctggggggtacaaaaacccgcccaaaaaacatttgcctgggttccattggggcccaacaaagttttttcgaaattgttccagggcatttaatgataacctgagccctgattggaattttcgatgcctcaaaaaaccctactcttttttta

SEQ ID NO: 35718 - DNA, 501 bp, Oryza sativa
  Clone ID: uC-osrocyp017g02b1
tccttgcgtccggcgcgcctctctcgagcacctgccgatccgatccgatccagaccggatcgcttcccctccccctggcaaatcaccgccccctccacccggatccctcgcttccgcgtcgccggtctgcattcgcgccgcccccggtcagcccgtatcgccggtccccatcatcggcggtgccgcccccggtcagcccgcatcgccggtccccatcatcggcggcgccgcccccgatccccctcgatctgcactgctcccgacgagtttaacccttgcgcggctctgctggagtgtgagtgcaagaacagcgccgccgccgagaacacgctgctccgggcgggctacggtgggtggctgctctactcggcggcgtcggcgggggacatggcgttcgtgcaggagcggcggtggctgctcctcggtgttctggctggaaatgatgagtagggcagtccacgccgccgcggtgggcggcagcgtggagatgctgagggagct

SEQ ID NO: 35719 - DNA, 401 bp, Oryza sativa
  Clone ID: uC-osrocyp017g03a1
ggataaatacaattcaacaggaaatatctattagcttcattgtactctgatacagtagagggtacaagttatgatacactttggatgtgataactaagttaatgggggaagaatggggatcagaaacatttagagtgaaacctaaataattgaatcacattatctatgagaactgtaacctacaagggaaaaaaaatacctaagcaaaattgaattgccaatcgctaaaatcctctgaatattggtacagagcagcacgtacagttcagggactagacgataaaattatccatcatgtgattgataacgtccgcgccgcctgagtttagccaatagctcttaacctggatggtgttatgcgcaaccaatctttgactacttttctggaagcttacattaac

SEQ ID NO: 35720 - DNA, 382 bp, Oryza sativa
  Clone ID: uC-osrocyp017g03b1
tagtcctcacctccacgttctctcaggcaagcgagccccccctaccttgcctccgaagtaaccgccgccgccgccgccgccgccgcggcagctaggtcaccgagcccgggcccaccctcccctcccctcccccacgccggatgatcgccgccggcgccgcctcgatgggccgcgccaccgccactccagcccacggggcccattcgcggtggccccgcgccgtcgcgcgcctccgcctcgcgttccgctccccggcgcccgcggccagcggcggcgcgcggtggataggcttgtttcgccccgcgccaccggcggcggtgaaggaagcgaaagggaagcggccggaggtggagaaggagcctgcgcggggccgtagggaaga

SEQ ID NO: 35721 - DNA, 410 bp, Oryza sativa
  Clone ID: uC-osrocyp017g04a1
ggaacaaaagagtaaatttcttaattgaattcccaggtttaaacactcttgacatgctttcaggttcagacaccaaacatactaaaaaaagctacacctgcccaacgcaaaagagaacagaatataaaagaaaaggaactgcgcaaaccaatgatccatcattgaaaaccaaaagtccaaaaaacctttactgctatccgcacatctcaccagacacaatcagctaaacttctagctctcctatgaaaccacctccaagtcctaaccaaaagcaacggagaaactcacaaggaaactcaaatggatcttgaattgccttgattgctgccttcccaacctatataggccttcaccttacaccacccctcaatggctgaaatgatgagaaaaaacttaacagacgcttaaac

SEQ ID NO: 35722 - DNA, 555 bp, Oryza sativa
  unsure (1)..(555): unsure at all n locations
  Clone ID: uC-osrocyp017g04b1
gttgattttaacaagttattggaacactggcaacaggacaagtggactggctgtttccctgtaaagtggcatattgtgaaggatgttccaaacagcttactgaaacacatcattcttgaaaacaatgagaacaaaccagtcacaaattgcagagatactcatgaggtgaaacttgagccagggcttcaagtgcttaagattttcaaggaccatgtctgcaagacgtcgttactggatgactttgatttctatgataatcgtgagaagatgatgcaagagaggaaggcaaagcatcaacaactgaagaaggtcgttgatgagaagctgcttaatgctgtggacactgagaacagcttgttaactgtgaaatccaaattgcaggaaacagctgaggtagagattgatgtcttaaacaaagagcctcatggtaaagcangacaagttgatgggaaagagaacggtgtgttggccgtttctgtaaatgggttaccccagaagatgttcagttgacatacgagaagttggccagtttgagcgtctgttaagtttttttta

SEQ ID NO: 35723 - DNA, 468 bp, Oryza sativa
  Clone ID: uC-osrocyp017g05a1
tttttgttttaacaaaaaccagacattgctcttataatcacaggatttgcatctcttcacaagaagaaacagggaaaaaatatacgcgtccgcaaaatttcccttttatcatacttatataaacaaaagggccccctcttttcttgtaaattatttacaggccctttattttacctttttatagctaaaaaatgcatggccctactatcttcgcatcatcaatgctgtatcaaaattgcagaaatgttctctcggcctatgcaactacgggttggaccagaccttcacttgagacagcaatgtcttctgtgccattggtttcaccttcatcatccttcgacaggtaattgtctacggctgctgcagcttggcgcccctctgtgatggcccaaacaaccagtgattgcccacgtctgcagtctccagcagcaaatacaccttccacattgggtcgcaagtttccaattg

SEQ ID NO: 35724 - DNA, 463 bp, Oryza sativa
  Clone ID: uC-osrocyp017g06a1
gctgttcgccctgctcctctgccatggctgctgccgcggcaaggtgggccccggtcgtcggcctattgggcctcctcctgctcccgttcgcgcctgctccggcgggagccgcaacgcccgcgaggtcgccgccgtcgtcggcctcctccgccgtgttcctcctcagcggcgacgtgtaccccaccgggcattactatgttactatgaacattggggacccagcgaagccgtacttcctggatgtcgacaccggcagcgacctcacctggctgcagtgtgacgctccctgccagagctgcaacaaggtgccacatccgttgtatcggccaacaaagaacaagctagtaccgtgtgcaaattcaatctgtactgcgttgcacagtggatctagccctaataagaagtgcaccacccaacaacaatgtgactatcaaattaagtacaccgaccaggcatcttctct

SEQ ID NO: 35725 - DNA, 431 bp, Oryza sativa
  Clone ID: uC-osrocyp017g06b1
ggttccaaataaatggcacatgattattcaccatgaacaggagaatacaggttagtgccttgttatcagcctctattacatgctcatccttctctcctttcgtcttatttctccatccatatgtgtttaagagtacagactttatttggatggcaacagattgtcattcttcacttacacagtactggtgacttgaggctagtaataactttttccaactccatcagtgatacatccaattatgattaagcggatgtccagctcatggttcaaatgtgagggatgatcatggaaaggaagacataatagacttggggctcctactacatgatccacggatccaaccaagctgtgctttctcgttatcatatatcaccatctgaccctgcattgtaatgtctccaattatgctgaaactcagcttagcagca

SEQ ID NO: 35726 - DNA, 420 bp, Oryza sativa
  Clone ID: uC-osrocyp017g07a1
ttttgtgtttgcatcaaagggcagtacaatgtatttttgcgtatatagacttgcagttgcaaaccgaattacatgcgtggtgtcgcatagacgtacaaattccacaggctgaggctttcctttctgcatccaaccaagccctgcggtaatacatctggtcgacacgacaaaaccatgttcaactcaaaatatgtcagatttcactccggttacacaaatggaacacttacaggttacaacaagtctcccagcgaacaggttgaacttgattctaatacactatgtaagctacaatggcacacatacagtggtacaagcaattggccgtgccttgcggttgcgagataccagcaattgccagtgccttgcggttgagagtttaccaggttggttgcacggcagctggagaactcaggcctc

SEQ ID NO: 35727 - DNA, 464 bp, Oryza sativa
  Clone ID: uC-osrocyp017g07b1
cgttcgagccatcgagccgacaaggcgacaacagccacaacgcctcactccccccaccctacgcgctccgacgagctccgatccgccgcccacctcgccgcccgccggcgatgagcaccgcctccggcgacggcggggacggcggcggcggcggggatggcgcctcgtcggccgcggggggcggcgggaggcggatcccgcccgcctcgtccatgccgtgggtccgcaacctccgccgcttcgtcggcacgggcgccggcctcggatccgaggccttgatggaactggaaacaaaaaggatactgcttgagattttcaaggagcgccaacggaagagtatggaagctggtgccattccaagtttttataagaagaaacctgaagatggatccattagcaatagagttcagaaattggcaagtacaggtttctaaagaaacaatctgaaactctgcttaatgctg

SEQ ID NO: 35728 - DNA, 391 bp, Oryza sativa
  Clone ID: uC-osrocyp017g08a1
ttttgggtggtccaaatcaacgggggtttataaaaccaaccacattatatagtaaacattggcttcagagttcagatccacaaggttcacagccactatagcaagtacagataaggtagaagctaagtaacttgttccagcctcatatagcagttacagatagatagtttcactgccaaatagtacttgagacttcagcatctaagctagacacagcacatactaacatactaacatagctatatagcgcaactagaagcgcccgacagacacatgccgcttcttggatgtccagaatgtttattccatttgtccttatatatacaggcaccagttggtacaccccaaacccctcagtagaactcggccgacacgggcatgtcatcgaagc

SEQ ID NO: 35729 - DNA, 373 bp, Oryza sativa
  Clone ID: uC-osrocyp017g09a1
gaaacttgattaatcactttacttgaacatcctactatgcctgttgaaccatcttcatacagtatatatagcaaatcctaatcaccttctaaatcttctaaaaaggaaattatgcaaaaaaaaaatgctaattaagccatttccaagttcttcctctgttctccattgtctccggcggcggcgctcctcgtctcggcgcgcgcccctctccggcgccgggagcggagcaccgcgacggcgtggcaggcccagtcccatgagttgagcagcatgtaggaggcgatgccgccgatgaggccgtaggcgatggagtaggtgagcggcatgagcgccagggtgaggaacgccggcacggcctgcctcatgtcggccc

SEQ ID NO: 35730 - DNA, 464 bp, Oryza sativa
  Clone ID: uC-osrocyp017g10a1
ttttggttaacttgctcggtatggattttgtttttaggttcaaacaatacaatctaattgttcatactaatatgcatatttacatatgttctcaaatgtgcccgcaacgaagctcggggtttcatctagttattagaaagctatattccaccgatccaacaccgttacgacaacaatctcattctgacatcttgacagtgtcgatgactcgtgtccctcttgcaaaagtctcgtagaagccacttaagtagtccttgatcttcatcttggcatactgcctcggcctcttctcatcgtccaccagctccggcgccggctccagcgcgtagaacatcaccaccgacactcgctccctctcggcgttcgtcaccaccctatgcaccgggctctttaacaacccattgctcattatctccattccatcccccatgttgatgagcagagcattggggacgacgggcaca

SEQ ID NO: 35731 - DNA, 346 bp, Oryza sativa
  Clone ID: uC-osrocyp017g11a1
ttttgtgttttttaggcagacggcgatatcatggtataataacaatttaattctttggcgcacgtatgtacgtacgaacgctcgtatacgctggcaagtatgtagaaccctagggtgcatgcgaatgggcatctgccccatgcatgcatgcaacaacacaaacgaaggaccaagctcacgccacgtatgcgccgtgcgcatgctagagcttggcggagccggtgtcggtgcaggcggaaaaccgccaggggcggaatatgcagctaggtggggagcacggccggcgccggcagacagcctgccatggcggggcacggggcagaccggcatagctgttgacgggtgc

SEQ ID NO: 35732 - DNA, 379 bp, Oryza sativa
  Clone ID: uC-osrocyp017g12a1
tttgtgttttaggatctcaaggcgtgttggaagtataaatgaggagttttcacagaggtgttgtatgggagaccaatatttcagtgttttcagcaggtaacaagctcacggactgccggactggccgcacatcacacaaaaagagaactcaattcttccttgaagggcagtaagccaaacaaataggtcactgcaaatccttatttggaaaaaagtggaggggaaaaacatcgatacagcagggccgggcctcctgtatgtaagtacatgtcctggctaacaaacataaaaggcacaacatgttgccctgcaaatgtcaaaaattgcatcgcttatgaagcggactacttggcaatcttctgtgccttggcaatgacct

SEQ ID NO: 35733 - DNA, 402 bp, Oryza sativa
  unsure (1)..(402): unsure at all n locations
  Clone ID: uC-osrocyp017h01a1
gagagagtaatagtagtagtaattatatattgcacttccttgatttgttttgacagagaaacagaaagcttactgcctcattaatccttacatagttggagtacatgatgatgatgatgcatgcagaaggcttaacttaaccatcacttgatttaccaattacacaagataattaggccattaattagccctagcagctagcttagcttcgttaggtgcagtgcttagttgcttacccccagtggcaagtactggaattttcttcatcttcttcttggtctctgccatggcagcttcagcttcagtgtttgagctagcaaagctggaacagctcgggggaggatctgaagaggtcgtcgaaggcggcggagtcnaaggcgaggagcgggtcggtggcggcgg

SEQ ID NO: 35734 - DNA, 339 bp, Oryza sativa
  Clone ID: uC-osrocyp017h01b1
tggagttcctgatcgatgtcgcctgtgatcagtgagatcctcctctcggggtttatgatcaactccacactccggcgccgcacccatctcgtccagtctttctccgtcgtcttcctctactggttctatgtcttctcataagctactcgccatccatttccctctcctcctctctctctagcttccttctacaataatcgatctcgtgttcgtcgtcgtcgttcttgtcgatctctgtgtgtgttcttcgtcgtcgtcgtgttcgttttggattttggtttcagtttagtatatgcacttcttgttcttcactgctgctgctgctgctaaagcttgtag

SEQ ID NO: 35735 - DNA, 343 bp, Oryza sativa
  Clone ID: uC-osrocyp017h02a1
aaagtaataggggaactacattatatattgcacttccttgacttgcctcgacagaaaaacagacagcttactgcctcattaatccttacatatttggagcacatgatgatgatgatgcatgcagatggcttaacttaaccatcacttgatttaccaattacacaagataattaggccattaattagccctagcacctagcttaccttcgttcggtgcagggcttagttgcttacccccagtggcaagtactggaattttcttcatcttcttcctggcctctgccatggcagctccagcttcagtgtttgagctaggaggcctggaccaactcgggggaggatc

SEQ ID NO: 35736 - DNA, 300 bp, Oryza sativa
  Clone ID: uC-osrocyp017h02b1
cctgcacgtacccggccttcctggctggacccacgcgtacttgattttggctccccaagctggcgcggctctggttgtaccttaaacaaatgtctcttcctcatgatggatgctgtaggcaagacatacactggcatgactgctcaccttggggtggcccctctgacaccatcgatactgcaaaggctgagatccaagataaggagggcatccgcccggaccagcagcgtctcatcttcgctggcaagcagctggaggatggcaggacccttgctgactacaacatccagaaggagtcga

SEQ ID NO: 35737 - DNA, 447 bp, Oryza sativa
  Clone ID: uC-osrocyp017h03a1
aattaactagcatatttaaatttaaaacgtaactgtttgagcaaataccacgaaatgttcaggcgctaagatacggcaataccgatacatccagcatagcaaaaatggcgaagagcacagagtcagataaagctatagagaactagggctccaggagatgggggccgaatgacaaccatggcgcttagtcgacctcctccatcttgctctcgccggcgtcgtcctccagcggcggcatgtcggcgtcagcctcagcagactcgtcctcgtcgatgctcaggccgagcttgagcatccggtggatcctggtgccgaaggtgttggggtcctcaaggctgaagccggaggtcaggagggcagtctcgaagagcagcatcaccaggtccttcacagacttgtcgttcttgtcagcatcggcacgcttgcggagctcgtccatgatggaat

SEQ ID NO: 35738 - DNA, 483 bp, Oryza sativa
  Clone ID: uC-osrocyp017h04a1
gggggtgccgtcgtgcgcgtcgaagctggtcccctgcggcggctacctcaacgccaccgcggcgccgccgccggcgtcgtgctgcggcccgctcagggaggccgccgccaacgagacggcgtgcttgtgcgccatcctcaccaacaaggccgcgctccaggcgttcggcgtcgcgccagagcagggcctcctcctcgccaagcgctgcggcgtcaccaccgacgcctccgcctgcgccaagtccgcctcctcctccgccaccgccgccgccgccgccgacgccgccggtgccggcactgcaggtagcactgctgcttcttcagcttccactggaaacgctgcatctacagcggccaagccaacggcgagcggaggcgcaacgcatcgcctgagcttgatcagtgcatcgtccttggtaggcttcagcttcatctggtggacgatcatggcgcagtagtaattcagatccagaagagcagtttc

SEQ ID NO: 35739 - DNA, 303 bp, Oryza sativa
  Clone ID: uC-osrocyp017h04b1
gattaagcatgttttatttggacagtacagaattaaacaactctgattcaaccgaggaactgatcgaccggcgaagaacagcaatctacagaagaaagaattttgccaatacaatcctatgtacttcctcatcatttagtagtgaccaactagcaaacttgaaactgctcttctggatcttaattactactgcgccatgatcgtccaccagatgaagctgaagcctaccaaggacgatgcactgatcaagctcaggcgatgcgttgcgcctccgctcgccgttggcttggccgctgtagatgc

SEQ ID NO: 35740 - DNA, 449 bp, Oryza sativa
  Clone ID: uC-osrocyp017h05a1
aagcaacatagctagcacaacaatttcatcattatctttctccagccatcacaaagcaaattaatatcgttccaaacatttaaggagctcatgaatccaataatccggaggtttttttaaaaggactcatctcaacatccataacaagcaaacgatagttgtttccgacaccaacattagaccataacgagtcaactgacaaccatagactagaccaaaaataccgcggactgcatagataaaacatcagtgtcgagcagaaggaaccgctcagcacttgacctccttcagcccatgagagaagtaaaggaaggttgggtcggtggctccgtccttgtagtaggcaaacaccaagccgccatcatcatgcatgctctcaccaacaaagaactgaaggtccttgagctttccaagcagtacttggtgcaccctcaatgtctttctgaatc

SEQ ID NO: 35741 - DNA, 385 bp, Oryza sativa
  Clone ID: uC-osrocyp017h06a1
agcgctatcaaaggagcatatattattcaatcttgatgaaagagggacacaagccatcatctatagtgatggtgcctcttacaaacttcaacacacgggtaacaagcatacactcaagagtcaacgacggtggcctaggttcttgtgagtacaatggaacacgcaggcatgtacacaaccaagtatactccaccccaaactatagcctttgcaatggctttggcagctgctcagaaaccatgaatctcgatggggtccttcttcacaatgccggcctgaacaagaaaatttgatacgctcttcctctgaacaccctgaagttgaatgacctggccaagctttgggggctggacaacagtaccattggagcaaaactctttcttga

SEQ ID NO: 35742 - DNA, 463 bp, Oryza sativa
  Clone ID: uC-osrocyp017h07a1
aggagaagattaatagcaagtaaatagtaggccaaaccatgcaaacttacataaggtttaagtgcagtcataacacaatatacactagtttgataaacaaactttattcagcagcaagtaaataaggtaacacaaagcgaatatctgatcctcagtagcgcgccaggctagacaagttcggatcatagagcatcgccatcgagaactaggccaaaccttcaaaacaatgtacattgttggcctcacaatgcttgcagtgaccaccagttcgagcactggtaaatccagcaacagtccacgagaaagattcagcgaggtttggcttagctcggagcggcagcaggtggccatgaagacacatctgttgcgcagtactgccagcatatggaatcccactaggtcatcagtatcagagtcctctagaacggttctggacttagttatgacagtgggaactgcatgc

SEQ ID NO: 35743 - DNA, 470 bp, Oryza sativa
  Clone ID: uC-osrocyp017h07b1
cttgctgattattggttttggcattatttggtgaagcatttctgcttgtaccttaaacaaaggtctctgttgtcttattggtgctgaaggcaagatatacactgcagtgatggctcaaacttgcttgccacctggctttcgttttcatccaacagatgttgaacttgtttcatactatttgaaaaggaagattatgggaaagaagcctcttattcaagctatatcagatgttgaactgtataaatttgctccctgggatcttcctgctcaatcctgtctccagagcagagatcttgaatggttcttcttttgcccacgagacaagaaatatcctaatgggtctaggacaaatcgttccacaccaaatggttactggaaaacacgtgggaaagatagaacgattgagcttaactctcgcattgctgggtcaaagaaacactgattttcatgaagcaaacacctaaaggcac

SEQ ID NO: 35744 - DNA, 409 bp, Oryza sativa
  Clone ID: uC-osrocyp017h08a1
ttttgtttttttgagaagattgggggcaagaaaataatacgccaaaccatgcaaacttacataaggtttaagtgcagtcataacacaatatacactagtttgataaacaaactttattcagcagcaagtaaataaggtaacacaaagcgaatatctgatcctcagtagcgcgccaggctagacaagttcggatcatagagcatcgccatcgagaactaggccaaaccttcaaaacaatgtacattgttggcctcacaatgcttgcagtgaccaccagttcgagcactggtaaatccagcaacagtccacgagaaagattcagcgaggtttggcttagctcggagcggcagcaggtggccatgaagacacatctgttgcgcagtactgccagtatatggaatcccaatag

SEQ ID NO: 35745 - DNA, 467 bp, Oryza sativa
  unsure (1)..(467): unsure at all n locations
  Clone ID: uC-osrocyp017h08b1
ttgttatcctcccactcccaccagccggtttcgcccttttcgtcgccatccgctccttgtcgccgtattggatgagaagctccacggtgccgccgagctcaaccttggcagattgagggacggtgtcaacctcggcggcggattgaggcggcccctcttctccaccccttatcggtgaacacagatgcaagtggtgtgggtcgacgactgcagatcgagcgatgaataacatctcatttggtcatggatcctgacgggtgagatctactcagctattttgcattcgtgcatggtgggtaccgactcaccatcagcctctccaccacttacattttcctggtttttcctgcttagaagttgatcgttgcgaagtctctaggccgcatccngtgcagctgagcgcaactggcgctctggagactcngatctggtgtacctgcgggtcagccatcgcttagagagcaatc

SEQ ID NO: 35746 - DNA, 383 bp, Oryza sativa
  Clone ID: uC-osrocyp017h09a1
agaatacaggataattcacaggctgcctggggacaattttcaggtagagcgactgtcacgatagccacttgctgaccaaacagactcataatcaatctagtaagacacaatcatagttgcctccctggtgtacaccacggagggccttgtttaagcaacatacgagctgggagggccagaaggagtgtcaccaccgagaggggcttgagggggagaggctaaagaagaaaggtcctctgtagaaaccttggcaagagcttcagcctccacgatctgctgagaagtggcagaatcgtcagcagccttcttcgcttctgcagcagcggcttcttcagcggccttgcgagcagcctcctcttcagctgccttggcggcttcttcag

SEQ ID NO: 35747 - DNA, 408 bp, Oryza sativa
  Clone ID: uC-osrocyp017h09b1
ctgaccaggacgttgtttgcgaggccgctgcagaagccgccaaggcggctgcagaggaggctgctcgcaaggccgctgaacaagccgctgctgcagaagcgaagaaggctgctgacgattctgccacttctcagcagatcgtggaggctgaagctcttgccaaggtttctacagaggacctttcttctttagcctctccccctcaaacccctctgggtggtgacactccttctggccctcccagctcgtatgttgcttaaacaaggccctccgtggtgtacaccagggaggcaactatgattgtgtcttactagattgattatgagtctgtttggtcgcaagtggctatcgagacgtcgctctagctgaaaattgtccccaggcagcctgtgaattatcctgtattct

SEQ ID NO: 35748 - DNA, 419 bp, Oryza sativa
  Clone ID: uC-osrocyp017h10a1
tttttgggcatagaagggaactgggtattatatataagtacttccaagttccaacaaacagccacacagccacacaggtgcacattcgggccattatttagaacgcacaaagctgatatatagcatgcagccatgcacgcatgcagatgcaggagcatgacagacccagtgtcagccactccagtacatagggctacaattacaactatatatacgcgaccaatccctaaaccgagcaagctatatgctgcttcaggctgcagagacacccacatagttttaattaattaagggattgatctgtcgccggagtttcatcagttggcgacgacccggaggttcatcccggcggcgcagtggccggggacgccgcagatgtagtagttgacgcccttcttgaggaggaacgacgcggtccc

SEQ ID NO: 35749 - DNA, 169 bp, Oryza sativa
  Clone ID: uC-osrocyp017h11a1
tttggtgtcttttaaaggagggggagcttatatatactctcttccaagatgcatcaaccagacacactatcgtacaggtgcacatttgcgccaatattaacaacgtacatagttggcatataaaaaggagccatgctttcatgttaaggcaggtacaggccctacccat

SEQ ID NO: 35750 - DNA, 343 bp, Oryza sativa
  Clone ID: uC-osrocyp017h12a1
ttttggttttttttaattttttggggttttttttttttttttttttggaattatttcccctttattttattggacaccattccaaacgggtcaaccaacaggaattacaagtttacaacatgaaacatcccatggtttgagtagaaaaggacttattgggcccgcacataatctggggggaaaccaggaaaccttacgggttttaacggcacccctttggaccatattgcaggggggcctccggaacgccggggactgaagacccgcccttcttcacgggctttcggcaaacgacccttgtgtccgccgggttagggcttggctttctaccctccttcgacgg

SEQ ID NO: 35751 - DNA, 511 bp, Oryza sativa
  unsure (1)..(511): unsure at all n locations
  Clone ID: uC-osrocyp021a02b1
gttctatcataacatcacctcaaacactttagttgtgctagaggctatggcagcacacaatgtgagaaccctgatctactctagcacatgtgccacctatggagaacccgagaagatgcctatcaccgaaggaactccccagtttccgatcaacccatatggtaaagccaagaagatggcagaggacatcatcttggatttttccaaatccaagaaggcagacatggctgtgatgattctaagatacttcaacgtcattggttctgaccctgaaggaaggcttggcgaggctccaaaacctgaattacgggagcatggccgtatatctggtgcatgctttgatgctgcactggggataattcctggtttgaaggttaaaggtactgactatgaaacacctgacggtacttgtgtaagagattacatcgatgtcactgacctcgttgacgcccatgtgaaggcgctcaacanggcngaaaggggcaaagttggcatatacaatgttggcaca

SEQ ID NO: 35752 - DNA, 492 bp, Oryza sativa
  Clone ID: uC-osrocyp021a03b1
ctcgctcgtggacgatggaccggcggcgagcttgtccggtgaggggcggcaagcttccgcctgaccactcgagcttgactccaccacaaggactggctcgagactccttggtccaccccgcgccggatcttgaagctatggcgcgcgtcggcgtcgagaaggagtgagaggagtgggagtaggaaggtgagcagcgacatggtgcgtgggtcagcgcgggaagggtccacggccaccaaatccggcagccctccgcctcctaggcgatagatcggacggccctgttcctcctagcgctggataattcgtgtggatgtccatggcgatgtgatgtcgccagcgcagcgtagctgctagtctcgatccatgtctcagcgaggtagggaggaggcactgggttgacgaggaccgaggacagcgcagaccggcggtggctgcttccgctgcccccaagtagtgagttttctttggattctttggaatcgggtgttc

SEQ ID NO: 35753 - DNA, 512 bp, Oryza sativa
  Clone ID: uC-osrocyp021a04b1
gcttaggcggcggcggcggcggcgcgaggtgagcggggcaccagcggcggcggaggagatggggaaggcctcgaaggggtcgcggagagggaagaaggcgtggcgcgccaacatcagcaccgacgacatcgaggacttcttcgagaagcagacgcgcgacgcgcacgccggggccgccgccatcccgtccctgccctccgactccctcttcttcgtcgacaagccggcctccgccgcgtccacctcctccgccgccgacgccgtcgcggcggatgtcgcccccaaagatattcctgtccaaaggaagattgagaagaagagagagaaggttctatatcatgagagtgtattgaagcggaatccatatgtacaaccagtcccgttttctttaacgacaaagaaggatatgaagaagtcaaagaagaaggaatcgaaagagacacaggaagcgaaaattgttccatggaagatgttcaagtgataagatccttgacatctggggtcaagatgtt

SEQ ID NO: 35754 - DNA, 445 bp, Oryza sativa
  Clone ID: uC-osrocyp021a05b1
ctgaatttgcctatcgcaacgaaatgccctccagaagtactcctgtgaagaggaaagtggtcgaggccactaacatagcggaagcatctattacaatagatgggatgtataatgtagttgacccagcatttgcaaaactcaatgtgtgtaacccaaaacagggcctggattcactgatcatcacaccgatatctcaagcatcagctaaacacagggcatgggcgagctggacgtacaggcccaggatagtgcaattgtctatacactgaaagagcctatcgcaacgaaacgccctccacaactactgcagaaattcagaggatcaactcgggggagacggaactcaatatgaaggcaatgggaataaaccaactattgtcatttgactgcatggacctcgcagctccttaataactcataactgaattggaacaactgtacaacc

SEQ ID NO: 35755 - DNA, 483 bp, Oryza sativa
  Clone ID: uC-osrocyp021a06b1
tttgcttttcctgcttccatcacgttgtctcgagaaagattggagtttttggaggtttgggttgagcgactcttgtttttgtcggcgcaagcgcatgactgtttctggaacatagtgagcgcgagaaagagatattgtgttagttggagttcgccttatggtgaatcttcgattcaagtctggagatggcgcgtttttaggaaaccaaggagaggaatgatcaaagacctgttgctgatcatgtagagcaccaagacctgatgcaaaacctgacacatcctcatgattaccacgacatggacaagatggtcaaagcgcgaatctaaaggtgctgaagccatacacgataacgaaactaaggttgaaattaaccatggtactacattagatgatcttggaagcccttgagttatatggcttgcattagtacccagctaatatgtaggcaggccttgcctattgctctgacgcctaaataaaacc

SEQ ID NO: 35756 - DNA, 189 bp, Oryza sativa
  Clone ID: uC-osrocyp021a07b1
cataacttcaaccctactttctctggggggtaattaataatactatgggggtgcatgtggcaagtcatagtcggtagctgtagactctcacaagcgccatggttaagaacttgtgtaggtacctatcccttactggattaccactatcttcttgatggaagagcatgtgataacttctaatactgctca

SEQ ID NO: 35757 - DNA, 92 bp, Oryza sativa
  Clone ID: uC-osrocyp021a09b1
tctttttagtacaacatattctaaaactgcatggggggttcttctagaacattaggtggattaaaaggaccagacgtatcaattaagtttct

SEQ ID NO: 35758 - DNA, 334 bp, Oryza sativa
  Clone ID: uC-osrocyp021a10b1
cttccctggtcctccttttgtgtacccatggagtccagcatggaatggcattcctgccatggcaccaccgggatgcacagcaccagctgaaccatcaaatccttcatacattggtagcacttttagtgtcatgtggtacatgctctccaattgttgttgatacctgtatactttccggtaattccatttttagattggactctcatttctacctggtcaaatggtgcatggagctcgccatggatttaacctaatcgcagagagtcagatttatctcctacaagcactagtacatgttcaaacatcggtcttcccgtcctaggaaagcacttca

SEQ ID NO: 35759 - DNA, 505 bp, Oryza sativa
  Clone ID: uC-osrocyp021a11b1
tctctatgtctcctccgcatcaccaccaccgccgccgacgagctccggtcgccgccggcgagaggcgccgcgcgatccgggagatgccgccgctcacggggcccaagtccggggacgctctcttcggcagcgtcgagcgcgtcaacgcggagctgttcacgctcacgtatggggccatcgtgaggcagctgctcacggatctggaggaggtcgaggaggtcaacaagcagcttgatcagatgggctacaacattggaactcggttggttgatgagttcctggccaaatcaaatgtatcaaggtgtgttgacttcaaggagactgccgatgtcattgcaaagcttggattcaaaatgttcttgggtgtgactgcaactgtcaccaattgggatgctgagggtacaagctgcagctttgtattggaggacaatcctcttgtagattttgttgaacttgctgatacttgccaggtcttcagtactgcaatgtgctaagtggagttatt

SEQ ID NO: 35760 - DNA, 507 bp, Oryza sativa
  Clone ID: uC-osrocyp021a12b1
caagaagcaattcttgagctcaatcagcaacaacatctatctccttcttgcttagttaagtccttcgccctcccaagaagaagaagatgtcttgctgcggcggcaactgcggctgcggcagcggctgccagtgcggcggcggctgcggcggatgcaagatgttccctgatgtggaggccacagccaccaccaagaccttcgtcctcgctgctccatccaacaaggcgagctctggaggaatggagatggcggtggagagcggcgagaacggcggctgcggctgcaacacctgcaagtgtggcaccagctgcagcggctgctcctgctgctcctgcaactgaatctatcgtcgtcgtcgcccggctgcatgaggatttatcgtatggatgctgctactgtcgatcagagctttgatcgaggccttaatttgcttgcattagtacccagcttatatgtaggcaggccttgccttttgctctgacgcctaaataaaaccgtccgtcgtcg

SEQ ID NO: 35761 - DNA, 485 bp, Oryza sativa
  Clone ID: uC-osrocyp021b01b1
cttgtaatctatgtcctgaaggcatcaaatattccagggagatttaagttatcacctatttgcaatcataatgcacaacacatctaaactgaaccatggttaaattacataaagtacaagcagctcctcgctagcgtgaagttcgaactaacatgacaaaactgttttccccaatgtaacaacatttgcaattttggagtcacggtacagctcaagcgagctaacctagatgagcttcttcttctggaagtacccttgaaggtgccacaattgcaaaattgaaaccacaatgcagacgcttagtgacaaaatactgaaccaggctaccctagcgtttgttttctcgctcactgttcgcatctctgcttcccttgctttgagatatatcatgttctgatggatggattggactgccacttcaagttttctaagctctagttctacaccctcaattttttccttcttagcgataacatcccaatcct

SEQ ID NO: 35762 - DNA, 437 bp, Oryza sativa
  Clone ID: uC-osrocyp021b02b1
cctcctctcgccttctcccgtcttctccttcgagttagctacctccttattcaaccatgggtaaggagaagacgcacatcaacatcgtggtcattggccacgtcgactccggcaagtcgaccaccacgggccatctgatttacaagcttggaggtatcgacaagcgtgtgatcgagaggttcgagaaggaagccgctgagatgaacaagaggtccttcaagtacgcgtgggtgctcgacaagctcaaggccgagcgtgagagaggtatcaccatcgatattgccctgtggaagttcgagaccaccaagtactactgcactgtcatcgatgcccctggtcaccgtgacttcatcaagaacatgatcacgggtaccttccaggctgactgtgccgtgctcatcattgactccaccactggtggttttgaggcttgtatc

SEQ ID NO: 35763 - DNA, 467 bp, Oryza sativa
  unsure (1)..(467): unsure at all n locations
  Clone ID: uC-osrocyp021b03b1
gcatgttggcacaccatggccaggaaacaatactagggaccatcctggaatgattcaggttttccttggtcacagtggtggccttgataccgagggtaatgagcttccccgcctggtctacgtatctcgtgagaagcgtcctgggtttcagcaccacaagaaggctggtgccatgaatgctcttgttcgtgtctcagctgtgcttaccaatggacagtacatgttgaatcttgattgtgatcactacatcaacaacagcaaggctctgcgggaagctatgtgcttccttatggatccaaacctaggaaggagtgtctgttatgttcagttcccacaaangttcnatggtattgataggaatgatcgatatgcgaacaggaacactgtgtttttcgatattaacttgaggggtcttgatggcatccaaggaccagtttatgtgggaactggttgtgtattaacagaac

SEQ ID NO: 35764 - DNA, 506 bp, Oryza sativa
  Clone ID: uC-osrocyp021b04b1
cgtggagatagcgcaagagaggagagggtttctgcgacggcgatggcggcggcggcgaacctggaggacgtcccgtccatggatctgatgaacgagctgctacgccgcatgaagtgcagctccaagcccgacaagcgcctcatcctcgtaggtccacctggctctggaaagggaacacaatcgcccattattaaggatgagtactgcttatgccatttagctacaggtgatatgttgagagctgctgttgctgctaagactcctttaggagtcaaggcgaaagaagcaatggacaagggagagcttgtttctgatgacttggttgttggaattattgatgaagccatgaagaaaccttcatgtcaaaagggtttcattcttgatgggttcccacggacagttgttcaggcacagaagcttgatgaaatgctggaaaagaaaggtacaaaggtcgataaggttcttaactttgccattgatgattcaattttggaagaaagaattac

SEQ ID NO: 35765 - DNA, 151 bp, Oryza sativa
  Clone ID: uC-osrocyp021b05b1
tttttattaaactctaatgtaaaaaagttaaacgggggggttcaaaaaattaaatggggaggttttacaccaacagaacttcatctttgttacagatactattcctataaaaatattatctgtattactatatttttacaaaaaacaattt

SEQ ID NO: 35766 - DNA, 292 bp, Oryza sativa
  Clone ID: uC-osrocyp021b06b1
atttctctccatctctggttatactatacccctggggggtttatagagagtgtctgcgccgtttcgaccaccatcacttcactaatctatcctgctaccacgttgcttccctcaacaatgcaagagggccatgcctggactgttggtttgaaggctgtgacaacatctgcgacagctgatggaattgaagaatgccgaaaactctgtggtggacatggatacctgaacagcagcgggcttcctgaattgttcgctatctatcttcctgcttgcaccttatgaaggagacaat

SEQ ID NO: 35767 - DNA, 86 bp, Oryza sativa
  Clone ID: uC-osrocyp021b07b1
ttttaacacacactaatcaaatacataaaggggggctcttatagatcaaaatgcggattcaaatgatcaaacttataacctactaa

SEQ ID NO: 35768 - DNA, 330 bp, Oryza sativa
  Clone ID: uC-osrocyp021b08b1
tcgtatacgcacacatatgtccagagcgagcagggcggtcattttagaaaacaatgcggctacagttgctctaaactatcgccattactactactgtatgcagccaatgctactagacatgagcatctcttagacctataacggattcactctatccagatggggcacataaataatgatataatacagacgtacttcaacagtatgggcatgttgtaacttatgaacagttaaactttggtctcttgacgtaagcatccattatataccattacatcaactgaactcataaccctgaagacaccaaaaatggccttttcatcatcataa

SEQ ID NO: 35769 - DNA, 103 bp, Oryza sativa
  Clone ID: uC-osrocyp021b09b1
tttttggacacttttatgacgaagtggaggggggggtatttcacgagcgagtgcggtgacatcctactcatccgaccacccatacgtcgacagaccggatgct

SEQ ID NO: 35770 - DNA, 88 bp, Oryza sativa
  Clone ID: uC-osrocyp021b10b1
tcttacgcgtacttttctaaaatgcaagctggcgggcttttttagatgtctaggcggggaaatacgcctcaacctaacttcaacactg

SEQ ID NO: 35771 - DNA, 396 bp, Oryza sativa
  Clone ID: uC-osrocyp021b12b1
ctttcctttgctggcttcagcttatgcatttaggtttgtgggtgagtggctgaagtggctgtacacggatgtcacacataaactggaagccaaggatttctcaacacttcaagaggcccatgcctgtactgctgggttgaaggctgtgacaacatctgcgacagctgatggaattgaagaatgccgaaaactctgtggtggacatggttacctgaacagcagcgggcttcctgaattgtttgctatctatgttcctgcttgcacttatgaaggagacaatgttgttttgctattgcaggttgcaaggtttctaatgaagactgtatcccagttagcttctggaaaacagcctgttggtacaacggcttacatgggcaacatacagtacttgatgca

SEQ ID NO: 35772 - DNA, 93 bp, Oryza sativa
  Clone ID: uC-osrocyp021c01b1
cttcgttagctccggccaccaactttgacccggcctgctcctccgcatcccccatcccctactccccggcggcggcggaggcgcggaggcggt

SEQ ID NO: 35773 - DNA, 490 bp, Oryza sativa
  Clone ID: uC-osrocyp021c02b1
gcaaaggaggccaaagaagcgcaaatctgcagaatctgatcttgtttcttggcataaactcattgagcaccccaaaactttgagaaacatgagcacaactgagatggactgggcttgggcagctaataggttaatggagaaggcagaggatgatgcagaaaatctagaagatgtccctgtaaattatttatggcgcaaaaggttaagattgaccacacggttaatccagcaaattcttcctgctataccagcaaaggtcctcaaagcacaagctgcatcagcttatgaaggtgtaacctataacatcgctatgttcacactaggagatgcatgcaacatggcatcatataactctcgcactcttaccgatcatgaaaataactcatctgaacaaacaaatgccaagaaaatggaagacagattgtaaagggttggggaagtatttactggaagaatcaagaagatggaaaatgactttgtgagcttgaac

SEQ ID NO: 35774 - DNA, 464 bp, Oryza sativa
  Clone ID: uC-osrocyp021c03b1
cagcttcctcttgttttttttggccgaaccccccctcgacacgccgtcgccgtcgaggggagagagagtgaggccgccggccgccgctaccactgacccctctcccttgtcggtgcgccccgtttgtcggtcgggtttgatcgatggtgtccaagaggatcctgaaggagttgaaggaccttgcataaggaccctcccacctcatgcatcgcaggtcctgtgggtgaggacatgttccattggctagctactattatggtaccctcagacagcccatttgctggtggggttttcttggtgaacatttattttccaccggattatccttttaaaccaccgaaggtttttttccgcaccaaggattcccacccggacattaattatcatggccagcatttggctcgacatcttcaatgaacagtggagttctgcacttaccatttcaaggtcctcctgtcaatttg

SEQ ID NO: 35775 - DNA, 321 bp, Oryza sativa
  Clone ID: uC-osrocyp021c06b1
gccctcacccgttgccgaacctgcggggggtcctttttatctccatggagagcgtgaaggcccgccacacctttccattcctgctaccctgctcgctaggttgatatttgctgctcggatggaacatttgcgagggctgctgtgcctagcggtgcatctactggtgtatatgaagctttggaattgagggatggtggttctgattacttgggaaagggtgttctcaaggctgttgacaatgtgaactctattattggaccagcattgatcggcaaggaccctacagaacagactgccactgacatcttcatggttcatcac

SEQ ID NO: 35776 - DNA, 408 bp, Oryza sativa
  Clone ID: uC-osrocyp021c08b1
tttgttatgtgaactcggcctccaatcctgacgggggagtcatatgaagggataggcaggtacatatgatgaggcttattgcccctaatcattgtatgcttccctagttttatagtgcttttcgcccccaagccatcttttgtttatcacaagatcatggagcgccagcctcttattctcataatcaggaacaggttcaagtatgatctgacataccaagaggttatttctatctctcattgcagtgccacgtcttggatgatgtgctaggtcacctactgacaagacctacccagcctgttacaatgaatggaatttccatccacaagacttgagcgaactacatgcttatgtacgactaccaaaggacaatcctctacattatatctttataggctaaaatactaa

SEQ ID NO: 35777 - DNA, 122 bp, Oryza sativa
  Clone ID: uC-osrocyp021c09b1
acgtttaaaggcacaaacccgccacactctagcggggggcaccacagacgccgtcgaggcattttcctacaccgacttcagacgactgtttatcgttcactcttacaagtttctttgttaat

SEQ ID NO: 35778 - DNA, 150 bp, Oryza sativa
  Clone ID: uC-osrocyp021c10b1
tttttaagcgtacgcttatgagagatcgtctgggggggttttatagttgcctatatgggtactacgtgatacaatcttaatgttaaattataaataaatatttccaattcatttataataacatatttaagtatacttttacatatataa

SEQ ID NO: 35779 - DNA, 429 bp, Oryza sativa
  Clone ID: uC-osrocyp021c11b1
atcgtatcccaggagctccaggaaaggaaaagcatgcatatcattcgacaataccagctgcctctgaagaaatacatggctatgatggacctccatgaggggaatgagaggcttttctacaagctcttcattgacaatgttgaggagctacttactgtcggttacactccaacagttgatgaggcctgccaaaagtatggatccatatttagccgtcctcatggtctttatatcagcttgaaggagaagggaaagatccttgaggtgctaaaaaactggccagagaggagcattcaggttatcgttgttactgatggtgagcgaattctggggcttggagaacttggctgccagggaatggggatccctgatgggaagcttgccctttacactgctctatgaggagcgcgtacatctgcttgtctgcca

SEQ ID NO: 35780 - DNA, 465 bp, Oryza sativa
  unsure (1)..(465): unsure at all n locations
  Clone ID: uC-osrocyp021c12b1
atccccttccccgatctaagatccatccgatccaggccatggcggcgaccatccagagcgtgaaggcccgccagatcttcgacagccgtggcaaccccaccgtcgaggttgatatttgctgctcggatggaacatttgcgagggctgctgtgcctagcggtgcatctactggtgtatatgaagctttggaattgagggatggtggttctgattacttgggaaagggtgtcctcaaggctgttgacaatgtgaactctattattggaccagcattgatcggcaaggaccctacagaacagactgtcattgacaacttcatggttcagcaactggatggaaccaaaaacgagtggngctggtgcaagcaaaagcttggtgctaatgctatcctggctgtctcacttgctctatgcannagccgagctattatcaagaanattccgttgtatcaacacattgctaacc

SEQ ID NO: 35781 - DNA, 277 bp, Oryza sativa
  Clone ID: uC-osrocyp021d02b1
tttcttgtgggcggacgcgtgggttgtgcaccatggccattgtcggatttgatgggcctgctgcaaagcttgccaaaagaaagagaaagaaccaatttaggggcattcgccagcgcccttggggtaagtgggctgcagaaatcagagatcctcgcatgggtgttcgcgtctggcttggctctttcaacagtgctgtagaagctgtaagagcttatgatgctgaagcactcaagatttgtggtaagaaggccaaggtgaattttacagaagcttcaac

SEQ ID NO: 35782 - DNA, 337 bp, Oryza sativa
  Clone ID: uC-osrocyp021d04b1
catcaccacatttgcagcatatagctgcggtctttcgaggtgtacagtgagtcacagtgagaaaattcacgattgatcgaaggtagcacatctatgctatttattttagctagtcatggtgtccaaggctttgctcgtgttggctatcagtctcgctggtgcctttttcgttaactgcgcccagtagctttagccctacgccgacctctgcaacgacgaccccaacgccggctacggtagtagcggctacggctactcgtcttattagggacaaatcccagcgcattatggacctaacccgtcgcaacagggaccaaacccggtacagttgggacag

SEQ ID NO: 35783 - DNA, 144 bp, Oryza sativa
  Clone ID: uC-osrocyp021d05b1
gctatcattagagaaccagacctagcgggggattcaaagcaccaaccgggcgcggtctccccaagtgttcaagtactaacacataaagtacgcaggcacgtgactaattccgtgtatccacgattcacacaatcaaacacttgt

SEQ ID NO: 35784 - DNA, 314 bp, Oryza sativa
  Clone ID: uC-osrocyp021d07b1
tttttaaccagtgttggcagcatgtgccatgggggtagcttatatgtattgacacgaataaagtatcctcagatgtttgtctgacttgcaattggacagcctggtttgattcctatcgttgctatttgctttgactgccgccaggatcattctctgtgcgatcactttcctaggatcccctgtccagatagcttcatcagcctatgatcaataatgtatagtttacccattggcctcacaccagtgccggcgagtgctctatatatgtatttgcacttggacgcgctgtcggctcactatgtgtatatgatctt

SEQ ID NO: 35785 - DNA, 176 bp, Oryza sativa
  Clone ID: uC-osrocyp021d08b1
ctttggcgaatgaactttacataaacaagggggggtttttttagagattttgagcggtacattcgctctaacttttggcctatactggggctattctaatcggttatgattatataaggctgacttgccttgcattaacctcaggactattgtggtgttcaaggattattaagtgt

SEQ ID NO: 35786 - DNA, 69 bp, Oryza sativa
  Clone ID: uC-osrocyp021d09b1
ttctttttaccagcaataatgttaccctaccttggggggcctatctacaacatgatgcgggacctcgcc

SEQ ID NO: 35787 - DNA, 222 bp, Oryza sativa
  Clone ID: uC-osrocyp021d10b1
tctgttatgcatattccaacactatgtgctgtgcgcggttaatctagatgagactggtgtggctatcattcctgaaaggagagtttatttgattaggccttcatacaagaccgaaaaaggtagagtgtgaaatacctatagtataatactttatttttgttcctgatcacatacggtttacgttagagtgccaacttatacattttatatgaaacataagca

SEQ ID NO: 35788 - DNA, 512 bp, Oryza sativa
  Clone ID: uC-osrocyp021d12b1
acggttttaagttcaaaaatgagaggagcagatccatacaaggcgagccttcgagctactcctttgccagccttgtctcgacttccggttctagaccaccttgcgcgggagccagagccactcgagctgtgcttctcccccctccaggagatacgcgccctccggggatggacaccgtataaaagatcgtcgaggacttcggctacgacatggccatgggcccgttatgctccggcacggaccgttccggacatgatacgggcgatacgcgcgtgcaggacggcggaccgaggagcgggccgaggcgcggcggtagtgcgcggcgatacgagaggccatcggcgagaaccagcaggagatccggcaccggaacatggccaagctcatgttcatccatatgctcggataccccacccacttcggccagatggagtgcctcaagctgatcgccgtcgcgtgatacccggagaagcggatcggctacctcggcctcatgctgcttctcgacgagc

SEQ ID NO: 35789 - DNA, 275 bp, Oryza sativa
  Clone ID: uC-osrocyp021e02b1
cggacgcgtgggcgccgccacacacccccaaccaagcttacaccagcgcgaagcggcggcgagagggcgagatggcgcgcggcgtggcggtggcggctaagggcggtgcgggcggcaagaagaagggctccgtctcgttcgtgatcgactgctccaagcccgtggaggacaagatcatggagatcgcgtcgctgtagaagttcctgcaggagcgcatcaaggtcgccggcggcaaggccgggaaccttcgcgactgcgtcaccgtcacgcgcgac

SEQ ID NO: 35790 - DNA, 485 bp, Oryza sativa
  Clone ID: uC-osrocyp021e03b1
gctaactgcgggatttgctatcccgggcgcgagatcaaattcacgaagagaaagcaacgacagcaatttcagctgcatcataaccatgagtctagcttgtctagtatgccatggcatgagcagcccctcgcactcgtttaggagctattcggtctcaagttcggaggaggagaacaggtgtggagctgttgttgcctgcctaacacggcgagtaatgcctgctggaaccgctaacactgtagggacgtcgaaggtgacaccttttcctctaatggctgctggccaaggcactgaaggcgctcctcgacttcaacgaagccgtgctgtttcaagggatcttgtcagggactggaactttgaagagattgctatcaggaactagagtgagtagggtgtgctagcagttctttccaggttgagcatatggcactatcctttggcagcagatttcgagtgacttgatgtacattttctagaatacatct

SEQ ID NO: 35791 - DNA, 109 bp, Oryza sativa
  Clone ID: uC-osrocyp021e04b1
gagggcatattcaaccccgaaactgggggggattaatgaacaaacagggggcattattatacgaattattcgttaaagtgttaatattactccttgccttatctaaata

SEQ ID NO: 35792 - DNA, 91 bp, Oryza sativa
  Clone ID: uC-osrocyp021e05b1
actcaaagtagcacgtatactcacgggggggctctaaaagatcaattggggctcaattacccatcgatcattctatcaatctcgacaaatc

SEQ ID NO: 35793 - DNA, 73 bp, Oryza sativa
  Clone ID: uC-osrocyp021e06b1
ctttttcgtgcgaaaaaaagtaatatattctcggggggttaaataaagaggagtgggggatctgaccaaatag

SEQ ID NO: 35794 - DNA, 67 bp, Oryza sativa
  Clone ID: uC-osrocyp021e07b1
tctgtttttacgcaatcatactccttagtacagggggggatactcaaataaaggaggcggttattac

SEQ ID NO: 35795 - DNA, 56 bp, Oryza sativa
  Clone ID: uC-osrocyp021e08b1
ttttacacaaacccttactccaaaccctacgggggactcaataaagatcaatggcg

SEQ ID NO: 35796 - DNA, 131 bp, Oryza sativa
  Clone ID: uC-osrocyp021e09b1
gttacgcgtgtgtgtgcaaggaacaaactgggggtgctttttgaagattgaggaggaaggtagctgcaccaccagaatggaactacagagttttcattggaggcttcctactggcttcacttagaaccttt

SEQ ID NO: 35797 - DNA, 86 bp, Oryza sativa
  Clone ID: uC-osrocyp021e10b1
tctgttttcgagtactatagccaccagctaaaaggggggctttttgaatttcaatggtggctaaacccgctaccttgtttcattgt

SEQ ID NO: 35798 - DNA, 345 bp, Oryza sativa
  Clone ID: uC-osrocyp021e11b1
tttatgtgtattttttctccgaaacaccaggggggtcttttatgagctatgggcggcgacgtcgggaggatcctcgcgatccgtttgatgccgacgttcacggttcccaattacggtgacttctactttggttgcagttagcgcgtatacgcggagctgttcacgctaactgtatggagccatcagtgtaggtatcttgatacgtattcggtggagtactttgatgtcatcatgcttgttgatcagatggtctacatctattgtaactccgatgggtgatgtggtactggccatattaaacgtctctaggcgcgatgactttaaggagactgccaccggtaatgc

SEQ ID NO: 35799 - DNA, 495 bp, Oryza sativa
  Clone ID: uC-osrocyp021e12b1
ggaatagggaagcgagggcggagtacggcgcgcttcgccgttgccggaggcggcgggggtgagggcagcgagcgatgccggtggcgaggccggagccgcaggagccgcgggtgatcgcccatgtcgacatggattgcttctacgtccaagttgagcagcggaggaacccggagctcagggggcagccgaccgccgtggtgcagtacaacgactggaaaggcggcgggctgattgccgtcagctacgaggcccggaagttcggcgtgaagaggtccatgcgtggtgatgaggccaagatggtctgtccaagtatcaatttggttcaggttccggtggcccgtgacaaggccgatcttaatgtttaccgtagtgctggctctgaggttgtcacaatcctctcgaccaaggggaagtgtgagcgagcatccatcgacgaagtttatcttgaccttactgatgcagccaaggaaatgcttttagaatctccaccgggag

SEQ ID NO: 35800 - DNA, 413 bp, Oryza sativa
  Clone ID: uC-osrocyp021f01b1
ctgcgaacactaaaactattctcatgttactactatacgttaggggcaccacaatcggcctgaatgaactctacttaaacggctctggtgcgaatggatggctcaaaacagaaatactaatgcaaaaagcatagaagcatgatacctccagacctggatccctaacagacatagagctcatggagatgatacaaagcaacagcaacactgatgattgcagacgatgagcatctagctccacaggtgtgaaaagtgttgaactatgacagcgcggacattgaggactaacctcacactgagacctatacatcagaacgataagggcaccctatatgcacacatggatcatgataagcagactgataagaggcggcgctaagcccatgctgagagcacggataaactagcgttgt

SEQ ID NO: 35801 - DNA, 349 bp, Oryza sativa
  Clone ID: uC-osrocyp021f02b1
ctcatgcagcagcagtcgctcaagcacgtgcgcgtgtacgacaccaacatcgacgtcatcaaggccttcgtcaacaccggcgtctagctcatggtcgtcgtccccaactctgaccttctccccttcgcgcagtaccagtccaacgtagatacctgcctcaagagcagcattctgccctactacccggccaccatgatcacctacatcaccgtcggatcctaggtcaccgagagccccgtcaacgtgtccgccctcgttgtgcctgccatgctcaatgcgcatactgccctgaagaaggtcagccttgccaagaagatcaccatcttgagcacgcacttgctcgggatac

SEQ ID NO: 35802 - DNA, 220 bp, Oryza sativa
  Clone ID: uC-osrocyp021f03b1
cttatctttaacccgatgtggaaccagctttccgtgcgggattcatagatctattcgtgggatccaaaccccacctacatccatgagccttcatactatcaggacatgactatgtcctcacttggtccccatggggtgaagaatgcctactgcttactgtatctttgtggtcagaattacctacacaccatatattcaccaccaggtagtatttacatta

SEQ ID NO: 35803 - DNA, 190 bp, Oryza sativa
  Clone ID: uC-osrocyp021f04b1
tttattctgacgatactatgtacttcccctccggggggtattattgacgacgaccgcgacaagctacatatccttcgtgctgaacgcgtggagtcgtggagaggagattctgtcaacgctactaggagtggacagttgtatatgggaggtgagtatccatttaattttacacctaactatcatttaatat

SEQ ID NO: 35804 - DNA, 275 bp, Oryza sativa
  Clone ID: uC-osrocyp021f06b1
ctcaggcagcaacggaaccatattacgggggggtataaaagacataaattgggggatacccctcaacattccgacaccttatgttcttcttctacttacatagagacaatgttgtactaaaatatcaccataacatttccagtaacacgatctaccatatcaaattactattttctaattttgaagaaatcgccgtcctccaccgtcgacggggccgcgccggcggcggagaacgggtacttcagcaccgtcttctccgagttgcccacggcaaa

SEQ ID NO: 35805 - DNA, 339 bp, Oryza sativa
  Clone ID: uC-osrocyp021f08b1
tcttttacccgtacgagagattctgaatgctagggggccttttataaaccgtgtgggggtgatacgcgataaaaactttgatatacggtcacattgtacaggcatatttattttaatagaagagcttgaaaaatggatcataaaattgaacgaccggatatatcatgacagcattcccttgcatgaggtgaagcttttgaccaaacagattagagagatttttaagaccaaaccgtaattcacttgcactcatgatcaccttgctcaaattcaagattcagaggtcgaaagagacgacatacatgatcatgttaacatcatttgttaggttattgatgt

SEQ ID NO: 35806 - DNA, 76 bp, Oryza sativa
  Clone ID: uC-osrocyp021f10b1
tgttacgcgtacgataaccactaacaaactggggggctattaaagaatctaagaggggaaaaaccgcaacatccat

SEQ ID NO: 35807 - DNA, 282 bp, Oryza sativa
  Clone ID: uC-osrocyp021f11b1
tctgttatagggccgcgcgggcggctatcacggcgggttgacgtggcctatggttgtcgcgcctcatgggtcacgagctatgcctgctgtgctgcctcaccttccacagacgcgtaggatcatctatgctgacctggactgttcttgcgcgccaagaaacccaaaccaccgccgtgtgttgacgccacgaagaaatggccggcctccaccgacgtccgggccgggccggcggctgatagcgggtacttacgaagcgtcttctccgcgttggcaaaggtacat

SEQ ID NO: 35808 - DNA, 571 bp, Oryza sativa
  unsure (1)..(571): unsure at all n locations
  Clone ID: uC-osrocyp021f12b1
gtcgcttcccacctccgaccccgagccgcgccgccgcctataacgaccacttcacgtgccctatctttctccgcctcctcgctcacgagctcgtcctcctcttcttcttctccttccacggaagtctaggttcatctctcctctcctctcctctcctcgagcgccaagaaacccaaaccaccgacgtgtatggactccaggaagaaatcgccgccctccaccgccgccggggccgcgccggcggcggcgaacgggtacttcagcaccgtcttctccgcgtcgcccacggcaaatacgaaagacgcgaagcaggcggacctgtacgcgatgctgaacaagcagaactccaaagggcagaatggcggtggctttgcagatggcaaatcgcacagccctactaaagctcgtggtgcatacaaggatggtaaacaatcatatccaaacgagtcatcggagtcgccatattttggctcttctgtgcattacggtgctcgggagttttatggcaacactccaccaaagcagggtgatgcatcaccagganatcaaaggagcagggagcagatcagat

SEQ ID NO: 35809 - DNA, 444 bp, Oryza sativa
  Clone ID: uC-osrocyp021g01b1
cggacttgtgggggtgttcttggcaacctgaggggcggctggaataagatcgccttcgtcaacgccgccttcgtcgccctcctcctcgtcgtctactccctcggctgctgcgcgctccggaacaaccggcggcacaagtactcgctggttgggaaatgatgagggtttttggtttttgctcagatgaaggttttgtggcgcgtgtgtttgtgttgtgttgcttgctggttggctacatgaacaactgtaggatttcaggaaaaagatttatgcttcagtaaatatgcgcttccatgttatgaatgaacgctagtttagtaaatatgtgttggttgagttcttgattgagatctgagaatctctcaggaaaatatggctggaccttttaatagttacttttgggtttggaacagtcacagaatgggcccggtccagagttgaagc

SEQ ID NO: 35810 - DNA, 307 bp, Oryza sativa
  Clone ID: uC-osrocyp021g02b1
cggacgcgtgggcggacgcgtgggcggacgcgtgggcggacgcgtgggccttctcctccggctcttcttcagtatcgaatcctctcttctcctcgtgcccaccaccaccaccgtagcaatggcgggcaacgggccgatcaacaaggaggacccgctcaactggggcgcggcggcggccgagatggccggcagccacctcgacgaggtgaagcgcatggtggcgcagttccgcgagccgctggtcaagatccagggcgccaccctccgcgtcggccaggtggccgccgtcgcccaggccaaggacgcc

SEQ ID NO: 35811 - DNA, 98 bp, Oryza sativa
  Clone ID: uC-osrocyp021g04b1
ctttctctcgctcgaccacgcaacctcttttcggggggttttttaaagagatacggctggcactgttcaaacttctcatctttctgtcttaccactga

SEQ ID NO: 35812 - DNA, 96 bp, Oryza sativa
  Clone ID: uC-osrocyp021g05b1
ttttcttaaaagcatactagtaaattgagctggggggaatcaataaatgtatgtggggctaaataacaactatggacatattcctagattctttaa

SEQ ID NO: 35813 - DNA, 96 bp, Oryza sativa
  Clone ID: uC-osrocyp021g06b1
atactctaatgcaataccaccctcgggggggatctgtaagatctgagtgggggaatatggtcatacgttgtggatagtcaaccagtgaatgtttac

SEQ ID NO: 35814 - DNA, 120 bp, Oryza sativa
  Clone ID: uC-osrocyp021g08b1
tttatttagagaacaacaaataccaattgttggggggggattatagagagagcgtggcgatatctaccaagaagatggtcggtatcagtttggtgtactagcttgtcaagactatcattt

SEQ ID NO: 35815 - DNA, 192 bp, Oryza sativa
  Clone ID: uC-osrocyp021g10b1
acgtgatcgcttccatcatcgaagcgggggggaattgatacacttaccgtgccttacatctgacacatcttattattagactgagagcagtttttcaaggcgtaaaagagatcgtctcgaacaataagcttattatatccattcatagctcaccccgactcgattcagtgccgtgaaatccttcgtagccta

SEQ ID NO: 35816 - DNA, 515 bp, Oryza sativa
  Clone ID: uC-osrocyp021g12b1
cttgtatctttcacaggccgagaaggacttgcagccctggattgctcgagatgatgagcaaggtcagaagatgtggagagtcaaccagcgaatagttaagctgatagcagagcttatgaggaaccacgatagcccagaagcattggtgatccttgctagtgcttcagatcttcttcttcgagcaactgatggaatgcttgttgatggtgaagcttgtactttaccacaattagagctattggaagtaaccgccagagcagtccatctcatcgtcgaatggggagattcaggtgtatccgtcgctgatggcctctccaatctgctgaagtgccgtctatcaaccaccatccgctgtctttcgcaccccagcgcgcatgtccgtgcactcagcatgtccgtccttcgcgacatcttgaacagcggacaaataaactccagtaagctcatccaggggaacaccggaatggcatccagagcccaacctaccagtgcttggcagcaagcatcatcaactg

SEQ ID NO: 35817 - DNA, 242 bp, Oryza sativa
  Clone ID: uC-osrocyp021h02b1
cccacttgtgcgcgagctcgtgagcgagcgcgcggaggtccatctaacaaagggggcgctgaacgacacatgcatccgactaccactgtcgctagcgttcagacctaccaatcgcagtcggactggtactgggcctagaaatacgtaggtcacccctcacactggcgcgtatctgtaagcaagaagcccagcaagtcaactggagttctattacaaaatgtcgaccgcatagaccatcgacg

SEQ ID NO: 35818 - DNA, 106 bp, Oryza sativa
  Clone ID: uC-osrocyp021h03b1
ctttatttcgccctgactaaaaaccaacaccggggggggtttatttaaatagatggggccgttcttccccccctcctaattacttatatacactccgaccattttc

SEQ ID NO: 35819 - DNA, 84 bp, Oryza sativa
  Clone ID: uC-osrocyp021h04b1
ctttattcatgcgctcacgcccaaccccccacgcgggggatctacaaaaccatactcgggggaaacaccaccaccctccaacca

SEQ ID NO: 35820 - DNA, 68 bp, Oryza sativa
  Clone ID: uC-osrocyp021h06b1
ctccatctcctaaacattctttggggggggatttaaaaacatttatggggggatcactaatcaaagtt

SEQ ID NO: 35821 - DNA, 100 bp, Oryza sativa
  Clone ID: uC-osrocyp021h07b1
tcgttttcacaagccctatctccaaaacgtcgggggggttattataaaaacattaggggttcagaccactaccacctacaccttaagcatggcgataatt

SEQ ID NO: 35822 - DNA, 92 bp, Oryza sativa
  Clone ID: uC-osrocyp021h09b1
tttctctaagatactatatttaataacagatgggggggttttaataaaatcatcgacgggtaagactcccacaatcttactactaaacttct

SEQ ID NO: 35823 - DNA, 207 bp, Oryza sativa
  Clone ID: uC-osrocyp021h10b1
tgttaaggatactcttttgaagaacagaattgggggttatgatacaatcattggcgggaaagacggctactaccttactggtgctctgcagcataactttccatcttaaaatgaccattagatcgacaattaacacagtactacgctggatgctcaactcacaagcatgctgtgaattgaacgagtggtggtatgagggacaatgtc

SEQ ID NO: 35824 - DNA, 516 bp, Oryza sativa
  Clone ID: uC-osrocyp021h11b1
gagaaggttacccttctcaagaccaagtttggctttcacgatgcattcaactacaagaaagagggcaacgaccttactggtgctctccggcggtgcttcccagatggaatcgacatctactttgacaatgtcggcggtgcgacgctggatgcggcgctggtcaacatgcggcgtggtggtcgagtggtggtgtgtgggatgatctcacagtacaacctgcaggagcccgaagggatgcacaacgtgatacagatcctatccaagaccatccgggtggagggatttgccgtattcaaccacttcggcttatacccgaggtttgaggatgagatggctaggtacctaaaggaaggtaaggtgaccgtcctgcaggatgttgtcaagggcatcgagaaggcatcggaggctctcattggcatgttttctgtgaggaatgtgggcaagtttgtggtggctggtgcagatgaatgactctagataataataataggcagttatagtactgttatagaataa

SEQ ID NO: 35825 - DNA, 490 bp, Oryza sativa
  Clone ID: uC-osrocyp021h12b1
gtgaaggttacccttctcaagaccaagtttggctttcacgatgcattcaactacaagaaagagggcaacgaccttactggtgctctccggcggtgcttcccagatggaatcgacatctactttgacaatgtcggcggtgcgacgctggatgcggcgctggtcaacatgcggcgtggtggtcgagtggtggtgtgtgggatgatctcacagtacaacctgcatgagcccgaagggatgcacaacgtgatacagatcctatccaagaccatccgggtggagggatttgccgtattcaaccacttcggcttatacccgaggtttgaggatgagatggctaggtacctaaaggaaggtaaggtgaccgtcctgcaggatgtttgtcaagggcttcgagaaggcatcggaggctctcattggcatgttatctgggaggaatgtggtcaagtagttggtggctgttgcagatgaatgactctagatattaataata

SEQ ID NO: 35826 - DNA, 348 bp, Oryza sativa
  Clone ID: uC-osrocyp024a02b1
ttgactcagctatcctcacaaaatgagagattggaatcctcggagaggcaaaggccaccttcacaaagctacaggccacagtcgtcgcaagggcagaggcctagttcagtacaaggccgtcagtactccgagcaaagaagaatccaggcaaatgatagagtaaagtcggcagaaaggcagataaggctctcctcgtaacccatgccatcacgacatatacctttcaactgaatgcgtgatgcccatgcaaagaaatttgctaccgatgtaacgaagatttattgatcttagcgttgatatgtatgtttccttttttcttttcttgttctcttcttttgttcttttctc

SEQ ID NO: 35827 - DNA, 238 bp, Oryza sativa
  Clone ID: uC-osrocyp024a04b1
cctcctcgtccgcggacgcgtgggttccgacggcgaccgttgccgccatatccctcctaccgcttgttcctcctcctgctcttcttctccccccctatctctctctctctctctcccctccctcccctcctcgctcaccaactcctcctgtcccgactcgcgagcgaatccgccgagcagcccaagaacaagggggaaggaggaggaggaggcggaggtgggccgggggggcttgcct

SEQ ID NO: 35828 - DNA, 287 bp, Oryza sativa
  Clone ID: uC-osrocyp024a08b1
attgtgcgacgtgtggtgtaagctatgtgtcacaatttgagcacaccatcttactccggccaacctgcaaggaagtcatatccagaggcgacgactactgattgcggctgtagcttgtcatgtaccggttgtttgtgagatcattgtgcaccattctgggcaacctgtgtactatcatgctatgtatgggatcatatggcggaatcatcagataaataatcgagagacgttttcagttttttgttttgttgtttacacgagataccaactatctgttgtctttcttg

SEQ ID NO: 35829 - DNA, 416 bp, Oryza sativa
  Clone ID: uC-osrocyp024b01b1
gtaggggacgcacacgtttgtgaacaagcaccagacctggtgccataatgacattcatggtcatatcacctggactgagccatacgacctgttgattaccatcaagcatactggcgatgaggatgatagaccggtgtgagataccagcggttgtgccaacacctaaagagatgagtgccatggacataagcactagtacctgcaaagaagaactcaacgctttgcctatcaccaatgaccatgcttgccatggccgtgaacatagccactgtgaagaacccgttgctctgtactctaccggcgaacatgcttgccatgagcatgagcatgagcatatccactgtgactagccaatctgctcgtattgcgctgataagcatgcttgccatgaccatgaacaggttcatgagcatcat

SEQ ID NO: 35830 - DNA, 137 bp, Oryza sativa
  Clone ID: uC-osrocyp024c04b1
ctaactattaatcctctcgagtaatcgccttgaaatcatcggttgatttcatgcagagattaagaagcaacagatattatataacttttatcatccaaacactttcaacacataataactaaccaattttaatcaat

SEQ ID NO: 35831 - DNA, 211 bp, Oryza sativa
  Clone ID: uC-osrocyp024d02b1
tttcctacacccccaaacccacagccacgacgcggccgcaatggcggagcccgagtcctccacggccgcggccggcggcagccgcctccgcatcgcctgcggtggcgtgctgtgcgccttcaccctacttctcatcggcgtactctcgttctcgatcctctttttcttcgtgatttatgtctagagcgtgatccacgtgtttgacctcttc

SEQ ID NO: 35832 - DNA, 264 bp, Oryza sativa
  Clone ID: uC-osrocyp024d07b1
cgacgagatgtcttcgatcgtgtcctcttactcggaaaattaccagtcgatctcggtctcgtcatcactagctacgtctttgtgtgtgttttgtgtcgcgtcactgctgcttcgtacacgccggagagagttacataaaacgcgcgcgcgtgcacgggggagtggcgctagctttggctgcttggtggttcgtgtggggttcgtagattgctcgctctgatcattccggggctggagcctgtttatttatgggcgtgtgcgtgt

SEQ ID NO: 35833 - DNA, 154 bp, Oryza sativa
  Clone ID: uC-osrocyp024d11b1
ctcaaggtcaacttctctttacgccgccgccgctcgtcccgaagcggccacggcgttcttcggcgaagcattcgccgcagcagcagaaggccaggtcgtcgttcgtcgtttcttcttttctttttatcattttttttttttttttatttatttt

SEQ ID NO: 35834 - DNA, 424 bp, Oryza sativa
  Clone ID: uC-osrocyp024e08b1
gctggcacgccggcagcggccggtgccggaattggccgggatccggcgccatggtcatcgcagtcgccgcctcccccgctcagtcccgcaagactgagacctacaccgacaccaagcgccgggatgacgtccgcggccttaacatagccgccgcgcgcgccgtcgccgacgccgtgcgcacctccctcggcccccgtggcatggacaagatgatctcctccggcgagcaggaggtcatcatcaccaacgacggcgccaccatcctctcccgcatgttcctcctccagcccgccgcccgcatgctcgccgagctctcccgctcccaggacgccgccgccggcgacggtaccactaccgtcgttgtccttgccggatctctgttccgccgtgctcaatgcctactctatgctggtgcccaccctac

SEQ ID NO: 35835 - DNA, 550 bp, Oryza sativa
  Clone ID: uC-osrocyp024e12b1
attttaacttccatagtgtgaatgatctactaaggctcgtgcggctttcaatggagtctatcagctgctgacatgttcagaatccaggaaaatgacatccctttacaaggtgctgttggatgtgcattccatatttgagtaatgtcccagacttgccagtagcatttggttgaaaagttcaactgtgcgaaattcataggtcttctcatttaagtgtgctggttaatttgtacatgaagcgtttgtcttatcttctattctggaggcctgtttttacccattgctagcatctagttggatggttttatccatgagggaggttgctgaagatgtgctttgcagattgcactgatcaacttgattttgggcaagactgcctagttacagactgcacttgataagcttatacacaatgctactggacagcagcttccttgtagataatcttctttcctccatgctgtaaatgatgtattttcgtcatgggagtgacctatggcgaatagtatcatatgttcccttgagaaggcaaaatggtggttccacttag

SEQ ID NO: 35836 - DNA, 349 bp, Oryza sativa
  Clone ID: uC-osrocyp024f07b1
tcgtttccactcccctccccccattattcccgcgattctcctcccttcctcccgccgcgcgcgccttggccatggggaagtacatgcggaaggggaaggtgtcgggggaggtggcggttaaggtggtcggcggtgcgctgctcgtgcgttgtccttttctctttccttcttcttgtctcccgctggtttttcttcgttccttgtctcttctctttttcctttcttctcctcttttttcttttctgttccttttgtcctttttcttttttttttcttgtttcccttttttttcttcctcttgtttcttttctctttgctctttcttctgcttctttccttttcttttcct

SEQ ID NO: 35837 - DNA, 118 bp, Oryza sativa
  Clone ID: uC-osrocyp024f10b1
ccctggagaatgcagctccccgtagaccgacggatgtttttaacatggcatcaaccaacacgccagataatgttgaaaaatcaaccactgatgataagcaagagctaagtatagatcc

SEQ ID NO: 35838 - DNA, 310 bp, Oryza sativa
  Clone ID: uC-osrocyp024g03b1
caccacacctaaacccttctttcttctcctcctccgccgccgccgccctcccctctcgccatggcgtcggagaagaagcagtcgaacccgatgcgggagatcaaggtgcagaagctcgtgctcaacatctccgtcggcgagagcggcgacaggctcacccgcgcctccaaggtgttggagcagctgagtgggcagagcccagttttctccaaggcgaggtacaccgtgaggtcattcggtatccgtcgtaacgagatgatcgcgtgctacgtcaccgtctggggcgagatggccacgcagcttttggcga

SEQ ID NO: 35839 - DNA, 708 bp, Oryza sativa
  Clone ID: uC-osrocyp024g04b1
aaaaaaaaaaaggataataaaaaacaaaacttttttaaaaaaaaaagaagaaaaaaaaaaaaagggaggataaaaaaaaaaaaagaggaagaagaaaaaaaaaagagaagaggaaaaaaaagaaaaaaagaaaaaagaaagaaagaaaaaaaaaaaaagagaaagaaaaacaaaaaaaagaaaaaaaaagaaaaaagaaaaaaaaaaagaaaagaagaaaaagaagaaaaaagaaaaaagaagaaaaaaaaaagaaaaaaaaaaaagaaagagaaggaaaaaaaaaaagaaaaatgagaaagaaaacagaaaaaaaaagaaaaaaaaaagaaaaagaaagaaaaaaaaaaaaaaaaaagaaaaagaagaagaaaaagaaaaaaaaaaggaaaaagaaagaaaaaaaagaattaaaaaaaaaataggaaaaaaaaaaaagaaaaaaaaacaagaaaaaaaaagaaaagaaaatagaaaaaagaaaaaaaagaaaataaagaaagaaaaaaaggagaaagaagagaaaataagaagaaaaagaaataaggaaatgaaaaaaaaggaaaaaaaaagaaaagaatgagaaaaaattagagaatagaggaggaagaagaatagaaaagaaaaaaataaaagataagaaaaaaaaaagaagaatgaaagaaaagaaaagaagagaaagaaaaaaaagaaaaagagaaagaaaaa

SEQ ID NO: 35840 - DNA, 53 bp, Oryza sativa
  Clone ID: uC-osrocyp024h06b1
tatagttgaaatgctggtaccgccctgcaggtacccggtaccggatatccccg

SEQ ID NO: 35841 - DNA, 252 bp, Oryza sativa
  Clone ID: uC-osrocyp024h08b1
ctcgatgtattgcgcgttctccgatcgctcatccgcgttggattgacgctgtcagtgcctgttcgtagagggagggagaccgataagcttgtgttgcaatgcatggcaagcaaagccttttccccagggagtagccttgctcatctagtcatcttatcgtcggcatttgcctgtgcttgcattttctttcttttcaacccaccccggcgttgtctgattgtcttccgatttgtaaagcagttgcaatgttaa

SEQ ID NO: 35842 - DNA, 292 bp, Oryza sativa
  Clone ID: uC-osrocyp024h12b1
cttccatctcctcctcgtcgtcgcggcgcgcgagctagggtttctcgactcgccctcgccgatccggtcagccatgtcgaagcaaggagggaaggccaagcccctcaaggcgcccaaggccgagaagaaggagtacgacgagagtgatctcgcgtatctgcagaagaagaaagatgaggaaaaggcactgaaggagcttaaggccaaggcaggacagaagggcgcactgggaggcactggtctgaagaagagcggaaagaaatgaggccgataccaatctagtatgtctgaa

SEQ ID NO: 35843 - DNA, 450 bp, Oryza sativa
  Clone ID: uC-osrocyp025a02a1
gagggaccccaaaggcatttgatatatatttcaaataaaggtgttcaacacaagaaagctttagacccggcaatatagcccccgacccttggggattcaggggtcaacaaaggggtttatgatcgggtttacaaacaaacaaaaagggccggtatttcggttcccacaaaggataagggtaggtttttttaagcggctgaaaggaagggcttcccgggggccccaggagaggggggaccctgggaacccaggggcttagcattgaccccatcagggagggttttacccccgcttttaagccggacgtattcatcgggggtgaacttggggaaaccccactttttaccctgaaagaactttgggggaccagggaacttggacttggcacgacggagggcttttctggcatggaccggattggtggggttgcccccaccaaaaggagggccc

SEQ ID NO: 35844 - DNA, 451 bp, Oryza sativa
  Clone ID: uC-osrocyp025a03a1
gaccaaagggtacagtaccgatttcattattccatttgcccatcgaagtgatatgatgcattgaaatctgataacttacataactaaaacgtagttgtttcaaatagtaaggcaaatcctatgattacaccataggaaaaactgctcattggaaagcctatataggaattatacatatagccaagaagcatcgtttttggcctagtcaaaatctggcaaaccatgacttgccgtagtatcatcaacaagcacaagctggtcgtctaatcgtccagctcaatgatcttcacaaccgaggaatcacccactttctggcagacaacaacgcgatcatgcgacttgatcacaccggaagctttgccatggtcaagagcaaccttcaaaactgactcattggtagcgctggtcgattcaactggatggcgaggatcagcaagcatcggaaagagac

SEQ ID NO: 35845 - DNA, 456 bp, Oryza sativa
  Clone ID: uC-osrocyp025a05a1
ctaaaaggcggcaaaacaatatatataacaataacattgataagttaagtacaagtcaatgtaagcacacggcagcaatgatccgttccacgcttccagcaaacttctaaaaggctatgtggtactctttcaaaggccggggctgggggtgatccaaacttcagaaatagggagataggtcgaatacccacgctcacaagaagggaaaacatccctcaaatatctgattttgaaagtcgtaaatccctacacctttccaaccttcccgcctagaaggaaaatgatcatcgttacacaagcaaggtgttgtgaagtagacacagttggacctaagctctggaaaatccctgatgggcaaacacaccgaatgattttgtccaacaaatatcgcatgctcccgaagggctgctgctgcaaccgcagatcttaatcttaccaatctgttattttttaacc

SEQ ID NO: 35846 - DNA, 371 bp, Oryza sativa
  Clone ID: uC-osrocyp025a06a1
aggtcaaaaccaatgcgtaattccattgaatttttgccgtttgacaaattaaagcatagagacaaaagaagaacaaaaactctgatgataggaacaagtagaggcttcaaaaatgttgttgttcagcaagcgaggcctagctcagtttgcaaccctgcagtttgtgcggatctggccgtcgctgccggtgagcacctggatggcgcccatcttgaccatggcctggccgaacttggtggcgaagaggtacatgttgtaggcgttctgcgccacgagcgcggcggtggcgttgtcggcggtgagcgtctggtcggaggcgaggacgccgcggccggcgaggaggttctggtagtagctggtgtcgaacgtgt

SEQ ID NO: 35847 - DNA, 416 bp, Oryza sativa
  Clone ID: uC-osrocyp025a07a1
ggatgaaacggagtgatgcagcgtaacggggaagtgaaacagattacaaatcggagcaccaaacatagcaacgattcaacgaatgtaccaccaccacaccaaaaccaaagctaaaagagtcgatgatgatttgggtatgcagtaaaaatctgaactgtaaagcgacgagccggtgatgatgagcgtgagatttggcattggtttctttataggaaagcgtccatctcgagcaccttgaggacctcatcctggttgttcagcttggccacctcgatgggggtcttcccgtccagattctggggcgtgacagcagcgccatgcttcagcagaagatccacacattttttccgaccatatccagcagcgtaatgcagtggggtgttcttgttcttatccagagcgttttcagcagcacc

SEQ ID NO: 35848 - DNA, 460 bp, Oryza sativa
  Clone ID: uC-osrocyp025a08a1
aatctaacatacgcaaactgatattatcacaatgttagccgatgacaatggaaagagtaatctaggtacaagcggatcattgacggtggagacaagacattggctgcaccacaacacccaccagtggcgccaacaaggagcgctatccgttataggacgagagaaaaagtaaaacatcacgatgtgaagtgaaactgaataattctagtagacgatgatgatgatggataggctccttaggacgcccgccgcccttagcgtcttgctgctcccatcttgtccactggaaggctcactcgtcatcgtcttcatcctcttcgctgccctcgtcgtcatcctcatcattgacctcggacttggacttgtcagattcctactcgtcgtcctcctcttcctgcttggcgggtgccttcttggcagtgctctcgcccttgttgtaggcagcaatggccttgttgtt

SEQ ID NO: 35849 - DNA, 439 bp, Oryza sativa
  Clone ID: uC-osrocyp025a09a1
gtattataggatcaaaacatttttattaccacaactttttaaggatggaattgagtagcaatactttcaccccaaaatacagtttagcgacaatatcttaaaaaagccgcttgctttgccgccatggctggcaagctgagcagagcagctaacacaaagaacacgagatcactataaaccaaacggcaacgaacgaagaaaatccagggtcttttttgtctgaagatacacgaagcggttcggtttcttttatttttaggctcctttcctcctcgatgatgggtgtatggcaatggcaatggcgatgggaccttggcttaattgatgggaaggggctcgccgttccactccttgaggcagccgagcatggggtcgatgagcttgccctggctgatgccgaggaacaccttgttgcactcctcgccgggggacttgagct

SEQ ID NO: 35850 - DNA, 462 bp, Oryza sativa
  Clone ID: uC-osrocyp025a10a1
aggatcaaaacatttctattaccacaactttttaaggatggaattgagtagcaatactttcaccccaaaatacagtttagcgacaatatcttagaaaagccgcttgctttgccgccatggctggcaagctgagcagagcagctaacacaaagaacacgagatcactataaaccaaacggcaacgaacgaagaaaatacagggtcttttttgtctgaagatacacgaagcggttcgttttcttttatttttagtctcctctcctcctcgatgatgggtgtatggcaatggcaatggcgatgggatcttggcttagttgatgggaaggggctcgccgttccactccttgaggcagtcgagcatggggtcgatgagcttgccctggctgatgccgaggaacaccttgttgcactcctcgccgggggacttgagcttcttgccggtgaggaatacgcagccgagct

SEQ ID NO: 35851 - DNA, 393 bp, Oryza sativa
  Clone ID: uC-osrocyp025a11a1
ggaggaaaacatcgaagtactttttcatatagagggcatacagttttttggtaccatatgcacacagctcgcatatatacatacagacacatacaaagttaacatgaaaagcacacctggaagaaacattgagcaaacaattatgcagcatagctcaggaattacagaagctgaagatgatcaagaagctagctgacgcagaaagccagaaaccgaggataaactagctctggcaggcaaacgaacagctagctgatcattaacagcgagctgaccggaggccctttctgatatcgatatatctacactttaatgcctccggtcatgcatccagcggcggcggcgtctagccgcggaaggaggaggaagagcccagcttggcggggctggccc

SEQ ID NO: 35852 - DNA, 171 bp, Oryza sativa
  Clone ID: uC-osrocyp025b02a1
cttattggctccggaaactcactttcatttctccgatcagcattattgccaactgcttacatgactgccacaaatgaaagaattacacacgatccgtatatacatcaacaaaaaaatcgccatctgttgcattttgctctacaccagcgtgttgcatgtaccagtggaggg

SEQ ID NO: 35853 - DNA, 475 bp, Oryza sativa
  Clone ID: uC-osrocyp025b03a1
aaaaacaggaactcaatgatcctatgcttcatggatctgcattataaaggacacatgctttcgaagttccagagtacttttgtgcagcacactaaatgtcactgcggttacttattaggggtaaaaggagaaaaagaagacaaaaaaccatcgctcatcaaaagatgtcacccctgcttgtaatcacgtactggctacagaacggtcatatagaaaccagaatccaaaattttaacttgtacagaactttaacattgaatagatcttatgaagccgactccttggcgatcttttcagctttagcaatgacttcctcaatgccttccaccatgtagaatgactgctcgggaaggtcatcatatttcccatccaaaacaccctggaaactgttgacgcttttctttaattccacgtacttaccatgagcacccgttaaaactttaccacatggaagggctggcttaagaaaccctgg

SEQ ID NO: 35854 - DNA, 418 bp, Oryza sativa
  Clone ID: uC-osrocyp025b04a1
agatgcgaatcagccaccgacaataaataacactcgacacgtctattacttcaaatccaagctgcccattatgatcaagcacaatttacaaagcaggcacaagtttgcaactactgccacctagcacactgcacacgaggggaaagggaaggagagaagcatggcatcgaaaccctagagagacaggcctagttgctggtgaacttggtgaccgccttggtgccctcggagacggcgtgcttggcgagctcgccggggaggacgaggcggacggaggtctggatctcgcgggaggtgatggtgggcttcttgttgtagcgggcgaggcgggcggcctcctgcgcgagcttctcgaagatgtcgttgatgaaggagttcatgctcgacatggccttggaggagattccgatgtccgggt

SEQ ID NO: 35855 - DNA, 469 bp, Oryza sativa
  Clone ID: uC-osrocyp025b05a1
cgctcagagaattcgtttacaccactgcctgccgccctgtgaggaccgtgaggcctgccatcacttggccattggttgcctcactggcttccacaacatataccgaacatgctgcggatgcatggcattaggcaagtgccataccaggtacaccaggccggtactgatttccaaccataacaactgcggattactgccagtgccactgcttcagtctaaacacaatgccaaggaggtgaccaagtactgcaagaacatcattggtgcaactgacaggaatgactgcggctgcagtacatgtgcttttgtcagctttgcttggcagttggtgacctggtggagcatgcaactttgggacaactgcccacttcaattcaacttgtcctgccctgtgcacgcaaacaaaacaatgcgaggctgccgagctgctgcctgctgttggcacatacagacatacaaatgacgaacc

SEQ ID NO: 35856 - DNA, 475 bp, Oryza sativa
  Clone ID: uC-osrocyp025b06a1
tggctgcggcggcggcggcgaggggtgtgacgaccgtcgcgctcccggacctcccctacgactacggcgcgctggagccggccatctccggggagatcatgcgcctgcaccaccagaagcaccacgccacctacgtcgccaactacaacaaggccctcgagcagctcgacgccgccgtcgccaagggcgacgcccccgccatcgtgcacctccagagcgccatcaagttcaacggcggaggccatgtcaatcattcgatcttctggaataacctcaagcctatcagcgaggggggtggtgagccaccacatgcaaaacttggctgggccattgatgaggattttggttcatttgaggcacttgtaaagaagatgagtgcagaaggtgctgctttacaaggatccggatgggtgtggctagctttggataaagaggcaaagaagcccccaatggaaacaactgctaacaggaccct

SEQ ID NO: 35857 - DNA, 458 bp, Oryza sativa
  Clone ID: uC-osrocyp025b07a1
gaattctgaacgataaacaccaggaaccggcgtttatttgaggcaagcactgcccaaaatctcgcaaaagtactgaaaccttagacatagtacacatccatggcaaacatggatgccaaatgacaactacagaaaattatcaaattcgaatgcagctgacggcttctcctgctgaagatgcatattttcccctccattacttggatgtgctctctccatcgacagccaatgggacggcgctggccaggctgcggtatttcagagcatagaacatctcaatgtaacggcgagtctcgcgcctctcaaggttgcttacgtacttccagaatccatatacaccagtcaaggtcatcagcctctcagagtacagcttccaggtgtacttctcgtaaatcctctgcagaccttcctgtgaaatattggcccagtaggttgaatcctgcttgcacttctcaaag

SEQ ID NO: 35858 - DNA, 461 bp, Oryza sativa
  Clone ID: uC-osrocyp025b08a1
caaacaagacaatattcttatttacattcagacaatgcataaacttgagaagatgctacacaatctaactggagcatctatcgatcaccaaaaaaaaaaaaagttaaaaccaccgatgacatacttacagtacataattgtaaccggcaaaatgatcatcaactaccttttcatgcttttggttagacatgatatgctttatattttctccatgttcggtaaacctttctgaacttgtgcaaacctcaatcagcttaaagttgtgattgagactacatggcgcgacattgcacaaccaacatgtacaaatttgtaacgttcatctgagttagcgaagtttaaacatcatatacgggcatgcgttcttcaatgggcacacggcagattggacatttcttgcacttatcagaacaagtcttgcataatgttctgcgccggcaaggaagtaagaccatgcatat

SEQ ID NO: 35859 - DNA, 471 bp, Oryza sativa
  Clone ID: uC-osrocyp025b09a1
agcgcgggcgctgcaactgcttcaacggcagcaactacgaggagagtgacgacgaggagggcttcttcctcccctccgaccactcctccgcctccgcccccgccgccgccggcgacgccttggagtctctcaagggtttggtgcagagcgcgagcgtcgcggagcggaatcttctcgcggacgcgtcgaggatagcggagaggtgctgcaagggatccaagggcaaggcggagtgccgccgcgcggtggccgacggcctccgcgcactcggctacgacgccgccgtctgccgctcgcgatgggagaagacctcctcgtaccccgcaggtgaacatgagtacatcgacgcggtggtcggcgaggaggtgaggctcattgtggaggtggacttccggtcggagttcgaggtggcgcggtcgaccaaggcgtaccgggcggcgctgcatgcgctgccgccgctgttcgtgggga

SEQ ID NO: 35860 - DNA, 472 bp, Oryza sativa
  Clone ID: uC-osrocyp025b10a1
gtacaatctatggttttgatttaacctttgttcatgtatatcaaagagagtatctgctttgctcttcaacagttccaatggaggggaacattcacatctgtgaggtgatatgtatgtatataacggacagaaacgagaaaaaaaatgaaatgtacatggctatatctagctggatgaatatggggaaaaaatgaacatatagaaaagaatgcaacagagagaaaaactttcttttgtcaggcttctcacttttcaactgttactagtatgacattatttggaccagatcttggcagagcagcttctcatgatcctggacgctaccaagttcaagaaggcatcattcacactaggatggcaaacaaaaagaggagcagccggacagttatgttattggcacaacagcatccagattcctttgaagcaaccagcccattgggtagttgacttgaggaggttccagttcgaaatt

SEQ ID NO: 35861 - DNA, 477 bp, Oryza sativa
  Clone ID: uC-osrocyp025b11a1
cccaaactacagcggcaaatccatctaattaaacatcaagactcgtctcaacaacaacctgccacaattcacaaacagcaggctgctgcacaagacggtgtacacggttcattttatttgggtgttcgtttccaccatcagattgatataatacacgcgaacaagcagaaacattcggcaacaatttctccaggaaaatcgcggcctatttcgtcatcatcccgagcgagcgttatttggaagagggagtctttttcagacaggcacagcctcaatggcaggagcgagtgaccaacgtcgacgtcggcgtcctagtagccaccctggatgtaggcgttgagccggttcagctcttcccggtgctcgctgaccacggcgcggacaatgtctccaatggagaccatcccaaccatgcccctgccgtcgatcaccgtgatgtgcctgatgcgcttctctgtcatcagctgcattgcttgc

SEQ ID NO: 35862 - DNA, 363 bp, Oryza sativa
  Clone ID: uC-osrocyp025b12a1
gagggaaaaaaaccaacaaaatattattttggaaaaaaaaaaaacccgggggccaaaagaaaggggggaaccccaaaacaaggggtttttaaaaaaaaaaaaaggggggcccccccgggggggggggcccatgggggagggcaaaaaaaaaggggggggccctccaaaacaaaaggaccccaaaaaaggttaggcagggaaggaaaagccggtttttcccccaaaagggggaaaaaaaatcttaggccaaaccgggaaaaaaggaaaggaaccgggggactaaattggggaaaaaaaaaaccccgggggggcccccaaaaagggaaaaccgggccggggcggggtcccccaaaaaggtaaaac

SEQ ID NO: 35863 - DNA, 455 bp, Oryza sativa
  Clone ID: uC-osrocyp025c01a1
atgaacagcatttaactaacaaattaaactagaaataacattaagtttccataggaggtttactggctggacggacatacatgtataaaccagttccaagttccagccattttgcaactaatgcaaaacctatatgagaaagacctatagaattaccgggttcacaggagacgcttccaccatggaagcagagggatgaccatggtgaactttaaaagcttaaggtgctctttctttaaacgctacaagtttattcttcagtactctcagtagtaccaattcgagccgtcattcttctgctggccctgcattgcgccggggtattcgacggcacctgacatgttgaaaccagagccgaacctgaactccgatgcaccattgatgtcgcccatctggttaccgaatggagtatcgtcgcggatgaagaactgctgctgtgccggggtggtctgctg

SEQ ID NO: 35864 - DNA, 458 bp, Oryza sativa
  Clone ID: uC-osrocyp025c02a1
aaaccaaccaaaatgaacttatataaacaaatgccatatacaaatacttatagccgcgcactccatgtacagcttgaacaaattacaaaaaaaattaactcgcatacaagtatacaacatgcatttacacacagaaaacaaatcaagcaggggaaattaatacataaccaaaagattaatcaaatcaaatgacccactaaatatacaagcactggcagcgtccttaattatgccgaaggaggaggtgccaagaacggcatcggcacggatggcatcggcggcagcgtcaccttgggcaccgccggaatcgacggcatcggcggcagcgtcaccttcggcacggccggaatgggcggtagcacggcgttcggcacggcgggcacggccggcatcggcggcaacgtcgccgtcggcacagcgggcaccgcgggcatcggcggcagcgccaccgcggggac

SEQ ID NO: 35865 - DNA, 486 bp, Oryza sativa
  Clone ID: uC-osrocyp025c03a1
tctgttcgcaacaagcatggccgcggccatgtgaagtacatccgctgctccaactgcgccaagtgctgccccaaggacaaggccatcaagaggttccaggtgaggaacatcgtcgagcaggcggccatcagggatgtccaggaggcgtgcgtccatgacggatacgtcctcccgaagctgtacgccaaggtccatcactgcgtctcctgcgccatccacgcccacatcgtccgtgtccgctcccgcgagaaccgcagggaccgcaggccgccggagaggttcaggcgcagggaggataggcctactggacctcgccctggtggtgctggtggacctggtgcccctgctgctgctggacctggtggcccccctaatgttgctcgcacctaaacagccgtagtcgctcctttgttactctatatcatatcctgttaatggcgccatggatatcatcgttatggtctttcatgaggtcaaagtctttct

SEQ ID NO: 35866 - DNA, 446 bp, Oryza sativa
  Clone ID: uC-osrocyp025c04a1
atatgcgggctttactgaaatgattcaatatctggtataagtatcctcaatgttctgaatcatgttcagttaaaacccagcaccaccagccagaagggctttcctacttctctcaagatagatcactaagaaagccgctacattgtcccccaaaagattgccatgatctaagtatctaacgatgaaaaccagagacaatacacttcccctctaagatgaacataataccttttacaagaacacaatgtctctggttatacatcttaacaactaatggtatgtagcacttctgttgccagaaggcgggaatgcctgtcgcccccgaggattctggcgattcccctcgttctctccagcaccgaattggtttgaggttctacctttatctccagaatccttgtttattgccctggccactgcattgcctttgattctctcggctttac

SEQ ID NO: 35867 - DNA, 477 bp, Oryza sativa
  Clone ID: uC-osrocyp025c05a1
tgtttcgccacccgctggccgcccacgcctcctccgtcgcgccggcgccgccgtcctcgccgtcgaagtggatggtgcacgccagcgccagcagcgccctggcaagcgcggcgcccacgctcgccatcggcaccaccgccaccgccgccgcgtcgccgccgccacctgcaggcgcggcggcgtcgccaccatccgccgccgcgagcgcgctctcgtccaccacccgcgccgtcctcctccgccgccgccgccgccatcgcagcccctgccggacgagcgacgccacgctccacatggccagctagctagccggccggcttcaactccaaccaaagaaactgagcttcagctaggcgcgcgcacacacgcacacaacgtgttcgatcttttgcttctttcacgacgagacttcggcggcggcggcgacacggcagccggcgcacattctcgccgtgcacggagacgcatgcacacaca

SEQ ID NO: 35868 - DNA, 465 bp, Oryza sativa
  Clone ID: uC-osrocyp025c06a1
gatgagttcaaactgaagatatattagtaaaaacaacagagaaataaacttgcagtagtgtgattgtacaaggtccagaccaacaacaggtttacaacaccatacaggattatttttgaggtactaaacctcataaaggagtgcaggtagctcctgcttcatattaagaaggaaaaaaaaccgaagagttgccacacaggattatgcatggctgcttattccactatcaaaagaaaagacctatatgaactcactcactcaagaatgccacaccaacaatggcacattattggttcagtaatagtaaaccgcagtttcatccttgggggatgaaatggttattccgaggctcgctccgcttgcatattcccgggcaagggaagcgaagagcagcagtagtagtgtccactttcatcaaacctgcgtgtctgacaaagatgaatctcgggaatgagattttcgccc

SEQ ID NO: 35869 - DNA, 208 bp, Oryza sativa
  Clone ID: uC-osrocyp025c07a1
gtggtaagtactgaccaaaatttttcaaaagtactgaaaccttagacataggacacatccatgggaaacaaggatgccaaaggacaactacagaaaagtatcaaattcgaatgcagctgacggcttctcctgctgaagatgcatattaatgccctccattactgggatgtgctctgtaccatcgacaggccaatgggcacgggagctg

SEQ ID NO: 35870 - DNA, 460 bp, Oryza sativa
  Clone ID: uC-osrocyp025c08a1
gctaaaattgaattgcttcccattccatgcgaggccttagaaaatctctcagatggctcaaatggcgaggcatgtaagccgcgtagccggatgtgtgatactctcattcaggacttacaaaatcgcaaggaaaatataaaatgataaacatcatacatatccatttccctgtcttcaaatcctggcaatccacaaagaacaccgtgaagcacggtaggactatgattctatagttgccagatttgtttcgttagaagtggcatcaggagtaccaccggacgggctttgtttcctttctgcctgtaatgatcgacatagagattccagcttctctttttgattcttgaacttatcaacttgcttcttcattaactcacgctcctcaatcaacttcactagagcaacatctgaattctcacatttactcttcatgaattcattatccttctttagatccttt

SEQ ID NO: 35871 - DNA, 396 bp, Oryza sativa
  Clone ID: uC-osrocyp025c09a1
cccaaaaacaaacccaacatttttttaaaaaaaacccccattgggggagggcacggattttaaaataaccaacccagggggagggaaaaggaacaccggggggaccaaaggggggagaaacccaaaaccggggggggggggcccaaaagggaaaaaacccggccctgggaaaagtttttaagcccgggggggggggcggctgcctcggggggaaccccggccaggcccaaactaggcccttaaaggggggcctaaacttgggggcaaagcccccccgggattaagggggacccccctgggggctttttagccccccaagagaaaaggtgggggaacccccaaaaatcttgggacaaaggcccaaaaaaccctttcctctcggggggggggcccccc

SEQ ID NO: 35872 - DNA, 340 bp, Oryza sativa
  Clone ID: uC-osrocyp025c10a1
actccgatctttatggcgatgtttgtgcttcttctgatccttgtacttgtccttgtctttctccttgtgccttttatgcttctttactttgtctttggacttgatctttgatttacccgatatagttggcgtacctttttcagcagaaggcaaatctattggcgctgtttctcgcagctgaaatgcttgtccaagtgtttccatgtcaaagggttgaatgtaagaggtcttctcccttaggtatgcatcctgaaagagttgatcaagctccattccttcccctttacgtatttctgtgtctaccacaacattgtgaagataatctgtctcggaaatttgc

SEQ ID NO: 35873 - DNA, 471 bp, Oryza sativa
  Clone ID: uC-osrocyp025c11a1
gtaaaatataacttcgattaggatatccgtagcatttaatttcatacaatgtcatgctggtgaataacaataacaaataacaaatgacaacatgaatagcctatatctcggctatagctcaatgcttgctgaactatgtattgcctctcgtgcctactacatttgctccacagatgtgaactactaccagccaatggtcaatcgacattgcagaaataaagttacaaacaaaaacaactgctcttttctgcaacgtccaatcttattcagcagctcggtagaaatgaattgcagtatgccacatgcttatattcgatctgtttgtatgatcctatcaatccttaaggattcagtggctcatcttcatcaaccatctcttgtgcttttgtcgatgatttgtgtaggtcagaaacaaccattagccgtctttgcaggattgccgccctgaagaggaagattgaacacatgcca

SEQ ID NO: 35874 - DNA, 400 bp, Oryza sativa
  Clone ID: uC-osrocyp025c12a1
gggggggggacacgaaacaaccaactaaattgaacacttttaaaacaaaggttaaggtacaccatgatttattatgacggggaaaacccccaaaaaaaaaaaaaaaactttcacacaaggcaaacaaaagtaaagtttaaaagcagtttatacctgactagaaaggattatgtagtacctgcaaaagggccacaagggggacaaactggaaccatatacgacgcatacacgagggatattatggatcaaaaaccacggaaaaaattaacagaaacgggcccccatgacttaaaaaaaaaaaggggattaccatgcgggggggacacttggtaaccgcaggggaaacttaagggtacagggaccaacttagttaaaattaggccaacttaaaccgaaaagg

SEQ ID NO: 35875 - DNA, 454 bp, Oryza sativa
  Clone ID: uC-osrocyp025d01a1
ataggatcaaaacatttctattaccacaactttttaaggatggaattgagtagcaatactttcaccccaaaatacagtttagcgacaatatcttagaaaagccgcttgctttgccgccatggctggcaagctgagcagagcagctaacacaaagaacacgagatcactataaaccaaacggcaacgaacgaagaaaatacagggtcttttttgtctgaagatacacgaagcggttcgttttcttttatttttagtctcctctcctcctcgatgatgggtgtatggcaatggcaatggcgatgggatcttggcttagttgatgggaaggggctcgccgttccactccttgaggcagtcgagcatggggtcgatgagcttgccctggctgatgccgaggaacaccttgttgcactcctcgccgggggacttgagcttctcgccggtgaggaatacg

SEQ ID NO: 35876 - DNA, 434 bp, Oryza sativa
  Clone ID: uC-osrocyp025d02a1
agatattaaccgtactgaacaggtcgccctaggtattcttctgcagatgtcacagctaaaagcgatgtggcacaggcatatatgtaagttcgaaatacggatctatgaatacaagaaattgccatcactcgagcaaactcaagggtcgacggatggtagaaacaccacgacgaggaagatgcggatccgacggtaaattttcctcactccgaaagcgtggacttcagctctccactgttcttcaggtcaagaacgatgtcacaggctccaatcagttctgatttgcagtacagctgagggaacgtgggccacttggagtacgttttcaagccttgcctaaccttctaggaggataggatgcccaacgctccgaagctgactcctgcttgcttcagggcattcacaaccttagaactgaagccgcaacggggggc

SEQ ID NO: 35877 - DNA, 433 bp, Oryza sativa
  Clone ID: uC-osrocyp025d03a1
aaccaaaacataggaggtttcatttcttcttctcaaagtagtgtagcatctttccttctttcaccattacataagcttaagcaataacagataacaaatcctcctcctcctttaggtaaaatattcaaacacaatacccttataagtacttattattaggaaagtagcgtgcatgggcataaatggcagcggggggcaggttaagaatcacaatgctgagcagcgaggaaacaaaacaccataatgggacagagcaaaagcctccgaaagggagcttttaggcagaaggcttctcccacttgaggggctttaccacctcccaggtgaagtctgggtcgtcccttccgaagtgaccgtaagccgccgtcttgaggtagcgtccgttgccgccttttttgaggccaaggctgatgatgatcatgccaggcctgaa

SEQ ID NO: 35878 - DNA, 469 bp, Oryza sativa
  Clone ID: uC-osrocyp025d04a1
cgttcaaatacaaataaacctttactacgtacacaaaaataagttatcttcaagagagaaaacaaaactagaggtacaatcattaagacccgcaattcggctagtagaaaattcgaaacaaaaagctttcaaactgcacgggcaaacatccttgttgcccggtgaaacccaacacaacaatccattgcatacattaggaatgccctgatgcgatgccattgtctgaaaaaactgaccgactcagacgacctacactgcacactacctggacagatttcttccagtacaccaattgacttcaccttccgcattgccccatggccaacagccctcaggtgctactgaaaccatgggacgcatgcaaacaatctgcagatcacgtctcaatcagctgataatggtacaaatctgcccacaaacttagaagcacttcatgtggacgatgcctggaccagattcatcgtattcg

SEQ ID NO: 35879 - DNA, 465 bp, Oryza sativa
  Clone ID: uC-osrocyp025d05a1
gacaagaactcacatgatctacagttgtacagctcaacgcgacatgaattcttccaaattcaccgcaccgaaatggcgcagacgattcggagaaaaggatatcagaattagaacaaaatgtacacagtttgctcgcattatacagaggaataattggcaatgcagctcgtgcaatcacaatcaccggcactggacatggaagaaagggaaaaaaaaaacttgtgcttaaagcagcacgaaggaacacacggccgcggctaatgcgccgagcactactgaccgcaacgcgacggcggacgacgccttcatttccttgtgatccgccggcttcgacggcgcgtcggccggcggcggcgccggcggagacgcgtccgcgaccgacggcgacggggcgggcgccgcgtcgtccgggctcggggccgccgccggcgcgtcgccgaagagctcgaccggcatgaggaggtt

SEQ ID NO: 35880 - DNA, 428 bp, Oryza sativa
  Clone ID: uC-osrocyp025d06a1
actcatcaaaacttgcacagtaaaaatggacggatgtactttgacatagcatatgtttcgccattacaagccgctctgcagttcaactacttcaagataagaggcactaatgacaggcatcactcaaaaataaactcaaactagcacttttgtgaaggataataagatgggatgaaaaatgcttccagaacaaccagtcccagtcccagtttttggataagtagcaacatccccttttgatattttaaatcttggtgaacgcaacgatgtcgcagctctggacaaattcgttgatcggcttttcagtcagatgttcttcgataaggctatccacagacaccaagtcatcaacaatggtcaacatgatctgcaactttttgatcccgtaacccacaggcacaagctttgatgctccccaggtgagaccc

SEQ ID NO: 35881 - DNA, 353 bp, Oryza sativa
  Clone ID: uC-osrocyp025d08a1
aaccaaaactttttaaggggggaaatgggaaaaaaaactttcaccccaaaaaaaaggttagggaaaaatttttaaaaaagccctttgttttgcccccatgggtggaaaggtgggcaaagcacttaacaaaaaaaacccgggatccctttaaaccaaacgggaaccaacgaaaaaaaacccggggcttttttgggggaaaaaacccaaaggggggcggttttttttaatttaagggtcctttcctcctaaaaaaaggggggatgggaaagggaaaggggaagggaccttggcttaactaaagggaagggggttgcccttcaaatttttgggggaacccaaaatgggggcaaaaa

SEQ ID NO: 35882 - DNA, 442 bp, Oryza sativa
  Clone ID: uC-osrocyp025d09a1
agcgaacaaacagttcattgacaacattttgcaaagtaggtaggggtgctcaatcatagcagtagcacatggtgtccaaaccatttacacgaatagcattaacacacgtacaaagacttgggcacaatcaaatagagtttatgtccctaggagatttggcgaagctaacataacaagacacctttttttttaactttcacaatagcaaaccatgtagtacagaccataaggcagactccatcttaaaactgttagacttcttggttttcagaaaattccctacagtcatttgatctccatcttgcttttgactgtggggcagaaaccattctagttgcggtttttggacttatcaactgcccttggagcaagtccaattgcatctgaacctttcatgatcctgagtctgcgacaagagttggcaaacattttccatggaaca

SEQ ID NO: 35883 - DNA, 330 bp, Oryza sativa
  unsure (1)..(330): unsure at all n locations
  Clone ID: uC-osrocyp025d10a1
agattcacgacccaaanccactatactacaaaattaacccttcttactagtaggatgatgaaatgatgacatgaaacccttactatttttccaacaaaaccaaacctaccattccgcttcgtggatgaaaccagacttgatatattacacatagattatatgacagtagcttccccacaaaccggctctggacatggaagaaaggaagaaagaccaccttgtgcttaaagcagcacgaaggaacaccataaacgtggctaatgcgccgagcactactgaccgcaacgacaacggttgaacgacgccttaattccttgggatccgccggct

SEQ ID NO: 35884 - DNA, 467 bp, Oryza sativa
  Clone ID: uC-osrocyp025d11a1
agatgatgcaatctaagagcaatccattgtatacaggtcagcctgagtttggcaggaattatatagaacatcgtcgtgatcactgatcgagcattacggtggtgaaaaagccctccagggtttataacaccgttcttgcatcaatgttaacctcaaagtataagccaatacaaaagggaactacttgcaggagtttttatgatgcacagctccatcatgacgagagcaacggcgtgctaagtttgtaatagctcttcaaaacacattgtagataagttctccgcatgatcagatctgcaaatatcgtgattctgtcctcagccttgctacctgaaccaccatctttgggctgcagaaatgggtgtattgaggaatggtgcatagcgatggatgtacgggttgacaatccggccaattttcgcccacgcgctctggtggtagctagcggttacaggagcatggtacat

SEQ ID NO: 35885 - DNA, 467 bp, Oryza sativa
  Clone ID: uC-osrocyp025d12a1
gaatctaaatctccctaaacaggaacaaaaatacaacagttgctattcctagatagcatatcatcagacatcggttttgttctacaaattcccaaggtggaaagaaaaaaagaggtatagatttcagtcacaagtacttgtatcggttcacttagcagtcctaattcaaggtagtacaggactacagggcacgacaaacaacacagctactgtccactacggactatgctaaactgttacagtcaactgaacccattcctgtaactggagtgctgcaggatgtgcttccaagtgtcatcttatcagaaattctggatggacagccaaagggaacaaacatagcagctacaacaatcaggcttttttgcgaccacaaacaagaaggaaaaaaaatctttgcttctctgcacatctgattaaaagcaatctaggcagcatacaaaaacttgcttctctgcacatctggt

SEQ ID NO: 35886 - DNA, 429 bp, Oryza sativa
  Clone ID: uC-osrocyp025e01a1
catcatgtacatgatgataacatattcatctaagattatgccaaatcaaaatctccaatggtacagcacaatacattgctaaatgagggaactactcttgtttcttgcagatctcatcttgtacccagtacacaacagacctaaccctaaacactatagcaagcacaaaaccaaaccagactgaacattctgaaacaagaactactttcctttttcaccacccaaagtgtagctgattccacattccagtaaataatatataagagattcagacagagccttagcaccaccaattgtggtctttttgtacaggcaaaggggcaaaggctcccagttcttcactatctcaaaactggaacctgctaggttgagtcttggtcatccatgccataccaaacggctcgtcggtttcgatcctcctggcgttgc

SEQ ID NO: 35887 - DNA, 465 bp, Oryza sativa
  Clone ID: uC-osrocyp025e02a1
aagcacaaccgaacaagcactgtttatttcatgaaattcttatggaagagattgtatcatgtattacaagtttacaacagcaaccacagccagataggtagaattaagcgcctgaacggaacatatggcgccttggacatttgaactcaattcacctaataggtaaaatgaaaagatagcctcaaagccgtaagttcagttcaaaactcaactcttctcaagcaatgaacctcatcccgttctaatcaatgattctacaagagaatcacacaatactaggtgccctttgcactattcggttgcgctaaccaggaggaactccccctcgcacactaggtcaccaccaacgtaagcttttccttccatcttggcaagaccaaatcttttctgatacttggtcagagtcattctcatgatcaaggtattccctgcaattactggcttacggaacctcactttatcaat

SEQ ID NO: 35888 - DNA, 456 bp, Oryza sativa
  Clone ID: uC-osrocyp025e03a1
gaacaaataaacatgatagctcatgttcctctacaccacatttgttcaccatgtccatgagttacctaacctagatattgccaatcataccaaggttcaaacttactactataatgcgagctagtatggtacacaaccgaccaaaacatgctcaataaacttgtaggggtactcattgcatccatttctgattcagcgttccaacaagaagatcccaattttactaataagcacgaagagaacacagaaagagtgctcactaggggaagacggccttgactctctcaacgtccagcaagtgctgcgttggcctcggcaccccgagcttgatctgcagcttcatctgctccgtgttcaccccaggaatggatccgctgcggaaggccgggatggagttggaggtgatggcgtccctgcaggcgcgcacggcggcggcggtgacttcctgcccgtgct

SEQ ID NO: 35889 - DNA, 463 bp, Oryza sativa
  Clone ID: uC-osrocyp025e04a1
agccaagaacacacacttctgatttttattgctaccagatgcagcattacagggccaaacagtaattagactagatcatactactattattaagagcaacattttattattattggaacaagacagcttgctcttaccaccactggttagcatagaacccagagaggggggcacacacccacactaaaagagtagttcatcatttacagtgaggacggcctcgagaagcactgaaattctcataatttacatcaacctgacgtgatgaggtttcaaaatggccaagttgggaggcattgcggcgacggcaatcatggatggcggatcatgctcggggcgcaatgttcatctcgtgatctttcttgctttgctatggatctccagcctcgatggtgtctcagcattcttgggagctgccgatatggcctctcgagatctgctattagaattattgctcttgtag

SEQ ID NO: 35890 - DNA, 464 bp, Oryza sativa
  Clone ID: uC-osrocyp025e06a1
aggaaagccatcagatttactgctcaaatccgcatttgaaacttctcttttacatatggtattacagtcttcaggatatacatgggaaaaccttgcattatgttgtctacatatagcagctgcatgtttaagaaactgtacacatctatctcaacatcctgggctgcctaaacaaattctcacaacctgggagtttcagcacacaagcatggaaaccttatagttcaagcttgtggaaaaacctcaattggtcggcatgccatgaatcatgagcagaatgcaaagtgaccaggatgctactcaatccgacatttgataggattgcgacgatgactcgctcatcatcgagttcatacaaccatagggtattgagacgctgggctgtccaattgttcagggatgtcattttccgggacctgctcaggggtggcctgaggagggacctgcgcggaggcttgcgactg

SEQ ID NO: 35891 - DNA, 414 bp, Oryza sativa
  Clone ID: uC-osrocyp025e08a1
gaaaggaaattaaactgatttattacttgttccattaaaaccatcacactcgggtacgtggtgaaaccgtgaaagttaaaaaacaaaaacagtagtagtagagtgaggccctgctcgctgttacatgagaggtgcacgaagaaccagcacacgagcagagcatccagcccacacgcagcaaggaaacggtagggatgccgccgccgccgccggccgatccgccgcccggcgatgatgcgtcgtcgtcgtcgttcaggtgcacgcggaggcggagcggcgtgcggcgcggcgcggtcgagaggtgatgagtagttgacgcggagcagatatatatggatggatggcgtcgtcgtcggtcggacgacggcgaggtcgcgcgcattacgcgcgggcgtagctgcgggcgaggtgggc

SEQ ID NO: 35892 - DNA, 457 bp, Oryza sativa
  Clone ID: uC-osrocyp025e09a1
ggcacacgtaatggaaggattagagtgttttgagcctttgaaaggtaagttctgcaaaatttctcaatacgaaaacagatagcgtttctgcagatgagcacggaataccgacagcgacgcccatgggggatatttcaatgcgaaatggcgtcgcaatcacatggtgttgcatctcctcgcacatggtgttgcagattaatacttctggggctccaatggtgtagaatatttgacagaatatctcatgaatccctgaagaagaaaacatattcgctgtaacatcaagcaagcaaggggttcatttcagtcccgcttaggcacgtgctgtactgcttcaagctattagtggatatcaagctcttcttcattcatgtgctgtactgctgttttcatctacatccgcctccacttatcgatctcctttgatgtcgctttgatcagcttcctggtgctctcc

SEQ ID NO: 35893 - DNA, 360 bp, Oryza sativa
  Clone ID: uC-osrocyp025e10a1
aatattaaaatatatttttaaaaagaaaaaaaaaaaaaaaaaaaaaaaaaaaaaaaaaaaaaaaaaaaaaaaaaaaaaaaaaaaaaaaaaaaaaaaaaaaaaaaaaaaaaaaaaaaaaaaaaaaaaaaaaaaaaaaaaaaaaaaaaaaaaaggggaagaaaaaaaaaaaggggaggtgaagaatcccaaaaaaaaaaaaaaaagggggagaagaggaaaaaaggaaggaaagaaaaaaaaatcggaaaaaggccggctcaaaaaaaaaaaaaccataaagggagagaaaaaaaaaaaaaataaaagagcaagccaaggtgttcaaaaaaaaaaaaaaaaggaataaaaaatttacaaaaa

SEQ ID NO: 35894 - DNA, 464 bp, Oryza sativa
  Clone ID: uC-osrocyp025e11a1
gatcttaggacaagagaagaatgaaatgtgcatttcaccttaagtcttgtcacattacatctctatatcagcatgctttaggcacatgcttatcgatacagaccaacagtgttaaccaccctcttttaccatatgcatccacccattagtgtcttgccttcccgtatttacaaaaggaatacaccaccatcttgcttcagaacaagagcaggcacagcaccacaaaaacgaagaggaagaaccagatctgatgcagtgacctctcaacttccatctgatgtctcctcgctctagagctcatattgtgtgccgcgacatagtggggactcatgaacatgctcggtggcacctggccacggaatgcccatggtagcaccgccactgccatccccccaagcacaccaccagccgtcgagtggatcaagccacgcccaattggtgatggcgggtaaataaaatcaaat

SEQ ID NO: 35895 - DNA, 439 bp, Oryza sativa
  Clone ID: uC-osrocyp025e12a1
accaagggaaagaaaggagaatgtataatagagaagctaattactgtacattatttagtgtacctcttcttcacataactactgtagttaatactacagtgtgtgccttagctttttatatggatcactatctgcctaaacatttctcactgcaataataatagtaaaccaccaattacaagacgaaagaacagtacaatttaggctggttcataaattttgcacaggagtttcttctgatgttggagattctgtttctgcaggcttcagaaacttcaggatatccatttttgttttctcagtacagcctgatccttgtggttatatgctgctggcacatagggcagcgcaccaaattcttcccgcattcataacaggtctgatgtccacatccaaatgcaagatcctttgatttatccatacagatagcgcacaaaag

SEQ ID NO: 35896 - DNA, 463 bp, Oryza sativa
  Clone ID: uC-osrocyp025f01a1
aaaaagcgtgtcacaagtatccaaaatttaatcttccccttacacaagaaacgaacaggccgtgttctaaacataaaaaaacatcattttatacgcactagcgcctcatggccgtccatgttggatggctctggccaggaaattataaatttcaatatgattcactttgtttattgattttggattactaagcaagcaagcaaacacttgttgacgagcatcgaccgatcgacggttgacctaagtcaaggcttcaagcttttgttgacgagcacgcacgcagcacgtggtccggcgtgacggcggcccagaactcgccgtcgagctccagcgccgccatgtgctccggcgccagcaccacctccgcgttgacgccgtctccgccgttccgcgccgggtacagtgacgccttcccgtcggacttgttcgcctttccggttcgggccggcaccgtctttcccca

SEQ ID NO: 35897 - DNA, 457 bp, Oryza sativa
  Clone ID: uC-osrocyp025f02a1
gcgccaccatcatggtcggcgccgtcagcttcttcctcggcggcgccgtcaacgccgccgccgccaacgtcgccatgctcatcgccggccgcctcctcctcggcgtcggcatcggcttcggcaaccaggccgtccccctctacctctccgagatcgccccctacaacatccgcggcgccgtcaaccagctcttccagctcaccacctgcctcggcatcctcgtcgccgacgtcatcaactacttcaccgacaagatccacccgtgggggtggaggctgtcgctggggctcgccatgggccccgccaccgcgatcttcgtcggcgcgctgttcttgccggagacgcccaacagcctcgtcgagatggggcggctggaggaggcgaggcgggtgctggagaaggtgagggggacgaggaaggtggacgccgagttcgaggatttgagggaggcgagcga

SEQ ID NO: 35898 - DNA, 452 bp, Oryza sativa
  Clone ID: uC-osrocyp025f03a1
gatcaaggaaaacaactgcagctcatagattaatgcttactagctttgtccatcaatacatacaaaaaccagtccaacagtcatggtaactgctccaaatcaaagcacgccagaagttctcttaacgcctcacacagcaggaaacacaacaacaaactggattttatttatctacacatccatcatatttacataccaagggagaatccgcaggactcattttcctttctttcaggaagcctcagcagtggagaaatgcattttagcagccgattcacgcaaaaagctgcttccacatttggcgtcttgactgctgatgccataatccaatatatcggtctcatgtttgttgagatcgtctggtgctgaattactacttgtggtttcagcatccttgagcctatcaaattcgccaggagcttggagcactgctgaactctggatagcattct

SEQ ID NO: 35899 - DNA, 462 bp, Oryza sativa
  Clone ID: uC-osrocyp025f04a1
aacacagtatgatttctattttctcaaagatataccagtcgtaatctcagaaatttcctgcttcgttgtgcaattttggtcacactgatacaacaccgattaaacacgcaacaaaatgatgttgacacgtcttcgtcactaaaaacaaaccagtcattttactcgactgtcctgtcactactggtcaaaaggcactaatcctcaaacttgatcttcttagctgaaggctgaacgctgccgataaggggtggacactcgtaatcaatcccagcagctttgattcttttgcgacgtttctcatcccgttttacgattttgtcaaccaactttttgtgctcttctattggtttatccttgttcagcctcctccgttcaattgctacccgatcaattggtataaacccccgtcgcacacctttccacaattttggatgaattttctcaggtggaacaatcgcaatt

SEQ ID NO: 35900 - DNA, 425 bp, Oryza sativa
  Clone ID: uC-osrocyp025f05a1
cccaaccaagaaccaaatcaatcataagttatactcatacatcctgggatcctatccctttaaaaggacgatgatcctgcaccggagggggggaacaattttgggaaaaacagcttgaacaaatccgctttttaattgttcacaatgggccccctttttttctttgcaaagggcaacagattacagagcagggggggattacacatttacgcaaactttacagtccccaagaaacctaagagctttttgggcaggagttacgggccgccaacacgacgggcagggtcacagtttttaaggctttgatccagcactggaaaaagctaaggaactttttcctccccgggggcaagccctcctgggcggcgtggagcggccggcgggggccctcggcggcggcggaggctttgggggcgggctgcggc

SEQ ID NO: 35901 - DNA, 400 bp, Oryza sativa
  Clone ID: uC-osrocyp025f06a1
aacccaaaaatcctggtacaatatcaactaagtttaatggctaggaagacccggtgaaacatgaaaaccggggactgccgggcgagttacaaatcatttaggaaaagaggtaaaccgatcctgattcctaaggggaacccacaaaatatcagggttggggggcccgggggcccgccccgaatggggaacagaggggtctggaaacatggccgggggccatgcaagaaacaaattggggacttttgaccacgggcattggcaaggggaagagtgcccccatgccctggaaaatccccctggaagcccaaaaatgggaccatgttccctcacttcaggacagaaaccggggaacatttccttggtttcccattttatggacatccccaggggaaaggttttt

SEQ ID NO: 35902 - DNA, 484 bp, Oryza sativa
  Clone ID: uC-osrocyp025f07a1
ggagacggtcggcttcttccaggtggtcaaccatggcgtcgccggggagctgatggaggagatgctcgcggcggtgcggcgcttccacgaggagcccctggaggcgaaggtgccctactacaccagggacgtcgccagcaaggtctggttcaactccaacttcggcctcttccgtaacgggttccgttcgccggaggccaactggcgcgacacgatgttcgttgagatgttcccggaggcgccctcgccggaagagatcccgccgccgtgcaggggcgtgctggaggtgtacgccgcggcggtgcggcggctcggggaacggctgttcgagctgctgtcggaggcgctgggcctccccgtggggtaccttggccgcgacgccgggtgcatggacgggctgagcctgagcgtggcggcgcactactacccggcgtgcccggagccggaggcgacgatgggcgcgaccaagcactccgaccccagc

SEQ ID NO: 35903 - DNA, 464 bp, Oryza sativa
  Clone ID: uC-osrocyp025f08a1
gagccaacatgatataactattattaatcaaagaccacccaagggcaagttttattttgtttatttcatccacatccacaaactcagaaacaaaatcatagtataaaagctacacctaatataataaccaagacaaggtccaagggggagagcctcatcagcttgatttaatttctttctaggccgagccattgttgtgggtaggcttgctgctgctccggagttgcttgctgatgtcgtcggcgatgtgctccgcgtcctcgtagctgccgtagattcccctcctcaccatcccggcgcagtacagcccgttctcccccttccagtgatccgggtagctccgccccgccatcccgtcgtcgccgatcagcccgtcatcactcttgagccagtgcttggtggtgctccggtagccggtggcgaagacgacggcgtccaaggcgtggcgctggccgtcggcgaac

SEQ ID NO: 35904 - DNA, 480 bp, Oryza sativa
  Clone ID: uC-osrocyp025f10a1
gccatcgccgtgaagaagttcggcaagctggcatggcccgaccccaagcagttcgcggaggaggcgagaggggtggggaagctgcggcaccggaggatggccaacctcatcggctactgctgcgacggcgacgagcggctcctcgtcgccgagttcatgcccaacgacaccctcgccaagcacctcttccactgggaaaacaaggctattgaatgggctatgcgcctcagagttgcatacaacattgctgaagcattggaatattgtagcaatgaggaaaggcctttatatcacgacctaaatgcatacagagtactctttgatgagaatggtgatcctcgtctatcatgctttggtttgatgaaaaacagcagggatgggaaaagttatagtacaaacctggcatatacaccttcagaatatctgagaaatggcagggtcacactagaaagtgttgtattcagttttggcacaatactc

SEQ ID NO: 35905 - DNA, 128 bp, Oryza sativa
  Clone ID: uC-osrocyp025f11a1
gcagaaaaaggtaaaatatggtattctcaatcatccagagttaaatgatcaaaattgtatgaagctccttatttttctctctgaaaccctgccaatgaatggcctgaggaaaaactatcaacagttaa

SEQ ID NO: 35906 - DNA, 455 bp, Oryza sativa
  Clone ID: uC-osrocyp025f12a1
gtgaaaacatcacttgtaaatatgcagtgcgatatatgtacagcagcagaatttatacattgcagccaaattttagaacagattagtcacagaaagtagaaacattgatggtacatacaatggtcatgcagacaatgctgcacagtttcaacggtagtcaggagccaaagttatgtaagacccacatgactctaggaaaaacaataaacacataaaacttcagaaagagcaatactgattgcttgcaagttgcaacccatatattacgatggtttttgagcagatcttatccttgggcaaaaccgcaaaacatgacaattgccaagtagcataggccatagaatttcgaaagttagtagcaggattctgaataaacaacagatcaggcatacatgtacacagaaaatggatagcagcatatatcaggatatattataattaagaccagatttcag

SEQ ID NO: 35907 - DNA, 480 bp, Oryza sativa
  Clone ID: uC-osrocyp025g01a1
gatgccacaaagaaggttcacataaacaacacaggtcacagcagcgaaagctacaagcaaaccctgcataatcgaaaagcaaatgtttttcaaaaccagacacacaaactgatagatagaagcccacacggacagatcataggatagcagcagtaatcaagcattgccaaggcaccaggcaagaaccctgaacctctctagtactcgtcaccctcatcaccctcgtcaccatcgtcgaactcggagccgacctcctcgtagtccttctccagcgcggcgaggtcctcgcgggcctcggagaactccccctcctccatgccctcgccgacgtaccagtggacgaaggcgcgcttggagtacatgaggtcgaacttgatgtcgatgcgggagaacacctcgacgacgctggtggagttggagatcatgcacacggccctctgcaccttggccaggtcttcccccgggacgaccctgggcggc

SEQ ID NO: 35908 - DNA, 371 bp, Oryza sativa
  Clone ID: uC-osrocyp025g02a1
cccccttgatatatatcactcagaatttcttgctagataagagagtgcaccagcaatctgctgagcttcttgttacacagtcaaaaacctgtgaagatattggcagcctattgaaggccatatacaagcaaagcccctactccggcaatgccgattatcaaactgacgatcactgtaataggtggtagcgcaccaccaatcgccctcccggtttctgcatcatatttcgcgaaccgcttctttggtgcgttgcattgtgggcagccatattcatcaggctgttcttcgaaaggcttgggaaggaagtatatgtatccacaatcaaggcaaatgtgtgttgctctagccttttgtgattccgtcaatttccg

SEQ ID NO: 35909 - DNA, 447 bp, Oryza sativa
  Clone ID: uC-osrocyp025g03a1
tcgttcgctgcgcttggcgccggtgccggagtggtactcgcccacattgccgacgacgaggttgcaggtgttgacgtcgcgggtgagcgtgaagcggcggtagtccttgtagtaggtggtgcggccgttggtgtcctcggcggggcggaagcgccatgcgaggtcgcactccatggggctccccggcacggcgacggggcggccgaagcggtagaagtggaggtcggagaacttctcgatcgccgtgcgcatgagcaggttgaagagatccttgtcccccgtgcagtccaccggcgcctccgtgtcgcaggagaccgcctcgacgatggggttctcctccgccgcggcgcccgcgtccgagctggcgtcggtgttaacggtgacggcccgtttcgcccccgacgactcctccttggtcgcgacgtcctcgagcttgatgaacgggac

SEQ ID NO: 35910 - DNA, 353 bp, Oryza sativa
  Clone ID: uC-osrocyp025g04a1
ggaagggaaattaaacggatttattacttggtccattaaaaccatcacactcgggtcccgggggaaaccgggaaagttaaaaaccaaaacccgttgttgtagaggggggccccgctcgctgttccatgagaggggcccgaaaaacccgcccccgagcagggcttccagcccacacccagaagggaaacggtggggatgccccccccgccgccggccgatcccccgcccggcgatgatgcgccgccgccgtcgctcaggggcaccccgaggcggaccggcctgcggcccggcccggcccaaaggggatgagtagttgccccgggccaaatatatatggatggacggcccccccc

SEQ ID NO: 35911 - DNA, 430 bp, Oryza sativa
  Clone ID: uC-osrocyp025g05a1
aggggggcactggctcactgctttcgctgatttcaatacggtatccacccagaatggatgggtaacacttaggggcacaacaacacaagagattaccattacatgcattgttcaaactaaccaaaattgatgggtctcataacagagtaagctttgacacctactttttactaaacctccccttcttcctagcttttcttttatctttcttgatcttcaagggaagttggaccttcttcttgctaatgctaccaattggcttcaagaaggacttggacttgttatttccttcatccgccattttaacgtccatggccgatgcccagctggaggcggcccgggagcccccggaatccttggaccgcggcggaggcgcgcggaccggcagcgcgggcgcctcgagcgcggcggcctgccccgcaagtttggc

SEQ ID NO: 35912 - DNA, 459 bp, Oryza sativa
  Clone ID: uC-osrocyp025g06a1
aaaaccatgacacacattatcagtactaatttgcaggcacggacagtcttattacagagcccacgggtacacatcgaccaataccgatgccggtttatttggtttacaattttccaccgaacatgaactagaactagtaggaagtaggagaaaaacacattttaaaatacaatggtgtcacagtacatttgatttgaatctggtgtgctccagttacggcacagtatcctggatatgaacggctacagtaaaaaaagattagcaaagcgtagtagtagtttcccagcaacagtaacttacgacactgttagtaccggggacagtagtagcgactaacgttagacagactcagattgctgtgcaaagataatgttatctacgtttactgcagaggacctgcgtcccagcaaggcatgttgaggtccaacggcgtagtccggctccggtgctcctccacag

SEQ ID NO: 35913 - DNA, 392 bp, Oryza sativa
  Clone ID: uC-osrocyp025g07a1
gaactgaaccgaggcaatttcaagggattccacattacatcatccacatgttaccacattcaaagtaaacaaaagtttaaacatcagcactaaagttttgcccatcaaatcattattctttcatcgaatccataacataaaaaaagcgttggcgcggcacgaacgcacccgccgagggagacggtgggggaaaggaagtctcacatcaccatcgcagcggcggttcgcaattacgggatgtcccatggtttgggctccggaacggcgacgaccatcccctggagctccggggggagcacgacctggcacccgagccgggcgtgcttgttgagctcccggttccgggacgcgcgggtgaggacctaacgcttctcttaagaaggaggggggag

SEQ ID NO: 35914 - DNA, 442 bp, Oryza sativa
  Clone ID: uC-osrocyp025g08a1
aaaaaaacacatgccagaactataaaaacaggtttgacacatgccagggaattatacatatgctatatatactattaggcatcaagccttgcagccttgcacatgttccaagcaggatgattccaacagataacatacagcaggaacatgcggttgttgcaacaagagccctgcatggggtttttttggtggcaaagataaaaagctaccggtaatacattccagtctgacgatagatactaggtattggctagggcaaacgaagagaacgcgcgacgccaagtacactcagcttgggctttcattttctctgcagaacaggcctattaatatgatagggccacaggacttaacttttctccagggtgcctttttccaccctggatcctggctgtgactcagtctagggccattggctgggagatgccacaccggaagcggg

SEQ ID NO: 35915 - DNA, 386 bp, Oryza sativa
  Clone ID: uC-osrocyp025g09a1
gcccctcccgacgccccccgtcgcctcccggctcgaattgaagtgctaacagcaagcagtttggtttgaaagcaaatttgggggattattatttttttggtgggaaatttgagtagggatctgtaatagcggaaaaaggaggagcttcggtggtgaattgagggggtttctccatggtggggaaggaattggtggtgagaaagaacggtcccgtggacatccgcgagattgccgccaaggcgacgctgagggaggtccggcagaatgggcacacctacgttgagctccgccgtgtcggcatgcgcgtcatcttcttctgcaccatctgcctcaccgagtgcttcatcgacaccgtgctttttgatcacctgaaggggaacctgcac

SEQ ID NO: 35916 - DNA, 438 bp, Oryza sativa
  Clone ID: uC-osrocyp025g10a1
gttagaaatataatgtgttagttagagataagagtcaaatacaaatatagagataagatatatcctagagattgactcctagagataagatagagtcctaaagatagaatcctagagataaatctactcttacttgtattatactccaagtctctatcccctatgtactcctatatataccccatgagagggtcgatataatagatcagaaaacatcacaataaaacaaattagaattttccacagtcagccaaaacactcccaagaacgcaaacgcaaaggaaacctgggtacactacagccgagaacaacggcggatcctgtcgctctcggtgacgacgtggccgcgcgtgatctccttcaccgacgtgcagccgctgagcgccatggtgatctccagctcgtctctcagcatccgcagcgcgttcctcacgccgg

SEQ ID NO: 35917 - DNA, 456 bp, Oryza sativa
  Clone ID: uC-osrocyp025g11a1
aaacagagaagagattatacatatatcacaattttcaaagaatagtaaaaaaaatgtacattatgatgatatcgcccatgggagattaatcaatcccttggaaagaaaaccaaaattttttccttctttgcagctagtaggaaatcagcagcttcaagttgtaaccatgcatgtacaatgtacaccctcctctcctccggctcgtccagtctcttctacagctcatcgttctatcacctcttgttctgaggagacggttgcgaagaaggtagcggcgtcgtgttgacatgccataccataacctctgaacagtctgaaggaattcctctcactttgctataatcttcaaggaccacttgctgtacgaacttcaccgagtcctgggacttgtcgggctcggaggtcgggtaccggccccaccgctcggggtcccagagcaccgagctgttgaacgcg

SEQ ID NO: 35918 - DNA, 464 bp, Oryza sativa
  Clone ID: uC-osrocyp025g12a1
gattcgaaggaagccagggacttcatttttctttctgtcctggcttccaagggtttttgatctttatcatcatctctatacccctctcatatttatctaccaacaacagtgttatttctccaccattattcccttgtttctaatcactaaaaattaaacacctcaagaagaagaagaaaagaaattaataggggcttaaacaataagcacttacaatgttatacagacaagagcctccaagaactagctatggaatacacacttgcatggtgtctcatggagttgtgctgctcgatcatgatgacgccgacatcgccggggccttcttcttcttcttggaggccgacaaggaggagggcttgccggcgccggagaccttggcggcgatcttggggacgtcgagcttgagcttgtagtagtcggcgaaccagtcgacgaattggcggaggccggcttctagggag

SEQ ID NO: 35919 - DNA, 405 bp, Oryza sativa
  Clone ID: uC-osrocyp025h01a1
aattaaagtgcaaaaattatcatttcgtctcatatgcatgatatggcagatacaagttgtgcgggcaatgcaacggcaagcccacttttttttttatctcgtctcctcgtgaactctacatatatagagatttatcacaagcgaggaaattaattaaccgaggaaaaattacacgcagccatgcaggtagaaaaactcgaaacccacatgtcagcgaaacaattttgacgccacataggcccttatatatatatataagcttctcgtgctttagtattcgcgctcgctcgcccatgccgcggcggcgatggcggcggcggtcggcgggctagccacggtaggtcggcgttggcgcggcggacgcctgctgctggaggagctggcggcggaaccactcgatgaagt

SEQ ID NO: 35920 - DNA, 330 bp, Oryza sativa
  Clone ID: uC-osrocyp025h03a1
aggaggggaactcatcgggtaaaataaaaacgaggggcttatccttttggtataacatgtagccgccatgctgtttacccgacccaaattacagccatttacctccggattggcctcaagaaaacaaaccttccgcaggagagacggaactgttttccagaacctccatggggctcaactctcaccgaagaaatttataatgatacatctggcaatttgcccaaacaagggtgggaccccagacttcaaagctgtaacagcttaatcccgcattccggaaagtcggtccaacaatacccatgaaaattggtgagccccaacaatttccaa

SEQ ID NO: 35921 - DNA, 366 bp, Oryza sativa
  Clone ID: uC-osrocyp025h04a1
ggcgtggatgcagaagtggtcgaacgccatcttgaagtccgggatgtagggcctcacgccggcgaggccgaacacgcggcgcgccacgagcgacgccaggaacaggatctgctcggacatggggaggacgaggggccccagggtggtgatgttggtgcggagggcctcgccggcgacggccatgaggtccttggagagcgcgacgccgacgccggcggcgtcgtcctcctcctggaacacgcagcggtaggcgcggtcggcggcgccgctgtgggtgcgcaccgtgtgcagcagctggtacttggcgcgggggcggtcgtcgcctcggttgctgaggaggatggcggcccccgcccatccggtaga

SEQ ID NO: 35922 - DNA, 461 bp, Oryza sativa
  Clone ID: uC-osrocyp025h05a1
gaaaacacatcaactttattaagcaggaacagatctagggaataaaccccattacatatccaagcaaaagagccatccttaagaaaggagagttaactgaactacgaaagcaaccttcctgaaataacctaacatcagaacagaaaaaggagcaagtcgacagggatctgcggcgaagccgcgacgactgctaccctgggcctcaaaagatgtgcagtccgcttgacaaaccgttaatccccatcggctgcctccacggaaacggcacaagaccgaggtttgatgctgagccgtagattttggtgtgtgcgtcaccggactcagcaaaggatccccacggggctcatcaggtggtccgagctcaacccgaatgacaaacccaacatgggttcttctgttagggaacaacaggatagatgaatccgaagaacagccaacctttaaggaagaagcacttgaat

SEQ ID NO: 35923 - DNA, 463 bp, Oryza sativa
  Clone ID: uC-osrocyp025h06a1
gcacaagaagccaaacgtgagagcttgtacaaaacttcagctctcttcaatgttgactacgctaattaaaattgtaactccataaaaactcggctacgccgagaaaactgtaattacaacagatacggcgtagccaattcacgcaatgcgcacccatacggctacagtatggttcatttaacgtctgatagacgatttcttaaggtgctgccgcaggtggcgacaaatactgaaaacagcgaggtaatccaataaagaaataacattggaaatcctctccagcggcaacccaagtctctaaatgatcataatcactcgagttaccctgcaacgcaaatttgtacccgggttgcgaacgggcagttccatttgtagaattgtagttggtgttacgggcaaaataacaacgagcgtcattttcccaaggcacttcaaattcaacagtaggatttactctcgaatt

SEQ ID NO: 35924 - DNA, 83 bp, Oryza sativa
  Clone ID: uC-osrocyp025h07a1
aaaatgaaatttagaaaaatttcaaaaaatgaaaaaaaaaaaggggaaaagacaaaaaaaattgaaggcaaaaacgcaaaagc

SEQ ID NO: 35925 - DNA, 460 bp, Oryza sativa
  Clone ID: uC-osrocyp025h08a1
ggatcgacagacgagttaaccaactcgttctcgctacaacaatccaatacaattgaatacagaggttccagctgtttaaatacgacatggcgaaaacaacagttgaatgcatgtccagtcccagcagctgtttgtccggaatgctaagatgtaacacggcaaaacgaacaacaaatgaattcttcaaaaatgggcgctacactgctactacaacatgggcatcgtcaatcgtcattgtcatcttctaacatgggcatgtttcttccaggatttgggttgataggccctctgtttcatgtttctctgtgagatgtagttggcctcctcctggaaggggtttggtccaccgtagtcttcctttgaatttctgattttcttggcctttccacggtcatactccttgttccattcatttaacacatatccaatgctcttgctttctgaatgttttgactctttt

SEQ ID NO: 35926 - DNA, 474 bp, Oryza sativa
  Clone ID: uC-osrocyp025h09a1
gataacactaaaaaagtgtcgtatataaaaggcattaccaacaggagatttctagcacaacaacttacacacccagattgttagctaattaatcatacagaaattccagaagaaagtcactgtacgaagcagttcagaaccttgatgaactgtacacaaacaaacaagcgccaagttatttacatggagatcattgtgggccgaccgaactgatcattttggttcaaccctggacgaagatgggatgccaccactgtaatcaaattgagactctccactgtatggatgacgcggtgtcctgctgttgtagctcatcgagtttgatgccgagtcgacctttgggtttacgcctgccatcttcatgatcttctcaatctccgccaccacctcactcattgatgggcggtccattcctgccttcttcacgcacttcaaagccaagtcgacatacagttcgaaagccgccagcgacgt

SEQ ID NO: 35927 - DNA, 454 bp, Oryza sativa
  Clone ID: uC-osrocyp025h10a1
aggatgaactcttcgtatttttatattccattcttaaaaaacaattctgtaacactccagtaaaaagcataactttggggtaacattttacagtgtaaaggaaaaacagcatgcattacgtataccacatatttatccacgtcgggacaactcactgagcaagctatctaagcttggcagaaaatcagaagctcctatgtactgcaaatgtgcgcaattacttgactggaacaaactaactttaatttgcgcgtcaaaccacttggtagttataagtaaccaatcgattcctctgagaaaactttggtgggctaccttccctcagcggacggatggcggtcaccttcaaatcactaaatgtatttgatgcagaaaacccaacagatatcgggaagaatgttgatggatcagctgcagggacagtgaactccaaagaaccactgcggtttgattg

SEQ ID NO: 35928 - DNA, 452 bp, Oryza sativa
  Clone ID: uC-osrocyp025h11a1
gtaatagaaaaacggatggtatatagatctaacaacattattcagttgaagttccacattaaatttcacaaccctcttcagccaaaattatgataggaacgatcttcggagtacactggtaaaagcaaaaacagacagaaaattatggttcatataagataggaaaattgctaagacgaaaggaggcgcagccgacatgagtaaattgttcatcttgatgcgaagctaataggcgaaggagggttcgctgggcctgaagctcctgtaaatggaggctgcaactgggataagacccaacagcgcgatctggacctgctccgaggtgcttgtcctgacagtgatctggccacttagtttgttattcaatccaagacgaaccaccatcttcgagccccttccaatcgagaactgggactgcaaattcgcaccgagagcaaggtctcggcgccact

SEQ ID NO: 35929 - DNA, 109 bp, Oryza sativa
  Clone ID: uC-osrocyp025h12a1
ggacttaaaagacagggccgctttttgaattaaccacgacgctcgggtaaagtcaaaccggtggcaaaacactggtacgaagtcacaattaatataagctgtccctgcc

SEQ ID NO: 35930 - DNA, 352 bp, Oryza sativa
  Clone ID: uC-osrocyp026a01a1
gggagagactgatctttatatgaatatatgagagccaattttgataactctcttaaagatgctctaagcacttaaaaaaaagggaggcttaaatagagtaaggttgaaggacacattttcattgttcttttggcggctatacctatatttgagttttggatccacgagaacgtgaccaccctgttgctggtgcccccctcccccctggcgacacacgcaattattggggatccttcaaatcccgttttttgccctgggctttttacccctggccaacatttatgtgttgggagaccacacttttacctgggggagatcaaccggtgggggaggggggcctttggcttttttt

SEQ ID NO: 35931 - DNA, 174 bp, Oryza sativa
  Clone ID: uC-osrocyp026a02a1
aaggtcaatgctaagttttttagatgagaaatatttccacaaaaaagagggaaactaaatacagaagctcataactgcgagccattcctttacacagaggtacaatcaaactggaatatttgttagcaaatttttctttttactgaagttacccacctagtctgtaagtgcaaa

SEQ ID NO: 35932 - DNA, 453 bp, Oryza sativa
  unsure (1)..(453): unsure at all n locations
  Clone ID: uC-osrocyp026a03a1
aaaattatcaaccttggaagccacagaccagtcctgtaataggcaccgggtacaagtagaatggcacctccctaaaactcgagggtcccaacattcatcactgggtgcattgtacaaacggcacacaggttaacagttccacgacctcaaaactcaattgtcaagaagctcatggccctagaatcacgctaatggcacttcctgattctaattgcttaacaaaaaccacacacctncacgctaggcattgcaggcgatctttcaactgctagcctcagccaaaaaaacaagccgctgactatgaataaaaaagaaacccactaactatgaataacatcctgcttatcaaccggctcgtctttcagaaagatgtgaagtagttggaagcaacaattgctccacctgcatttttacctgagattgagctttgttaagagcctgaacctgagcttg

SEQ ID NO: 35933 - DNA, 63 bp, Oryza sativa
  Clone ID: uC-osrocyp026a04a1
caggggttggcataattccaagagtaaattatattgcaatcccattattttaagaaaactcaa

SEQ ID NO: 35934 - DNA, 382 bp, Oryza sativa
  Clone ID: uC-osrocyp026a05a1
cttactgcggcccatataggcccatcaagattagaggctctagcggcatgttggcacaatagcctttgggaaaaagtacacccaaggtccctcaacttgtcatcgaattacaaaatcatcctccaaccgtaaaaccggatacacatccctcaacttataaaaccggtgcaaattagatccctaagcagttttgaccccggttttatccaatgtggcagttgactcagcatgggacatgtcaaccccttattcccctccccttttttcctctgtcctcttcttctcacttcctctgtatccttcccctccccacgcagggcaaccgcccggtgtctgtgtcggcggggcccgatgagtcgaagccaaaggggaagacaagagg

SEQ ID NO: 35935 - DNA, 250 bp, Oryza sativa
  Clone ID: uC-osrocyp026a06a1
caggcaacataatttgataaaaaaagacgttataagtatgaataagaagctggcatatacttcggctagtagcattgcaacgcaaacagtatgacaaggtaccacgcattgtttaagagctaagacaaagacaaaactgatgcatccaacgtaccaaaaagaaagcgaacagcagcagtcagatagctatgagaagagaactaggagagggataactagaagggacagaatggcatccatgggtccatga

SEQ ID NO: 35936 - DNA, 143 bp, Oryza sativa
  Clone ID: uC-osrocyp026a07a1
aaaacacataaacaggggggggatactattctggcatacgggccttcccttagggggcttaaacaagcttcttaggcccaggggggaaaaggattactttcaaaaaactttcaagggcggtcaaatcacaaattaaacccttt

SEQ ID NO: 35937 - DNA, 320 bp, Oryza sativa
  Clone ID: uC-osrocyp026a08a1
cgttctcgccggcgcaggaggcgctcctcatggtgcaccggcggatcctggagacggaaccagacgacggcgatgaggatggcgagtatgggcccagggccaaggatgccagggaccgaggcaaggtgaccacgcgcctcatcgtgccgcgcctccatgttgggtgcctccttggtaagggtggcaagatcattgagcagatgagggccgagaccaaaacgcacatcaggatcctgccacgcgaccagcacacgccgtggtgtgtatcggtgtcggaggaggttgtacaggttgttggagaggggaattgtgttaaaaag

SEQ ID NO: 35938 - DNA, 477 bp, Oryza sativa
  Clone ID: uC-osrocyp026a09a1
ggatcataactttttttcttgtattcagcagtgtagcaatgctagtcaataaagctaatttcacctttgaacgggaatggggaagcaatgaagtacagaattacaggagaaggtggcagctgaggagagaatcaggagctgtcacaactcacaaagctatatacaagttcagaagctgaacgagaagagagcatgcttccttcctaccggaagcattatgactttttggggctggtttacaaatttgggggattattggaagaacattgcggagcagctgaagctttttttgggattgggaaccctggtgcaaaggggaaatgagggtgcgatccccattcacattgtccacgcgacatgttgttggccagaacttggcgcccccaaaccccctgcaaggaacgcaacgtactccctggagtacgggttagtccatgagtcggttattaaaatttggggcgggtgaggagcactttt

SEQ ID NO: 35939 - DNA, 373 bp, Oryza sativa
  Clone ID: uC-osrocyp026a10a1
agccatcacctttttctttactcagatttagcaattgtttgagcagtgacagacataaacattatcatccattgacaccattgacagcatcatagagtagtgacacataaactaaacatcatagctaaaacatgccgacgaagacgcgacggaacacggtcacatatgtatatgtgcgcgaatcaacggatctatcacacgggacatcatgacacagtagtaataattcaaaacagcaagcagcagcaagcacaccggagcgagcggcggcgggcggtattagtagcagattcgggtgatgatggattcgattgcggttactttttgagggtgccggggacgccgggcttgggcttggaggaggaggcggagg

SEQ ID NO: 35940 - DNA, 524 bp, Oryza sativa
  Clone ID: uC-osrocyp026a11a1
gcgcccgagtcggcgccgctggagtccgcgtcggaagcggcggcgccggcgccggagacggccgcgctcttgtcgctgccgttgtccaggtccagcgggagcttcatcttggcgagggactccgtgaactgctgcatgctcttcatgtacatgtccatgatctccttctggtcgaccttgacctcctgctcgaggttgacgcggatgaccggcggcttatccaccgcgctctcggacatggcgccgggggagttcgccgccgggctggcgctgctctgcacggtgcgggaggactccacctccgcgtcggcggcgtcggaggcggccttctccttttgctccgccgacgagacggcattgccggaggagttggactgcggggtggccgggaccgcggcggcggcgggggactccgtggtggacacgctgctgaccggggtgttgtttcggaaggtgccggccgagtcggcggtgctgttgtccgtcgagaagctctgcacgacgcgcacgccggcgacgtgggt

SEQ ID NO: 35941 - DNA, 141 bp, Oryza sativa
  Clone ID: uC-osrocyp026a12a1
agaatagcggccctccagcgtgttgacctagggagcccaccaccttcaagccgaaccggttggaacgcgccgcttggcggtccacgaaaaaggtcggggcgggtcgtcgcagcttcaacgttgccctgaggaggagggggc

SEQ ID NO: 35942 - DNA, 392 bp, Oryza sativa
  Clone ID: uC-osrocyp026b01a1
gatcaaacattgattactcaagatcgatcacatcaagagtacacttctacaagttcactagacggccacaattctgatcatagacacgaattgcataatcgaatcaatttgcagtccttttatttccatcacatagttcatagccagctctgatgccatccaagcggcagccaagaactgaacatgatgatcaatggatggcaacttcaacttcagtctgcgtgtctttcattctcagtgctttagcatgtccctgaaccagtaggccgacgccttggggtggcgctcgagcgtgttgaagtcgacgtagacgatgccaaacttggacgtgtaacctgacagccactcgaagttgtccaggagagaccaggcgaagtagccagccacattgg

SEQ ID NO: 35943 - DNA, 422 bp, Oryza sativa
  Clone ID: uC-osrocyp026b02a1
ccccccacatagtgcatatacaattgagtgatctcacgcttgtgcatgcttatatatactgtactctatgtacatcaatttgccaattaggagactaatacgtacgtatagcagaacaaatcaagcaattattaccatctaattgattatctaaacaaaatttagatcaattttatgaacttgcttcacttgttcggcgccgccgcgccgccgtcgcgccccatgtaggacgtgatcgccgccgccaaaaccgactggaagctcgggtccgacgtgatcgccttcgcgatcgtgtccgtcacggtcgccggcgcgacgcccgcgccgtcgatggctttttgcaggtacggcgacgtcttttggccgccgaacagttgttccggcgccggtcttggccgcggcgccgccatgcccattaatgc

SEQ ID NO: 35944 - DNA, 448 bp, Oryza sativa
  Clone ID: uC-osrocyp026b03a1
ggggaaaaaaaacccccaaatttttttttcccaaaagggtcatcccgggggggggggttttaagattccgtaaaaaaaaagggggatcttttcaggaaacggggggtttttttttgagaaaaaaagggggggagaggcaaaaagtatttggggggaaaaaaaatttgtcccccgggggggttatagaaaaaaaaagggaacgtgtggcgctaaaaaaacaacggagatttaaaattggaaaccctgggtaactggggggggttaatttctttatacagggggaattttggggaggggaattttttgggggagggtttttaaaaaaaagacgccttctccctaaaaaaaaaaaagggcccccttctaaaaacctggggggggccccctccaaaaaaaattgggggaaagagggggttattttataagtccccccacagggggggagggg

SEQ ID NO: 35945 - DNA, 326 bp, Oryza sativa
  Clone ID: uC-osrocyp026b04a1
atcatcacttctattaattttttttatattatcatcacttctatttacacaagttggtaaagtatacagcatcacaacgccattgagcgtcatacccaatgttacatcactagtagaagacaacacaaattacaaaatattatacatagtattaaagcagcaacaccgcaacagcatcaccaattgtttttttgtccatgaacggtgatcaaggtagccaggagctcactatcactgcatctactacagagagtttgatgatcggaaagcacacgctttcctttatttaacacagaagctcgataacattttgacaggatcgtatt

SEQ ID NO: 35946 - DNA, 419 bp, Oryza sativa
  Clone ID: uC-osrocyp026b05a1
ggcacaaactactaccactaatacttaggtatacaaggggaaacgatctggttcatacagcaaaatcatcatgggcacgttcatacatgggacatcagggaaacaacagaaatgccacataccttagcacaaagtcagaacaggatagggtttcggagcacttgaggaacgcggggaatgtcatgttatccaaagctaaaattgcttgggggagaagagaaccctaagggtcactgctgctgctgctgctgttgcacatttgaagggttgccccccatgtcagtctcaattgctttggattccaaccccagatgccaaggttttttaattttggttttaaagttttgagaattttttagcgaggcctctaaaacagttgaatttaccgctgtgggaaggaggcttgcccaaatcatttt

SEQ ID NO: 35947 - DNA, 208 bp, Oryza sativa
  Clone ID: uC-osrocyp026b06a1
aggggaataataatagcatttttatgatatagagtagcaaatttacaatggcatggatcgtgaggcccccggtccaaactcagtactgtcatattagtgtattacaatgccacggagcacatctattactttcactactaataccgaatatttagtattgtcatatgcaagaaaaaatattatcaggggcctagacttttttttaaat

SEQ ID NO: 35948 - DNA, 393 bp, Oryza sativa
  Clone ID: uC-osrocyp026b07a1
ccgagctcattatcttttatagtatgtttttattcccacgcaaaaccaacaggtagatgctagatagatacataacatagccggtgttgacagcatcatgtcaaacaaaaccattctccgacagcaaccaaaccacacaccaagcttctcgctgctcacttctccctcactgcttggaagcagctttatttcgatcatacacactcgcaaagatcaaatattatcaaacatattttgggggcataggcatgatgacgatttagttgtaagcgtccgggttggcgatgaggtaggcctcggcggtcttgaagatgccggtgagggactccttagccttggtgatctcgtccttcacctccactccggggaggagcttgtacgtggacttcacct

SEQ ID NO: 35949 - DNA, 326 bp, Oryza sativa
  Clone ID: uC-osrocyp026b08a1
acatgacacaagcacaagcacacagtgtattattattgattaagatatggtgattcttctccgatacaagcattacttagtctagtagttgacatatattaaagattaattctttgagcaagcatgcatattcccatacaagctagtatcagcatacttaggtagattgctggcatttgtaacagggaggagcagagccagagtacaatacttaagtcttcttcatccagctgttatacatgatgatataatccatcatcatccatgtgtgttttacttgaggatgtacttgagcacaccgggtatatggatcctgtagaagtagt

SEQ ID NO: 35950 - DNA, 483 bp, Oryza sativa
  Clone ID: uC-osrocyp026b10a1
gaaaggaaattaaactgatttattacttgttccattaaaaccatcacactcgggtacgtggtgaaaccgtgaaagttaaaaaacaaaaacagtagtagtagagtgaggccctgctcgctgttacatgagaggtgcacgaagaaccagcacacgagcagagcatccagcccacacgcagcaaggaaacggtagggatgccgccgccgccgccggccgatccgccgcccggcgatgatgcgtcgtcgtcgtcgttcaggtgcacgcggaggcggagcggcgtgcggcgcggcgcggtcgagaggtgatgagtagttgacgcggagcagatatatatggatggatggcgtcgtcgtcggtcggacgacggcgaggtcgggcgcattacgcgcgggcgtagctgcgggcgaggtgggcggtgcggaggtcggcggctttggggccgccggcgaaattggagggccggtagtgggattttacggggtt

SEQ ID NO: 35951 - DNA, 432 bp, Oryza sativa
  Clone ID: uC-osrocyp026b11a1
agctagctagcttcagatcatctaccattcgttttcctagataatttacatatatggcagtaacaaattttcactaggtgcaagcaacagttgcttgcaccccagactgcagtctggacaaacgttttcaaccacaaaataaaggccaatcggtccacatatatattgggaggctttctcggtacagttgaacaatgttgccatgcgtagccttgtagattgcatcttctttatgattcaggcgacgcaattgagtcctacacagcccattcacaagcttttcacatgcttcctcccttttgccttcttgcggaggagttcagaggggactttgtacaagtcctcgtcaactggcctaacaaccctaggccttctcgatccatggacaactaccccaccatcaacaacaacagatggcccattccttcttct

SEQ ID NO: 35952 - DNA, 372 bp, Oryza sativa
  Clone ID: uC-osrocyp026b12a1
gcacaagaagccaaacgtgagagcttgtacaaaacttcagctctcttcaatgttgactacgctaattaaaattgtaactccataaaaactcggctacgccgagaaaactgtaattacaacagatacggcgtagccaattcacgcaatgcgcacccctacggctacagtatggttcatttaacgtctgattgacgatttcttaaggggctgccgcaggtggcgacaaatactgaaaacagcgaggtaatccaataaagaaataacattggaaatcctttccagcggcaacccaagtcttttaatgatcatatatcactcgaggttccctggaacgcaaatttgtacccgggttgggaacgggcagttccattt

SEQ ID NO: 35953 - DNA, 126 bp, Oryza sativa
  Clone ID: uC-osrocyp026c01a1
aatggtaatcaaacgtatgcataaataaaggtaattatacatcaaggtgaaaaaaaatgtattcatatgtgtcatcgcgagacctgaaaaacaaaaaaaaaaagggcggtccttttgcgattttat

SEQ ID NO: 35954 - DNA, 396 bp, Oryza sativa
  Clone ID: uC-osrocyp026c02a1
aattaactagcatatttaaatttaaaacgtaactgtttgagcaaataccacgaaatgttcaggcgctaagatacggcaataccgatacatccagcatagcaaaaatggcgaagagcacagagtcagataaagctatagagaactagggctccaggagatgggggccgaatgacaaccatggcgcttagtcgacctcctccatcttgctctcgccggcgtcgtcctccagcggcggcatgtcggcgtcagcctcagcagactcgtcctcgtcgatgctcaggccgagcttgagcatccggtggatcctggtgccgaaggtgttggggtcctcaaggctgaagccggaggtcaggagggcagtcttgaagagcagtattaccaggtgctttacagact

SEQ ID NO: 35955 - DNA, 144 bp, Oryza sativa
  Clone ID: uC-osrocyp026c03a1
ttttattttgggggtttattaaattttattttttttttattttttttttattatatatatttaaatatatatacatttatattacaattaacctcatcaaaaaaaaaaaaaaaaaaaaaaaaaaaaaaaacaccccaaccaccc

SEQ ID NO: 35956 - DNA, 385 bp, Oryza sativa
  Clone ID: uC-osrocyp026c04a1
aaggcaaagctgcgagcgccagatcatcttattactacagcttcttggcgatatgctacagtagcttcttcctcccttgcaaaaagaaacccaaaccttatctacaacgcaacacacacaccggacacagagcgctcgatcgatcgaagcagacgagacgacgatggcgaactactactaggtaagcgacaacacctaggctatacagggatacagcgcgcggcggggactggcggcgagacggcggcgatgatcaggcgctggccttggtggccttcttggagatggcggagcggatggatttgggcgggtgcattggttttgcgggggcgggccttcttgcccttttggcccgggctgggcgggcggggggaaccgacttttt

SEQ ID NO: 35957 - DNA, 387 bp, Oryza sativa
  Clone ID: uC-osrocyp026c05a1
accatataacggacgattgctgattactattactggttgcaatgtaacacttcggatacaatagtacattacagagctagctaaatgcgaagccacaataccgtcagcgcaagacgatcataaataaagcttacacaacatagccaacatgcaaaccattcggactgaccagagatgagggttcttgaagctgccgtggtgtgccatgcatcacaaatgccgaacaactagattgtagcagccaacatgaaaggaaaaggcatggataatgcagcaaagatggatgatgaagaccgcagattgtgacgctttgttcaccaaccatatgaaacccctaaattttgtcaagttttttcgcctttaccaccggatttagccttggcaata

SEQ ID NO: 35958 - DNA, 405 bp, Oryza sativa
  Clone ID: uC-osrocyp026c06a1
aagatcaaagtgtctgtaggattcatttaatgagcctaagacaagtaccactacttgtcacaccatcagcatcagttcacagcgttaaacattgtaactagcaaaaaggataaaggtagaaactggcaaaacatttcaagcttttccttgcgaaggcgtcacatgatcacttcgtatcaggtatgagtattgttgtaggacagcaatctgatgacagtgaaaaaaaaaaaaagagccattctgaaggggaacatgcccagctacctccctaacaaaagtgtagagaaaagagtgcctatttcctctgctgataaataaactaccatcatgtatataggggcctggagatcttgttagacattgttagacaggaggaatacaggatggtaggggaaaagaattatt

SEQ ID NO: 35959 - DNA, 72 bp, Oryza sativa
  Clone ID: uC-osrocyp026c07a1
cacaaacgcatggaggctaaaccgagaccgcaacagaaaccacacaaaagaaaggccaaaaaagaaaggaaa

SEQ ID NO: 35960 - DNA, 368 bp, Oryza sativa
  Clone ID: uC-osrocyp026c08a1
agatagatagataatagatagattccagttgtgaagacaagaaaatttgatcttgcccaagttgtcattacattccagttctgttttgtactatccgaattcagaaacagagcaccatccataataccatactgcttatttaaaacctgctagctgcatgccattcactcgttcagatttcagagtgatggttgtcacgccgtcgggtaggaggccatcatggcgaggccacagacgcccttcttgtcggcgacgcccctctccatcctgacgtagccgtccttcccccacgacgtgccccacgagttcttcataagccagtacttggtcccgtcgcttgccacgccgtaccccaccgccgtgatcgc

SEQ ID NO: 35961 - DNA, 392 bp, Oryza sativa
  Clone ID: uC-osrocyp026c09a1
gggatgtgataaccgcatatcaaaatatcgatccatgagagtatgtatgtcagttcgaaccacttcactcgcggcagcgaggaagtcgaaaagcttattcacgactcatctagcaaaacttgacgataagcctatctcaagttcttcatacaagcattgacattgcaaagttacaccgagaggtctgaaacaaaagtgcagactgctgatggagacaagccgaattagcttacgcttcatcaagggcaagaacacctgggagggtcttgccttccagcaactccaagctagcaccaccgccggtggagatgtggcttatcttgtcggccagcccagccttttcgaccgcagcaacggagttaccaccaccgatgaaggtcgtggcgcccttt

SEQ ID NO: 35962 - DNA, 431 bp, Oryza sativa
  Clone ID: uC-osrocyp026c10a1
aataagaatatgcagcattttcaaacttgcaactcaaataaaacatcaacaggaatgagatgcaaatgagcaaattgagcacatatttaggttcaaatccaacttattcataaagcatactgctgtcccacaggaaactgtttcataaaactaacatatcatacggactcgatggtccattaaaccagacacaagtagacatcagcaccacaaatacttgacgaacagaggctcgggatgaccaggcacatcggcagctccaccaaactggctgattactgaccaccacggaggcggagcaccaggtggagggtggactccttctggatgttgtagtcggcgagggtgcgtccatcctccagctgcttgccagcgaagatcagacccttgttggctgggggaatcccctccttgtcctggatcttggcctt

SEQ ID NO: 35963 - DNA, 469 bp, Oryza sativa
  Clone ID: uC-osrocyp026c11a1
aagcacaatacatcacagtagtcttttatttatatataatcatatataaaccacgtacatatgtagcgaatgtagcacaacacataaatgtatacagcactgagagaaacataacggggcactagtgaggtaaacttttgggcctaggccacatacacatgcacactatatatgtataggtatatagagtgattgaaagaaatgtcacccttaggacttaggtcttgtgcgattcatccccaagagagagattggaggggaggtgtagaattaatctcctacaaatctccttcaacctcttgtgtgagggattatacaaacaagactttagcggtgaatttatcatgagcactgatccaacatatatccaattggatatattcatatgtagatgacatatattatatgtggacataaactccgatagagtccacaagtgcgcccgagcgaccaaagaaaccaaccacac

SEQ ID NO: 35964 - DNA, 487 bp, Oryza sativa
  Clone ID: uC-osrocyp026c12a1
ggggtcagttcagtgtataacatgatacatatgaatttgccagaaatgaagaaacgtatgcacgtgcacgtggcgcgctgatcaaaatatatcagccagcagccgtctgttgcacttgcacgtatatgtgcatatactacaagaggcagtacaagcatgaacacacacacattcatatggatgtgtacgcagctagctagctagcagctgttacatatatatatttatatagtactgatcagagattgagatgcaactgcaagttgcgctatagaacgagttactaacatgtatatattaattcctccatcgatccctatatgcaagctagtaattacagtaattagcagctgtagcaaggatgtaacaattgagatgagctgagtactcccacatgattaggaggcatcgatcgatcgagttgatgtagtcggcatcgtcttggcggctgatggaagtatatactatccccagagaggtagcgaat

SEQ ID NO: 35965 - DNA, 398 bp, Oryza sativa
  Clone ID: uC-osrocyp026d01a1
ggcagaaaatttttcatccattatttctccatcttgcattccgcaagaagaccgctagttagggggaaaagagtaaaaaaagaccaaaaacgatcacaacacgtcgtcgtactccaacacgtacgtacggtactccactagaacgtaaaacctctctagaagagggaaaccggaccatatatttggtagcactttacaactagggctgttcagatcagccatgtttttttgttttttgttcttccaatcattcatcgaaaatttcctttaaccagagcgccgtttgcaattcccgctccagcgctgatgacgatctctcgttgaatgccgagggggttcctcacactgtgtagttctgctggatcgggtcgatgtccagccccttcagcttcaccacc

SEQ ID NO: 35966 - DNA, 336 bp, Oryza sativa
  Clone ID: uC-osrocyp026d02a1
gaccgaaaaaaaccaccagtttgatactattcgaaatcactgcaatgagtgagtgacacaatggagcaacaccaagagtgcactgcaaagccggttttgatccttacaccacacaaggcgagagggagacacacccgttgataatgttgttacaacatcgacatgtccatcgatatctgaggtgctacatggcgtacctctgagtccaggtccttgctgagttcttcgacttgggcctatctgtcttgtacatgtgggcgatctcagggaccagaggatccttagggttcggatcagctcagcagggaaccagatttgacagcaacacctttggaa

SEQ ID NO: 35967 - DNA, 463 bp, Oryza sativa
  Clone ID: uC-osrocyp026d03a1
gcacaagaagccaaacgtgagagcttgtacaaaacttcagctctcttcaatgttgactacgctaattaaaattgtaactccataaaaactcggctacgccgagaaaactgtaattacaacagatacggcgtagccaattcacgcaatgcgcacccatacggctacagaatggttcatttaacgtctgatagacgatttcttaaggggctgccgcaggtggcgacaaatactgaaaacagggaggtaatccaataaagaaataacattggaaaacctttccagcgggaacccaaggctctaaatgatcataatcactcgagttaccctgcaacgcaaatttgaacccgggttgcgaacgggcagttccatttgtagaattgtagttgggtggtacgggcaaaataacaaccgaggggtattttttttccaagggactttaaaattacagtaggaatttactttg

SEQ ID NO: 35968 - DNA, 407 bp, Oryza sativa
  Clone ID: uC-osrocyp026d04a1
gaggctacaaaccaagatttggcatacatatgactggaacttttgtcttggcaaaacttagtttaaaaaaaaataaaatgacaccagtacatagcttttgtccataataaaactgaagtaaccgactgttgcattgcccttactgaagacagagacctagcttgaactggccaaactggagttttaagagggtactggcaaacatgcccaaggttttaaaaagatgtgaaatatcatcataagcttaagcctcagggatcaacaccggagggcgcagctcctcctcctccttgggagcatggatggttacaagatccggcagaggggtggtcgggccaaccttggccttggggccccagtcgagcatgatcttcaccttgatgccaaaaacacccctgtttaagagc

SEQ ID NO: 35969 - DNA, 368 bp, Oryza sativa
  Clone ID: uC-osrocyp026d05a1
cctgaatagggtgtcactggctcactgctttcgctgatttcaatacggtatccacccagaatggatggttaacacttaggtgcccaacaacacaagagattaccattacatgcattgttcaaactaaccaaaattgatggttctcataacagagtaagctttgacacctactttttactaaacctcccctttttcctagcttttcttttatctttcttgatcttcaagggaagttgtaccttcttcttgctaatgctaccaattggcttcaaaaaggacttggacttgttatttccttcatccgccattttaacgtccatggcccatgcccagttggaggcggtccggaagcccccggaatccttgga

SEQ ID NO: 35970 - DNA, 77 bp, Oryza sativa
  Clone ID: uC-osrocyp026d06a1
atccttcaaatcactcatatactaatcataaatatcggaaccatgtttgacgtcaaaaaacttcaccctattttaac

SEQ ID NO: 35971 - DNA, 248 bp, Oryza sativa
  Clone ID: uC-osrocyp026d07a1
aaacgaacatacccaaactgatattatcacaatgttagccgatgacaatggaaagagtaatctaggtaccggcggatcattgccgggggagacaagaaattggttgcaccacaacacccaccagtggcgccaacaaggagcgctatccgtttttggacgagagaaaaagtaaaacatcacgatgggaagagaaactgaataattttagtggacgaagatgatgatggataggtttcttaggacgcccg

SEQ ID NO: 35972 - DNA, 416 bp, Oryza sativa
  Clone ID: uC-osrocyp026d08a1
attaccatccacataaattttaatagccaactgcactgggggtaaataaacaacctgggccaataagaatacatgatttgcacatggtccatggagaatccgaaaagaaagtcaaaaaaccattcgaggccccgaggcctcatccttcccaaatatacatgttgcaaccgcattaaacacaaatattcaaacacttttggaatgggcatcaagaactccgaaggggggagcttatgcttagacgcagttacgctcgaccattgtccttgtggaaacgagttgttcaaccaactacagggggtaaatacacaaccaggagtatgaattaacaaatttttttgagggctagtatgggtcctgatcccgctgggcacttcaaaccctttttccgatgatgcacaagaacttccaaagag

SEQ ID NO: 35973 - DNA, 434 bp, Oryza sativa
  Clone ID: uC-osrocyp026d09a1
gaacgaaccaaagtacttgtactatttaatttagcaaccgaaaacaaaggtaccagtccatgccatgttaatttgtcttgacctgacaaactgatggtacaaatgtaatgtaccaatcaccaatctcaccacgccagatcaaaagggcacagttcgagggggaaacctggtgtctttctagtagtctactgggttacatgatttgtggtccatattttacaaacacgggcggtacaaataacaatcgtaacaatacatatactacaaaaataataaactacatatactccaaactctgcccaaaaaaacacgcttgtatccgggaggacaagcaaaaacactaaagcgtcagagttgttgaacttagagagaatgaaattaagctgtaacaagtaatcttagttttctgtcatgctttatcattgaacttacac

SEQ ID NO: 35974 - DNA, 304 bp, Oryza sativa
  Clone ID: uC-osrocyp026d10a1
ggggacataaaccctttgaagattagttacggatttgggttaacttgttaagaaacaaaggggcttaatatttaactgaagttttaaagttcaagggaataaattaaaaagggccacgttttaaactaaacccaaaaaaaaggggtgcaaaagctaacacaaaatgtgggaaaaatttttttcctggtcaaaccattttttggtgccttgaagaaaactttgttctaccccctgttggatgccacgtttttgctgaataggcaacggttgtaaacaatttgaaaagggctttgcccccatgaaa

SEQ ID NO: 35975 - DNA, 529 bp, Oryza sativa
  unsure (1)..(529): unsure at all n locations
  Clone ID: uC-osrocyp026d11a1
attaataggggcgatcctaatgcagcttcccttcactgtctaccaataatacaaaatggaagtacataaggagaaaaaaatccagtgcatgtaacttttaacgtcttgtataaaggttgagaagcagcaacaaaatctccaaacaaaagaattgagagacatacagccgggctcgtggaacccgtatctaaggacagaagatctacagaccccgacaccgcggaggagaggagcatcaacacaggtgagttaaaattgtcaacaccacaaattacaaaaagtagtcgggagtcttgcgtgttgtgtctggttcaatttgccgaggagctggatcaaattggaggaagttctgatccatgttttcgccaatctcaagaattgcagccatgttaccacagcgataacagtagnnnggtgcactgaagaccgtcacaacattcttgtcctgacaccaattaaatccttccatacaagttgatgtgccccttggaagagagatggaccatttgtatgggtaaactgttgagcg

SEQ ID NO: 35976 - DNA, 236 bp, Oryza sativa
  Clone ID: uC-osrocyp026d12a1
aattaatatttaattaatatataaactattaaattatatttaaaaaaatatacaaaaaaataaaactaaaaaaaaaaaaaataaacaaaaaaaaaaaaaaaaaataaaaaaaaaaacaaaaaatataaaaaacaaaaacaaaaataaaaaacatacaataaacataaaaaaaaaataattaaataaaaattaaaaaaaaaaaataaaaaaaaaacaaaaaaaaaataaaaaatcaa

SEQ ID NO: 35977 - DNA, 336 bp, Oryza sativa
  Clone ID: uC-osrocyp026e01a1
attcacaacaaaacaccattcatttggcccttgattggcgtccggccggccccagttacaacaatgggggattttaattcccaaaaaaaaaaattggccctttggaaattaagtaaacaaaccgggggtaaaaccctgtccacatggcaaatttaaagaaaatctggggaaaatttttgggttttggaaaacacaaaccaaaaatggccccaaaacccctgttcgaaacaattaggacaacaggtgggccaaatttgcccccccaaagcctgtaaaaagggggggaaaccaccaggggccctccaaaaaagcccgttggggccccccctcgggggg

SEQ ID NO: 35978 - DNA, 330 bp, Oryza sativa
  Clone ID: uC-osrocyp026e02a1
aaccacagttaatatctatttcgcagtcaatcgcaacaacaaatcaaaagaaatcataatatctaatattttgcaatcactttgagtgccatggcacgtgtaccaatccagcaatcattaacgaatggctggatctgtgctgttgagggatcaaaaccgttaccgccagcagccaattccatggtaattgagatgggaatgtttgccttggccaatgcccaatcatcgctaccaccagcagcagcataaagcacgtttgtggagctgccaacggtgtatttggggcccgttgcggcacggatagcgcttgcgccagcctgggcaaccttt

SEQ ID NO: 35979 - DNA, 396 bp, Oryza sativa
  Clone ID: uC-osrocyp026e03a1
ggaattgattggcaaatgggattttgctaattaggccacccccaattactctcttattattgctccgaataaatagtttttttcctgtacaaatctgaagcagaaaataaggattaatctaggctccccaatgcccccatctgatctcactcactaatcttgtttactatagcaccagctgcgccgccttctgctgcttctgatgttgctgctgctgcggctgctgcgatgactgaagcctccccttcagaaaacccctgcacaccttcttccacagatccttgtctggttgccgcaagtcgaagctcgccttcgccttatccacctggggatcctgtaatcaacacaaattaggatgagatcgttccggaggagacggtcggcgatgctcatgag

SEQ ID NO: 35980 - DNA, 162 bp, Oryza sativa
  Clone ID: uC-osrocyp026e04a1
actacgcaaaaaagttgtcattccattcgacgtttagttattccgccatgaacaccacaagcgttttacaacagcaagcaacggacggagccaactcaatgacagacaaaccgcacaagacacgtcgttcacacggacgccggccatgacaacacctaaacc

SEQ ID NO: 35981 - DNA, 127 bp, Oryza sativa
  Clone ID: uC-osrocyp026e05a1
gggggggccttaaaaggccccttaaaaaagggaaacaggcccattacagcttgcacaaaacatgaattcccccaacttgtcaacaaaacacacaggccaaaagagctccaaaaagcgatagcccggg

SEQ ID NO: 35982 - DNA, 305 bp, Oryza sativa
  Clone ID: uC-osrocyp026e06a1
ttgttcgccaccaccgcggcgccaccacccgcccttccagcaagatcgtccacgccgccggctgcgtctcccgctggtccacgctcccgcccttcccagacgacgacggcgacgacgacgggtccgctccgcctcgagcccttcccctgcgaccccatcgagcgcaggaccggcgccaagcccctcgccctcgtctcctcctccgccgccgaagcctcctccccctgctccgcggcggccgccgcatccaccgtcaccgagaggttcttgccggaccttctcgccgcggctgggagggcgaaggc

SEQ ID NO: 35983 - DNA, 392 bp, Oryza sativa
  Clone ID: uC-osrocyp026e07a1
gctaaataactttttgcttcaagaacataaattctcgtacttcaacgtacagaaactaacataatgctaaggaggacaacatatgatcatattctacagcttgcaaaagaggttacattgctgactatccaagaaaagaaattctcacagtgcaaatatataaaacattactagccttctcgtacatgcataaatacagaaagggcaaagtgaaagagctgagcggttaaatcatacacaattagttgatattaaggcgcaggagcgctgtaaattctgggcaagaacaagagcttatttcacttaaattggacaagaggtcttcaatcgtatgctggaaacattataatagtatttgaccaacataacatactttccaaactgatagttga

SEQ ID NO: 35984 - DNA, 226 bp, Oryza sativa
  Clone ID: uC-osrocyp026e08a1
gagggtcaaatacaacttattcataaagcatactgctgtcccacaggaaaactgtttcataaaactaacatattatacggactcgatggcccattaaaccagacacaagttgacatcagttccacaaatacttgacgaacagaggcttgggatgaccaggcacatcggctgcttcaccaaactggctgattactgacccccacggaggcggagcaccaggtggagg

SEQ ID NO: 35985 - DNA, 532 bp, Oryza sativa
  Clone ID: uC-osrocyp026e09a1
actctcagaacgtgacacacccatatatacacgacgaaccgatcaaaacaacaacacacaagacggtaggttcaccgacggcgagaaatggttggcacacggccatgaacggctgagatcgcacacacatagagacagacaatgtactctcagaaacgcacccattacacgatgaaaaccaatcaaacacgaaaaaaaaaaagcacaaaagaccgacaaacaacgcctgcgacgacggaggcatgtgggggccagagaggggcaccgcgtcactgacgctgggccccaccgcccttgatgacaaactcttttatttagccccacgttacgcgtacccacacacacctacggagtcgagtactaccacttcagcttacttaacttattatttgttacacgcacacgtacgtacaactccggcgagtcgccggcggtggcggctcgcgcgggccatgcatgtactccacggtgtacgaagaccgggagccagcctttcccgggatgcacttacttgttggcctttttgggcttc

SEQ ID NO: 35986 - DNA, 397 bp, Oryza sativa
  Clone ID: uC-osrocyp026e10a1
aatataaaaaaacgtactgcattgacgttgttaatcatttcccatcgcaggacaagacatgataaacttataaagaaatttacaactgcacttaacactgatgatgtggcgaaaggtaaatcttaacagtacaacccctctacaaaggaagtagagtagaaaggaacagggaagactgcaaatccatctccatgtagtcgtatttttaagatggaactacaaccagccttattaacaccaaaggaaaaacagagactaaaatttagctgactgaagtcacaagacctatacccctataggcaacatcacaagtcgcaacggaagctttcagctggtcagctcatggttcaaccgaagagctcaaatggattccctcaggaccaggttgatgcccaac

SEQ ID NO: 35987 - DNA, 544 bp, Oryza sativa
  Clone ID: uC-osrocyp026e11a1
caggaggaagcgtgcaaggggctttttaccaggaacaataaaccaaagctgacattattacaaataatcaaacaaataatcaaagcatatttgtccttcagtttacagaagaaaacctgtagttgcagaatactcctgggtcgcagtacagcaattgcaggaatttgggatgacgggatgttagactttttacaaactatatatatcccagaatttttgttgagcttttttcacatgaaaaccaagcaacctacctacaaagaaatccgtggttaagatttacatttctgtactcaccagtttgaaggaacaatttgcaagggcacattggggatccctggactgatctaatggattggatggtactgtgtgatcccccgtttaggtggtaggttccttaatatgaacagcaccaaaactgaaggtacaattttaaccaacaagtagtagaagaagtttaggattggatggttcagaacatcaagatcggctttttttataaacgcatttaagcacatcattacgcatttgatcaagaagccag

SEQ ID NO: 35988 - DNA, 265 bp, Oryza sativa
  Clone ID: uC-osrocyp026e12a1
aaaaaaatcttttccctataattgggctaaggggaaaaatattttttgggggggcataaagttccccaaattcaaaaaaatttttggaaaaggacgagggggaaaacaggggcaaaaaggaaacggggggcaaacatttgaaaaggggggggggaatttgcccgggaccgggaatggggggcggggggacatcaattcatccaaggggccaacctttttcctaaggggggccagggggcgttaccgaacgggggattgggggggg

SEQ ID NO: 35989 - DNA, 431 bp, Oryza sativa
  Clone ID: uC-osrocyp026f01a1
ttttccgctctcgctgcagatgatgggatgcgcgacgcccttgcggtcacagacgcggccgacggcggccaccactctgtcctggtgttcgaggccttctcggcttcggcgcccggccgcattgacccggccacgggctacctgctcgacgagctcaccgacgactgccacgccgactaccgcaacctcatggccgccgcggtgcgcggcgacttcgacacctgcgctctgtacgccgaccagctgaagcggcgctgcgccgatcagttcaaggacggcgttcttggcctggagcacctcgccgcggtggacagcctctgcgagatcgtcgcccgcggcatgggcgccgacgagccgtcgggcacgtaccacatcaacctgtccgggttcaccttcctgcccgacatgtgggcaatcgggcagatggttcc

SEQ ID NO: 35990 - DNA, 383 bp, Oryza sativa
  Clone ID: uC-osrocyp026f02a1
agagctcccaacgcagtttttcaattcaaaaagactgcccaaacagaccaagggtatcatcatagcagcaaagttttttaacacgcaacatcaaagagacactaatgcaataagataacttgaagcgcggatcactagcaaatttcgcgcttagtcgacctcctcgatcttggggccagcaccgctgccgcctgccgggggagcatcgtccttgtccatgccgccggccatgtccgcgccagcgccctggtacattttggcgatgatggggttgcaaatgccctccagcttctttattttggcatcgaacttattaaccttggcgagctggttgcccgccagcccctggatgggctgattgatgggatttttgattttttttt

SEQ ID NO: 35991 - DNA, 492 bp, Oryza sativa
  Clone ID: uC-osrocyp026f03a1
gaacttcatcaccaaagtttataaaaaaagactgaactataattcatgtatggccctaatatcactataccagcaaaatggccagtggtttcactgtcatgtcaatggtttacatgtgaattacaaatgtgaatttcagtttactgtaacagttcccatatggattaagctcaaaacaagtaaaaacctgtcgaaatctttgtcaccctttccaataggttcatcaagttaagcaacctctgaacctccttggctccttgccattgtctgaaatgcacctaccatctcttcccaaatatctttttcagattctctacacatctataaactcatttcctcatcaagtgaaacctctaagagaaggtctggctgagcatttgagcatacttttagtttattagtatatggtgatcacttgaagcatgaatctgaaatgtcgtatccccagcatttcatattgcacttgcaaggcgcccagaatccatcgttcct

SEQ ID NO: 35992 - DNA, 200 bp, Oryza sativa
  Clone ID: uC-osrocyp026f04a1
agctccaaaatccatatagatccttggagcctggaggaatatccagctcctcttcctgtatcttacacgtggagtgtcatttacacatttgatcacatcaagtacaaactcttgatgcaagagttttcaagacatttgacaaaacgctatttccttttatgaaggggttatcaaaatgcttattgcgagaaatagcacat

SEQ ID NO: 35993 - DNA, 181 bp, Oryza sativa
  Clone ID: uC-osrocyp026f05a1
gcacaagaagccaaacgtgagagcttgtacaaaacttcagctctcttcaatgttgactacgctaattaaaattgtaactccataaaaactcggctacgccgagaaaactgtaattacaacagaaacggcgtagccaaatcacgccatggcgcacccatacgggttccggatgggtcattta

SEQ ID NO: 35994 - DNA, 403 bp, Oryza sativa
  Clone ID: uC-osrocyp026f06a1
catcagtgctttcactgaagtgaccatgaaaagtatgtgttgtttcttgtctagatccggaatacatcgtacaagacacatgtgtacatgaccgatgactccgacgagctccattcgatgcagctcgatcgcccggtaaaacgaaacaatatgccgggtggtaacggagtcaggatcagttgatacaatgttcagtatgatacgtacataacacgaactgtgtcccacgagccatttggcaggcaccacacacaaccaacacccaaatacccccaatcctacctgaaatcgtgtcaaaagaaaagaaaattccaacctgacacgagtgatcgggtgctgcagctaccagggcgtggacgtggtccggaagcgcgcctcgctcctttggaccgccgccatgatc

SEQ ID NO: 35995 - DNA, 417 bp, Oryza sativa
  Clone ID: uC-osrocyp026f07a1
aaagaaactgaacatgtggatgatcgagaattacagcagccacagtatcccagaagtccataacatcaggatataacgaccaatgttatctctcggacaccatcctgttcgtgctgataatgtttggacctcagttgataccgcgtcaaggtttactaacaaatgtgtaaactaccaaactatataccagcaatgtctaccaaaatctgacgtggaaatgatgcgaggaatatcaattgctccagaaaatgcataaccttgctagctctgattcagacatcatgcagagtaccttgatggttcctgctttaatctagcttattaggaaataagaacttcgctgagcttttaccacctataatgaacagcggaggggtatttttggtggatgacagctgcttttacattccacaactt

SEQ ID NO: 35996 - DNA, 327 bp, Oryza sativa
  Clone ID: uC-osrocyp026f08a1
gacgcaaaaaaggggataatatattcagttccaaatgactaaaactgatcccaaattatggttactacatagtcaaaagaaagaaggctgcggaagacggatcgatgatggccatgactgtacttgaaacaggacatataccaccataccggcctgaaaacacacgcagaaccttaaacgagtaccttattttcaaataagttaggccacctaaactgactttaagctctccaattacattcataaacagccggccgagaagtactttcatttgcaagaagatccaacttttggcataacaatgtccttaagcaacggtttttaaaa

SEQ ID NO: 35997 - DNA, 319 bp, Oryza sativa
  Clone ID: uC-osrocyp026f09a1
aacttcaaaacgtactgggtttttgtatacacactgacagatggtttcccccagagaatcgaggtttgtcgctatgatagttggaccttccctacctccactatttgactctgggcttttagcaacaccgagagcaaagacgaggccacgaaaagcaccgtttgcttttgtgggatatcccccatcctcggtgttttttactggcgcactagttgtactacaaaactgccggcagcgatcgcctgccgtcaaaaagtgggggcttgaaacaacgtttaaactattttttccttgacacgcctacaagaaccggggacat

SEQ ID NO: 35998 - DNA, 338 bp, Oryza sativa
  Clone ID: uC-osrocyp026f10a1
gggaagcatcaagagaaaaccaaaatacgtctgttccaacaaatatatatacagataccccatccaaaccggaagctcttgggctacttttcttaaaacaccagacacacatacagcgcatggaagcttcgtgtgatatcatgcactaccaaagacaaagcaacaggaagcgtgtttggaattacacagatgatccaggacctttaccctggcgcacatggtaaacaaattgtacttcatggtaggtcaatgcacagggtcacttctgattctgaagttccagttttattaacccaacttgaccgccttgaatgtgtgccagctcgtcctttcatgag

SEQ ID NO: 35999 - DNA, 435 bp, Oryza sativa
  Clone ID: uC-osrocyp026f11a1
gacaaagacagttgtgatgatgtagcactaactgatgatgatgatacatttgacatgcagttactctgtcccgaccgaggaatcgagtagtaactttactttttatgaagcaaaaccattctaactaagcagagaatgcatggaaaccaaacaccacgcgcagatggcatcctcttaattattattactagcacaaaacataaacataaaacgatcactaattactccataagttaattaggcgtcggcggcgaagccttggtcgtcgtcggcagcgttgaggaggtcggaggagcggcggttgggagcggtgcagttgttgcggatcttgccggcgttgccggtgaggacgtccatttggctcatcttgaccatggagcgtgcgaactggtcaagaaggcggcctggttgagggcgaaacggacggcggtgcgg

SEQ ID NO: 36000 - DNA, 101 bp, Oryza sativa
  Clone ID: uC-osrocyp026f12a1
aaaggatggaattgagtatcattactttcaccctaaaatacagtttagcgacaatattttagaaaagtcgcttgcttttgcgccatggcttggcaaagctt

SEQ ID NO: 36001 - DNA, 392 bp, Oryza sativa
  Clone ID: uC-osrocyp026g01a1
gcacaaaccgatgagcttagcagtagcaggcagccttcttaagttcttattaccatttgaagaaataaaatacctagtgaaaaactaccaaaccagcaagtttgctaccaacaatgacaaaaatagtaaaatactgaatccatggtgatgaaaaatgagtgaaaaatagtcctaacaattaaaacggaggcaaagatgggggaaatcggacatgcatccactgcttctcgtaggccgatacatggacccatcctatctcctcaatcaattggatcttcaaatcataaagtcttttctttggttgctcagagtcatcttgaatcatgtcattcagaaccttcaatgcagtgccaagtctttcacagggccttttacgcaggacagttaaagag

SEQ ID NO: 36002 - DNA, 104 bp, Oryza sativa
  Clone ID: uC-osrocyp026g02a1
tttttttttgggggttattttttttatgctttatccattcttttttaattattttttattattttttttatataataatttttattctcttctttctatttttc

SEQ ID NO: 36003 - DNA, 478 bp, Oryza sativa
  unsure (1)..(478): unsure at all n locations
  Clone ID: uC-osrocyp026g03a1
acatgtacatagtataaagctttataaagctagcagctagctggctcatcaaatgccaaattaatcaattcgtaaatgatcaatccacccctaatctacaccccattgattgtagtataatcaatcatcatgctactagacacaatcaggataccccgtacttagtagtagtaattgtatttacatcagatcaagacatgaagaaacctagctagctaggattaattaacaaggagtcctagctaatccctggaggtctggatggatgataaataatctgatcatccgaacccatcccgagaagaagccttcgatcggaaggaggaagagaaggatgnattaacaaattggcactaattaacccaagcatgaaacaccaagttaattaattaacccaagtaattaatcaaccagcctgaagcaaaatcctgtagcgcaaggtcggtagggagcttgctccggatcatttaggcgtgga

SEQ ID NO: 36004 - DNA, 172 bp, Oryza sativa
  Clone ID: uC-osrocyp026g04a1
aacagcaaaggaagaaatgcatatttagatgcacaactctacgagtctcacggtgcaagcatagccatctgaccacaaaaaatgttgagccactgcacacggtgcagtggcaagtggagcatttacaacataccgagtttctttttaggagggaaaaactctacgagtctta

SEQ ID NO: 36005 - DNA, 89 bp, Oryza sativa
  Clone ID: uC-osrocyp026g05a1
aacttaacacatatacgattggttcatgccaaaatttatactccggcatcatgccacagaaaatgtactctcttttttctagttcggag

SEQ ID NO: 36006 - DNA, 107 bp, Oryza sativa
  Clone ID: uC-osrocyp026g06a1
ggaaaaagggacccaaattaactggtcttcattggaatggaaagagggggaccggattatggcgaaccttaaaccaaggttggacccaaattttaatggggcttgaa

SEQ ID NO: 36007 - DNA, 409 bp, Oryza sativa
  Clone ID: uC-osrocyp026g07a1
gggatgaaaaaggaagggctcctttactatgattaatatttcaattaaaacataagcacttagctattatgtttccctgtttacatggggattaaacacaacactgatcacggccacacctaatctaaactttacaacgttttcatctacatttttgtacgctttttgggcataaaaaacaagcgaaagcgaactgataggcagacacgcgcagactgaatacaccaacgctttgaagaggggaagaaaatggtagtaaaaatacctgaagcaaaccaaggcgtgtaaaggcccccgaaacaaaagaaatctcggtcagaaattaagcaacgccttttggtccgaaacatcaagcaacgtgaatcagcaagtgcttgggacccaaaacttgcctgcttggtggcttgct

SEQ ID NO: 36008 - DNA, 245 bp, Oryza sativa
  Clone ID: uC-osrocyp026g08a1
ggttcaccaacaaaaacttcttctctgttggattgatgaagccagataccaaaagttggacaaaattgctctgaaacgacttggatctatcgtatacacttctgtcctaactgacagtacagttacagtaaattttgaaccccattttcatgtttggacaaaactttctataagtttccaccattgaaccctttttttgggaaaaaaacaaattttatctaaaacatttaaaggcatttccatga

SEQ ID NO: 36009 - DNA, 316 bp, Oryza sativa
  Clone ID: uC-osrocyp026g09a1
ccaagagtgaaagtaatattggtacatcaattgtccaggggtaggcgcataggccaccatgagatgatcaaaagtccatatatgacaagtgtaacagctgcctcaaggcaaacaaaaatcgagggaaatgagggggagaagatacaaaaacacgaccatgtatacactcctcaatcagtaaacatgcagctaaaatgtgagatagagaatccctagaattttaagagactaaaagaaaatgggggagctctaccttagcaccacttatctcaaactgtgtgggcgagcagactaggcctgaagcatttgcaccaac

SEQ ID NO: 36010 - DNA, 107 bp, Oryza sativa
  Clone ID: uC-osrocyp026g10a1
cctcaagaagaaatcaaatagtattcatatttttccaactaaattcccagcgaaccaacgatggggcccagtgtcagcgcccgccggccacgcctttgacttgtgcc

SEQ ID NO: 36011 - DNA, 777 bp, Oryza sativa
  Clone ID: uC-osrocyp026g11a1
ttttttttttttttttttttttattttttttttttccccaaggggaaaaagaaaaattttaaaccggggggtaattaaaaaaaaaatctaattaccaaattaaaaaaatttatatttaattaaaaaaaaaaggtcccaaaaaaaattattttaatttaaatcaccccccccttttttggggttaaaaaattttaaaaaaaccccacggggggtaaaaaaaaaaaatttttttgggcggggaaaaaaaaaaaattttttttgctttttttttccagttttaaaaaaaaaaaattagcttttttttttaaagggggagatttttcatttgaatcaaaaaaaacaaatatttaaaaaaaaaggtttaaatattatttttttttaaaaaaagtttcttttttttttaaaaaaaccattaccttttttatttaatggacttgcctgggaataaaaaaaaaaatttttttaaaaaaaaaaaaaactttttgtgggcggtccccataaaaaattttttttttttataaaaatttaaattgggagggaaaaaattttttttttttgggcccaaaaaaatgacccccgggttttttttaaatttttaaccaaaaaaggggaaaaaaaaaaaaaattttttttttttaaaattaaaggggtgttgtttctccctttaaaaacaaatgatatttcaaggggttaaaaaaattttgaaaaaattcaataaagggtaaaaaaattgtttttttttttgctaaaaaaattaaaaccccgttcttttttttt

SEQ ID NO: 36012 - DNA, 403 bp, Oryza sativa
  Clone ID: uC-osrocyp026g12a1
aagcaacttatatcatatttttcattttttgcgagtctataagtgaactaatcttaatgagtctatgaccgaactaatcttaagagtagccatgttttcttttcttctttttgttctcctctgatcagctcagctgctaggggaggtttgactagctatcggaagtaaactgagacaagaggaatatcgatgtcgtttccatcatcatcctcgcaggccgccacaagatccaaatgcttcctgtattcaggaacatccaccttggcgacttctctggccacgtctaccaccttcttgttcaatctctccttgtgtcttgcgaacatgttgttgtacagcagcgaagtgccacaggaaatgctgtaagcggtaaggccccttgtcgctgaaccattgcaggagc

SEQ ID NO: 36013 - DNA, 335 bp, Oryza sativa
  Clone ID: uC-osrocyp026h01a1
gcacaaaaggacaagcaagtaatgtcatcataactgatacaactcaaattccacgaaacagaaccactgttttacatcctgaatttttacatgcctacacaatttacagatgaagcaaaatcagatctagagagacaagttctttttggcattaacaggcagacggctaagcatgaacgggactggattagtaatatcaagcactcacgcatgatggctcaatgatgctgaactgcaaccatcacagggaatctaatatgacggagaatacagtaacatggttgaaaatgggcacttgacgggcatcatcagactaagcaagatgtgcatttgat

SEQ ID NO: 36014 - DNA, 378 bp, Oryza sativa
  Clone ID: uC-osrocyp026h02a1
ggtcaaatgaagagacctcttatttaacttatacgaaggccattcaactagttacgagaagatgtctagctacaacaatacatcacatttttctctgcatgctagctgctacattggattgttggctacagctcgatacaacttccttaccctactatatatatacatatacaaggccgaggaatccaagacaacacctgaatagctccttcagggttggaacggaacgaccgatatattatcacttcactggccaatgagctctactaacaaagcctccactccagcaccgtgcatgtggaatggttacattttatccaccaaacacacaagttgacagcaattagcagctcctgatgatcaagaatctgatctact

SEQ ID NO: 36015 - DNA, 402 bp, Oryza sativa
  Clone ID: uC-osrocyp026h04a1
aactaaatagtaaaccttatcattagagagctgaacagttcctggagaataaacagtcccccaatgaatgcaaactgcaaaatagttgcatttgccattgatcaatctgtatagcttgaaagccttatttcaaacttattcatcaattaggttagcaagactgacggaagtgttctttacatctcgccaggatgtagccagtctatacatgcccccgcagtgcttgatcagacaaaaaagcaacatcacaggcactgcttacagattgaccacttgtcaagcacattaacattcatatatggtttaatttatttcactcggtgatgatttcactggaggcgaggataaaattgcggatgaactgaaacaatgtcttgtgaactatggggctgttttatgact

SEQ ID NO: 36016 - DNA, 248 bp, Oryza sativa
  Clone ID: uC-osrocyp026h05a1
tggtgcggtgagccctgcgtgcaaaggagagcaatacagatgactctgaaagcttccttctcatcaaattccttaagacatggatcgactacgcgcagagcttgccccatttcatacaaaccccaagcccactccaagagatatatcttgctttcctcaagggagttgtttgtattcgaacgaccagcaacagtctccaacataagtactccaaatgcaaaaacatcggccttttttgacaaatgacc

SEQ ID NO: 36017 - DNA, 284 bp, Oryza sativa
  Clone ID: uC-osrocyp026h06a1
cggggataccatatccaaggttattattattaacttatcagtgtcagtactacatcttccactacagtctacaggtcctcctgcaaagttaaacgaagcacttccagctttttgtacaaaaggaaagattagattatgcatgggccatccctaacaaaaactggagatcactccatggcaaaaccttaaatcttcaaagagagcatcaggccatactggggctgatccatgaaaaggcttgccgactgttgggcactttgatcttttaagttacacctagccct

SEQ ID NO: 36018 - DNA, 424 bp, Oryza sativa
  unsure (1)..(424): unsure at all n locations
  Clone ID: uC-osrocyp026h07a1
gtggggctaaagaaatgatccagtagtgattttcatgagataaaaacactgaagctagaacaactacttttgatgaactgaactaacttttgtatgctgctcttttggtgtttcatcaaacactgagatttaacttgtggaggcacttcctgaaaattcaaatcagaatgcaactgctttcatcatttttgtaatcattgactttcctgttgctgtagtaactgttggccttattaaaaattagagctcaagatcatacactttgaaaggtttgaagattgtggtagcaaagctcttattggttncaggttttatttttctttgtcatcctagggtttgataattggtcagatccatataattgaccacataatggcgtatggaatcccggggtccaaataattccaaatgcccatgtgctttt

SEQ ID NO: 36019 - DNA, 419 bp, Oryza sativa
  Clone ID: uC-osrocyp026h08a1
gatcaagtaacaaaacttttgtatttacacatctctcgatttggcctgtacataaccgcgagcaaagaagctaaagctaatacatcctacagatttcacgtcgcgctgaacggacggctctgatcacgccggcgagcactcgacggaggcggcggtaacgtcgggcgccgccggccggtcgccctgccacgcccagacaatgtcggcgagccccggccgcacgtcgacggcgcagaacttgttgaactcgagctcgtcgccggcgtcgtgcgcgaactcgaccaccgcgacgtcggcggccacctcgaacgcctcgacggtgaccgcgagccgcccgtttgctccgtccgccgtcgcctccaaccttagcttccaccctttccctctcgtggcgctgtaacccagcgatcgccccacgg

SEQ ID NO: 36020 - DNA, 533 bp, Oryza sativa
  Clone ID: uC-osrocyp026h09a1
tgttgtggccgccgccggtgaggcgaagatggcgtggcaggcgtacgtcgacgaccacctgatgtgcgagattgacggcaaccacctcaccgccgccgccatcgtcggacacgacggcagcgtctgggcgcagtcccccaacttcccgcagtacaagcctgaggagattactggcatcatgaaggactttgatgaacccggcagtctcgcaccaactggtcttttccttgggggcacaaaatacatggcgatccaaggtgaaccaggggttgtcatccgaggaaagaagggcactggaggcatatgtgtcaagaagactggcctgtcgttgattcttggaatctatgatgagccgatgaccccaggccagtgcaacatgattgtggagaggcttggcgattatttgatcgagcagggttggttagtcctccctcccccctttggggcatttgggactaagtttactccctatttggatcagttttgggagcttggcatttgtttgggtatcaaatgatatggagtgattaatt

SEQ ID NO: 36021 - DNA, 58 bp, Oryza sativa
  Clone ID: uC-osrocyp026h11a1
atggagcacaaacccttattaccttatgaagaaatctctacaatggtcagaatttcaa

SEQ ID NO: 36022 - DNA, 170 bp, Oryza sativa
  Clone ID: uC-osrocyp026h12a1
gctggtgctcccgctcacgctcgcctaccccaacgccacccgcctccccgcctcctcggccaggcgcggcctcggcgatggacacaaccccaacgcccgcatgcgcctccacgatgatctcctcaccaacgggttattacaacgacgagggctgtacaatcggggccgcc

SEQ ID NO: 36023 - DNA, 428 bp, Oryza sativa
  Clone ID: uC-osrocyp027a01a1
tttgtttttttttccaggaaataagccaaagttttgatagagaggtagagcactgcaggacaaaaggacccacgcaaagtctttgagccctgcacagccacctatcttgaccaccattccaccacacccttatgacgataaaattcgaccacaaaataaaacaataattgcagtaaccattgtgcaaaagaaaattaaaccctaacctctgattcttcccaccttcacaccacacattctaagacacgtccgcatgcctgtacacaagagaagcccagcaaaagtgaaagacactcgtccatcctacagtgtttttacagtcttgcaacaccagagagagcggcaaaagcatttggcccaaacagaaactggcaattaaatatggggatcaaatttatgacgtgacgatcgagatcggagagggagag

SEQ ID NO: 36024 - DNA, 371 bp, Oryza sativa
  Clone ID: uC-osrocyp027a01b1
ttagttttgaacgagggatcgtagagaggagggtttggtgagggagggaggaagatggcgacgtgcgcggcggacctggcgccggtgctggggccggtggcagccaacgcgacggactacctgtgcaaccggttcgccgacacgacgtgtgtggtggacgcgaccgacctgctcttctcgggggacctagtgtccgccatgcaggtcgggttcgcgatgctctgagccgggtcggtgcgggccaagaacacgatgaacatcatgctcaccaacggcgctcgacgccgtggtcggggcgctcttctactacctcttcggctttcgcttcgcctttggcacgcctgtcaacggctatatcgggaagcagttct

SEQ ID NO: 36025 - DNA, 448 bp, Oryza sativa
  Clone ID: uC-osrocyp027a02a1
tttgtgtttttttttttttttttgacgtataagatttatccacatcaccacaaataaaacttttactcgtgatgacatggacaaatctctcacattcacttcataatcagacagtttgtcttacatataaagtttgcgctacatatattccccaaggctcccctcctactaatattatacacaacaccaccagatggcacacaatgaatatgaatcaatggcaatcagcaatcattacatgtaaatgtcatgcctggattggacctacttgatttgggtaggacgcagcatatacaaacacaacaacgttaattatagcttccaccatttcttgttctccattgatttcgcaagctcctgggccagggaagcaaaattctctgctccactctcaagctccgcggatcgttggcttattctctctagtttctcctgtcgctgcatgagc

SEQ ID NO: 36026 - DNA, 458 bp, Oryza sativa
  Clone ID: uC-osrocyp027a03a1
cgtcagcttcggagcctcctgttgcggccgccttcttttttttgttgttttttgatttttcgggtttatatttttttattttttttttttttttttttgttttttctttttttttttttggaaaaaaacacccacctaaaagcatattttgacccaaagcaggaggcgcgtcaccccccctacgggacgtaaacacctcccaccaaagatgaacccaactgtgcaaccggggcggggcggtaaaaggaatttcaaaaggtttttgcccgggaccccccccgaaagggatggctttgaacggtaccctttcctcctccaactagctgtgatgcggggaacacactaagatcctccgttgatggagggggaattgccggggggcccaaaaagaaataaaaatgcccatccccccgctgcccaatgacaccaagagggccgccccttcattcgggcaaacc

SEQ ID NO: 36027 - DNA, 452 bp, Oryza sativa
  Clone ID: uC-osrocyp027a04a1
gagcgcggcgctctttttttttgttgttttaccaagattgggctatctcaatctataaggaaagataaaaagtacttgatcattactgatgatcataaaataaagtacacttcaggaagaaggaatgacctaaaatggctccttcaacagaggaagaatagggctagacaaggtacacaaaggtaggcaaggccattgccgtcatcgttaacgttggcctcgatcagctgtctccgttctgctgcccgaagctgcatgatcctgagggcaagaaggagaagggattctcagagatgtcaaatccaggtcgagtgaagtcatcaagcccaccgaagcaaggatcaaagctcaatggcgagaaatagcgtggatcatcggccatcttcatgtcaagatttgggatgtcgtccgatgagctaccggggaagttatacccagcgctccccaccatg

SEQ ID NO: 36028 - DNA, 368 bp, Oryza sativa
  Clone ID: uC-osrocyp027a05a1
atattgaggagaatgtttattattgctcaacactacatggaattattccaatctttccagtatcacacatgaacccgccatatatcatattgtgtctgagtacatgtccacctcaaaacatccaatttgaacaaacccagcttacgacagaacacgtaccctttaattgcacataattaacatataacagcgattaaaaatagggcaaaagaaaggacggagaggagggactcaaggtcattggattcattcattcattgatagcatggctccaatgctccatgcttgcatcgatcagctccagaaccaggcggtccagctgccgagctgcgcctcctcgtcgtccgtggggtaggggtgcacaactt

SEQ ID NO: 36029 - DNA, 345 bp, Oryza sativa
  Clone ID: uC-osrocyp027a05b1
ttagtatatgggtacagcagtgaacacaatatttacaactaggtccctggccgggccggtcggccaccggaaggagcacctcgccggagaaggctttggctcttctttttcttctcctcctcctcctccatcggcggcggcatggggttctcgctgtaccccatgaagacgtcgacgcgcatgctgtggagcaccagcttcttccgccataaggtcgcctcctccttctaagcccacgccctctcgggcggcggcggcgagccggcggcggagcgcgcggttggtaggtgcgcgtgcgtgcgtgaacgggagagcagcttcgagatcgggttttcttgggttctt

SEQ ID NO: 36030 - DNA, 399 bp, Oryza sativa
  Clone ID: uC-osrocyp027a06a1
tggggttttaaaggcagggtgagacagtggattatatacagaagcgctatagatatgcccaatacttatatgaaatcagcgacagtcacatatactgtggtaggttaagagacaacggggatgtgtacacgagctttcatgctccattggtttatctcagctaagggattaaccacatgtacctctgtccttccggcctgcgccggacagcgggaggctctggatgaccgcgggcatgggcggcctcaagagcttcgacgagctccttagtcctgttatccaggctgaatgcgcacaggttgctgtaggagttaatgaagaatacacagttttacttcaggctgagatgaatcttcgccctgtaacagaccgagctgtggtagctgacaaacagcgcaa

SEQ ID NO: 36031 - DNA, 426 bp, Oryza sativa
  Clone ID: uC-osrocyp027a07a1
tgtgtttttttttttttttttttttttttttttggtactgcaaccaagaaagttattactgaaagactaaaccaagaagaaccaccttttatagagattctagaactccattttttttgtatcaagatcaacactgcagcaactaaactcccctgtgttcttgagggaatcactttcaacaagggccattattttcagaggagaaggcaaaaacacttttgtgaaaaattcagagaaatgcaaacgctttgtgggaagcatcgactccattttggtgggaccagtgcatgacgtacacgttgtcctcgacaatggcgtccccggtcttgaggtccagggtgtgcgtcctggcctgggggtaaccgcgggcaaagcggaaggtgcccgtgcacgctatcacgggtattttccgggcctttgtaaagg

SEQ ID NO: 36032 - DNA, 445 bp, Oryza sativa
  Clone ID: uC-osrocyp027a08a1
tgtgtttcaagagaaaaacactgacatatgatcaaagaatagcacatcagttttagctacaacaaacatatatccgaaatcgtaattctgaattctcatcttcactttcacctatagtagtagtagtatgacttattctactagacatataccaaacgacgaaggatggatcgaactatgcaactctgaatttcttcttcatcatcttcctcagtgtccaaggccggcagctctaccgcagagtatggcgttggtcgggatactgtactcattggagaagctctgctgcggcgtccacactctcatgtacagctgctggccgaggtattgccggtcccagttcgccgacctcaggttccacatcccctggttgtccaatgacaccaagattgccgaccatccattcgggtaaacctgaactgtatgcctcgcttgcgcatcaacc

SEQ ID NO: 36033 - DNA, 387 bp, Oryza sativa
  Clone ID: uC-osrocyp027a08b1
ctctagatccagtaattgcgcctcctccggctgcagctgcggcgttggcggcgtgcattctcgccgtcgccgccaccctcgccggcgccgacgacccctaccgcttcttcacctggaacgtcacctacggcagcatcaaccctctcggctccaccccgcagcagggcatcttgatcaatggccagtttcctgggccgcgaatcgactgcgtgacgaacgacaacatcatcgtgaacgtgttcaacaacctggacgagccgttcctcctgacatggaatggcatcaagcagcgcaagaactcgtggcaggacggcgtgctgggcaccaactgcccaatcccccctggcgccaactacacctacaagttccaggccaaggaccagatcg

SEQ ID NO: 36034 - DNA, 446 bp, Oryza sativa
  Clone ID: uC-osrocyp027a09a1
gttgtttttttcactagctgagcataaaacttttaacttaattagtacatatcacatggttcaaaatacatataaaatagataaacatgcaaatagctgcttattctgcggcagcgctgcagacagctgagaaggcacaaaatcctgtttgtgctggctttgctgctgaaggctaaagccccaactgaacagggcgatgatcggctattaataagtgatccgaacgagactttcgatgaacggcatggcactgaacaattccgacttccgtgccccctccccctggtacctcgtgcgatccaatctacatagtatcttgagcttagaagtcgccagatcatagcgacatatattattacctcgcaacaagatgatttcatcgctgaaaggaggaagagccatcacagagcaaagactccaggggtaatcgatgcagtaacgccatt

SEQ ID NO: 36035 - DNA, 457 bp, Oryza sativa
  Clone ID: uC-osrocyp027a09b1
atcctctctcgctatctctcctgtctcctcgaatcctaagccccggcggctgctgctccctccctagcggcggctgctgctcttcctccccggcgtggtggcggttgctcccctccccgtcctggtggcatctgctacgcccccctccccggctgccccctcccctccccgacgtggagccgaaggcggctcctgctgcctctccccggtgtgggagcgtggcggcagcggcggcggttgcttccctcccggcgtggtggcagcagctgccccccctccccgacattgtgttgacggtggctcctactctcccttcccggcatggtgacggcggctgtggcggctgcttccctccccggcgtggtggtagcagctgcccgctgcctcctccttcccggctgcccctcatctacccgatgtggagcccaaagcggctcctgctgcctctccccggtgt

SEQ ID NO: 36036 - DNA, 319 bp, Oryza sativa
  Clone ID: uC-osrocyp027a10a1
tttgttgtttgcataaatcggggcaacttttaactcacaaaaggaagacatgtgattttcttttacataaaattcagacaatattattatgccaaaactcgaactctatctaccactgcatacaactccagggcgcgcgtgcaaacaacacatgctactagcattcattcgtactattcactataaacaggacctcccatctgaaccacccccaaccttggtttccgattcgataccgaattacacgttgctgcaggacgcttccatcataccattcccgatttgctcgctgatatccctgacatgggctgggccatga

SEQ ID NO: 36037 - DNA, 152 bp, Oryza sativa
  Clone ID: uC-osrocyp027a11a1
agcgcgcgctcttttttttttgtgtgtttttaaagcgaggagtggatacataagatctaccaacagcagggctttggcattgtctaccactcatcataacacagacctactatctatctgcttgtgagtgcgctgaggatacatatctgcaa

SEQ ID NO: 36038 - DNA, 418 bp, Oryza sativa
  Clone ID: uC-osrocyp027a11b1
tacgtgtagcgaccgcggcgccgccgccggcgatccgttccagacgaaccccgccgcaccgacgtggtagctgacgtaggcgaggtgcgtctcggcaccggactccaggaatcgtgctgctgctggaacgccgcgcccgctcaggcggtggccgggcgtaccgcgtggctcgctggcattgatcggggatccctcctacgggctcgacggggtggtggttacacgggaccggcgctaggacacgctctttcctcatcaatctgctgacgttaagaaagattggaatgctcctgtagtcgaatttggctatgtacagcatttgaattggttatgactcataacttgatagtggcatgtctgcgaaggatccaaggtacctagaagctaattgcggtgggatgggggattgggctggtct

SEQ ID NO: 36039 - DNA, 476 bp, Oryza sativa
  Clone ID: uC-osrocyp027a12b1
tgcgcgtcgcgaccccgtcgccgccgccggcgatccgctccagccgaaccccgccgcaccgccgcggtagctgccgacggcgaggtgcgtctcggcaccggactccaggaatcgtgctgctgctggaacgccgcgcccgctcagccggcggccgggcgttccgcgtggctcgctggcatcgatcggggatccctcctacgggctcgccgacgaggaggtttcaggggaccggcgcttggacacgctctttactcatcaatctgctgacgttttgaaatattggaatgcttctgtcgccgaatttggttatctacagcatatgaacggttataacttataacttataagtggcatgtctgcgaaggttgcaaggcacctagaagcctatttcggtgggatggcagattgggcttggtctatagactgaaatccttggggtaattgaaagaagcttggcgtccctgactatctgagaa

SEQ ID NO: 36040 - DNA, 447 bp, Oryza sativa
  Clone ID: uC-osrocyp027b01a1
tttgttgtttttttttgcaaagtaggtaggggtgctcaatcatagcagtagcacatggtgtccaaaccatttacacgaatagcattaacacacgtacaaagacttgggcacaatcaaatagagtttatgtccctaggagatttggcgaagctaacataacaagacacctttttttttaactttcacaatagcaaaccatgtagtacagaccataaggcagactccatcttaaaactgttagacttcttggttttcagaaaattccctacagtcatttgatctccatcttgcttttgactgtggggcagaaaccattctagttgcggtttttggacttatcaactgcccttggagcaagtccaattgcatctgaacctttcatgatcctgagtctgcgacaagagttggcaaacatcttccatggaacatcgccaacaagcattcagt

SEQ ID NO: 36041 - DNA, 448 bp, Oryza sativa
  Clone ID: uC-osrocyp027b02a1
tttgtttaaaaatgaaattattggagtgaatgaaataaatacattcagatacaaaaggtgttacataagtacataactcagcaaaattatcttctgattgcctgttcttttccaaggatgtgttcactgtgaaaaactataaaacctctctataggaagacttacatgtattatttcaaagacaacaagaaagcattggtgcaatttatgtcctattcaatcctcttctttcttttctcaatttactgtaaattaatgctaccatgatgagggtatatgtaactccaataatctccaaatatgcatcaatcctcacaattgaggaatgatcaatatgggaaagaccctgtcattttcatatgattaagggtacttctcaggccatagctttcgacagcccgattggcagctcgaaaaccatctccgtatgcctcagatgaatccgttt

SEQ ID NO: 36042 - DNA, 374 bp, Oryza sativa
  Clone ID: uC-osrocyp027b03a1
ttttgtgtttacttcaaactagtattgtacatcttaaaattactataaatttcacggtacaatagcaagtggttatctgatacttcaaactagtattgtacatcttaaaattagaattctatgaagttccgctccagtatcgcgatagaaaacgaccctagttatgttgtcgcacagaccagttggctgcatcttaccacaaagagagttactttggtactactgctgaagcttggacaacacaacacgagctatatatatatagggtaaattttgataccttttggcacctatacggagtcaaggtactaccacatattaacagcttaacactacaatctgggatatttaccggtaactttttagtaccataa

SEQ ID NO: 36043 - DNA, 149 bp, Oryza sativa
  Clone ID: uC-osrocyp027b04a1
ttgttgtgtactgacagggggtgtattttaatatcataatagagagttaacctcgtggatcaatcaaacagctgattgattaacctggacaaatgagcgaccatagatgcccgtacgaaaatgtccatgtgcattcgaaactgacatta

SEQ ID NO: 36044 - DNA, 261 bp, Oryza sativa
  Clone ID: uC-osrocyp027b06a1
tttgttggatattaaaaggtggctttactctgacaaatgacagagagaaatacaatggtacatgacacgcagtgggttaagcacaccaattatttggacacacagaggtcaaggttgcagagaaaatcaagcaacacaagctgaactcacggacccacctgtcagcctctcactggtcgaggccggagactcttgtgaaaaacagctacaccacgcatgcagaagaagacaaattattacacacacacatcgccggcacgg

SEQ ID NO: 36045 - DNA, 232 bp, Oryza sativa
  Clone ID: uC-osrocyp027b07a1
ggtgttttaaactgaaagggagtgtgttttagaataatcatagaggggtaacatggtgtccaaaccatacacgcgaatagtaatcacacacgtacgacgattgggacgcacacaaacaaagtttatgttggtaggcgatacctcacagctaaaatatggggagacctttttttttcactttaacaatcgcaatccctgttgtacataccactaggtggactccattttgaaa

SEQ ID NO: 36046 - DNA, 182 bp, Oryza sativa
  Clone ID: uC-osrocyp027b07b1
tgtgcgtgtggtaccaaataattaccgtggcttcctctttgcatctccagataacgagtagcgagcaccatccagatgtggggggggagacatagagcagcccatgatgaccaggacggacatcctgatatgtccaatcttgctgatacgaagcatgctcatgttcttaggaacagacggaa

SEQ ID NO: 36047 - DNA, 361 bp, Oryza sativa
  Clone ID: uC-osrocyp027b08a1
tgtgttttttttagctagggttgtagtttatgatattgaattgaatttatattacataacagtagctaattgccacggaatcaagtagcctacgttcttacaccagcttccatatcattctcctctcgtaaagggtgccaccatcgcataccaccaattctagattggcgcaatgacagtaagaagacaacagtgatctcctcgaagcttagatatttgaggggcatgagaaactcaatgcctagagggacctcttccatgctgcttaggtttattagtcttaatctttcaaggctcaccatggcaccttgctgaatatccatcctctttagattaggcaagtcttttaaacgtagaacct

SEQ ID NO: 36048 - DNA, 499 bp, Oryza sativa
  Clone ID: uC-osrocyp027b08b1
ctcctctattccttgattatgccgggggacgaaatctgtactcgttgcgcctattttggtcccaactaaaagaggatcccttgccatccctttctcggttgttaaatctaacagagctacatttcaccagagcctacaacggagagaagctggtcttccttactagatggtttcccaagctgaaggttctacgtttaagagacttgcctaatctaaagaggatggatattcagcaaggtgccatggtgagccttgaaagattaagactaataaacctaagcagcatggaagaggtccctctaggcattgagtttctcatgcccctcaaatatctaagcttcgaggagatcactgttgtcttcttactgtcattgcgccaatctagaattgggggtatgcgatggtggcacactttacgagaggagaatgatatggaagcttgtgtaagaacgtacgctacttgattccgggcaattagctactgttatgaatataaatt

SEQ ID NO: 36049 - DNA, 435 bp, Oryza sativa
  Clone ID: uC-osrocyp027b09a1
tgtgtttttttttttttttttttttttttttttttttttttgcaaaacatgagattatccattaacttagcaacataaaaaagcagcatcacgaaagttagctccacttctggatattttacatgggcaggatgctaagtttttttacaaaacagcacttccattttccaaaataaagatactagacctagagctaatttcagaataaatttcagggggaagattttacaacatgcaggcttttgatggaattctgtcttcatgttccagcaattgttttacacgggatcagcgcctccaagcatggggccaccataaacagccatagcgtctgcatagtttgcttgatgctggctcccaacatatggggcattccttcgcacacgattgggcttatcactttcaccatcagatgcctcagcaagccttgcgatg

SEQ ID NO: 36050 - DNA, 290 bp, Oryza sativa
  Clone ID: uC-osrocyp027b10a1
actcctccccctgctcccatctcctgaagcccccctcctccccgtgttttagtagtagtagcaatatttttagtagtagtaattatttataacgattgcttccccatccacgagcgctcacgcccatcggtcctcacttcgagccgtttgcgttctccagttcgattcggttgagctcgctccgatctatccctttcctgctttcgatcagaagcagtcggccttgatggaggcggagcttgctggttcttcgtgcaaagagaaaatcatttacttactttggaattaag

SEQ ID NO: 36051 - DNA, 290 bp, Oryza sativa
  Clone ID: uC-osrocyp027b10b1
tttttttttttttgtgttgtttttttttttttttccgtttgtcctctacatagaaaaataccggaaaacaaccaggagagggacggagagacgccaaacccccagtccgcaaaaaaaaacaccccccccgggaaaaaaaaaaagagggggaaaaaaaagggacggaaaaaaaaccacaaccggggaacaacaaaaagaaaacaaaggccgggggaccaacaaaaggggtaaacacgaaacaaaaaaaaaacacacggggcaaaaaaaaaaaaaaaaaacgccctcccccc

SEQ ID NO: 36052 - DNA, 404 bp, Oryza sativa
  Clone ID: uC-osrocyp027b11a1
tttgttgttttcgataaatattgcttcacttgtacaaagtacagataaaaatacattgatacatgacacggagagagccatgcacaccacttatttggacacacagagggcaaggctgcagagaaaatcaagcaacacaagctgaactcacggccccacctgtcagcctctcactggtcgaggccggagactcttgtgaaaaacagcaacaccacgcatgcagaagaagacaaattattacacacacaaatcgacgacacggcggccggcgacgtacggcgaggtcgtcgccgccggcggcgacgttgtgatgaggtcgatcagccgaagaggtggtgcttattctcgccggtggactcctgggcgctcttgtgggccttcttcttctcgcggtgctcgtggaa

SEQ ID NO: 36053 - DNA, 149 bp, Oryza sativa
  Clone ID: uC-osrocyp027b12a1
tttgtgttttaccaacatggggctttttttaaaaatacggaagggtgcaaacctcttgttcatttctaacaattaaaaaataaaccccactaaatgaccaatgaaagatccaggtacgctacttacacaggcaaaccatacctcacgac

SEQ ID NO: 36054 - DNA, 449 bp, Oryza sativa
  Clone ID: uC-osrocyp027b12b1
ttggagcctcaaattctactcgcgttttcatgactgccctatagatcagctcctgattggaaggactgtagttccatgagatagaagggcatattgaagtagaatttggcctttggtgaatctaaatggacagtggcttgggaagaagttcagagacatccttgaaagccttgccatcaatggcaagtaatgcaacaaggaatactgatcctgaccaacagggtgttcgattcagttccatggaccagcctccatgttttgcaagacctggtcaatcgttccctgcttttcctccactctttggggttcagtcttccagcttgtatttacctgatgacattgaagctaaaatcggtaaccagttcgaatcaaatcctttcccgaataatcctacaatggattgggaccctcaggcaatgctgagcaacttattctttcttgagcagaag

SEQ ID NO: 36055 - DNA, 400 bp, Oryza sativa
  Clone ID: uC-osrocyp027c01a1
tttgttgttttttttttttttttttttttcttacattgcattaagaatcattcaaagaaaggcaggcgagcacccgagatggtttggaatttacagaagaggattcagggagtaggatacacatggccacagatgcaaggatttatgtacatatgatacatttttgtccggctataacggtatgacttttgctcgctacagaagctgtttttgcttacaagagtagttcctgcgcagcattgttgctgctgcctgctgcgtcctttgcagcttcagtgggatgagccatgagctaacaaacctaactgggtacttcactagctcacagttcctatagcttgaagaatgatcttgaactacatacatgacttaacagatgacaatcataactacaggggca

SEQ ID NO: 36056 - DNA, 394 bp, Oryza sativa
  Clone ID: uC-osrocyp027c02a1
tttgttttttatttatattatcttttttttttttttacatttttatggaattatcttttttacatattcaagctgaagagtcatccttaagaaaggagagttcacagaactacaaacgcaacctacctgaaataacctaacatcacaacaaaaaaaggagcaggacaccagggatctgcggagaaaccgtgaggactggtaccccgggcctcaaaagatgggcagaacgatagacaaaccgataatccccatcggctggcttcacagaaacggaacaagaccgagcggtgaagcatggccgtaaataacggagagggcgtcaccggactcaacaaaggatccctgcggggctcattaggcggcacgagctaaacccgaatgacaaacccaacat

SEQ ID NO: 36057 - DNA, 228 bp, Oryza sativa
  Clone ID: uC-osrocyp027c03a1
tttgttgggtattcacagggggtgtattttcaaaaaataatagtgtggtattatcttgtttacataaaacagttgataaattatcattaataaaggagcgataagagatgcacatacgcaaactaccttggctaacctaaaatgacaccataaaaatgggcaggacaccatggatctgtagagtaatcatgatcacagttaactcttggcatatatgatggccagtat

SEQ ID NO: 36058 - DNA, 211 bp, Oryza sativa
  Clone ID: uC-osrocyp027c04a1
tttgtgtttttttgaagggaagtgaatttacaaggcataatagagtgcagaaagctggaatattaaaaacagctgatgagttatgagcgataaaggaccgactaaagttcaatgggcacgaacctcataacatggcctgaactgagcagtggtacatgctcagggagctgacattccacatattcccttttcattctgtatgccagtttcc

SEQ ID NO: 36059 - DNA, 271 bp, Oryza sativa
  Clone ID: uC-osrocyp027c05a1
tttgggttttattcaaggggggtgtatttccaaagcagatcagagggcaaaccactcggatgcagctggcagcagacgatctagccgcgacacatgaggcacaagagatccagatgcgcagaccaccaggtaaaactggagctgacagcacaaacatgggctgggtatccagacctctgacgaaaaatcggtgatgactggtcctccttggactcgatggccgtgaccgcggcagaccactggattatctcgaccgggatgctgcagaaaa

SEQ ID NO: 36060 - DNA, 140 bp, Oryza sativa
  Clone ID: uC-osrocyp027c05b1
tgttctcttggtaccggcaaattaccctttcgtcagctttgtattggtagagatcatgtgggcagcaagatattgatgggagggagatgacaaatacagaggacagactcgtagggcagacggggagtaatgtcgactgt

SEQ ID NO: 36061 - DNA, 105 bp, Oryza sativa
  Clone ID: uC-osrocyp027c06a1
tttgtgttttattaagggggagtgaacttcccaaacaaactaaagaggtaataacctcgagcaattatggaaccagctcatgaacatggattcacaagcgacaac

SEQ ID NO: 36062 - DNA, 362 bp, Oryza sativa
  Clone ID: uC-osrocyp027c07a1
gttgtttttttttttaagcgcaatttattacatttgaacagaaagcattgaaagaaagggaccataaccccctaggtggcacgcaattaacacaccaggaaactcggtgtatggatcacggggcacaaggtacaagggactgacaaacccaacaagcctttttacctggtacaggaccaataaaatataggaagctgcgaaaacatatatggcgtgcaaaagaaacacttgcgcggaattgcagatggagcctgaccgcctccaggaaggcataagaggttcagcgatgatctaagagagctaaaatggggggatgcttagaatacccagcataggaagccctaattgcacccaaggtgccg

SEQ ID NO: 36063 - DNA, 102 bp, Oryza sativa
  Clone ID: uC-osrocyp027c08b1
tcgtgtgcgtctggttccacctaattaccttggcttcctctgtccagatgcttatagctagtagggagcaagtcaaagatatgggggaggagacagataagt

SEQ ID NO: 36064 - DNA, 415 bp, Oryza sativa
  Clone ID: uC-osrocyp027c09a1
tttgttttttttttttttggttttttttttttttttttttttttttttttttttttttttttttttttttttttttttttttttttttaaaagggaaaacccaaaaccgcgcccttgaaatttaatggcccttcccgaagggggcatcccaggaccccaaaacccccaggtttttaaaaaccacccccgaaaaccgggcagggcaccccgggatgaaaaccccaaaaacttggggaaagaattgggggcccccccccttttacccacaaagagaaccgccccaagggggccccgactggggggaaaacccaaagggaaaagccgggcccaaaaagggggggggaacccagaaccggggggaattggtggagaacccccggggacccccccggtggaaaggggtttgtttggggga

SEQ ID NO: 36065 - DNA, 449 bp, Oryza sativa
  Clone ID: uC-osrocyp027c10a1
tgtgttttttttaggtaaacaacaataacattgatgatcaaaatacagagcaataatatgttgccggatcgatcccatcttgatgagaaacaaaatgaacaaaaaaaaaagaggaacaatagtgatgataataatggaggtgctagctgaaccatcggctggctataccatccgacgaaaacgagcttaaattcttcagacttaattaacagcaataacaataataatcatcatgacgacgttctggaatcgcagaaactggcgcagaatccggccaaaccaccaccttcttgttcttcatcttcatcatcgccgttgttgtgatcagatcatcagatcatgctctatgcatgcttcatctctccacaagatctcaagtaaaaatacacacttgacacacacactatgtacaaaacaagatttaaccacatatcttgatccatttctga

SEQ ID NO: 36066 - DNA, 451 bp, Oryza sativa
  Clone ID: uC-osrocyp027c11a1
tgtttttttttcaattcaaaaagactgcccaaacagaccaagggtatcatcatagcagcaaagttttttaacacgcaacatcaaagagacactaatgcaataagataacttgaagcgcggatcactagcaaatttcgcgcttagtcgacctcctcgatcttggggccagcaccgctgccgcctgccgggggagcatcgtcctcgtccatgccgccggccatgtccgcgccagcgccctggtacatcttggcgatgatggggttgcagatgccctccagctccttcatcttgtcatcgaactcatcagcctcggcgagctggttgccgtccagccactggatggcctgatcgatggcatcctcgatcttcttcttgtccgctgccgggagcttcgaggcgatcttctcatccttgatggtgttgcgcatgttgtaggcgtagttctccagcg

SEQ ID NO: 36067 - DNA, 455 bp, Oryza sativa
  Clone ID: uC-osrocyp027c12a1
tgtgtttttgcaagggagagttaacaccaagaatcatctgaaaaatgtataagctgtagcacttatggtaccagctcatgtacatggattcacaagagacatccaactacagaaaagaaatatatgtatgctctgcatctgccacttctgttatgagggggttatttacatgtacatatcccctcctgcgactttaacctatagaagctaaattatctatatgatgagaaataagaatccatgtatgtagtgaaacaagtctggatgtaaatttagtagacttcaccggtgaaatctcccaagcgctcactctggtgtaggtccacagaagaactcactgatcattattattcgctatcgtcttctaacagttattattcggtccgcggtttcttcaaaacgtatgcaatctgtggcataccttgtcaattctgttcctatgatcaaatgaagct

SEQ ID NO: 36068 - DNA, 433 bp, Oryza sativa
  Clone ID: uC-osrocyp027d01a1
tttgttttttttttttatcatcaaaaggactgccctttttattgatgtgtggcggattttagtgcagaaaatttgcatatttattaaaagaatgtttgcatatggaggctccagggccagtaggaaaccagagagagagagattgatggctcaattcttcttgaaacatctcccactccagctccagtttcttatttttcttttcaatggaagattatggagcccattgtctctgtctctgtaatgtgttctttgggccaagccagattgtatcccttgtctgaaaaaggtcataaacttgagtacttgacccatgcaaagctctagattttgcagtgctttgcttctattcgcagtaaggttttgccactgaaaatttccgtgctcagatagtcggatgccaagtgcggccattatggagcccataaaaagg

SEQ ID NO: 36069 - DNA, 441 bp, Oryza sativa
  Clone ID: uC-osrocyp027d02a1
gacatgaactcttggttttcccttaaaaaagtttactctgttgtctgattgtccatgatacacaggtatgatcctggcacagatgaggataccacaaataaacgtaaaccatgacccaccacccacgtatgacatgcaacacatttagattggcctaatacgttggtgacaaacagtaagcattttatcagcgagcacaaggcaaacatcttgtacagtttgatatatgcatggcttcccaggactcaatacgtgatcagagtgttcacagtaagcagcctttgaaggcttttcgcagtgcagcttcatccaaattccttccaataaatactaatttgttgaatcttttctcatccggctcccatggtttagctgggcatccctccaacatagagtgcacaccctgggatacgaaacgtccagttgactcatttacggaga

SEQ ID NO: 36070 - DNA, 255 bp, Oryza sativa
  Clone ID: uC-osrocyp027d03a1
tttgttttttatgcaaagcaggacaattattcaaatatagaatgatgaaagacgcaagaagaaaaaagaaagatgaaaacaaaatatgactacaagagccatgagagatgtgcatacacagataacaatggcagacataaaatgaaactgagaaaatgcgtagcagatgctacatcctactgataatcaacagtaagagttgccacgagtgaaataggatggataggaggatacagataatggctagctccactg

SEQ ID NO: 36071 - DNA, 345 bp, Oryza sativa
  Clone ID: uC-osrocyp027d04a1
tttgtgttttacatcaaaaagctttgactgtttgagtatgagtatgattaccatcacaaaaaccacagggagcaaaccaccaacaagcgccgatccacagaagtaaatcaaacccgtatatatctggagtactagcgtatagggcccccccaatcccaaggccaccgaggtgaccgtgcgcgccacgacacacttacacccctcactgtactccactaagcccacgaggccacgacccacactgtgcgcgcgcgcggccaaacgacacgtaccatcaatttgtacagttgtactacaaccgcgaccttattgtccgtggcatattaaacaccccggtcggggacg

SEQ ID NO: 36072 - DNA, 428 bp, Oryza sativa
  Clone ID: uC-osrocyp027d05b1
tttaatagcaggctgaaaggatgttatctaaagtgctgattctcttgacgtacgaacttgtggaaggaggaggacagttagaaataaaggatatgttgaaagtgaagaaagtgatgatagtgcggaaaagttagctaatcagcaaagaggtgtggaaggatgacccataaaaagaagaaggggaaacaattgaaaagaattctctgggatcaacctaaaggtggttctgaagaggctctgatgaatggccaatcaaaataacctaatttgatctgcttcacattagatgtggatgaattatgggatgatgtaaaattttatataaaatgggagggccaatgaattcttacattgccagtggaaagaattattttagctttcaaaccgttgggggttttaaaaaggtttttaaattacatgaaaagagt

SEQ ID NO: 36073 - DNA, 269 bp, Oryza sativa
  Clone ID: uC-osrocyp027d06a1
agcgcgcgcccttttttttggggttttttaaatggatgcaaatatcaaaggaatcacaatagcgggcatgccgaaacattttcagcgtatgcattgattggttcagaactcgacacacctaaattgaaagcgagaattacacttttgtatcttgcaacaggacaccacaaaggaacttccggactagtatgtaacttgaaagctctgaatgctttgacctgaaccctactagaatctgtggtatccccaacatttacaagtaaggcaac

SEQ ID NO: 36074 - DNA, 201 bp, Oryza sativa
  Clone ID: uC-osrocyp027d06b1
tttatttccagctagcaccagaaaagatcatctgaagcatcgtttgattatggatgacgtctagatgagcctgtcgtacccggtgcgtcggttatttccagaagctgactggtagcatagatggtcggagaacggacacgtctacgactagggttccactggtactcgtacctcctagagcaatggctttcggctgaaaac

SEQ ID NO: 36075 - DNA, 161 bp, Oryza sativa
  Clone ID: uC-osrocyp027d07b1
tctgggtgtgctcgcacacaatgaccggggaactctaagtacgggaagctgctgcgagttacgaccatgcgaaaccgagggggtcggcaaaaaaacggttacccacagtcacagcattagatgtcggcactacacgcaaccgtcgaagggcgactttctag

SEQ ID NO: 36076 - DNA, 447 bp, Oryza sativa
  Clone ID: uC-osrocyp027d09a1
tttgtttatgaaatccatgtcttataaatgaatcttgcaatgtacaactacgcaatatggtaatagtaacattcatccaacatatcactactatgtacaagttgtttttgtttgcaacgtacagcagggcagtaaaacactcaaaaagagcatatgagtgacaaaaggaaaaaaaaactgagagactccagtaagccaatgaatgatttcatctgtttttttaggaggatgctgttgtacactactttcactctagcagcagctgtctaatctcatcgaattcatcgttttcatgagggagtactcctgattcgtcatgttcaactactgctagttcatcgcgacgtactcccgtcttttcgtagaaggcctccttctgtgcatcccattctttgacgatttcatctaccctgtcgcccagcagtttgtcattctgaacaaagtgcc

SEQ ID NO: 36077 - DNA, 487 bp, Oryza sativa
  Clone ID: uC-osrocyp027d09b1
tcgttgacgcggcggcggcgccaccggcgacggcctctccttcgtctcgttctccgctctgcttgacgggaggcggctcctccgcgcgtccccctctccgccgcggtgaccggccgaggggtgctccgccctccgcttctcccaaccccggacggggcgccgccgagccagtgctccccgacggcggcggcggcggcgaggaacccgtccccgacagccgaaactcgggtcccaactaggaggagctgcagaaagccggcgtctcctacctccaacggcttcgacttgactgcaaaatatggatctttctcctttcaagttggatattgatgagctactagcggattataccgaggcaaattgcactgcattcgctgatttcaagagattgtggatggcaaagaaattttcttatatctatgaaggaagacctaagacaaactctggcgctttatgcagtcgctcttttgcattgattggtcatatg

SEQ ID NO: 36078 - DNA, 418 bp, Oryza sativa
  Clone ID: uC-osrocyp027d10a1
tgtgttttttagcttaaagcatttctttcctgctcagaaaaaaaacgaggatcgctcggaatccgaagagtgatcgcatttgtgtctaagtaacattcaaggagactcactgtctgccttgctctttttggattccattacattacagaacaaggcttattctatgggaccttctgtgctagtttcagtttcaatactttacaacaccaccagtccaccacacctgagcagcagcacttatggaggaatttattccaagaaactaatacggctcctttttctcaagtttgacaggaactatcaactgttggcgtagacactaatagttactggctagtctgtcttgaatctgtgtacaaacttctccaggccctttttgcagtcctccaccacccttttttgattatccccaatggtg

SEQ ID NO: 36079 - DNA, 401 bp, Oryza sativa
  Clone ID: uC-osrocyp027d11a1
agtccatgcaaatatcaaatcaatcacaatttttttcatacggaaacattttcagagtctacattcacaagttcagaactcgtaacaaaaaagagaaagcagaattacattttgtatttacaaagacaccacaaagaactcctcacagtattaactgtaagtctgatgtttgactgaacctacagaattgtgtattacaaatctacagtaagcaaaatgttggatctttttaaagtatttatagtgataaaaaagttgactaatggacctacctttacaagcacatcagaataatacagtcaagaacaccaactcttgcagaagtttatgttggagttggagcagcagcttgccttatgagcatgaatctcctcctcgcaatattgttgcattttcaccta

SEQ ID NO: 36080 - DNA, 447 bp, Oryza sativa
  Clone ID: uC-osrocyp027d12a1
tttgtttttttttattgaactaagcttagatggcctcatttagacaggaaagccaaaattttagatacatatgctttgttttgagcactaaaatactaactcaattacaatggggatgaacccaagaacatggcctgctcaaagcagtgctacagcctcttggagctgacatctctcatcttcccttttcattttatagctagtttcccgccagaacaaaatggttcaagtctcagttcttgattgcacacagccacagaaaggtgccctcttctttttcttctgcgcaccgccgcgcttttccttccttccatacagataatccctcagaagaacccgagtgcgcttatcggagaccttgagccttctgtacttaaggttccttttaagctttagcaggacattctgtattttttgagttccagttcaatcttccacgttttccga

SEQ ID NO: 36081 - DNA, 449 bp, Oryza sativa
  Clone ID: uC-osrocyp027d12b1
ttttgaagcagaagataaggttcatttgttgcaaggaaagaaccgagaattatgtggagttgttggctcgcttcaggttgccattgaaggggctaaaattgtgaaagaggaactcgagaagaaaatcacaacgttgactgaagagggaaacaccaaagatggtgaaatttcgcttcttcgccaagcaaacgagagactgcaggtggaagctgacatcctaaaagacaaggaagacagtttgacttcctcacatgaattactgtcgaaagaggttgaacaacatgaaggggaatttgttgtgttgatggatgatgcgatatcctcttcagtgaatgcggcagtctatgaaaagaaggcacttgaacttatgacggaaaatacagaacttaaggccaacttgagcacacaatgagctctgatagcatctttgctgatcatgtcatgagctg

SEQ ID NO: 36082 - DNA, 454 bp, Oryza sativa
  Clone ID: uC-osrocyp027e01a1
tttgtttttttttttttgagacaggtcacattggccaatccattagtaaagcctgctccagggtaatcagtgatcaaacaaacaacttgtcctaagagacccttttgatggtcaaagaatctttttcatggttagtttggacataagggattaaactgtaaaatggatccaaaactttcctatctttccacaaccggtctactccaactccagaggcaatcaatcagactatcgcactatgtgagttgatctggggaggcagcagaaaggcagcattttacaacacattctcttaactgtaacaaaagaattgactgatcagtagacttgtctgatgttgatatttatccttgaattttgaatgtagtttaagataaaagagtcatctttagcagatagctgcggaaccagcgcagagatttctgcctgatcacttcctgtgaagattcgtgga

SEQ ID NO: 36083 - DNA, 496 bp, Oryza sativa
  Clone ID: uC-osrocyp027e01b1
tataacctctccctccggcgatgtacggcgacaccgagccggccgccgccgccgccgcggagcgcacggcgttccggcgagccgagaagcagtacaagctctacaagccgctgaagcccaagggcggcagggcaaggagcaagccgggaggcggcggcggcggcggaggattggaggacctgtccgcggtggtcgacttccacgcgctgctcgctgccgccgccggcggcgggggggagctgcccgccgggatcgggaggcgcgacgtcgccgggttcgacctcttctgcttcttggaccgacctggattctatttcatacctggtgctctatctattgaggaacaatgctattggatcagggaaagcttgaaaaccttcccacagcctcctaatagaactaacctgacagctttgtatggtccaatttttgacttactcactgctgccaaaagtggaaagattttagtcgaagtgggaatcccatgaccaaaaag

SEQ ID NO: 36084 - DNA, 164 bp, Oryza sativa
  Clone ID: uC-osrocyp027e02a1
tttgtttgttgtccaaaacaacagagttaccagcattaccaaatatggatgcaacatcaaagttaaagataactgcaaataaaattccaatatatgagcgaacagacgacggaccaacattgacacacaattcgactcccacaaaaatgtaagtttaacataca

SEQ ID NO: 36085 - DNA, 290 bp, Oryza sativa
  Clone ID: uC-osrocyp027e02b1
ttcttgtctcgctgctcataatgacacactgctcggcagtttagctagctagaggctggcttgatcacgccatttgtctgctgttggatcgatctagtggtgcgccagccatggcaagaatgctggttgaggcggacgactccggatcggcggaagactcactcaagtaggaccggatcatcatcctctgcaggatgatctgcacgctcatgtagatactccgcctcgggatagtcgaccggtgcgcgtgcacgcgccgctgggcgtgggccgccagccgcggtacagca

SEQ ID NO: 36086 - DNA, 382 bp, Oryza sativa
  Clone ID: uC-osrocyp027e03a1
tttgtttttttttcaaggaaagacaactattcccatttatttgaatatttgtatcgagcaaaaaaacatcggctgataacattttaagataatacaatctatgagaaatgcccatacacaaataacacttgaagacattaaatgtcatttcgacaatgcagagcttattctacatcttcctaattatgaacaagcaacttgccttccgtgaattcggatggattgatgggtacagataattgcttgcgcatttttcttacaacaaatgtttcagtttcttcgcatattgtgaccacagttccttttcgccctagacggaccgttcggccagatttgtgggcatagtgggttaagtatgttggaagatccagattaatcacaa

SEQ ID NO: 36087 - DNA, 362 bp, Oryza sativa
  Clone ID: uC-osrocyp027e04b1
tacgtgttggggattgactgattgctccggatggggatgaagaagaagcacgggagcatgggcagcaagacgtacccgacggggagcgatgagtacctggcggccgtgggcaaggcgaaacgcaagctttgcggccttatcgccgagaagaactgtgctccactcatgctccgcctcgcgaggtcactctgctggcaccttcgatgtgtcgtcgaggaccggcgggcccttcggcaccatgaagaaccccggcgagcagttctacgccgtcaacgccggccttgacaatgtcaccaggcttctcgtccctatcaaggaccaaacttccattcttttctacggctacttctaccaacttgctg

SEQ ID NO: 36088 - DNA, 183 bp, Oryza sativa
  Clone ID: uC-osrocyp027e05a1
tgggtttataacaagacccccacactcacataattctaacgaatcgaataatgtcagggagcacacagactcactatatcacgaccggatgatcgttacatttgttataggagcagtaaaacgaaacacaggtacagaaggtattaacaaggctcgatgatcgagtgggcggtgaaaactaat

SEQ ID NO: 36089 - DNA, 305 bp, Oryza sativa
  Clone ID: uC-osrocyp027e06a1
tgtgtttttttttatgtatgttgaataagaaatcctggcaacaattggtattttaaattgttaccacaacgttttacgaaacacacttttaattcttacacaagcttcaagggagccttttgcaccagaattaaggaatgggcactcctccaagcatgcaaccgattgcagcgcatttctatacccttagctaatgccaggagatcaacgtatgggcaaaccaaggctactactactaactactaagaaagtgcctaccaacacatgtagcatttccttagctcatggtgagcctatgagcaaaa

SEQ ID NO: 36090 - DNA, 345 bp, Oryza sativa
  Clone ID: uC-osrocyp027e07a1
gttgtttgcacaagaaggcaagcgtgagagcttgaacaaaacttcaggtctgttcaatggtgactacgctaattaaaaacgtaactgcataaaaactcggttacgccgagaaaactgtaattacaacggatacggcgtaaccaattcacgcaatgggcacccatacggctacagtatggatcatttaacgactggtagactatttcttaaggggctgtcgaagggggtaacgaattctgaaagcagctagggggtggaataaagaaaggacattgtaaaacctctacagtgttaaccgaagcatataaatgatctgatccactagagttaccctggaacgcaaat

SEQ ID NO: 36091 - DNA, 303 bp, Oryza sativa
  Clone ID: uC-osrocyp027e08b1
gctttcacgccttcttccacgtttttaccgggtagagtttattaaaattgaggtaaccgaagtcgaatacctttgtttcttcggcagactcaattgggacactcacgaccgatcactcgaggccgacttgcacaactacggcctgatcctcgactccaagatcatcaccgacagggagaccgggaggccacaagggcgtgagcttataaattattactccgagctgatgatgcgcgacaccatctttggcctcaacggattggagcttaacggccggtactattaccgacatttacgcccatg

SEQ ID NO: 36092 - DNA, 147 bp, Oryza sativa
  Clone ID: uC-osrocyp027e09a1
ataaaaaggaaaaggatttttattttataaaagaggggtaggctatttgataattaaaactggtgatgttaaagtaagaataaatgacctatgagagttccacgtacgcgggaaacaatggcaaacaaaaaatgatactgaaaaaca

SEQ ID NO: 36093 - DNA, 116 bp, Oryza sativa
  Clone ID: uC-osrocyp027e09b1
ttctcgtctgcttcctcctcattaccggggcctcctccgtgcaggtgccgagctccagtgaggagctattgatatgtatggcggaggagacagatagtggcccatcatcactagcc

SEQ ID NO: 36094 - DNA, 443 bp, Oryza sativa
  Clone ID: uC-osrocyp027e10a1
acatcaagaaaatctacactcagattattctaacgaatcgtataatgtcagggagcacacagttccactatatcagaccggatgatcgttacatttgttatggagcagtaaaaagaaacacaggtacagaaggtatctacaaggttgatgatgaggggaggtgaaactaatttgaccagacatgcaccaggcctttgctgtttccagtgtagatttcgttgcggtcctcgtcgtagaatagtgcggtgatgtcctcaagagcatcagaaacagtgctccgaatggtagatctgctgctgtcacctctttttcgaggagcaattgtgagagtagggtcgaggggggagatcttggcgacgcactttcccgtgaagatgttgattatgttgattgatcccgtggggggagctattgccctcgtagtcggcactatctttgacctt

SEQ ID NO: 36095 - DNA, 399 bp, Oryza sativa
  Clone ID: uC-osrocyp027e11a1
ggtgtttttttttttttttttttttttttttttttttgaattaaaacaattcataagcttaaccaccaagcaaaaaatacacaagcttagatttcatttccaggggaaggggaaaaatgtgccatccagaataaggaaaagttacagcagggacatatatagatcttccactccaaatacagaaacagaaacaccgcgacctgagacagggacgggcaggccgcgaaggcccggggccagaggacaacggcagtatcactccatgtaccactgcaaaaactgacgggggaaatcccttgtgaaagggccgaagcggaaacgtctcggggccttggcctctgcacgagcctggattttgatacaacatcctaattccactttacctttaacagtgaagga

SEQ ID NO: 36096 - DNA, 431 bp, Oryza sativa
  Clone ID: uC-osrocyp027e12a1
tgtgtttttttttttgcaacttgaagaggaatgcttgcaagcactagcaattgtaaatgtcagcaacacgtatttacgaaacccaatctacatgcgtacacaagcttcaatggtgcctcttgcaccagaatttctgcatgggcactcctccaagcatgcaaccgtctgcagcgctcctctataccttttgctaatgccaggagatcaacgtctgtacaaccaatgctactactactactactaagcaaagttcctaccaacacatgtagcatcttcatagtccatggagagcctatgagcaaaaggtctttccttgtagcatgaactggctgcctctggcatgaaagaataagcaatagagcgccagtcactaccaaggagcgactgaatgcaaccaaaatcactctacaatcgggacttgatcatggggg

SEQ ID NO: 36097 - DNA, 493 bp, Oryza sativa
  Clone ID: uC-osrocyp027e12b1
tggacgcgtgggcgcgtgtcgtctttgcgttgtgcaataggtattgctggaaaggattcacaacttactagacctgattcacgtcctcgttggagcacgcaacacattgcgttacgcctctcgctgacagcaaccatggcagactatttcccggcgccggggcggaaccatctgtttgtgccaggtcccacaaacattccggacaaagtgatccaggcaatgaccagaaacaatgaggatcacagatcgcctgcttttcctgcgctcagcaagacgtgcttagaagatgtcaagcagctctttggaaccaagaagggccatgcattcattttcccgtccacaggaactggtggttgggagagcgccctcacaaacactttgtcccctggggacaaaattatctcctttcgtgtggggcaattcagcctgctatggattgaccagatgccgcggctgaatttcgacgttgatgtgggtgacacgtgatggggcg

SEQ ID NO: 36098 - DNA, 395 bp, Oryza sativa
  Clone ID: uC-osrocyp027f01a1
tttgttgataaagatctatatactatgtaagtctgtaacaaccaacattttggtgcttaacacaacactagtcactcaaacaacaaccttcgctgtctaaggactgggaagaaagtcacagctgcctatttacatggtgtcctttattcattattgcagtgaaaaaccgcacatgataaaaccctaggtttggtttttcactgaagccaacacaagggtactatagaaccctcagcttggtaaggaagtctgcacagaagtccaggaaaaggagctgaggccccgtaactctctgcatatccagcagatacttcttgtctctggtctttgaaagctggatttcaaacttgatcacagcagggagccctccatttacatcacccgtatccattatg

SEQ ID NO: 36099 - DNA, 402 bp, Oryza sativa
  Clone ID: uC-osrocyp027f02a1
ggggcgcgtcgggcggaggccggtctccttcgtccactcgcccgcccggcggcgcatctcccggcccttgtctcctcccatcgcctcccgtatcttggcctccaccgcgtcgcgccgcacgtcgtcgtcgatctccatggcgacgccccactcggtgcagctgtaccggcggttggtctgctgctccgcgaagaacggccagcacagcatcggcaccccgccgcagaggctctccaccgtcgagttccagccggagtgcgtcaggaacacgcccaccgcctcgtgccgcagcaccgccttctgcgggcaccagctcgccagcaggccgcgccccccgacggactccatgaactctggcggcagcacggcggcatcgccgtggatgaggtcggggcggacgat

SEQ ID NO: 36100 - DNA, 497 bp, Oryza sativa
  unsure (1)..(497): unsure at all n locations
  Clone ID: uC-osrocyp027f02b1
ttactggacacggttcagtgaccacacgaggttcacgagtacagtgacgcatacagagacatgggctccatcgcggccgacggcgacaagccgcacgccgtgtgcatgccgttcccggcgcaggggcacgtcacgcccatgctgaagctcgccaagatcctccaccaccgtggcttccacatcaccttcgtcaacaccgagttcaaccaccgccgcctcctccgctcccgcggcgccgccgcgctggacggcctcccggggttccgcttcgccgccatcccggacggcctcccgccgtccgacgccgacgcgacgcaggacgtgcccccgctctgccgctccaccagggagacgtgcctccctcacttcagccgnctcctcgccgaccttaacggcaacgcctccnccgagtcccccgccgtcacgtgcgtcgtcggcgacgacgtcatgagcttcggcatcgacgccggcagggagttccgcgtgccgtgcgcgct

SEQ ID NO: 36101 - DNA, 281 bp, Oryza sativa
  Clone ID: uC-osrocyp027f04a1
tttgtttttttttcaaggaaagacaattattcccatttattagaatatttgtatcgagcaaaaaaacatcggttgataacattttaagataatacaatctatgagaaatgcccatacacaaataacactttaagacattaaatgacattttgacaatgcagagcttattctacatcttcctcattatgaacaagcaacttgccttccgtgaattctgatggcttgatgggtacagctaattgcttgcgcatcttgtttacaacaaatgtttcagttccttc

SEQ ID NO: 36102 - DNA, 431 bp, Oryza sativa
  Clone ID: uC-osrocyp027f05b1
ttcatttgtccgattttgaagtatataatccaggcgatggatttcaatattatggttgtgtgccccaatctggaacggagttacacccagtttcaaacacgaccgaggagctaaatgctccattaaaggatgaggctttaatgattgggggcacacatgtcgtgaatgataagatgccattagagaatatgggcgagactataaaatcctttagaacattgctgcatagggataatatgcatagacctgaactgttttgaaataccgtgggagacaatgcttattacggcatacgaccgcagttacctgcattgcgtgtcctacatggcggtgctgatgatctgactgcaaactgtgatccttatatgtatgttaaccagatacttttgcactgggtttcacacgcattttaagggtacagagggtccata

SEQ ID NO: 36103 - DNA, 76 bp, Oryza sativa
  Clone ID: uC-osrocyp027f06a1
aaaaagtagggagatttctaagcctatactaacatctaatttaaattggcagagagtggggcaaacaaaacattca

SEQ ID NO: 36104 - DNA, 72 bp, Oryza sativa
  Clone ID: uC-osrocyp027f06b1
tagttttcgaccgccccaccatcaccaatacggccgtattagttcagtgcatctacagttagccccatctta

SEQ ID NO: 36105 - DNA, 101 bp, Oryza sativa
  Clone ID: uC-osrocyp027f07b1
tcgtgctcgtctgcttcctcctcatgagcgagtccacctccgcacaggagcagatcaccagtgggcagcaactcaattggcgggggcaggaaatagataga

SEQ ID NO: 36106 - DNA, 142 bp, Oryza sativa
  Clone ID: uC-osrocyp027f08a1
gttgttttttaacaaaacgtcatcacaaatggatgcatggaaaaggcaaagaccattgaataaatgatactgccaacgtaaagggaaaaaacaaatgactaatcagagcggcacttacgggggcaccagaggcacacacaac

SEQ ID NO: 36107 - DNA, 135 bp, Oryza sativa
  Clone ID: uC-osrocyp027f08b1
tcgttctcctctagctcaacaccactaccgtggccatcttcgttaacgagcctggctccaatgaggaccagctgaattggagggcgtaggtgattgaatagatcccgctgctacctagcctatgtgacctgcatg

SEQ ID NO: 36108 - DNA, 467 bp, Oryza sativa
  Clone ID: uC-osrocyp027f09a1
ggccgttgctgcggcgaggcacccgcacgacgtgcagtccgtgccggactcgccgatgattgacaagaactcctcgttcggatcaacgtcctctgcgccatcgctgtcgaatctaccgccgatacgggtgcggcccgaggatcgcccgccggatagccgactcgccccgcaggttcccgttgaggatcacttcgcccagatggggatctccgatcagccggtgcagcctgtaattgggggatacatgcagccgccgccacaggtgccgatccccaacatggctgtccccagcatctccccctcggatgcgtccagccgagtgttctccgacgatgacaagtccgatcacggcggcggcggaggtcggaagccgcagccacccaagccggaggttccacctgtcgctgaccccaccaacagagccatgtactacaacgatagatcgcctcctgctgaattgagcgtga

SEQ ID NO: 36109 - DNA, 350 bp, Oryza sativa
  Clone ID: uC-osrocyp027f09b1
ggagacaggaatgatgtatatatatgatatttaactcaaatgaagtttctacaagcaaagtagacacttttatctgacatttcaacctcaataacttccaggttcaaatatacaaagggctacacaaatgatgagttcttgattcaaaatttgtaccgagttctttagacactatatatttattttttaaaaaaataagaagacggcaattggaattggaagccactccccgccacttgctccagcattggcgattggcattttcagaaccaatcacaaacaccctcttgagtttcacccaacacaagaactaccatcccattttcatcttattttgatcccaaatgcac

SEQ ID NO: 36110 - DNA, 63 bp, Oryza sativa
  Clone ID: uC-osrocyp027f10a1
ttttgtttttttaaggggaacgccaactcccagcacctaaaagagggtaggcataaagacaca

SEQ ID NO: 36111 - DNA, 426 bp, Oryza sativa
  Clone ID: uC-osrocyp027f11a1
aaggatggaattgagtagcaatactttcaccccaaaatacagtttagcgacaatatcttagaaaagccgcttgctttgccgccatggctggcaagctgagcagagcagctaacacaaagaacacgagatcactataaaccaaacggcaacgaacgaagaaaatacagggtcttttttgtctgaagatacacgaagcggttcgttttcttttatttttagtctcctctcctcctcgatgatgggtgtatggcaatggcaatggcgatgggatcttggcttagttgatgggaaggggctcgccgttccactccttgaggcagtcgagcatggggtcgatgagcttgccctggctgatgccgaggaacacctttgtgcactcctcgccgggggacttgagctttttcgccgtgaggaatacgcagacga

SEQ ID NO: 36112 - DNA, 407 bp, Oryza sativa
  Clone ID: uC-osrocyp027f12a1
ttgtttttttttttttataaggtagtaaatattttactgcacgaatacgggtataatggactttgtttttacaattgatcgtgccatcatcgttacaaacacatatacacccggtacccaaaaaaaaagcacaatccagagggcatcgcatcgcctgccaccgaagcctgtcatcaattgtggtgtggtcgtcctgggctgaccctttgtgttggctgccggcgacgaacgttgacgaaggacatgttgaggatgccattccagtggcaccatcaccactggcataatcttctcatgttcttttctagtttccaccataccatcaagatgtgcatccacctgcaagagtgcacactgtagatgctgatgcctgcaaaattagaaggtaatcatttagtaaaatttag

SEQ ID NO: 36113 - DNA, 404 bp, Oryza sativa
  Clone ID: uC-osrocyp027f12b1
tgttggcatcaggaagcggaggcggcggcgacggcgatggcgtgctacagggaggaggcggcgtgctggatctaatgggttaggcggcaagaacgggcatgtccatgtctggcgaggaggcgaggacggtttcgctctcgtttccgcggttgtcgtcggctccctccctcaagcgagaaaagcaagaagcgcgctgcctccgccaaggctgccgacgaggcctccaccaaccgcacccgcgctacctcccgacgccaacccctccgctggatccccattgctgtatcgttctcctcggtgaggtggggacttttctagggtttggggattaggggattattagggttcctctggccttcctgcgtataggaacgaatcagaattttggttttctctattttttt

SEQ ID NO: 36114 - DNA, 470 bp, Oryza sativa
  Clone ID: uC-osrocyp027g01a1
tttgtttagcacaattgcagttttccttgattccaatttccaatgaatgagacaaaacaagacggcgtgtacacagttcacgcaacaacacttaaaattaaatcttacagctaatcgcaagcagcgacatgagaaacgacatgaatttttatagcaagctagaagggctgctggtgctcgcagtcgaggttgggcccgacgtcgacgccgagcacctggcagtagcgccggtagaagccgatgcggttgttcacccgggcgtcgcctgcccggttgcactcgagcccgccgttgacgatgttggtgaccagcccgaagcccgccgtgcggttagccgccacgtcggccgggccgggccggtactccccgaccatcacctggtggcacgacggcttggtgtcccttggcgtcattcagaaccacagcgccgtctggaacgctatgtccgagcagttggccacgatctccgg

SEQ ID NO: 36115 - DNA, 386 bp, Oryza sativa
  Clone ID: uC-osrocyp027g02a1
gcacaagaagccaaacgtgagagcttgtacaaaacttcagctctcttcaatgttgactacgctaattaaaattgtaactccataaaaactcggctacgccgagaaaactgtaattacaacagatacggcgtagccaattcacgcaatgcgcacccatacggctacagtatggttcatttaacgtctgatagacgatttcttaaggtgctgccgcaggtggcgacaaatactgaaaacagcgaggtaatccaataaagaaataacattggaaatcctctccagcggcaacccaagtctctaaatgatcataatcactcgagttaccctgcaacgcaaatttgtacccgggttgggaacgggcagtttcatttgtagaattgtagttg

SEQ ID NO: 36116 - DNA, 470 bp, Oryza sativa
  Clone ID: uC-osrocyp027g02b1
gctcaaacaaatcctgttgttgaatgtcgcgtattctcacgttattgatattcagatactcaagattttaccatagaggttcctcatatgcaaacacgaactttgttaactagggctgaaccgccatttacactggttaccacacaatacggcactactttgttgccaccgttgtccactggtaatggaactattgctgtttatggtgagactattctcgccactcctaatagcacagtggatgcaccagttgatattaatgtttttatatcgatgggagatgattttgaagtatataatccaggtaatggatttcaatattatggttttgttccccaatctggaacggagttacacccagtttcaaacacgaccgaggagctaaatgctccattaaaggatgagtctttaatgattgggggcaaacatgtcgtgaatgataagatttcattagtgtatatgggcgagtc

SEQ ID NO: 36117 - DNA, 98 bp, Oryza sativa
  Clone ID: uC-osrocyp027g03a1
cagccgccctccttttttttgttgtgtctgaaactcacatcgataataactcacgacaaaaggagctaaacaatattggtatggtagaatcgaccaaa

SEQ ID NO: 36118 - DNA, 437 bp, Oryza sativa
  Clone ID: uC-osrocyp027g03b1
ttcttgctctcttcccccccgcgtccagttccatctaatcagcttctcgtcgagatgggccgcaagttcttcgttggtggcaactggaaatgcaacgggaccactgatcaggtggacaaaattgtgaaaattctgaatgagggacagattgcttctacagatgttgttgaggtggttgtcagcccaccttatgtgttccttcccgtggtcaagagtcagctgcgcccggagatccaagttgctgctcagaattgttgggtgaagaagggcggggctttcaccggtgaggtcagcgctgagatgcttgtcaaccttagtattccctgggttattcttggacactctgaaaggaggagtttgttgggtgaatcaaatgagtttgtttgagacaaaagtggcatatgcgcttttttaacggcttgaggtcattgcatgtg

SEQ ID NO: 36119 - DNA, 309 bp, Oryza sativa
  Clone ID: uC-osrocyp027g04a1
tttgttgccaaagaacggcaataacatttgatttcgagtctttaaccgaaccctgtttttacactaattaaccgaccaaaccctattacaaagctgctaatgaaaacgagatctaaaacgcggaagcgagaggggaatcaacaagttgaccacgtcacgtcgtcgtcgttgatccccccagatcgcttgggcgctacgcaacgcaaccgtgtggaagggggtggattacgcgcgctcgccgcggatgcggcgggcgagctggatgcccttgggcatgaaggtgacgcgcttggcgaggatggcgcaaag

SEQ ID NO: 36120 - DNA, 326 bp, Oryza sativa
  Clone ID: uC-osrocyp027g05a1
tttgttgtttttccaaggaaagacaattattcccatatatcagagtgtttgtatcgagcaaaaaaacatcggttgataacaaattaagataatacaatctatgagaaatgcccatacacggatcacatttgaagacattaaatgacatttagacactgcacagcttatcatacatctgcctaattatgaacaagcaacttgacttacgtgaattctgatggcttgatgggtaacagataatggttggcgcatttgtctgacaacaaaaggttgagtttcttagcatagtgtgaccacaagtgcttttctccctagacggcccgttc

SEQ ID NO: 36121 - DNA, 398 bp, Oryza sativa
  Clone ID: uC-osrocyp027g06a1
tttgttgtttatcaaaggcacgagagttaccttcctctaacatggggtaagaccatgggataaaaaaatcagttgaagttaactctgcaccacatcacatacgagagatcgctatactaagaccccaatgtctgcgactaactgataccgtgtcaccaaacacgactgacaatatttcttgagggtattatgacacgatcccgccggcactaacgagacagcaccatggatgtcacagagagaaacatagtgtgccccactagaccccctcgctgggttgttcttataagcaaaggattaaacccactacttacactacgacgacggctccatttgtccaatgagcgcgctaggggaatttaagccttttgaccatgcattcttttagccagataaaa

SEQ ID NO: 36122 - DNA, 211 bp, Oryza sativa
  Clone ID: uC-osrocyp027g07a1
tttggtggtacaaaagcaggggtccttgattccaatttccaatgaatgagacaaaacaagacggcgtgtacacagttcacgcaacaacacttaaaattaaatcttacagctaatcgcaagcatcgacatgagaaacgacatgaatttttatagcaagctagaaaggctgctggtgctcgcagtctaggttgggcccgacgtctaccccaag

SEQ ID NO: 36123 - DNA, 123 bp, Oryza sativa
  Clone ID: uC-osrocyp027g08a1
tgttttttttatacaaaggacgacaattattcacatatagcaaaggtttagactaaagcaaaaataaaacggctgaaaacaaagtgaacaaaaatatgacctatcgagaggtgcccatacaca

SEQ ID NO: 36124 - DNA, 212 bp, Oryza sativa
  Clone ID: uC-osrocyp027g08b1
tgctcgtctgcttcctcctcatgagcgagtcgacctcctttcatgtgttgagctccagtgagcagcatctcatctgtatggcgcttgcagatagatacacccccaatatccatagcaccggtggatcaattttgaagatccgtcgttagtgtcgtcagtctggttgctgtacagttggcctgtatactcatgagtggttatcaatcgtaaat

SEQ ID NO: 36125 - DNA, 285 bp, Oryza sativa
  Clone ID: uC-osrocyp027g09a1
gttgtttttttttttttttctttttttttttttttttttttttttttttttttttttttttttttttagggaataaaaatcggccaaaataggaagaggtccgaccttaaagtgccaggaaaggcctggcgtgggtggaagaaaaaaaagaaaagggaaaaaaccaacatgagaaaaccctacccccgggggggtactgaacccaacacacgggaactatctaacccttagccggcaaagccagcctgaacaagaaccccaggaaagtggggcccggccccataa

SEQ ID NO: 36126 - DNA, 448 bp, Oryza sativa
  unsure (1)..(448): unsure at all n locations
  Clone ID: uC-osrocyp027g09b1
tcgtggacgcgtgggcttgacaagagtagaacaacaacaacatcatcatcatctatcacacacactatcagggcaggtgatcgaatagctaggaagcaagcaagcagagagtagtagatcgagtgatcggaggatggggtcgcggtacgaggtggaggtgacggtgtcgtcggcgcgggacctcaagaacgtcaactggcgcaacggcgacctcaagccctacgccgtgctctgggtcgacgacggcgccaagtgctccacccgcgtcgacctcgacaacgccgacaaccccaactgggacgacaagctcaccctccctctccccccctcctccccgctcgacgacgccctnctctactcgacgtcgttcacgccaacgccgncgagggcgtcaagccgctcgtcggcttncgccgnctcccgctccgngacgtcttcgacgacgccg

SEQ ID NO: 36127 - DNA, 438 bp, Oryza sativa
  Clone ID: uC-osrocyp027g10a1
gatgacaatctaaaactgtaaatttaaattaagcatcaccgacaacataatacagggagagcacaggtgtccttttaacaagagcactaacaatgtaagaggctttcaagcaacaaaggtgaaagcaactacttaccatagaacgcacctatgcttgctgatttttacatcaagcaaagttcatcagctttaactttgcttcggtgctgctttctactcagtatttaacaagctagaaattcaagatagcctaccacatgtgactcttccaagaagactcaagactacataatatgcaacaactatcattctttttccttgctactgtgaagagattagcctacagcctttttctcataagtaaatcagtttgatggatacaaagcatagaataaacactttcagcattttctgttgtttcatcagcgcctactacca

SEQ ID NO: 36128 - DNA, 448 bp, Oryza sativa
  Clone ID: uC-osrocyp027g11a1
tgttgttttacacgaacagcaacggaacattacattaacacggattagagacaggtgaattacaatgtaattgtatctagccatgcacagtgccaaagaggcagcaccgctagaataagacgcaaacgaatccgactaacaaaatacgagtcaccaaacacactgacaatattctgagtatttttgacagatccaccaataagacgaatacagcaccatcatgtcacagagagaaacatattgttccacaaaatacaccctactcagattgttcttataagcaaaagattaaacccactactaacactacgacgcatgcttcatttgtcaaaggagtcgccgaggggaatttaagccctttcaccacgaatccttctagccagctgaatgtccttaggcatgatggtcacacgcttggcatgaatagcgcacaggttggtgtcctcga

SEQ ID NO: 36129 - DNA, 446 bp, Oryza sativa
  Clone ID: uC-osrocyp027g12a1
tttgtttttttctgttatgaaaagttcattacgacaattatgactaattggcagcattccaaaatattcctcaacgttgacactccatgccacacaatacaatcgaaatttctagaataggcaacatttccgagcatctcggagacaagaccaacatcaccactcgaatgacactgagggggaaatatacaggggaagaagcaaaaatgctatctttaggtagtcgtttgacgacagacagttaagtgtagtgcacctgttgtagcactcgcttactcccccttgtgctccttatctttcagagcatttcctgtgatttacgaacaatgcgtctaacctttttcttgaaatcgtccctcttttctctccaatccttagccgcttcaatatttgctggagactcatcatttggactagagagcatcgaaatgatgctcagaactata

SEQ ID NO: 36130 - DNA, 510 bp, Oryza sativa
  Clone ID: uC-osrocyp027g12b1
ctccacgcctctacatttaaagctcgtcccgaggaagggcggcgacccaccccccccaatcgccaaaaccctaactccgatccgatcgagctctgcttcccatggcgactgccgcgagccaggcgagcctcctgctccagaagcagctcaaagatctcgcgaagaaccccgtggatgggttctcggcggggcttgtggacgatagcaacgtgttcgagtggcaggtcaccatcatcggcccgcccgataccctgtatgatggaggctacttcaatgcaataatgaccttcccccagaattatccgaatagtcccccatcagtaaggtttacctctgagatgtggcatccaaatgtttatcctgatgggcgcgtatgcatttctatccttcatccacctggcgaagatcccaacggttatgagcttgcgagcgaacggtggacacctgtgcatacagttgaaaagatagttctgagcatcatttcgatgctctctagttcaaatgatgagt

SEQ ID NO: 36131 - DNA, 441 bp, Oryza sativa
  Clone ID: uC-osrocyp027h01a1
tttgtttttttactcgtaactgataggtgctgatcatttctataatgataacatatataggcacattggcaccatcaatcacttacacttgccttccagcgattaatggaaaacgttcacaagtgctaaaaagctcccactaattccaactaaacattggcaaatcctagaaagcactgataagtactccttttcctagtttccatcaaataaatgagatgaaatttccaagaatgctcacaagaacaagcttctcacctatctatggaatgcctatacagttcttcaggagtcaattttgtagaatcaaaccgctcgagacaataatgcacatacggaagcacatcgagcgggcaacaaactatgcatacacagaaattctaatgaaaacaaaagataatacataaggtatttccaaacaaatatactgaaacgaagatc

SEQ ID NO: 36132 - DNA, 414 bp, Oryza sativa
  Clone ID: uC-osrocyp027h02a1
tttgttttttttttttttccctccacagtcgttaactcactgccaggctacagccagtactgaaccccgggcaatgcgatgcggcatggaatgtcagctgcaccatccattgtttaggggcactgcatggctttgccactggccagaccggctgactcaacaacagacagtgctaggcaaactcagctgtccaacccttccatgtaccaggctgctgtagcagccgtcatgtcatcatcacactctgtccctagcgcacagtacgtcccagctgccactcactctactgctctccgctctattgctgttcctcatcagcagctgccttctgggctgggtacttggctgccacatcggcccagctgactgtgccgtccaccagctgcctgatgactgccgcaatgtctggcaccg

SEQ ID NO: 36133 - DNA, 453 bp, Oryza sativa
  Clone ID: uC-osrocyp027h02b1
ttctttaggtggtcctcaaggcctctggccacgtggaccgcttcactgacttcatggtcactgacgagaagacgggcgactgctaccgtgctgatcacctgttggaagcagcaattgaggccgcgctggaggacgcaaagaaccccctcagcccagaggcacgcaaggaggctgagcagttgctggctggtgtgggtgagctgggcctggaggcgctgcatgaggccctcaccaaattcagcgtggtggcaccggacaccaagaaccccatcagcaggcccttccccttcaacctgatgttcaagaccagcattgggcccaggggagacctggtgggctacctcaggccagagacagctcatggcatctgtgataacttccgtgacctgctgtacttcaacggccgcaagctgccctttgcagctgcacagattggcaatgcatacaggaatg

SEQ ID NO: 36134 - DNA, 412 bp, Oryza sativa
  Clone ID: uC-osrocyp027h03a1
ttttgtgtttttttactgaatgattttctttgaaatggagcgttgccaaatttctggaagctgaaccatcctgttcgagcagccagtactgtacaagtcatacaacaaagcgttcattgagtctgttagactgaatatccatccgcaccacctgggttaaacttcaataagaggaaatgcgatgtaataaagctacaggtacgaaaaaattagcctctcaagtctgaaccaatcacggtaactactgatctcggggatattctaccaggttgctcgcttgtaagtgcacttgcaaccacacctatagagcccaatggctgctgcccttagttcttctgagggggtgactttggcctgaggcccttaatttcaggtgtcgtaaaactagatggggagcctccggcggaggatt

SEQ ID NO: 36135 - DNA, 448 bp, Oryza sativa
  Clone ID: uC-osrocyp027h04a1
tttgttgttttttatagtattatcaaaacatgtgacagaacatttgctctcacggttgtggaatcaaccacgcagaaaacccatcacttgtttaccagcatccagccagctccataaaatgacagctgatccaaaaaagaaaatcacgcgatctccatcaatgactacaagctctagcattcgttctttcaggcaagatcaccaaacatcatatctgtgaacctaaatatcaaaaactataaagaaagcatacataatgttcagataaatataatggccatgtgcgagagatctgaaagggctggccaccccccatctatacccctatacaaagccaatctgcaagcgttttcgtggtaccatggatgcaggcgatagcggctgcaccttagacttcacggcgccagccaatcctgaagtattgacatcgtaccactataagctccat

SEQ ID NO: 36136 - DNA, 443 bp, Oryza sativa
  Clone ID: uC-osrocyp027h05a1
tttgtttacatgatctaattaattaattaattaaacagaagcaaactccaaaccagaccgctcaaaagcttaaacatagtttgggagaaagaaaagaaggaaaaaactaagaggtgacaagaacaaacacttgatcatgatcatgcttccatgtttgctagcttggtgtggtcgctagctaagctagcttaggctactccaagaacgtctccattaggtccgagtagacgccgccctcgtgtgggcccctgtactccatcccttgctgctgctgcggcggcgccggcgccgtcgacgccgacaccgacggggacgtcgacgtggtggacgagctcatcctcgccggcaacgtgaagctcctcttgaacttggtgctctgggcgctctccatcctcctcgccttgttggagtggctctccaggctcaggtactcctacacgttc

SEQ ID NO: 36137 - DNA, 318 bp, Oryza sativa
  Clone ID: uC-osrocyp027h05b1
gtgatgtgagtgaagagagagacacagccaaagctcagctcagctaagctaagctctactcctactagtagtccctcttcaccctcactctacctcaccctcccccgagaaaaccccaagaaacgatcaaaaagagaccgaccagcaaggccgtagcctcaaagagcagccaaaaccacggagtttttaccatctatcttagctctagcttagctacctagctagcgccggagcagtgaaagagagagtgagaagaagaagaggaggtggaaagaagtgaaagaaatgtgtgggctccggggcggcagggggaggggg

SEQ ID NO: 36138 - DNA, 346 bp, Oryza sativa
  Clone ID: uC-osrocyp027h06a1
tttgttgtttttttttttttttttttttttttttttttttgcttacaaagaacgggaataacatttggtttagagtttttaaccgaaccctgtttttacactaattaaccgaccaaaccctattacaaagttgttaatgaaaacgagatctaaaacgcggaagggaggggggaataaacaagttgaccacgtgacgtcgacgaaggtgatccccccagatcggttgggggctacgcaacgaaaccgcgttgaaggggggggtttacgcgcgcttggcgaggatgcggcgggcgagctggatttccttgggcatgatggggacgcgcttggggtggatggggcaaag

SEQ ID NO: 36139 - DNA, 281 bp, Oryza sativa
  Clone ID: uC-osrocyp027h07a1
gcggcgccttttttggtgttgagaaaccgtgggggctgtcatttctataatgataacatatatacgcacattggcaccattaatcacttacacttgccttacaatgatgaatgggaaaccactacaagagctcaggggtttcgaacacatgcacctaaagcacgcaagcctttaagacgtgccatgcagaactactgggagtagaacagcatgagtacatatgtcaagatcattcaggacaggtgactggaccggtctcaaaatctactgtggactgggct

SEQ ID NO: 36140 - DNA, 327 bp, Oryza sativa
  Clone ID: uC-osrocyp027h08a1
gttgtttatgaattgcggtcgcactaaagaacggaaagaggttgaccagagaaaccctgaccctttgtaccgcaaacaccaataaaaggtcacgccttacaacactattgtcaaccaaccacatgcagattgcttgtggctcgatggcagcatgcgatcgaaaaccgagggccagtggggctggtttacacacacacacacacacaggggggtcgggaaaaagcagaaaggacgtccctcactccaagggcccggggggaatcgggagggggaccatgtagtggttgctgcgcacgttgagcagtcggaccaccctcccgaaggttg

SEQ ID NO: 36141 - DNA, 238 bp, Oryza sativa
  Clone ID: uC-osrocyp027h09a1
gtgtggttaagaagggcgggcgctctaatcaaagtaccgaggaaggcgagagaagaagtcgccgtatgcacaggacacaccacaacacttagaccttaagagcactggtaagaccaggcacatggcacaagaagcgacatggattgtcataaggggctagaaagcgctgtgtgagatcgaaagggaaagaggcacacacacggacacagagatcctggaaattgtgcctggacgagcc

SEQ ID NO: 36142 - DNA, 432 bp, Oryza sativa
  Clone ID: uC-osrocyp027h10a1
tgtgttttttttttgacaaacatgaacatcactgtacctcttttacttgcataacaattcgaaaacatcagaattgccaagtttatcatatgagcagcagccgattcacaaggaatggggtgtttccgatgatgattagatggatagcgtctttaacaactaagaactacaagatagaagggccaaaactgttaaaaacagcacacagaaactagagcacactcaatatagactaatataaccacacgctgatagtgttttctttttcagaatcatgaactattttcgaacggtaaatccaaaacctaaatagctcatttttccacggtatccttgctccaacgacgcctcacttgaagcatttcgcattcaggataggctcgccctcaaatggctcaaggtcctcaataatggcgctgacgcgctccttct

SEQ ID NO: 36143 - DNA, 446 bp, Oryza sativa
  Clone ID: uC-osrocyp027h11a1
tgtgtttttttttttttttgtttttttttttttttacggaaaaatttcgctcacataaatggaaggcttacatttttattgttattatgcaaagttggtcttccaaagctctatgcgtggtcaaacagctggtttggacatagggaacaagtactctgtctagaccggccttgatgttttgctaaagcatgttaaatagggcaagggcaaatttccccacttgacctgcctactgaaaattgcaccgattattgaattttgtcctttataattgggaattgttagcctgtttgagaaatatgaattggtagcttatagaacatgctgggaatatgagctgcagatatatggggtgacaccaccggaggctcgatatcctgaattctttagattgcaatgcaacaaacaaaagaaattcagggtctagttcatcaagtactcctatt

SEQ ID NO: 36144 - DNA, 415 bp, Oryza sativa
  Clone ID: uC-osrocyp027h12a1
tgtgtttttttttttgaactgaacaatgcttcacattaccaaaccacatatacagtaagcatctcccaatccttttttgacgcatgaacaattttgacacatatgagcatcagagagaggaacacacgtgtagtagtactgtacaataatataacacatctaagctaccattatactaaatctgttccattttgaatcattgatcactgggttttagggccactggccaacccaagagctttgaccagacgaaggtgccattgatggccatcccggaaccgcagtttgctgtagtccatgacgatcctgcaggagctccatgcctcggcgtgcatgctgacgccaagatagtatatgtggtcttgcacgctgctcccactcacagacctgcagcatgatgggtcttcaccagaat

SEQ ID NO: 36145 - DNA, 331 bp, Oryza sativa
  Clone ID: uC-osrocyp027h12b1
tcgttaatctttaattaatttatttctcgcctctctttaacttattttgctcctcactttctcttgactagctcaaacacttacacgaactcggattgttaataatcttttactactcctatatacggcaataaaatcttcgatttcaccgattggtcgccactctccgattccccccaactcgtcggtagcaagtagctcgatcgcgcggcggcagaatttccagggtggatttggccgatttggggcatcaggtgagttgatttgtgcaaattttgccaagatttgccatgggcccttggatatttccctctctttttttggagggcat

SEQ ID NO: 36146 - DNA, 63 bp, Oryza sativa
  Clone ID: uC-osrocyp028a01a1
agaggccatcacctgaaaggatgaagcttactggccgctcttccaggatgatacatccctgtc

SEQ ID NO: 36147 - DNA, 373 bp, Oryza sativa
  Clone ID: uC-osrocyp028a02a1
ttttgggtgggttttgaaaagcttgcagataatcaattaattaataagcaattagtataatgctgaccaagaccaagctggtcatcaagcactccttaacgatcacatgtttggggcagcgactccaaaggtggaaaagctttttgatgaatgttcgggtgctagttaaatgttgaggagtttatattaggggaaaagcagtttagacaggcattataaatgggttgctgatgggcattgtggaagggaaaaggacgcgctgcagggcgttcttagagaagggaggcacctgaagaggaggatgaccacgtggcagcattgtacccctcgctgccacaatatggggcgggggcccaaaatcaagcccaccccg

SEQ ID NO: 36148 - DNA, 424 bp, Oryza sativa
  Clone ID: uC-osrocyp028a03a1
ttttgggtggttgaggctttgaacatcttcatttcgagatatttacacccagatcgagaagcaatacgctgcctatcttaaacatctcctcgtcacaaaaatcaaacaaacacgaaactctctccaaaaagagaaaaaaattgaacgtaatcctatcccctttcggagcaataatatacaaacacaaaaaaaacactagtcctgtctccacatttccagttcttcttcttgttttttttttttcagatagacgtctgcgtcggcgtctttgacgatgagaaaggcttcgtttaattagtggtgctgaacgatctcatgtttggatgaccgggttgtttcgttctcccttttgctggctgctgctgaccttgaggtcggcgaaatcggtgatcatggccggcctggtgatcccgtgcacccgaga

SEQ ID NO: 36149 - DNA, 106 bp, Oryza sativa
  Clone ID: uC-osrocyp028a04a1
agaaaccaaagtttggtataggaaagccatttttactgttgcatgttacgagttcaaagacaaaaatgtttggtgtcaatcaaataaggcaaggagggcccattac

SEQ ID NO: 36150 - DNA, 451 bp, Oryza sativa
  Clone ID: uC-osrocyp028a05a1
tttttgtttgttttttttttttttttttttttttttatacaggttcgggccggtgcgaagcgtaataccctactcctgggtttttggggatttgggtatgaatgagctacaaagtgggagccaacttttcccccgttctaagctttaaatctggaaaagaatcaaaaaaaacccccttttttatgggcaagggcctccttttatacttcaaggggataccacatgcacccacccctttccaaactggacttttcttttttttatggacggagattggtatggttgctgtccgaatgacactccgatgggacagcccacacctaccttcacttccgggggagacaggcgcaacgtgggatactggctgcccgttgctgacgcgaccagtgccagaccggtcattcttgtccaccacgcgtcagtttaacaacatgcatgtttgcccttcctt

SEQ ID NO: 36151 - DNA, 462 bp, Oryza sativa
  Clone ID: uC-osrocyp028a05b1
tttttctctcttaatttgcaccacgtagctctaagatgtccacgagagtttggtttatccaacttcttttgctggtgatccaactgctcaccgtcctcttactcgttgccgcctccggtagaggctacagctgctatgtatgccaacattgcgatccccataattgtccccacaagaaatgaatctttacatctggtctggtaatctacttgaactcttccgtctttgctttgtcttcagtaatcaaccggagaaaatttttggttgcaaatgttatgagttttgttctcgttaatgtttcttttaaaagaactttaatatatcagaacttagtcaattggtataacttgcgtgcttcaattttgtatatttggttgaccaaaggaaatggcatctttattaaatgcagttttgatcaaactggccaaacctagctttaatcaataatggttatattgaaat

SEQ ID NO: 36152 - DNA, 91 bp, Oryza sativa
  Clone ID: uC-osrocyp028a06a1
tgggtgttttttttttttttgtttttttttgacactcaagccaacttttaatttattaacaaggcacatcttctggaaagaatccggataa

SEQ ID NO: 36153 - DNA, 248 bp, Oryza sativa
  Clone ID: uC-osrocyp028a06b1
catagcgcctggacgccaccgcccacggacgcctaaacaccgacggcacgccggcctcggagtacgccaactccctcctgtgaaaccccgggtcagccgtgagacgcccaaccaccttcaactacgcgtacgactactcgacgacggccgccgccccggaggagaagagcgagcagccatacgggcacctaccctgcaccaccaccgtgctcgggaacctgtccctggggctcccgtatggcctccca

SEQ ID NO: 36154 - DNA, 434 bp, Oryza sativa
  Clone ID: uC-osrocyp028a07a1
tttttgtttttttttggcatgaatgtaaattgccatgtattttaatcatgtgattcatgaatattggaattggctgttcttgcaagcttacaatggagtacatctctgcatgaaacaacaaacaaatatcccccttcctcgccaaaatcaccatgaacgttttcctaccagtaatctttacacgagcagaggccatccctgaaatgatgaaacctcgtggcgtcccgcacgatgatctccctgtccgtgaccttggagatggccttgatcgcggcgtggcagtcgttgcacacccgcaggttcttcatgacccgcagcgtcgtcttctccggcgtgctgatgaggccgaacgcgatggcgagcttctcgctgtgggggctcagcagctcctccttgagctcgtcgtcgacgtcgggcaggacggactgcaggtc

SEQ ID NO: 36155 - DNA, 460 bp, Oryza sativa
  Clone ID: uC-osrocyp028a08a1
ttggtggtattaaatacggtgtatcgtttcaaggatgagttcggatgagtgatcgatcactctccacatacttggatcggactctttcgtacacgtacaacgacatggggagacggtacaacagcagcggcgacaaacactcacgtacacgggtaggacttacagaacgcgccaacgttatgggcgattggtgagaaaacacgcacacctactagtgctagctttatccttttttagtggacaccacacgggcgtcgacgatcttattggctagcgcgatcaatggccgggcggccggccagcttcgagcgttatgcttccatcttcccgttggctgacccgttggccacaaccaggccgacgccggtcggtccgttggccgccatcgcgcagttgccgttggccttgccgttgctgttgacgttggccttggcttttgcctgattcgtgtggttggcag

SEQ ID NO: 36156 - DNA, 429 bp, Oryza sativa
  Clone ID: uC-osrocyp028a08b1
gtgcattcatccaccggctcaagctgggtagtgatcctttaggcctcgccgctagttccaccaccgggcgccaccatgtgcgggatcctggccgagctcggagccgacgactggtcgcaggcgaagagggctcacgtcctctcctgctgccgtaggctgaagcacacgggacccggctgctccaggttgcaccagtgcgagggaaactttcttgctcaacagcgtctagccattgtattaccggtctccggcgaccaggcgttgtacaacgcggaccgggccatcgtggtcggggccaatggagagatctacaagcacaagaagatcaggaagcagttcgacttccaggacacagtcacgaccggcagcgacctgccagggcatcatcccgctgcatgaggaggaccgggaggacctcgtcgtcatgct

SEQ ID NO: 36157 - DNA, 165 bp, Oryza sativa
  Clone ID: uC-osrocyp028a09a1
ggggaggattaaaaaagctccgtctttgctgctgtagttgttgacgccagtaattgaacaagctaaagctgcccggtaacataggcgcggagaatacgactaacacgttcttccaaaacgcgaccgaaaagaaggcggacggggtggacggcgtggcgagaggcg

SEQ ID NO: 36158 - DNA, 357 bp, Oryza sativa
  Clone ID: uC-osrocyp028a09b1
ctagcctctggggatattaggctttgaggcttgctgtcgaagagattgtgtccttttaaaacatgagcgaccctggcgaacttgacgcatatacgaagggagtagagaatgaactaaggggaacgggtatcagttgctctccactgcacaatgcaattagagccttgaaaacgggagttaccaaagtaaatggtgagagaaaggagcttcaaaggcaactgttgagcaaccagctgataaaggatttaatgaaaatacggtcgctcaatgaccggctcatgcaggctgaacgggcatttcactaacagggaaggcctgttcaagcgagaatggattaaacatatggtctatggacca

SEQ ID NO: 36159 - DNA, 292 bp, Oryza sativa
  Clone ID: uC-osrocyp028a10a1
tgggtgggaacaccagcagaatctgtttcttctttatttatcaatcaatcatgctctgagagactgtaacgagaatgaacacaacttttgggctacaagatcaaaccaaaacgtgacagtacaagcgtgccatgggcgaaggcatattgacgtttactttacaaggacggtgagagatcaccggagcaagcaaaacaccccagtctgtggtcctactccttgacctcctccctctccctccgcacggacccgaaccgatcgaccaggatgttggctacgatcggctgccagc

SEQ ID NO: 36160 - DNA, 378 bp, Oryza sativa
  Clone ID: uC-osrocyp028a11a1
tgggggggttttttttttttggtttttttttttacacaaagttacgtacgttgacatgaacaatttccaattaaagcggttaggaggttccattcacattggacacaaaaaaaccgatattttccattcacgatcaacagaaatccactacggggcacacaaatctacataaattcacagaaatccgagcaccaccgcccgaggcccgacggggttggccgtgacgaggtcgaggccccgaagggggggctccccgggcctttggggggggggatccgtgctggttggagcccccaacggggcggatcgggacatcccggcccgttcttcataggggggggctactgccattggacagattttggaaaggggagagga

SEQ ID NO: 36161 - DNA, 336 bp, Oryza sativa
  Clone ID: uC-osrocyp028a12a1
tggttggtttttttttttttttttttttttgacacacaaacaatagtttaatttattagcaagtcaaaatttcttgaaagaataccatcgactcacttgtgtctacaagccttgagttatactttttgcaacacagacaacactacagataccatacattcattttaccggtttcactcgcttttaagacgttctataaaccttacatctggcgctaccatgctgaccggaccaaaaccttgatttccattggagggaatggaatgaagctctctctctctctcttctctagcacactagctgctgactgccaaaagcagggtaggctccatatgc

SEQ ID NO: 36162 - DNA, 480 bp, Oryza sativa
  Clone ID: uC-osrocyp028b01a1
atgcacgcacacgtacgttaggatgctttctagtgggcggccgcgctttttgtttttgggggacgacgactacgacgacactgggtgtatgaacgccagccccagtagcaccactagcatagaccccggcaccagaattagcttatgcggcctaggcggcggtggcataagggcgagcgggaggatcaccatgctctccaaaacacacaccaaaaggcgcagggactccaccgggaagtacttggcctacacgccgccgtcggcggcgtttgtcgacggctcaatgatattgctgtcgtcgacgcctgcggaggtacctgacgactactggggcagatgatgcagagccaacctaccggagtctagctataacctttgtacctcatgtatgtaaatgtcactgatgccattcatgttgtctgatatgaaccaagaagtctacgcgggatattttgaatagggatactacaaactatgctg

SEQ ID NO: 36163 - DNA, 456 bp, Oryza sativa
  Clone ID: uC-osrocyp028b01b1
atctgtagctcgcagctgtatgatctggaatactccagccagctagctagctcggatcgatcgatcgggatgctgcctgggcgtgaagagatcgaggtgatgatcaggtgatccatcgatctatatgctgctgactagctgctgcatgcatgcctgccatcccgtctcttgaatcagcagataccgcatgcagagattgcaggaacagcttagatctgatccgaatatatatctggttcagtatcaagaaatcgagctacatatgaaaacttcatttctaagctccagcagctagcgtgatatgatagtgtgattgatatttgatacttccttgagagagacgcatacgatcgaatcggatgcactgcacctgagctaagctagctcaagctcgctcgatcagctcatgtacttgttgagcccaagaaatggcgactaggaggacgaacaggagga

SEQ ID NO: 36164 - DNA, 167 bp, Oryza sativa
  Clone ID: uC-osrocyp028b02a1
cgcttttggtgaggacggaccacaacgagccttacgtggagcttcaacagtatgctcctgctgacactgcgtgctatttgcctgggacaagatctagtttatctggcctccggtgcgagagtctagctgcaagaagcgattgaactcaaacatggcgatacttgcat

SEQ ID NO: 36165 - DNA, 368 bp, Oryza sativa
  Clone ID: uC-osrocyp028b02b1
tataggcccagaacgcgtcatacaaacatttgagagccagtcatgggtgcactccaatcgcttagcactttcagagtatgttaaagctcttgtcaaggcagataggctggatgatagcaccttgctcaaaacactacggagaggtatggtctgttcaagaggagaggcagacagacatgataggtcttctgaattaaagagtgctgctcaagcgacaatagatggaactcttgagactgcaaacgcacccattcacatggtgacatcagacacaggccagtgtgaggatcagatctggcggacctttcgaaggcttgcactagctatccttgcaattgcagtcattggggctctcatggaggatagag

SEQ ID NO: 36166 - DNA, 472 bp, Oryza sativa
  Clone ID: uC-osrocyp028b03a1
tttttgtttttttttttttagggtcaaattcaacttattcataaagcatactgctgtcccacaggaaactgtttcataaaactaacatatcatacgggctcgatggtccattaaaccagacacaagtagacatgagcaccacaaatacttgacgaacagaggctcgggatgaccaggcacatcgggaggttcaccaaactggctgattactgaccaccacggaggcggagcaccaggtggagggtggactccttctggatgttgtagtcggcgagggtgcgttcattctccagctgcttgccagcgaagatcagacgctgctgggctgggggaatcccctccttggcctggatcttggcctttacattatcaatggggtcggagctcttaaccttcaagtgatggtcttcccagtcaaggtcttcacgaagatctgcataccaccacggggacgaagcaccaggtggagggt

SEQ ID NO: 36167 - DNA, 434 bp, Oryza sativa
  Clone ID: uC-osrocyp028b04a1
tttttggtataccaagaaattatttattattaagatcattacatgctttattgttcacggacgtcgatcccagagtcacaaacatcgatgaaatgtactgcggcagcgacatagcatgcagttcaacacgactgtgtacgagtgagtggtcgtctacttggccgcggcgtcgagggtgaggaacgggcgctcgccgttgaagttgcccggggggtcgtagttgcaggtgatgaacacgccgcggttcgccgcgcacacgacgcgggcgcagccgatgcgcaccgacttgcgccacaccacctgggtgtagtggccgcacaccttgcccgggtcgcacgtgttggtgttcgaatggtagttcttcttttcgcccacccacgacgccaccgcgtcggcggtgctccaggcgcgccccgccgagccccagaagatgt

SEQ ID NO: 36168 - DNA, 346 bp, Oryza sativa
  Clone ID: uC-osrocyp028b05a1
tttttgtcaaaaaatgctatgccaagattgactttatcaagaacagccaggcggatctggccaattacctgttgaatcgaatgatcaattagctatagttcgtagtaagtagaagtggctgttacttaggagatcttggcgccgacggcatggaccgccgggtcggccctgcctggacgggaacgggctccttcttttccaccacggccgggggttcctcctggccgttgttccgcagccggggacggcagcgagggccccttcaggttgcatcggacgcgaaaggaggtgcggagaacgatggccggtacggcgacggcaagtgcggcgaggaggtcggggttgg

SEQ ID NO: 36169 - DNA, 245 bp, Oryza sativa
  Clone ID: uC-osrocyp028b05b1
cgtactccaaataaagaaagcgagccgtgcaaggtcaccttcgccgcggtggatccgagcggcagcagcccgaatatgggcgatatgagcgcggccggtgcggacacaggcgcgatccagcgggcgacctgcgcagcagcggacagggcgtgcacggtgtcgaggcgggcaggtgggaccctaaggcggccagcttcgcgcacagctacgcgggcaagcgcgccggatactgccggctgcagtac

SEQ ID NO: 36170 - DNA, 541 bp, Oryza sativa
  Clone ID: uC-osrocyp028b06a1
tttttgtttttaacaaaacacagaacacgatgtgatgtttaagctttcggtgcaatggaagtcgtctatgtatgaatctcacgtgatgaatcacatatacagcaaaatgtcaggcaggtcagctctgctcagtggtcaggtgaggtgctgccgcttgtatctgaaacaatgagaaactatctccacacctcaacaacactataccctaagctgactgagggaatccggaccaacgaggtatattcgtcttcgactactcttgtaccggaagactactactcctttataagctgttcttggaatgccatccttccattcttcaaatattccaaattgacgagctatccgctcaaagtcttcctgatcgttatactggatccttacatccgcatccatattgtgggctttcaacgcggcatcagatccatggagaggggtggcactagcgacgtctttcccaaattggatcaggaacttgtcctccttgaggtagctcaggtccctagaattccacttgatatgggcatcatttaacttgatt

SEQ ID NO: 36171 - DNA, 512 bp, Oryza sativa
  Clone ID: uC-osrocyp028b06b1
gatcaaatcgcgcacttcccctgttgaggagggaggcgatttcgcccgtctctccgcgtcggctccggcgccgacccactcccctcctccgccgccatccatctattcgcgccgcaccgcccgctcaactcttccttcgcgcaggcggcggcggtggcgcaggcggcgtcttcctccacctgatccacctccacttcctccggaccgcacaagaataagaagaagaagaagtgcaggtacggtgcaggtgcagatccaattgcgagctcacctgctctgccctgcccactaccaagtagtagcctcctcctcctcccctttctccccaacatcccatcccaaatcaaaggctactagactagtgttgggggagatccaagagatggcgcggagcccctgcgacctccgcatcctcctcgtcggcgccgctgcagccttcatctacattcaagtccgccttttttctactcagttccactacgccgaccggctggcacaagcagaaaaatccg

SEQ ID NO: 36172 - DNA, 513 bp, Oryza sativa
  Clone ID: uC-osrocyp028b07a1
ttgttgtacaaaagactcaactaagactgggtattcattttctttacagactaacaccactaagtgaaaacagttaagttaatctagctaatgagacctagacaatgttagcatagaggtagttccgatataagccatgctatccaaaagagtaagtgaaatacacctgagaccaagaggaaaaaaaaaggaataaagatggcataaagatgtatatataaagagtacaagagacaggcaatatttaatttatgtctggaacaattatatattcttgcacatatcattcatagccaacccacgagattctagctaaaacctttgtaccacaggtgaataaatttgacgcaggccatacacctccttagatatcaacagaaaagtataggccgtttattttccaaaaaggatacgacaaactatgcttgtaaggctaaaatgttgactaactaaaacaaaagattagagaagatatataaatcttagcatcaattatagaaaaaaaataccagt

SEQ ID NO: 36173 - DNA, 296 bp, Oryza sativa
  Clone ID: uC-osrocyp028b08a1
cgcttcttttgggggcggtccagtagggggcaaacaccgagtttcaacagaatgttcctgctgacgctacgggctatttgcctggaacatgatctagcatatgtggcctatggtgcgagacacgagacaaagatgggattgagctcaaacaagccgatacattgatgaggcattgtgaggatgagccataggaaagaagtaggcaataatagagggagttatgtagccttttggtaaagtacaagacacgggcgggtgctaatgtatttgtcataacagtaaaaatagttggacac

SEQ ID NO: 36174 - DNA, 528 bp, Oryza sativa
  Clone ID: uC-osrocyp028b08b1
aaaaagtagtctggtcttatggtattgtccagaaagttatattgagatggaggataaagggacgtggtttgcgtggctttcgacctgagaaacaattagaaggccagacacaaatgcagcctgcaaaaacagaggatgaatacgattacttgcaggatggcagaagacaggctgaaggcagactacagagggcactggaccgggtgcgctctatgacacaatacccagaagcaagagaacagttccgtaggcttacaacttgtgttgctgaaatgcaacagtccaggatgatgcacgacgagatgctaagtgaggcagctggtgctgacggaagtgatttcatgaatggactggaggacttgatatgcagagacgacccccaaatgactgccatttggtgaagtcgaagttgttacatcagttaggccgatcattgcccttgtcattgacatattagccttgtaaattctttccgtttgagttcactcactgattaatatctagctcatgctgttagtattatgtaac

SEQ ID NO: 36175 - DNA, 481 bp, Oryza sativa
  Clone ID: uC-osrocyp028b11b1
ttcgccgccgccgccgccgccgacgccgccgggtccgcttcgactcccgccgccaggttctctctctccagcgcgcaggcaccatggccgaagccgaggttaaggacaacgaggtttacgaggaggatctcgtcgactacgaggaggaggtggagaacggcaccgacggtggcgccaacgccgccaacgcctccgccgatgtcgtcaagaaggggtacgtggggatccacagctcggggttcagagacttcctgctcaagccggagctgcttcgcgccatccaggactgcgggtttgagcacccttccgaagtgcaacacgaatgcatcccacaagccattcttggaatggatgtcatctgccaagcaaaatctgggatggggaagactgctgtttttgttctctcaagtcttcagcacattgatcctgttgctggtaaggttggtgcacttgtgctatgtcacacaagggagctagctta

SEQ ID NO: 36176 - DNA, 117 bp, Oryza sativa
  Clone ID: uC-osrocyp028b12a1
tttttggcggtttaaaccaaagtttggtatctgaaagccatttttactggtgcatgttacgagttcaaagacaaaaatgtttgggggcaattaaataaggcaaggagggcccattac

SEQ ID NO: 36177 - DNA, 273 bp, Oryza sativa
  Clone ID: uC-osrocyp028c01a1
tttttgtgaaaaatcaaatgacaaatttttttagaaaagtacattattgattactaatagcacatacaacacatcaacacattgccacaatctctactgtcatttcacttgtcaaaatatttaacattaagactgttcgttcaatgattgtggttgtggctgctcaccttgccaagcccatacaatatcctttagtgctggtctcatctcttgtttgaccttttgatactcaagtgtatcaccatttatcttcgtaaattccactaaatgaaa

SEQ ID NO: 36178 - DNA, 196 bp, Oryza sativa
  Clone ID: uC-osrocyp028c02a1
gggggaccaactgaattattggtcagtcaaacactagagggagacatcgcacccccgtgtagtgtgcagaggaacacaatcagggacgacggaccactaacacgagttgcaaggtaagggggagtggtaatacgcccgattccaccctagtataagccaccctagaggggggtaggggtgacaggaggggtgacag

SEQ ID NO: 36179 - DNA, 539 bp, Oryza sativa
  Clone ID: uC-osrocyp028c03a1
tgcacgcacgcgtacgctaggatgcattctagtggccgccctttttttttttttgggacgacaactttaaatattgctcaataaaacactatctggagacaacacacacgagagtcatatccagaggaaaacaatcagcccagacggaccactagcaccaaatgcaaagcaatgggaagaactaattcgaccgctaccaccctagtaaaaaccagagaagagagaggaaggggggacaggaagcaaaacattctagtagaacaggagaagaatccatccatcatggagacagtagcatgaggcatctaaatcgatggtctccaataacatgcggagccatcgatcgatcgatcttcccattttactggccctcgccggcgtagcccttggaggcttctttcacctcatcaccaccgtactccgtgaggtcagaggtccagagggtcaagttgtccctcaggagctgcatgatcaaagtgctgtccttgtaagactcctccccgagggtatccaactcggagatggcttcgtaaacgcct

SEQ ID NO: 36180 - DNA, 515 bp, Oryza sativa
  Clone ID: uC-osrocyp028c04a1
tttttggttgtttttacagcaaagcaacatcgggagcccattggtatatatatatattttgccattgctccttgctgtaaacaaaaccgatcctcaaaaccattattggtgctcttttacttaatggacatgtcgaaactacaaacctactagccatcacctctattatatttatagccgttgatcatttacaatttcagcaagggaaggtgattcaaagtcattgtatttactcggaactggggtgttccgtctggactggcgctttgtcgccacgagaacctgctccgcctttggttcgtcggagatggagaacttcttgttgacctcgtcgcctttgaacaccgggtggatgtaggcattcatcaggtatcctttgaggtcgaaccctggctctcttgcgcgttctagggtatccttccgcattgcatcctgaatggatatttcacaaaagcaggctcatagcgattcttgcagtatttatagaaataaaaggttacaacagggagaacaag

SEQ ID NO: 36181 - DNA, 528 bp, Oryza sativa
  unsure (1)..(528): unsure at all n locations
  Clone ID: uC-osrocyp028c04b1
atatcttcaccaatcagcaaatgaaataccaaggacaattggtgaagcaattccaatgaaagcaaccttttttataacatacgtaatggttgatggttgggctggggtagctggtgaaattttaagattgaaaccattgataatcttccacttgaaaaactttttcttggtcaagactgagaaagacagagaagaagcaatggaccctggaagcattggttttgactcaaatgagcctcaaatacagctctatttcttgctcggacttgtctatgctgtggtgacaccatttttgcttcctttcatattaatattctttgggttagcatatgtggtataccgtcaccaggtaataaccctttggaacactttgtgatttttagcactttgtgattaatcatgaatctgtccatattctgttttggngtgccaagtgaaagtaattcttgaaaaaatcattttcacaaatatatgtctatcaatctgagtacttttttttgtactttgttcaaaaaatcatgaggcttg

SEQ ID NO: 36182 - DNA, 494 bp, Oryza sativa
  Clone ID: uC-osrocyp028c05a1
gccgccgggcgtgcggaggggcggtgcgacgtacgccagcgccccgcccccgccgcgcagcgcgcacgccgcgccgcccagcttcttcgactgcgccgccgccgccttgtgcgcgccgccggcgacgaggcgggcgaggccgaagccggagacgtgggcgcggagctcgtcgtcgagcaggatcttggatgacttgatgcacccgtgcacgtaccggcgtgggctgcactcgtgcaggtatgccagccccctcgccgcgccctgcacgatggacagcctcatcgaccacggcaatggcgtcggcgacgccgtcgggccaccgtggagagcggagtggagggagccattggagaggtagtcgtagatgagaagcttcttcgtcgggcgcgtagtagtaggcgcggaggcgcgcgacgttggggtggcgcgcgcggccgatggcggcgggcttggttttgaacgcgcggcgccggcgccacccggagtcggagccg

SEQ ID NO: 36183 - DNA, 545 bp, Oryza sativa
  Clone ID: uC-osrocyp028c06a1
ttagttgccgcggcccacgacgcggggcaggtccttggtggccttggcgaacacctccggcttcttcaggagctccgacagcgcccactccacggtcaccgccgagctctctgtgccgccagcgatgaggtcctgagtgaatgccttgacaccttccctcttgagcttgacctcaaggttgggattgtcagcgaactgcagcagcacgtccaccatgtccttggccacgaagctctccccctcgcggcggcggcgctcgttgtgctcgtccacgacgtgttccaggaaccggtcgaacatcttgccgagcttcttcatcctcttgatgtacccctgcaggtccagccagtcgagccacgggatggagtcgccgatgttgagcacgccgttgagcaggaacagctcgtcgagcatccacttgaactcctccggcgtcgtcaccgacccccccgcatccttgtccaggtacttcttgccccagaccatgcgcgtgatcacgttcaggctcaccgtcgacaggtagtccttgagcaccacgacgccga

SEQ ID NO: 36184 - DNA, 490 bp, Oryza sativa
  Clone ID: uC-osrocyp028c06b1
cggtccgaattccggggcgctagcctatattagaactgaatgcagcatccacgtactaccgaccggtaccgatggagctgatgctgccgcatgggcgtcttcgcggcgtagtgctcgcaccggctgttcctgaaagcggtgctcggcgagccgcgcgtgtacaacctcccgcggggccgaagccgggcggtcatcggaacctcaacctgggggcacgctccgaccgtccatccacaacctctcaagaagtacggcccctgatgtacctaggttcgggcgttcccgtcgtcgcggctcgtcggggagatggccaagttcttcctaagacccacgacgtggtgttcaccgaccggccaagaccgccgccggcaagcacaccacctacaactacagcgacattacgtggtcgccctacggcgcgtactggcgccaggcgcgcaagatgtgccttaccgagctcttcagcgccaagcggctggagtcgtacgag

SEQ ID NO: 36185 - DNA, 468 bp, Oryza sativa
  Clone ID: uC-osrocyp028c07a1
cgtacgcttggttgcatttttgttggcggcctttttttttttttgggggggagcatctaaaatattggatactcaagcactatatggagacaacgcacactagtgtagtgtgcagaggaacacattgatggaagacagaccgttatctgcgctttgcaaagtatttgaacattaggaatgacgcccgttatgcaccgtagtataaggccggttctcgtggggcgaggccgagtacaatggtaggggatgacatgaccagcataaaccgggagaatgaagttttggacatccaaggaggtatggacctatttacggaattgtggaccccctgtgggcccgaaaggtcctgggcggagaccttgcaattctttacaagcattgcatggacatgagggccttcaccggggtggtttgtgagcgggtccatcttttaacaagaccaccatttttctttcaagaattttaatg

SEQ ID NO: 36186 - DNA, 533 bp, Oryza sativa
  Clone ID: uC-osrocyp028c08a1
actggggggggaccaacccgactctggcgcccgcgcacctccaggatttacctggcttcacacgtagtgtttacaaaagggatcatgctttgattacaccagagagccatgtattcagccctttgcctgactggatcaacacattaggagcatatttaattagtccagctatcggggcacatttcacaatgtacctggcaaaaatgcatgatggatcaaaatcagccctaccaccaaaaggtgttgaaaggcttatctttgtactccaaggaagcattctattgtctgaggagagtgggaatacccatactctgctggtggactcttatgcctatcttcctgcaaacatgaaacactctgtgatctcagatgaagtaactacccttgtaatctttgagaggaggtacacaaccattgagggttaccatcctgatctcattgttggatcaactgataagcaaccccttcttgaaaccccaggagaggtatttgagttgaggaagctgctacccacttctttgccttatgacttt

SEQ ID NO: 36187 - DNA, 409 bp, Oryza sativa
  unsure (1)..(409): unsure at all n locations
  Clone ID: uC-osrocyp028c08b1
gaatcaggtacctggtttcattacagcgacgcattatttcgacatttcaaggggttagccaatacagatttccgaagagtcacagcatagcccagttctgtccagaaaatagtacagcaactttttttctgaattcatattgaccaataagaacaagtgggtagcttgaccattccatgtacagatctgagattcttgcgtcgattcatcattttgaagggttcatcagcgagaaagaagatttatttttttctgagatcatcttccacagggactcttcaagaccagcgtaatacctctccaatttgatctattaccatcggtcaggaaaagttgcattccttatatcagnggatccctattgacatctttatacagcaggtcccttgttttggttttttcaagggca

SEQ ID NO: 36188 - DNA, 345 bp, Oryza sativa
  Clone ID: uC-osrocyp028c09a1
ttggtgggcaaaagactcaactaagactgggtatttattttttttacagactaacaccactaagtgaaaacaggtaagttaatttagctaatgagacctagacaatgttagcatagaggtaggtccgagattagccatgctattcaaaagagggagggaaatacacctgggaccaagaggaaaaaaaaaggaataaagatggcataaagatgtatatgtaatgagtaccagagacaggcggaatttaatgtatgtttggcacacatatatattcttgggcatatgcattcattgccaacccaccagatttttgctgaaacctttgtgccacaggcgaataaattt

SEQ ID NO: 36189 - DNA, 366 bp, Oryza sativa
  Clone ID: uC-osrocyp028c09b1
tttatattacatacaaggaggtagcaatgggggagaaatatcatctcttgtacagtattatcgctgtacggaaagccatggatgacatgctgactttcttgttctactggattgacatcccactggacgacatggctactgaagatactattcctgtgtggggtctgccttatatgactacagccgttactaatatgaatgctatattacaaaccaggaacgcacatatcatgccaggctggagactattagagaatgcgatggccatgcaccgtatgcgtgtaacgatgagcggatgactagctactgggcctactgatgactgagtagctactgaaagagatacagagcaggtgaaggatgagc

SEQ ID NO: 36190 - DNA, 533 bp, Oryza sativa
  Clone ID: uC-osrocyp028c10a1
gggttggttttttattttttttttttttttttttttttttttttttttttttactctgtgattgtgatttgttttaatcgcgtcgacgacttatattatttttttggcgtagacgaggggttacgaagaaaaaaaacagagacacggaacgggggggggggaaaaagcaggataatagggggacaaaaatgcacccaccgcaaaaatggggatggggaactagaactccagtagaaagagagcaagccagtctagaacaagccggaaagggaaggggaggtctcaacggaccaaagaaaaaggtttcaataaaaaaaaatgtgggaaaaggagcaagggtttatttagaaattttacaaaaagcaacaaaaagaggggggggttgaaaaaacccgggggaaataaaaaaagtttaaaaaaggataaggggggggggggggaaaacccggaaaaaaatgaggcggcaaaaaaggttccagggggggggcccagaaaaacgaggccggaaccgtgggaaaaaaaaagtttctata

SEQ ID NO: 36191 - DNA, 205 bp, Oryza sativa
  Clone ID: uC-osrocyp028c11a1
ggtggggtttttattatttactttttttttcttttttctatgcattatttgcaatctgtactgttaatatgttatcattgaggagccaaaagaaacaggtttaaagtcagttgaatgggcgacccagtgacaaaacaaagacacaaagctcagaggaaggaggtctaaggacacaggactcgtgggcatccaggtggcaccaagg

SEQ ID NO: 36192 - DNA, 439 bp, Oryza sativa
  Clone ID: uC-osrocyp028c11b1
ttgctttgcttagcccttactgctgcaacctgtagttgtcagggtgcagttgcagtctatcttctccctctagtcccaaagcatgtacttgcacccctcaacgtcgaagttctcaaggctgctggtgagaggagcaccggttccctgcatggcgtggacttccttctacggtcaaacttcctcaatgacccagctgccacatatgctggagcagacgacattgcgaaatctgccgatgaggcagtggatgcaaagcttagatctttcatgctcgagcattggtcacaggcagctttttctgagggattcgcgtctgctcaagagcacttcgataactttcatgaggataatggcaaagggtgagtcgccgatctgcctgaaggacctcccacttgagccggtgattgccatggccttcctaccactggtcagggaatgc

SEQ ID NO: 36193 - DNA, 148 bp, Oryza sativa
  Clone ID: uC-osrocyp028d01a1
aaatggagctttttttttttcacaagtgtgatacacaggacacattaatcgtgttacagccgtgagtccagaacatatatttacataccaacacgaacaaaggcatgggtgctatgcactagacttaattgcaactgggaaaacctac

SEQ ID NO: 36194 - DNA, 279 bp, Oryza sativa
  Clone ID: uC-osrocyp028d02a1
tttttggtttgtttcattaatttgaaatgcacttttttcacaggaacgagataaagggctccttttttttctatcgcaacattctcatgggcacccaatattggcaacaccggcacaccatcatgatctatgggcaagaggctcgacaatatgcaaaacacgcaggccagatgattgtcgtgacaccacgttacccaataagttggtgtaggctggagaacgaaacccgcagtgagcatggtatattttgcggaatgacccagggcattcaaaatccgg

SEQ ID NO: 36195 - DNA, 75 bp, Oryza sativa
  Clone ID: uC-osrocyp028d02b1
atctttcgcactaccaacacggggttgggatgagatctttgctggttcttctgctgagaatagctacggacaggg

SEQ ID NO: 36196 - DNA, 303 bp, Oryza sativa
  Clone ID: uC-osrocyp028d03a1
aattgcacttttttctcttgatcgggataaagggcaccctttttttttctcgcaacatttacatatgcacccaatattggcaacacggtcacaccatcatgatccataggcaagaggtacgttcatgtgcaaaacacggaggccagatggtagaagtgacaccacgttccccaacgagttggtgtaggcctggtgtacgaaacccgcagcgagcatcggatttctggcggactgagctcgagcttcaacatccggtgattgaccccttgacgctgactattgtgtgacgccaacagatcccta

SEQ ID NO: 36197 - DNA, 495 bp, Oryza sativa
  Clone ID: uC-osrocyp028d04a1
cacgcacgcgtacgtttggttgcattttagttggcggccttcctttttttttgtttgtgtttttaaagtaacatggcatatctcattactaaacaataataacagtctatatttaaaacaaggcaacattaaggagccacaaaaaacaatttcaacacataaatccggaaacccctctctaaaagaagcttaaagcttgaggtgcaggtttaactagcaggactttgggctccactgttctcaggagcagtaggtgccggaacagcgcttgtcgcaggcgcagccccggttgcaggggcagaagcagattggtcctgggaggcagaggtagccgtcgctgtacagttgaataaggggcgggctgcacgtagcttccactgccataaggatcaccgtatgactgctgttgaccatagcctggggggcttggatcaggtgcaccagggtaggcgcaggtgcgccatatccttgctggttctgaggagtaaccatact

SEQ ID NO: 36198 - DNA, 469 bp, Oryza sativa
  Clone ID: uC-osrocyp028d05a1
tgtttgtgtatcaaaagtaacggggacataactctgtatttttcactttgaacacgatctatgtaaatcaagtttacatgatggagcctctgataccaattgcaccacttgaaactggaaagcccgtgtcttaataacaatccatgatggaggattaaaaatcccttagacacatgtctaaacacccctgatactaggaccagtaggggtccaaccaattgccaagcgtatagctggtctactctttgagtgccaccttggatacaggtgctgcctacgggattcttgatgtatctccaagcctaaaggtatttggggtggacgaggtgacaatggcataaggatcaccatatgagtgttgctaaccatcggctgggtgacttgcacctacttcttgattgccttgtgaaagagctgcattgcgttgtttttgatgagagggaccatgcgggtcggacccaccaagttc

SEQ ID NO: 36199 - DNA, 538 bp, Oryza sativa
  Clone ID: uC-osrocyp028d06a1
tttttggggggaatcaaatgacaaatttttttagaaaagtacattattgattactaatagcacatacaacacatcaacacattgccacaatctctactggcatttcacttgtcaaaatatttaacattaagactgttcgttcaatgattgtgggtgtggctgctcaccttgccaagcccatacaatatcctttagtgctgggctcatctcttgtttgaccttttgatactcaagtgtatcaccatttatcttcgtaaattccactaaatgaaaatctggtgtgatctgaaatatttcagcattgatggacattacacctttccttcctggttttgatccttccatctttaacaaaccaccatttttcttcaagaattttaatcgtaaattctttcgcacatcctcaagcttttttggtgattgtcgtagctgtgttaagtggatgtaaattttgattccttttttgtgttttcattttaaacattgcagaaagatcaaattctgatgaaagagaaataatatcaaaagcttttaagct

SEQ ID NO: 36200 - DNA, 488 bp, Oryza sativa
  Clone ID: uC-osrocyp028d07a1
ttgtggttttttttttttttttttttttttttttttgaccgagtaagccatgagccctagaacaatatgatacagggatacaagatcacagcatcaaaatacaggacatcacagagaacatggaagggcatacataatttagatagctgggccaaaccacatactttatgttctcacgacagcacattaacaaaacagagaaactagtctcaaaatcccacagataacttcttatggagatgttcaggtaaaaacagattgataaatccttgagataagatccggtaacgctgctactcaaaacttaaaacaagacaacgctcactggggcactccgagccactttgagaagttgtcgaactcagcatagtcactgtctgagatcatggttttggaccatgcctttcctgcagccttaaccttagcagcctcctccgggctaagcttggtcctcttggagtaaagcttttcctttctggccttgatgc

SEQ ID NO: 36201 - DNA, 379 bp, Oryza sativa
  Clone ID: uC-osrocyp028d07b1
tataaccctagccgccgccgccgccgccggcgtcgccttcatggccacccaaacccgcccccttgtctccgtcaaggccctggagggcgacatggccaccgacaacagcagcagcctcgccctcgccgaggtgttccgcgcgccgctccgtcccgacgtggtccgcttcgtccacaggctgctctcctgcaacaagcgccagccctacgccgtgtcccgccgcgccggccaccagacctcggcggagtcgtggggcacggggcgcgccgtgtcgcgtatcccccgcgtccccggcggcgggacgcaccgcgccgggcagggagcctttggcaacatgtgccgtggcgggcgcatgttcgcgccgacccagacatggcgc

SEQ ID NO: 36202 - DNA, 259 bp, Oryza sativa
  Clone ID: uC-osrocyp028d08a1
tgtttgtacaacttgtaagcttttcttgacccggaaggccaaaagaggacacggtgaaattttccactgagcggtaattttacagcagagaggggatgaacacagaacgccaattgaatttaaccatgtcatcatttttttttaccctaatactaaaagaacaaaacgaactggatcaattcagctaatccccctacctaatctatggctagctaaattactcatctggagttagcgagatcgatggcgatgaggagga

SEQ ID NO: 36203 - DNA, 298 bp, Oryza sativa
  Clone ID: uC-osrocyp028d09a1
ttgttgttcctgatcaattattaaaagaattacacttccacacacacacatgttacatgtttgatgatatatgtaaagctaaagaggcccacccccacaacaacacactctcagtttggtggtccatcctatcagtcacactaccttccccatcctctgatcgtgagctccacacaaatgtgagctcaccaccaaagcttagccaaagccagctgctcgatcgatccactaataattctttctgcagcttgcattggttggcttttttgtctgggtgatccaccaaattaaaggagag

SEQ ID NO: 36204 - DNA, 534 bp, Oryza sativa
  Clone ID: uC-osrocyp028d10a1
tttttgtgtatcaaaagtaacataacataacgcaatactaaacaataataacagtctatatttaaaacaagtcaacattaaggagccacaaaaaacaatttcaacacataaatccggaaacccctctctaaaagaagcttaaagcttgaggtgcaggtttaactagcaggactttgggctccactgttctcaggagcagtaggtgccggaacagcggttgtcgcaggcgcagccccggctgcaggggcagaagcagattggtcctgggaggcagcggcagttgtagcttcagtagaataagcggcgggctgcacgtagcttccactgccataaggatcaccgtatgactgctgctgaccatagcctgggtggcttgcagcaggtgcaccagggtaaggcggaggtgcgccatagccttgctggttctgagagtaaccatactggccatacccaccaggagcagatccaggaggcggcgcctgtccgtagggagaagtgttaggaggagccttctgtccctgagaggtgcgccat

SEQ ID NO: 36205 - DNA, 506 bp, Oryza sativa
  Clone ID: uC-osrocyp028d10b1
ttccaagtgacaagagaccttgatgctctacctggctcacagacaagacctgttgaactttcaggcactcctgatcagataagcagagctgagcaattgatcaatgaggtcctggcagaggctgatgctgcttcatctggtaatctctctagccgaaagtacaatgctcctcaaccaggtgctgatcaattccaaatgaaaatagctaacaataaggttggtctggttattggaaagggtggtgagactataaaatccatgcaagccaaatctggtgctcgtatacaggttgtccctttgcatttaccccctggtgatcctgcaaccgaaagaacagtgtatattgatggtacacaagagcaaattgaaactgcaaagcaattggtgattgaggttaccagtgagaatcgtgctagaaacccaatgtcaggtggctattctcagcagggctaatcgcctcctcggcttagtaaaatggggttcgcatggggggcaccgatgcaaca

SEQ ID NO: 36206 - DNA, 474 bp, Oryza sativa
  Clone ID: uC-osrocyp028d11a1
tttttgtttttttttttttttttttttttttttttttggccgcatcacatgtaaataatcggtccaaaacacaatcgatgttgatcaaagagaccgtcgcaaagttgtagtactgaagaaagggtacacaacagtcacagttttttaaaacagtagttttttggaaactcagacacggtgtaagggaggagataagatgtattttgggcctagatgtccatgggcgcggggtccgtgcccttggcctcctcctgcatcgagctcgactcagcctttgccgctggggcctcctcggcagcctccatggaatcgattattttttggatccttttcacgtcgatcatttaaaatggctcaacggggccatcgtcctttctgccaacaatagcaacggtgcatttggagctggttagcttctcaccttgcagcgtctcctttatgggggaaagggcatctttgataagttgctttggg

SEQ ID NO: 36207 - DNA, 407 bp, Oryza sativa
  Clone ID: uC-osrocyp028d11b1
tatgccttcgggtacgacgcgcccctccccgtttccagtctcgtgctccgccttgccgacaaggcgcaggtttgcacacagcgatcatggtagaggccatatggtgttggcctacttgttgctggattagatgagtctggagcccatctatactataactgccccagcggcaactattttgaggaccaggcatttgctattggctctggctctcaagccgccaagactttacttgagcgcagattcgagggctacaacgactacaccccagagcaacttatcaaagatgccctttgcgccataaaggagacgctgcaaggtgagaagctaaccagcttcaactgcaccggtgctattgttggcagaaaggacgatggcaccgttgagccatttgagatgatcgacgt

SEQ ID NO: 36208 - DNA, 237 bp, Oryza sativa
  Clone ID: uC-osrocyp028e01b1
ggcagccgcgggtggtgttagaggagctatcgcctctctcgctgacgggcgcacctggacacggcgatagagacagaggtgggagatcggagatgaggaagctggacccctcgccgatcctgccgacggagacggcgctagctgatacgccggagatggcatgccatggcgctggcgctggccctacggggttgctgggaggaggtgaacggattgactgagtggcaggacgaagcc

SEQ ID NO: 36209 - DNA, 335 bp, Oryza sativa
  Clone ID: uC-osrocyp028e02a1
ttagctgggcggcctttctttttttttgtttgtttttttttttattaacataccgtttgcaaaataattagggccgggggtaattaactcccaacggtacgttgtggtgggccaaccaaaaatgaacatcatctgacaactattggtggctcaagaaatataaaggccacaaaaatgggtaaggagaggacaaaaaaaccgtttccacatccatgagagcatgacatagatgacccatcaaaactacttgaagctcagctcaaatatcacaattttccggtttgaaacaagcttttggaatgcttgtgacgacaacaaccagcccttctaacgaa

SEQ ID NO: 36210 - DNA, 439 bp, Oryza sativa
  Clone ID: uC-osrocyp028e02b1
gcggtactcctaccaactcttctcgtcgtggcggtggctttgtccggtcaccggccgctgcatctccctttgtgtcttagttagtttaatcccatttacaaatcttacgtggtgaactgatcaattattagttgagctgagctgagcttataagtagcagctgctctgatctgctcagctcgcttcatcaccttccactcaggcaatcgcagcgagaagccaagaagcactcaaccacgcgctgttcgtcatggcgagggtacagctctgggtggccgtcgcgtgcgccgtcgtgctcgcgctcgccgcgccctcgctcgccggggaccccgacatgctccaggacgtctgcgtcgccgacttggcgtccccggtgaagctgaacgggtttccgtgcaaggcgaacgtgacggcggacgacttcttcttttgcggggct

SEQ ID NO: 36211 - DNA, 84 bp, Oryza sativa
  Clone ID: uC-osrocyp028e03a1
ttagtgggcggccttcctttttttttggtggtttttttaaaataaatcgttcctttttctgaggaacggggttatgtgcgcttc

SEQ ID NO: 36212 - DNA, 501 bp, Oryza sativa
  Clone ID: uC-osrocyp028e04a1
tgggtgttttacaaacaataggtgaatttattagcaagtcaaaatttcttgaaagaataccatcgactcacttgggtctacaagcctagagttatacttgttgcaacacagacaacactacagataccatacatgcattttacctgtctcactcgcattttaggacgattttataacgctcacatactggctgctaccaatgcatgacacggacacaagaacactctgtctttaacatgtgcgaggagaatcggtatatgaaagctggtctatatctatcttctctagctcactagctgctgactgccatagacagggtaggctccatatgcaccagcatacatgttagggtgcgggacgggggaggcataaccgtatccaccgtaaaatggcgacccatagtacatattggttcttcggatgccagaatcagccgtagactgattatgtgatgggctgcgcccccatgaaaggagaactgccagctttccattgactgat

SEQ ID NO: 36213 - DNA, 329 bp, Oryza sativa
  Clone ID: uC-osrocyp028e04b1
gtgtgcgcctgactcctctcgataaccattggtttttttgtggcgtgtttgcacaggctctctttcactcagggacaatagtaagatcggaatcaatgggttcggtcgcatcgctaggctggtggccagggcggcgcatgcaagcgaggatgacgagctcgggggcgttaacgatcccttgatgaccaccgaggacatgacatacatgttgaaggatgacaccgttcacggccagcggaagcattcatgaggtcaagggtaagggcttgaatacacctatttttggcacgaaagaggttgtggggtctggctgcaggaaccctgaggag

SEQ ID NO: 36214 - DNA, 459 bp, Oryza sativa
  Clone ID: uC-osrocyp028e06a1
tttttgggggttaatttggaaattccatattttcattagagaaaaacttggattcagcaaaagcttcactgagactggcgccgaccatgcacagttacaacttcaacaatggattaatttcaacaaaaataacgcattgagttcggtaaaaaaagacactggttacttactacgggtagggaaaaattttttcacatacatgtcatttttattgcgacatttttactagagcgctagcgacggcagctcgtagtcttcgaaggggcagagcccggctggcgccgcggcttcctcggtgcctgcggcggaggcggccccgccctccatgtaggggatgccgaggaagctcatgtagttctcgaacccgagcagtttcttggacagctccttgaccttgttggaggagcaggcgccggcgcccttggacaccgacttcatcttgggcggtgggagcacggc

SEQ ID NO: 36215 - DNA, 491 bp, Oryza sativa
  Clone ID: uC-osrocyp028e07a1
gcccgcaggtgaccttcagcacgaacacgccgaacgcgaacacgtcggtgaccggcgtcgccttgcccgtgcgcaccagctccggggcgaggtaacccatggtgccgacgacgtgcgtcgtctgcgggtcaacgccgtggtcgtacagcctcgcgaggccgaagtcgcccagcctgccgttcatctcgccgtcgaggagcacgttgctcgccttgatgtcccggtggatgacgacctgctcccagtcctcgtggaggtagagcaggccggaggcgacgcccttgatgatctgaaacctctgcccccaatcaagaacaggcttggtcttgtcgtacaagtacttgtcgaggctgccgttggacatgtagtcgtacaccagcaggagctcgcccttgcgccggcaggtgccgagcagctgcacgaggttgcggtgccggaggtggccgatgctgacgacctccgcgatgaacttcttcatcccttgcttcgag

SEQ ID NO: 36216 - DNA, 465 bp, Oryza sativa
  unsure (1)..(465): unsure at all n locations
  Clone ID: uC-osrocyp028e07b1
gtgttcgacaccatgctcaacccggagttccaggacatgaacagcaaccacatcggcgtcgacatcaacagcatgaagtccgtgcagaaccacagcgccggctactacgacgaagccacgggggccttcaacaatctgagcttgatcagccgccagccgatgcaggtgtgggtggactacgacggcgccaccacggtgctcaacgtgacgatggcgccgctcgacgttcccaagcccagtaagcccctcatctccgcgcccgtcaacctctcgtccgtcgtgaccgacacggtgtacgtcgggttctcggcggccacgggcgtcatctacacgcggcactacgttctcggctggagcttctcccagaacggcgccgctccttttctccacacctcaagcctnccggcgctgccgcggttcgggccgaagccccgttccaaggtgctggagatcgtgctcccgatc

SEQ ID NO: 36217 - DNA, 549 bp, Oryza sativa
  Clone ID: uC-osrocyp028e08a1
tttttgttttttttagtataataatactggtagtataataattctggccggcgacgagcaaattaaagtcatacaatgtcgtggttcatcggtgaatgcgccaccgggacaacggtggcgccggtgagctcgtcgagggcgtcctcctccgtcgcggcgggtggcctcgccttggggtcgtacctcttgctcgccgggttcgccgccgggtcgtaccttttgacgaccagcaccgacgccgacgtcctgaactccggcgacgccaggtagctccccacggggcccagctcgtcgggcttctccaccagcggcgccgtcggcggcatcctccccaccacgaacacgctgaacatggacagcgagttgatcgccttcatcacctccgccttgctctgcgccggccgttcgttgaaccgcaccgacccgtccttcaccatgcccaccttcgacttgaacgcctccaccgtcgtccttgttggggggtcctcctcgcgggctgcgcgcgactcggcctgaaccggttcagcgttacggtgacaccagggtgct

SEQ ID NO: 36218 - DNA, 414 bp, Oryza sativa
  Clone ID: uC-osrocyp028e09a1
ttgttggttttttgaaaaaaaatctttgtttctcctgtgtgttgttgatttctgtgtgtataagaatgttcaattacagtgtcaaaaaaaattccctgtgtcctaaaactaccatgcctgtatgttttatccacacatctaactctcaaaaagaaaaatctacaaaaatcaactttgatcagaaattcagaatggcctcttgagacccttgaaatccactgtctcgatgcattcgacgctgcctcgcgacccgttgagcatcttgagcagctcgctggcgcgctccttggtgacgccggcgcagcccacctggagcagcagcagcagcttttggaacgcgccgactcggagcgcctcggcgcggcacggtgcggcgccggcgccggcgcggcataggcgccagagcgcggacac

SEQ ID NO: 36219 - DNA, 544 bp, Oryza sativa
  Clone ID: uC-osrocyp028e10a1
ttttggtttcacaaacaatagtttaatttattagcaagtcaaaatttcttgaaagaataccatcgactcacttgtgtctacaagccttgagttatacttcttgcaacacagacaacactacagataccatacattcattttacctgtttcactcgcttttaggacgttctataacctcacatctggcgctaccatgctgaccggaccaaaaccttgttttccattggagggaatggaatgaagctctctctctctctcttctctagctcactagctgctgactgccatagacagggtaggctccatatgcagcagcatacatgttagggtgcgggacgggggaggcataaccgtatccaccgtagaatggcgtcccatagtacatattgtttcttcggctgccagaatcagccctagactgtttatgtgatgggctgcggccccatgaaaggcgaactgcctgctttccaatgactgatccattcaatccttgcagtgcttcttccgcatcaattctgctgacgaattgaacaaagccacattg

SEQ ID NO: 36220 - DNA, 498 bp, Oryza sativa
  Clone ID: uC-osrocyp028e11a1
tggggggtgagctgacaaaccatttatgccgtatggataatacaagcctggggaaaaacatgggccactctgtgatcacaagctgcacagggcaacagcagcaacagcaaatatacaacttgttttaaaatcttttttacaattaggttctcggatgcgcacagctcagcaaacatcacacgaagaacggcagctagattaatccagcacacaaaaggcactgaaagaaacagagcagcagcagatcgatcaagatcgaaggtttgcacaggctggctgcaggaagctagaagaaggatcgcttggtaggcaccctcccaacagccttcatgaagttggcgagctcgagcaccttggcgagcttgaggcctctcttcgactacgtcgacgccctcttctcctccgccttgcgccgcgccttcgggatgtcgttctgcgtcctctccagcgccttggcgcgctgctcgtccagctttttttcgatcttttgagccatgc

SEQ ID NO: 36221 - DNA, 393 bp, Oryza sativa
  Clone ID: uC-osrocyp028e11b1
tacaagcctactactggaaggttcaaggtgagtggctgtggataagatagtacctagagaaatagatgcacatgacggtgaggtggtgccgaaagaggatgacgcacgggatgaggatgatgaccacgatgatgacattgaagttctaatggccgagatcgacagaatcaataaagatggaggtgacgacaaccttgtaacggaacgccccccagaacgagaggtggactctatgacggaagctgaactgatgcggggaaaccccctgatcaagatgaacaacgccggatccttcaatggggagagaaggagggatgaatgatgcgtgttcaacaaccaggctcgttgggagaccaagacaccgtaacggtcatgaacgacactatgacaagt

SEQ ID NO: 36222 - DNA, 214 bp, Oryza sativa
  Clone ID: uC-osrocyp028e12a1
ttgttgtttttttatttttttttgttttttttttttttttttttttttttttttttttttttttttttttttttttatttttttaataaaataaaatataaaaaattaaaaaataataaaaaaaaaaaaaaaaaaaataaaaaaaaaaaaaaaaataaaacctaagaaaaaaataaaaaaaacctaaaacaaaaacaataatttaaaagggtca

SEQ ID NO: 36223 - DNA, 449 bp, Oryza sativa
  Clone ID: uC-osrocyp028e12b1
tagatgctgatgcatcaaggtcaggtgctcagaatgtttgagccacctctctgcacaattctacttccaatcagtggtccgaagaggatactatgaggaatgtttctgttaggaggccaaaccagaacatatcatgtcaagcacaatctgaaggaaaccataagggtcagaggaacggatttaaggacagtggtcagagaacatcagatgatgtccttgtttcaagtcaaggtgttcaaaaaatacagccgtaaaacatattccgagagaatgttgattgtagacctcttaaacagaacaatctgaagcagaatgcattgtctgaaacttatagagcagcagatacagggcatatggtccaaaggcagaaacaaagagcttaggagcataatgtggcaaacacagccaatgactttgtctgttaaacagaggtatgaacaacagtgcat

SEQ ID NO: 36224 - DNA, 189 bp, Oryza sativa
  Clone ID: uC-osrocyp028f01a1
gtacaaaacaggataagggacattgtaactgacactaccgtgggcagatgttttaagacatctcaggcacatgtcctttgataagagcgcgttactcttagctttgtttataagaataaacaaaaagaaatccataaaaatgcccctatacggtatgatttatacatactatatgtcggatatgatgca

SEQ ID NO: 36225 - DNA, 326 bp, Oryza sativa
  Clone ID: uC-osrocyp028f01b1
caatgccgggcgcggtggtactgccggcatcagcggttgccgtcgccgttgtgctgttacaggccactgctacttgaagcacaccaacgggcacgcggacaactgggccttctacaccgtccgcctcagcctccacctaggcctcctcgctggggagagaggaggatgcataattgctgatttaacaaggatagggaaacggttccctgacagcatgttaaagaccatacccatgtggtgttgtgactcttaaccgggcaattgagaggtatcggcggtacactaacaacaagccatctgatgcaaccaacaaagacgctgaaaag

SEQ ID NO: 36226 - DNA, 515 bp, Oryza sativa
  Clone ID: uC-osrocyp028f02a1
tttttgtttggtttttttttttttttttttttttttttaaaaccaaacaaaccctagcaaaatataatctaaaagggataatggtttacatgtccggacaaacagccacttaacacacttctggcgaaactaaaaaccaggcgggttcaagaatgtgatgtgacggctttgcacaagctttcactcaggctatacaagttgcaaaactggtgcacaccttcctaaaggatgccaacactacataattgttgcctggtgaaaaacgcatactttagaagctttaatccctgctccagacttagagatatgaaatccgggaccagctgggaaataatgtaacacaggccccctgggaacctttaggttatgggaccaccggaacaatttagttccccgaacgggggccacaatttaccaccgttgggcaaatattgttttatatggattgggcagcaacaccgccttgggcaaagtcaaaggttgcaccttggggagcagctaccgggggggctccc

SEQ ID NO: 36227 - DNA, 415 bp, Oryza sativa
  Clone ID: uC-osrocyp028f03a1
gttggctgcaaaccaatatctgactttgtcaaaattttgtcagtaccccgatttagcatacaaatgttttggtaaggttttacattgatcgtaaaccaaaccagaccttactttgtcaaacgtaaaaacaaaagctagaacctaacccttcattttaatcattactcctttttcttgattctgagcagcacttagcagttgaagagagaaggccaaattttaactatgaatctaacacaaatcattcacatataacttcagggaggcacaccctcttcacagcaaatgtattgcgggtaaatgcgtactctttttggctacatgaatcaacttagggcatttttccttcaaaagaaggaaaattgctcgctagggcttttaggacattctgatatttacaagagctggttgatga

SEQ ID NO: 36228 - DNA, 457 bp, Oryza sativa
  Clone ID: uC-osrocyp028f04a1
tcgttgctctgcacctggtacatctgctcgtggatgccgccctcgccggcgttgcagaagacgtacttgccgcggacgtccttgcggctgaggctgccggactcgcaccgctccttggtccggctgccgtggccgtagtagagcgcggcggcgccggccggcacgcgccccgggtacaccgacctgccgacgatgctcctcgcgccgccggcgccggcgccgagcgtcacggtggcggtgaacgccctgtcgatggtcgacgcgccgacggtggtgatccacggcgcgccgttgaggacggagtagctgtcggagccggcgttgccggcggagcacgtgacgaggatgcccctacgcacggcggcgaaggcgccgaaggggactacgatggtgtagaagggggactccggtaagaccagcgagagcgacatgactttgacgccgtctgcgatggcct

SEQ ID NO: 36229 - DNA, 413 bp, Oryza sativa
  Clone ID: uC-osrocyp028f05a1
tcgttgctttgtacgtggtacatatgctcgtggatgccgtcctcgccggcgttgcagaagacgtacttgccgcggacgtccttgcggctgaggctgccggactcgcaccgctccttggtccggttgccgcggccgtagtagagcgcggtggcgccggtcggaacgcgccccgggtacaccgacctgccgacgatgctcctcgcgccgccggagccggcgccgagcgttacggtggcggagaacgccctgtcgatggtcgacgcgccgacgggggtagatccacggggcgccgatgaggacggagtagctgtcggagccgtcgttgccgtcggagcacgtcacgaggatggccctccgcacggcggcgaaggcgccgatggcgacaacgatggtgccgtagggggactccggga

SEQ ID NO: 36230 - DNA, 120 bp, Oryza sativa
  Clone ID: uC-osrocyp028f06a1
ggatgcacgccaccgtcagcttggatgcctctcttgttggccgcccttctttttttttggggggttatcatgagctcccaattttcaaccaatcaaacccatttcagcctcaattcaagg

SEQ ID NO: 36231 - DNA, 194 bp, Oryza sativa
  Clone ID: uC-osrocyp028f06b1
gccgcacaccccgacggggacctgccacgggacgggacggagcccgacgccgccgcgacgaggcctcccggtcggcgcccccgccccagcccaagccggccgggggagcacgccggagcgaacggcgccccggagagcgagaaggaagcggacgacctgagcaggaagaacgaaaaatgggcgcgggccgaaag

SEQ ID NO: 36232 - DNA, 488 bp, Oryza sativa
  Clone ID: uC-osrocyp028f07a1
tgttggttttctggaaggccatatacttcaactcaaatacccgcgggatcattttctattctatttccttatctgaaatggggcattgcaacccacgacaagcatggggtgaaagcattccagcaaaatgcaagcacgctgttacttggattcactgcacaaagcatgcccgaatgctgtgagaaatgtactatagcttatccttgacaatgtcaccagtggctactggttcgacatccgcaatttggagcttctccttgacgaattttgccatggccttcagatatgatttctttgaaagatttatcgggttgcttttgtcttgcgcaggatatagcaacagtgtaggggacatgtttatctgcactttgggatgttcattcacagaagcatctatgcctgcaaatttaacattagtgtggcccaaatcattgaaatgtttggccaacttctccacgttcttacttatggcctgacagtaaacacaa

SEQ ID NO: 36233 - DNA, 365 bp, Oryza sativa
  Clone ID: uC-osrocyp028f07b1
gtattccactactcctacacctgctcctcggggcttcatatcgagcggagctcgtagtgtgctagatctaggaggaggcgggcatgagggcgcggtgggttgccgcggcggaggcagtgctgctgttgaccgccgcagtggcggcggcccgggtcgacctggacgacgacgggcaccactcggaggtgctggacgagctgctcgccgaggacgaggaggaggagagaggggagctcggtggaggaggggaggccgcccgaaaacctttcgtccgtggagaccgacatggtgtacgtagggctcttggtcgccacgggcgctatcaacacgcgggactaccgtccttggcaggagcttctctccac

SEQ ID NO: 36234 - DNA, 492 bp, Oryza sativa
  Clone ID: uC-osrocyp028f09a1
tgtttgttgacataacaaactgccacagaaaatgcgggactggacaccacactacacataagcatcccacaatggcgaggaagcgcaatatttacaattttgttccttcccgttacgccttggagggttcacggagtgaaggaaatacaaggaattttttcagtacttgaaaacgaaaagatcccgataaacggagcaggaaggacctagaaaatgctaccatagactttacttattaatctggcttcaatccaggcccttgcaaagctatctacatgaagccattcagatgattatttacaggtgatcatgtagtgtccagctactcgggtgcgaacgcttatcaggttggggagcaccgtcgcctgcagcttcttcacctcacttgtcgggaccctgcaagatcaagcgacagcgagcgcaggttctgcagatccttcagggggcagaggccggccttggatacacaagtgttggagacgttcagcgaga

SEQ ID NO: 36235 - DNA, 432 bp, Oryza sativa
  Clone ID: uC-osrocyp028f10a1
gttgctctgcacctggtacatcatgctcgtggatgccgccctcgccggcgttgcagaagacgtacttgccgcggacgtccttgcggctgaggctgccggactcgcaccgctccttggtccggttgccgtggccgtagtagagcgcggcggcgccggccggcacgcgccccgggtacaccgacctgccgacgatgctcctcgcgccgccggcgccggcgccgagcgtcacggtggcggtgaacgccctgtcgatggtcgacgcgccgacggtggtgatccacggcgcgccgatgaggacggaggagctgtcggagccgtcgttgccggcggagcacgtgacgaggatgcccctccgcacggcggcgaaggcgccgatggggacgacgatggtgccgtagggggactccggtgagcccagcgagagtgacatga

SEQ ID NO: 36236 - DNA, 546 bp, Oryza sativa
  Clone ID: uC-osrocyp028f11a1
tttttgttgtgcaaacaaaccatttatgccgtttggataatacaagccaggggaaaaacaagggccactctgtgatcacaagcagcagagggcaacagcagcaacagcaaatatacaacttgttttaaaatcttttttacaattaggttctcggatgcgcacagctaagcaaacatcacacgaagaacggcagctagattaatccagcacacaaaaggcactgaaagaaacagagcagcagcagatcgatcaagatcgaaggtttgcagaggctggctgcaggaagctagaagaaggatcgcttggtaggcaccctcccaacagccttcatgaagttggcgagctcgagcaccttggcgagcttgaggcctctcttcgcctccgccgacgccctcttctcctccgccttgcgccgcgccttcgcgatgtcgttctgcgtcctctccagcgccttggcgcgctgctcgtccagctttctctcgatcttcttgagccatgcggatgctttctcgacctgctcggtctcccaccccgtgatgacaacct

SEQ ID NO: 36237 - DNA, 465 bp, Oryza sativa
  Clone ID: uC-osrocyp028f11b1
ttctagttcaccacgaaaacatggaattatacaagaagatcagtttaattcgccacgaaaatgctgagctatataagaggagctacaagactgaaggaccaagtgaagccaatcgggattcaccaactccgtacaacttcgcagtaattgaaaaaacaaatgctcctgcgcaacttggactcagcacactaccacagcatagtgacgcccaacaatcaactgctcctaagctagggctacagctgaatccatgaccagaacaacattgctttgctacacccttgtatgctgaagggatactatctgctgtcaagagttgatactcagatcaagaaaaaaagaacttttcatgccatagcgattgagaaatggacttgtatactggaaataaatgccacagtgaattgagctgcggaatccacgccatgagtgccttatgattcaatttttgcatgtatttttcat

SEQ ID NO: 36238 - DNA, 350 bp, Oryza sativa
  Clone ID: uC-osrocyp028f12a1
ttggtggttttattgaacattgtggtttacttcactatttatcattacgacaaaggtgtccataatcctgattgggtatcacaacataaagaaaatctaatacgcaacttaaacagtactatatagacaatccacacgatcttacggttccaataaacactaacggatcataacccccaaaattagccaaaatattccaagaacaaaaaaagcacaaactatgaacaagagagggtaacataacaaatccttaaataattaaaaacgagcgtgacacatgttccagaagcaatatattacctgtgccaaaaaaaataactacgaccataattagttgagagcgcaagcaa

SEQ ID NO: 36239 - DNA, 358 bp, Oryza sativa
  Clone ID: uC-osrocyp028f12b1
tgacgcgtccggacaagagcggccggttctttgtgttttacacatgtgacaggacgcagcccgcctcctgctccggtcggtgcggcatgctctgcgacgtgtgctgcgaccctggcaagctcaccgcctacaatggcgcgcacacgtgccaggaccagaccgtgatcagcgagtacaccgtcaacgcctccttcggctcgccggcgacggcgaccgtggctaacccggcggaggtcaagaggatcatgacgatggggctgccgattagaacgcaccacggagggctgatcctctgtagaatgggcgaccgcttaccttacttgaaaatgggcgaccagcggagccacggcaacccgtg

SEQ ID NO: 36240 - DNA, 404 bp, Oryza sativa
  Clone ID: uC-osrocyp028g01a1
ccaggcaactttcaatttatatattatgcccatctttggtcaagaccaggataaactaaaacaaatgggaaccttaggatgggcacaagttacaatgcacagggggaagggcacacagataaatttcagggggataaatttacaagaacaacccgaagaaaaagtaaccgccaaaagcaggagttaaaaggctttaccttatgaagcaaaagttcaaaaccatttgcttatgaccagccaaagactaactcccggttgtacaccacaaccagcgaaagggggtaaagcatgtaccccaccagacaggtccagagggggaatgtggttctgaagcttgtgaagagtcccatgatgacacatacgagcagtgtgatgcgcccctccgatgagaagtcccatggcag

SEQ ID NO: 36241 - DNA, 377 bp, Oryza sativa
  Clone ID: uC-osrocyp028g02a1
tttttgttggattagaagccaaccgtgagagcttgttcaaaacttcagttttctacaatgttgactaccctaattaaaagttgagactccataaaaactcggctacaccgagaaaactgttattacaacagatactgcgtacccaattaacgcaatgggcacccatacgggtacagtatggttaatttaacgacctgatagacgatgcttttaaggagctgccgcagggggagacaaatactgtatacagcgaggtaagacaataaagaaagaacattggaaatcctcttcatcggcatcccaaggctgtaacagatcataatcactcgaggtaccctgcatcgcaaatttgtacccgggttgcgatcgggctgctc

SEQ ID NO: 36242 - DNA, 489 bp, Oryza sativa
  Clone ID: uC-osrocyp028g02b1
cttttcgtacggccacgcgtgcgtgaaactatgttcattattgcgtatgcgtggtgtgaagacattgagttctctggcattacacaggttgagcctgcaacaatcgtgcctgacacaggtttcgagattgaccaagctaatgctaaaggatttatttccaaaccagctacagctattgctagctttgcaggtaagcttgaaaatgtaccagtgataggtaagtatgctaccgttactgctactatagcaggagcgacagctgatgttgctaggaattttggatattgtcgtccacctgtgacggagaatgcagcttcccgtagaccgacgggtgtttctaacatggcattaaccaacacgccagataatgttgaaaaattaaccactgatgataagcaagagcttagtatagatcccagtattatgaatttaccaggagtagatagtttaatataaaggaaattgcaaagaaggagagttatttaacta

SEQ ID NO: 36243 - DNA, 406 bp, Oryza sativa
  Clone ID: uC-osrocyp028g03a1
tttttgtttgttttttttttcaccaacttgctgttacacagctgcgattgatgacagaccctcagcaagacaccctttttacactacactctcacaacagcaacggtaggggttacaaaacgtacagcacagcagctccatgccaagtacgtttagtacacctccacatgccactggttcttgtgcttgaggttctcgacgaactcgtcgaagttgcgtcccttctcctcggacacgcgcttgagcatgtccaagatgcctggcatcatgcccttcagaccgcagaagtacatgtgggcgccgttgtccagcaggtcaaacacctcgtcagcatactcctcaaccttgtcctggatgtacatcttgccacccttcctgttctgctgctcacgagacagggcatagt

SEQ ID NO: 36244 - DNA, 540 bp, Oryza sativa
  Clone ID: uC-osrocyp028g04a1
tttttgtttggtaactttgaaactccacagtacaatacggcgttctagaggtccagacaaagagcatcaaagcaagaatgaagagaaagacaattggaatcacataaaaagatggcccaaagcacactaatttttattacaaccgccacgacagtcttgatcgtactgactctaaggcgcaaaatacaaatcggcattaatcttttgcggatatcccgctctctaaaggcttcttattcctcagcaaatcccagttcagagagcttgaggtgggcctcggcgtaatccgcaaagaaggcgtcctcatccgcagcatatttctccaccagtggacggaaggctgggtcagccatgagggctttgtcacttggcagctgaagaaggccttccttctcgccactcacaagctcggtgaagtaagagttgtcaaagatcaaagggttggacgttcaggctccctcaaagccagatctctccttgtggcatcttcccaggtgtgaccaccagaaagagcaactatgttcttgtcactcaaaccca

SEQ ID NO: 36245 - DNA, 485 bp, Oryza sativa
  Clone ID: uC-osrocyp028g05a1
ttttgtgtggttttatttttttttttttttttctttttttttttttttttttttttcttttttcttttttttttttttgggcaagggacaaaaaccctaaattcatccccccccccaagggggccccaactgggcttaccgggcccccccacatttatccccacagaaacccggccaggggaccattttaaggcccggaaaattaacccaccagccgtaaaaccagcctcccccaatccctatctctaccaataaaacatacgaccctcaattcctctcccaaagtttacgccacccaccactatacatgagaccccataaacttggatcccccccatgcccatccccctcaatgatcccgtcaaaccccaccgctcggtccccaaacctttggtccccaccaactcacacgcatccccctctatgtaccgctgaattgcacaggttaacaaggctgcagaactgcccccgactgtttaaaatgt

SEQ ID NO: 36246 - DNA, 544 bp, Oryza sativa
  Clone ID: uC-osrocyp028g06a1
tttttgtacaaaagactcaactaagactgggtattcattttctttacagactaacaccactaagtgaaaacagttaagttaatctagctaatgagacctagacaatgttagcatagaggtagttccgatataagccatgctatccaaaagagtaagtgaaatacacctgagaccaagaggaaaaaaaaaggaataaagatggcataaagatgtatatataaagagtacaagagacaggcaatatttaatttatgtctggaacaattatatattcttgcacatatcattcatagccaacccacgagattctagctaaaacctttgtaccacaggtgaataaatttgacgcaggccatacacctcctcagatatcaacagaaaagtataggccgtttattttccaaaaaggatacgacaaactatgcttgtaaggctaaaatgttgactaactaaaacaaaagataagagaagatatataaatcttagcatcaattatagaaaaaaaatacgaggcctgttatactagatggacatcatgttaaac

SEQ ID NO: 36247 - DNA, 481 bp, Oryza sativa
  Clone ID: uC-osrocyp028g07a1
ttgttgtttttttttttactctgaacttgatgtaggccattaattctgcaatcgtagtaatttcacacacaaacagcagagcaatgcaagaatccatgggacagaattaaaaatcagtacagcaccaaaataacataacataacacaaccacatgcgtctcactcagaattgtcttgacattcttattaccatgtgaggatgcagaaccgaaacggactcgcgataagtctccacctctctaggactctctaagatgctagagagtggaatgctaaagtaatattactaccactagtccagtaataccagcaccacggcaaaagggggtaatccaatctcatgtaagccatagcagcagaccaaaacttcttacgcgtcacagcaccagattacctcttcaggtggaggatgaccaccgcaacgacggccgtgacggcggctccagcggcggcagctgccatcagcccgtgataacctacc

SEQ ID NO: 36248 - DNA, 439 bp, Oryza sativa
  Clone ID: uC-osrocyp028g08a1
tgtttgtgtagaaacattttttttccatgtattttgaggaacatgcacatatcaacatacatgtaatacgatgttgaattaagcaagcaaatttaagcatgcagagtgcactgcttagcacacactgcatgtgttgctagctagctagctccatctagttccctctcttctcatcatgattgacacttgataaaattaagcaagatttagctagctagctgagctgatctgatcaccatgcatgcatgcaagcaaggccaattcaatttcaagctcgccggccatacaccacacagcacatatacggtgggtaaaacaaaaacaaaaaggaaatcatacacaacattgattcattcatccattctcttaattaattgacttgaggttgaggagcatatatatacgtgcgtggtatgcatgcatatatatggtacggtgg

SEQ ID NO: 36249 - DNA, 536 bp, Oryza sativa
  Clone ID: uC-osrocyp028g09a1
tttttgttgaagatgaaaaattggagcaaccattataatgctaaaataattacattgacagtagtacaaaacaggttatttgacactttgactgttgactaccgtagaccccctatccttatgtacatgcacaggcaacatgcatactgaaaagtagctagctactcctagtttttcttaaaagaaaaaagaaaaagaaaaagaaaaaaatacgcctatactgtaggagtagtaattactatcgacggctaggttgcatgaatagaaatagaagtccatttccgagatttagatggtgaatttgccatgcggagcataatgtcaagcgacctccactcagcgtcgcacgtgattgccggtcgccgctttctctccaggctgcagcagcgcagcgccaggcggagcagcttctcggcctgcacctccggccagctcccggcggaggcgttcagcacggagtggacggcgtccattttgagggccttgcgcacctggtcggcgatgttgaggtcgagcagtccggtgagcacctggag

SEQ ID NO: 36250 - DNA, 456 bp, Oryza sativa
  Clone ID: uC-osrocyp028g09b1
ctttctagctctaagtatactcatgaagttgatggtattgatacagatgccaccattaagtgaagttgatgaaaagtggtgcaccacaataagttcctgatgtagaagagggcatgaaaagatggatgaggaagagattcatattgcggttgggaagaacttcagaaaggagaaggctaacatcttatgggctgctgcaaggttcccaagggccactatagttcttgttcatgttcactggccttccaagtggatgcccttcatgggtggcaaagttctatataagtttgcagatgaaaaggagaaggagatgcatcgagccaaagaaacggatgcgatggtcaagatgttgtcacaatacaaaaacctttgtggatcaagaaaggctagggcacattacctttcacacgatgatgttcttgctggtgttgtgaatttgataaagaagcttaaaat

SEQ ID NO: 36251 - DNA, 89 bp, Oryza sativa
  Clone ID: uC-osrocyp028g10a1
tgggtgggttaataagataactcacattcaatttctgttctttagcgattcagcaaataagcactaaagcaagaatgaagcgaaagaaa

SEQ ID NO: 36252 - DNA, 355 bp, Oryza sativa
  Clone ID: uC-osrocyp028g10b1
cgccgttggcggctccagtttgtaacgcaccctccggtctctgtcctcgagcgcgcgggccttggggctttggacatgcacggccagcttgtgcatcgctcgcaagggctcgagcggctggatcaccgtgcctcgtagtcagccggggacgaggccctgatcaccgcggtaatggccgtcgcgggggagccagaagccgacaatgcagtcctccgcgttgtaacggacgccatcattacctgcttcatccacgtcctcgtttgcaacaacaaaagatgtatgattcattatttcaagaacacgaaggctcacgaagcgcgacgccctggtgagggagatgacctgctgggcctgg

SEQ ID NO: 36253 - DNA, 544 bp, Oryza sativa
  Clone ID: uC-osrocyp028g11a1
tttgtgtatcaaatttgtaagaacaggtgctcatttgaagcagtagttatttacaggttacaagccaatcgtgtggtaaaagttactccaatgtctaagaacagaagaatttttctgttcttctaaactgcacctctagtgtacaaaacacaaccatctgtacaggctgcaagacctgtagtcctgcagctcttgcgatacttgtgttaatagatgaatttccagccttctccaagccaatctatagcatcaaaatataggtactcaaattcttccgcaaagttcatgccacctagcactatacttgagacatcagtaattggaatacagtacatggagatgccactcaattatccaggcaaaccccacagctgcgtgcacaaaactgttgtttgccagttgtagcatcagcattctagctctatgtactgctgaattgcacaggttaacaaggctgcagtactgcaccagactgtttaaaatgttgcagatgcagcatcagcaaaactggtatatgaagatgattgttcagtttctctgggct

SEQ ID NO: 36254 - DNA, 520 bp, Oryza sativa
  Clone ID: uC-osrocyp028g12a1
ttgttgtttttttttttttttttttttttttttttttttttgaaaggaaatgtgctgactttattcatgctgcaggatctgaccaagggcttcagaattccccactcaaaaagaccttgggtgcaaaaggaacatggaaatatgaattttcccaggaaaagctggcatataccttagggaattgacccatgtgccggcccttacggcgattagcgttatattgaagattaacattcattcaactaggggcttatacaaaataggaccttacactataatttatacaattgaaaaaccaatatatgaatggaattcttcaaacccatatgcctggcatgcaatacagaacgcagcaacaggagtccctttcagccaggttggttcaaaggggggtaaaattgattttggagcatttcatcactcaaggctgtggaactctgctccttacctaggccacaaatcctgatgaagatgatgaaccgtatattttttccgcttgcgccaccggaacatacaccac

SEQ ID NO: 36255 - DNA, 436 bp, Oryza sativa
  Clone ID: uC-osrocyp028h01a1
tttttggtttgttttttgaacgaagtaacacatgcattctccttgattgacaagttccacataacgaaagcacgtaaaacaacagaacgaataacttacagctatcatgcattcccccaaaaagagagtgaaacatcggacatgtaaaaacgcaaaactaagaaataacagggcgatctcgtgctgcatcccagctaccactccagcgacgacctacatatatcttgtatcatgcttgcttaattccgcagcatatataaaatattcaactcctacaaacatgagcttgcgtattggttcgattctgacccgatcccatccccattcttgcaatgcagccattcatggatctatgagtcaccactcaccagtactgctagctgctgctactgcttattctatgctggtaggactgggtatatcttgatcaactttt

SEQ ID NO: 36256 - DNA, 383 bp, Oryza sativa
  Clone ID: uC-osrocyp028h02a1
gttgataattatacgcgtaacctgttatatatatatgtatatgtgttacaataccacgacacatatattgtgtacagaaaaaagctatgaagtgttaatttaacttgatggttggatgtactgtgtataccaacaagtatatattacgagacgaacttcatggaccataaaattattggaaggatggtctaatcagaccttaatagacagctagctagcctagaaatttgtgctttaacaccgggcctggtcgcatggacgttccttcttatacgcgctagctagctgatacttggtgtgccatatgtgcacagcacgatggtcagcagctaaagccggttagtgggcttaatgctggatatactgacagtttgttgggacga

SEQ ID NO: 36257 - DNA, 317 bp, Oryza sativa
  unsure (1)..(317): unsure at all n locations
  Clone ID: uC-osrocyp028h02b1
cgtcttgtatgatggttgatggggaatgggtgggtactaattggaactggaagtgctgccttttttagcgctgagctatttgcaggcggcctattgccgcttgcgaaataactttttcgaggcgtgggtgcaggcgtatggctgccgctgcaaaatatgattctgccgctgggaaaagagttttctagtcgnggagctcgtaaaaatatctagttccaattagttacccatttgctaaaagattgcgaatttactgatcaaattccatgctctgcattaattatctaatatttggtgtaggttccaggagggtggat

SEQ ID NO: 36258 - DNA, 412 bp, Oryza sativa
  Clone ID: uC-osrocyp028h03a1
cttgtctacctgttgtttttttctattcacatatagtaaaaggcctggttaatttgtctccagataagacatacccataactacttagacacttagatatagccaagcaggaaatgcccaaggaggggactcaagataccacatacccataattagctagatcggggtaagaagtagacacccaaggacggatgcacatacttaacatgggggacataaatacagcagaagaatccttccattgggcgtgcaatcccttaagcaagatgacattaagcaatcttgaatccagcaagcggcctgctcaagtgagccaccattcctctactttccgggggcatctggagctcccccttcattttggtgagccccccaactattcgagcccaaaaacaatgcattcttttgcatt

SEQ ID NO: 36259 - DNA, 452 bp, Oryza sativa
  Clone ID: uC-osrocyp028h04a1
ggcgtctgtggttggggatgattacaaatgctccgtctaggcggcggctgtgggtgtgccgtcgttgagcaagctgaagctggccggtaaccttggcacggatgatggcatggacgagtgccttagcaatgcggccgctatgaagggggcaccggtggccgggatcgtttagacgcatacgttgccgcaggtggcgccggatgtggcgaaggattcgttgctggctaacctgttcggtggcgtctcggcggtgaaggcggcgaacgcccaggtgcagctagcgcagttcccctacgacgcggaggcgattcaggccgtggacgccgcgctggtggcggagcttaccaggatgtacgacaccaagcgggggaatttacgggaccccgccgaggcggtcaagaacgcggcggcggcggggcacaccgcgctgtacgcgcacgccgaggagcagc

SEQ ID NO: 36260 - DNA, 305 bp, Oryza sativa
  Clone ID: uC-osrocyp028h04b1
ccttgggagccaaacttaaaatgccatttatattatgatcaccaccactacatcccttaatagagacataaccacccactgatcatcatcaccaacaccgtcgtcgccgtcgcagtcgggtgccggtgggagaccttgacggccgccccaaaagggacattcctccccctttatcatccggcggacacctgaaacaagacggttttgtcacaacccatcatggccgccgttccggccgcgacaggtagacccggcattggatcattggacggccaactttaaaccccggttccacggtgaacccg

SEQ ID NO: 36261 - DNA, 444 bp, Oryza sativa
  Clone ID: uC-osrocyp028h05a1
gaagaaaacacaaataggaactgaaatccagatccacacaatgctgaagtaactgaactgccgtttaacaaagataaagacagacttccccacaggttcaagttccaaaacacaccaagtacatactacatcacttgcagtctcagatataagatgccaaccaagttaagaaacgacgccgtcgctcagggtgagagcagctagctgatcagttggggtatttgcctgctgctgctgagcattacggagaacttccatagcctcagcgaccttggccttaagagcatcaggtgactcaatgagatggagaacttcagtctggtccatttccaaaagcatgccagtgaccttcgctgcctgatcatgctccagctgatcaaaaagcgggtataaactttcaccaagcattagtctttgctgatctgggggtgaattggccagtgc

SEQ ID NO: 36262 - DNA, 410 bp, Oryza sativa
  Clone ID: uC-osrocyp028h06a1
tttttgtttgtttttttttttttttttttttttttttttttttttttttttttttttttttttggggaaaaaaacaaggattcaaacattgcttttttaaacaataacctttccaaactccaaaaggggcccttgccatttacaaacccccccctaaatttcaaacaaatcctcaaaactatgccaagccctaactacatcacctagctccattttaagggggtcccacccaaacccttttaccttgcccgtgccgccgtaaacgtgcccgggggggacctccagcctaagttggacgagcaacagggggggggccacctccgagatgtccaccgacataggggggatccccgactacagccgcccccccggcagggggaaggcattaaccccttttttccccccaccac

SEQ ID NO: 36263 - DNA, 533 bp, Oryza sativa
  Clone ID: uC-osrocyp028h07a1
ttgtttgggaaaatttgtaacctgaaaccaaacaattttgagcaacggcacaccagcaacactcgggatatcatctagtttgtttttttttacacttgcaaccttaaactgcataatctatggcttgaacattggaggcattctcactttggtaacctgctcgaaggcataagccatctcaattagcctcggctcgtaccccttcaatccaccgaagcagacaccaaaggggactcctttctcgtcgtaccctgccggcacaaccacgccggggaggccatggaaggcgaggacgacggcggcggcggagtccggcgtcacgatggcgtccagctgatgatcggtcatgagcttcttgaccccattcactgacagctctgtgggacgacggatcgcagccttctctgcagggccgatcccgggtgtgttttcagacatcagcaagatgctctgtccatgctcttttagctcctcttcgacaggatgtgcattggtgaatgcaattttttcagcgagagaacgaactggcgagt

SEQ ID NO: 36264 - DNA, 508 bp, Oryza sativa
  Clone ID: uC-osrocyp028h08a1
tgtttggttttttttttttttttttgacaagatgggcatatcattctactcattgttcaggtcctgcgtcatcaccacctcactagtcaccagtaagtgaaatcagcaggataatactgataatacatacatacacaaaaggggggtaaaagggacacacatgtaatacatacacaaattgggggcaaagaatgagaaacagatacaaaattgtacatgtgccgcatgccaaaaaaaaaggaaaaaaaaaaacagaacctgactgggctttcatggctttctccttgcacagctgatgccactcctgcaaaacggccgcctggagggcacggggctcagcttcctccgccgggagctttgaaagcgtcgaggggcccttggggttcccgaattcatccaggtcctcggttggcttcttctcctcttcctcttcttcctttgatttcgcaggcggcaccttcggtttggctgccttgagcagggctattctctccatggagatctttag

SEQ ID NO: 36265 - DNA, 551 bp, Oryza sativa
  Clone ID: uC-osrocyp028h09a1
ttgttgtttagcttataaacaagacaaactgtggatattctcgaagcacatatagaaaaaggagtagtaaattgtctcagcatagcacatacccataactacttagatacttagatatagttaagtagtagatgcctaaggattgtctcagcatagcacatacccataattagttagatatagttaagtagtagatgcccaaggatggatgcacatacttaacatggtggacataaatacagcagaagaatccttcgattgtccctccaatccctttaagcatgatgacattaagcaatcttcaatccagcaagcggcctgctcaagtgagcctccattcctctactttccggtgccatctgttgttttcccttcattttgcttagttcccaactattcgatcccatctccaatccattcttttgcattgctctctcttgtttttccttctgcatcatttcacgtccaatcttttcgattgcactttcttgttttgctgctgcatataaactccgatccgacttgggtgtcgcacctttcaataagaggga

SEQ ID NO: 36266 - DNA, 349 bp, Oryza sativa
  Clone ID: uC-osrocyp028h09b1
tttcctccttctcccttcttcctcctcatcctgtcgccgccgtcccctggagggcggcaaaccctagatctcgccgtggcgaggcgacatggaagcgccgtcggcaaaacctagatctcgccgtgccacgcatggatatatggtcctggaccgcatagtccgttgctggagcggagttggaggggacgacgaccccacggcgtcggagatcgcctacacctgcagcggccaccccatccgcgtctccctccgcgtcgccgacccccccgccgtcttccgcctctacgttcaccgccccggctggccgcgcgtctacgacctgggcgacgccgaggtcatcgccgtccac

SEQ ID NO: 36267 - DNA, 348 bp, Oryza sativa
  Clone ID: uC-osrocyp028h10a1
ttgttggttgtaaaatagcagcaatgcatttatcatattatatatgtagctacaaactacatatagcaagctataagtatgtacagcaatgatggcaggtaatattgccatatcaattttcctgctatggtatgtacaccagagaacgagaacaatttagatgatttgggatggtggagcatctgaaataatgcacagttcttcagacttcacctacggttcaagcactactgcccccaatcgatcatcaaactacaggggcaagagaaaaagataacttgggtatattgcaggagctgagaatatttgctaagtttttttcacctatgatttaagcactaaaacccc

SEQ ID NO: 36268 - DNA, 358 bp, Oryza sativa
  Clone ID: uC-osrocyp028h10b1
ttgaagcgaacgaaccaattctcctctcttgctccgcacggaacagcgccgcgccgcgactcgccgtgaagccatggcggcgcgcgctcgccttcgcctcgtcctgcccccgctcgcggcgctgctcctcttcgcgcacctcgccgtcgtcgcggtggcgcggccgctgtgggaggaggagggcagcaacctccgcctgccgtcggagcgcgccgtggcggctggcgcggcggcggacgacgctgccgaggccgccgagggcaccaggtgggccgtcctcatcgccggctccaacggctactacaactaaccgcaccaggcggatgtctgccatgcctacccgatcatgaagaggggc

SEQ ID NO: 36269 - DNA, 398 bp, Oryza sativa
  Clone ID: uC-osrocyp028h11a1
tggtgggaaatataaattggaactgaaatttttatttttattttgttttttttattgtactggagtttaacaaggattaagacagagttgtttaaaggataaaggttcaaaacaaaaaaaggggggccggggcatttgcaaacacaaatataaaatggaaaacaagggaaaaaacaaggccaagccttaaggagagagcaaatagctaaacagagggggtatgaagaaaaccgttgtaccggaacatgggggagctaccacaggctaagggggcacccccaaaaaaaaataggagaggtaatgggggggaaaaaaataaggtggttcatctaaaaaggggggataccgggggacgggggctccccaggcagggggagggcaaaaaacggttttttcct

SEQ ID NO: 36270 - DNA, 502 bp, Oryza sativa
  Clone ID: uC-osrocyp028h12a1
tgggtgtttaatgaaagataaaaagtacttgatcattactgatgatcataaaataaagtacacttcaggaagaaggaatgacctaaaatggctccttcaacagaggaagaatagggctagacaaggtacacaaaggtaggcaaggccattgccgtcatcgttaacgttggcctcgatcagctgtctccgttctgctgcccgaagctgcatgatcctgagggcaagaaggagaagggattctcagagatgtcaaatccaggtcgagtgaagtcatcaagcccaccgaagcaaggatcaaagctcaatggcgagaaatagcgtggatcatcggccatcttcatgttaagatttgggatgttgttcgatgagctaccggggaaggtatacccagtgctccccaccatggtgttcatcgcctcgctgccttgaggttgatctgatgctcctgttactttgatttcatccatagggagtgcaggcgtgtgcccttggaaaagagcaa

SEQ ID NO: 36271 - DNA, 71 bp, Oryza sativa
  Clone ID: uC-osrocyp029a01a1
ctgggggggcaaatagaagtatctgtgtcttcaatatcacaaagtatgattattcacttggcacagaaaag

SEQ ID NO: 36272 - DNA, 191 bp, Oryza sativa
  Clone ID: uC-osrocyp029a01b1
tgttgtgaccaggtcgacggctaggagctgcggttgttttttttagctcgaggtccgggaagtgcactcttaccacgagttcgacggctacgaaaggcctattgtagctggctgcgtgatcaaggcgctcgtgaacctcatgggcattcttggcatgaatcgctggtattataagtgggtggacgggatct

SEQ ID NO: 36273 - DNA, 55 bp, Oryza sativa
  Clone ID: uC-osrocyp029a02a1
gagggcgcaataataaattttttttgtacaaaaacactatgatatgaaaattaac

SEQ ID NO: 36274 - DNA, 447 bp, Oryza sativa
  Clone ID: uC-osrocyp029a03a1
aggggaagataatgagctcgagtatgcatacatacttcgagcgacaactttcgataacatctgtttggatgttcaacaaacggagcaaacagtgtaacaaagaacaagacacgtggtcacaaatcaaaataataaaggcataagcggtaaaagttttgcatttagttgataaccaacagctaacgagtcggatgtatcaacagatgattaagaagctagctggttgtgactccatagggagaacatccccttgtactttgcagccacaaactgtcgtgacagaaagctcaaaggctgctccttgcagtagctggagctgcgtttgatcggcttcaatgtctttaacacaggaacggtccctgtaagtgatgcactttcagaagtaaacagcggagatagcttgctacaaagaggaacggtaggggcagttctgctgtcgctagtgct

SEQ ID NO: 36275 - DNA, 294 bp, Oryza sativa
  Clone ID: uC-osrocyp029a03b1
tattcgggcaagatgatttggtcgtcaatgaaattggaatggttattgctgaagtgatgcatgtctgcagtgatcatgatgatgatgaagggacagactcggctgaagactttgatgaaaatgagggtctacttcctctggaatcagattccactgatgatgcagtggatattgataatgaatcggacatatcgcctacctttttttgttgcaatgaatttgaatgatcaatcaacaaattacactttggaaaattcttccatttatggcactccaccgttgggtactgcaatg

SEQ ID NO: 36276 - DNA, 99 bp, Oryza sativa
  Clone ID: uC-osrocyp029a04a1
ggggggcggaggttgtaatttgcttactacccaattactcaaacgccaaaacactcaagaaaatggaaaggcctgtccactgctagcaaggaccgggac

SEQ ID NO: 36277 - DNA, 463 bp, Oryza sativa
  Clone ID: uC-osrocyp029a04b1
acgcgcgtcgtaatctctctgtgcaggaactgaagcaaggtttggatttgtagacatacatcagacagtgcaacgatgcagggaatggttagtgcaaggaacacatgtgctactagccatgcccacactttgtaccaggggcgctagatacatacacccagatgatcacaacattccacagatcgcatcctggaccgcggagcgggcgcatcaagagggctcggcgggggtgccggaccgcttgtcgactacgacgggaaactcgcagtgctggacgcagttggttgatgacgctcaccaggagagttctttgaaggaaaccgtaaccaaggttgccaattaccaccaatgttcgagcgcgacttttccccggcccattaatcacatccctggggtcccttttttcacccgggtttcacctttacattggggaaggcagtgcaatttctcggccttggcacac

SEQ ID NO: 36278 - DNA, 221 bp, Oryza sativa
  Clone ID: uC-osrocyp029a05a1
gtccatgtaaacagaccacatgcatataatacagaccattcaaaagattggtaatagtaaaaatacaagttcgtgaatggcgataatacttaaagctacctccaaatagcgtgtagcattgcgtagcaaaccaagcatataacttaggaccaacattcagttgcaggttcacatcatcgctggttatcataacctgaataacaagcgcagatggagcatta

SEQ ID NO: 36279 - DNA, 263 bp, Oryza sativa
  Clone ID: uC-osrocyp029a06a1
ggggttaggacaaaagtagaaagcttaacatataccacacatcttgccgggctcaccctcacagcattgttgttcgaaatagggacggacaaacaacacaggttcagctagaaattcctaaaaacagctgagttcatggtgtagctatagatgatcacattggattttgggtgttcattcatgcctcgggaaatatttaacttaagctgcggaagacatctcaaagtgattgcctagtctaatcccagccttgagcagctggg

SEQ ID NO: 36280 - DNA, 92 bp, Oryza sativa
  Clone ID: uC-osrocyp029a07a1
ggggtcaaattttttgggttacacaagccaaaaatttattacacaggggggaaaaagaattcaaatcggtgcatgtttacaaaaactgaaat

SEQ ID NO: 36281 - DNA, 512 bp, Oryza sativa
  Clone ID: uC-osrocyp029a08a1
gtccaaagttcagacagttgatttatctacagaagtgctatagatatgcccaatacttttatgaaattagcgacagtcacatatactgtagtaagttcagagacaacggggatgtgtaccgtagctttcatcctccattggtttatctcagcgaagggattaaccacatgtacctctgtccttccggcctgcgccggacagcgtgaggctctggatgaccgtgggcatgggcgggctcaagagcttcgacgagctccttcgtcctgttctccaggttgaatgcgcacaggttgctgtaggagtcaatgaagtagacacaattcgacttcaggttgagatgatccttcgcccggtaacagaccgagctgtagtagctgacaaacagcgcaaagtccccgatgttatcaaccttctcccaggaaaatgtccccttgtccagaatccagaccacaaacttatcatttgattgccgcttcaccctcattagatcaccagctggggactccaccaaa

SEQ ID NO: 36282 - DNA, 443 bp, Oryza sativa
  Clone ID: uC-osrocyp029a09a1
gcacgataataacaaaccacgagttgtccaaagttcagacagttgatttatctacagaagtgctatagatatgcccaatacttttatgaaattagcgacagttacatatactgtagtaagctcagagacaacggggatgcgttccgtagctttcatcctccattggtttatctcagcgaagggattaaccacatgttcctatgagcttccggcctgcgccggacagcgggaggttatggatgaccgtggcttgggcgggcttaagagctttgacgagctcctttgttctgttcttcaggttgaatgcccacagggtgctgtaggagtcaatgaagttagacacaattcgacttcaggttgagatgatcctttggccgggaacagaccgagctggaggagctggcaaacagcgccaagtccccgatgttatcaacctttttcca

SEQ ID NO: 36283 - DNA, 381 bp, Oryza sativa
  Clone ID: uC-osrocyp029a10a1
tctactacccggtgatcgacggcggcggctacgtgctgacccaggaggtgatggacagcatggaccgctacatggccaccgccgccgactccgtcgtcgccaaggcccgcgacatctgcaccgccttccccaatgtgaaggtggagacgcgggtggagaaaggggacccgagggatgtgatctgcggggcggtggagaaggccggcgcggacatggtggtgatggggagccatggttacggttttctgcagaggacgctgctggggagcgtcagcaaccactgcgtccagcactgcaagtgccccgtcgtcgtcggcaagaggcccggcaccaacgccaaggccttttgatgcgccaactccgcggtccaggatgcaatct

SEQ ID NO: 36284 - DNA, 282 bp, Oryza sativa
  Clone ID: uC-osrocyp029a11a1
gtcgatgttacaaaacgacgagcttcttattttttaacacataatataatgtcctttgtattaacaactaaacgtggaactgaatgcttaacaacgcttaaacacaaaatatacttagattaacccacgctaaatttacctttataccccccacctcaacgctacagtaattaccgacatttatgcacacctcgccgtcgccggagccggagaagacgagacagctagacctcgacgcggcataaggtggcggtttggaacttgaggccattggcgccgggg

SEQ ID NO: 36285 - DNA, 459 bp, Oryza sativa
  Clone ID: uC-osrocyp029b01a1
gggggcatacagaaggttctttgatcataatacgacaccagatgcatattcacttgaagaggaaagcgccatactacaatttaacatgagccaaccttaaacattaactgaatgcttaccactacagagggtttctcagagacataacaacgaaaagaatcaccgcggataggctccatgcagatcacttcaagagcgtttacgagtgacggcctgaaccctctgttctttccacctttacggatggcaaacctctattacctgctcacaagtgacctggctggatgagatccacatccatgtggatacggtcaccaggcatgcacatgttatactcctgatccttgttgttcataatctttgtgacattccccgggccattggaggggcttgtgcataactgatggctgcaacaagggtaaaagggtcagggccgtccaaactgaaattcttaattac

SEQ ID NO: 36286 - DNA, 85 bp, Oryza sativa
  Clone ID: uC-osrocyp029b02a1
gggggggcaagaataagtttatagttttcacaaacaatccaaaatgaataacaacatgcagaagcaaccttccaacatcacaaag

SEQ ID NO: 36287 - DNA, 102 bp, Oryza sativa
  Clone ID: uC-osrocyp029b03a1
gggggggtaataattagttttcattgttccaaaacactctgaaattgaagctatcacgaaaaagcttaattcccacatcacatatcacagaaccaaatgacc

SEQ ID NO: 36288 - DNA, 82 bp, Oryza sativa
  Clone ID: uC-osrocyp029b04a1
gggggggtattaactggtttgcattgaacccaattactctgatgctgaaagtatcacaaaattggttaagaccaacctctca

SEQ ID NO: 36289 - DNA, 322 bp, Oryza sativa
  Clone ID: uC-osrocyp029b05a1
gggggggtcaaaattcattggtagggttgagcattactccaaagcaaatgtctccagcaaaaaggatgagacaaacataaacttttcggggatcgcgagtacatgcacaggtgtgtttcgtagcaatagccaacatccaattttcccagtggatacacactgacaagggccatacttctgcccccaaacaggctcaatttgatatgaagaggtgcagacagccacggagtgtctgcgagaatgagagaccgagatggcccgcactgtcggcgtaatcaggtcgccctcagtatgatatgcaccggactgtctgtatcaacca

SEQ ID NO: 36290 - DNA, 304 bp, Oryza sativa
  Clone ID: uC-osrocyp029b06a1
gggggttaggacaaaagtagaaagcttaacatataccacacatcttgccgagctcaccctcacagcattgctgttcgaaatagggacggacaaacaacacagggtcagctagaaattcctaaaaacagctgagttcatggtgtagctatagatgaacacattggattttgggtgttcattcatgcctccggaaatatttaacttaagctgcggaagacatctcaaagtgggtgcccagcctaatcccagccttgggcacctgggtgggctgcagggtcccatccaggtggcgcaaccggtggaa

SEQ ID NO: 36291 - DNA, 423 bp, Oryza sativa
  Clone ID: uC-osrocyp029b06b1
gcgggtaagactctcctgctcccccgttttccctttgggcgcgccacccccacacacgcgaccatggcggcagcggcaggaggcgcagcgcgggcgctgtcgcaggcggagcaggacgtgcagatgatgctcgccgccgacgtccacctcggcaccaagaactgcgacttccagatggagcgctacgtctacaagcgccgctccgatggtatctacatcatcaacctcggcaagacatgggagaagctgcagctcgcggcgagggtgatcgttgccattgagaacccccaggacatcattgtccagtcgggccgcccctacggtcagcgcgccgtccttaaggtcgggcagtacactggcgcgcacgccattgctgggagggatacgcctggtcatttaccaatcagcttcagacctgcttca

SEQ ID NO: 36292 - DNA, 497 bp, Oryza sativa
  Clone ID: uC-osrocyp029b07a1
caatagattataattagctgctacaatcagtaatatacagcttgtgccaagttcaaaataggaggatgggttggcttcaagaatgttcatttaacagttcaacagcgaaaactacagtgtgcagtttataacatttcattcaagcataaacggtcactgaaagtaaacaacaggcctaaaccagcagcagttttttactctttaccagttgagttggtgttcgatgttgaatcacgtgacttcatttgcgacgtcacatggtgtgatatatacctttcgttgacctcgactatctgaccttgacccacatattactgttgtctgtccattccagtttccacgcttcgttttccaccccaggggttgaaggctcttttgccaccccacgggttaaaaccctttttatgcagaggtttatctgaattgaactttcttttaccaccccaagggttgaaagcccttttgccacccccagggttaaacgctctttttccgcc

SEQ ID NO: 36293 - DNA, 369 bp, Oryza sativa
  Clone ID: uC-osrocyp029b08a1
attatgttaacagttgataatacactgattggtacatatcagaagaggacaacagcatcatattatattccacatattataaaagttttatcgagatcacataatttatttcacaggcgcaaatgcagacctttagactgtatgctacacttgcagtaattggacacattggctataaggtggaatgtaggtcaccttactacagggcaaactggcctaggacggcggccgggccggcgtcaggagggctcccctgctggccatcggattggctaaacgtgtggttaacatgccaacattgccgggccacttgctgaccagtgcgtactgcgaccggcctgtgaacaggtcctgtgcggaggggaacag

SEQ ID NO: 36294 - DNA, 276 bp, Oryza sativa
  Clone ID: uC-osrocyp029b09a1
ggggaggaaaatggttattattgctcaacactacatgggattattccaatctttccgagtctcattcatgatcccgtctatatatcatatcgtgtttgactacatgacaccttcaaaacatacagtttgaacacacacatcttacgacaaaacacgtccactttaattgcacatcattaacatataacagcgattaaaaatagggcaaaagaaaggacggagaggagggtctcaaggccatttgattcattcattcattgatagcatggcttcaat

SEQ ID NO: 36295 - DNA, 391 bp, Oryza sativa
  Clone ID: uC-osrocyp029b10a1
aaacaagaaaagggtcttttaggaaaacaagcaggggcctgggaaatttgaaacccccagttttaccccaaaaattcaccgggggaacaaactaaagccaaaatttgggaaaaacgggggcaaccaaattataacttggacaaacacccccacacttggccttttgggccaggtcaaccaccacgggggggggtttgggggctagtagcctataggcgccacggggggcccagggggagcccaaaacttggcagggttttttaaaccccttgacggggcaggggtcaccgggcaaccccgggggggggcgcccatttccatttttcacggccaaggccgagggggggttgttccccccccccactattgccggggatttttttttgttttt

SEQ ID NO: 36296 - DNA, 513 bp, Oryza sativa
  Clone ID: uC-osrocyp029b11a1
gagaaaacaaatcacatgacagctcgtaattacagtactaagtacacgatggaacggaacaacaaccccatatcatcatcaccatcatcatctagctagctagcaaaccactcatctctctcacacacatgcatgccggccgtcagacgaaatgatcaagaaacaagaatcatatgcactgcctctatcctggcaggtgggcccgatcagaagagggcgagcttgacgaggacgccggcggcggcggcgacggcggcgctggcctgcaggccggcggacgcgccgccggtcggcttggagggggaagaaggggtggccggcggcgtgccgctgcttcctggggtggtgctgggtggcgtcccggagccggagccggagccggagccgctgccgacgttgatggccagcttcatgccgccggcgcagtggccgctgatggtgcagatgtagtagtgcatgccggcggcggcgaggtccagggtggctgggctggtgctggtcgaggtgatcgag

SEQ ID NO: 36297 - DNA, 407 bp, Oryza sativa
  Clone ID: uC-osrocyp029b11b1
tattattccacttggacgaacactagctcaccggccggccatggcgtcttcttccgttctgatcaagctgctcgtcgtcgtcggctgcgccgccgcggcctccgcggcgacgctcaccgtgggtggtagctccgggtggacgcttggccagaactacgatacttgggcaagtggccaaaccttcgcggttggagacaagctcgtgttcagcttcgttggggcgcacacggtgacggaggtgaacaagaacgattacgacaactgcgccgtcgcaagcaactcgatcagctcgaccagcaccagcccagccaccctcgacctcgccgtcgccggcatgcactactacatctgcaccatcagcggccactgcgccggcggcatgaagctggccatcaacgtcggcagcg

SEQ ID NO: 36298 - DNA, 331 bp, Oryza sativa
  Clone ID: uC-osrocyp029b12a1
ggggagattaagtaaatgatgtatatctattaaacaacatgtacaagatcccttgggaatgggccactacatgcctacaataaccgaatacatgcatgacatgacaaaaattctttacttgaacccaaaggcttaactaacgcactgatgatgatgagataaggtaaaaaaaaatgaacttttggagccttcctaacatgctatttacagactttggacgggtagcttaggacaccagtttattttttggtttggatcctacggttgagatcaacggcggcgtcttctcctggatttggcgcacaagcttggacatggacgggcggagccc

SEQ ID NO: 36299 - DNA, 214 bp, Oryza sativa
  Clone ID: uC-osrocyp029b12b1
tgtccacctgatctgcatggagatcgccagcgttgccggttttaagagggcgtgtcctcgtgacatagcgagtgtgcgtgtgcgcaagcgcccgcggcaagatgttggacgcgtgcagcctgttggcgtgcgcccgatgctgctgcgtgggaggcggcgagacggagagcggtgcacgcatgttggacgagccagacatgcgcgggtgcagctg

SEQ ID NO: 36300 - DNA, 501 bp, Oryza sativa
  Clone ID: uC-osrocyp029c01a1
ggaccatgagttatgttatattatcatcatacgggaccagatgtatcatagctagcagaagagagcccgaaacattttcggatcaagcaaccaactgcaacattgcttaatgcataacatgcttaaaggtagttgtgttacatccgcacatagtgaagtaacacagacaggtagctggtttatcatttttcaggcattacagattggtatcagcctcatttcttcccgctcttcttcagaccagagcctcccagtgcacccttctgtcctgccttggccttaagctcctttagtgccttttcctcatgtttcttcttctgtagatacgcgagatcactcttgacgtactcctttttatcggccttgggcgccttgaggggcttggccttccctccttgcttcgacatggttgaccggatcggcgagggcgagtcaagaaaccctagctagtgcgccgggactaacgagcccgggattttccgaccggaccctgcaggcgta

SEQ ID NO: 36301 - DNA, 217 bp, Oryza sativa
  Clone ID: uC-osrocyp029c02a1
aacgggttatttattgttttaatgttttcacatataatccaatactattcccaacacgcaaaagagaccatccaacattacgaagatctaaaccgatctgaccaaacctttcagttatagtagtaaatactatacgtaccatacaagccggtaacaatactaacaaaatctaagtcccatggaacgagcaattacacaatttcacacaggttccaaa

SEQ ID NO: 36302 - DNA, 64 bp, Oryza sativa
  Clone ID: uC-osrocyp029c02b1
gcgcttacacatgctctctgagatgacgagaagcgcattatcctttcggtactggtcctagaac

SEQ ID NO: 36303 - DNA, 162 bp, Oryza sativa
  Clone ID: uC-osrocyp029c03a1
gggggggtattattttgtttgcattgtaccaaattactctgatattgatagtaacacgaaaaaggttaaaaccaccatctcatagccaggaaccaaatgaccaccgcacagatctgggatggtactagttagcatagagtgacgattaacagctgagaccac

SEQ ID NO: 36304 - DNA, 238 bp, Oryza sativa
  Clone ID: uC-osrocyp029c03b1
tgttatcactcgctgagcattgcaaagcttcgattgtaccttgcaaaagcgctgccgaaggcccatacgaaagtattctttcaatgtcccaagtagattatgaaggagcctgtaacccaggtaatggatttcaatattatgggtctggtccccaaagtgcgacggggttacagcccgtttttatacacgaccgtggagttctatgcttcattaaaggatgagtctttaatgactgggg

SEQ ID NO: 36305 - DNA, 101 bp, Oryza sativa
  Clone ID: uC-osrocyp029c04a1
gggggggtattattaggattgcattgaaccaaattactctgaaattgaaagaaacacgaaaaaggttaaaaccaacaagtcataatcgagaaccagattac

SEQ ID NO: 36306 - DNA, 63 bp, Oryza sativa
  Clone ID: uC-osrocyp029c04b1
gtatacaccgtatgaggacttcaaagctccgggggtactttgcgaaagtgggccccaccgccc

SEQ ID NO: 36307 - DNA, 97 bp, Oryza sativa
  Clone ID: uC-osrocyp029c05a1
gggggggaaatattaggattgcatagaaccacattcctctgaaagtgaaagtaactggcatttggatgagaccagccactcatagccgggaaccagc

SEQ ID NO: 36308 - DNA, 410 bp, Oryza sativa
  Clone ID: uC-osrocyp029c06a1
gggggaattattattcattggtagtcttgagcatcattccagagcaaatgttttcaggaaaatgtaagagtcaaacataaacttttcgcagatcgagagtacatgcacaggtttgttacgaagcagtaaccaacatccacttttcccagtgtatacagattgacaagggccatacttctgcccccaaacaggctcaatatgatatgcagagttgcagacagcgacggagtgtatagagaatgagagattgagatggcccgcactgccggcgtaatcaggcagccctcagtatgatatgcaccccactgtctgtattaaccacatgaattatctacccaacttttagagcaagaactgtcttgtcaaaagccttctgcatttggcctctttcaaatggacctaggttaccc

SEQ ID NO: 36309 - DNA, 84 bp, Oryza sativa
  Clone ID: uC-osrocyp029c06b1
ccccaataaagggaccgaaaccacctccgacgatggcttctccatttgcaaacggtccatctccggtgacgcgcccgtgttagt

SEQ ID NO: 36310 - DNA, 88 bp, Oryza sativa
  Clone ID: uC-osrocyp029c07a1
aattgcattcaaccacattactctgaaggagaaggaagcaggaaataggaaaaaacaagccaaagatagccgaaaacaaggtgaccac

SEQ ID NO: 36311 - DNA, 93 bp, Oryza sativa
  Clone ID: uC-osrocyp029c07b1
tcttataaagaaactttgtgcattgaagacctgggatcctactcggcgaaagtgctccgcaacgcttatacctctgaatgcgtgaccctaacc

SEQ ID NO: 36312 - DNA, 463 bp, Oryza sativa
  Clone ID: uC-osrocyp029c08a1
atgcttacagatgattattgactgactggcagctatcaaaagatgtttacagcaacattattaattccacaaataataaaaatattaaccagatcacaaaaataaatccaaaggagcaaaaacagacatcttgactgttcactacacttgtagttcttggacacgttcgtcatcaggttgactttagttgaccttcctacagttcagacggacctcggtcggcgtcccggccgccggcaggagggcgcccatcctcaccatcgccttggcgaagtcggcggcgaacatgccggcgttgccggcgtacttcctcaccagcgcgtcctgcgacccgccgttgaacagctcctggtcggagtggaacagcccctgcttctttaccaggttcgcgtagtaggcgttgtcgaacgcgtcgggcgtctgcacgttgatgggcgccagcgtcgtgtcgccgccggactgc

SEQ ID NO: 36313 - DNA, 512 bp, Oryza sativa
  Clone ID: uC-osrocyp029c09a1
gcacaagaagccaaacgtgagagcttgtacaaaacttcagctctcttcaatgttgactacgctaattaaaattgtaactccataaaaactcggctacgccgagaaaactgtaattacaacagatacggcgtagccaattcacgcaatgcgcacccatacggctacagtatggttcatttaacgtctgatagacgatttcttaaggtgctgccgcaggtggcgacaaatactgaaaacagcgaggtaatccaataaagaaataacattggaaatcctctccagcggcaacccaagtctctaaatgatcataatcactcgagttaccctgcaacgcaaatttgtacccgggttgcgaacgggcagttccatttgtagaattgtagttggtgttacgggcaaaataacaacgagcgtcattttcccaaggcacttcaaattcaacagtaggatttactctcgaattaaaatagacggcaccgttcggtccatcaggataatctaacgggccttca

SEQ ID NO: 36314 - DNA, 350 bp, Oryza sativa
  Clone ID: uC-osrocyp029c09b1
tttaactattgctgtttatggtgagactattctcgccactcctaatagcacagtggatgcaccagttgatattaatgtttttatatcgatgggagatgattttgaagtatataatccaggtaatggatttcaatattatggttttgttccccaatctggaacggagttacacccagtttcaaacacgaccgaggagctaaatgctccattaaaggatgagtctttaatgattgggggcaaacatgtcgtgaatgataagattccattagtgtatatgggcgagtctataaaatcctttagaacattgttgaagaggtataatatgcatagacgggatatgttttaaatac

SEQ ID NO: 36315 - DNA, 391 bp, Oryza sativa
  Clone ID: uC-osrocyp029c10a1
caggaagaattcaagactaataaaaatctcaattcgacgacatgatttggtatgtgccattgaaaagagtacttgcctccatgcacttattgctacccccatgttcttcaattctcgtacatcaccatgacagatttgattcaccgatgtgttaccctaccataccatgcacatgcatacacctccttccttctcatagccgatcgaaactcaacattacagacaaagaagcggaaaaatgaaaaagagaacgatttttttaacacgagaattgaatgcacgacgacgcgcgcgcgcgagaaatctagttccacatccaccagcagctgatctgctggccgtcctcctcgtcgtcgtccgcgtgttggtggtggtggtgggtggccccggt

SEQ ID NO: 36316 - DNA, 176 bp, Oryza sativa
  Clone ID: uC-osrocyp029c10b1
taaaatattataggaaataaaaaataatttcctggttagaataaacacatttttaaaaaaaccaagaaaagattttcctcttctgttacattccttcttccttctccggccaccggagccgtagccgaattgtgcctcttctccggcgaggggagagggagagagggggtgtgagt

SEQ ID NO: 36317 - DNA, 449 bp, Oryza sativa
  Clone ID: uC-osrocyp029c11a1
gttaaccaaataatctactaccatgatggcattaatgaacaatcaggaattcagaatactgttctgtagacaggatacaatggcacacctggtcctacaatatatcaagcaacacctgtgattatgtactgatgaaactgactttcttttctatttctccttccattcttctctccaataggcgataggcgaacaaaataaatacaatttgagatgtaacaggaaaagctaggggtgtagtttttgtcatatgaaatcttgttcttggtcgtctgttcggcgcgacgaagtatctccgtcgagcattctcttcgtcatgttggccctctggacaagacgaaccaatgcttgcaccacctctgacattggtggcctgaattctggttcaggctggacacacaaagcgagcacgtcggcaaaccgggagagagacttggcagggtacagac

SEQ ID NO: 36318 - DNA, 448 bp, Oryza sativa
  unsure (1)..(448): unsure at all n locations
  Clone ID: uC-osrocyp029c11b1
tatggaaatataactgatgtattttccagcctctatagcttgacaacactggatctttcctttaattctcttgctggtgacctaccacaagggttcacatcattgtcaagcctgaagaaattatatctgcagaacaatcaatttactggttatatcaatgtccttgctaatctcccccttgatgatctgaatgttgcaaacaatcatttcactggctggattcctagtcaacttaagaagataaacaatctacaaactgacggaaattcttggagtaatggaccagcaccaccaccttcaccgtattcagctccacctccaccaaaccgtccaaacagcccaggtcaaaacaatggtggttcaagttctggtggaagctctgggataggtggtggaggtgtagcangcattatcatatcattgctggtagttggagcagacgttgcat

SEQ ID NO: 36319 - DNA, 408 bp, Oryza sativa
  Clone ID: uC-osrocyp029c12a1
aaaatataaaaaaatattttaaggggggggtacaaaagctaatagaggtataaccaccattttctttcctatttttcttttatatttccctatatggatagaggccatgcccaagaaggaacataactttttttcttgaattcagaaaagctaaaatgtttgtcaataaagctaatttcacctttgaacggaaatggggaatcattgaattccaaaatttccggagaagggggcaccttgttgagagaatcagggggtggcacaatttaaaaagttttatacaggtcaagaactttcactagaagagagaatgctttctttttacgggaagcatttatgatttccgggggctgtttaaaaaattgggtgaatatttggaagatttatccgtttaaaattaacattttt

SEQ ID NO: 36320 - DNA, 294 bp, Oryza sativa
  Clone ID: uC-osrocyp029c12b1
tctcagtgaaagcaaggccgaactagacaggttctgtgatgctctaatctcaagcagggaagaaattgcagaaatcgaaagtggctaagcagatgtgaacaacaatgtcctcatgagtgctcctcacccgccccaacttctgatgagcgactcatggactaagccgtactccagggagtacgctgcgttccctgcagcgtggcttccgggcgccaagttctggccaacagcatgtcgcgtggacaatgtctatgggggtcgcaacctcatctgcactctggaacagggatccca

SEQ ID NO: 36321 - DNA, 182 bp, Oryza sativa
  Clone ID: uC-osrocyp029d01a1
gggggaacttacaacctttaagcatttatttcctgctcagaaaaaaaacgaggattggttggaatccgaagagagaacgcatttgggcctaagtaacattcaaggggaacaaactgcactgccttgcacttggagggagttccatttcattaacagaacaggggggttatttctataggaac

SEQ ID NO: 36322 - DNA, 430 bp, Oryza sativa
  Clone ID: uC-osrocyp029d02a1
aacaggttaagtatggttttactggtttcacatgaaaaccaacaccatgccccagttgacgcggagaccatacaacaataggaagatctaaactgatctggccaaacctttcagttatagcagtaaactctctacgtaacatagaaggggctaatactactaacaatttctaagtcgctggaacggagataacacaagttcacacaggtcccaaaaaaaatacagcaagagcttagcccgagcagcagccgacctttttcaccgccgaaacataatcctttatattgatcttttcacccttgccaggaccagaacctgcatcatcacctgcttcgactgaccttttgctcacgatgcggtagatctgggtcaagacctttgcaaatgcattctcaaagttggtggacttgagcgcagaggtgtctatgaa

SEQ ID NO: 36323 - DNA, 223 bp, Oryza sativa
  Clone ID: uC-osrocyp029d02b1
gcgctattacctgctccctgaggcgaggagaggcgctatgtttgttgggtactggtcggaggacgactaccactacttctctaaggcggtccttatcggctacttcggggtctgctaagtcaaccttatctaccgctttacccgcaacgagtccagtctggagtccatgttcaccatgggcgttgagtttgccacccgctacctccaggtcgacggaaaggtc

SEQ ID NO: 36324 - DNA, 93 bp, Oryza sativa
  Clone ID: uC-osrocyp029d03a1
gggggggtattattttgtttgcattttacccaattactctgatattgaaagtaacacgaaaaaggttaaaaccagcatgtcatagcagagaac

SEQ ID NO: 36325 - DNA, 84 bp, Oryza sativa
  Clone ID: uC-osrocyp029d06a1
gcatataaccatattgcttttaaagtgaaagtatcatggaattggttaaaacaaaacacacctaattgactacaagctagacac

SEQ ID NO: 36326 - DNA, 57 bp, Oryza sativa
  Clone ID: uC-osrocyp029d06b1
atgaaagaacgtgtccgcactgcagacctgcgggtgtactttgcgacagtgggccgc

SEQ ID NO: 36327 - DNA, 105 bp, Oryza sativa
  Clone ID: uC-osrocyp029d07a1
gaccgcacacaacctgattactttaaaagtgcaagaaacacggaatagcacacaaccagacacaccaaacagacaacgaggctgccaccccttaaaagtgcagct

SEQ ID NO: 36328 - DNA, 363 bp, Oryza sativa
  Clone ID: uC-osrocyp029d08a1
gtggaggaaacgacttaaataacagaacagtcaggtagaacagactaccagactgaaacggacttcacaaggtagggtacatatgagttcaactgggcacaacagccctcaaaagtccattcatacttcgttggggggagagtggtgacttgatggttatttaggtgataacgtcgttgggtttcgacacgtccaccagtttggctggttttagcccatggcgtacttttgtgtccaggagcgagcggtggatttatacttggccctatcagttttgtacatgtgagcaattttcggcactcaacggtatattggggttcgggttcgttagcagtgaacaaattgaccggaggacctttgata

SEQ ID NO: 36329 - DNA, 492 bp, Oryza sativa
  Clone ID: uC-osrocyp029d09a1
acgaaaaaaatctcaagttcaaactacgaacttgcattgcccgaaggaatgcggttgcgatctaaggttttccacgtgtcccttcttgaaccagcaccaagaaacgccagactcgaaacacaggtacaagcagaagacgacgagagttacgacgtcgagaagatccagagtctaactcgtgggaacctcacgagaacctgaattgcccggagaagctcgagcagttccaccgacagaaccctgacctttctggaccagcaagtccggatcaatcgtcgaccagtcgacgccagcaagccagtcagggctaccaacgaccgcagaggacgactggggctgaccgcccgttgaggcttgggactccagtaccggagtagaagaagaggcgagggaagcctccgtcgtcgctgaaccccgcttgaaaagctcgttggcccggctcttggccagacgcttgcggcgcatcaccgaaaggagcctttcctgaagctc

SEQ ID NO: 36330 - DNA, 438 bp, Oryza sativa
  Clone ID: uC-osrocyp029d10a1
gaccccatacaaatacgaatgactttgcggaattaatgtatcggaataaatttgtttcaagtacagttggaacaaaatggttatattaagctaccaaaacactctatctggtctacaacaaaggcccacacaatatatgaagttacagaagtttcccagtcccacacccttgattccagtctttcgttgcagtagaacgcaccggtgaactgaacgatcgtaacattcatcgtaacattcctgttagacaccaaatcttcataaaatctctaggtatttggcaaaattgtgccctgttctttatcatgcagggttcctagccttttggagatcactttgattgctccgggacttcacttttttcattagtcaccccaaatttcttttggcagggaacctttatctgcttgtgagaagagattatccccgctatctttt

SEQ ID NO: 36331 - DNA, 465 bp, Oryza sativa
  Clone ID: uC-osrocyp029d11a1
gagatatgcaactgaatatggcataaaagatatacaataggtttctgggcaacatgaagctttcatttcacacccacgtaatagcatgatacgcgactagaggccgaaatccatatgttcataggctcgaacatatgggttctttgcaatcaggtaagaacactagtacgcattgtcagcccgtccgtggtagtttctcctcctcagctgtgactctggcgcaggctgctgaaggaaaatctttgtaggatcgttcggatcaacatacgcatgacgcatcatatcatcaacaggagtctgaacagcttgtagcgggtccacacgtggcgccatacttgcggcagactgggcctcaaactgattgtagcgtcgcacagatgcaaccaggtttaggaagagaggaacaaaggtaccacagccaccctccttgaacaagaacttgaaagtgtgggtcgagtacagggc

SEQ ID NO: 36332 - DNA, 419 bp, Oryza sativa
  Clone ID: uC-osrocyp029d11b1
ttcggagtccgtcgtcgtgttcaacttggagttatacatacaccaccgtggtcggggaggcgatccaccggtggcaaggagaggcgacggtactgcgggatgctgagaacccgcagctgtttggcaacgggatgctggtggccttgtacggaaagaggttcgtgctgggccgggaaggggcaccagttaaagctgacaagatgctgttagatcctggaggcatgctatggcagagggcacatggtacctgtcagacataaggacggtctttgtcgccagcacgcctgctgggaacttatctgctgttgatatgcgccctgtggtatgcgcatggtgagaaaatcaatcaggcaatatggcagtgtaacgacatatcgggtggaggtgagcccggtgtaccagagatccagaacagggcc

SEQ ID NO: 36333 - DNA, 460 bp, Oryza sativa
  Clone ID: uC-osrocyp029e01a1
acattacccacccacatattttattgaaaacatggataggtactacaccaacaaatagttttatttctccaaaaaaaaaacaaagatctaagtatttccatttgagaagtaataacacttctaggtaatgggacaaacccccgaattaatcttaaggggaaaattcacaacaacatgcaccatttacgcataccctctttcaaatgcatcaatcccaaccgttgattggttttccgaagagcaaaggcctcgacttgggatcaccctccgatcttggccggacatgcctaggtgctttcacaatcttgatgctttgattaattatacacttcagttgattatctacactgatagcaacacaattaagtaagctgctgacatcttttagctagaagttggacccatttgagctggtgaccatggaggcattgaccaccaagctcgagttttccatcccaaa

SEQ ID NO: 36334 - DNA, 484 bp, Oryza sativa
  Clone ID: uC-osrocyp029e02a1
aacaggtcaagcatggctgcactggtttcacatgaaaaccaacaccatgccccagttgccgcggagaccatacaacattaggaagatctaaactgatctggccaaacctttcagttatagcaataaactctctacgtaacatagaagttgcttatactacttaacaattggtaattcgttggaacggtgataacacaagttcacacaggtccaaaaaaaattcaggaagggctctttcccgagctagtaatcccaccttttttaaccgccgaaacattatcctttatattgatcttttcacccttgccaggaccagaacctgtatcatcacctgcttagactgacctcttgctcacgatgcggtagatctgggtcaagacctttgcaaatgccttttcaacgttggtggactcgagcgcagatggtttccatgaaattaaagcgattttttttccgaaatgccttacttttatcggtttgaacc

SEQ ID NO: 36335 - DNA, 390 bp, Oryza sativa
  Clone ID: uC-osrocyp029e02b1
gcgctggtacctgcactccgaggagaggagaggagctttggtagtggggtaccgggcggaggacgactaccactacctttttaaggtggtccttatcggcgactccggggtctgcaagtccaacctgctgttccgctttacccgcagcgagtccagcctggagtccaagttcaccatcggcgttgagttcgccacccgctccctccaggtcgactgcaaggtcgtcaaggcccacatttgggacaccgacggtcaggagcgataccgtgctgttactagtgcatgagactcacgtgtctgtggagtgaagcttgtttataatgtcacccagcacctaacctttgcgaaagtagagcgctggttgaaagaatttggggaccatacagaccc

SEQ ID NO: 36336 - DNA, 91 bp, Oryza sativa
  Clone ID: uC-osrocyp029e03a1
ggggggtatttactggtttgcattgaacccaattcctctgatcctgaaagcaacacgaaaaaggtaaaaaccatcaaccccaagtccagta

SEQ ID NO: 36337 - DNA, 122 bp, Oryza sativa
  Clone ID: uC-osrocyp029e03b1
tcgtaggacaggctggccagtccaagaagcagtggactatttcaaggcgatcgccacgcccgacgggcttttcagaaacgcctacaacctcattggaagggctgggaccaagctgttgggat

SEQ ID NO: 36338 - DNA, 97 bp, Oryza sativa
  Clone ID: uC-osrocyp029e04a1
gggtgggaattaccatgtttgcacataaccatattcctctgaaagtgaaagaatcacggacaaggtgaaaaccaaaaactcctatcagagaacaaga

SEQ ID NO: 36339 - DNA, 63 bp, Oryza sativa
  Clone ID: uC-osrocyp029e05a1
gggggggaaatatcaggtttgcacataaccagatcactctgaaagtgaaagactcaagaaaaa

SEQ ID NO: 36340 - DNA, 62 bp, Oryza sativa
  Clone ID: uC-osrocyp029e05b1
tttatacatagtgtgtgcacttcatatctacggttctactttgcggaattggccctcaccgc

SEQ ID NO: 36341 - DNA, 105 bp, Oryza sativa
  Clone ID: uC-osrocyp029e06a1
gcatattacctgattcctttgaaagtgaaagttgcatgggataggtaaaaaacagacactcctatctgactacgagctggacacaccagatgttggtagttacta

SEQ ID NO: 36342 - DNA, 123 bp, Oryza sativa
  Clone ID: uC-osrocyp029e07a1
gattgcatacaaccttaatcctttgaatgtgaaagaaacagggaataggataaaaccaaacacgccaaatagacaacaagctagacacaactgaagttgaaaggtactaccaggaccaagccc

SEQ ID NO: 36343 - DNA, 73 bp, Oryza sativa
  Clone ID: uC-osrocyp029e07b1
tataagcaccctgcccgccctgcagatctgcgagcctaccaagcaacagtgggccgcaacgctgacaaccatg

SEQ ID NO: 36344 - DNA, 201 bp, Oryza sativa
  Clone ID: uC-osrocyp029e08a1
aatatatgaagccgttgaatttctcagaaacgtaagagaacaaacattcaaacaacccataaagacgagtaaccagcacctaactgaagatgataggtactaccactcatacttccaatccaaggatcattttcagtggatcattgcgcagctagcgtacgctctactcccgtaaaactgccttgagccggttccgatgaa

SEQ ID NO: 36345 - DNA, 62 bp, Oryza sativa
  Clone ID: uC-osrocyp029e09a1
aaattatgtttctattctctttaagtcattgttctttttcttttttttttttgggcagaaag

SEQ ID NO: 36346 - DNA, 505 bp, Oryza sativa
  Clone ID: uC-osrocyp029e10a1
gcgcgtgtcatagccggctggccgtccgcggccgtgccggtccttttcaagccactggccgcgtgcctcgcgtcgcctgacccgcgggcgtcggctgctgccgcagctgcattctgtgagctgtcggcgccgccagccgatgctgctcctttcctgccgctggcgcccgacctctacaatctgctcaccacgtcccgctccaactgggcgctcatcaaggtgctcaaggtgtttgcacggctggctcctctggaatcacgcctcgccgcacggattgtcgacccggtgtgccagcttctcgcgcgttctgctgctatgtccctgacgtttgagtgcatccggactgttctaactgccctgccggcacatgatgctgccgtgcgccttgccattgggaaggccaaggagttccttgctgctgaggatgatcccaacctgcggtaccttggcctccttgcgcttggtatgcttggaccggcatatgcatcgccgttgcatgaatgcc

SEQ ID NO: 36347 - DNA, 491 bp, Oryza sativa
  Clone ID: uC-osrocyp029e11a1
gggaaactaggttttctgttatgaaaagttcattacgacaattatgactaattggcagcattccaaaatattcctcaacgttgacactccatgccacacaatacaatcgaaatttctagaataggcaacatttccgagcatctcggagacaagaccaacatcaccactcgaatgacactgagggggaaatatacaggggaagaagcaaaaatgctatctttaggtagtcgtttgacgacagacagttaagtgtagtgcacctgttgtagcactcgcttactcccccttgtgctccttatctttcagagcatttcctgtgatttacgaacaatgcgtctaacctttttcttgaaatcgtccctcttttctctccaatccttagccgcttcaatatttgctggagactcatcatttggactagagagcatcgaaatgatgctcagaactatactttcaactgtatgcacaggtgtccaccgttcgctcgcaag

SEQ ID NO: 36348 - DNA, 475 bp, Oryza sativa
  Clone ID: uC-osrocyp029e11b1
cacatcccttgcactttcgaactctccacgcctccacaaataaagctcgtcccgaggaagggcggcgacccaccccccccaatcgccaaaaccctaactccgatccgatcgagctctgcttcccatggcgactgccgcgagccaggcgagcctcctgctccagaagcagctcaaagatctcgcgaagaaccccgtggatgggttctcggcggggcttgtggacgatagcaacgtgttcgagtggcaggtcaccatcatcggcccgcccgataccctgtatgatggaggctacttcaatgcaataatgaccttcccccagaattatccgaatagtcccccatcagtaaggcttacctctgagatgtggcatccaaatgtttatcctgatgggcgcgtatgcatttctatccttcatccacctggcgaagatccccacggttatgagcttgcgagcgaacggtggacacctgtgcat

SEQ ID NO: 36349 - DNA, 96 bp, Oryza sativa
  Clone ID: uC-osrocyp029e12a1
ttctttggggggatattaggttttccgcctttctcccttcatttcgacaaacacgactttccggtaaaaatgtaaaatatttctaagccttaaaaa

SEQ ID NO: 36350 - DNA, 443 bp, Oryza sativa
  Clone ID: uC-osrocyp029f01a1
acattacccacccacatcttttattgaaaacatgtataggtactacaccaacaaatagttctatttctccaaaaaaaaaacaaagatctaagtatctccatttggagaagtaataacacttttagttaatggcacaaacccccgaatcaatcttaaggggaaaatacacaacaacatgcaccatttacgcataccctctttcaaatgcatcaatcccaaccgttgattggttttccgaagagcaaaggcctccacttgggatcacccttcgatcttggccggccatgcctaggtggttttacaattttgatgcttttattaattatacactttacttgattatctacactgattgcaacacaattaagtaagctgctgacattttttaactagaaggtggacccatttgagctgttgaccatggaggcattgaccaccaagct

SEQ ID NO: 36351 - DNA, 405 bp, Oryza sativa
  Clone ID: uC-osrocyp029f01b1
ttgttcacgcccccacccgctttgctttgatgcacgcctagctaatcaattaacttaacctgcctcgcctctgcctattcgaaacagcagcggctccagctcgccgtggtcgactttcccggcggcgatcaccggcagcggaggaggagcagtacgtgtgtatatataaaggatggggaggcagccgtgctgcgacaagctgggggtgaagagggggccgtggacggcggaagaggacaagaagctgatgagcttcatcctgaccaacggccattgctgctggcgcgccgtgccgaagctcgccgggctgctcccgtgccgcaagagctgccgccttcggtggacaaactaccttccgcccgacctcaagcgcggtcttctcaccgacgccgaggagcagcttgt

SEQ ID NO: 36352 - DNA, 518 bp, Oryza sativa
  Clone ID: uC-osrocyp029f02a1
gttggaggctagaagattcaatcctggataaaagaaacaatgcatattatgagatttaaactgaaaggcgaagttataaagtagcgtaaaataattaaatggaacatttgagatgtaaacagaaatctcaaattattgtccttttatctcaacataaccactttacagatacccaagctgtaatctttgttatactcatgaaactttgagtacttcaggcaatcagtaatttcatccacaaatgggcaccaccagaaacttggcaagtccatgggcgatggctgcgaaacaatgggcggcgggttacatcttcaaatttcgtaaaggaacctgtgttctaattccattactaatttcattcccttcactgaccaaaacttatagtcaaccttgggcaggatgagctgctacagacccatggaatatgtgctccaatatgaaggaccatcctaagcaaggtacagctatttgcttttccttcaataagtgagtcctacttttaaggtttaggatactgc

SEQ ID NO: 36353 - DNA, 92 bp, Oryza sativa
  Clone ID: uC-osrocyp029f03a1
aaaccaacgcgaaaaaggtttataagggggttggaaagccgagtacgcctttaacaaaacaaattggagggagaggtatgccatttatatca

SEQ ID NO: 36354 - DNA, 140 bp, Oryza sativa
  Clone ID: uC-osrocyp029f04a1
ttttttttgggggggtattaacaggtttgtacataaccagattactctgaacgtgaaagattcaaggactaggtggaaaaccgagtcgcatatcagggtacaagttagacatgacagtacttgcttgcgagtacaaggat

SEQ ID NO: 36355 - DNA, 218 bp, Oryza sativa
  Clone ID: uC-osrocyp029f04b1
tataatcactgtgtgcgcacctcaaagcttcggtggtagttttcagaattatcccccaagggtcatgagaaggcggacatcaagaccatagtctttgtcctcgtaggcacggtgacgtgcagctccacgggcctgttgacctacaagctcggaggtatctgcaagcgtgagagctagaggtcaaagaaggaagcccctgatatgaacaagttgtggat

SEQ ID NO: 36356 - DNA, 135 bp, Oryza sativa
  Clone ID: uC-osrocyp029f05a1
gggggggaattacgatgttttcacataaccagatccctctgaaagtgaaagacgcacggactaggtgaaaacccaacagtcataatcgagaacaagatagacacgccctgaacttgctaggtagtacaaggaaaa

SEQ ID NO: 36357 - DNA, 60 bp, Oryza sativa
  Clone ID: uC-osrocyp029f05b1
gatacggacagtgtgtgcacttcatatctccggtggtagctttcagaatcagctctcacc

SEQ ID NO: 36358 - DNA, 125 bp, Oryza sativa
  Clone ID: uC-osrocyp029f07a1
gattgcatacaattttatttgtttgaatgtgaaagaagcaggggaaaggataaaaacaaacaagccaaatagacaacgagctagacacaactgaagttgaaaggtactaccaggaataagtccaa

SEQ ID NO: 36359 - DNA, 62 bp, Oryza sativa
  Clone ID: uC-osrocyp029f07b1
tataaacaccctggccgcactgcaaatctgcggtcctattcagcaaaggtggtccccaacgc

SEQ ID NO: 36360 - DNA, 503 bp, Oryza sativa
  Clone ID: uC-osrocyp029f10a1
agcaatgtaaatactcgcattccaaaacagccgatggacaataatcggactcagagcatcagttttaaccgaacagaaataaacgagagtattaaacgactgacatagtgcacattgcgagcagatattaacggtccatgaaacgagagccatgcccgtgggcaaaacttaacaaatactagaactagatatctcaactgcagacatgcaaaccaccatttgaacgaggctcacttcttcttggcggcagccttggtcaccttggcaccggttgggtccttcttctccacgttcttgatgacgccaacagccaccgtttgcctcatgtcacgcaccgcaaaacgaccaagaggagggtactcagagaaggtctccacaaccatgggcttggtaggaatcatcttgaccataccagcatcaccgttcttcaagaacttgggctccttctccagctccttgccagatcgtctgtcaatcttggtcaccagcttagaaacttgaca

SEQ ID NO: 36361 - DNA, 414 bp, Oryza sativa
  Clone ID: uC-osrocyp029f11a1
ggggtaaaaaaaaacagcttgaactataaacgctggtgatacatgagtttctgtgctacagggctatgtcagggaaggaaaagaacaatctgaaggatgcgttgcattgcattcctgcatgcatcagcagccaaaacttttgatcagttccatgtcagtcctaggcctaccactcgtttcagctaatgaagctaatagagccagtaagtccacctactccattccaaacaaattgttgtagaagtggggagccgtgctcgtgttactcgccacccatgtcccgttgctaccggtggagcccccgtagagtgctgatccagaagccatagctgctgcagcagaataagaaatgttgttaccggagtagctgttgctctgcctgttgctgctgccgccgatttttgctgcctcccc

SEQ ID NO: 36362 - DNA, 498 bp, Oryza sativa
  Clone ID: uC-osrocyp029f12a1
agggaaaaggtttaattaacataggagtacagcagaaaataacaataaaaagatagcatggaattaaagccgctgctccaatttaccatacgcagcatttgattacaggaataccaaaaaactactaccgatgacaggtattaattattaaaaagcacaggttcagattattgcgacaaaagtttttgatacccgtaagattggacgcttgatagccaaaccacactcagaaccctaaatatgcatacggaggatgtccaatcggatcttcagccaccaccagaggcagatcagtacttgtagtccttgacgtgaaggctctcagaggcaccctcgccgagcacagcatcaccctggtatgtaccaagggtagcctcagagttggccttgcacctggtgatgaaggccttctgcgccttcaccacgttctccgtcttgccgccccaggcctttgagcgtgctctgctggagagcacggcccaaggagaaggacagagc

SEQ ID NO: 36363 - DNA, 74 bp, Oryza sativa
  Clone ID: uC-osrocyp029g02a1
gaggaggatacttttattaagagcaatgtttataagaagcagtcccaaacagaagaaaagatggaatggttgta

SEQ ID NO: 36364 - DNA, 358 bp, Oryza sativa
  Clone ID: uC-osrocyp029g02b1
ttttcgcgtgggcggaggagggagcggtggggttgtcgatcgaggccaagatggtacatgggcctgtgggcctactgcatgtacatcctgccaaagtactgcgacaacaacgagggggtaaagggggtctgcaacgaggacggctggaccgtcgagcccagcgggaccacataccgcatgggatggaagcctcctcaagcagagggtcctgagccaattggaagatcggattcgacaagctcttgctcttcatattaaccaagtacgcggactatatacatccaaggtcctgcatcgatcttctttccaagctctggatactgctcgtagatcagtattggtggaaacaggttgattg

SEQ ID NO: 36365 - DNA, 72 bp, Oryza sativa
  Clone ID: uC-osrocyp029g03a1
tttcttttcatggtggggtttttatccggaatgcttcttatttttcacgactttttattggcttataacacc

SEQ ID NO: 36366 - DNA, 533 bp, Oryza sativa
  Clone ID: uC-osrocyp029g03b1
gggccggggcggaggtttctgggtggagacacgacgccgtttttccttgtgaagaggggcagcactaaggagggtcctcttaaacggctgtggcccagggtgactagagaacaaggaggtcaaacctgtgactaattgcagggacacccacgaggtgaagctggaacatggcctgcagatgtcaactatctttaagaaccatgagtcggggaggaacatgcttgaagaccttgacttctatgagcagcgggagaaagtcttgctggagaatagacgtcagctactgcctgcccgcccagagctgcaaaaactagtttagaaaaaggccctaggagaacttatgggccaaatctcagacacatttggttagactgaccagataaaagaaactgagattggccatagcaagcctgcaggtgagggtgttccttcagctgatgaagcgttcaccgatcccaccaaggctgtagatggaacgggttagacgaacgcataaccttggggagtttagcagcgattttttcccccacact

SEQ ID NO: 36367 - DNA, 232 bp, Oryza sativa
  Clone ID: uC-osrocyp029g04a1
gggtgggaattattttgtttttatatatccagattagtctgaaagtgaaagagtcaaggacttggtggaaaaaatagacttctattagagtacaagatagataagcctgaacttttttagtagtgcaaggataaagtcgttaaaagactttgggattcttgaagagaatgacattcagggcatgaccgatctggcatattaccaggataacgacgcgagttcgaaaaatact

SEQ ID NO: 36368 - DNA, 131 bp, Oryza sativa
  Clone ID: uC-osrocyp029g05a1
gggggggaattacgatgtttttacataactagatttgtctgaatgtgaaagagtcaaggaataggtgaaaaacaaaaacttatattagagaacaagatagataagccagaacttggttgagtagtagaagg

SEQ ID NO: 36369 - DNA, 270 bp, Oryza sativa
  Clone ID: uC-osrocyp029g05b1
gataagcacagtgtgtggacttcaaatcttcggttgtattttgaggaatcagccctcaacggtcatacgaacgcgggctgtacgaccacaacatgacctggagcatgcacggtgaccagcttatacgtgcacatgttccccgcggacgaatcgtgcggcagctgcagtgacagatcggcgacaacgtccgcctcaccagctacgagtaagtggcggatgccaaaggcgcacggctatgggatgccattggagggctcttaatggaccggt

SEQ ID NO: 36370 - DNA, 121 bp, Oryza sativa
  Clone ID: uC-osrocyp029g07a1
atataactagatcactctgaatgtgaaagacactagggatagcagaaaaccaaacaatccaaatagactacgagctagacacacccgaacttgctagcgactaccaggatcaagccgctac

SEQ ID NO: 36371 - DNA, 72 bp, Oryza sativa
  Clone ID: uC-osrocyp029g07b1
tcaatgcgttttgtggagactacatatctggggtcctatttctgacaagaggtcctcacggcggatgcacct

SEQ ID NO: 36372 - DNA, 160 bp, Oryza sativa
  Clone ID: uC-osrocyp029g08a1
acataattagatttgtttgaatgggaaagaagcaaggaactggagaaaaacaaagaatccaaatagggaacgggctagacaaaacacaagttgctgggtagctagaaggaacaagcccatactagcgctgcgaagaccccaaaggagagaaaaccaaagc

SEQ ID NO: 36373 - DNA, 383 bp, Oryza sativa
  Clone ID: uC-osrocyp029g09a1
agcctttggtccggcgggtggtgtggcggtggcgcgactagtggaggtagggcttcctgccttagaccagcctgttctccctctgggccttggcgcgggcacggtgacggcggaggatgccttcgtactgcttcgcgttgacatagattcggcgcatcggtatggcgcgtttagcggcatgtatgcattcgccctgccacctcatttgatttccatccgcgttaggtggtcaataagaaccatagcatttggctccataccaaggaataacttggtgagaggacctgaaaccacatggcctagtaatgttaacccaaattaggcaacgcataacacaccttgatggttactattcagaaaataaaatctttttagtaagtaca

SEQ ID NO: 36374 - DNA, 342 bp, Oryza sativa
  Clone ID: uC-osrocyp029g09b1
tcttgatagatcgcgagcggccgacctttatgggtttctctttatctaaactgggcaagggagacgacaaccacggtggcggaggtgatgctgagcttcaagcaaaaccactaggggtttggccatgtttgcgccgctggagctggaccgctagaggagcagtcaccgtggtgggcggggtcgcagatgctgtacggggaggcgtcgcctgaggaggctgccctgcgcgacagcggtcagatccaggtcgggcccggaggccgcgaccagctggatccggcggcgcccgagccggtgaagacaggggtgcccgcgatgcccaaaaaagggggaggatgaggg

SEQ ID NO: 36375 - DNA, 399 bp, Oryza sativa
  Clone ID: uC-osrocyp029g10a1
gaggcataaaccatttgccaatctgatttattgatatttaggagttaggaccaacacaacacattggcctaaattaccagctttttatccaagataataactacaagagcacatatcagggcaaaagtactaaaatcaaagtctcttaacggctcacatctttgaacataattaagacaaatcgtaagctaggtgttcgtcccaaatcaggatcatgtccggcgaccaccaccgtcgacgataatgtccttgaaagcgccattgctggggatcatcggctgcacgtgctcctggtgaggcacgacgacgtccagcaagtacggccccggcgccgccatcatctcctcgacggcggcgcggacctcgcccttccttgtcacgcgggccggcgggatgccg

SEQ ID NO: 36376 - DNA, 356 bp, Oryza sativa
  Clone ID: uC-osrocyp029g11a1
ggcggcgttaaatccatctaattaaacatcaagactcgttttaacaacaacctgccacaattcacaaacagcaggctgctgcacatgacggtgtacacggatcattttatttgggtgttcgtttccaccattagattgatataatacacgcgaacaagcagaaacattcggcaacaatttctccaggaaaatcgtggcctatttcgtcatcatcccgagcgagcgttattttggaagagggagtctttttcagacaggcacagtcttaatggcaggagcgagtgaccaacgtctacgttggcgtcctagtagccaccctggatgtacgcgttgagcccgttcagttttttcccggt

SEQ ID NO: 36377 - DNA, 374 bp, Oryza sativa
  Clone ID: uC-osrocyp029g12a1
acagtaccaaattaaagtttattttccctttactgcatcattcttgagatattccagtagcaatattgattggtcgtaaaaagaaggatacacacagagcaggcaggaaatgatgtcaattgtatctaaaaactagccctttttcagagtcagttgaagtatacaggacgcggtgtcaaggtggcctggggaaaaaacagcctaaaactcgccgattgtcaaccactaaaccaaacaacataagctaacacggagcatttatgaagtggaacaggcttcgagctttgggaggacgccttgccatgcattcagcaatatctttagctaactttgcttggcccttggcaaattcatggaatgcgaatccaatatca

SEQ ID NO: 36378 - DNA, 293 bp, Oryza sativa
  Clone ID: uC-osrocyp029h01a1
tctacgccggcgtcaacctggtgttccggggcctcccgctgtcccattccgtccacgccgagcagttccttgtcgtcaacgcggccgccgtgggggagttggagctgcgcgccgtcgccgtcttccacatgccctgcggccactgccgtcagttcctccaggagatccgtggcgccggcgggatcctaatcattgtcaccttcgacgccgaggacggctgcgcccccgagtggcgcacggtggtgttccttcttccgcgcccattcggtccccatgatctccttctcaagcac

SEQ ID NO: 36379 - DNA, 237 bp, Oryza sativa
  Clone ID: uC-osrocyp029h02a1
aaaaaaaaaaacggtttataggtgcataagctaacccaagttcaaatccctggaagggggggggcttttcttctcccggggggcccggggggggactttggaatttccttttctttttatacaaaaattggacttaaaaaacaggtggggtggccccacacaaatttgaaattaaccccacccgaaaagggtcgctttttttggccgctccggggggggccccccggggtttttggc

SEQ ID NO: 36380 - DNA, 370 bp, Oryza sativa
  Clone ID: uC-osrocyp029h02b1
gggcaccggcgcggaattcctggggacgacaccacgcgcgtgtcgggggtacggcggggggagcgaatgcggtgggtgattgtggccaagaccacgctgggctgcgcgcccaccgtatctacaacctccccaagcggtgcgacaacaaccaggtgctgaaggcgctatgccacgaggccggctggaccgtcgagcccgacggcaccacctaccgtaagggatgtaaaccttcttaagcagagcgtactgatccaattggaagatcggattcgccaaccaaggggtctggatatgaaccaagtacggggggttcatacaacccaagatcctgcattggaccttctttacaagctctggatccttcttgaat

SEQ ID NO: 36381 - DNA, 209 bp, Oryza sativa
  Clone ID: uC-osrocyp029h04a1
atctgaatgataaataaactcggactaggtgaaaaacacacaatactttcaaaaaacaagttagataagaccgaacatacttggggcttcaaggaactggagttcaagggctcccgaagtctagaggccaaatacaattccaggctagacccccctggcattttcgaggttgacggcacattgctaaaaaatggtaactcggagccaat

SEQ ID NO: 36382 - DNA, 198 bp, Oryza sativa
  Clone ID: uC-osrocyp029h06a1
ttttattttgggggtacaatgaacagatcctcttatgctttgtcttaatagttttacatgcttctacaatacattgaacaggttcttttatactttgaattacatgctacaaaacatttaaccttactttacatacaattaaaagttctcgagagaaggttcaaggcactcaaagctttattgagttcacacatttaa

SEQ ID NO: 36383 - DNA, 285 bp, Oryza sativa
  Clone ID: uC-osrocyp029h07a1
aaattcaggccaccaaagaaggccaaccgaaatttaaagggggggcacaattttgtacatggggccactaaacaaactttaccacttggtaaagggaggggacaaagaacagccttataaccctataaaccccaccctagaggcagggagacggctacaaaaaatttggtgcaacaaaaaacggtaaatactttaaaccaccgggagaggacaaaacactccgtggccaggaacttgggggaagaggccccaaacaaatttcctgaaaaaccaggggggattaaa

SEQ ID NO: 36384 - DNA, 297 bp, Oryza sativa
  Clone ID: uC-osrocyp029h08a1
acttcaaatccaagctgcccattatgatcaagcacaatttacaaaggaggcacaagtttgcaactactgccacctagcacactggacaccaggggaaagggaaggagagaagcatggcattcaaaccctagagagacaggcctaggtgctggggaacttggggaccgccttggggcccttggagacggggtgcttggcgagctcgccggggaggaccaggcggccggaggtctggatctcgcgggaggggatggggggctatttgttgtaacggtagagggggaaggatttcccccc

SEQ ID NO: 36385 - DNA, 361 bp, Oryza sativa
  Clone ID: uC-osrocyp029h09a1
caaagaactttcctttccatttttttatgcaagatggctacatcagacaagttgactatgtgaatcaactatgtttccaataaacagaaaagattctgcagtttagctgccgataaataaaagaaaagctcaaagggttctacagttattaaggcatatatgatattttactaaagggcctttatgacttttttttaatttcccttggaacccaggggaaagaatgattaacatttaacgggatacaagacctcattataatagatgaagctactgaaatttcagcagaacatcaagctggaaattttatggggaagggtttccaccccttacaacgggctgttcaccttcaaactcagat

SEQ ID NO: 36386 - DNA, 338 bp, Oryza sativa
  Clone ID: uC-osrocyp029h10a1
ggttcggccttaattcggtgttatttttgatggcttgcgtggctagcttcatccatcatctttctagaacgagaagaagctacactgcatgcatgcatgactgatcagtcattgacaattaacatgcattatcaccagttgatccacctaaattaaataatcaaaacaccacattaatccaccattaacttgatcatctcatcgatcgatcgattgattagctagttccatgcttgcatgatgcatcgatgaaccctaataatctgggggttaattaatataataattaattaattacttcattttttggcccagtgagccggccatgcccatcccgg

SEQ ID NO: 36387 - DNA, 471 bp, Oryza sativa
  Clone ID: uC-osrocyp029h11a1
gaaccttgaataaacacccagaattaaatcattccataactcatacgtgcgagcaatgcataagcaactggcacgaggtcatcataccaacgttacgtggggatgcagtcaatgtgtttaacaatgtgcgcttttaccaaacaagacctacgagtttactacacacgccacaccatgcgcaggaattacagcaagtaaccccagcacgctctccaaggcattgtttatttcccgcacatttttgtattggatagtcatcaacggattgagtaaaattctatagaagtcaaatccttccatacaaagtcacgacctgtacactgggactgcacgcaagcttcagaagtcgtaagcttgccatgaatgcagagggaaacggtacttcacatagcactcagccaggagtacagctgcactaaagatgacaccttgtcatgcacgtttatcctttggaaacaacatgcatgtcac

SEQ ID NO: 36388 - DNA, 435 bp, Oryza sativa
  Clone ID: uC-osrocyp029h12a1
gacttagtctatggtattacaacatcagggcagcatttcagacaccacccgtcaacttctcagctcaatgagtttgtagatggaggccagagcaatgctgtgcacgaacagcatacggtactgcgcacagcggccgtacactctgcacatgctgtcacgcatgacggtatatcctggggcggcgactgaggcagcccccctcttggcaagactagcccccagcctattgttcctcatccactcctttgcccaaacatgcaatagtggcggctctaacaatatttgccagataatatcggccgcgggtcaaacaagcacaccacttctgcccaactccagtgaaccatggttgagttgctcggcaatgacaggcaacacaaccacccactgcgggcacagtaacagccccaggacacagttgagtggcggaagact

SEQ ID NO: 36389 - DNA, 332 bp, Oryza sativa
  Clone ID: uC-osrocyp029h12b1
caacaaggcgcttgtcttatcgctgccacgcgttgtgtttgcggtcattgacgctgttgtgtgagcttcattggtatctacttgactgaactgaccgcgacattaaattggcgaaggcccagcaaagaatgaccaaatccaagtcgttcaaggaagagcatactctagacaagcgacaagcagaggcgcagcggatcagggagaagtatccagatagaataccagttatcgtcgagaaggcggagaagacggacattccagatattgataagaagaagtatttggttccgtctgacctgacagtgggccagttcgtgtacgtcattcgtaag

SEQ ID NO: 36390 - DNA, 464 bp, Oryza sativa
  Clone ID: uC-osrocyp030a02b1
tttactcgtgggcggacgcgtgggcaggtcttctccacctactctgacaaccagcctggtgtgctcatccaggtttatgagggtgagaggaccaggacacgtgacaacaacctgctgggcaagtttgagctctctggaatccctcctgctcccaggggtgttccacagatcactgtttgcttcgacattgatgccaatggtatcctgaacgtgtctgctgaggacaagaccaccgggcagaagaacaagatcaccatcaccaacgacaagggcaggctcagcaaggaggagattgagaagatggtccaggaggccgagaagtacaagtcagaggatgaggaacacaagaagaaggtggagtccaagaatgcgctggagaactacgcctacaacatgcgcaacaccattaaggatgagaagatcgcctcgaagctcccggcagcggacaagaagaagatcgagga

SEQ ID NO: 36391 - DNA, 445 bp, Oryza sativa
  Clone ID: uC-osrocyp030b06b1
gtcattgacaccaaagctgatgacgtcgacgctggtcttgtgtgaaaggttgtgcccggactacccgctgaagatgcacgtgagcgcgatcgtgctggtgctttggaaggccacaatgggggcgatggcgccgcacgaggggttgtgctttctgagagactagctggtgaaactataagcccaatgatgcttgtgggaacacaggaacaacaactgtataagtgatagaccttaaagctttatactagctcatcttgttgtcattaattggagctggagatcccatcagacggcatactctcaatatgacgaacacacaactttggggaaatatccactattgaagatccaatgggcttcatgcagaaaggatgttttatgactatgctgctcggtgatgataccttaggagcgtatacccggaggctgctgtgcactggaacaa

SEQ ID NO: 36392 - DNA, 450 bp, Oryza sativa
  Clone ID: uC-osrocyp030b09b1
tcgtttacgcgtggggtttgtagactacaatgagcctcaaacagaaagggtttactcttcgtatcttgagttggatcttaatgaggtggaaccttgcatttcaggcccaaagaggcctcatgaccgtgtccctttgaaggaaatgaaatctgactggcattcttgcctggataacagagttggtttcaagggttttgctgtaccaaaggaacaacaagataaagttgtgaaatttgacttccatggacaacctgctgaactcaaacatggcagtgttgtcatagcagcaattactagctgcacaaacacatcaaatcctagtgttatgcttggtgctgcccttgtggcaaagaaagcctgtgaactgggtcttgaggtgaaaccatgggtaaagacaagccttgcccctggatctggggttgcaactaaatacttgttacagagtggcct

SEQ ID NO: 36393 - DNA, 463 bp, Oryza sativa
  Clone ID: uC-osrocyp030c02b1
gtgctctcgaatccctggttttgattatcactgaaggccgattccggtccctcatttcccctttctttaattgatttaaacctttttttttcttattctgtaataccacaaaccgcccaacatgtctgtctgggatgccataaccggacgcaagaacaagcccgcacaatcacctccccctgcgccagcgccgacagcgaccgagcctcatcatgtatcttctcacttcgacccctcagccgctcaaggcgtagacgcgttcctcggaacctccagcttcgccgatccttcagttctacaccccctcgctgggctgaacaaggagacgctggattacatctcgctcgaggacggagcgatcgctaccccaggttcacaggccggtctgccgtcgcgcggcttcaccgacgatctctgctacggaacgggcatcacatatctctcgggtttgacgataggtggc

SEQ ID NO: 36394 - DNA, 460 bp, Oryza sativa
  Clone ID: uC-osrocyp030c03b1
gtcctcttcctcctcgtatcgttatcgcatcgcatcgcccagatctcccgccgagttagatcctaatccgaggagagactcgagtcatggaggattctgcgcggccgacgcccgctgactccggggagctccccaacggcgcggggatggcggaggatgcggtggtggcgcccgacgcgggggaggctccggaggagggggaggaatcgggaattgcgaacgattcggagacgaacgcggctctgggcgcagagggcgagccctcgcgggcgctcaccatgcgggagctgcttggggagctcaaggacagcggggagccctcgtcggggagatccacgctttcggagggcaatgggatcggatctgccggtgcggagcgcgccagccaggacagcctacagttctcatcccatcatgatgttgccatggacttgataaatagtgtcactggagttgacga

SEQ ID NO: 36395 - DNA, 469 bp, Oryza sativa
  Clone ID: uC-osrocyp030c05b1
tttgtctctagacttggtcgggagcatcatgatgacctggctcagtttatgctgggaatgggctatgctactgaagcacttcatttacctggaatatcaaagaggttagagtttgatctcgcaatgcaaagtaatgacttgaaaagagcacttgcatgcttgttgacaatgagcaacagccgagatgtgggacaagaaactactgctactgatgttacacagattcttaatttagcagtagctaagcaagctaagcaagaaagtctggcagatgccgtgcaagggatagtgaagtttgtcaaggaattttttgaccttatcgatgctgcagatgccactggacaggctgacattgctcgtgaagttctaaagagattggctgctgcagcttctgtaaagggtgctctgcatgggcaaatgctacgaggtctggcactccgtcttgcgaaccatggagagcttaccaggc

SEQ ID NO: 36396 - DNA, 402 bp, Oryza sativa
  Clone ID: uC-osrocyp030c07b1
aaaaaaaaaaacataatttgattaattgcagggaaggtcgacgcagtatgtccatttcacttcatggacaatgcaacagagaatgcccatatgatgcaaaacactacaaaaatgctatgttgctgctgcagcaccagcggcaaatttacatttcgccaagactgataaaacgttttatttcctttcccctccgcggacatgtagtttaaagtaaaagattcacccatgtcttcagaatcttttcattgataaaaactacagcatatgaagctgcgcttcgacagccagattgggacaccattgttcgcactctttcgtgagggtgcttgttagtacttttttttccttgttcaacttgatggcttggtctgcattttcttcttcttgcaactcttatccttt

SEQ ID NO: 36397 - DNA, 460 bp, Oryza sativa
  Clone ID: uC-osrocyp030c08b1
tcgtacgccggagtcgctgctccgcttaggttcgggcagaggatgctccttggtggcgcggagaggaggtggtcgccgccgccgccgccgcggccgaagccgaagcacaagctcgtgctgcgggagatcgaacctggggaaagctccgaggttccttcagaaacaaaacattcagaagcaaaacctttggaaacaaaacctttacaaacaaaggtttcaggagtgaagaggaaagtagatgcaattcctgcaaccactcgaccagggaaattacagaaaccagcccaggactggagctgtgcactatgtcaagtgagtgcaactagtgagggagctctaaatgaacatcttgaagggaaaaggcataaggcaaagctggctcattgtggagccagcaatgcgattaaggatggcaaaagcagcccgaaagaaaaaactgcaaataaggatgacgcaggcc

SEQ ID NO: 36398 - DNA, 420 bp, Oryza sativa
  Clone ID: uC-osrocyp030c09b1
gataaatgaagcaggcaaatggcgctagaaatattatcattcgatcatgaattctgattgcgagagttacatcaaaccagcatacctgtggaaactgaacgacaaacttacagaatttattctctaaacttgctatgatcaacatcattgagccgttgacaacagaaagttgtgccctataacgtcacaggtaagtagtgctttgagacacactggcagaaggttagactaaagatgaagtttcagtggttctggcaaatcttcaattttgtcctttggacgatagcagcaacaactaaactgagaacacttcttgaaggtctgacaccatgtgcagttcttcataagcaaattaaggttcgcctcagaaattttttttaggaggatttattcatccttcaggagttttctagcttatct

SEQ ID NO: 36399 - DNA, 473 bp, Oryza sativa
  Clone ID: uC-osrocyp030d06b1
caaaaccagtaaaaaattattgtcaccttcgccggcgagatggcccaccgccgcatcatcctcctcctcgccgccgccgccgtcgccgcgacctccgccgtcgccgccgcgtcctccggcttcgacgactccaacccgatccgctccgtcacggaccacgccgcctccgcgctcgagtcaaccgtcatcgccgccctcggccgcacccgcgacgccctccgcttcgcccgcttcgccgtcaggcatgggaagaggtacggcgacgcggcggaggtgcagcggcggttccggatcttctccgagagcctcgagctcgtacgctccaccaaccggaggggcctcccctaccgtcttggcatcaaccgatctgcggacatgagcttgaagaaacctggtgacagagttgaggctgatgagcccatagcacagattgaaactgataaggttactatagatgttgctagtccggagct

SEQ ID NO: 36400 - DNA, 458 bp, Oryza sativa
  Clone ID: uC-osrocyp030d08b1
tcggtcggatcccatgttgatccatttgacatcttttcatcattctttggaccttcttttggtggtggtggcagcagcaggggcagaaggcaaaggaggggagaggatgtgatccatccgcttaaggtttctctagaagatctttacaatggtacttcaaagaagctctctctttcccgcaatgtcctctgcgccaagtgcaagggcaagggttccaagtctggtgcttccatgaggtgcccaggttgccaggggtctggcatgaaaatcaccatccgccagctggggccttccatgatacagcagatgcagcagccttgcaatgagtgtaaggggactggagagagcattaatgagaaggatcgctgcccaggctgcaagggcgagaaggttattcaggagaagaaggttctggaggttcacgttgagaaggggatgcaacacaatcagaagatcac

SEQ ID NO: 36401 - DNA, 465 bp, Oryza sativa
  Clone ID: uC-osrocyp030d10b1
ctgcggctcaacagaggaggggcgccgatctccatctggcgagcagagcaggggaggggaagggaaggtatcctgaaagatgcttaatcttatcaaaataaaggataaaaagaaagagcaggcagcaagtgctgctggaaaggctcctgtgaagaagcaatctgctggagagctccgtcttcacaaagatattagtgagctaaacctacccaagagcacatcaatttcttttcccaatggcaaggatgatctgatgaattttgagatcatcgtccgacctgatgaaggatattacctaggtggcactttcgtctttacttttcaagtctctccctcttatcctcatgaacctccaaaggtgaagtgcaagaccaaggtataccatccaaatattgatttggaaggaaatgtatgccctgaaccatttttgcgtgaagattggaagcctgttctaacatcaacact

SEQ ID NO: 36402 - DNA, 473 bp, Oryza sativa
  Clone ID: uC-osrocyp030d12b1
tcgtatctccttccccaaacacggtgtggtctgcacgcgactcctcccccctccgccgccgccgccgccgcagcgagaccccggcgaatggcgtcccgcatcgcctctcgcctcctccgccgctccaacgcgactctaggcctcatcaggagttattcacatgccaggaactacagcagtcaactttcagctcttattccaattgtttcccagagctcaaagcttacaagaagacgctattacttgccaaatgcctctccgtaccaactctggagtaggtcatttgcatctgacaatggagaccaggttgaagctgttgtccctttcatgggtgaatctgtaactgatggaactcttgctaacttcttgaagaaacctggtgacagagttgaggctgatgagcccatagcacagattgaaactgataaggttactatagatgttgctagtccggaagctggtgttattgaaaa

SEQ ID NO: 36403 - DNA, 385 bp, Oryza sativa
  Clone ID: uC-osrocyp030e01b1
ttcgtttccgccagcgccgaggtcgcctacgcccggcggagagaccgggtcgtgcccgcgcgacacgctgaagctgcacgtgtgcaccaacgtgctcgggctcctgaaggacaagatcaggggcggtggctgccgacgagccctgctgcttggtgatcgacggcactaggggacctcgacaccgtcgcctggctgtggaccgtcatcaaggccaacgtgcttgggctcaagcttaacatccccagcgatctaaggcttattctcaacaactggggcaagatctgaccatccgactgccagtgaagcttaatgcacatggggacactgaagagcgatcgaacgactgatcgacagacagtgaggtacacggtgtctacatgttttt

SEQ ID NO: 36404 - DNA, 479 bp, Oryza sativa
  Clone ID: uC-osrocyp030e02b1
caaaatcatcagatccgttcttcgcctcctcctcctccacctcctcccaccccctcgccgatccagatccatcgccggggaggcgccagccatggccggcggcgggggcgccggcggcatgtcggagtcggtgctccgcaaggtgctcctctcctactgctacgtcggcgtctggatcttcctctccttcgccgtcatcgtctacaacaagtacatcctcgaccccaagatgtacaactggcccttcccgatctccctcaccatggtccacatggccttctgctcctccctcgccgtcgccctcgtccgcctcctccgcgtcgtcgagccgccctcgtcgcccgccatgaccccgcagctctacacctcctccgttgttcccatcggcgcgctctacgccatgtcgctgtggttctccaactcggcctacatctacctcttcgtgtccttcatccagatgctcaaggcgctcatgcccg

SEQ ID NO: 36405 - DNA, 474 bp, Oryza sativa
  Clone ID: uC-osrocyp030e03b1
ctgtattgggggattactgcttatggatctgttgccttctctgacaacattgacctgcttaaaggatcgtgtggcaagtctcttgcacctttcccacaaggtaatgtttaaactttgaacagtaatgcagcgacgaaagatgaagcatttactataaaatttgatctctaactattgatttagttaggcacaattgaccttttctttgtttctgttcactaattcatttcggttgcaggctgcttctattccaatgctcttggagttggaggcttgaagtgctatgagaacccaaagcacaaggtgaccgcagttcctgccaaagaagaagaaatttgcggtgcaaccttcaaggtaaaaaaataataataataattgatggcaacctaaatacttaactgaatacattgtaaccgactgatgtcaaatggtgttttcaaccctttcttgggtcgatgtgcatctcttctttat

SEQ ID NO: 36406 - DNA, 461 bp, Oryza sativa
  Clone ID: uC-osrocyp030e11b1
tgctgccaagggcagggtcctgccgctggtggcggtggcggcagcgctcgcggcggcgctcctctaccgcgcgcccttttccaagagcctgggcggtgaggggtgcagccttctcccccacgaccacttctggatcgccagcgagcgcgtcgacacgctcggacgggtcggccccgccgcaatggaggtgaagggagggctgatcaacgcgatcgccgtcggggattaccggagctcactgctccggcgaccggtggtggactacggtgacgcggctatcatgcccggactgatcgatgtgcacgcgcatcttgatgagccaggacgtgctgagtggcaggggttctccactggcacaagagcagcagctgcaggtggcattacaacattagtggacatgccttttaatagctaccacgcaactgtgtctgaagaaactctcaagccgcagctggatgcac

SEQ ID NO: 36407 - DNA, 174 bp, Oryza sativa
  Clone ID: uC-osrocyp030f05b1
ctacttctccccctctttaccttttcctcctcggttcggttccgtggctcgcctagggcttagcgggttgagatggccgccccggatgcatccatccagtcgcttcgtcggcggagctcgcctgggccacacgagagccgctccctcgaggcctccttctacacccaccgccag

SEQ ID NO: 36408 - DNA, 416 bp, Oryza sativa
  Clone ID: uC-osrocyp030f06b1
tttgttaaaaaaaatcatcagcacaagatcgaggaggctttatctgaacaagggagatggcggactacgtgtatgggccggggcggaaccacctgttcgtgcctgggccggcgaacatcccggaccaggtgatccgcgccatgagccgtcagaacgaggactaccgctcgccggaggtgcccgccctcaccaagaccctcctcgaggacgtcaagcagatcttcaagaccaccagcggcacccccttcctcttacccaccaccgggacgggggcgtgggagagcgcgctgacgaacacgctgcaaccggtggacaggatcagtgcggccaatgatcgggcagttcagcctgttgtggatcgaccagcagcaacgcctcaacttcaacgtggacgtggtggagagcgactggggcta

SEQ ID NO: 36409 - DNA, 449 bp, Oryza sativa
  Clone ID: uC-osrocyp030f09b1
tcgttgacgcgtgggcacaatacggcactactttgttgccaccgttgtccactggtaatggaactattgctgtttatggtgagactattctcgccactcctaatagcacagtggatgcaccagttgatattaatgtttttatatcgatgggagatgattttgaagtatataatccaggtaatggatttcaatattatggttttgttccccaatctggaacggagttacacccagtttcaaacacgaccgaagagctatatgctccattaaaggatgagtctgtactgattgctgccagacaggttatgactgatgagattccattagcgtatatgggcgagtctataaaatcctttagaacattgttgaagaggtataatatgcatagacgtgatatgttttcaaatactgttggagttaaggcttatcacggcataccaccggagttt

SEQ ID NO: 36410 - DNA, 383 bp, Oryza sativa
  Clone ID: uC-osrocyp030g01b1
aaataaccccgccgccatcgtttccgccgccgacgaggaggggtcaccgatgttgtccgaccaggagctggcccggtacgtggagtcgttcgtgcgccaggcggcggccgtcccgggcgccgtggcggcggcggggggcatatcggcggagtccgtggcgcgccagctcggcccccagctcggcctcgacctcacccccaaggcccccctcatccgcgacatccttctcgccctcttctcccccccgccgcagggggcccccttcacctgcttcgcttcctccccctccgcctccgactccgtctccgcctccgacgccgctgctggccacttcttttcccagcagcagcagcagcagcagctgcagacgttcctgacggcgt

SEQ ID NO: 36411 - DNA, 471 bp, Oryza sativa
  Clone ID: uC-osrocyp030g03b1
ctcgcctacgcgattccttttttatttcgccgccgatgaagggcggcgggggcgcggcggcggcgtctgcggcgccgggggactacgtctacttcaagtccggcggaccgctccacaagatctcgattggaccgaaattatggaggtactatgattttggaccaaagactgttccacctcttgtctgcatgccaggaattgcaggaacgggtgatgtgtactacaaacagatcatgtctgtctctatgaagggttatcgagtgatgtcaattgatgttcctcaagtttggaatcaccaggaatggatttattcattaaaaaattttggactctgaatatctatggcatatttatggtacatctcttggtggatttcttgcacaaatatttgctcaacaccgtccaaggagagtaaagtccttggtcctatcaaatacttttcttgagacacataagtttgctgctgctacg

SEQ ID NO: 36412 - DNA, 231 bp, Oryza sativa
  Clone ID: uC-osrocyp030g04b1
ttcgttcgtacacgccgacgagcatggtcgacgaggtcggtcacttcgacctcctcatcaaggtgtacttcaagaacgagcaccccaagttccccgatggcgggcgtcatgacgcagtacctggactcgctccccgtgggcacctacatcgacgtcaaggggccactcggccacgtagagctcaccgggcgtggcgagatcgttatcaccggtcagccgtggtacgcgcgg

SEQ ID NO: 36413 - DNA, 59 bp, Oryza sativa
  Clone ID: uC-osrocyp030g07b1
tcttttggtggtttttattttttttatccggcactcccagccaagaatcatttcgaatt

SEQ ID NO: 36414 - DNA, 465 bp, Oryza sativa
  Clone ID: uC-osrocyp030g09b1
tcgtcccaagtcgcgtcgcaccgaagcagagtagagaaggagaggagcggagcgccatcagccgtccgatcgagtgatccgatggctctcgctctctccacctctgctgctgctgccgctgccgccgcggcgcgggcgctcgcggcgagggtgacgacgacgaggggttacgccgcgtcggcggcgtcgtcggcgatgaggcgggcggcggcggcggtggaagggaagggcgctgcggggatgacgcaggcgaaggacgggtcgtcgtcgtcggcggcgagggaggtgtcgtgggtgcccgaccccgtgacgggccactaccggccctccaacttcgccggcggcgccgacgccgccgacctccgtgccgtccacctagcccgcagctacccccgcgcgtgatgcgcgcgacctcgccgttgttcgaccgacgacgacgccatgcatccatatatatttggctcc

SEQ ID NO: 36415 - DNA, 445 bp, Oryza sativa
  Clone ID: uC-osrocyp030g11b1
atcgtaagtttgttgcctcaggaggcccattggtacttcttcaaggtgcttgcctttggaagcacaaaccctgtggagcacccatttctagaaccagcagctatggaaatggcagcagagtacagatgttttgtagctgctaatttcgttgcttcattattcagagctaatttttgcacccagttttggcatttgctccttagatgtcacagaaacatcgttgagaaacatgtcattctatttggtgaacattcatacactcttgttcaaaaaaatcacggtatatatcttgttgaaaattttagggatccaaaattcattctagtcaatggctataaaacaagtctcagggatgatgatcctaaggtaatgctacatgaaggccatactggaacttttaaagctcatggaaaatttgaggtcctagtatggagatcacgcatac

SEQ ID NO: 36416 - DNA, 452 bp, Oryza sativa
  Clone ID: uC-osrocyp030g12b1
tctttttgttcttgcatccttgacattggaaaaaatagattcggttttcacaagctctttgtttctctctctctttttttcttgtgttaatttcgatttgtaagcttgtaatgataagtagtacttgtttgcataaacttattggagttgggttattgtactttccccaaagagaggagtacatctaagatttggttaattgttgcactcccttaaggggcatgaacttgtatgcctgaaatgtgcttcctttcttttgctagtacttgtccaagattcaacctcaagtgtactctccttcttgaggaataaagttaatgatgtactacaataccatgtttagtttcaaacctgaagtgtatgattcatctggtcaaactcctgctttgaccagtttttgccctttagtgttcattcatgccaaagccccaaatcttttttattgggtattt

SEQ ID NO: 36417 - DNA, 358 bp, Oryza sativa
  Clone ID: uC-osrocyp030h01b1
gtttccgtctccccgccggccgcctccacccgcaccgcgcggtgcccccctcatcaccaagaacggaagatgacagaagctgctgagtggaatgatgagaacactaaaattatctgtgaactttatgctgaacaagttcgggctggaaatcgaccaagtactcatctcaacagcattggatacagccaagttgcattgaagtttcagcagagaactcatttgctctacaccaagagacaacttaaaaacaaatgggataaacttaggaatgagtacaccatctggaagaaattgcttataagagggtcaggtttaggttgggacagtacaaaaggaacaattgcagctgacgaaaact

SEQ ID NO: 36418 - DNA, 178 bp, Oryza sativa
  Clone ID: uC-osrocyp030h04b1
acccggtcgtattcaccccccccacttcaccaaaacctgcgaggtttggtgccgagggacgcctagggatcactggacagagatggccgctcccgatgtcgagtgccgccgcttcagcaaacgggctagcctgggccaccgacgaccgctcgcttgaggccgacttcctccacctacc

SEQ ID NO: 36419 - DNA, 354 bp, Oryza sativa
  Clone ID: uC-osrocyp030h09b1
cagagctcacaagtctcatgtcgcgtcgcaccgaagcagagtagagaaggagaggagcggagcgccatcagccgtccgatcgagtgatccgatggctctcgctctctccacctctgctgctgctgccgctgccgccgcggcgcgggcgctcgcggcgagggtgacgacgacgaggggttacgccgcgtcggcggcgtcgtcggcgatgaggcgggcggcggcggcggcggaagggaagggcgctgcggggatgacgcaggcgaaggacgggtcgtcgtcgccggcggcgagggaggtgtcgtgggtgcccgaccccgtgacgggccactaccggtcctccaacttcgccggcgg

SEQ ID NO: 36420 - DNA, 462 bp, Oryza sativa
  Clone ID: uC-osrocyp030h11b1
atctttcgctgcggcggcggcggctgcggcggccaagatgcatcagggcaggagggtcacggccgacatgctgtggccggggatgctgcggaaggggaaggcggcagctgcggaggaggactttgaggccgacttgcgcgagttcgagcgtggcatgagcgacgacgaggcggaggggggcggcggcgaggaggaggaggacgacgacgacgtggtcgtggtggtccccccgccggcggctggcgaggttcgacgtccgtgccgcggtcaaggcggctcccccaactgcagatgggatgttgactacaaagcttgtccaacatgatggacctactgctagatcagcaaagcacaagaggaagaatcagtacagggggatccggccgcgttcctggggcaaatgggcaactgaaattcgataccccagcaagggagtccgtgtttggcttggaactattacaa

SEQ ID NO: 36421 - DNA, 445 bp, Oryza sativa
  Clone ID: uC-osrocyp031a01a1
acatacaaacaccaaaggtttcaagtgacaaatcgatatagttttacagaaacaacaaatggaatcgactggcagggtacttgcgaatctgctagagcaaataatgtggttataactggaaaaacaatgccggcaactcatacagctgatatataatcttaaacctttgttcattggatgaaatatatctgcagaatccattgctccctcctggtacttgtcatatgagtcacttgcttccaccattgatcaccaaggcctctggctgtggtggctcagcaatgtcctttaccaccttcaccttgggagggcccgaatgccgcctcatcggagaaggcggcgccattccagcttggaaggacagcttcttcttcactgaaccaacagaggctactttcttcggtggtgtctttgcaccatcggtcactgcagatccttggaggcg

SEQ ID NO: 36422 - DNA, 220 bp, Oryza sativa
  Clone ID: uC-osrocyp031a02a1
gaccacaatcagaatgtcacatatagtagtagtaagttgtaacagtttaacaacagtaccagcatcacatataatagcttagcaatgaaaagtatccaagataacacagacgtttacatgccagttcctactcgggcattttaacgaacacaaggtggacaccaccaacattacttaagatttccaacttaacaacgaaagtaaattagcccgggaattc

SEQ ID NO: 36423 - DNA, 493 bp, Oryza sativa
  Clone ID: uC-osrocyp031a02b1
tcgatagaaacacagttcaagataatccattgaatgtctcaaagcaaaatggatatggtggtggtgcttcacagggtatccagccaaatggcttgcactcaatgacagggcatcgcaaggcagacatctcggaaggggaccgatctttctttgctgctaaacaggctagccttgaaaatgagatcaagcaattgaaaaagcaacttagtgataattctgagaaagaaactgaaacaaaaaggaggttagaggatgaacacaagcggaatgaattgcttcagcaacagctaaatgaactaaatgtcagcaaagagaggatttcaactaacatggaagagctacacaatgagttgagtgagaaggaggcaaagttgagacgcttgcaagaggatttgagtagaagggaaaaagagcatgtttcagatgctttccttagagcctaagaagtttggtgattgctttacagaaggagaactcagatcttaagatagag

SEQ ID NO: 36424 - DNA, 288 bp, Oryza sativa
  Clone ID: uC-osrocyp031a03a1
cccttccgtaggttggatcctttagattgggccccgccggcgggcctcgccatggcgacgggccgccgcccggtcaccagttcgagcagcacgacgccgaggctgtagacgtcgccgcggtaggtggccaccgacgagtggccgtactccggcgggatgtagcccatcgtgccgacgaggtctgaggacacgggcgacaaatgaagcgaatagaccagccgatggaggacgctttgaggaaaaaggggttccatgcgggccaggaggaggatgttgtttgacttgatg

SEQ ID NO: 36425 - DNA, 331 bp, Oryza sativa
  Clone ID: uC-osrocyp031a04a1
gacaaaaaaaaggtttttttttggtgggacacaaatcccggtcttaattcacgagttccggttgagttcattccagctacaacagggttgaaacaccgacacttcactgtttaattgaattgggccccaccttaaattcccctcctgacatcacaggtttatgtcacactcctacgggggcccaccaaccccacccatgggagcagcaggggcatttgggacgccctttttccggggggttccctcccacgacgaaaaatttgcccgcggggaacacgccccaaaagggtccgcacggcattcaaatgggcctgtgtacctaacaaatttt

SEQ ID NO: 36426 - DNA, 278 bp, Oryza sativa
  Clone ID: uC-osrocyp031a05a1
gggggagcccccctcccgccgatttgtttcggagcttttcttcttcttcggattcttccttccccaatcctttggttcttgttctttggtctctccttcgaaattcgatccctcgccggcagcttagccggcgcggcgcggcgcggcggcgatccatctcccgcggtttcgatttgggtttatttgggcggtggggagaaatccgtggttcggtgcgtttggtatgagctgaaaaggtcgtcctttttttttttgggttttttccccctgatctgcgc

SEQ ID NO: 36427 - DNA, 231 bp, Oryza sativa
  Clone ID: uC-osrocyp031a05b1
actttttctttcctttttttttttttcttccttttacttcttaccaacattccattccccacccttcaaaaagaggattatttccaccctctaacggaattcccaaccacccccatgttcttcttcacccccaaatgcttttaaccaaaccccccctcaatttcaaacaaacacccccccacatcccccactaatgcgcggacccccaaaaattcccaccgggcaccacac

SEQ ID NO: 36428 - DNA, 418 bp, Oryza sativa
  Clone ID: uC-osrocyp031a07a1
atggtgaacatttattatatttattaattaaacatgtcaaacataacgttcttctcaactagattcattttcattcattgaaccgagtgcaaaacttcaggcagctccgaaaagaacgtcgaaaataaactagtcgcttgttcaattgaactagtgtctgcaaattcgcggattgagtgcatcgccaactgagggcacccgacatcgattgtttgtagccctaattttgccgataaaattgggccgacggtggagccacatggtgaatcgttgcggaccacaactttttgaagaggaactttggctttttttgcaatctttttcaaaattagcatgagtggtcgatgtggtagcatagccgcttgttgacattttacctttcacctaccacacctttgtggaaagctggacggcgttt

SEQ ID NO: 36429 - DNA, 266 bp, Oryza sativa
  Clone ID: uC-osrocyp031a08a1
gtgtactctggcaatatgctatctccattttctgtagaacgataggagtccatttacatatgacatctttacatcccgggaagatgaaggggaacaaaaaatgagggggtaactctgaatttggctatatcataacattgtcaacaaatgaaacgaatagcttacatcatgatgcacgctttgaagaaaaaggcatccgatactgtacaggtgatcacaatcatttttggggtggtcttgagaatggagtctgtgtggaggtatat

SEQ ID NO: 36430 - DNA, 538 bp, Oryza sativa
  unsure (1)..(538): unsure at all n locations
  Clone ID: uC-osrocyp031a08b1
cggtccggaccggccgggtcggcccacgcgtccgtttcacgcgtacgatcaaacttaaccaaagagtcaaaccccagacatgctagtagtcagttagttaaccaaccttctccctcctctcttccacttcgtgcaagcatgaagcttagcaagctcaagctggatcggatcatctgatgtgaattctctctcacaccaattcaccatggatggatgcccatgaccatccttagctccaggaagaagaagaagaagtgaacagtagctatagccatgggaagcagaggaggagctttacctgttgctgtactggtgctgttgctactgctggtgctcaagaacggcgccgcccagtcgcggtgcagctccggcgacctcgccgcgctgcgtggcttctcggccggtctcgacggcggcgtcgactggtggccggcgggggtcggcaacgcgtcgtcgtcgtcgacatcggacggtggccactgctgcccgtggcgcggcgtggcgtgcgactagcngtggaggtcgctgcgtggtcctg

SEQ ID NO: 36431 - DNA, 358 bp, Oryza sativa
  Clone ID: uC-osrocyp031a09b1
tttccttctactccttctggtagaatgcaacgggcattttaggctatcgccacacctggcactctccctacgtgtgctgccctgggacacatgagtggtcccaaaccactctatattacctgctgaatattgacgctccatgtcagatttatctgctcaaatagaggagagtggatacgagactgccactgcggcagaccattggatgtctaaggggaagagcgctgacagaccctgggtctggagcactactgatgactatggctacgatgctgtcaaagctatgactcaacacaatggtggagctccggcgggcggtaaacctggaccggattaaccaaccgctggcggtgttact

SEQ ID NO: 36432 - DNA, 277 bp, Oryza sativa
  Clone ID: uC-osrocyp031a11a1
aaaaaggtaaactcttcataataatattattaagacattatagctgatgtcttttgatcacactgcgatcaaattatgcatcataggcagtacaactccgcgtcaggaaaaagtagaggagatatatttcttgttattacttaatacagcattcacatatatcgaaccatccggtacgtacgtagtagtactccacgcgttcacatcgatgatcggggacgatatcctcaggtagtacttatgcaaaagcgttggcgtaaactgacgaactgaacgg

SEQ ID NO: 36433 - DNA, 333 bp, Oryza sativa
  Clone ID: uC-osrocyp031a11b1
ggttactaagccgtccatagattcttcttcctccccgtcactcctcaccaacaaccatcccccacccttcaagatggacgccgccgtcgaccgcctcaaggatgggttcgccaagttcaagaccgagttctatgacaagaagccggagctcttcgagccgctcaaggccggccaggcacccaagtacatggtgttctcgtgcgccgactctcgcgtgtgcccgtcggtgaccatgggcctggagcccggcgaggccttcaccgttcgcaacatcggcaacatggtcccagcttactgcaagatcaagcacgctggcgtcgggtcggccatcga

SEQ ID NO: 36434 - DNA, 298 bp, Oryza sativa
  Clone ID: uC-osrocyp031a12a1
aaggatggaattgagtagcaatactttcaccccaaaatacagtttagcgacaatatcttagaaaagccgcttgctttgccgccatggctggcaagctgagcagagcagctaacacaaagaacacgagatcactataaaccaaacggcaacgaacgaagaaaatacagggtcttttttgtctgaagatacacgaagcggttcgttttcttttatttttagtctcctctcctcctcgatgatgggtgtatggcaatggcaatggcgatgggatcctggcttaattggagggaaggggctt

SEQ ID NO: 36435 - DNA, 224 bp, Oryza sativa
  Clone ID: uC-osrocyp031b02a1
aaaacgagaacgccttgatttaccatcgaaggcagacaatgtcaaaaaaaggtgatttttttttcctacaggccaccctacaggcgattagaccaacctgactggacaaaaccaaatacttatcccagccagcaagaagcgtttaacgcccccgccaaaccgaaaaaagcaaaccaaagcaattcacccgtgacccatttcaaaccccaacttaatttttcctt

SEQ ID NO: 36436 - DNA, 259 bp, Oryza sativa
  Clone ID: uC-osrocyp031b03a1
aaggatggaattgagtagcaatactttcaccccaaaatacagtttagcgacaatatcttagaaaagccgcttgctttgccgccatggctggcaagctgagcagagcagcttacacaaagaacacgagttcactttaaaccaaaacggtaaccgaacgaagaaaatacacgggtcttttttttgtttgaaagataccacgaaggcgggttcggttttctttttatttttagggctacctttcctccctcgattgatgggg

SEQ ID NO: 36437 - DNA, 334 bp, Oryza sativa
  Clone ID: uC-osrocyp031b04a1
aggcaacacacaaacggttttattatttgttagcagaacaaagccgcagttctcaatgtatggacagacggcaacgccacgggatctcccgtaacagaaacgagtgcacccaccggggaagatgagcaattcgagcacgtgacaagaaattgactgaccgtacgaaacgtgcggggcactacaagtgcaaggctgggagagtatagacctacattgacccacatgagcgggaacacaaactccatgccggacccgggcaacaggaaaccaaagggggagatcaagctgctggttgaaccaattctaggggctatactacacaggaaaacacgga

SEQ ID NO: 36438 - DNA, 343 bp, Oryza sativa
  Clone ID: uC-osrocyp031b04b1
gtgacacttcatctcatatagtccaaaagagcctacagcgagaaatggtggggagagggagcgtccgcctcctgcgaggaagtctccacacctcgacagaagacctaatctgttggacgtaatacctgcatcagcacgacagactctacttactgtagcccactcctgacatggtcagtggctacagataacataggctccctggaagagtgtgctccgtggaccctccccggatgaggcctcggcaagccttaacaagaggaaaccttgctctgcactgaagcggaaggagatgaccgggttaagaatcttctcagacgattcccagggagacatgcaggaa

SEQ ID NO: 36439 - DNA, 362 bp, Oryza sativa
  Clone ID: uC-osrocyp031b05a1
aaccaaaacataggaggtttcatttcttcttctcaaagtagtgtagcatctttccttctttcaccattacataagcttaagcaataacagataacaaatcctcctcctcctctaggtaaaatattcaaacacaatacccttataagtacttattattaggaaagtagcgtgcatgggcataaatggcagcggggggcaggttaagaatcacaatgctgagcagcgaggaaacaaaacaccataatgggacagagcaaaagcctccgaaagggagcttttaggcagaaggcttctcccacttgaggggcttcaccacctcccaggtgaagtctgggtcggccccttccaagtgaccgtaagcc

SEQ ID NO: 36440 - DNA, 105 bp, Oryza sativa
  Clone ID: uC-osrocyp031b07a1
ttttttttttggtttttttatattttttctcttttttttccgaatgggaatgtgctgactttttttttgttgcggatctggccaagggttttacatttcccactc

SEQ ID NO: 36441 - DNA, 518 bp, Oryza sativa
  Clone ID: uC-osrocyp031b07b1
ttgtttatgcaaagggagagagcatctgcagctagtggagcacgcggggagctagctagctccgacgtcgtcgacgagctcctgtggctcgccgttatccgctcgctgatcgagccgtgtgcgggtgagaaagaaaaagaaaaaaaaaagatcgcgcctttttggcgggttcttggggtgtgaatccacggtttccccggggtaggatcctgatggggctcgaggaaggcggcgcgatgagggcgctgatgcggcggaagcaggtggactccgaccgggtccgcgccgtcggcggccaccagctcgccaaggagctctccgttacgcagctcgtcgcgattggtgttggttcaacaattggagctggagtatatgttcttgtgggaacagttgctcgggagcatgctgggccggcattgacactttcatttcttgatagctggagtggcagctgcactttaagtttctgttatgcaaagcttgctaggtcctgcccttctgcatgaagtgcctaccat

SEQ ID NO: 36442 - DNA, 503 bp, Oryza sativa
  Clone ID: uC-osrocyp031b08b1
tcgatagaacgacagcgcaggataacgcagggcatgccacaaagccctacggtcatgctggtggtgctcaacagcgtctccagacacagagctcggacgcaaggaccagcgctggcacggcggacatctctgaaggtgaccgacccttctttgctgttaaacaggcttgccttgaaaatgagatcaagcaattgaaaaagcaacttagcgataattctgagaaagaaactgaaacaaaaaggaggttagaggatgaacacaagcggaatgaattgcttcagcaacagctaaatgaactaaatgtcagcaaagagaggatttcaactaacatggaagagctacacaatgagttgagtgagaaggaggcaaaattgaaactcttgcaagaggattcgagtagaaggggaaaaagagcatgtatcaaaatgcttccccttcagagccctaaaaaggtatggtgaacggctttacagaagggagaacttagaatctaaagattgaga

SEQ ID NO: 36443 - DNA, 201 bp, Oryza sativa
  Clone ID: uC-osrocyp031b09a1
gggatgatcaaaagtccatatttgacaagggtaacagctgccttatggcaaacataattcgtggggaaaggggagggacaccttacaaaaaccagggaccaagtttacccctcaagagacacaaaaaaattcaggtaaaaaaggggggaaaaaaaactccaaacacctaccccaggggtcccaccccaccaaaggggggaa

SEQ ID NO: 36444 - DNA, 331 bp, Oryza sativa
  Clone ID: uC-osrocyp031b10a1
caaagaaaccaccgtttcactcgagctgaaaatgagactgactgcaagaattcaagaagcacctcagatgaaaactacagcaatactcattttggtaaatggtaagggagatgcgggaaaacagttaccaaatacaaaacgttctcatactgagacaaaattcaaaagcacttggataaccgtttacatctccaatttttatttaaatgggaaaaaaggggtcattgctctttctgctacaaccaaatcttttgtcggagggattccagtccagttggccttgggctcaaggatctttgatctagttggcccttggatccaatgacttttt

SEQ ID NO: 36445 - DNA, 287 bp, Oryza sativa
  Clone ID: uC-osrocyp031b11a1
ggtcatcagtaccatataacggacgattgctgattactattactggttgcaatgtaacacttcggatacaatagtacattacagagctagctaaatgcgaagccacaataccgtcagcgcaagacgatcataaataaagcttacacaacatagccaacatgcaaaccattcggactgaccagagatgagggttcttgaagctgccgtggtgtgccatgcattacaaatgccgaacaacttgattggagcagccaacatgaaaggaaaaggcatggataatgcaacaa

SEQ ID NO: 36446 - DNA, 495 bp, Oryza sativa
  unsure (1)..(495): unsure at all n locations
  Clone ID: uC-osrocyp031b11b1
tctaattccattcctcgcgattcctctcccctcgcctcctcgtcctccccctcccaggggatcgccggagaggaatcgcgcggaggaaaaaaaaagaaaagggcttccccgtcgtctaagttaaaaggaagccatggagcacaaggagactggatgccagcagccagaaggcccgatcctttgcatcaataactgcggcttctttggcagtgcggctaccatgaacatgtgctcaaagtgccacaaggagatgataatgaagcaggagcaggccaagctggcagcctcctctatcgacagcattgtcaatggtggtgattccgggaaggaaccaattattgctggtcacgctgaagtagctgttgctcaagtcgaggtgaagacgcttgttgcgcagcctgctgagattgctggtcctagtgaggnggtcacggtgaaccccaggggagggaaggaccaatcggtgcttcacttgtcggagaggttggtcttacc

SEQ ID NO: 36447 - DNA, 73 bp, Oryza sativa
  Clone ID: uC-osrocyp031b12a1
ataaaaccaacaaaaaagcaaaaagcaaaaaaaaaaaagaacgaaaaaggaaaaagaaaaaaagagaataagg

SEQ ID NO: 36448 - DNA, 112 bp, Oryza sativa
  Clone ID: uC-osrocyp031c01a1
gggggtacaacaacatttttctcgatatattccatacatatatattcacacagcactgaagccgtttgaacgtatcaaaaaacaaatgatgatccaacattttgatgaaaac

SEQ ID NO: 36449 - DNA, 390 bp, Oryza sativa
  Clone ID: uC-osrocyp031c01b1
ctttgacccgttttctttctccgtatcccccatcccctccttcccggcggcggcggcggcgcggaggcggcggcacgggagcggctagtggtttcgtcggcggaggcggaggcggtgccaagatgttcgggcgcgcgccgaagaagagcgacaacaccaagtactacgagatcctgggggtccccaagaccgtctcccaggacgacctcaagaaggcgtaccgcaaggtcgtcatcaagaaccaccccgacaagggcggcgaccccgagaagttcaaggagcttgcacaagcttatgaggtattgagtgacccggaaaaacgtgaaatctatgaccaatttggtgaaaatgcccttaaggaaggaaatggtggaggcggatcccatgttg

SEQ ID NO: 36450 - DNA, 66 bp, Oryza sativa
  Clone ID: uC-osrocyp031c02a1
gggggaaatatacatatatatgaatatactttcgtttgtacaaatttacacgaaaaatacattttg

SEQ ID NO: 36451 - DNA, 234 bp, Oryza sativa
  Clone ID: uC-osrocyp031c03a1
ggtaggacaggaaaagattgacttaactaataggcttataaaaatgacccatggagtaggatggcattgcgtttttgccagggggacacctacatacgccattagcaaaagttcctcctttgagcaacacgtattttaggattaacaaaaatagggcctttaattccagttagttatctcttgaagacaaaggcgcccccaatggcccacaaaaggggcgtcctcggactcgaa

SEQ ID NO: 36452 - DNA, 425 bp, Oryza sativa
  Clone ID: uC-osrocyp031c04a1
ataaaaacagctgcggttgctgccaattacagcatcaccaaccttctcgtgactgaacgctggtacagcgagaaagcacggaggattcaagaggcttctgcaacctagcagcaacagcaacttcttggctagggagtataattctttacataagcatcaataccttataaattcatcaaataggtagccactacattgggaaaacaagtaggggaaggcaggggatcaagctcaggaattacaacaactgaagattttttatgtttttagtaggtgatacagaccgggaaagccagaattgcatatctttaggagaagcttgttgcagaaactgcaactcaatcatgtccttggcttagtcggccgtccagctctgctccacaatcttgcggactttgcgggtgtactcgcgcttgttctcgctg

SEQ ID NO: 36453 - DNA, 452 bp, Oryza sativa
  Clone ID: uC-osrocyp031c04b1
cggcgagaggaggaggctgcggtggggcgttcgtcgggagagagaccagggccggggggctagggttcggccgttcagagaggcggctatcggttcaggaggatatgaagaatgcagcattcagagttatttcgctgtctggttcttatcttatcatccctataatagtactaccacaagatggactgtattcaaatttatcaggttgattccagcagctaagtaaaagcaaacttcataaggcaattgcgcctttgcatttgcatcacatattcacatggcaacccttaaaatgtatgtatgtctgtactcatatgttgcggtgggtgaaccttacgaagtagtcagctgctctatactttcatattgcatatgtgaatgacaagatctgtcatggtcataagaatcggcttttgttggtctacggttatattaacatcacggggtgtgca

SEQ ID NO: 36454 - DNA, 396 bp, Oryza sativa
  Clone ID: uC-osrocyp031c05a1
ccatggagcagtttacttgctgaatagttgaatcaattagacgattgaaacaacctcttccacacttcaaaacctgtcttatctccacaggggttaaaaacaaaaaagaaaaaaaaaagcgaacaaagaatcaagaaataatagatgtagcaggtacagtaggcaagcaccaacacctcccctccaacctcacactatggaaactactaattttttacagaatacaactcacacttcaagataagcttcagggcaacagaggcaagggaagtttgatattctccctcccacagattttcgtcggtttgtttgtttacgcgttctcagttgctgcgtgcgatcgctttggtcgccactctgtgtgtgccttcacaatatcagctcctgactcaagct

SEQ ID NO: 36455 - DNA, 508 bp, Oryza sativa
  Clone ID: uC-osrocyp031c05b1
tctcacgcttccgcggacgcgtccgcccacgcgtccggagaaattctcccgtcgtctccttccttgcgccaagaaagacgagccgcggctcaacagcggagtggaggggcgccgatctccatcgccgaggagagcagagcaggggaggggaggggatcctggttagcgcttttggcgtgtgattgatttctaaacgaattttgggccgtgaagggaagttcaatcatggcagggtctcttgccgcctcagcattcttcccaggtccaggctcatctcctgcagcatcagctagaagctccaagaatgctgctgttaccggcgaattgccggagaatttgagtgtccgtggcattgtcgcaaagcctaacccaccttctgcagccatgcaagttaaggcacaggctcaaacccttccaaggttaatggtacgaaggttaacctcaagacggtgaagcctgacatggaggaaacggtggcttacagtgctccatgacgtttataaccact

SEQ ID NO: 36456 - DNA, 346 bp, Oryza sativa
  Clone ID: uC-osrocyp031c06a1
cacgcaatccatagtcgtgatagagctcccaacgcagttcttcaattgcaaaaagactgtccaaactgaccaagggtgttattatagccggggagttttttaccacgcaacatcaaagagacactaatgcattaagataacttggagcgcggatcactagcaaatttggcgcttagtcgaccttctagatcttggggccagaaccgatgacgtctgccgggggagcatctgactcttacatgccgccggccatgtccgcgccagcgcgctgggtcattttggcgcttacggggttgcagatgccctccagttgctacatcttgtcatcgaactcatcagcctcggt

SEQ ID NO: 36457 - DNA, 155 bp, Oryza sativa
  Clone ID: uC-osrocyp031c07a1
gtagcattcacaacataccgagtttctttttaggaggtaaaactctacgagtctcacagcatagtaaaacgtagccagctattactagatacgagtagcatttttttaggtcgcaaacaaaaggggatacagtccccggcttaagggggtggtaa

SEQ ID NO: 36458 - DNA, 453 bp, Oryza sativa
  Clone ID: uC-osrocyp031c07b1
gcatcgaggacaaatcactcctggggtggcactgatttgaagcagagaagactaacatatttgaccgaatcattcattcaattaggtcatgaattgagcacgctgaaagttctacagaactgggttattggccgatgactacatcaactgttatctacctattacaaaatacttttaaggctagcagttcaacaagtaaaggaccaaagtcgagtctaaccacaacaagcaacctgttcagtatgatggtgcataatggtcgatcgacgtcattaggatcatgcgtattaagtggatatagtggaatggtcggcagggctgacaatgcatcaaatgttgaaggaaaatgactagaactacgtttatacaggaaatgacagcttctgtcgggcagacttatggaatgatcagagataacctgatgaatgatataacccgggtttgatatttgca

SEQ ID NO: 36459 - DNA, 497 bp, Oryza sativa
  Clone ID: uC-osrocyp031c08a1
ccagattggaatcagatatatattgctcggggggtaagatggcccgcttacagtgacaaaccttccaaaacgattcatatggtaaacaggtaacccccttgtgacttcccccaatcaagcccctttattattttccccgtgaataaacttccggttgtagcttgttattttccccgttttttccaccccttaggggaggatttttttttttcccccaaaaaaaaaattttgacttgccttaacaaatctttttaattttgcccccacaatggcccaaggggcttttttggttgccccggggattaattttccccaccccctttttaattggaaaccaaaaacttgtaatgttccccccaagcctcttaaaaggggtctttttgaaaatttaataacccccttttgttttttaaaggcccccgccctttttttttgcccaaaatttttcggttaaaaaccccactgttttttttgggcaaagctttttttttttgaaa

SEQ ID NO: 36460 - DNA, 255 bp, Oryza sativa
  Clone ID: uC-osrocyp031c08b1
gcggtgactttatgatctcatctacttagaaatcccactgattttataattgtacatcttgcttgcctgcaaattatactacatgctggtcatgctgccttcgtgggtacttggtctgccatgggcagatagcatggacaggaaatgattcagttgtgggaacaatgtgcacatgtccaggacttgcacctgacaaaggagcctgcacagagagtggctgaagatatggcggccagtggcgcctgtgactggagg

SEQ ID NO: 36461 - DNA, 138 bp, Oryza sativa
  Clone ID: uC-osrocyp031c09a1
aaagaaagtataatcaaatcacaaacatatcatatacatagacccataaactagcatagttcatggtcccaaaagcacaagagtgctccggtgctcccccacaaacttcctccggcccatgtgggcctgattcggggg

SEQ ID NO: 36462 - DNA, 505 bp, Oryza sativa
  Clone ID: uC-osrocyp031c09b1
ttggttgagccggtcttctttcatatcggcgtgtaccgcgcctgcattgtgcccgtctcctacagaagggtgccgtgcgtgaagaagggcgggatcaggttcaccatcaacgggcactcctacttcaacctggttcttgtgaccaacgtggccggcccaggcgacgtgcagtccgtgtcgatcaaggggtccagcaccgggtggcagcccatgtcccgcaactggggccagaactggcagagcaactcctacctcgacggccagagcctctccttccaggtcgccgtcagcgacggccgcaccgtcaccagcaacaacgtcgtgccggccggctggcagttcggccagaccttcgagggcggccagttctgatcgagtactcggctaattccgtttttcagttcacttttctgcagaaatgtcagtgtgagattgagattgaggtggaggaggaggaaggcctctttgctttagtaaagagaagaggctttggctattctgaggc

SEQ ID NO: 36463 - DNA, 341 bp, Oryza sativa
  Clone ID: uC-osrocyp031c10a1
ccacaaaaaaaatgataagtcttccacaggttgagcttttatatcttaacaaacatactgtttgagacaccagaatccaacagattaaattgtggagctatgtcttcctattaaccatgtgcagggaagtcttattctaccaggcgtcacaaaagttgatacaagctcgaatgtctggatcaatcaaaaaaaaaccatccgatccgtagattcgctacataagtaactatagttgccatgaaagtaaaagaaacacatcagttgatgacatttgcactttgagatcggtaatatgaacatgatgaccttcttcaaccaagccccatctatcaacctggtga

SEQ ID NO: 36464 - DNA, 466 bp, Oryza sativa
  Clone ID: uC-osrocyp031c10b1
atacgggggaagttgcatagaagatgaccaggactcctaattaattcggatactggtattatagaggtattgtttcagtaggatatgaagaatgcagcattcagagttattttgctgtctggttcttatcttatcatccatataatagtactaccacaagatggactgtattcaaatttatcaggttgattccagcagctaagtaaaagcaaacttcataaggcaattgcgcctttgcatttgcatcacatattcacatggcaacccttaaaatgtatgtatgtctgtactcatatgttgcggtgggtaaacttacgaagtagtcagctgctctatacttgcatattgcatatgtgaattaaaagatctgtcatgtcataagctatcggctttgttagttctctggttatactagcatcacgggtgtgcatccaaattatattgattactgacttcaactgtaaca

SEQ ID NO: 36465 - DNA, 430 bp, Oryza sativa
  Clone ID: uC-osrocyp031c11a1
aacaatagctaacaagatgccaattagataagagacacagacaaatgctaaatctcagcatatcccaaatagatgtcatgcttgacaccacaggttacttacagaaagcacagtttttcaagactctttcagagagcattagaaaggctaaacatagaatatggatgcccgtcattcagtgcttattaagttgacagagacacgaggcatctgcatcttgtatagactgaggtgcttctgttccaacctgaagcagactgatcagttcttccttccttcacagaggatgaagtggtacccatgcgttgacttaaatggtgcgctagtagctcccacaggtgtgctaaatgcaacatcctgaaaagggccagccatttttccacgcgggaaccattcaagatcttcacctttttttccagatggacattca

SEQ ID NO: 36466 - DNA, 404 bp, Oryza sativa
  Clone ID: uC-osrocyp031c12a1
gagggtaaggcaaagctgcgagcgccagatcatcttattactacagcttcttggcgatatgctacagtagcttcttcctcccttgcaaaaagaaacccaaaccttatctacaacgcaacacacacaccgtacacagagcgctcgatcgatcgaagcagacgagacgacgatggcgaactactactaggtaagcgacaacacctaggctatacagggatacagcgcgcggcggaaactggcgtgaagactgttgcttttattcaggctctgtcctttgtggcctttcttggagatggctgaatcggatggattttggcggctgcatttggatttttgggggcgggtcttttcttgcccctctttggtgcggtctgggttggcggggggaacccactttttttcct

SEQ ID NO: 36467 - DNA, 243 bp, Oryza sativa
  Clone ID: uC-osrocyp031d01a1
gaagttgaaaggaaattaaactgatttattacttgttccattaaaaccatcacactcgggtacgtggtgaaaccgagaaagttaaaaaacaaaaacagttgttgtagagtgaggccttgcttgctgttacatgagaggtgcacgaagaaccagctcacgagcagagtattcagcccacacgcagtaaggaaaacggtagggatgccgtcgtctacgacggccgatccgccgttcggctatgat

SEQ ID NO: 36468 - DNA, 460 bp, Oryza sativa
  Clone ID: uC-osrocyp031d01b1
tgttcgttttcctttgctcatacgctctccagatcttcagccccaggagctccggagggttcccaatggcggggaaagtgtatcacatgtactactctatgtatggacacgtagctaaactagctgaagagatcaagaagggtgcttcatatactgaaggcgtcgaggctaaaatatggcaggttcccgaaactgtccatgaggaaggacttggaaagatgggctcgcctactatgccagatgggccaacgatcacaccacatgaacttagtgaggatgatggtatgcggcttggattgcctacaaggttcggcatgattgctgcccatatgaaagcattctttgatgcaaccgattgcctgtggagtgagcacatgcttgcacagcaagcccgtcggcatcttttttagcactgttacccacggcggtggtcaggagactacaccgatggcaggaataa

SEQ ID NO: 36469 - DNA, 386 bp, Oryza sativa
  Clone ID: uC-osrocyp031d02a1
gcacacaaactatatagagatgttgatttacatatgaaggtcgatagatacggtcaaagttccctgaagacaaaatcggaactcctctgcacacaacttaaaagaggagacctcaactcaaaatggaacatagatgaagacgccagaaaaggttccaaaagaaaatgcagggaaagactttctctccacaccaccactaaaaactcatgttaattgtctccttgctctcctctctttctctctctcccctcagcacagttactggaaactgctatacaacatggggttaatacattcttaaaaagtgaccaaaatctggaagctctcgctgcgcctttaaccttttttggcctttaaggtaatatgataatgggaggttcagggga

SEQ ID NO: 36470 - DNA, 546 bp, Oryza sativa
  Clone ID: uC-osrocyp031d02b1
cctgtccaattcggtggtctcttcaaggaagatgatcctgagttcaccacctcagacgccgttaccgagctcactatcaaaccttcatcgaaagaaaccgttgagattcctgtcactgagaattccacgattggatgggagctccgggtgcttggatgggaggtgagctacggagcagagttcactcctgatgccgagggtggatacacagtcatcgtgcagaaaacgaggaaggtgcctgcaaatgaggaaccaatcatgaaaggcagcttcaaggttggcgagccaggaaagattgtgctaacgatcaacaaccctgcatcaaagaagaagaagctcctctacagatccaaggtcaagagcaccagtgagtccgtttgaggttgcagctgcctgatcaccagattcaccacaatggcagctgaactcattccctgatggaagagaaaccttttggttttggctctttaattattggttttgctgttttgtttcacatttggatttggttaataaaaaccaaagtgagcttgttttgggatagtt

SEQ ID NO: 36471 - DNA, 337 bp, Oryza sativa
  Clone ID: uC-osrocyp031d03a1
aatgctaatttaataaggggtacaccaggagcaaattaagtggagtaatccaacaaaatgaaaaagaagcctagagacacacacacacacacacacagaactaatagtacaattttgtaactacagaactctccaatctccaataagaccgacatggtgttacaaggaagcagggtagcctgatgcttaaacagtgactaatatcgggacagctacagcaattgcagttagactcttctgcctgaagatggaaaacctactggaactcagatacattttttacaagttagaaagaaatgaagccatctttggccgccaccggggatcatggtgtgcg

SEQ ID NO: 36472 - DNA, 479 bp, Oryza sativa
  Clone ID: uC-osrocyp031d03b1
tcgttcgcctcctcctcctctcgccgctcgcagcgaaaaagccagcgcctcccagcgcccacgcgatcccgacgaatcgaatcgagtccgagacgccgatctcggattcgagaccgttgatttcaaccaacacaagccctcctccggatcgatccgctcctcttcagccatggcaggaatggcacccgaaggctcccagtttgatgctaagcactatgacagcaagatgcaggaactactgcaccaaggtgacaatgaggaattcttcacttcatatgatgaagtttttgagagttttgatgacatgggcctccaagagaaccttctcagaggcatctatgcttatggttttgagaagccatcagctattcagcaaagggggattgttcccttctgcaaagggcttgatgtgattcagcaggctcaatctggaacaggaaaaactgctaccttctggtctgggatcctgcagcaccttg

SEQ ID NO: 36473 - DNA, 488 bp, Oryza sativa
  Clone ID: uC-osrocyp031d04a1
ctctccttgttctttgtttggagcatcacaatattattgtacatgcatacatatctaaactagtgacatgcatgattgttttacaatctttcctatacagtaccacaattataccagctgctaactgtagcatttctggcaagcttactatacttactactatcatacatggcctccatgccacaatacaaactgacactacttgtagaccttgggtactgtagcatttccggcaaactagctagctgcaattttaagttcacaaagacgcggccacgaaagacgtcgagtatacggtatgttattattgagttgcatgcaccaaccagttaaactcaaaagcttaagcttaagagctaaggcgggcaattcaggacatatagattgttggtatgatcaaggagtgtcagttgacgaccctgcaagatgttctgacctcgccggcgtcgcccttcttgaggtcgagctgccccattttgagcatcccc

SEQ ID NO: 36474 - DNA, 480 bp, Oryza sativa
  Clone ID: uC-osrocyp031d05a1
ataagggtaagatcaccatcaacttttgaaaaaacaactttgcataagcatctactacatccagcagcatgaaacataatgttcaaggtatcagactttggaagatacttaaatactaggccaaacggttcgtatttcaaaattcagctaacacctccactggtttcactaagacgaccacacttcaagccaggtgttcacttctttgccttcttaggtgccgctgcagtttgagcaggagctgccgctgcaggagctgctggctctcttgggccctgagccaacctctcctccctcctagcaatcttcctctcacggcttgccttgctcttggcacgctttagcctcaaactggtcagagagtgttttctttcttgccttttcaggcttaaacttgtggatacttttccattaagaacacgcttgttctttgaacatgttaccctttgacctttatgtacatgtaatgatacatgtgct

SEQ ID NO: 36475 - DNA, 495 bp, Oryza sativa
  Clone ID: uC-osrocyp031d05b1
ttttactcttgggcggacgcgtgggctcccacccaggtaaggagagggtggaggaagggaacctctaaggcggcggcggcggcggcggagatggattccctcaagctgcagaagcggctcgccggcagcgtgctcaagtgcggcaagggcaaggtctggctcgaccccaatgaggtcaacgagatctccatggccaactgccgtcagaacatccgtaagttggtcaaggatggattcatcatcaagaagccccagaagattcactccaggtcccgtgcacggagagcccatgaggctaagcagaagggacgtcactctggctatggtaagcgtaggggtacaagggaggctaggctccccaccaagatcctgtggatgaggaggatgcgtgtgctcaagcgtttgctgcgcaagtttcgtgaggccaagaagaatgacatgcacatgtatcatgacatgttcatgaaggtcaagggtaacatgttcacgaacaag

SEQ ID NO: 36476 - DNA, 459 bp, Oryza sativa
  Clone ID: uC-osrocyp031d06a1
gtggttgcaaccaagttgtgtgtatagcataataatgtttaccagatccaacatacaatctcactggaccgtttgaatgccaaggcttatttcaccagtcgcagtcccaggatacagagacatgcttaagcattgttaacaaatggaggaccaaaatttctaccgaaaaaaacgatgagaaggtacacattttttgactgtttgtattgataatccaccaacaattgcccaataatagacactctacatttggagacactttctaaaagatgtagctgttaccttggggtttggggaggtttgacaacaagcattcatcaaccaaaaaggagatgggactttggatcaaaacagtatgacaagttttaatatatttcccaacatgacccactggagaaatgaactgtgtttgttttttttccaagaacatttgagcctcaaaattgtcggccaaaaaca

SEQ ID NO: 36477 - DNA, 343 bp, Oryza sativa
  Clone ID: uC-osrocyp031d06b1
ctaaaccggaaaaagattctgcttttgaagatcgggatggaggcgcaggggcggaacaagatgatgatattgagcgctgataaggacatggaacacgaccgtgaggacggggacgacggctctaacgactacaaccagatccgctcagaggcgaaacactccgactccgaccatgattacaccgataatgactccctcgatcacacccgcgacgacgtgcagttggaccggtctatcgacaaggatggcaagaggcacctgcgacgctgataccatgcaatggatgctagcgatcttttcagacaggctccagagcgtgctgtccaccaaccgaaggggcctc

SEQ ID NO: 36478 - DNA, 319 bp, Oryza sativa
  Clone ID: uC-osrocyp031d07a1
ggggaaccaagagatttccccgttcaataaccaatatatataatgggggaaccaataatacaataacagaacttactgcaaattacaaccagctgaccaatgcgtaaaacagcatcatatcatgcgtccggcaatgagaaggtccagggagaagccacatagtatcgagaaacaccacaaaagaagagaccaagctattgactgtatgtcggcatggtttggagctgaatgaaatgcctcacgatgttgtgcgaagggacacgcacacgcctaattgaatttgtccaattggagagctaaaggcggccccttgagcttc

SEQ ID NO: 36479 - DNA, 400 bp, Oryza sativa
  Clone ID: uC-osrocyp031d08a1
ggtgaatgatgacaagtacttctaaatttaacatgtccatgagaatccagagatgcaatgtacagacagatatacaaagcagcagatattcttcagtccttccacaatttttgtcctctgccctcaacaaaccatcacgatgtcattatatcatatcaaccctctccttccaactatcacaaaaacaagctcactttggtttttaattaaacaaatacaaaatgtgaaccaaaacagcaaaaccaataaattaaagaaccaaaaccaaaaggtttctcttccatcagggaatgagttcagctgccattgtggtgaatctggtgatcaggcagctgcaaccttaaacggactcactggtgctcttgaccttggatctgtagaggagcttcttcttctttga

SEQ ID NO: 36480 - DNA, 165 bp, Oryza sativa
  Clone ID: uC-osrocyp031d08b1
tttgctcttgctgcttctcttctcctcgcttcgtcttcttcctcctctcgcctcttcgttgcgagtagagagattcctgttgcgatttttgagggaatatttttggattttcggtttattcttgcgtgggtttttttggaggcgcatttattacgctcttctggt

SEQ ID NO: 36481 - DNA, 426 bp, Oryza sativa
  Clone ID: uC-osrocyp031d09a1
gagaaaaacatggaagccgtccttaaccacaattcaaatagaccccgtccttaccactcctcccaaacgagaaagttggtcatattaaaacaaaaacaaaaacaaacttttatccagaaccttacttcctaagacataatctagagaaggtcagcgacgttggccggcagctcctcgatggtcacattgtagaacctctggatgtcgaacagcatcctctaattcatcgcgggtgacaaagttaatggcaactcccttcctgccaaaccgaccactacgaccaatgcgatggaggtagttctcaggctgggtgggcaggtcgtagttgatgacaagggagacttgctggacattgataccacgagcaagcagatcagtggtgataagcacacgggaagaaccagatcggaactccctcatgatgat

SEQ ID NO: 36482 - DNA, 225 bp, Oryza sativa
  Clone ID: uC-osrocyp031d09b1
ctacttattccttttctgaactaacccaaagatcaggtctgatgcggaggcaaacacgagaagaagatgccgcgtcggcctatcggcggcggtgtttccttttctctccttctactcctttttcttcttattgtctctcttctttatctctttagttccgtcttcatttcagtcattttatttgtatcttttctgactgctttcaattatgattttcatcttctt

SEQ ID NO: 36483 - DNA, 340 bp, Oryza sativa
  Clone ID: uC-osrocyp031d10a1
gattcaccggtaaccaaatacttatagtacggattaggacagaagtacattacagccacaagcaacatgagcacacgtcttttgcttgttcttattttaggcatcagcattcgcctcactgtaactaccgatgcacgccatgtcgatctgctgatactatattagcagaaccacactactagtacagtaataataatcaaggagccccatctgaagagaatggtaggtggcacaaagccaaggctcgtattaggcctgtcgatcaggcgacgggaggctttttaacgtccttgagggggcggaaccaaaccttttggttgagcacggaggctccaccatt

SEQ ID NO: 36484 - DNA, 364 bp, Oryza sativa
  Clone ID: uC-osrocyp031d11a1
gccccgccttcccgtccgtcgccgtggcgtccacatcgatggcgtcctcggagagcgaggagaggaaggagaccaagctgtggggcgggcgattcgaggagggcgtcaccgacgccgtggaagggttcaccgagtccatcttctacgactggcagctctacaagtacgacatcatgggcagcaaggcccacgcatccatgctcgccgcgcagggtttgataacggctggcgataaggacatcatcttagaggggcttgatcaaatagagaagctgattcaggatggaaaattttgagtggcggacaaaccgggaggatgtcatatgaatattgaggcaccttttgtcgaaaaaggttggtgaac

SEQ ID NO: 36485 - DNA, 249 bp, Oryza sativa
  Clone ID: uC-osrocyp031d11b1
gacaacgaagcacatcttttattcagatcaatacttcagcagaacaatggttcccaatacaagtgcatcgatcgttctgaaattaaagcaacagcgaactgtcgtccataaaagaagttcacgacactccgacccactttcaaaaactggaaccacaataatcggattttcgaggtcttctcgaccatttatgaactaatgccaagctgagtgcgccaatcctcgagctggttttttacttgctcccag

SEQ ID NO: 36486 - DNA, 108 bp, Oryza sativa
  Clone ID: uC-osrocyp031d12b1
tttccgtgctcattcttgcaatagacgatgggagccaagctggttttactggctcatcctcaacgatcaagccggttgatgatgaggaggaggaggaagagggggtgt

SEQ ID NO: 36487 - DNA, 390 bp, Oryza sativa
  Clone ID: uC-osrocyp031e01a1
aggttcaaatccaacttattcataaagcatactgctgtcccacaggaaactgtttcataaaactaacatatcatacggactcgatggtccattaaaccagacacaagtagacatcagcaccacaaatacttgacgaacagaggctcgggatgaccaggcacatcggcagctccaccaaactggctgattactgaccaccacggaggcggagcaccaggtggagggtggactccttctggatgttgtagccggcgagggtgcgtccatcctccagctgcttgccagcgaagatcagacgctgctggtctgggggaatcccctccttgtcctggatcttggccttcacattataaatggtgtcggagctttcaaccttcaaagtgatggtct

SEQ ID NO: 36488 - DNA, 442 bp, Oryza sativa
  Clone ID: uC-osrocyp031e04a1
gcacaagaagccaaacgtgagagcttgtacaaaacttcagctctcttcaatgttgactacgctaattaaaattgtaactccataaaaactcggctacgccgagaaaactgtaattacaacagatacggcgtagccaattcacgcaatgcgcacccatacggctacagtatggttcatttaacgtctgatagacgatttcttaaggtgctgccgcaggtggcgacaaatactgaaaacagcgaggtaatccaataaagaaataacattggaaatcctctccagcggcaacccaagtctctaaatgatcataatcactcgagttaccctgcaacgcaaatttgtacccgggttgcgaacgggcagttccatttgtagaattgtagttggtgttacgggcaaaataacaacgagcggaattttcccaaggcacttcaaattcaac

SEQ ID NO: 36489 - DNA, 506 bp, Oryza sativa
  Clone ID: uC-osrocyp031e04b1
ccagactccacgcttccttttccagaggagatgcgacagtacgacgccttgctcgtctgaaaagcaagggttcccggaaaatcatttccagtgctacctcaactaatggaactatgttggcctattcagattgtgtgaaaccctgcctttttgcactaagacataagggtggaaaaaagtttactctagacaaactagagctgccaaagggattgctgaattctcagtgtatgctgttttctattgactcatccagtttgattctagctggccgtgatggaaagatttatgttgtagacattgccacacgggaaatttcaaatgtctttcaacctatgagaaaaatggatggagctttcaaagaaccacctgttacaaaaatgttcctcactgcggatggacagtggttggctgcagtttactgttctggggatatttacatatttaacctctaggtgcaaaggcaacactggttcataccttgtatgaatgatgggtctgttaca

SEQ ID NO: 36490 - DNA, 421 bp, Oryza sativa
  Clone ID: uC-osrocyp031e05a1
gagccagtgttgtgtatttatactttatttggttaaaaaccagagaaggataaacaggtagtgtgcatgcatgtagaaacccctctacagaaacagaaagagtttgaccaacatttataagagagacaggttgaaagaccatctgaaagctttgaacagatagggcctcgcaacggactgattcctgctcctgacgctgccattatcaaaatccaaagaaggaacgaacacggcatgaagttgcatataaagggacgagagaaccattgcatttttggagaggggccatgctcttgaagaagttccccagagtgttgctgacagaaaagagagggaaatccttacaacaggtagggcgttgaacagaaaagattgtggaggggccaaaagcggctatacaggttctatggggggcaataat

SEQ ID NO: 36491 - DNA, 157 bp, Oryza sativa
  Clone ID: uC-osrocyp031e06b1
tttactctaccgcccacgcgtccggatacccatcctttgagtctcttctgcgacaacactggtctgtatccttttctgctgccttgctaaacaacacgaaccaccaccggatccccacgtcgtcgtcaccaaaccacctgcagacgtcgtcactagt

SEQ ID NO: 36492 - DNA, 244 bp, Oryza sativa
  Clone ID: uC-osrocyp031e08a1
aaacaccataaccaaagcgaactcaattcatggtaacatcacggacgaagaacacctaacactggatggatggatagagggcttctcgactcgagagagccactggacacgataacgactcgactcgatgataagaagattctgacacggatagctaaggataactggccacgatgggccccaccaatcagttcctccagttcccgccggagtcgccgtcgtagccgccgccacggttgccacc

SEQ ID NO: 36493 - DNA, 293 bp, Oryza sativa
  Clone ID: uC-osrocyp031e09b1
ctcacaagcccaagtcgtgtttcaccgaagcagagtagagaaggagaggagcggtgcgccatcagccgtccgatcgagtgatccgatggctctcgctctctccacctctgctgctgctgccgctgccgccgcggcgcgggcgctcgcggcgagggtgacgacgacgaggggttacgccgcgtcggcggcgtccgcggccgatgaggcgggccgcggcggcggtggaagggaagggctcttttgtcctttccctggcggaaggacggctcctactcacatgacctccgtctttc

SEQ ID NO: 36494 - DNA, 561 bp, Oryza sativa
  Clone ID: uC-osrocyp031e10a1
gcaaacaacaaataacacataacataactgatacatagtttacagatgccaaaatttgcgcagcaacaagtatgacaaaactcgcgcagcgattagtccactaaatttcgtacgctaaaagaaaaaagaatacagcaaggctacccaaggaacaatagccatttgacagcattaacccatattagttgctataactccatatcagcagacatttttatgctgctagctgtttggatctcttaacaaacttcgatgtatggcatttcacatcttgggtgaagacaaaagaatgggatgcctgtcgcaagtgccaaaagttgagatgtgccaggacggcatggatcatgtaccgtatatatgtctatgaactggtgcgccaaaacctttaactacattccatccaattctttttttaccattagaacaaagttggctgataggtggccaacaaatagcactgggacttaaaagcaaagaaataaagttattccttatttttggcttaacttttttttttgagctttctttaagctttttgttggaacctttgagaagtttttt

SEQ ID NO: 36495 - DNA, 442 bp, Oryza sativa
  Clone ID: uC-osrocyp031e11a1
aaaaagtaactagcatgcatggtatgccgaataatttgctaggcaatcaacactataacaccgaacatcgcaatcttattaaagaaaaaaaaaacacacacacacatactcgatcgatgaacttaacaacctgcatgcgcgtagtacatatactagcaaatgcataaatataattaattaatttccagctgaaaccacctactaattgtaattaacagtaacggctgctctcgatgatttgccaattgtcgtcgtaccgagccgccggggcggcggcgacggcgacggcggggcagccacctcgtggttcttgtgtggcacgtagtgacgagcaggcaccgctcttgccgccaccgccacgggatgcttctccccgtagccgccgccgttcgggacgcccgccgcgaactgatcatgagctggtggctgccgcggcggcggc

SEQ ID NO: 36496 - DNA, 489 bp, Oryza sativa
  Clone ID: uC-osrocyp031e11b1
aaagccgctgcccctgccggtaccgaatcgccggtccgggccgaccggccggtccacggtttagcaaagcatgtctggatgcccatcccttaacctctcctgcgacaacacttcctgcaacctcttctgctgccaccccaaacaacacgaaccaccaccggcaccccacgccgccgccaccaaaccaccgccgtcgccgccacacgatgacccacccctcaagccgccgccgcagcagcagttcataaccgcacagccaccgccgccagatgaaccaccgctcaagccgccgccctcgttctacccagccgtgctgccgcctgagccgccgccgccacgtcgtcctgcagcgacgccgtacagcaacagagaaggcgtcgacgacgacgacagccatcacgtggcgccgccgtcacgccggtcgcccgcagctcgtcctccttctgcgccggagacgccgctgccgttgccttgctgtgagaagccccc

SEQ ID NO: 36497 - DNA, 374 bp, Oryza sativa
  Clone ID: uC-osrocyp031e12a1
catgagaaatgaaatttgttctatccaactccatcccaagaagtaacaaaacaaatttcacaagttttttacaaaccaaggcagcatagcctatgtgataaatcaaatttatattctgtcctacaatggttacccaccccgtcactggcgaccagtgagcacatcacatgtaaagaccctccggcacacctttcctttttcttgaacatcaccttttcctttgccttcttgaagtcagcatgtgtcaccttcattcggcgttttctcaaagcaagatgtccagcttcagtacatattgcttttgatatcagcaccggaaaactcattcttggtcatgacaaactctttcccccgtgaatttccggtccggtacc

SEQ ID NO: 36498 - DNA, 352 bp, Oryza sativa
  Clone ID: uC-osrocyp031e12b1
agccggtaccggaccggtaatcctgggggaagagtcttttacgtttaaggatgagttccccggtgctgagatcaaggcaatatgtactgatgctggactttctcgccttgtgtgatcgctctaatgaatgtgacacatgctgactccatgaaggcaaaggagaaggtgatgatcaagaagaaggaaggtgtgccggagggtctttacatgtgatgcgctcactggtcgacagtgacggggtgggtaaccttgtaggacgaaatatatatttgatttatcaccataggctatccagccttggtctgctaaatacttgtgaaatttgttttgttacttcttgggatggagttgg

SEQ ID NO: 36499 - DNA, 108 bp, Oryza sativa
  Clone ID: uC-osrocyp031f02a1
ggaaataagatggcagaccaaacatataccaaaaatcagcgatctcatacgcataaaaacagtttctgatggacaacttaggcccacacacagccctaaaggcacata

SEQ ID NO: 36500 - DNA, 408 bp, Oryza sativa
  Clone ID: uC-osrocyp031f03b1
ttttctttacgcgtgggcgcgtgcgtggggcagtcgactgtggcggtggaggaggcgtgggggaggtacgacgctttgctggggcccggttgccacttcgtgccgtggtgcgttgagccgccgcgttgctggctacctttccctccgcgtccagcagctggacgtccgctgcgagaccaagaccagggacaacgtcttcgtcaccgtcgtcgcctccgtccagtaccgcgccctcgccgacagggcctacgacgccttctactgcctcaccaacgcccacgcccagatccagtcctacgtcttcgatgtgatcagggcgagcgtgccgaacatgaacctggacgaggtgttcgggcagaaaaaggatgtggcgcgggcggtggatgaggagctggctagggctatgac

SEQ ID NO: 36501 - DNA, 246 bp, Oryza sativa
  Clone ID: uC-osrocyp031f04a1
agttcactagtatttattacttcatggcaagaaccctgcatcaacaagagtagcaagaatactcgaatcctagaacctatttacactaatccatgatcgtttgaaccacatccccatgagccataaattggatcctatgaacccttgccttctagaacccgtaaattttgattgaaaaaaggattctaaatcctttgctttttgtttttagttaagcccttggctttttttttaagccttttacct

SEQ ID NO: 36502 - DNA, 417 bp, Oryza sativa
  Clone ID: uC-osrocyp031f05a1
agctaagaatctacctttattcccatactaacattcaatggcacaaaatgggaatgagatcccatgaacacatgaaaagcagtagcagcagcatcgcgaaatagttactggtaccgatacaacagatggatcgaaaatctcttacgcgcaaagaagcttttgcagggagcctaattttgctatgatgaagaacagagaccattcctactgaagacagcatcaaaataccataaccaccatgagtcaaattaagggttcctggcttggaaatccttcatgaacgcgacgagcttttccacaccggcgagcggcatggcgttgtagatggaggcgcgcacgccgccgaccgacctgtgccctttgagctgcaccattccctccttggccgccttggcaatgaactgcttttaaaaatcc

SEQ ID NO: 36503 - DNA, 379 bp, Oryza sativa
  Clone ID: uC-osrocyp031f06a1
aaacaaatatacagacagacttcattcatgcttgtgcttaaaagtctgcatacatattatgaaaacacattgcaatcaagactcatatatagcacaacaattagtaatcaatctcaaatgtttgacacgagaagtgcagatcaactggctattaattctgcatgtcaaattgcaaagcaaacagaatgttacctttaacgtgaccatgacacagcatcgatctcatccctggcagacttgtataactcaagcctcttaaagcactgctgccttcgctccataagagcaggatcctcatcaaggagttgcgcaagctgcttagcatctttcctgcccacttgggtatagaaatagttaagcaaggaacgcttagcttccc

SEQ ID NO: 36504 - DNA, 298 bp, Oryza sativa
  Clone ID: uC-osrocyp031f07a1
gcacaaagccaaattaactttattaaaagttcaaaactgattgcaagtttggagcaatgaggtaatccggcatgcgtacttgagtcactagctcattcgctagtgctagctttgttgctatcaacttcattcaaacagagaccagctggcaacagggatacagttcatatatacatgcattctgctgttcatttgccttattaccatgcaccaatataatgcatcctcctctctagcttatcataagtactaattaacttattatcccaaagcatggcaccaatataattgaaccact

SEQ ID NO: 36505 - DNA, 292 bp, Oryza sativa
  Clone ID: uC-osrocyp031f09a1
acccacagaaatcagagagttttaataggattgcaacaagcaaagcacacacaaaaattgcaggtacaaaaaaacatggcggcggcgcgcgctgccggttttaggaacctactataatgccttggggggggctgctcctcctccggcggtggcggtggcctggaggaggccgtcgcggacctgcgcggccatgttgcggacggcgctggggccgtgggggatgaaaacgggggaggacctggagggggcgcctatgttgtggttggggtaaaaatactgggtgacgagcacc

SEQ ID NO: 36506 - DNA, 327 bp, Oryza sativa
  Clone ID: uC-osrocyp031f09b1
ttctctttctcgcgaggctctcgtcgtcgaatcgaatcctctcgcgtcctcaagatgcagatctttgtgaagacattgaccggcaagactatcaccctcgaggtggagtcctctgacaccatcgataatgtcaaggctaagacccaagataaggagggcatccccccggaccagcagcgtctcatcttcgctggcaagcagctggaggatggcaggacccttgctgactacaacattcagaaggagtcgacccttcaccttgtccttcgccttcctggtggcatgcatatctctgtcagacttttaccggcaagactattacccttg

SEQ ID NO: 36507 - DNA, 541 bp, Oryza sativa
  Clone ID: uC-osrocyp031f10a1
ggaagccatttggcgtgttttattgatatgggtggccatcaacccaattacaagaactctttaaattagacgcatgtttagctagaacttgtgccacaacattggcttccctattacagggcttaacagaaacttctacaaaatcacaaatcaaaatattgcatcagtaaaaaatcactaccaaagttgccgaaagcctccatcttgcatcgtttccagttttccaccacttgcaagcaatctgtttgggtaataatattttgacaaccaatctgctgggcaagaacgagtccttacttgagggcgtaggcttctgccatcgttgcatcagcaacatgaggcaagtgccttgagaattcctttaggcggtttatgccaccctttccgtggttttgcatccggtttttccttgccattttataatttagtgtaagagcaacaatagatatagctgatctagcagccatttgaatcatttcaccattcaccatttgtctccttttcaaacataaagtgtgttgatttacaagtgaaaactttt

SEQ ID NO: 36508 - DNA, 425 bp, Oryza sativa
  Clone ID: uC-osrocyp031f10b1
taaccctcctcccctcctctcctctccattccgccgccatggccgccgccgccgccgccgccaccacccccaactccctcctcctccgccgcccggcggcacccaagccggcctccgcggcggcctcgccgctccgtctccccacgcgggcagccaggatctcctgcgcggccgtggccacgcccgcgcagtcctcctcctcccccgccgccgtcgccgccgaccgcggggtctacaacttcgccgcgggcccggccacgctgccgctctccgtgctccagagggcgcaggcggagctcgtcgactaccgcggctccggcatgagcatcatggagatgagccaccgcgggaaggagttcgacgccgcgatcaagaaggcggaggccgacctccgcgcgctccttgccgtgcccgacacccacgag

SEQ ID NO: 36509 - DNA, 493 bp, Oryza sativa
  Clone ID: uC-osrocyp031f11a1
gcacaagaagccaaacgtgagagcttgtacaaaacttcagctctcttcaatgttgactacgctaattaaaattgtaactccataaaaactcggctacgccgagaaaactgtaattacaacagatacggcgtagccaattcacgcaatgcgcacccatacggctacagtatggttcatttaacgtctgatagacgatttcttaaggtgctgccgcaggtggcgacaaatactgaaaacagcgaggtaatccaataaagaaataacattggaaatcctctccagcggcaacccaagtctctaaatgatcataatcactcgagttaccctgcaacgcaaatttgtacccgggttgcgaacgggcagttccatttgtagaattgtagttggtgttacgggcaaaataacaacgagcgtcattttcccaaggcacttcaaattcaacagtaggatttactctcgaataaaatagacggcaccgttcggtccatcagga

SEQ ID NO: 36510 - DNA, 446 bp, Oryza sativa
  Clone ID: uC-osrocyp031f12a1
aatcaagatagcgctatattagtatatttcacttgcaaaatacaacaacggaatcagaaagctgccagccaaggccatgaacgctgcaggcgccacggcattgcagcagcaatctcacacgattacaacacggataaatacagcaagctcaaaaaggaaaaaaaaaacacggacggagaaacaacgtaatctgctgatgagcgtacgagaagccttcaggatcctgaattcctccctttcttatttcggtgcacgtatcgtctcttcctggatcttgtcgcgttcgcgggtggactggttcgatcagcagatgggcaggggctcgccgttccactccttgaggcactcgagcatcgggtcgatgagcttgcgctcgctgatggccaggaacaccttgttgcactcctcgccgggggacttgagcttctttccggggaggtacacgc

SEQ ID NO: 36511 - DNA, 546 bp, Oryza sativa
  Clone ID: uC-osrocyp031f12b1
ggaattttggatattgtcgtccacctgtgacggagaatgcagctccccgtagaccgacggttgtttctaacatggcattaaccaacacgccagataatgttgaaaaattaaccactgatgataagcaagagcttagtatagatccaagtattatgaatttaccaggagtagattgtttcaatataaaggaaattgcaaagaaggagagttatttaactacattccaatggtccgatggaggatttggatttatggaattcacgtgtttccccgatgttgtggcgagctgtggcaggacctcctgcccaagcatggtttcctgcttgtgcgtatgccgtcatgccgtttgagaattggtcgggatcaatgaagtttagatttcaagttgtgtgttctagttttcataaagggcgtttgcgtattgtgtttgatccaacaggtgctcaaacaaatcctgagttgaatgtcgcgtattctcacgttattgatatttcagatactcaagattttaccatagaggttcctcatatgcaaacacgaactttg

SEQ ID NO: 36512 - DNA, 104 bp, Oryza sativa
  Clone ID: uC-osrocyp031g01a1
catattttttcttggggggaaaacattttttttccatgtaatttgaggaacaagcccaatttaacctaacatggaatacccaaggtgaattaagcaaggcaatt

SEQ ID NO: 36513 - DNA, 356 bp, Oryza sativa
  Clone ID: uC-osrocyp031g02a1
gatgaattcaagccgcagctacatttgacggcgaaaaagaacaacactacagccggtagtcgagaataccatgcatggttatacaaccaaacaacatgttgtcaacaaggaagtttagactagttttgtttgccaagagctaaagtctgtgcattacggcacaaacgttttacacacatttccttgagctttttttgttcaacccgactcctccacagcttgttatgtcggcaaactggcatttttaattacggactagcacctcctccccttccaggtgctcttggcgcttgttcaattgctgccatgggtggcaacttctggtgaagtcttactactgtagaaaccaaaagctt

SEQ ID NO: 36514 - DNA, 142 bp, Oryza sativa
  Clone ID: uC-osrocyp031g04a1
aacgacgcatacccgacgttttttttgtttcacaaacgacgggaaaaaataacaagtacggtgcccccttgcttttaaataaaagaaggggggtttcctttgcgggggggggcccctttggtctacccgcgggggaaaattt

SEQ ID NO: 36515 - DNA, 465 bp, Oryza sativa
  Clone ID: uC-osrocyp031g04b1
ttagggcttacccgtcgtctaagttaaaaggaagccatggagcacaaggagactggatgccagcagccagaaggcccgatcctttgcatcaataactgcggcttctttggcagtgcggctaccatgaacatgtgctcaaagtgccacaaggagatgataatgaagcaggagcaggccaagctggcagcctcctctatcgacagcattgtcaatggtggtgattccgggaaggaaccaattattgctggtcacgctgaagtagctgttgctcaagtcgaggtgaagacgcttgttgcgcagcctgctgagattgctggtcctagtgagggggtcacggtgaaccccaaggggagggaaggaccaaatcggtgctccacttgtcggaagagggttggtcttaccggattcaactgccgatgtggcaacttgttctgcgcaacgcaccggtattcccataagcatgac

SEQ ID NO: 36516 - DNA, 482 bp, Oryza sativa
  Clone ID: uC-osrocyp031g05a1
cgttccaaacatttaaggagctcatgaatccaataatccggaggtttttttaaaaggactcatctcaacatccataacaagcaaacgatagttgtttccgacaccaacattagaccataacgagtcaactgacaaccatagactagaccaaaaataccgcggactgcatagataaaacatcagtgtcgagcagaaggaaccgctcagcacttgacctccttcagcccatgagagaagtaaaggaaggttgggtcggtggctccgtccttgtagtaggcaaacaccaagccgccatcatcatgcatgctctcaccaacaaagaactgaaggtccttgagctttccaagcaagtacttggtggcaccctcaatgttctttttgaattcctcttgcttttccgcatccagcttggcggagaggttcttgatgtagcgctttatgaaggtcacaaactgcttcttgtcaaaaggaggttgctcctg

SEQ ID NO: 36517 - DNA, 397 bp, Oryza sativa
  Clone ID: uC-osrocyp031g06a1
atgaagcaacagaagcaaattcatgtgcgaggccagttcatcgaattatttggatacaaaaaatagggtgccccttcagggcttcaggagttaggatagggcaaaagagaatcacttaacaattgaccaatcatcatggtatgattgataaaaaaaccacgcatacttttttttttgaaaaatcataatcacacgttgcgtttactaaagtatcccctacctgcagaatttgaagacttttttacaagatagctgatggccggcaaaacatgcaccatgcaatttttacagcccctttgtccttcagactacagagggaccccttttttgaaggtcacatgggcggagcttgttcattacacgcccccataattgccattggtgggatgcttggaaa

SEQ ID NO: 36518 - DNA, 358 bp, Oryza sativa
  Clone ID: uC-osrocyp031g07a1
aaaaaaagaacaatttccttgccatcaaagatgcaacttggtcgcacaaaaacattgcctctcctagatcaaaatttctcagcactatgccagtggtattggcaatatgataataccaaaccggcgattttcatcactcaaccataagcttcgcacaagatatgtctacccaattcaacaatggaaaaagcttccaaacatttaattccatgtcccgaaaaaaatttcccccgccagtttcacttaaccaacttaatcccaacactttcccaactgggttttcaaaccaaatggacgagaccatttttttaagccgaacccaaacctttttttttacttcaggaccggacttttgaaa

SEQ ID NO: 36519 - DNA, 328 bp, Oryza sativa
  Clone ID: uC-osrocyp031g08a1
attgcaagaaatccatgtgactgggctgagcagttctctcttgactcgattaaagattacatgtgacgatgtttgtacctaattattttgtacaccaaagtttaaaccactgaatgcgctcagaaagcttatcaatatatggcagaacagataaggcccgccatgtatattgatcacagtaagggaacaagtagacactcccttcgtctcataataagttaatttagtacgagatgtggcatatcctagtactacgattttggacaaagacatgtccagattcgtagttctaagatatggcacgtcctgtaatagagtaacttatttt

SEQ ID NO: 36520 - DNA, 391 bp, Oryza sativa
  Clone ID: uC-osrocyp031g09a1
gttaatcagacacaacacatggatggaatttcattcgatagcagagcatgcaaatcagtaccagatatcaaacagaaggggtatgatgacaccaaaatgataagctggtctctatttccagcacaaaaacaaaatttagatttagtccctgatagcatccactagctgctgaatataacaaaacagatactatgtccggtcacttcacttcttctcttccttctctgcctcaacagcccttttctggcgggcaccaacatggcgctggttcatcctctcaacacggagcttagcataggccttgaacgcctttcatctaattggggaccttcacaaccttaactgagcgcttttcaccacgagcaataggcatgtagtcaccctggacctg

SEQ ID NO: 36521 - DNA, 482 bp, Oryza sativa
  Clone ID: uC-osrocyp031g10a1
accatataacggacgattgctgattactattactggttgcaatgtaacacttcggatacaatagtacattacagagctagctaaatgcgaagccacaataccgtcagcgcaagacgatcataaataaagcttacacaacatagccaacatgcaaaccattcggactgaccagagatgagggttcttgaagctgccgtggtgtgccatgcatcacaaatgccgaacaactagattgtagcagccaacatgaaaggaaaaggcatggataatgcagcaaagatggatgatgaagaccgcagattgtgacgcttcgttcaccaaccatatgaaacccctaaattttgtcaagtttctccgccttcaccaccggattagccttggcaatagcattcctagcagcggtccgatagtcaaactggcagtcatgcttatcggaatagcggtgcgttgcgcaatacaaagttgccacatcggcagttgaa

SEQ ID NO: 36522 - DNA, 280 bp, Oryza sativa
  Clone ID: uC-osrocyp031g10b1
acgttcactttgcgcgcaccgctactcccccctcgccgagagagctctagggattgcgctggcgaatttttttttaattcggggggagagatttgtagaggcctgaccatgttggtctaccaggatctgcttaccggtgacgagctcctgtcggattcgttcccctacagagagatcgagaacggcatcctctgggaagtcgatggccagcggtgtcgatcaaggagctattgatgtgggacattggtgccaacccatctgctgagggtggcggtgatga

SEQ ID NO: 36523 - DNA, 147 bp, Oryza sativa
  Clone ID: uC-osrocyp031g12a1
ggcggtggcggtggtggtgtcggaggaggaggaggaggtggtggtggtggatcctactacatcttatgtttaaaaacaaaaatttctttattttaatcatatgcaagttaatttacatgttcttttttatttataatttaagctttt

SEQ ID NO: 36524 - DNA, 266 bp, Oryza sativa
  Clone ID: uC-osrocyp031h01a1
atactcaagagagaactacatacatccaccggatgataaagattcaaaccacatacccaaacaagcacaggtgacttaacaaccagacatttgaacagctttttactaacaaattaaacctagaaataacctttacgctttccataggaggtttacttggctggaccggacatacattttttaaacctagtttcaagtttccagtctattttgccaccaaatgcaaaaaacctattatgagaaatgcccttattgaaattccccgg

SEQ ID NO: 36525 - DNA, 319 bp, Oryza sativa
  Clone ID: uC-osrocyp031h01b1
ctccgttggggcaaggaccccgcgggcggcgggggggggctacccgcccaagccgcggcagacccaggagcaggcgcggcggaagaagacgtcgcgcgcgcaggaaggcatactcaagcacatgctcaagacgatggaggcgtgccgcgcgcaggggctcgcgaacgggaacaacccggagaagggcaagccggagagcggagccaccgacaacccccgaggctggcggaaggagaaggcccgattcgaccggaacggccccgccgccatggacaagaaccaggccgaaaaacgccgaaccgggccggaagagcaagcc

SEQ ID NO: 36526 - DNA, 388 bp, Oryza sativa
  Clone ID: uC-osrocyp031h02a1
aaaacacaagaacttgttttaacaaagcatacggacagtacatatacggttacaacacccagtctttatacagttctgctggagttccatctactggctgtcattgtatctcaggacagacaggttaacataggtacaacgcaattacaggctaaaccgaagcgaactacactgtcagcatctctaacagtatcgtcaagcaagcttatttacagctgctctagtaaatttacaacgtccctggcagaatccctttcgtttctggcagcgacgaggcacggtccatggccttagcaggacatctcacccgttagctggatagaaagcaaccgactttagtggaatcacctggtcctcagagttctttattttctctggagggaaatga

SEQ ID NO: 36527 - DNA, 101 bp, Oryza sativa
  Clone ID: uC-osrocyp031h04a1
aatccccaaacatggccagaggctttgcttatgttcagaggttgacttgagaaaacacccaggattcccaaactacaggggcaaattcatctaatttaaac

SEQ ID NO: 36528 - DNA, 446 bp, Oryza sativa
  Clone ID: uC-osrocyp031h04b1
ttttgtttttttcatccaactatacaagttcctgaagagtttacatgtgacccagaagatcaagatgtcgtgcggtggaagttgcaactgtggttcctgcggatgcatcggtggctgcggaaagatgtaccctgacctggctgagaagatcaccatcaccactactactacatccactgtcctcggtgtttgcacctgagaaggggcaatttgagggagttgtgaaagcagctgaatctggtgagggtgcccatggctgcagctgtggttccagctgcaagtgcaacccctgcaactgctaatggccaatgcgatctgtgactatgttatgaacaaacaaagccctttcagtctgatggctcatggcttgtgagaccctgttaatttcaatcattgtgtgtgccctcgcccgtcattgaatgtcaaaaattatggcttgaaaacca

SEQ ID NO: 36529 - DNA, 162 bp, Oryza sativa
  Clone ID: uC-osrocyp031h05a1
gccggtgaggcgaagatgtggtggcaggcgtacgtcgacgaccacctgatgtgcgagattgacggcaaccacctcaccgccgccgccatcgtcggccacgacggcagtgtctgggcgcagtccccccactttccctgtagtccaagccctgaggagattact

SEQ ID NO: 36530 - DNA, 107 bp, Oryza sativa
  Clone ID: uC-osrocyp031h06a1
gctgataaagaaaaatggcattttgcaacacatttaacttgttcagtgttcaagctaacgttgaacctggtacaagtacaacatgctgggacgcatgtccacatttt

SEQ ID NO: 36531 - DNA, 157 bp, Oryza sativa
  Clone ID: uC-osrocyp031h07a1
ggaatcagccaaccaagacttttgccagtaaacgagaaagccagtgcagtaacaaccattcataaattgaaggaaaacgggcgcattttccaggaccatgccaaccaggttgttttcaaatcccaacacatatagatgttttttaggggaaatcaat

SEQ ID NO: 36532 - DNA, 437 bp, Oryza sativa
  Clone ID: uC-osrocyp031h07b1
taccggcccggactgcctggctgggctcttccgctctctccctcttctctagcctggcctatgctttccaggccgtgggttgcccgtacctgccgagggatgatcgccgccttgcatcccctcctcctcctcgagtggttcgtctactactatacgcttggtgctgcaggtacaagcgattggcagtggcattgttcatcaaaggttttgtgcaaaattatgcgatcttcatgggctgagatagttgcgaacgccgaggaatcggcgcccgcgactggtgctgctcccacccctgacgctaatcaccagaactcacgccccactcgcagcgcatacgtgcctcctcacctgcgtggccaggcaccaaccacaactgcagatacagctacagctccaggaccagctgctgtccagccctcagcttctgtacagccttc

SEQ ID NO: 36533 - DNA, 327 bp, Oryza sativa
  Clone ID: uC-osrocyp031h08a1
atgcacgcacgcgtacgcttgcttgctttctattgttcggcctttctttttttttttaaaacacaagaacttgttttaacaaagcatacggacagtacatatacggttacaacacccagtctttatacagttgtgctggagttccatctactggctgtcattgaatctcaggacagacaggttaacataggtacaacgcatttacaggctaaaccgaatcgaactacactgtcagcatttgttaacagttttgggaagcaagcttatctaacagcagcatctggaaaattaacaacgcctcctggaaaaaaaacctctggtttttgg

SEQ ID NO: 36534 - DNA, 456 bp, Oryza sativa
  Clone ID: uC-osrocyp031h09a1
gaaacatgcacttattatttgcaacagggaggagtagccaactattatcagaagcacttgcctcaagcatagatattggaagccataatatctaatactctacaactggccaagaagtgctgttggcttcctgggcaaccactacatgacatgaatgacgacacactaaacaccctacattgaaatgaaaaaaaaaaagacatagccagctccaaacttatgagaactcgactgaaaactcttatggttagataatgacggcaaacaattgaagactatatgctaacagacgcttgttaataagatgccaaatgacccgatgactcccgactcgctgtcctgttttgcttcactggtgaaagcgtccaaattctttgggatatgatgaaaaggccccagaaattgccccaaaaatggacccacttgccacattttaacggaatcgtttttagaaaa

SEQ ID NO: 36535 - DNA, 428 bp, Oryza sativa
  Clone ID: uC-osrocyp031h09b1
tggatcaaacgtaccaacggtgctttttatgggtgatgaggtggcgaaggcggcggtgctgatatcgccggcggcggtgacgacgtcgtggctgctgctggcgtgggtgagcacggtggcggggaacctgtcgctgctggggtcggcggcgaacctgatagtgtgcgagcaggcgaggagggcgcccaggaacgcctacgacctcaccttttggcagcacatcgtctttggcgtcccatccaccctcatcgttaccgtcgtcggcatacccctcatcggcaagatctgatcttatcttatcgacccatccaaattaattaattatgagatcgacaaacatccaagcttgctaggctcgtcgcgtcgtcgtcgaccaccgaccataatttatgcatgcatgccacgcacggatattatatgcttcctaa

SEQ ID NO: 36536 - DNA, 499 bp, Oryza sativa
  Clone ID: uC-osrocyp031h10a1
aacttattttttattaaaaaaccattttaaaataacaaaagaggtgtataaaaaaaaaatattttgacaaaaaaaaatccaatatttttatttttttaaaaaaacacaaaaaatttttatttacaaatatttaaaattaaatattaatattgtaattaaaaaaaaaaaaaaaaattctcttttaattaaaaaaaggggggttaaaacaaaaaatctattttaagatccattttaaaaaaaatttttaaaaaaggggttcttctatatatttggtaacaaaaataaaaaaaataaaaattcaaaaaaaaatttaccctcttttataatacttttttataaaaaataattatatatagagggtattttaaaaaaatttttgtaaaataattgttttaaaaacacacaaaataattttgtttaaattaaacattatggtgaaaaacatttcttaaaaaaaataaaaataattaatactatttttttttttttatgaataaaa

SEQ ID NO: 36537 - DNA, 431 bp, Oryza sativa
  Clone ID: uC-osrocyp031h10b1
atttaccaaacccaaactttattcttagtccgagaataggccaacccaagtacatttatataatgcaatcatttttataaagcaaaacccacaggttccatgaccaggttaatgtacagaactcacggaatggaccgctgagtttgatacgacacgatgccaaacataaaccacaggtaaatattttttaacacgttcaccaaccaacaaaccggagctaaattattcactccatatcatgtgatacgcaaggagatgcaagctcacattactgaaccaaatagggggtaaacttagtcccaaatgaccaaaatagcatattgaggacttaacaaccctgcttgaacagataaatcgccaagcctttccacaatcatgttgcactggcctggggtcaatgggtcatcatagattccaagaatcaacgacag

SEQ ID NO: 36538 - DNA, 72 bp, Oryza sativa
  Clone ID: uC-osrocyp031h11a1
aaggatggaattgagtagcaatactttcaccccaaaatacagtttagcgacaatatcttagaaaagccgctt

SEQ ID NO: 36539 - DNA, 175 bp, Oryza sativa
  Clone ID: uC-osrocyp032a06b1
tcctgacgccgcggatggagtcgccgccggagctgcagttttggatggtgctcagcttcaggcgcggcgtcaagctcactgtcgtcgagaggcgccacgccgccgccgtctagacaagcgcagatcacctgcaaaaaatactctgtgcaacatttggaatcgcttttttcactgg

SEQ ID NO: 36540 - DNA, 384 bp, Oryza sativa
  Clone ID: uC-osrocyp032a08b1
tttcgctgccacttccatgactctcgaatgttcgtctcacgcccaggggcctattgagcgagtacttacaccgggaggcagacgatccagaaggagaaggggctagggccctccaaggtagacgactccgacgggcacgctttttttgaccttgataatgaggaccagcatctaaagagcaagctgaaggacctgaacatcatcaatgcaaaccatatggatattgccggaaccaggaaggctgtggtgaatgaccacccgcaccatgagctgatggcattcaagataattcaagtcaaggtcgtcaaggagaggattaaaaataacatgggaaaggtatgcatgaagtgttgaacaaggaagattgagaggccacccatgaaa

SEQ ID NO: 36541 - DNA, 202 bp, Oryza sativa
  Clone ID: uC-osrocyp032a12b1
tcttttgcagcggcgagacggtgatcgcatacaagcaattgaaggccaatactttgccaacatgggtgtgatcgtgtgccacagcaaggcggcatgggaagagcggcgtctagacgagcgcagatcacctgcaaaaaatacttgttgcaacatttggatcttttgtacaaggaaaagataaacatttgtacagttgtgactg

SEQ ID NO: 36542 - DNA, 277 bp, Oryza sativa
  unsure (1)..(277): unsure at all n locations
  Clone ID: uC-osrocyp032b03b1
ctggaatgaacgaactcatgnttttgtacatgaacaacaatagcttcagttcatcattatttgaataatcactagccgacgcattataggctgaggcgctatcagattcataatttacatacctaaaataattatttgaataatcaccagccgacgcggtatatatatccattaaaaataggtctaacaacatatgtatgagaattaatggtacttgtaaaattattttgagaaacatatatatttgtaaattttacctcaaaaaaaaaaaaataaa

SEQ ID NO: 36543 - DNA, 494 bp, Oryza sativa
  Clone ID: uC-osrocyp032b06b1
ggttcacgacacggttgttacgccgatgagagggcgtgctgggtttgtttatcctgccttgctggtgctccctcctcagcgatggaacagtacatggcacctattgtgcagttcttggccaaaattggggctccacttctggccagtgtgtttccttactttacttacgtgcacaatcaggaaggcatcgatatcgattacgcccttttcacctccccgggaactgtggtgcaggaccgtgaacatagctatcagaacctcttcgatgccacttgggatgctctgtattcggagaaggaaaaggtgggtggattaaccgtcagaatagttgtctcaaatagcggctggccatcagctggggctccttgcagcgaccaaagatatggttagggcctacgtcagaacctgatttaccctgtgagcaaagggacaccccataggcccgtacctattgagacatacatttttgccatgtccatgagaacgagaaaacc

SEQ ID NO: 36544 - DNA, 190 bp, Oryza sativa
  Clone ID: uC-osrocyp032b07b1
tcgtgcaaacaaaggtagaaagcctcaaaagcaggaggtgtacaaagcgagatacctagatccaccaacgacgaagagctatagcaagatcgtcttatctacgttcgttaatcgatcacgatgccgctgagaaagaaaaagaaaaaaaaaataacgcgccttaaagaaggcttattgatgtgagtattaa

SEQ ID NO: 36545 - DNA, 469 bp, Oryza sativa
  Clone ID: uC-osrocyp032b09b1
ttagtagtgtatatcatgatgaattagattgtcatatcggcgctttgagcgaaaattctatatttaaatcgttgcattgttatatgagacccaagaaatgtgcattgaccccaatggaagcgtgtgcggtgaatatagacggagcgcttcgtgaatggtttaatcacggtgagacaatttatgagcgtcgtcgtgaggaaatgatgaaggttgccgtagagaatcaactcgcagaacggtgcgtgatgttgagcaggtcttatatggattgtgttagtttgtggaagttaaacgctttggagtcatcaccaatgaatgcggaggatgattttaacgtccaaagtggatttgagtttgaagatttatatttgagagctcaagaagagataccaatggctttgtttctgtgaatcaagtcattattgcaccaagattttgggaagctgatttagtatttaaaaggagtttt

SEQ ID NO: 36546 - DNA, 418 bp, Oryza sativa
  Clone ID: uC-osrocyp032b12b1
ctcgtttctagatcgcgagcggacggcctgcggtggtggttttacaaggcaccatcaagtgttgcttcccaagaagcaaagagtgcaggggcatcgagctatataatagtagcaaagcccgtgagagacaggcccaaaaaaaagaagggagaaaaaagaaaggaagaagaaagaaaaagtaatgaaaaaaacatgcacaagttgctgatgaaccaaaagtagcctgggggagcaagatccatgcatagaactaagcaattttccaacttaatttccgttcgctaaggctgagatcgatgtacggggatccagacggcaatgtcggctggtcggttatagtgaaggcttctcgcccttgccggggctgtcggtggccggacggttgccgaggctggagcggcggatcttgtcgatcctc

SEQ ID NO: 36547 - DNA, 424 bp, Oryza sativa
  Clone ID: uC-osrocyp032c01b1
ggtccccctcccggcgccgccaccgccaccgcggccgtcaccggcgaggaaagcgaggagacgaagggcggacatgactgtggagaaggtggacgcaaccgtcgccgacttcgtctcccactttgacaagctcttcgtcgccggggacgacgccgagggcaaggtgaagctgcttcttttccttgtcgaccgcgacgtctcctccaaccaaacctggagccccgactgtaacgtgttggtgccggcgatctacgacagggtggaggcgactgctaaagggaaggagaaggacgtggtgctgctgcgcagcgttcgtatgttacatgaccacttggagggacccggtgcaccccgttggaggggttaccccgtgttcaagctcaccggcgttcccacgtttataagtgggagaacggtgccacgg

SEQ ID NO: 36548 - DNA, 427 bp, Oryza sativa
  Clone ID: uC-osrocyp032c09b1
ttcgagccggccttcctccagatcggcgtgggccgcgccggcatcgtgcccgcctcctacacaagggagccgtgcgtgaagaagggcgggatcaggttcaccatcaacgggcactcctacttcaacctggatcttgtgaccaacgtggccggcccaggcgacgtgcagtccgtgtcgatcaaggggtccagcaccgggtggcaaaccatgtcccgcaactggggccagaactggcagagcaacttctaccttgacggtcagagcctcttctttcaagtcgccgtcagcgacggccgcaccgtcaccagcaacaacgtcgtgccagccggctggcagttcggccataccttcgagggcggccagttctgatcgagtacttggctaattccgattttcagttcacttttatgcaaaatgctagtgtgag

SEQ ID NO: 36549 - DNA, 340 bp, Oryza sativa
  Clone ID: uC-osrocyp032c12b1
tcggtacccgagccgagccgtgccctgccctgcccttctttcgcccagggttcgcagccaggccgttcgacgtcgtcggagggggaagagagccgcggcggcgttaggaggaggaggaggggcgagatggaggcggagaagaagccgacggcggtgtccgacgaccgggcgtgggcgatgaacgtcgccagcctccgtcggcatcatcatggcaaacaagcagctcatgtactccttcggctacagccttctccttcgccacgaccctgaccggatttcattttacggtcacggcgctcggcggatggatcttcaacgccaccggtttcttcgtatccaa

SEQ ID NO: 36550 - DNA, 446 bp, Oryza sativa
  Clone ID: uC-osrocyp032d01b1
ggtactcgtggggcaaaacttagcaaaaattgtcagatcctgttattgaaacatctggctttaagctcggttgtcatttgtagacctataaaacaccaggaacagatgagcttcaacaaggattttttgcaaaaaacagcgattgcttgaacatgaaacaccgtggtcaccacagtgagatgtcagcggcgtacattaggagtggcagacaatggctgagtgggttgagagaaggtgttgaaggtggccccgtcatgccagtggtggaactgaagtcgttcagaacagatgcctggacgcaatccaagtcggtgccagccttttacgacaggcaccacgctgatgacgtcaccttaactgactactcaatgacgttacgaggtggaggtcacctgaccggcgacggagtggtggcctatcggtcagaagagttttatgatgttgag

SEQ ID NO: 36551 - DNA, 390 bp, Oryza sativa
  Clone ID: uC-osrocyp032d04b1
cttatccacgccaccgggtgctagccagagcgaaacgaaaatgaagaagaagcttttgaggttgctgatcatggtgacagaggcggccatggcggccgagccacagcaagcggttggttctgagcatggactactacaggatgagctgtccgttcgcagagatagtggagaggagcgtggtgagccacgcgctgatgggagacccgtcgattgacgccagactccttcgactacactttcatgactggtttaaacagggctgagacaactccgtacttcttgacgtaaccccggacaacaccgtacggaaggacacgcttgccaacaagaggctccgcggaattaaagggcattgaccgcattaaagacgccctctagtcgaagtgcccc

SEQ ID NO: 36552 - DNA, 339 bp, Oryza sativa
  Clone ID: uC-osrocyp032d08b1
tcgtggacaccccaaggaaaacgatcctgagtgggggatcttaaacgccgttacccttctcaccatcaaaccttcatcgaaagaaaccgccgagatacctgatactgagaattacacgatcggatgggagcttccggtgctcggatgggaggtgagctactgagcagagttcactcttgatgtccaggggggacacacagccatcgagccgaaaacgaggaaggtgcctgcaaatggggaaccaatcatgataggcagtcttaaaggttgacgagccaggaaagattgggctaacgatcaaacaactcctctatcaaacaaggaagaagctcctctgct

SEQ ID NO: 36553 - DNA, 422 bp, Oryza sativa
  Clone ID: uC-osrocyp032d12b1
cgcgaagcagcaacactccgagcgagagagtgcgtgtgaagccatggcggcgcctgcagccagcgcgctcccgctcgacggccgcgtcgcgctcgtcaccggcggctcccgcggcatcggccgcgaggtgtgcgcccacctcgcctccctcggcgcccgcgtagtcgtcaactacgccttcaactccgccaacgccgacgccttcgtcgccgaccttaactcccgcggcgccgccgccctcccgagcgccgtggcggtgcgcgccgacgtgtccgacccggcggcggtgcgcgcgctgttcgaccgcacggaggaggcgttcggcacgccgccgcacatcgtcgtcgactgcgcgggccttctggagtccaagtacccgtagatggcccacaccgccgaggaggacttcgacgccatgctcg

SEQ ID NO: 36554 - DNA, 471 bp, Oryza sativa
  Clone ID: uC-osrocyp032e02b1
tcacgcacccaatccggttctatcctccgcgcatctatcacccggcgccggaatttccgcccgcattccgcgtcgcaagcggaggaccctatgcgccgattccccaccatcatcgatctcctccgccctctcatccacacggcgccagggaagcgacgccccaaccgaaccggactgccgggacaccgacgcccatcccgttcactcgactgcccctctgcgccgagcatgcggatcaacgtcagacgcctgtcgctccactagtcctacactgcgccgtcacggatctcagccgccggatccgctccccttgccctccttcgcgccgtcactgaccttcaccttgacggacgcctgcccgtaacacatcgaggtcaccgcagatcccttgcgaaggcaaactgcttaatcctggcggtctgctttgagcctccacaaaccgtcgtgggcataatagtaaaaggttatccc

SEQ ID NO: 36555 - DNA, 78 bp, Oryza sativa
  Clone ID: uC-osrocyp032e05b1
gtgggagaccgatcaaccggtccagcaatgggggggctctttagggtgtgatccccgccaccaaacggtagtcggttg

SEQ ID NO: 36556 - DNA, 329 bp, Oryza sativa
  Clone ID: uC-osrocyp032e07b1
acgtgaaaggaaaagcaagaaaaaggcacgggggggggatttaaaaaaccgagaccgcgacccacaaacaaaaagaggagcaggcgaagccggcgcaacgcggacgaggacgatcaaggcgaaagccccaagggaagagggagagacaccagagggaccagaggaaggcgaaacacagagagaatagggatgaagaacccgaaaagaatgggcaaaaccactgaaagagacaacaggagcaggggaaaccagcaggaaataagcaggaagcacagaaagaagaggaaggacgacagaaacagaatatggggaaaaaaaggcatgaggcg

SEQ ID NO: 36557 - DNA, 323 bp, Oryza sativa
  unsure (1)..(323): unsure at all n locations
  Clone ID: uC-osrocyp032f03b1
acgcctntttacttcccaagctcgccgcccaagaaaaacactgaacctttgccttcctctctcgtccgatcgacctttgcatggcagcagtagctagctccaaggggcgggtgatcgctggaagcttcgtcgtccgcgtcctggccggcaaggccgcctccccgaggagatttgtgagcgctttagcctacgacaagaacgtggaagagcatgtgcgcccggcggtggtgccggacgatttgatcggcagcgtccggagccctgacaagtactggggccctcacccgaccaccggcgtgttcgggccagcggcggtggacgcc

SEQ ID NO: 36558 - DNA, 466 bp, Oryza sativa
  Clone ID: uC-osrocyp032f04b1
cactttcacacatagcggttgggtgcaaacaagaaagcatcaaatgttggacaattcatagatggtgctaatgtatcaaaagttgaagatggtcatgtggatagaagtataggtgtgaaaaaaccccgatattctgcagatgaagggccttctttgactgaactgagtggatacaattcaaagagacatgaatttgacccagagtatgataacgatgctgaacaggcactcgctgagatggagattaaagaaactgattcggaaactgatcgtgaactgaagctaatggtattgcgtatttactttgtcaaggcttgatgaaagaaaaaggagaaaagagtttcatactggaaagaaaacttactaatttcctaatcctttggagaaggatctcacaaatgaagacaaggaagtttaccatccttataaggtgttcatgccgtttccttctaaggaggaacattga

SEQ ID NO: 36559 - DNA, 279 bp, Oryza sativa
  Clone ID: uC-osrocyp032f05b1
ggtccttgcccccctaatagtctatccattgcggcgtcatttccggcgtcgtcgacggcttcaccacctgcgactgccgcctacgacgtcgattggaggcaccaaagccggccgcctgcgctgggtggccgacttactgttcccacgcgggcacccagtatgtcttgcgcggccgagtgtgacacccgtacattcaaacatccttcaacacgccgacgacggcgaccgagatgtctacaactccgccgtgggcccggacaggctgccgccataggggct

SEQ ID NO: 36560 - DNA, 260 bp, Oryza sativa
  Clone ID: uC-osrocyp032f09b1
tcgtggacgcgtgggcacaagcgtggggaagaaggtggtggttagaggaggaggccctgggggagccacagcagcggagctggggccaagatgccactctgagacgaggagagtcgaaccacgagtcggtggatatctctccatacacgtccagaaacgaggactgaacgatgcgagaccaagaccagggacaaacgactaaaggaccgttcgacagactacggacacggaccgagcaccatcaagggacagggccctac

SEQ ID NO: 36561 - DNA, 470 bp, Oryza sativa
  Clone ID: uC-osrocyp032f10b1
ctatttttttcatcctatcgattttgcagtttagccctcgaagaagcaaggatttcgagcccggtccctaggctcgatccggccgtgtcctttgctccgatcgagcgcgcgaggtctcgtaaggtccatcctgagcttgttgctgtggagtgcgcgattccgcgctcgatttcgtttcttccggcgcagatttcgtgttttttggcctagatttggcttgtgggtgaccgcctaggcgtttctcgcgtgtttcggctttttgtctgggatcgatttgtggctggatttgcttgttcctggctgcggagcttggatcttagcattagaaaccctcagattggggatttcctgccggaggaagctttttggaggagctgcctttgggaggaactctttcagttctgagggtttcggtgtttgttgctcgcctggctcgagaagaaagctggaaatctcgtattttagggcgg

SEQ ID NO: 36562 - DNA, 387 bp, Oryza sativa
  Clone ID: uC-osrocyp032g04b1
tggttatcgcgccgcctcgctgccttccggccggggctttgttacgcttctcggcctactacgggaggaagacagtgagataagcagagagattgaggcgcagaatcattcggcatagagcttgaatggtgtagagagctacagggatggatcgccggatctggctatggcggcggagatcgactgacaagagcccggccgtgaccgatagctcggtttcttcttccatcccagaggctgtcttgatgaacaggatactcccaaagagttcttcaagctcactttaatcaccggagatcttgttgaaggaagcgcaggatgacaatgtaaaggtgatggtgttgagcaagagactgtaatatgcagttttggacatacatgcaaaag

SEQ ID NO: 36563 - DNA, 429 bp, Oryza sativa
  Clone ID: uC-osrocyp032g10b1
tcgtcctcctcgcctccctcccctcccctcccctccccgtccggccatggcggcgtcgctgcttctccgagccgcccgccggcgagacctcgcctcgcccctcggaacgttgaccgccaatgctcaatcggcatattctgcgaatatttgttcacaatggggtagttttgcaagagctttcagtgtaaaaccaactggaaacgaggttattggaattgatttgggaacaactaattcttgtgtttctgttatggagggaaagaaccccaaagtgatagagaattcagaaggcaccaggacaacaccatcagttgtggcctttaatcagaagggagagcgacttgttggaacttcagccaagcgtcaagcagtgaccaacccacaaaacactttctttggcacaaaacgtctgaatgggagacgctttga

SEQ ID NO: 36564 - DNA, 206 bp, Oryza sativa
  Clone ID: uC-osrocyp032h01b1
acctgggtgatcttacaccatgcatggcataatatgtgacaatgctaagcctaaaaagtcctattggcactcaatgactgggctttgcatacaacttggcaggatttatctctgcaggtggtgaaaagggaacaagttcgggtatgcctcttagccggaatacacttcaaggacctgctggaacatctagagggcaagctgatgat

SEQ ID NO: 36565 - DNA, 330 bp, Oryza sativa
  Clone ID: uC-osrocyp032h03b1
tggtaccgcaccaccccccccaacaccggcaggagcgttttttagaggcacattggtgatgccgccaagaaccaggttgtcaggaaccccatcaacaccggattcgatgccaagcgtctaattggcaggaggcttagcgaagcccctgtggcgagggacaataagctctggccctgcaaggcgatagctggacctggtgacaagcctatgaatggtgaccagaacaagggcgaggagaagcacctagctgccgaagagaacctcctcatggtactaatcaaaaagcgtgagattggtgaggcctaacctgggaccaccatcaagaatgcc

SEQ ID NO: 36566 - DNA, 395 bp, Oryza sativa
  Clone ID: uC-osrocyp032h05b1
cctgctctctctctctctcccacgtgagcgcgaggcggttgttgcggcggcgcgaggtgagcggggcaccagcggcggcggaggagatggggaaggcctcgaaggggtcgcggagagggaagaaggcgtggcgcgccaacatcagcaccgacgacatcgaggacttcttcgagaagcagacgcgcgacgcgcacgccggggccgccgccatcccgtccctgccctccgactccctcttcttcgtcgacaagccggcctacgccgtgttcaccttcttcgtcgccgacgccgccgcggtggatgtcgcccccaaagatattcctgtccaaaggaagattgagaagaagagagagaaggttctatatcatgagagtgtattgaagcggaatccatat

SEQ ID NO: 36567 - DNA, 345 bp, Oryza sativa
  Clone ID: uC-osrocyp032h08b1
gcgtccacgcgtccgcccacgcgtccgcggacgcgtgggtttcaatcccaatctcttctcttcccctctcgctagggttaggtttttattttctctctctcgatttctctcttcgcttccacttcccaaaattctcgagtcaaacctcgtggcgttcggccatggcgacggcggcggtgctcggatcccacgacgccctcgacaaccggatgcatctgggggccttcgccgtgtccccggcgtcgaagccgaggcggaggcggcacagcatggcggcgtcgccgccccccaaggtggcggcggagagctcgccaccggtggttaagtcggcggcgagggtggcgt

SEQ ID NO: 36568 - DNA, 424 bp, Oryza sativa
  Clone ID: uC-osrocyp032h10b1
tggacgcgtgggtgccacagcaattgcgtgaaacaattttctcatctgatttgtttactaaaggtgatcagcagtttggaaatggagagctcatatttgaattttttgaatctgaacaaccattttggcgacgacagttgtttgacaaggtaaaggagctgattagtggtgtgaagccatcaagctgccaaatatcaggagacccaaagaatttggagctcagcctgtgtgatctccatcctgcctcctggtattgtgttgcatggtatcccatataccgtatacctgacggtaaatttcaggcagcattcttaacataccattcacttgggcactggattgttcaaggcgcatcagagcaagctgatgacagtctttttgttttgtcagtcacagggttttgagtcttacaatgaccaagtgg

SEQ ID NO: 36569 - DNA, 406 bp, Oryza sativa
  unsure (1)..(406): unsure at all n locations
  Clone ID: uC-osrocyp032h11b1
tantagcgagggagtgagagctagctaactcaggctcttccaactgatcgcgagctgcgacgaggtgatcaccatggcgtcctcgtcgtcgcttcttgttcgcgggagagcgttcgcgctggttgtggctgaagctctggtggctgctcctcgccggattaatggcggcgccgccgggccggcggcgaggaccaacgaccccaactggcacgttttcagcgtcagctcgctgctgcctagctcggcctgcactgcatcgaaagcggcgtccaactcgtcggatctcggcgtcgtgcaccggcacgggccgtgctcgccggtgcaagctcgttctttctgcggcggcggcgctttcacccacgccgagatcctggaacgcgaccaggccagggtcgacttcattcac

SEQ ID NO: 36570 - DNA, 192 bp, Oryza sativa
  Clone ID: uC-osrocyp032h12b1
gcgtgatcacagcgatgactataactgaaagggggggattttataaaaatatggccccgtgaccaccaaaaaaactagagaactaaagcatagacacctagacataacgataaacaacgggaggagcggaggccgataggagcacaagcggggctagcgccaggagcagggtaaccacaggaagggaacgga

SEQ ID NO: 36571 - DNA, 197 bp, Oryza sativa
  Clone ID: uC-osrocyp033a01a1
gtcaccgagctccgggtccccggcgccggcctcatgggcaccctcccgtcgaacgtgctcggcaacctctccgcgctccgcacgctctccatccgctacaacgcgctcacgggccccatccgcgacgacctctcccgcctgaacgacactccgggaccatactactccccagcaacaacagccttcgtccggcagag

SEQ ID NO: 36572 - DNA, 296 bp, Oryza sativa
  unsure (1)..(296): unsure at all n locations
  Clone ID: uC-osrocyp033a01b1
anataatttttttttagatacaacgcattatcaagtgttcttttccaagaatcaaagagttcagcgacatgtgctatagaatagaatcaaagcccgtgagagaaaggcccaaaaaaaagaagggaaaaaaaagaaaggaagaagaaagaaaaagtaatgaaaaaaacatgcacaagttgctgatgaaccaaaagtagcctgggggagcaagatccatgcaaagaactaagcagtttttcaacttaatttccgttcgttctggctgtgatccatgtacggtgatccagacggcaatg

SEQ ID NO: 36573 - DNA, 429 bp, Oryza sativa
  Clone ID: uC-osrocyp033a02a1
ttttggttttttttttgaataatgaaccagattagtacattgtgatcctgacagggcaacctgtcttggccacaactagcaatttgttgttacaagaggtcaaccagagattgacctcgttctcacactgacaagcacatccatttttacaacttattgcaaacaggtcaacaagacgttgacctcacccacgcattcggaagctaaaaaaactttttacaagcagcaagcaggtcaacaaaaagttgagctgcacatgctgaagaaatgaagatatctgaactttgttctgaaaaaaaggaaaaaactttgaacatttcagaattcaaactgacggattggcgttcgtcagttggtgcaggaagggaagacccacaccggcggcggccacttccaaagcaggtcgcgcacggtgccccgtggcacctt

SEQ ID NO: 36574 - DNA, 449 bp, Oryza sativa
  Clone ID: uC-osrocyp033a02b1
ctttgctctgctctggcaatggcgatgaacaagctagtcggcgccgcggtgaggctgtctgggtgggccgacctcccgcgggacctcctcgagtccgtgctcggccgcctccccgtgccggaccgcctccgcttccccggcgtgtgcacggcgtggcagtcggctgatgcggcctccgccaccgcacggtttcgcgccgcgcagccgccgtggctcatgctcccgttcaacccgacggcgcgcaggcagagcccgagcggcggcggcggtggggatggtaggttcttggaggcgaggttcttgagcctctccgatggcagggcgtacgccattccgcagtcggcgccggcggtgtctgagcggctatgtgtaggctcaggccaccggtggctcgttaccgccgacgccgtcttcgagctccacctgctgaacccgctcaccggtgcgca

SEQ ID NO: 36575 - DNA, 410 bp, Oryza sativa
  Clone ID: uC-osrocyp033a03a1
tttgtttttttttttttttttttttttttttttccagcatatcagtgattctgggataaatttattgtattcaacaaatgcgacggatgtagtacacattgcctttacccgtatttgtagaaacatttcacaccaacatctgttgttacagttccaaattcagacctaacattgctgtattcatctcggggcatttgacgaagtggagtaatacatgtaagcagtaatgcacaagcacaacaacatgaggcaaaatagagttgtactagcaacatctaatttactgaagctcattcggcaggacccatgcttttaggcacgtcacattcatcaagcagagctaggatgttattctcaggggcacttacagagggtaatatggcgcgcttcggtactgcggatcgcgacct

SEQ ID NO: 36576 - DNA, 454 bp, Oryza sativa
  unsure (1)..(454): unsure at all n locations
  Clone ID: uC-osrocyp033a03b1
cgagagaaaagggagcncctgtttgagctccggcgaggtacggagcaagagcgggggacgatggttggaatcttctccaggttctccgccggcgcacaccgccgcgccaagagcgccgtcgaggttgtggagacgttggcacccaacatgaacagcggagagcctgattcacaagctgttcctgcagatagtccgcatggcattgaggtcggcgtcgagttcaagccggtggagcacccagtggagcctgtcaaccttgatcaacctgtgaaatgtccacttcctgaaccatctatacttcatgatgggaggatatggaaagaaaggatcgctacagcgggtgtgagggttgatgacagacctgccagtcgtgaaagaaggatcgcagcttgagtcccacagcagcggagcaaggtcgcgatccgcaataccgaagcgcgccatattccccttg

SEQ ID NO: 36577 - DNA, 392 bp, Oryza sativa
  Clone ID: uC-osrocyp033a04a1
ttttggttttttttttttttttttttttttttttttcaagaaaagctacagacaaggttatatgtggccgagtgcatgcttcctgttagtgcatacagattggggcgctacgcaagagccttggcaggcagtggccaatcttaacgtgggggtcttgaatttacaagcttatttcaacactttcagaactttaccacaggtattgaaagcgcccacagttcccactctttcgtaagcaattggaacctgttttcgaaccaagaaccaccaaaacccttgttttcacctttgaaaccattaaaccgggcgctctggtatcaacaaggggccactgggttcctgaatgaaaatcaatgcggaaggccaggaagtttgagccttgaacctgaaaa

SEQ ID NO: 36578 - DNA, 399 bp, Oryza sativa
  Clone ID: uC-osrocyp033a05a1
agaacaaccaaatgaactcattttatatattgaattattaaacatacacgttttgcaacgcaatcacaataacacaaatgatcaaacagccttgacgcattacaaccagctttacttatttaaacaaacatgccactaccaccaccttgtaaaactcagcacacaagacaacctcagtggtagtagttgttgagcctcctgcagttcttcctgatctccccctgtgatccagtcagaggcgagatgttgcccatattcaccattgactgtgcgaagtgcttgaagaagaggttgacatcatcagcatacgccttcacgagcgccgctgtttcagcgctcttggtaagcaggacctgatcagagctgagaaggcccttgccagacaggatgttcttgaag

SEQ ID NO: 36579 - DNA, 388 bp, Oryza sativa
  Clone ID: uC-osrocyp033a06a1
aagttaataaaatacataattgtcaaaataaattatcatattacaacaaccttacagaccaaatcaggacatgaaagtccgaatcatttgataattacaatgtccaacatctttaggatgcttaaagagcacattgaagacaacacaccaaacgaacagacaaagggccaaactatactggactgaacccaccatctagctagttatagaacattacatgcccagatgttaaagatactactagagaaacaagttgggccaactaattagagatcagatagtgctactgataactctttcacaggtcataaagcatagatttctacttacaagaacatttaattgatggttttataatgggacaatttacacaaccatcgaatttact

SEQ ID NO: 36580 - DNA, 446 bp, Oryza sativa
  Clone ID: uC-osrocyp033a07a1
aaaagaaaggcagagttttgccaataaactggaagcaccgatgaacaggtgaatctggtggacgcacgagtgaaacaggattgaacagagaaagaaagaaagaaaaaaaaagaaagccatcaaagtgttcactagtagtagagagatatttgccgggacgcagacatgtggaaatggagcaacagcagcagggcccggacatgacagtgcaggaaacacaggtgagaccaaaagtttttcccaaatgtttctcggaattgcctctgcctgcctagcaagacaaacagcttgaaacaaaggcagtgcattctccacacgcatccccaactctccaagtgtatctccatttccacaccaacttgcgcccaggcagcccggcccccggccgagctggcgcccattttcggcatgtgcgcctacccagcacgcagaatggtgaacactgg

SEQ ID NO: 36581 - DNA, 448 bp, Oryza sativa
  Clone ID: uC-osrocyp033a08a1
tttgttttccacgtaacagaataaaacaccccttttttcagcttacatatatgagtacaatattctggttttacatgacaaacaccagtgctaaaaagaatcgataaaatgtcaatgtggcaagagaaaaaagaaaaaggagagaattttttttcgttttcacattacaatttatacaacagaaagcatccaatccctgtcttctgcacactcgttacaacattaagatcaccatgacgcatcctccagaaaccttcagttccagctcccaagcatatttgacgggtgttaaagtatgtatatttctaggatttgaatggctctaaaattggatgtcaaaatgaattcacaagagctgcgaacacaggaaagcagatacaaaatcctagagcgagacattgtacattatcatcaggcaggcggcgtatcacagtatggtacacccaca

SEQ ID NO: 36582 - DNA, 443 bp, Oryza sativa
  Clone ID: uC-osrocyp033a09a1
gtgaaatgctagcatatactgtaatttcttggagtcattttacacattacagtacatctccataggaaggtgacaacagaaatatataatagatccgaggagtaccaactccccgtgaggaaaaagtttccaggataacaaccattccttctatctgaatctttgcatcgaccaaaaaacattaattgacaacatttaaagaaaatacaatctatgaaaatgccattcgatgaattcatttgaacaatgcatagtttactctacatcttcctccttatgaacaagaagcttcccttcggtgaattcacatggcttgatgggtacagctaattgcttgcgcattttccttacaacaaatgtttcggtttcttcacatattgtgaccacagttcctttccgccctagacggccagttcggccagctttgtgggcatagtgtgttg

SEQ ID NO: 36583 - DNA, 106 bp, Oryza sativa
  Clone ID: uC-osrocyp033a10a1
aaaaaaaaaaaacctgttgtacaaaaaaaactaatggaaaaaaatgtacaaaataaacaaaccaatttaaaaaaacatgaaaaatttaaaattataccaataaaaa

SEQ ID NO: 36584 - DNA, 127 bp, Oryza sativa
  Clone ID: uC-osrocyp033a12a1
atttgttttttaaataatttttttttatattattttttttttttttttttaatttttttttttgtttattaacggaaaaaaaagaatagggaccccggaagagcgacacaaaaaccacaaacgaaaa

SEQ ID NO: 36585 - DNA, 441 bp, Oryza sativa
  Clone ID: uC-osrocyp033b02a1
accatataacggacgattgctgattactattactggttgcaatgtaacacttcggatacaatagtacattacagagctagctaaatgcgaagccacaataccgtcagcgcaagacgatcataaataaagcttacacaacatagccaacatgcaaaccattcggactgaccagagatgagggttcttgaagctgccgtggtgtgccatgcatcacaaatgccgaacaactagattgtagcagccaacatgaaaggaaaaggcatggataatgcagcaaagatggatgatgaagaccgcagattgtgacgcttcgtttaccaaccatatgaaacccctaaattttgtcaagtttcttcgcctttaccaccggattagccttggcaatagcatccctagcagcggtccgatagttaaactggcagtcatgcttattggaatagc

SEQ ID NO: 36586 - DNA, 409 bp, Oryza sativa
  Clone ID: uC-osrocyp033b03a1
aagagggtaaaaccattgcattccaaatttatgagaaaactgaatgggtgcacctagaccatataaaagcacaagctacatgaatgttccttccatgcataccgtacatgacacttcattattcaaagtacagaattcagacctagaatcataaagacaacagttgtgaattcaaagagaacccacaaagagacaccacacagagttactgataccattcaagtcctcaaatggccgtaccattactctttttcgccagcttagtccactctgtgtggaacgaacctggacggtcaatgcgctcataggtgtgtgccccaaacaagtctctctgtgcttggatcatatttgcaggcagccgactacacctgtaggggtaaagtatgaaaggctagcaaacatccctgga

SEQ ID NO: 36587 - DNA, 434 bp, Oryza sativa
  Clone ID: uC-osrocyp033b04a1
tttggttaaaacagcactaaatcaacattttatttcgtctctcagacagtaccatgctgatgatgcgcacgacctacacacatcacatgcttacatattcacaaaatgtatgtaggtaatgcacttgaaggtttgagatgctacaaacaaatgaaatcatttagtccattgaagagtggcttgccaacatacttacaccaaactgactggatacagctgaacaactagatcagttattctgggtttctaagcgaacttcttgtcgaggtgacggtctatgatttcagatacggtttctaagaagattacttcacttgaccctgggagaacatggccctcggcttcctggacgatgtcctcaatctcagagtctttatttacagtttccctgcacagtatacgccccatgtcatacggagtgaggtctcttgctg

SEQ ID NO: 36588 - DNA, 349 bp, Oryza sativa
  Clone ID: uC-osrocyp033b05a1
ccttgcaattcgttggatctttaaagccatccacatgttgtggcatttacaaagtcaaaggtgccctatgaggctttagactgtagagtcatatttctctattaactataaaaactataaaggactaaaacgtatctccattctacttttccatttaaaaactttgacaacccttatcaaaccgtgctttgattcccaagccttaattttttgtcaaggtgccaatcattttcaaatcttttacaactaataattaccacacctatcctttgacctcacatttttggaactttccagtcattaattctgggtaactgcttaagttatccttgactaacattttggactt

SEQ ID NO: 36589 - DNA, 454 bp, Oryza sativa
  Clone ID: uC-osrocyp033b06a1
ggtccccatccctgctcctccgtcctcccctcatgcagcgacagtggatctaacccgcggcggcggtggcggctttcgtgctgctgctcccctgctgccggcggcggccacggttgctgctactcccctgcgccggcgcagcggtggctgctgctcccatgcgacgtcggctaccgcggctggtgctcccctgcggtgccggcggctgcagctgctgcttctgctcccttgtggcactggttgcggtcgctgctccccaacagagccggtggctgctgctgctcgttcttctccgagcagcagcgatggctctctattccctgagaagcggcagcagctccttcttccccaatcgagcaacaccactctgctctaatgacagataagattatttcttaaatcgcaatgcactttatttattttttaaatcgcaatgcactttatctggacttgg

SEQ ID NO: 36590 - DNA, 378 bp, Oryza sativa
  Clone ID: uC-osrocyp033b06b1
tatagattgtgagttgtgaggaggtgtttattatttttgtcggtatttcattctcataatttgatctttttttttccccagccgagaaaaaagggacagaaaaggggaaaaaaaaaaaacagaaagaaccctggggaaaattgcaaaaagaaaaaagagggggggggggtgggaaaaatggggaaaaagggaccggggcccgggggggggggaagggggggaaaaggggggggctggggaaaaaagggggggaaggggccccccccttgggggggggaaaaaaaaggaaaaagggccacaaggggttaaaaagaaaattacgaggcctcgggagccggggggggaaaaaaaccgggaaagtaatccttcggggggggg

SEQ ID NO: 36591 - DNA, 441 bp, Oryza sativa
  Clone ID: uC-osrocyp033b07a1
agcattcactttcgaattgtatatatatgcaaatgtatgtataactctctgtacaagtttgaggtcttcagacataaaccatagcgtgtatttgtgtcatataaggctgtgttagggaactaatccctccaaccataataatcttccaatgcaaaacaacctagagaccagaaagtctgtcggcaagaattaaatttgggcacttctcaaaaccatggtaggtagctggtacaggatagaatacgaaatcacagccagttttctgaatgtgctcctctatcgtggatgtgcccacagcagtccgtacctactcggcatttgaacgcctcgttgtaaggtactaaccaccaaagcatcataaaggtatggaacaccaagctttcagacatgtgtgtcaacaggaatagcatggttctgatcgagtgagaacaaagcaacaca

SEQ ID NO: 36592 - DNA, 363 bp, Oryza sativa
  Clone ID: uC-osrocyp033b08a1
aataactggacgtctattgcacagctcaaatcattggacatcatacatctggaaacccatctgaaacacactaaaaagaatttacatcacatgccttttttagccacaatagcaagacctttacgttctttgcccaatcagacagcacaagggaattacacagggtttgaaaaggaattttgggaacactttttttggaggccatgtagtacccaaccagcaatgctgtcagtactaagggggacctttaaaaatatttaactctacgatttcggaaggaaaccgtaaaatttacatggaacatttttggggcatatgggaagggagggcacaggcgaaattgtcccatcacaatttttgccc

SEQ ID NO: 36593 - DNA, 422 bp, Oryza sativa
  Clone ID: uC-osrocyp033b09a1
actcccttacattttaaccccaatagatcgattcttacttttcaatacaaaaagggcatccaacataactgaaatattggagtctacgcatacatgtactgaagtactgaacgaactactgaccaaagattaagaaaagggcatcactgagactgaaagacagcatcaggcatgcaagaactgaaagctcaactctgcatgattgattcgcatttgcatctatggctatctgctgtctactacatggttagacgtcgacggattcacagctgggctggccgtccatgtcggaatatcactctttcagatcaggacaagccggcggtcattcgtcatcggagatcggcgggccgccgtaccggatctggcgcatcctcagcatccgcggaatggtctccgttagccatgaaaggcgatggcct

SEQ ID NO: 36594 - DNA, 436 bp, Oryza sativa
  Clone ID: uC-osrocyp033b09b1
gtgaatggcgtttttttttaccatgtgatacatcagtcctgtatcctacaacaggagggaacatgcaccggtttcgagctattgcgccgtgtgcaattctcgacattcttggccccccttattccacggaagatggccgagactgcacatattaccgcgctattccctactcacgtcattcggtgaaaaatggcgcggccgatcagctcaccggagtcgacgaagaaggccatcgcctctcatggctaacggagaccattccgcggatgctgaggatgcgccagatccggtacggcggcccgccgatctccgatgacgaatgaccgccggcttgtcctgatctgaaagagtgatattccgacatggacggccagcccagctgtgaatccgtccgacgtctaccatgtagtagacagcagatagccatagatgcaaa

SEQ ID NO: 36595 - DNA, 371 bp, Oryza sativa
  Clone ID: uC-osrocyp033b10a1
tttgtttttgaactatccaacaggaggagaccattttattgtgtaaatttggcgcctgcaagacaagtgacaatttaaactgtatgctatggtgtcagaagaaagaatcgggcaaaatcatacaacttccaccactccaaacaaaatgtgtttggcattggcatgtgttcccgcaatgcacaatgttacttcacaaaacttttagctatcgtttcgcaactctatcagaaaccaagccttgggttcttcagctatccacctttagggatccgatttgttggtattagcttggttcaggtggaaccattttgaggctgcgcattcacttgcataaactatggtcattaaagtggatgaagcttttttttcaa

SEQ ID NO: 36596 - DNA, 390 bp, Oryza sativa
  Clone ID: uC-osrocyp033b11a1
gaccttgatgccgactaggtcgatgtagtagaacgacggcgtcgcgccgtcggccagcgccgtgaactgcgcgttcgccggcggggcgccgccgagggacaggtagcccctgccgctcgacgacgacggtaggcagtaggtgaatccggggccgtagctcggcgcgccctgcgacggcagcgacaccttctccctgccgaggccgaacagcccgttgacctggccgaacagcccggcgttctggttcgccgcacccgaagacgaagcccgggagcgtgtccgacgccgagagcgtcagctgtgtcgcgcacgaggttgccgtcggtctgcgactggtcgccgtactggaccttgtaccggcacctgctgttcgacgagcagtccgacgcg

SEQ ID NO: 36597 - DNA, 399 bp, Oryza sativa
  Clone ID: uC-osrocyp033b12a1
aacaccactcgtaagagtggcaaatagttaattattccttatttacacaaagggtgggcacaaggtacattggctatttggcaaatctatcttgctagcaatactggggtacaagcaaatatgtgtgtccggtgcttattagggttcaagaatgaaaaaaaagaggggtacagggtcatgcttgctcactttgtgctgggtgaacagcacacagtgactagacccaaacaagtagaaatgtaaacaggggaagaagaaaaaaaggaaaaactaaaaacaggacacagttcggtagcacatgatctacacgaccttattttacaggtacatgctgattgatcaaaatacaagtaacccaaaaaaaatgattcgcacacaaacccaaattctttttttttt

SEQ ID NO: 36598 - DNA, 368 bp, Oryza sativa
  Clone ID: uC-osrocyp033b12b1
atcagacagagactagtcatccatcttcttcgtggtcttctcctacgttgaccttgtatcgctcttctacttcctccgattatttgagaagacgccgccggagtcgctctcgccgccaccacatcaagacggcggtgtggctcctgacgacgatgctcaccgccgtgttttcatataaagtggcggccatcatgcctttcccggttcaggtgctggtttgggccatggccgcagcaactgtgcttggagggttctacgcattctttctccactccgatgaaaaaaagcctattgagggataggcaaaatacttgatagggctttctggctgtttggcatttggcagacgccctgtgtgtggtaacatc

SEQ ID NO: 36599 - DNA, 463 bp, Oryza sativa
  Clone ID: uC-osrocyp033c01a1
gctggcgagcaaggcgaaggtgctggggcggctagtgcccgggtgccggaagctggcgttcccggcgctcctggcggaggcgtcggactacattgctgcgctggagatgcaggtgcgcgccatggcggcgctcgcgcaggcactccagtccgtggcacccgcgccgccgccgccgccgtcgtcgtcgtgatctcacctcctcatcgtcatccagttcggatttggcctgtgtgtctgtacatgattttttttttttttggggttcgggctagcttggccattgttagtgaattgatgatgaaaatcgaaatgagtttttgggtttagtttggtcaggattatcattaatttttgtttataggtctggtgttatcttgactctgcagtgaaagcaagcaggagatttgagatttttcatacgcttttttgagttggatgttggcgatcgatccatggatcgaat

SEQ ID NO: 36600 - DNA, 343 bp, Oryza sativa
  Clone ID: uC-osrocyp033c01b1
gcgaatagaacattttattgtcagaagaagcaaaagcatttctcaatcagtctgaccatgacttgactgcagaagcgattccattcgatccatcgatcgatcgccaacatacatactcaaaaaagcgtatgaaaaatctcaaatctcctgcttgctttcactgcagagtcgagataacaccagacctataaacaaaaattaatgataatcctgaccaaactaaacccaaaaactcatttcgattttcatcatcaattcactaacaatggccaagcttgcccgaaccccaaaaaaaaaaaaaatcatgtacagacacacaggccaaatcccaactggatgacca

SEQ ID NO: 36601 - DNA, 454 bp, Oryza sativa
  Clone ID: uC-osrocyp033c02a1
gtgcatccgctgcgctgtgctgccatttctcttcagcttaaaaagcgagccctaccatttcctctctctcttcttgtcatcctcctcatctcttcttcctccctcgtctcaccaacagcgaggtgactgagagaagctagcttgggagaataatccatggcaggcaagatgtctacaattgtgatgatggtggatcttgaatgtgacagatgctacaggaagatcagaagggtcctctgcaagctccaagataaggcgagcatcaaggccatctcgtacgacgagaagaacaacacggtgacggtggcggggccgttcgacgccgacgaggtctcggacaggctctgctccagcgccggcaaggtcattaccgacattcgcgtcgtcggtggtgccaaacccatgccaggcggcggcggccgtggcgccaaggcgcacgcccacaagccggccg

SEQ ID NO: 36602 - DNA, 249 bp, Oryza sativa
  Clone ID: uC-osrocyp033c06b1
tagtcgttggtcgaggcgaggaggaggaggaggaagaaggagtttgcgagttggggccactaggacgcgcatgatcgaacaggaagcccgaacgcaatgagcgtgcgcgaggcgccatccgagccaccacagcgacccccccctagactcgtggctggacttgcgacgaccggcaagcgtggcgacggcttctacccacatctaccaaggtttccagcacgtcggagaaacctgaccacgcgacgggtc

SEQ ID NO: 36603 - DNA, 448 bp, Oryza sativa
  Clone ID: uC-osrocyp033c07a1
cgctgatatggtttactaatccattcgataataacaggacccatattacaagtgcagtaagataaggaatccagactagcacatatacacaccaaaatagaagaacacccaaaataaaagggttggaactttattgctaattgctcataggaccattcatagctaagtccaccaagtcagtctgatttctgattcttttactcttttgaagggagtcagagaccaacagcagcatctcatttcagacatgtttacagatacttctgccatctgaaggttgcaaagtacttgttgctatcttttggaactggagataaatcgacaaggctaacagctactatgcattcttatgccaaagggatctgaaaggcagctgagaaagccatgaggattcagagcgtggtgatctagcggcttgagaagcgtttgtgccagtggaagcgttctg

SEQ ID NO: 36604 - DNA, 160 bp, Oryza sativa
  Clone ID: uC-osrocyp033c08a1
ggaccccatacaaaaaccaatgactttggggaattaatgaatgggaataaatttgtaacaagtccagttggaacaaaatggttattttaagctaccaaaacactctatttatggttacaacataaggcccacacaatattatgaatggtactcgaaagtt

SEQ ID NO: 36605 - DNA, 360 bp, Oryza sativa
  Clone ID: uC-osrocyp033c08b1
ttcgtatctctcctctctcccgccgaccaggagaaagaaggttaaagaagaagaaaaatcctctgcgatggcgaagaagaaggagagggcggcgaacgtgtaggggaagccgggccacatgctcgacgtcaaccgcgccaatgacaagaagggcgcgggcggcggcgccgggggcggtggtggaggccgttcggcggacacggtgcggaggctcaagatgtacaagatgaggcccctcatggaccgaggcgggaagatcctgaagcacgacctccagatcaaggagctttccaacacccgcatcttgcccgatcgccgctggttcggaaatacaccagtcgttaatttaaaaagagcttg

SEQ ID NO: 36606 - DNA, 441 bp, Oryza sativa
  Clone ID: uC-osrocyp033c09a1
aaatcttaaactttaattttaattttttaagaccttttattgtagtttctttttcaagattaacgtctaaatcattaataacacatatttaaaatttctaactataaattactaccggaggaccgttcgtcggcagcagccagagtctctgacgttgcatcgattgtctttgtctaagccaattcactccagttctagtgttgaactgttgataattgggttgcacctctcgttttgctgtcggccatggacgcgcacgcaccgccccggagccctgcgtccgacggcggccatggcgacggcgacggcgacacgaagaagccgcacgtcctcgtcgtgccgtacccggcgcagggccacatgctcccgctcctcgacctcgtcgcgctgctggccgcgcgcggcctcgcgctcgccgtcgccgtgacgcccgggaacgtc

SEQ ID NO: 36607 - DNA, 397 bp, Oryza sativa
  Clone ID: uC-osrocyp033c10a1
acaatggcatggtaacgaccaagccaaactaaaccctatctcgctaatccaatcaattaatcagcatacattgttatgttacatagaaaaccctcatttgtggggtttacacactcaaatttccagcgagcgatgcagcacaccgccattcatcccaaggcaggtatgctgcatgctgctctcctcccaaaaccggcaaactctattgcccattgcaccactcgcagatcaatctatcccaagacaaccgaaacgagattgattgatttcttttgcctccactccactccacaggttccacggccgtgcatgtgtggtacaaacacttttcgtacatgcgaaaaaacactttacaatgtggagctgtttagcgtaagccatacttaaaaagtagtaa

SEQ ID NO: 36608 - DNA, 350 bp, Oryza sativa
  Clone ID: uC-osrocyp033c11a1
caaatgccatagccattgattttcacggggaatcgagtagtaacacagggggatggatggatggatgatggtgaagtagaatgcgccagctactgtaccagtacaacaccattgcgacatggcactctgcatctgcacaagcatgaagcagaagcagagccaagctgcaaggtgacacgacaatcttaggacacttagctcactgatcagctcagctgagatcattacagcaacacaaagaagaagaagaaaaaaggagtaaaaaaaagttacacaaaaagggtaaaaaaacacttgactttcacttggagaggaagaagttgcaggatcattagtccctaacttaaaaa

SEQ ID NO: 36609 - DNA, 443 bp, Oryza sativa
  Clone ID: uC-osrocyp033c12a1
agcataaaagtacactgaatctttgccaagagagggttattaacagttcgcattcagcatgtcatttgaactgaatggatcaagtaacacagttcctggcacagaatatgaaagtgggaagcaatttcattcagaaaagaagatctagtctaacaatctattcaatgctgaaccatttacaacaaacatacaatgtgacaaggggcattacataggggcgaccacgtagtcttctagtctaccgaaagaacgatatatcctaagttctggtgcaaaaatttccaccgtggaaagctatagtgtggtcaggcgggtgcgctaagtattttggatcatgagaatgctctaccaagaagcatgccaccacagcatttactcaaaatgctggattctgaactccggtaatgaacaaaatgcccaagcatatataatgatgtcatcct

SEQ ID NO: 36610 - DNA, 104 bp, Oryza sativa
  Clone ID: uC-osrocyp033d02a1
atatattcaaaattcattgtttacatttataattatttttttcatatataattagaccagactggcaatatataaaatatatgcaatcatcaataatggtagac

SEQ ID NO: 36611 - DNA, 331 bp, Oryza sativa
  unsure (1)..(331): unsure at all n locations
  Clone ID: uC-osrocyp033d02b1
gagatacacaaacgaactnctaggttagaataaacacatttttaaaaaaaccaagaaaagattttcctcttctgttacattccttcttccttctccggccaccggagccgtagccgaattgtgcctcttctccggcgaggggagagggagagagggggtgtgagtttctttccttccatacagagggggcacttcgctggcggaggatgcgatgtttcttgatatcgcactaggggtgatgaacaagaaggggtttgccggttctgcctacagagatttaagacgggcacgtgtagaccacggagaacattctccagccgagctatggtaa

SEQ ID NO: 36612 - DNA, 105 bp, Oryza sativa
  Clone ID: uC-osrocyp033d03a1
aaagttaaactagaattattggagatcgataaaagaaccattaccacaagggagggcaccaaagagacaatacatagaatacgtgcagaaaccatggtaaggagg

SEQ ID NO: 36613 - DNA, 61 bp, Oryza sativa
  Clone ID: uC-osrocyp033d05a1
gaagataaacgagattgattggagagcaataaaagaaccaatatcacgagtgagggcacca

SEQ ID NO: 36614 - DNA, 334 bp, Oryza sativa
  Clone ID: uC-osrocyp033d06b1
gcgtgtcagtattgctcagcaagctgcacttttccacagtattaagtccttgttcatgaacaagcctctagtcattgtgtgcaacaagacggacttgcagcctcttgaaaatttgtctgaggaggacatgaagctggttatggagatgaaagcggaggctatgaagactttaggtcatggtggagaagctaatgaagagggtgttttgttgactatgagtacttttactgaagagggtgtgatggctgggaaaaatgctggatgtgagaagctttttgatcaaagggtggaagatcaaagatgaaatcaaagaagatcaatgactgcctaaata

SEQ ID NO: 36615 - DNA, 65 bp, Oryza sativa
  Clone ID: uC-osrocyp033d08a1
ttgttttttataataaatagcgagattctttgcaaggcgataaaagaacccagtaaaagaaggga

SEQ ID NO: 36616 - DNA, 69 bp, Oryza sativa
  Clone ID: uC-osrocyp033d08b1
tagtttctcaagtggagaaacccccaggagcgataattttttagacgcctgtacggtctcttccaaagc

SEQ ID NO: 36617 - DNA, 452 bp, Oryza sativa
  Clone ID: uC-osrocyp033d09a1
aggaacaatcaccaaatttgttacactactcaatatgttttgcatccaaaatggttaagcatcgatcatcacactcgagaagaaagtggaaaagaatgggaaggagacctatgcaaggcgttactatgccgcctgtagctcaatattttctggaccgtgtactctctcctgacaaaaatgaattgagactacctacaagcaaactaaactactactagtacgtttcattccagcctgctattttccagcttattcagcaaccagtggaaagcggctcaagttggatggcaattttcatgtccaattcacatctattgtcttgtcttctatgggtttaacggcttattttccccagtcatttctacagcttttgttgatctgtggagaacagagacacccattagccgcctttggaagattgctgccatgaaaaggaaaatagcacacatgcc

SEQ ID NO: 36618 - DNA, 437 bp, Oryza sativa
  Clone ID: uC-osrocyp033d11a1
ccagctcaacaagtttaacattgcatctcaaacagtagagcatcggtacagtagaacaggactggaatataagtataacaaagtcacaattataagatattgatggtagtgagtaccattcgacgaaattaaaccactctattaatactagccaaaccatatataatgtagcataaagctgaaacataagctaacaaaattatgtctcagtcgaaggatgagacgcgatacacaccaatccaccagacagtatgaataacggcgtagaacaagttcctaaagattggataaacaggccttccttcaccctaatcccaacaccgaactgcaattatactgctcttcctgaaaccagtgatgctaagcagcagtgctgaattacttatcgcctgctcgtcttgccaatagaacgttttccagagaatagatgctttggt

SEQ ID NO: 36619 - DNA, 149 bp, Oryza sativa
  Clone ID: uC-osrocyp033e01a1
ccgcaacaaaggggaacccggtctaaataattaattcgaaggtaattgcccaaattgcttcgcattacacggccgcgaatacatatattatttatcggtatcttttaaattctgatataatttataatttttcttacttctagatctac

SEQ ID NO: 36620 - DNA, 387 bp, Oryza sativa
  Clone ID: uC-osrocyp033e02a1
agcatcaaaacagtacgcactggtgatggtttaccagatcatctgtatttttttttagaaaataatactactatatcatctatattagtgtaggaaaactggtagcacagctaacatttgatttcaagacagcatcccgaatacattaacaattgacaacatttttttttgttatttctaaacaacaatcctcaagcaaatattggtgtttgcaacctttttcttctcatcattcgtcatcactgtcaaaaacgactgcctttcgacgatgaactgcctgttgttttcttggaggagaattatcatccgagtcgatctcctttgcgcctttgggtggcactggcacccccaagatttttcctccgttttggttccttgatttttttc

SEQ ID NO: 36621 - DNA, 453 bp, Oryza sativa
  Clone ID: uC-osrocyp033e02b1
atccgataatagtctttctagctgctgggaggcatagggttcacaggaggctacaattgagccaccgcgccgtggacgttttctcgtcgttgacgctgagacaggacgcgccgccgattgtgtccacgcgccggtccggtccgaggcggagacggtcgtggctccgagctcgctcaaccagcggcgatggcgggcggcgacagggagagggatgtcgaggaggagacgaggaaccagatgatgcagaatctcttcggcgaccagtcggaggaggaggaggaggacgacgacaggccgtcgatttcgtcgacgaggacgaccacccgcatccgcatcagcagcagcagcagctttcgccaccaggtggtggatgacgacgacgacgacgacgcccacgcccgctccggctaccactcggaagaagtggaaggtgaggctgataatgaggggaag

SEQ ID NO: 36622 - DNA, 445 bp, Oryza sativa
  Clone ID: uC-osrocyp033e03a1
gcacggacaacttcctttcttaaaaaaagaagcgttggaactcaatctgttcatactatttttttggtacaataactgatggctctacacacagtatgtacaatctgaaaatttcgaataaacatgtagtgttgcattacaaacaaatggattttgatattcttcaaatgtgtcaggcaattgagctaaagtgaacactttaaacttctggaaaatgaagagataaaaaaagggaaggcaaattatccaagaatgcgctcaacatgctgcgccactcgttttgcaaggcaatccagctgcttcctctgaagatgcctttgcatatacacgcaccacatcctcggtaccagatggccgtacgaaacatcgcccatgagagtaatttgatatctccccatctattaattcctgcagcccattaggctggcaaacccttcttttctgc

SEQ ID NO: 36623 - DNA, 354 bp, Oryza sativa
  Clone ID: uC-osrocyp033e04a1
ggggcaaaagcaacttaaactttgttactggcccactaggttcagaaccttgattggataaccttcaaatgatagtaggggactagcaatacaggggcgccctgaattatccaaagcttagcatgaatgcatgatcatggtttcacagctaaaaaaccgttgaaaaaacgtatgctagcccttgggggtataaatgggactagtatactttggtggtggtttttgggattgaattccaccaaaacaggaaagggcaatacacaacccctaatgggtactgggacaaaatccactgacaggtttttttcccaattgagatcccacctgattttgagcccttccaaactgggtttt

SEQ ID NO: 36624 - DNA, 62 bp, Oryza sativa
  Clone ID: uC-osrocyp033e06a1
cgcagagagccgagtttatttggagaacgataaaagaccccatatcacaagggagggcacca

SEQ ID NO: 36625 - DNA, 71 bp, Oryza sativa
  Clone ID: uC-osrocyp033e07a1
tgtgtttttttacaatgcggtggttactcttagaactgtacacataaacttcggacagtcaatttgaataa

SEQ ID NO: 36626 - DNA, 109 bp, Oryza sativa
  Clone ID: uC-osrocyp033e08a1
caattctgggcgaaactcatgataaggctataacagattccaggggcattatgggagggaactaaaaggctaatcaactaagacttatcgttgaagatagaataactaa

SEQ ID NO: 36627 - DNA, 96 bp, Oryza sativa
  Clone ID: uC-osrocyp033e09a1
gtctagatgtattgaacacctataaaagaacccttaacacaagggaaggaaccaaagggacaaaatctagaataagggcggtaaacaacgtaaggg

SEQ ID NO: 36628 - DNA, 194 bp, Oryza sativa
  Clone ID: uC-osrocyp033e09b1
tcgtacactctcaggacgacaaacgcccaggagagataattatagagcagcatgtgcggtctcttccaccgccacgaggaatgacaccgggacccaaattcggcaatgaggacggcttgaagaccgaacagacacagcgaggcgcctgccacagtcttgcctacaagacagaagggcacgtacatggcgaagga

SEQ ID NO: 36629 - DNA, 441 bp, Oryza sativa
  Clone ID: uC-osrocyp033e10a1
aattggaggacaaatcacaacatcaaaaccgaccgataatcccagaaaatcagtttcccattcgctggtacaagatcgacactacaaagaaatacacaaacaaatcccaaatccctaaaaactaaagcagaagcaccttcttccgcttcatctgtcaacgagcgtccgctctgaacattccacaaccaatcccaaatcatcacaaatctaacccaaaaactaaatcccaatccaatcggaatcattacaaaatcatcccaaaataaatcaagcacaggagacaatccaataatcacatcacaaaataaatcacacataagatgagagaagaggtggaaatcacaaaataaatcacatcacatatgatatgagaggagagagaagggtgagagggaggccgtcgtcgttctttgccgccatggagatcctgagccgttgccg

SEQ ID NO: 36630 - DNA, 345 bp, Oryza sativa
  Clone ID: uC-osrocyp033e10b1
gaacttcgcttggaccaccacctgatcagagaagtagctagctgcaggagagaaaccgaccaacaatggcggagtactactcgaacaccgtggacgagtgctacgagaccaccggcaggcagcacggtcacggccacggccacggccatggcggcatgagggtggagtcccacaccgacgactactactgcgagggcggcgagatcgaccgtgggaggaggaacaactccatgcactcgcaggagtacctgatgaggcagcagagcggccatggcggctacggccacggcggcggtcagcagcaggagtactacaagcgggaggagcgccagcacaagcagcgca

SEQ ID NO: 36631 - DNA, 412 bp, Oryza sativa
  Clone ID: uC-osrocyp033e11a1
acagaaatcacagtacatatatagatgtacgtacacacatacactggtttggaataaggcgcgcggccgcggcggcgaaattgtgggtgagcaacgtatatacgtgtacgtacgtacatccttgctcatcttattggaccgtatatatacgtacgtagtagccagtatttatttagtggtacgtacgtacgcatggattattaataatttgggggtgattaataattaatcagttgcagtagtagccctgctgctgcggcatcctgccgtagccgtactgctgctccttggcgccgtagctggcctgcttctgctcgcggtgctcgtggtaggcgtagccgccggcgcccaccgtcgtcacccgacggcacgccctgctcgatcctgtgcctttgcgcgttcgccgggttct

SEQ ID NO: 36632 - DNA, 331 bp, Oryza sativa
  Clone ID: uC-osrocyp033e12a1
ggagaaacagggacttttattggaatttttggaggtaaaacaccttgcaatcatttttacttagtactaatacacattgaaatatgccatagggaaaatctttaaaagctatatatccaagccatattatcgggggggatccttatatccaagccattttatcatggggataattaacatggccaatagctttatccacaccatatttttccccatttttttgataactgggtacacataggattcgaggtgggccttagggatttgcactggcattgacagggttgaactcctggggctccttgaagccctccaaggttttttcccaaac

SEQ ID NO: 36633 - DNA, 427 bp, Oryza sativa
  Clone ID: uC-osrocyp033e12b1
tttgaatgattgcaaggtgtattaactacaaatattgcaataaaagtccctgttactacaagaaggccaattctctgctggagttcgagaagcttgtgagtgtgaagcagcaagttgtcgctggcactttgtactatttcacaattgaggtgaaggaaggggatgccaagaagctctatgaagctaaggtctgggagaaaccatggatggacttcaaggagctccaggagttcaaagcctgtcgatgccagtgcaaatgcctaaggcccatctcgtatcctatgtgtatcaagttatcaagaagaaggggaataatatggtgggggatatagcttttggacatgttaattatccaacatgataatatggcttggatataaggatcttacacgataatatggcttggatatattgctattaaaaattt

SEQ ID NO: 36634 - DNA, 319 bp, Oryza sativa
  Clone ID: uC-osrocyp033f01a1
aaaatgagacagattcctcttgacaaatagtatgataaatccaaagtacattatttcatatcgtaatttagttcacaatgacatgatcttgttcggtacacaatactacaatttaacaagccaagtatgtacattatttaagtagtgcaacaaatataagcagagcttgaaaaagagcaaagcacggtgatctgaccataggataggtagagctgaggtgcttaagtcacaaaaggcaaaggtaagcctgaaaacataatgcatcatccagaacttcgtttgacgatctaacccatagtgccccaccatgatgagggag

SEQ ID NO: 36635 - DNA, 109 bp, Oryza sativa
  Clone ID: uC-osrocyp033f02a1
ttttgtttttttttttttttttttttttttttttttttttttttttttttttttttttggacatatattaaagattaattctttgagcaagcttgcatattcccataca

SEQ ID NO: 36636 - DNA, 253 bp, Oryza sativa
  Clone ID: uC-osrocyp033f03a1
ggtggaaaagatccaggaattcacaatttttgttgagactgatgggaccattgtttcacacataacccctggcgtggtagattgcacaggaaatttggtatgaagatgaatcaacctgtgcctaagggcaaacgaatctcaatttcatcatgttgttttgttaagcatacgtacaggggtatggagggaatcggagactcaacttcccatattgcacaaacggggaaaaaaatatattccacgatcttctttt

SEQ ID NO: 36637 - DNA, 419 bp, Oryza sativa
  Clone ID: uC-osrocyp033f04a1
actgaattcactttaatagcacttctcatcatgaactagtacaacaacataactgtccagtggaaatgtgaaatgcatacaccaagtaatggtccataacatgaactatatggatacaacaacgttcttatttcgctcatatatacatgaaataagtcttgcacgtcttggttacttaataggtgcgataatcgccgtaggcttttagaagaagaaaaaaaagtgagcctgcaaagttcctggggacagttgaagatcatcgggcactcattgctgcaacaaacttagggtggtagtggagcatttcgtgccacatcatttccctgatcatatctgcactgatgttcttggctatgtccagatcgataggcacttgcgcgggaggatttggacttggatcatacagaggggacatgtaa

SEQ ID NO: 36638 - DNA, 379 bp, Oryza sativa
  Clone ID: uC-osrocyp033f05b1
tttttggctccccgacatcgccatcccggaccacctcccgctgcacgactacgtgttcgagcgcctcgccgaccgccgcgaccgggcatgccttatcgatggcgccacgggggagacgctctcgttcggcgacgtcgacgcgctgtcgcgccgcgtggcggctgggttgagctcgattggtgtttgccatggtagtaccgtgatgctgctgctgccgaactccgtcgagttcgcggtggcgttcctcgcgtcgtcacggctcggggcggtcaccaccacggccaacccgctgcacaccccgccggagatcgccagcaagtggcggcgtccggcgcgacggtggtggtcaccgagccggcgttcgtcgcaaggtgagcgg

SEQ ID NO: 36639 - DNA, 412 bp, Oryza sativa
  Clone ID: uC-osrocyp033f06a1
aacacaaaataatcgattttatagatggtatgtataacaccctcctcatgatcgatggccctccctccctcatgtgtaaatgtatgctctacaatcatcaccatccaatccacactctatctgaccacctacctacacactcatcagttcatcagaactgtctgtacagcaggtaaaacacatcagaatcctcgtcattcagacagaggcagagatgggagtgaagatgaagatgaagaatcagcctagcttagatctacaccagtgtggagttcggaggggtgaatgcccattatcttgtagtacgccttctccgccttcgccattctcgtttgaaacattccccaattcctttcctgcaccgtgcccttaccccttcccatgcgggcttccatttctcttgacttgccct

SEQ ID NO: 36640 - DNA, 103 bp, Oryza sativa
  Clone ID: uC-osrocyp033f07a1
ttgttttgtataaagagcacctttattcagagaactgcatatacaaccagaggctgttcagttctattaaacctatttgttcatattatatttcactcgacat

SEQ ID NO: 36641 - DNA, 322 bp, Oryza sativa
  Clone ID: uC-osrocyp033f07b1
ttggtgttccactttttgagcgaactgctgcagtaactgcacattttatagttgggagaacagggaaacatttattccttacagactcagatgatgggaagcccccacttctcctacgaatggctgaagactgtgatgatggaaaattcatgtctgcgttgcgctcttttaagcgccgtgttgcctatgcgaatgtaacatatgatcatatagttggctggagaacatcatcaattcggcgtcagcacgaattacctaaattgcagttaacaccaagtgataaaaagtatccacatattatccatgttgacaaaggaaattc

SEQ ID NO: 36642 - DNA, 428 bp, Oryza sativa
  Clone ID: uC-osrocyp033f08a1
aacaatacgctatgcccaagacaagtcaatactacaacatctgtggcgagtacagaggtacaaaagtcaggcaccgtaagcctttcgattaaaaaccaaactgaaacacgcacgattttttaacaccccacgaaaaacaatctgatacctagctcctttggtggtggaacctaaagagctttatcttcccaaaacatccacatcattatctgtcatgactatatagtttcgatacgtaaaaaggcagcgttcactcagggatatccgccatgtcttcctttcatttaagcccggccaagatgcttcaagccttgttggcaatgttgttggaaagccagtcaagcccctcatacaaccccttaccagaggtagcacatgtgctctggatgtaccagtgccgctggcgcaaggagtgcagaccaagcttg

SEQ ID NO: 36643 - DNA, 175 bp, Oryza sativa
  Clone ID: uC-osrocyp033f09a1
tggttttttttttttttgtgtttttttttttttttttttttttttttttttttttttgttttagacgcaaacaaaggtaaagggaacagaaaagaaaagcaaaaaggaaaaaagggaaaataaaccacaaccaacacaaaaaggaaaataaaatacaaaaaaaacaaaacacaaa

SEQ ID NO: 36644 - DNA, 419 bp, Oryza sativa
  Clone ID: uC-osrocyp033f09b1
tcggtggtcagctggggcgcgatgatccccgccggcgtggcgatggcgcggttcatgaagcggttcgagccgctctggttctacgcgcacgccggcgttcaggggctcgggttcgtggtcggcgcggtggccatcgtcgccgggttcaggctcgacggcgaggacgacgtcggcgcacacaaggcggtcggcgtcgccgtcctcgtctgcgcgtgcctgcaggtgatggccgtgctggcgaggccgatcaaggaggcgaaggcgcgcaagtacctggaactggtaccaccactacgtcggccgcgccgccgtcgtccttggcgtcggcaacgtcttctacgggatgtcgctggccaaggaaggggacgagtggagctacgtgtacggcttcttcgtcggcgtctgcgccgtcgcgttac

SEQ ID NO: 36645 - DNA, 116 bp, Oryza sativa
  Clone ID: uC-osrocyp033f10a1
agtcagtgtgctgttgagacactgggcgtcggtgggcgcgcttccagataagcagcctggtactgcgcgcgagcatgtagcctggcggtcgccgaacacacgagtcaccgctcgga

SEQ ID NO: 36646 - DNA, 371 bp, Oryza sativa
  Clone ID: uC-osrocyp033f10b1
tcttttcgcgtggctaggccacaccccggcgctccgcgagcttggccactgcctccaggacggctacggcgcccgccgtgacgcccccgccggccgtcgcctgctgctccacgccgacgcccgcgagcacctctcctggaagaagcacaaccacggacaccacgacggcagcgccgccgaggacgcggtgagccggttcatggccgcgtggtgggactcgcaccgcgccaaggcggcggcgcgggggtgcctccctggcgaacacggggacaggtagcacgactgtagctaggacctgcggctgtgctcgcacgcccggtgcgggcggagggagacccggcagcacgagttccgggcgtgctcggagtgcg

SEQ ID NO: 36647 - DNA, 440 bp, Oryza sativa
  Clone ID: uC-osrocyp033f11a1
actacaataattcttggctagtatgaattatggcccagttgatcaaatctgattctagatcagaatggttcatacttaaaaaagacaggattcaaccaaaaaaaattagtacaggttttcgataccaaaatttgttccccttcgttaacctttgtgcagcataacattttcagccttcaagcattgccttggctgcatcaattagtgcaggtctaaagctatcagatgctcgaccaagtacggtatagccttccttgtcctcaatggcaacatcagcaccatgtctaactagcagaagagcaaccgctttgtcctcagaaataacagcatgcattagtggtgtttgtcctgttttgtcaactgcatcaacatcagccccctcctcaattaggaattcacacagttcagcatttcctgtactggcagctctatgtaagggc

SEQ ID NO: 36648 - DNA, 150 bp, Oryza sativa
  Clone ID: uC-osrocyp033f12a1
tttgttttacaaaagaaaatactaattgcaactttgattgacatctgaaccataacagatcataagcacaaaaaatacatatatatttgacctaggacactgatcacccggggttcacaacccaacacgttacatcatgtaaaaattaca

SEQ ID NO: 36649 - DNA, 458 bp, Oryza sativa
  Clone ID: uC-osrocyp033g01a1
acttaagtaatttaacattacttaatttcacattacaaaattacatagtccaacacactctatattgtggatatatccttcgcagaaaattctagtattattttgcaagaattgatcttcccacgagcaaaatgaatcatgtagcatatgaatcaaattttgatgaaattttggccaggttttcagatatccatgcttcaggtttctctgtcagctgtggagttcaccttccccgttgcggcggcggcggcggcggcggccttctcccgccggaatctctggaagtcggcgacgatgccgacgtccacgtcctgctttatcttctcggccagtctctgcaagacctgcaccgccacaatctttaagatcgccaagaaaccaaaatttgtggccccgccggcgttggcgaagaaccgaagacttactgtaagatgaaccattggcatctgggattatta

SEQ ID NO: 36650 - DNA, 386 bp, Oryza sativa
  Clone ID: uC-osrocyp033g01b1
tgtttgcgtgggcgccatgtgtttgtttgtttgtctgtttgggccggagggcgcggcgcagacggagtgggagctgcgtgggctggagcgcgactacgcgccggcgagcttcgacctcggcgtccgcgggtcgctctacgccgacaggagccgcggccgccgcgcctgccggctgaggggccacctcgagatctccatcggctgcgtcctgccaccgccgatgcgcctcgtgccggacgctgtcatgcgcggcgtcgccgagtcggtaagtgtagggatcgatcataagaactaagcccaccagagggggtgaatgggttgaatatccaaaaaccaaaaacttttaatgaaataaaaggtaccatcgaaatcgatggatcgcggtc

SEQ ID NO: 36651 - DNA, 449 bp, Oryza sativa
  Clone ID: uC-osrocyp033g02a1
attatcgtatttgcgttgaaacattcagttatgctgtatatatcacagttaaatactaactcaaattttatcgatttcctttcggaattaattaccaagaacagaatcctgtacatgacaaacaattggctctctcctctagtcctaccacatctcttgctcccaagtcccaatttgtcctcttcctcaaaaattcagagaagaagcaagagaataagacttcatcacttgggtagcctttaaaagactgcttccagcctttttcggaagcaatgcaggtaaattcagcttatatagttgccaaataatatgattgggatgtatggcaatgaattcttcatgaagaggcttatggaaaccgaaataaatgcaacaacagatggaatcaactttgctttaatatttacagggaaagagtaattcttgatcactaaaaaattgcttgatgc

SEQ ID NO: 36652 - DNA, 173 bp, Oryza sativa
  Clone ID: uC-osrocyp033g03a1
ttttggtttttttttttttttttttttttttttttttttttttttttttttttttttttttttttttttttttttttttttttttttaaaaaccaaaatcagatgggcctagcatttctttatttacctcgccctatttggcaactttctccctttggaaaaaaaaccctgaa

SEQ ID NO: 36653 - DNA, 404 bp, Oryza sativa
  Clone ID: uC-osrocyp033g03b1
ccgtcgttgccgcctgcttttgcttctttccacttctgacttctccaagtccaaactccaaagttctcatcgttgcgcgtggcactgtggactctccactctccacgcccctactccgaggatacaccgtgagtaggcgtggtggtgcttgatctcaaatatcaaatatgtgtcctcccgttttcgtgcagtcgatctaacaccgttgtttcttgctaattcgttttcgttcccccggatcaaagaaactttattttacaacaacaacaacaacaacaaaaggatctttacatttccttttttaaatgatcttattaccttctctctcttattattacagattttagaaataacctgtagcctttgtttgtttgtctggtcccaatttctgcaggttcttgagt

SEQ ID NO: 36654 - DNA, 385 bp, Oryza sativa
  Clone ID: uC-osrocyp033g04a1
ggcagaaaatttttcatccattatttctccatcttgcattccgcaagaagaccgctagttagggggaaaagagtaaaaaaagaccaaaaacgatcacaacacgtcgtcgtactccaacacgtacgtacggtactccactagaacgtaaaacctctctagaagagggaaaccggaccatatatttggtagcactttacaactagggctgttcagatcagccatgtttttttgttttttgttcttccaatcattcatcgaaaatttcctttaaccagagcgccgtttgcaatttccgctccagcgctgatgaccatctctcgttgaatgccgagggggttcctcacactgtgtagttctgctggatcgtgtcgatgtccagcccctt

SEQ ID NO: 36655 - DNA, 451 bp, Oryza sativa
  Clone ID: uC-osrocyp033g04b1
ctttcatacatcgatgccgatggtaactggcaccgtgccagcaagggtgctcctgagcagatcctgaccctgtgcaactgcaaggaggatgtaaagaggaaggtgcatgctgtgattgacaagtatgctgagcgtgggcttcgttctcttgctgttgcaagacaggaagtacctgagaagtcgaaggagtctgctggtggaccatggcaattcgttggtctgctgcccctgtttgatcccccgaggcacgacagtgctgaaactatccggaaggctctccatcttggtgttaatgttaagatgatcactggtgaccagcttgctattggtaaggagactggtaggaggcttggaatgggtacaaacatgtatccttcatccgcattgctcggacaaaacaaggacgctttacttgaggcacttacctgggatgagcttattgagaaggctg

SEQ ID NO: 36656 - DNA, 397 bp, Oryza sativa
  Clone ID: uC-osrocyp033g05a1
gctctcaattaattattgagcttagatagttaagacacattctatacagattgagcggatgctagaccgtgagttgaaagaggagtagtttggttacagacttgcaggcaaaagaagcatggagaaacaaaaaaaaatctgcttggagaggtctccttccatccttagctccgtagcacatcgtattctcacatgaatatgccaaattgccaacctgttctctagattgccatggttttgctgcctgtttgcacatcgtatcctgggcggcaaaggctgggagtgacggcgagtcaaggatgtcggtcgctggcagagggggtgatggaggcgacgtccagcgatcaccagcggcggcacgcgtgtgtggggattaggggcagctcaagagtgatgt

SEQ ID NO: 36657 - DNA, 465 bp, Oryza sativa
  Clone ID: uC-osrocyp033g05b1
gttttgagagctgttgcacttgcacaccactctctcgttctctctctctctccccgtcttcctgtgtctcttgccccatcctcatctgaggaatacactctcctgctctccactaacctttgctctagtagttgttgccaaccagatccaccatgccaccacctgctgctccaagccgtcgttgctgctgctgttgatgccttctcttccccctagctgctgctggatttagcttcttagatgacgcatttccggattgggacggcttcactcctcctcgcctggatcctgtcgtctctccgccccactgttgcgcggatccgccgtcgccggcgacgggaggggcggatccaacgacctcttcctctcacggatcctgtggccggcttcactcctcctcatttggatcccatcgtttctccgcccctctgtcggcggatccgtcggcggcggcgacgggagggc

SEQ ID NO: 36658 - DNA, 432 bp, Oryza sativa
  Clone ID: uC-osrocyp033g06a1
atgcataaaaacttgccaggcttcgagttactaacataaactactaggaacatgacataagcacgatgaaacaagcattaacaccacaatggtttatcatattgttccttattggctgccagcaaaatctctctagcaacaaacgtgtaaatgcccccaaaatacaccatcaccatgactccatgcatagccacaatatcacaagtatcgctacagccagcggcgccatgttccttttctgcgaggacgcgcgacatacacatgattctgaagctctactgacctagacacagggtggaagttcatgaccaaattggttggttcattcactccattgctactgcgtgcttaatttgatgaaaacacagactcgacttattttctttttttagctgcatgatcccatggatggaagaaacgaaacctactact

SEQ ID NO: 36659 - DNA, 387 bp, Oryza sativa
  Clone ID: uC-osrocyp033g06b1
attatatctcatcactcttcacccgccgcgacctccggaagcaaacgccacacgcgcctctccgccatgcttcctcctagggttgccccggccgccgccgccgccgcgcctacctatctcgccgccgcggcctcgacccctgcttccgtctggctgcctgtgccgcgtggtgccggacccggggcagtgtgcagggccgccgggaaagggaaggaggtgctcagcgcgtggtcttccagccattcgaggagctcaagggggagctctccctcgtcccccaggccaaggaccagtctctcgctaggcaaaagttcgtcgacgagtgcgaggccgccatcaacgagcagatcaatgtggagtacaatgcatcgaacgcgtaccactccc

SEQ ID NO: 36660 - DNA, 275 bp, Oryza sativa
  Clone ID: uC-osrocyp033g07a1
aacgatgcagtagtaataattttaaaccaaggtgatattacagtaggtacgtacaagtagtcgtattaatgtacgtacactacgcgtatactagtataataccgtcgtatttttttccgctgactcgatcgttgactagttactactactactagtagtagttctggttggtgcatctgcaagttttcctgatcttgaagtgggtgccctcggtggggagcttgctgagcttggccatggcggcggctaagtccactttccactttgtggtgttg

SEQ ID NO: 36661 - DNA, 285 bp, Oryza sativa
  Clone ID: uC-osrocyp033g07b1
tagccggcggcggccgacgccggcggcgattggtacggcaagaagagcatcgaggagacggtgaggaaggaggtggagaaggccatcaagcacaatcccggcgtgggtgccgcccttgtccgtttggtgttccatgactgctgggtcaacggttgtgatggatcggtgctcttggacaagacgccgtacagcagcagcacggagaaggcggcggcgaacaacatcggcctggacggcttcgacgtcatcgacgccctcaaatccaagctgggcgccgacgtcttc

SEQ ID NO: 36662 - DNA, 343 bp, Oryza sativa
  Clone ID: uC-osrocyp033g08a1
caaatgcaacccaatttgaattgaatggaggaaccacaaacacccccaaatttcaggagtggagctcattaaccacgggattacattacccagacgcacacacggcttcaccccaaaggttacgtattgaaaactaagaccaaaccaaactggttgaccaagctgcaactaataacacaacgtcccacccatttaaccatcatccggtggccaccgccacctaatacacgggcaccctaatacacccatgcttccggcctccggtaagtcacaggtatcgcgctccggtggaggatagctcaggttgaggaggccctactggaacgaggccacaaggtccatg

SEQ ID NO: 36663 - DNA, 165 bp, Oryza sativa
  Clone ID: uC-osrocyp033g09a1
atccttgtcgtagattttattaatgcattcagagacagtcccacaagtaacatgagagaccaagaacaaacaaatcccaaactaaaggcatcgcaggtcacctaccaagggataaccttcgtaagaggcacacacgcccacgtcacacaaggggagcaagacgat

SEQ ID NO: 36664 - DNA, 164 bp, Oryza sativa
  Clone ID: uC-osrocyp033g09b1
ttttgaacctagcgcactccaccagccgcggccggccgattgagcagtggacgaatgagtgggaaccgacgactggggagaaccaactcatcttctagcgcctactctgggccgacgaccagagatggatgcaggacgcagttcaacagctgcggctagattct

SEQ ID NO: 36665 - DNA, 113 bp, Oryza sativa
  Clone ID: uC-osrocyp033g10a1
caacctcgtcgtagatcttattaagccattaagagacagccacataagtgacataacgagggcaagagcacgacaaatcccataactaattagcacgcagggtcactctgcca

SEQ ID NO: 36666 - DNA, 81 bp, Oryza sativa
  Clone ID: uC-osrocyp033g11a1
tgttttttttatccgcgtcgtatctcttattaatgcattcagacggcagtcacagtagtaaagttagagggaaagagcaac

SEQ ID NO: 36667 - DNA, 123 bp, Oryza sativa
  Clone ID: uC-osrocyp033g12a1
tttgtttttttaccaagttgtggctttaatattcgggttgaaaagagattacacatttggagcttgaaaaaagggggtccaccgccaaaagatgtaggggtggtgcactatgctagagatata

SEQ ID NO: 36668 - DNA, 242 bp, Oryza sativa
  Clone ID: uC-osrocyp033g12b1
ttgtgatcaccaaggacacaccactagctacagcggagcgacctagtactcacagcatgtcataccgtcaaccactaggccagcctgttccatccgtcaggtactacgcacagaggcttagcagtagattgactactctaactagttaaccagtcaacgcgtggtcacggcgattgagatgaccaacaaggcttcaacacctccagatgaggtccaatgcatggagacatatgggagccgct

SEQ ID NO: 36669 - DNA, 289 bp, Oryza sativa
  Clone ID: uC-osrocyp033h01a1
gactagaatactagatatagccaacaaaatcgcacaaaacgtatgtgaattcctaccaaccatgctagcattattatcattatcaagacatgcatgatgcatgcgtgattacaaaattagtacattgacatccattgtacatttatgccccagctgaagaatccttgaaaactggtaagacacatcatctggtcttctggttttggaaggatgactagctaggtagaaagctagcttgaggaagtccaagcgcatgaagagcctgacagacttgttcctggtgccccag

SEQ ID NO: 36670 - DNA, 437 bp, Oryza sativa
  Clone ID: uC-osrocyp033h02a1
aaacataaccaagatctttattttaattagaaggtgaaacgatcctgagattacaactgtttcatcacaccatactgatattaattacccattgctaataccacagagcaacttggacgggtgatcaaggaggtgacacatttgaagttacaacgctgaagcgatctcagttcaatcagcactaacaaaaccaaaagtatttcggtatttcagtataagcaggtcacatgaacaaacgaagtttttatactaccgccctttaacttgctcttggcagtgccgtttgcggtggcaacagcttccctttggtggggtcagctgatcccaggccttaatccatgtgaccatggagttggcgagcttgttgaagtagccatcgacctttccgagcttcgccctacttgcttggccgctcaaggtaacacttttggacagtg

SEQ ID NO: 36671 - DNA, 433 bp, Oryza sativa
  Clone ID: uC-osrocyp033h02b1
tcctccacctctacctcctcctccgccaccggcgatggctttttccgacgccgcggccgcgcaggcggcgacgccgctgctgaaggacgagctggacatcgtgatcccgacgatccgcaacctggacttcctggagatgtggaggcccttctttcagccgtaccacctcatcatcgtccaggacggcgaccccaagaagacgatccgggtgcccgagggcttcgactacgagctctacaaccgcgactacattaaccggatccttggccccagggccttctgcatcttcttcaaagactccgcctgccggtgctttgggtacatgggctccaagaagaagttcatctacaccattgacgacgactgctttggtgctaaagacccaataggaaaggatattaatgcacttgagcagcacaataaaaaccctttg

SEQ ID NO: 36672 - DNA, 373 bp, Oryza sativa
  Clone ID: uC-osrocyp033h03a1
tttgggtaacaaaaaggatgggggttacataaaacccgatgtcataagagtattatatgaaacctaacgacgcaaaaaaccagtcacaccagctaaaatcaaaggaagaactgccccacgccccaggcaccaagcctatagaaagtctgttacgaaatttagttgccaagtcccaacccaagtagctatcgctcagccacgccgcgaaccttcagaatttgcacaattaagactgctcggctgtggcaattaaaccataaaatatatcgtgctaattgccatttgttacactgctttcaactgcagattttgaggcgttcagaatttcgccgacaataggggtgccctccttgctcaatggctgcttctgagc

SEQ ID NO: 36673 - DNA, 274 bp, Oryza sativa
  Clone ID: uC-osrocyp033h03b1
ttgtaaggcgatatctccatactttggatggtccagatgtaccgacaacaaaaaatgcattggtttgggtcgaattggttcaatatattccaaggttgctacagattttgcctgtgaccaaagatttgaaaaggaccgctggggttttcattgaaactgattggcttggtgctgcttactatcttctatggtttatgcctggctggacataatgtaggtactttgtggtattttttgaccatagagcgggaagattcttgctggcgctttaact

SEQ ID NO: 36674 - DNA, 398 bp, Oryza sativa
  Clone ID: uC-osrocyp033h04a1
tttggtttttttttttttttttgtttttttttttttttttttttttttttttgggggggggcaaaatagacttattgcaaggacgagcacgttaaactggttgggccttaaaaccagcatggcacagcctgggtcatattgggtcgtaggggcaaccagggaggcgagcccggcctgactgactgatctcaaaccatgctttggttgggctaggccaggccgtgtctagcgactcatttggccatctatagggaaaacaagaaaacccttcatgctttatttttgggaccaaagcaagagcccctttagcaattaagttgacgatgattactccctgggggtcacttgcatcgggaggccttcttccttttccagagtttaccaaaacacaaaccctg

SEQ ID NO: 36675 - DNA, 356 bp, Oryza sativa
  Clone ID: uC-osrocyp033h05a1
ttggggttttttttttttttttttttttttttttttttttttttttttttttttttttttttttggaaaagggatcaatgcccttaagttaaaaaagatctaaatccatcaggttacaaggccaatttttccaaaacacttattttacaaacatgttatgccaaaagggccaataaagcaaaagggtgcttttaaagaaagccccactttagttttgcttttcacttttgggaatttttaaggacgacataattggggccataaggcttttgaattttcgaaattttcttcaaaatttcagcaaaagcatttttggcccctggacctcgtagtctaaacttaaatttaaaaaccaa

SEQ ID NO: 36676 - DNA, 468 bp, Oryza sativa
  unsure (1)..(468): unsure at all n locations
  Clone ID: uC-osrocyp033h05b1
ccctantccattttcacgccaccccaccacccgcacacccacactccacgagagacgacccaaaccggtcgccaccgccgccgcgatcccccaccttcgcttgccggaaggggcgccgtagccccgcccctccccttccccctcttcggtggctggcccctctccggcgatggggagcgccgacctggtgctgaaggcggcgtgcgagggctgcggctcgccgtcggacctctactgtacgtcgtgcaagcacaccacgctctgcagctcctgcggcaaatccatggcgctcttcggcgcccgctgcctcgtttgctcggcccccatcaccaacctcatcagggaatataatgtacgggccaatgccaccacagattagagcttctctattggaagatttgtgactggtttaccccctttctcaaaaagaagagtgcggaaaacaaaatggtttttcataagaggggt

SEQ ID NO: 36677 - DNA, 386 bp, Oryza sativa
  Clone ID: uC-osrocyp033h06a1
gatgattccttcttgtggtatgatatgacatattgatttttccctaaatagattacatatacagccaaatcaacaacagatgcgtgtacatcagacagtatccctctataaatatatgcagttgggaacgcaggcacaaacagaagtgcagaactcacatctgttttgtataactcgtatacagattccgaatgttgctcaaccgagatggattggcagcagcgctgcaagcctgcgtttggcgtgagattctacctcgtggaattagttgctttttcatggaaatctgaaccttgttttatggatgaatctccaaaataggtacataaccagcaggaaagtataccaaatcaaacgccatcttcagattggttgatgcatagctt

SEQ ID NO: 36678 - DNA, 336 bp, Oryza sativa
  Clone ID: uC-osrocyp033h07a1
aacgaacaggcactgccaatttggcaattttctgaaattctgaaatgcctgagaattgtacagttcactatactgctattacttccccaatcctaagctcacagtgcaacttaaataagtaattaagtaattttcttgattgatatcgaatcactaatcaggctgctcgggcgacggggtcgcaggccgggccgccgccgacggcgaggttgacgacggggcgagcccgcgtatgcagcctcgggacggttaccctgagcacgccgtgggtgtactccgccgagatgccgtcggcgtccaccaacgccggcagccggaacttcctcgcgaagctcc

SEQ ID NO: 36679 - DNA, 496 bp, Oryza sativa
  Clone ID: uC-osrocyp033h07b1
ccttgttacagctgtgctgcctcttgcttcctcctcctcatcgtccgccatggcttctctcaccgatctcgtcaacctcaacctctccgacaccacggagaagatcatcgccgagtacatatggatcggtggatctggcatggatctcaggagcaaggctaggactctctccggccctgtgactgatcccagcaagctgcccaagtggaactacgatggctccagcaccggccaggcccccggcgaggacagtgaggtcatcctgtacccacaggctatcttcaaggacccattcaggaagggaaacaacatccttgtcatgtgcgattgctacacgccagccggagaaccgatccccaccaacaagaggcacaatgctgccaagatcttcagctcccctgaggttgcttctgaggagccctggtaccgtattgacaagagtacacccttctccaaaggacattaactggccccttggctggcctggtggggcttc

SEQ ID NO: 36680 - DNA, 369 bp, Oryza sativa
  Clone ID: uC-osrocyp033h08a1
aaacttctgcataacttctttttcttttttccgaaaggaacttctgcttaatttctgtatgctatagatgggatttagcagtgcaagactaaagtacatgtactccgagatggttcttgcgtggttacaaacttacagggcttttacaagcaaaaactctgctggctgtttttgaattttgtacataatctacatgatgcctccaatccacaacttaatacatgcaatttcagtgtgtttcttcttgttagccagcttcatcgacggcaaaatctggttctggaggctttggcaatctcacaattgtcgggctggccctgcttctgagcctgtgaacttcctcgagtgcattagctgcaaagcgagatg

SEQ ID NO: 36681 - DNA, 440 bp, Oryza sativa
  Clone ID: uC-osrocyp033h10a1
gcaaacaacaaataacacataacataactgatacatagtttacagatgccaaaatttgcgcagcaacaagtatgacaaaactcgcgcagcgattagtccactaaatttcgtacgctaaaagaaaaaagaatacagcaaggctacccaaggaacaatagccatttgacagcattaacccatattagttgctataactccatatcagcagacatttttatgctgctagctgtttggatctcttaacaaacttcgatgtatggcatttcacatcttgggtgaagacaaaagaatgggatgcctgtcgcaagtgccaaaagttgagatgtgccaggacggcatggatcatgtaccgtatatatgtctatgaactggtgcgccaaaacctttaactacatccatccatcttttctctaccattagaacagagttgtttgataggt

SEQ ID NO: 36682 - DNA, 477 bp, Oryza sativa
  Clone ID: uC-osrocyp033h10b1
tccaagcacctttttcagaggagatgcgacagtacgacaccttgctcgtctgaaaagcaagggttcccggaaaatcatttccagtgctacctcaactaatggaactatgttggcctattcagattgtgtgaaaccctgcctttttgcactaagacataagggtggaaaaaagtttactctagacaaactagagctgccaaagggattgctgaattctcagtgtatgctgttttctattgactcatccagtttgattctagctggccgtgatggaaagatttatgttgtagacattgccacacgggaaatttcaaatgtctttcaacctatgagaaaaatggatggagcttccaaagaaccacctgttacaaaaatgttcctcagtgcggatggacagtggttggctgcagttaactggtctggggatattttacatatttaacctcgaggtgcaaaggcaacaactggttcatacct

SEQ ID NO: 36683 - DNA, 408 bp, Oryza sativa
  Clone ID: uC-osrocyp033h11a1
ttgtttttcttccaagctaagagttgattcatcattctttcagaaaattggtgttcagtagggtctgtaggcacgacatagacgcaaacatgactaacaaaatccactgaataaaataggcgggccttccagcgtaaaacacactcgagagaacgctctaagctgcagcacccttgcccttcttcctctggagcttcttcatgtagaactcaagctctttgccctccaggatgtacccatcagctctgccacattgcccaggccgggaggagatgcaggccaagagccttccgctgccaaattgcttttcaatgtgcgagtccagagtgcgagtttgctgacgctttttaagcttcctcacaacatgggtgctcttttttgcttcctccgtggcaggctcaccctttt

SEQ ID NO: 36684 - DNA, 453 bp, Oryza sativa
  Clone ID: uC-osrocyp033h11b1
tctaccagcagctgcggcggcgcgagcacacgaagaggaggcggagcagccggagccacctccgccgccgccgccaccatgggtatctcgcgtgactccatgcacaagcgccgggccaccggtgggaagcagaaagcgtggaggaagaagcgaaagtatgagcttggtcgccagccggcaaacaccaagttgtcgagcaacaagacagtgaggagggtccgtgttcgtggaggaaatctgaagtggagggctcttcgcctggatactggtaactattcttggggaagtgaggctgtcactcgcaagacccgtatccttgatgtggtctacaatgcgtcaaacaatgagcttgtgaggacccagacccttgtgaagagtgccattgtgcaagttgatgctggcccattcagcagtggtatctcactcctatggtggcgatatcggaggaagaag

SEQ ID NO: 36685 - DNA, 380 bp, Oryza sativa
  unsure (1)..(380): unsure at all n locations
  Clone ID: uC-osrocyp034a02a1
aggttcaaatccaacttattcataaagcatactgctgtcccacaggaaactgtttcataaaactaacatatcatacggactcgatggtccattaaaccagacacaagtagacatcagcaccacaaatacttgacgaacagaggctcgggatgaccaggcacatcggcagctccaccaaactggctgattactgaccaccacggaggcggagcaccaggtggagggtggactccttctggatgttgtagtcggcgagggtgcgtccatcctccagctgcnngccagcgaagatcagacgctgctggtctgggggaatcccctccttgtcctggatcttggccttcacattatcaatggtggcggagctctcaaccttcaaa

SEQ ID NO: 36686 - DNA, 346 bp, Oryza sativa
  unsure (1)..(346): unsure at all n locations
  Clone ID: uC-osrocyp034a03a1
cccaagaaaanttaanagacacaattttggcggcattttattccctgngnangagtgcgagtgacaattgnnnatacaacacactggaaaaaaagcaaggccnaaaccaaaagggaaaaaggaagcaagcaagcaccgccacaaaaaggggacgcaacccggacagacnttgaaaaaggggcaaccacagggggaaacaaaaccaannncccccaaaagcaccacgcggagggctacaaccaaggggaaaaagnnggcacggggcgccgaagcggatacacagacccgcggggcaagcacgccccaaaatgggggggaggcccaccacgacgacgaccagcctagc

SEQ ID NO: 36687 - DNA, 276 bp, Oryza sativa
  Clone ID: uC-osrocyp034a04a1
ctgacgctgcttcctcaaatcttcagtttcctcagaaagagagttgcttcgcattctgtattcatcaatctctttcttcagttgtgctgtaagcatgatgtgctcttgcctctcttcctctgtaagtttcaaattgttctgctcttgcaatattttctccttttcagcaaccactgtggctttcaaactctcaagctccaatttgtacatctcagcctgctttctttcattttcaatctgcagcttttgttccgataactgtttctcatcattttg

SEQ ID NO: 36688 - DNA, 258 bp, Oryza sativa
  Clone ID: uC-osrocyp034a05a1
aagaaaaatgccgtacaactttgctcaagtaatcaacatatctgtcaaatctacacaaaactcctcttgctgaggatatggcttccccccaaagaattaacctattgtacatatttatcacgccagactaacacgctaattacaaggctcaaacttacaacacaacacatggatatggactactcgttacgaaataagttattatgcagcagctgtagtacacaatacacagcgcattcgagactcgcctgatggggt

SEQ ID NO: 36689 - DNA, 297 bp, Oryza sativa
  Clone ID: uC-osrocyp034a06a1
gacacaagcacaagcacacagtgtattattattgattaagatatggtgattcttctccgatacaagcattacttagtctagtagttgacatatattaaagattaattctttgagcaagcatgcatattcccatacaagctagtatcagcatacttaggtagattgctggcatttgtaacagggaggagcagagccagagtacaatacttaaggctttttcaacccacttgtattccttgaggttttatcccatcatcatccatgtgtgttttacttgaggatgtacttgagcacacc

SEQ ID NO: 36690 - DNA, 357 bp, Oryza sativa
  Clone ID: uC-osrocyp034a07a1
ggcaggaaagccttctttttggatttttattgctgcaactttcgttgcaaacttcaaaaatacactcgccagcatttgacggctgattacatatacccttacaggcttacagcttatttctacatacataaccaaatggcatcccatttccagctttaccaatccttgcaaattggaaaccttcttcctgaatcctgaacaatttagctggattcgccggacacgtactaacctgggctgcttttctttgctgactaggttgggggcaagacctacatcttgcagtcatgaggccccaccgatgctgatatctggccctgagccccgaaccaaaagggcccccatagatcaccagcc

SEQ ID NO: 36691 - DNA, 384 bp, Oryza sativa
  unsure (1)..(384): unsure at all n locations
  Clone ID: uC-osrocyp034a08a1
agctccatctagttccctctcttctcatcatgattgacacttgataaaattaagcaagatttagctagctagctgagctgatcngatcaccatgcatgcatgcaagcaaggccaattcaatttcaagctcgccggccatacaccacacagcacatatacggggggtaaaacaaaaacaaaaaggaaatcatacacaacattgattcattcatccattctcttaattaattgacttgaggttgaggagcatatatatacgtgcgtggcatgcatgcatatatatggnacgggggtcgacgacgacgacgacgagcctagcaagcttggatgtttgtcgatctcataattaattaatttggatgggtcgatgagatgagatcagat

SEQ ID NO: 36692 - DNA, 386 bp, Oryza sativa
  unsure (1)..(386): unsure at all n locations
  Clone ID: uC-osrocyp034a09a1
anannnnggggttttttaaacaaacactnnggatttgaaattcatagganacaccgagcaggttactgaatatcnnngggnactaacatcatactctaagataatagtctatttanctaggagactaggagagtggttgatgagggatctacaggagcagaagaagaacacccacatcttgtgttcttgcctgcctacccaatttcatcatcatcatcatccattggctgatttgattctacaagaagaaatggaaccgaactagtactacaaagagatgatcaagctgctgctaaacaagtaataacaaaaatcaagattaaaccacaggaaggatgcaaagaagaagagtaatttttaagctaaagctgtttttgcctactttt

SEQ ID NO: 36693 - DNA, 315 bp, Oryza sativa
  Clone ID: uC-osrocyp034a10a1
ggtataaattgctactcaatactatattaataaaaccataataatccaaactttaacaagtaaagcaaaaccggggccataatgaaagcccgtaccaaaaaagttgcaggagcactcaagaattcggtgtaaaacgaacgacaaattattgcaggtataactaaaagcgataaaagatcgatcatttagtcgacttcctcgatcttgggccctggtccgctgcttccggcggcggccgccggagcatcctcgtccatgcctccggccatgtcagctccggcgccctggtacatcttggcgatgatggggttgcag

SEQ ID NO: 36694 - DNA, 301 bp, Oryza sativa
  Clone ID: uC-osrocyp034a11a1
cagcaaaacatcactgcatgtttttctagttctcaagtgaactaatttgttctcccatacaatacaatggcagtatgtcacctatgtctgccgtactagggaggaggaaccgagcaacactagttacagataattacatcacatgtctataaaaccagctgtagaggcctctggcaatgatacccaaaacatgtatatatttacatattatattacatcttctcttgtgcccacatcagaaagaccaaagttaattttggttatttcttcatctcagcaggcgaacatacaccattccttg

SEQ ID NO: 36695 - DNA, 390 bp, Oryza sativa
  Clone ID: uC-osrocyp034b02a1
gacacaagcacaagcacacagtgtattattattgattaagatatggggattcttctccgatacaagcattacttaggctagtagttggcatatattaaagattaattttttgagcaagcatgcatattcccatacaagctagtatcagcatacttaggtagattggtggcatttgtaacagggaggagcagagccagagtacaatacttaagtcttcttcatccagctggtatacatgatgatataagccatcatcatccatgtgtgttttacttgaggatgtacttgagcacaccgggtatatggatcctgtagaagtagtcctcccaatcgatggtctttggggcgaagttgaacatttcatcgtcttgagggttcctgctcttcccc

SEQ ID NO: 36696 - DNA, 396 bp, Oryza sativa
  Clone ID: uC-osrocyp034b03a1
agtcacaatcacatcgttattacttctgcttcttcaagcattcatgtaacatcaaaacattacacacatcgtctcaatcgccttgtgaaaagtacaagaaatttactatcttttcaacacactgaagctcagttaattaacaaccctgcagttcttgcgaatctggccgtcgtcaccggtgagtgggctgatgttgcccatcttcaccatggatctgccaaaatcccagaagaacttgtgggcattggcgctgtaagtctccaccagctccttggtgttggcgatgccgtcgtcgctggagaagagaccctggtcggaggacaggaggcctttctgattgaggaggttctggtagtagcggttgtcgaaaacgtaggcggaggtgatgcccagcac

SEQ ID NO: 36697 - DNA, 367 bp, Oryza sativa
  unsure (1)..(367): unsure at all n locations
  Clone ID: uC-osrocyp034b04a1
actattgtagagctgtgacgacgcatgctcccctccgtcggctggtagccttttgtgcggccgccctccttttttttttttttttgcgttgcatgaaaacatgacgaatgactttggaaaatttatgcagtttgtgcgaatacagccggtcgaagctccacagggctgataactaataaactagtagtatatataaacccccaaaaaggcaggatctttaacagtagtagcgaacattctgaaatctgaactctgaatcacttatagctcagctaaggtgagcaacatcaacctcatcagggaacttgaacgtatcagctgcaccaaacttcttcctcccctgcttccactcatnttcggacttcaa

SEQ ID NO: 36698 - DNA, 371 bp, Oryza sativa
  Clone ID: uC-osrocyp034b05a1
ataccaagattgggctatctcaatctataaggaaagataaaaagtacttgatcattactgatgatcataaaataaagtacacttcaggaagaaggaatgacctaaaatggctccttcaacagaggaagaatagggctagacaaggtacacaaaggtaggcaaggccattgccgtcatcgttaacgttggcctcgatcagctgtctccgttctgctgcccgaagctgcatgatcctgagggcaagaaggagaagggattctcagagatgtcaaatccaggtcgagtgaagtcatcaagcccaccgaagccaggatcaaagctcaatggcgagaaatagcgtggatcatcggccatcttcatgtcaagaattg

SEQ ID NO: 36699 - DNA, 259 bp, Oryza sativa
  Clone ID: uC-osrocyp034b06a1
gggaaaatgaacctaagtaggacaatattttccagctgatcatgttccaaccaaaatggaagaaaaggaaggctagacaaaacgaaattcaagctggggtttagcacctataaaaaccgagcttctctttttacatagaccatatatgaatttgtacaaaaaaattttgcaagcctactcaactttcgggatgtgtggataaataactccactatttaactgcaagtttaatataattggaaggaataattagccatct

SEQ ID NO: 36700 - DNA, 394 bp, Oryza sativa
  Clone ID: uC-osrocyp034b07a1
acagtaaacaccacaatattacagcagcaaaatatggatttccaaattctttgctaggacaattagtttggtgctacaacaaaaactgctccagtagcgcaagctcgggagaacgagtaaatataacttgttatataacatacaaaaactgtataagtaattaaagaagcgcatatgaaccaacaatttaaagtctcaaggcagcaattgcttcaggcctgaagtcaatccgaagccctaacaccctcctaacctctgctggtgtcaaaagccatgtcagatgcccggcattgtcaccccagaaatccagtatctccgatacccgctcaaaattcagaattgttgacatctgggaaagtcttgagaacttgtctcggactggtctctgtgacat

SEQ ID NO: 36701 - DNA, 225 bp, Oryza sativa
  Clone ID: uC-osrocyp034b08a1
aggaaaaaaaactcccatccgtttccgtttgggctgattaggactttgtttttggttaggccgaataggacattgggttgaattataccaaggccctatttcgggtagcatcaccaggagaaacaagggcatattttacatacctaggataaaaaatcacagcccataacaaaagaattccatgccgcccttatagcacttagcactgggtaaaaggacaaaaca

SEQ ID NO: 36702 - DNA, 397 bp, Oryza sativa
  Clone ID: uC-osrocyp034b09a1
cctggtacaaaccaaatctaatgcaaattgatcttatcaattgtgtcgatgaaattttacaattttgatttccccttccagacaacaatcgcagaaagtgaccttttacatgtaccgtgtttgacaaaaagaaggtaaaccggaaaatacaaagcctgtgaacgtatcacacacgacgaatatcaaatcaagcaaacgtacgatgcatgcaaactgacacggatacttcaattaattcggttcatccacttttaagcgtagtcctggtcggcaacgggctggtatgagccgatgaacacgtcgccgtacacgagcccggcgaggccgccgccgatcagcgggccgacccagtagacccagttgccaacgaagttgccggcggcgacggcggggccca

SEQ ID NO: 36703 - DNA, 246 bp, Oryza sativa
  Clone ID: uC-osrocyp034b10a1
ataccaagattgggctatctcaatctataaggaaagataaaaagtacttgatcattactgatgatcataaaataaagtacacttcaggaagaaggaatgacctaaaatggctccttcaacagaggaagaatagggctagacaaggtacacaaaggtaggcaaggccattgccgtcatcgttaacgttggcctcgatcagcttgctccgttctgctgcccgaagctgcatgatcctgagggcaagaa

SEQ ID NO: 36704 - DNA, 302 bp, Oryza sativa
  Clone ID: uC-osrocyp034b12a1
gatctcagattaatcactgtgccccccctgtatatatgtatcggcagctatttcacagtccagagtaccatgtgtctacaacagtgctgtttgctcaattggttagctcaaactaatttacaattcaattgaacgattttacatgccatcagtaaacagcccactccatcctttttctctctatagcttgattttcttcaccaaactaccaaaaaaattgaatagtaatggtacatttcctatataggatacgatggggcaaaaaaaaaatcatgctccctgcttctcattgtggaaggaga

SEQ ID NO: 36705 - DNA, 376 bp, Oryza sativa
  Clone ID: uC-osrocyp034c02a1
gggagaaataacagcccattagactggcaacaatgccagcgcgaccacacacacacacacacataaaaaaaaaagaagacagagagcacaaagaaacgaacaccctacagcaccaagaggcagcgcaatgaaccacacatcagcaggttaaaatggcttccatggttatacgcagattatgatatagaggtgtctcctttgagtcgaaaatacgacggactccataaggcattaaacagttcctaagggttccagctaagtcatcaaaaagaaaaaagaaagaagcaaccgagggtcacgcaacttcgcccttcagagtgacagcatccacaaaatgcagacgatcggcaccatcgcaatctgacgtcctagactc

SEQ ID NO: 36706 - DNA, 312 bp, Oryza sativa
  Clone ID: uC-osrocyp034c03a1
gaaacaaaaggcaaacttgggaaccccaaaaaaaatttattattacagcaacagggggaaattcaaaaaaagcattattcctcccttgcaaaaaaaaacccaaaccttaattaaaacggaaaaaaaaaacgggaaaaaaaaggctggatcggccgaagatacagaaaaaactgtgggcaattgtttttagagaagggaaaaaacctagggtatacgggaatccccccggctgggcaaaagacccttaaacgaggacaagaaacaagcctgggtcttgagggcctttttggaaatggggaagcaaaccttttt

SEQ ID NO: 36707 - DNA, 391 bp, Oryza sativa
  Clone ID: uC-osrocyp034c04a1
gaacatgaaggaaggaaaaactatgtatagcttgaaaagcatctaagcaaagataactacagcatccgacgtcccagttatactgagaaaacctaattttatggactatccctattacaagataaccttttcataactagggcaaacatccgacaagttacaagcacacctgatctttacgattccattttttttctggttgcttttccaacaaatgcaacaatagcctagtcacatcaacatacaaacaagtcaatgtaaaagattagaaaagctttacagtgaagatccaaccggcatgcacctctatctttggatttggtctgcagctgggttgctagttgctgatgatgttgacgtcctgccattgggcaccccgttttccgtggga

SEQ ID NO: 36708 - DNA, 322 bp, Oryza sativa
  Clone ID: uC-osrocyp034c05a1
gggcaatagtaaaaaagaaactgtataacccatgcatagaaggggtttatgattttaaaacccaaattgtcaaaggggctgaactatgtaacttttatgcccagaaggaaaaattttaatctccggaaggaaacccttaattttggggggaggacaccaaatttggacaattacaaaagggaccacctaaagcaatcaaagggaaacgatttcgggggcccctaaaaagggcaactttttgatgaaaaaatggtggaatttggcggggaaacttggaaaaatgggccctttttgacagcaccagcaccagttcaagcttaat

SEQ ID NO: 36709 - DNA, 430 bp, Oryza sativa
  Clone ID: uC-osrocyp034c06a1
attatagaggtgctacgacgtatgctcccctccttcggcatggtagcctcctatagagcgccccttcttttttttttttttttttttagcttggttgctttatgtaactaactaacaaccaagttagctaattacaaggaggaatcagtgaatgttaatcatgcaggcatacactccacgagtggctaatagaattgaggtatggcgagtgccatatcttgccataccggaagctcctccactagatttgtctgtacaaaaaccattttgaggcaagaactcgagctctgaatccttgcatcaaacaatcgaagcatccaaataattttgggcatccatacattatcactatgtccaattggagacatcaagatcctttccatgatggtgtcggcactgctgttgaagcccagacacccaaaatgtagag

SEQ ID NO: 36710 - DNA, 392 bp, Oryza sativa
  Clone ID: uC-osrocyp034c07a1
gattcagaaccgttttattcaacactattgttcctgtacaaggatctgaaacagaaaactgatgcacacatatacaagccatggcgacgactgcagtttatgctcgctatttgtaacagctaacataacataaatggtgaatcttgatcctatgcctaattcccccccaatagtggggtgcaccttatggagtgaacctagtaagcttcagtgacaggctcagtcgaggaaaatcatgaattctctagatctaattctgctcaagtgtatggtggaatgtcttcgagattattggcctaacgtcctccacaccaacaagtgtctccaggaatgggagtaactcgaccaattcctggtctgaggggtcatcaaaccagctctttattggtata

SEQ ID NO: 36711 - DNA, 391 bp, Oryza sativa
  Clone ID: uC-osrocyp034c08a1
ccaatggatcacatctttgttgacgatcagttcacaaactagtcacaatcacatcgttattacttctgcttcttcaagcattcatgtaacatcaaaacattacacacatcgtctcaatcgccttgtgaaaagtacaagaaatttactatcttttcaacacactgaagctcagttaattaacaaccctgcagttcttgcgaatctggccgtcgtcaccggtgagtgggctgatgttgcccatcttcaccatggatctgccaaaatcccagaagaacttgtgggcattggcgctgtaaggcttcaccagcttcttggtgttggcgatgccggcgtcgctggaaaaaaaaccctggtcggaggacaggaggcccttctgattgaggggggtttt

SEQ ID NO: 36712 - DNA, 376 bp, Oryza sativa
  Clone ID: uC-osrocyp034c09a1
ataggatcaaaacatttctattaccacaactttttaaggatggaattgagtagcaatactttcaccccaaaatacagtttagcgacaatatcttagaaaagccgcttgctttgccgccatggctggcaagctgagcagagcagctaacacaaagaacacgagatcactataaaccaaacggcaacgaacgaagaaaatacagggtcttttttgtctgaagatacacgaagcggttcgttttcttttatttttagtctcctctcctcctcgatgatgggtggatggcaatggcaatggcgatgggatcttggcttaattgatggaaggggctcggcgttcactccttgaggcagtcgagcatgggggcgatgagctt

SEQ ID NO: 36713 - DNA, 224 bp, Oryza sativa
  Clone ID: uC-osrocyp034c10a1
tttgaacatggatcaaagacaacctattcataaagcatacaagctttcccacaggaaactgcttcataaaactaacatatcatacggctctcgatggtccattttaaccagactacacgctattacacagatacacctttatcactagccggaacagaacactccgacaagactacagcgcactctgtcaggcttcacccaaactggcttgattacctgaccac

SEQ ID NO: 36714 - DNA, 349 bp, Oryza sativa
  Clone ID: uC-osrocyp034c11a1
ttttttttttttttttagctttgttttgttttatgtaacttatataacaactctaatttttgttactacagaaaacaatgggggaaaaaagggcaaaggggaaagcactccacaagggaggctgggctaaatgtaaaaaatgggaacgatgctattacaaaaatcggaactccacaagctacaaaagggcattaacgggttacaggttaagcactttaaactctaaaccaaaaatggggttacaacaatcaaataactgggggggggttaggtaaagccaaaagttggaattggggggaaaatgaaaaatatgggaccgaaaaagtggggggggaaaaaaaggtggagg

SEQ ID NO: 36715 - DNA, 277 bp, Oryza sativa
  Clone ID: uC-osrocyp034c12a1
gcgttgcatggagacaagacaggcattcataaatcatgcattaggcgtaccaaaagtagagagtcccggggaaagcaagacgagttgcctcagattctgaatcatatggcccatcctcctgcacttacatcacccactgtttcatctcatagaaatgactggctcgcaaaaggacacacactgacccaaactccaggacggtcggacaccattgactgccctactccgatcgatccaacgaacgaacaccggcttatttcggtagcagatcgaacaa

SEQ ID NO: 36716 - DNA, 80 bp, Oryza sativa
  Clone ID: uC-osrocyp034d01a1
tttcctttggtggttttgaaccacgactctcaatgtaaaatgcaccacctaaatgcctaagtcctgtttaatttctccga

SEQ ID NO: 36717 - DNA, 344 bp, Oryza sativa
  Clone ID: uC-osrocyp034d02a1
gcaccacgacatacattgtaaaatgtagtccggaaaagtcaaatggcttatggcagatgagccctccaagcgccacagtcaaacacccggtacgtggacagatcgcccaacatgccccactgcacggcttcatctcaagcgagagtctggaccagcagaacgaagtgaattgcaatgagcacttacacgagacacttaacaacgttacaggcactaggagaaagggtgctggctacgagcccctttatttccataaaaaaaacaacggcaggggctaccagacccagatcaactacgccaaagctaaagagagctcccaaggacccaacgcctacaggagggtg

SEQ ID NO: 36718 - DNA, 396 bp, Oryza sativa
  Clone ID: uC-osrocyp034d03a1
gatacaattctcactgtacgactaggagcaaccaccgcaaaagctaagcgtgttcacaagtaacacaccaaatagatatacaattacaaattcagtcggtcagaaccgcctattctgttgagtaggataaccggggttctgcatccccatcccttgatcagctttccttctcaactgatgcggatgagattgggctccagcgcccctctgcattggaatattaccaggattcatcccagctatgcctccttgcggagctgcaccaaaggccgccatgtttgtaccacccattctcgacataccgaccatgggttgttgcatttgcctcggaatgggtctcggtaccacagactggttgccaggagctgcgttccctgatggcgcttgagttggttg

SEQ ID NO: 36719 - DNA, 394 bp, Oryza sativa
  Clone ID: uC-osrocyp034d04a1
ggaaaccaacgagggttacaatctcccacagaagtacataacagattcaaggaatacaacagcagcaatatctataacaatatagaaaacgcagacttgaaattatataatagcaacagtgttgatacaccttatcaagcaagtgaccacaggtgccaagagttcggctctgcaaccaaatgcacgttgctttgcggcagtacacattgccgcatcaaaagcctttcggctatcctcttctcctgctgcctatcacgcaatggaacatcagatacagagagagcatctataccagcccaagttgctgaaagcctgaaactgaaagcaacttcattcagtcttcaggccttgttcgctgcgtcaataaataccatcacttgtttccagctagctg

SEQ ID NO: 36720 - DNA, 395 bp, Oryza sativa
  Clone ID: uC-osrocyp034d05a1
gacgagattggttcaaatatggattgcaatttgaaaatctcaacaagaatcatcatcgcccgacaacttgggaagtaacgtttctcatcagtgcaccactagaacaaagattagccagcacacaaaatctaagatatgtcgtgagtgtcctgtccttaggcagcagtaacaggttccgatccttgcttcgattcagctccagatccagctttgccgtcttcggctggctgcttggtcatcttggcgaacatattgctgtagaatttggcatccttcttgttgtactccttgaccttttccttgaggttcttgtatgtcaacttcacatccctgttatcaggatcaatttcaagtgccttcttaatatccacctctgctaactctaggtcagcaag

SEQ ID NO: 36721 - DNA, 312 bp, Oryza sativa
  Clone ID: uC-osrocyp034d06a1
aaccacataaaattgtccttgatgtccatttcacatttataataaagtctcatacacacatgaaatgtccttcttgccctttgattaggtcacctaataacaacacaaaagaagaggcacaaacactttggacacatgtagagagactagagagagagagcttactagagctaacttaatgaagacttgacacgctagctatagctatagtagactagtagtagtagttgcaatgcatgcccatggtggtggcgtcaaggagcggcggcggcagctggggcatcatgaagccggcggcggtgccgacggcgc

SEQ ID NO: 36722 - DNA, 399 bp, Oryza sativa
  Clone ID: uC-osrocyp034d07a1
gcaccacgacatacaatgtaaaatgtattccagatatgttaaaggcatataacagatgagccttgtgcccacagtttaaaacacgctactctgaatgatcggtcaaaaagacccactgaacgggtacatctggggtgagagtcgcaacgagaagaatgaagtgtatagcattgcgtccttacacgagtaagacagcattgatacagccatcattctctgggttgtttgtaacttgtgcatatttaccccaaacaacttttccagcaggggttaccagaccaagttcactaacgttcacctcaatgatagttccccttgtcaaaacaccaagagtagagtacatttgaccatttgggtttttcttcacagaaattatgtcaaggttgaaagtacatttca

SEQ ID NO: 36723 - DNA, 398 bp, Oryza sativa
  Clone ID: uC-osrocyp034d08a1
acccgctggccgcccacgcctcctccgtcgcgccggcgccgccgtcctcgccgtcgaagtggatggtgcacgccagcgccagcagcgccctggcaagcgcggcgcccacgctcgccatcggcaccaccgccaccggcgccgcgtcgccgccgccacctgcaggcgcggcggcgtcgccaccatccgccgccgcgagcgcgctctcgtccaccacccgcgccgtcctcctccgccgccgccgccgccatcgcagcccctgccggacgagcgacgccacgctacagatggccagctagctagccggctggtttcaactccaaccaaagaaactgagcttcagctaggcgcgggcacacacgcacacaacgtgttcgatcttttgcttctctcacgacgag

SEQ ID NO: 36724 - DNA, 407 bp, Oryza sativa
  Clone ID: uC-osrocyp034d09a1
gatctcttcggctctccccgccggagacggccaccgcgtcgcctcccccttcaaccgcctcgatcccttcctgttctttcggtattttggtgtagtttgcactggtttctggatttcttgacaaaatggtgaagctgacaatgatagcacgtgttactgatggccttccactggcagaagggttggatgatggacgggatcagaaggacgctgacttttacaagcagcaagctaaacttctattcaaaaacttatcaaaggggcaacatgaagcctcgcggatgtcaattgagactgggccatactattttcattacatcattgaggggcgagtatgctatctgactatgtgtgaccggtcttatccaaagaaactcgcattccagtacctagaagatctgagaaat

SEQ ID NO: 36725 - DNA, 320 bp, Oryza sativa
  Clone ID: uC-osrocyp034d10a1
gctgctgatgatgatgatgatgatggatcttggggagaaatttgttggctaatttcgacgagatttctcttcggtttggggggcttcaagctgttcgtcctgggcggggccatcttcttcttgctcttgggagaagaagggggagtcgatttctcgccggctttgagctccggcgatggaggcgggttgccgggtagcttcgacccgacggatttgaccagctttttcttcgatgatgggccatcgatgacgcctttggttgattcaacgaccaacttgcttttaccatggggagatgatttgaatggtttcttcccctt

SEQ ID NO: 36726 - DNA, 93 bp, Oryza sativa
  Clone ID: uC-osrocyp034d11a1
ctattgaattacattccgatggatagcaacaagcagttcaaacaccataaccaaagcgaactcaattcatgggaccatcacggaccgaagaac

SEQ ID NO: 36727 - DNA, 212 bp, Oryza sativa
  Clone ID: uC-osrocyp034d12a1
caataaaagctggttgggtgaccgtctttcctataaaatgtgagaaatacaacaatgatgcaaacttgtctgaaagattgggtttgggagacaacaaacaaaacccaaattcgatggtggagaatgatcagtgatacatttgagtcggacatagagtagaagccttgtgtcagtaatgggtttccgagttacgaagcaacttgaattttcca

SEQ ID NO: 36728 - DNA, 423 bp, Oryza sativa
  unsure (1)..(423): unsure at all n locations
  Clone ID: uC-osrocyp034e01a1
gccgccgcgacgtggtacttatcgtcgtcggcgtggtggtggtggccgtggtggtgcatcagcggcatggccgacggcaggtggtggtggtgtcccatgcagaggtggtcctgcggcgggaactgcagcggcggcagcttgtcgatctcgtggcgcgccgcgttgagcagccagtccaccaccttgctgggctggttgagccccagccggtcctgcaggtcgtacagctggatcgccgtcggcaccgacagccgcacccgccggtcgcgcagccccttcaccgtcttcaccttgctgtgccggtccttgccgccgaacacccgcgacacgcgcacgatccgcgactccgtctgcgccgaccattgccgcgacgtcgccaccgccgccgtgtgcttcctcgctagctccgccgnctcctcctcc

SEQ ID NO: 36729 - DNA, 408 bp, Oryza sativa
  Clone ID: uC-osrocyp034e02a1
gatcccaaaatgattttacacatacagatcgcaaacatgctaaatcgtcctcagtttcttacaaaatggtgggagtttagtaaaccaactgtaacatttggtatggtacaaaccaagaaacaaatggcaaacagcagatgatcagcagccgttccagagatatgataactatgaacaaaaacaaactcggtgtactttacaaaatacaaaggatataccaaaacctgtcccctttgtaccgtataatggacaggaaaaacgcacaaggtgaatgaccaacctcccactcaaaaaggttccactgcatcaacgcgttggagtttcctcaaaagaattcagccttgtatcgacaaatgaattcactaaaaatagtaccctggtgtatcagaatttggggggagacctgct

SEQ ID NO: 36730 - DNA, 404 bp, Oryza sativa
  Clone ID: uC-osrocyp034e03a1
aaaaagtaaagcatgtttaaaggaagaaatattatataaaaaaattaattttctgcttcaacaaaaatgtatcaaaattgatactccattacacatcaacagagtatctcttatccttggtggagagtgaaacaggttgcatattatatcctccaacttgcggttgtggagtcaataaaaagctttgttgggctggagcagctgctggtgtcatcattggtgctgcatatgatcctattggcatttgaggcattgcagaggagacagcaccggtcatattagccattggtgctgcaaatggttcaagtgctcttctaacgatgaatccgtatagacctgtcatttggcctggagatattggaatctttcttttcattgctcgttcacgatcaactaacgcagct

SEQ ID NO: 36731 - DNA, 374 bp, Oryza sativa
  Clone ID: uC-osrocyp034e04a1
acattgaatccagttcgattcaagtgctgcaatctttttgcagccaaagacaaagttgcaggttcaatcagggaatcaaactggaacacatacacaaatagcacatctgacatctcctgtggatgaccggaattgagaacttcactagctacagaggcccctaggttatgctacagttggcattacattagagtgcacctttctctgggtggaatatattaacaggattgctaccgtaaaaatctggagaagactttgtcatcttactgatcagacaatggttgattacttgattgtgcaagtatcacaaacaagccaatacaatacatcgtgtattcacggggcagttctgaacaaaaatggggatttggggg

SEQ ID NO: 36732 - DNA, 272 bp, Oryza sativa
  Clone ID: uC-osrocyp034e05a1
aaaataataaaaaaaaaaaaaaaaaaaaaaaaaaaaaaaaaaaaaaaaaaaaaaaaaaaaaaaaaaaaaaaaaaaaaaaaaaaaaaaaaaaaaaaaaaattaaaaaaaaaaaaaaggttaagaaccttaataaaaattcaaattcaaaaacaaagcattactattaaattaagggaataaagccaaggttgcaaaaaaatataactggtagaatagaaaaaaactttatgtataaaaaaaaacaaaaaaataaaaaaaaaaggttgaatgaa

SEQ ID NO: 36733 - DNA, 390 bp, Oryza sativa
  Clone ID: uC-osrocyp034e06a1
catagaaatttcatccatggaaacatgctgatttgaaaagttacggttacaatatcccaggtaaggcactaggcccatacaattacacacgcatataactgtttttgagtttttgatgataagccggtataacatcacgtcttcaggtgtttatttaggtgcgggaatgaactgcctactaacaaaccaatcagccattacactattacagacgtggctgaaggtggcagtcaatagcaccagtgcaggtacggcaacatcaggcattttgcgttgctcatgctccgtcgtcgtcttcgacattgttgacacgctcgcactcatcaatccattcgctatatatgtcgattggttcagtcagtgcattgacagtggtgctgaagttttcct

SEQ ID NO: 36734 - DNA, 402 bp, Oryza sativa
  Clone ID: uC-osrocyp034e07a1
aacttaaccagtgctcaagtttaattgttgacatgactaatcaggtggcgtataagtagtacaacaatcagctgactccaaatgattgaaaaggtattctaaaagtacagagtagagagcagcaactcgatacattctacagcagggagaacagattcaacacatgaactagaatctaccatcaagaacataacaggttaagctggattgcttcttatgttgccctctcaaaatctacaaactaactagtcataatataatgataaatatcgtcggataatagtcgatatagatcaacaacagggtggctgtaatacgattgcccacatgcacccaaatttggtcacaaatcgtagcgatgctccacaacttcatgggcacttcctttggatgtaggatact

SEQ ID NO: 36735 - DNA, 397 bp, Oryza sativa
  Clone ID: uC-osrocyp034e08a1
aggatcaaaacatttctattaccacaactttttaaggatggaattgagtagcaatactttcaccccaaaatacagtttagcgacaatatcttagaaaagccgcttgctttgccgccatggctggcaagctgagcagagcagctaacacaaagaacacgagatcactataaaccaaacggcaacgaacgaagaaaatacagggtcttttttgtctgaagatacacgaagcggttcgttttcttttatttttagtctcctctcctcctcgatgatgggtgtatggcaatggcaatggcgatgggatcttggcttagttgatgggaaggggctcgccgttccactccttgaggcagtcgagcatggggtcgatgagcttgccctggctgatgccgaggaa

SEQ ID NO: 36736 - DNA, 400 bp, Oryza sativa
  Clone ID: uC-osrocyp034e09a1
atagttacataagctactgaatttccaacatgtaacaagggattacagcttaattctcgaccggccgcgccgtgaaaaaaacaaccggcagctcaaccaggagatcagatcactgagtacaccaacgacacttgcacgacgacgtaataccaacgaccttactactactgagtactgactagttactgctactcgcagcagccatggccgacgtctaaaatgccaccgagccatggaagccacggaattcagagaagattacacagctagttgagttgagtgactctagcttgacgaagactactactagtactagtaatagactagtagtagctgcttctgcttgtttatgagaggattgagtcccagtcgatctccaagacgggtacttgcgcaggtg

SEQ ID NO: 36737 - DNA, 376 bp, Oryza sativa
  Clone ID: uC-osrocyp034e10a1
ggttcaaatatggattgcaatttgaaaatctcaacaagaatcatcatcgcccgacaacttgggaagtaacgtttctcatcagtgcaccactagaacaaagattagccagcacacaaaatctaagatatgtcgtgagtgtcctgtccttaggcagcagtaacaggttccgatccttgcttcgattcagctccagatccagctttgccgtcttcggctggctgcttggtcatcttggcgaacatattgctgtagaatttggcatccttcttgttgtactccttgaccttttccttgaggttcttgtatgtcaacttcacatccctgttatcaggatcaatttcaagtgccttcttaatatccacctctgctaactcta

SEQ ID NO: 36738 - DNA, 390 bp, Oryza sativa
  Clone ID: uC-osrocyp034e11a1
gaaaagatgagccaattggcggcaatttcactcaatgggggtatcttttacatggtcaacgttcaattacccaggagctgagtagctgacatttttatttacagacaagaataggagaaaaatatgacactgtgagcttgggcactcacttctttcttcacagagctcaacttgttacagccgcttagaatttctcacaatttgagagctcagaactcatgttcgttggcttaattaccaacaagaataatagctggtgtcatcacaacaatggtggtaacatctaacaacaatgaggtgccgagatcactacatacaattaacactcggcaatgcaacatactagagaaattgcagcaagaatgcaaagaagatggccatcattggttt

SEQ ID NO: 36739 - DNA, 381 bp, Oryza sativa
  Clone ID: uC-osrocyp034e12a1
cagcaataattgacacaatttcaacaggattttttaacatagcaccacatataaacatgtccaagcatcacaaagtaccacatagtcaacaacaacacattacatgtccatcaaaagcaagagctatcacagtaccacgtagaatctctcaacctgaaactgaaggtcacctttccctacttacggagtataagtttggcatatataatcagccggctagaaaacggtcggcgaatcacaccaacacgaagatttacacgatgacacgatgtaataaattaaaatacaaatgccaccatctgcttcatatagagaaatgataggcatctttctgtttcttccccactgtaattgcacgtggagggtggtaactggtgaagg

SEQ ID NO: 36740 - DNA, 399 bp, Oryza sativa
  unsure (1)..(399): unsure at all n locations
  Clone ID: uC-osrocyp034f02a1
gtcgcgagatggaagacgccgtgtccatcagaccggacttcttgccggcatccggcaagttccatttttacggcgtcttcgacggccatggctgctcccatgttgcgacgacgtgccaggacaggatgcacgagattgtcgccgaggagcacaacaagggggcctccggcgaagtggcgccttggagggatgtgatggagaagagcttcgcgcggatggatggngaggttcggtaaccgggcgtccacccgcagcgacgacgagcccgcctgcccgtgcgagcagcagacgccttcgcgtcgcgaccacgcgggttcatccgccggcgtcgccgtcgttagcccaacacaggtcgtcgtcgccaacgccgttgactcccgcgccgtcatctcccgtgcc

SEQ ID NO: 36741 - DNA, 407 bp, Oryza sativa
  Clone ID: uC-osrocyp034f03a1
cattcaacattgaggtgaataaacaacccaaaatcttggaaccagtcaacgatcagcccgaatttcgccgttgttgcttgcctacctctccactccatcattcgcaaattttttgcagaacacagcaaggagtagcagagaatgagcgagatgcagccgcacgccgtgtgcttgccgttcccggcgcaggggcacatcacgccgatgatgaagctggccaaggtgctccactccaggggcttccacgtcaccttcgtcagcaccgagtacaaccaccgccgcctcgtccgctcccgcggcgccgccgccgcggccggaatcccggggttccgcttcgccaccatcccggacggcctgccgccgtccgacgccgacgccacgcaggacccgccgtcgctcagctactc

SEQ ID NO: 36742 - DNA, 334 bp, Oryza sativa
  Clone ID: uC-osrocyp034f04a1
ggaagcagggtaatggatacatatacgggacttcctccgtttcacaagggaaggcattctagaattttctatattcaaatgggggttaaggaatctagataaatatatatgtctagattcaatacccccaatttaaatggggaaaaggctaaaaggacttacattgggaaacggggggggtccatcacagggaatggcaacccaatataatatcgggaaaaacaaacgaggcccaggacccccatttggggggaatatcagggaccagttatgcccaaggaagggtcataacaaagggagctgggcccctaaacgcccagaatcccccgaagat

SEQ ID NO: 36743 - DNA, 373 bp, Oryza sativa
  Clone ID: uC-osrocyp034f05a1
aactgaattgctactagattagcaaatgaaacaaagttctgtgacaagtggttagcaaaagaaaagcaacagaacagcaggcggcattcaggctttttctttgctaatccactgtaggaaaacattctgagtaccataattctaaacggtcccccttcacacccacgcacgcctattcccaacatcttagggtcgaagatagcaaactagtaaagctaataggggacctaagacacagtttgctacctcatgcccccggatacactatttactcttcatcgtcctcattttcctcatcgctaccaccatcctggtcatcgtcgacctcagacttggacttgtcagagccttctccatcatcatgggtcttagc

SEQ ID NO: 36744 - DNA, 381 bp, Oryza sativa
  Clone ID: uC-osrocyp034f06a1
gttctcatctgaacatataaaatgatctgttcatcctgggtcaagtcatttcgtcacgcgctaacatatgaaatgaatccacgatgcagacagcaaggacagaaaaaattgcaacaccaattttgctgcagattacggtattccgttcgtgttcagcaaaatttctgaagacgtatcgttgctgcgacgtgcatgggttttggattcagagaatagatcagcataaaaaaaaagagaggaaaaattatggttacaaacttctctatctgagtctgaccgactgtcggttcactgaccagctgattgatcaacggccatcgccgctgctgagctgcgagaaggccttgctgttggcgatccccgagtcggtcacgctgtcat

SEQ ID NO: 36745 - DNA, 405 bp, Oryza sativa
  Clone ID: uC-osrocyp034f07a1
cagcaaaacatcactgcatgtttttctagttctcaagtgaactaatttgttctcccatacaatacaatggcagtatgtcacctatgtctgccgtactagggaggaggaaccgagcaacactagttacagataattacatcacatgtctataaaaccagctgtagaggcctctggcaatgatacccaaaacatgtatatatttacatattatattacatcttctcttgtgcccacatcagaaagaccaaagttaattttggttatttcttcatctcagcaggcgaacatacaccattccttggattgcagttgcagcggcgctgcagaaagtcgatcacgagttgttcttcttcgacgaagcacaggtagaaagatctcttcatccttcactggccattgacctga

SEQ ID NO: 36746 - DNA, 405 bp, Oryza sativa
  Clone ID: uC-osrocyp034f08a1
gaaaaattgcaatggaattatcagctgagtagatcaactactatttggttcacttcgtttttacatgttacaatctcatctgtgtttcccagtgaggaggtagtatacaaacattaccaagaaaagctggtaaaacctacaatctaacaaaattcatttgcccgcatgcaaaatctttgatgacgtgtatttcttttctgtgtgttcagtgtttgcttagtgtgggcagggcaccaagatggcacaagcaactgcccacactgggaaatgctttccaccactgtgttatcaccaattctgcaactgcgatgccacgcttttcaccactgggtgatacttcgtgtgtagatacttctttgcgttttctgaaccaggttgcccaagccattcatcatataatctttt

SEQ ID NO: 36747 - DNA, 391 bp, Oryza sativa
  Clone ID: uC-osrocyp034f09a1
aggttcaaatccaacttattcataaagcatactgctgtcccacaggaaactgtttcataaaactaacatatcatacggactcgatggtccattaaaccagacacaagtagacatcagcaccacaaatacttgacgaacagaggctcgggatgaccaggcacatcggcagctccaccaaactggctgattactgaccaccacggaggcggagcaccaggtggagggtggactccttctggatgttgtagtcggcgagggtgcgtccatcctccagctgcttgccagcgaagatcagacgctgctggtctgggggaatcccctccttgtcctggatcttggccttcacattatcaatggtgtcggagctctcaacctccaaagtgatggtctt

SEQ ID NO: 36748 - DNA, 217 bp, Oryza sativa
  Clone ID: uC-osrocyp034f10a1
aatcactcagaatgtcacataggcaagacaaaccagtcacgaaccatggcgcttgtagtagcagtagtagtgacctacacgtacatccaagatgcatcacgcgtactctatacagtgatgtactatacggaccaacaactctacatacgttatacgtatcacagtaaccctacgcaaaaccgtacacaaaatacatgatgcctccatggtatatata

SEQ ID NO: 36749 - DNA, 300 bp, Oryza sativa
  Clone ID: uC-osrocyp034f11a1
gcaagaactgaaagctcaactctgcatgattgattcgcatttgcatctatggctttactgctgactactacatggctagacgtacagcggaggcccagaaaggagctggaccgcccatgttcggatgcatcactactttcagtatcaggcacaagcccggcaggacatttcgacatacggagaatgcggcggggcccgccctgtacccggatttctggcgctatcctcagccattcccgcggaaatggttcttcccgttaggccactgaagagggcgattggcccttttctttcgtcgac

SEQ ID NO: 36750 - DNA, 334 bp, Oryza sativa
  Clone ID: uC-osrocyp034g01a1
gtgctgttcttttcttatattatatcatcaataaatatacagtgggataacattcacataacacggcagaggcaacaaggaaccagtacttccgagaagtttcgtctccgtggtgcctcagggcttaagaggtggccatcttgactcaaagaggtctccgcccgtggcagacacaagaaacatatacaacttgaaagtatttattctgtgtcgcagcaaacctcaaatacacaccagttaccattcattctggagcaactcccttccatatgcatcacagagactactggagctgatcctcgttatggatagtacatatatcctgtgagtgtgc

SEQ ID NO: 36751 - DNA, 393 bp, Oryza sativa
  unsure (1)..(393): unsure at all n locations
  Clone ID: uC-osrocyp034g02a1
gagtagcaatactttcaccccaaaatacagtttagcgacaatatcttagaaaagccgcttgctttgccgccatggttggcaagctgagcagagcagctaacacaaagaacacgagatcactataaaccaaacggcaacgaacgaagaaaatacagggtcttttttgtctgaagatacacgaagcggttcgntttcttttatttttagtctcctctcctcctcgatgatgggtgtatggcaatggcaatggcgatgggatcttggcttagttgatgggaaggggctcgccgttccactccttgaggcagtcgagcatggggtcgatgagcttgccctggctgatgccgaggaacaccttgttgcactactcgccgggggacttgagcttcttgc

SEQ ID NO: 36752 - DNA, 320 bp, Oryza sativa
  Clone ID: uC-osrocyp034g03a1
ctccttgctttctataggatttcattccgatagataccaacaagcagttcaaacaccatacccaaagcgaactcaattcatggtaacatcaccgccgaagaacacctaccactggaagcatggatagagggcttctcgactcgagagagccactggacacgataacgactcgactccaggataagatgattttgacacggctagctaaggataactggccacgatgggccccaccaatcagtcccccaagatccgggcatggccaccgcaatggccatggcaactgggctcaccggaaccgacggcgccggccgaaccac

SEQ ID NO: 36753 - DNA, 305 bp, Oryza sativa
  Clone ID: uC-osrocyp034g04a1
gaggagaaaaaccggacatccattttccctcatcagattaaaaatcaccaaccacattaacaaacccccggtggtggcaccgggcgggactcgggagacgaccaggggggggaattaacaggtaatcacccgcatcagcagccactagtcacacccgattctttcactccaactgggggtgggagcgctgacaagggctggccactgggcaccacgggggacgggggacaacgccacaccaccatttaattacttcttccccacttcaattccaaaaaaaggcggaaaaaaaaaggaaggaaaaa

SEQ ID NO: 36754 - DNA, 387 bp, Oryza sativa
  Clone ID: uC-osrocyp034g05a1
ggacatgaatttttctactcgtataaaagaagggaaaggaatggatataggactaattaaaagaagagaaactagaagtggctagattcgactcctagtttgtgaggcataatataggggaagtaattacctttactacaaaaagcaacatgggaatgaattaataagatgaaccaacgttggtctatcaatgtgcatgcatgatcagttcctacctcttggtagggtgagagcacagcttgttcgtcttgccatttggtttgaacagttgggtgtttgggatggaccgcagctgagttcatcaatgcagcagccacttcctccacctctgacagacgggcatctccacatttcagtactatggtgactttctggagcgaacttctt

SEQ ID NO: 36755 - DNA, 380 bp, Oryza sativa
  Clone ID: uC-osrocyp034g06a1
ggatcgaaattagacggccattaatttgaactagagtatcacaaactacgtacatcgacaaaatccccgtatcatggtactaagcattttcgcatggaaaaatggacgtccctcgaaaccatcacatttttaaacaacctaacacaagagctagataaaaaaacaacagttggtggcgacacatcactacagctcgtccttatcatacgacgacggctccgcctcctccttgatgttggatgattccttctcttcaacctcggcctcctcgacctcctcttcctcttccacggccgcgtcggggctcaggtcaaggctcttctgcaccgacctgtagatgctggaggcgaagtccttgggatcaggaaggttgaagccgc

SEQ ID NO: 36756 - DNA, 371 bp, Oryza sativa
  Clone ID: uC-osrocyp034g07a1
gatgaaaagtagagcttcattttattggcgaatcattcatgggaatcaaacaacacatggaaccaagagatagatcaagaactaaagtactccaaacaacatcaagatacagtagtactctcaagctcgcagccatggtcatggagaaacaagtgcaacaaccagctctagtgcacgcacttgaagtcggatgggcagatcttgccgcagttgttgaggatgaggctgaggtcgacggggaggtcgagcttgatgccgagcacgttggccttgacggcggtgcagaggcagacggcggcgtcgaggtcgacgaggccgtcgagcagcgagcagcagggctcgtacggcgccaccgcgccgaccttggcctt

SEQ ID NO: 36757 - DNA, 412 bp, Oryza sativa
  Clone ID: uC-osrocyp034g08a1
ataggatcaaaacatttctattaccacaactttttaaggatggaattgagtagcaatactttcaccccaaaatacagtttagcgacaatatcttagaaaagccgcttgctttgccgccatggctggcaagctgagcagagcagctaacacaaagaacacgagatcactataaaccaaacggcaacgaacgaagaaaatacagggtcttttttgtctgaagatacacgaagcggttcgttttcttttatttttagtctcctctcctcctcgatgatgggtgtatggcaatggcaatggcgatgggatcttggcttagttgatgggaaggggctcgccgttccactccttgaggcagtcgagcatggggtcgatgagcttgccctggctgatgccgaggaacaccttgttgcac

SEQ ID NO: 36758 - DNA, 406 bp, Oryza sativa
  Clone ID: uC-osrocyp034g09a1
aatagtgttgcttgtcacgctttcaaaagagtacatccatcaagaattcaagacataacaaagcaacgttacaactgaataacctatctggcaaagtagactatcacccgaagagaactagggtaaaggggatacacactgggatggcaaagttagggagaaaaagagagagcatacatatatgtttcagctatgcgagaaagcaacggtcgtgatgcaggaactatccacgatggggtacgtttggacatggtcgatgtacttgaacaccgcagtatcactggcctgcgcaccttcggagcccatagcactgagctttctctggttgaagctctctacctcctggaccaactcatccttggttctgctacatgatgtgatgaccagtatgccaccaggagaaacc

SEQ ID NO: 36759 - DNA, 388 bp, Oryza sativa
  Clone ID: uC-osrocyp034g10a1
gagattcaaacggaagttcatgatgatagaaactgggggggttcttgacatgttcatggtgatgatacacaaaagcaatactacataaggtctttaggacagacaaggcatgaggggggatcgattctactagggtggttctcagacgaatgaccagttgacgaacatgaaggcgaggcagtgcggcgtgtcgtcgtcgctcaggacctttcacgccaccggctgctcgtacgacaccggccgccccatgctcgacacgcacacgccgaccgggaggtaggcgaaaccctgctgcatgatcttggggaactctgtacatagtgccttccggccatcatcatcaaggatcttctcgagcgagatgtcctggagagcaatcagcgtcgtc

SEQ ID NO: 36760 - DNA, 385 bp, Oryza sativa
  Clone ID: uC-osrocyp034g12a1
ggcggcggccttcacaatccgagaccaaacggcagggagcaacaacacagcaagaccagtgacaggtcatcacggggcgggcgcatcgccagtacaaagagaacaccccctccccatcccaaaaccctcaggcaaagtctctgcttggagagcacacgaaacctctctcttgggaacgcttttgaggcgaaaagatgggggaagaacatggtcattctccgggacacggaaaagcccccagggaaaggcaggaggagatgatgtaaccgtctgtctgcgtacgtctgtgagtatggggtgagggatgtatggtcaccacaggaatgccgcctctctcgagtggtatatacggtggatgtagaattctgccatcccccccagcctg

SEQ ID NO: 36761 - DNA, 111 bp, Oryza sativa
  Clone ID: uC-osrocyp034h01a1
aactattaactttatttccgcgcgggcccaccttggggcaggcctgctaccgccaaaagacgagacaaaacgtccagtcccttctccttattgagcatccccatgcccttc

SEQ ID NO: 36762 - DNA, 403 bp, Oryza sativa
  Clone ID: uC-osrocyp034h02a1
aaacatcaaaatggagctgcttatcatgcataagaatacgtaggtgtgcagatcatggcagcaactccacagaagcagcgaccgatgaacaatttgtcaaaacagatacagcatggagcaaatgaagttcgagcctcagcgacctttggccgaagcactggaatcagcattctttttccttttcttcagcaagttcaccttgtcctttttcctttcctggttaatctcaattgcttgaagaaggcctctctgcttgcgagacataagggtcttggaaatgtcagcagcatccttctcggcttgtttatgagagtcctccatatgatcgtcagcttctttaggatcacttttgtccacaacatctggttggttatctgccgtcctaattgagaagggctttcct

SEQ ID NO: 36763 - DNA, 395 bp, Oryza sativa
  Clone ID: uC-osrocyp034h06a1
tttttgttttttttttacgacttaagccaatgaatatgaaaaaataaacttgtttttgaactgagggagtcctactgatttctctgttttgcttgaatggtccaagctctgtatatgctggtctctctctagggataaaaagagtgacagaaaaaaaaaaaggagtgacagaaaactgaactgaataataatgaccaaacctgggggtagcagtgcccaatactgctcctacaaagacactgccacattccttctccttcctcctgcatactggctctctgtctctctctatctgatcagctgttccgcttcctcctcttcttctgtcccccaaccccgtagccctcccacccatcgagccaggcggcggcccgacggccggtggctaaggcggc

SEQ ID NO: 36764 - DNA, 393 bp, Oryza sativa
  Clone ID: uC-osrocyp034h07a1
agagaaaaaggggccatggaacactgcactggagcacacaagggtaaccacccccaaaattcggaatactacaccgaaagatgattaggttgccttgccattgatgatacaaattacaagactatcgatacaagcttacgctacaaaatacaaatagaagttcagacttgccactagatttcctctggaaaaatgcctaaaaaggagagggtgaggatggatgggccttttttatcacctgaaaaacttaggcatcgctgcatgagcatgacactttgtttcaggatagcagcattttttgcattgaccaatggagggtcaagttttacgaaggggactgatgttcccttgatattggtggatggcccatgcgcagggttacaggccagcaaa

SEQ ID NO: 36765 - DNA, 320 bp, Oryza sativa
  Clone ID: uC-osrocyp034h08a1
cagttggaatgtatgcaacttcctttccaggctttcagcaattcactggagtagtggtttcttgatgacactttgacaattgacagagttaattcaggacagaaatgggctgtatatatatatatatatatgtgtgtgtgtgtgtgtgtgtgtgtgactcagcattgtgttcaggctcagtgaatggggatgatgcaaatcctacatatagagcatgcacgcccaaaaaatgaagatgcccctcgtttacgctacggataagggttacacaactttacacttgcagcaagagacccatgagtcgcggggccatatggagg

SEQ ID NO: 36766 - DNA, 180 bp, Oryza sativa
  Clone ID: uC-osrocyp034h09a1
aacacggattagagacaggtgaattacaatgaaattgtatttagccatacacagtgccaaagaggcagcacggatagaataagacgcaaacgaatccgactaacaaaatacgagttatcaaacacactgacaattattctgagtattttttgacagaattcatcaattaagacagaaaac

SEQ ID NO: 36767 - DNA, 397 bp, Oryza sativa
  Clone ID: uC-osrocyp034h10a1
ggagctaaaaccaccgaataagattatgtttcacacgttatctgataaaagatacatgatggcattgcacaggttccactagaacgagttcataaaagggcaacaaaaggcacaacataatttacacttgagaacatatggcaagggttttatgctgcgatagggactttgcaggttgccttgttgtgcccataacccttacacctgctgcagcgcaccgcccttttgattgcgattcgaggatcagctggcttttcctttggtcttccaacctgcctccgggttagaatcggtgattgatgtaatgcctcgccttgtgatgggtcagttgatggagcagccacaacaatgtcaggtattggattgattgacatggcataggtcaagcggtagcact

SEQ ID NO: 36768 - DNA, 396 bp, Oryza sativa
  Clone ID: uC-osrocyp034h11a1
tttgtttgtgggagtgaaccagaaattccaggagcaactctctcagtttctggcacagattctacaatgtctttgaggtatattttttgtctcttgagccactccccatatgggtgagctttcgagtactgtgccttcaatgcttcatcatccactacaggatgggtctcaaaatcaaccaacagcatcattccagggtttagtctaccctttctcaatacatctttggaaggaacatcaacaacaccaacttcacttcccatgactacacgtccactgtgtgtcacataaaatcgaccaggcctcaacccattgcgatccagggtggctccaaggtaacggccatcagtaaaagatattagagcaggtccatcccaaggctccataagggcagac

SEQ ID NO: 36769 - DNA, 398 bp, Oryza sativa
  Clone ID: uC-osrocyp036a01a1
gaactataaagtcgcttgcaccttatatatatctccctagtacacctaatttacacttgcacaccgtatacacttggaggccgggagcagctactacacatatactactgcacatataacgttcagacttcagagtttcagacaacaggtacgtacctgtctgttgttcagtaatcacacggaatcaaatcggcctcatcatcacacagaaaattcaaggtatatctacgtactttgggccagttatcgattgggacaatcagctactagattcggtcgcaatatgtcctccgatcatccgatcatcgtgacgatcgagacgacgacggccggcatgctcgcgcgcgagcagaagcagcatcgatcgtacactaactggtgcagctacatgatggggc

SEQ ID NO: 36770 - DNA, 409 bp, Oryza sativa
  Clone ID: uC-osrocyp036a01b1
ctattcacaagccacactttcttggggatgcccttgccctcagccgtaggaagcatatcacgctgaggggttactcgctcaccacagctgcgccactcgtagaaagatctgcataccgaagaagctgccatactgcagctactgtgcaaaaacaggacctaaaacctgccaggatgaagttctatattgagaagagctatgagctgcctgacggccaggagaccaccatcggatcataaaggatcaggtgcccggaggcgctctcccagccatcttatattggtagggaagctgctggcatccatgaagccacatacaactccatcatgaagcgccgatgttgatattagaaaggatttgcacggaaatggggcccttagtggggagatctacaatgccccctggtatt

SEQ ID NO: 36771 - DNA, 130 bp, Oryza sativa
  Clone ID: uC-osrocyp036a02a1
tttggggtttttcaattcagtgggttgtacctcttttctatcttcctagttcatctacttttagagaaaacaaaactagaggttcaattgtcttgatccgctattaattctataacaacatgaacattgc

SEQ ID NO: 36772 - DNA, 344 bp, Oryza sativa
  Clone ID: uC-osrocyp036a02b1
acgcatatttacaccagtcagttggcacactagctggaggcgatctagcgaagctcacctagcttatataacaagctgtcgatctgcttgctgcctttgtgaattgcggcggaagcatgtctcgcgcgttgaccatggaagcgctccacgccgcggctgctaaggtggagcagctccagcacaaggtggaggaggcgactggcgtgacgagtagcagtcccacgagcggggaggagggcggacacctgccgcatgggtggtcgaagcggacgccgtcgcgccttcagtgatcggtggaggataaccttaggttccgtcttctaatgctcgcccgtagtggtcac

SEQ ID NO: 36773 - DNA, 472 bp, Oryza sativa
  unsure (1)..(472): unsure at all n locations
  Clone ID: uC-osrocyp036a04a1
atggcgccgttcaggcgctgggcggacctgccgccggacctgctgtgccgcgtcggcgacaggctggacctcaagtgctacgccagcgcgcgcggggcgtgcacggcgtggcggtcggcgctgtcgccggcgtcgccggcgctcctcgtgctgtccgacgccaggatgtgcccctcggcggcgtccctcccgacgcggcggtgcttcgacctcgcggcgatactgacggggggcagatgcgtcgggtccagcaacgggtggctcgtcctgtccatcgcgctctacggcgggcagagcgcgttcgtgctcttcaaccccatcaccaccacggagatcgtcctcccgcccctgatctacgagagcaggtgggtctccaaggtcgtgttcgcgcccagccccgccaaggacgactacgccgncgtcgtcatctgcgacatcgacaggatcgcctacgtcaccgcgggcgccagga

SEQ ID NO: 36774 - DNA, 304 bp, Oryza sativa
  Clone ID: uC-osrocyp036a04b1
cagaatccattttcttattccatcataatatgatgaatacaagctcaacaagatgacagcgattgtttcattacacaaatatataaggatgatacgagttacataagcacaactagacagagaaaattgatttggaaaacaaacaaatcgcaataaactatcggctacacgggcagttttgaaacaccagctctgccacaacttatgcacgttcagatcacacttttgctatggtacataagctcaaacttctatcatcgtgatcggtgaaacccactatgtcaccaagcaaatctggcgacgc

SEQ ID NO: 36775 - DNA, 511 bp, Oryza sativa
  Clone ID: uC-osrocyp036a05a1
cgtgaacaagcaaggtgacatgcatgcattcaccaagataaaagacttaaattacaagggtgttactgatgtttgatgatcaacaccaagctatagcaagcataggtgcgctctggcagctgtctacaacttaacccttcttcattcttccagtgcataataatccattaatccacccaaagagatcaatctctagctagacaagagccacacacacacacacacacactaccagttatatactctgttgttgcacccatcaaaccatgagcatacacgtgcatagcatcaagaggaaccagccttttcagcaggatggctgctcctgatgttatgcagctaattaacccaaatgcaagcatgcatgcatgtgatgtaatatgtaagatatgatctctatatttccattgattcttcagctagcttaattagccagccgagccagccatttcattggccatggcgcccacagagatcaccggaccatgcatcgatctagcggccgaaccct

SEQ ID NO: 36776 - DNA, 322 bp, Oryza sativa
  Clone ID: uC-osrocyp036a05b1
ctcctccatatcttcctttagataaggctatagtgtaaagcctggatgcaattccacacctttcactgacccatttcttcacagatgcagatgtaggcccaaaaaaacacaagggatgccagggagagcagctgtcaaaaaaagggcagccaaggaaaagataactagtaaaggtagagatagagagggagggaggcaaaatagaacacatgagcagttgtaagctacttcacttcggcactaattgctcttgtgcacactagaggttccggttccctcaaagggccatatgcttgacttcttcgccacccttgggggcacc

SEQ ID NO: 36777 - DNA, 578 bp, Oryza sativa
  Clone ID: uC-osrocyp036a06a1
ggtggctgccgtgctgtcgtcggcggactggcacgggcggaggcttatggagggggaaggagaataggattgtgagggtattactttttttttttttttatcttctatttttttcttttttatttttttttttttttttttttttatttttacctttctttattttttctttcctttttatatctcttttttccttcttttttgttttttttttttttttatcttatcttttttttttattctttcttactaccatttttatttttttttgtttttcctttttattctttttctttcttgtgtttttttttttttttttccttttttttttttttgtttctttcttctttttttttttctttttttttatttatttctttttttttttctttttttttttttttgtttttttttttcttttttttttattttttttcttttttcttttttttctttctttttttcctttttttttttctttctctcttttttttttcttttttttatttttttttttcttttttttttttttattttttttttttttttttttttttttctttttttttctttttttt

SEQ ID NO: 36778 - DNA, 168 bp, Oryza sativa
  Clone ID: uC-osrocyp036a06b1
aatctataaagacatacataataggaggggtttattttaaaattaggtggtcgttttaccaattaggagaattaacccctgaagaaataaccctttacaacaatttccaagagaactccttaagacagagagctctctgatgccaaatttgccctggctttgtgtaaa

SEQ ID NO: 36779 - DNA, 538 bp, Oryza sativa
  unsure (1)..(538): unsure at all n locations
  Clone ID: uC-osrocyp036a07a1
caaatacaaataaacctttactacgtacacaaaaataagttatcttcaagagagaaaacaaaactagaggtacaatcattaagacccgcaattcggctagtagaaaattcgaaacaaaaagctttcaaactgcacgggcaaacatccttgttgcccggtgaaacccaacacaacaatccattgcatacattaggaatgccctgatgcgatgccattgtctgaaaaaactgaccgactcagacgacctacactgcacactacctggacagatttcttccagtacaccaattgacttcaccttccgcattgccccatggccaacagccctcaggtgctactgaaaccatgggacgcatgcaaacaatctgcagatcacgtctcaatcagctgataatggtacaaatctgcccacaaacttagaagcacttcatgtggacgatgcctggaccagattcatcgtattcggcccttgagatccacatcntgctgaaggtactgagagaagccaggatggaaccaccaatccagacactgtatt

SEQ ID NO: 36780 - DNA, 511 bp, Oryza sativa
  Clone ID: uC-osrocyp036a07b1
cgaaggatttacactccttcatgctattcttcgactcgatcttgctgggcgtgaccttaccgacaaccttatgaagattctcacagagaggggttactccttcaccacaactgctgagcgggaaattgtcagagacataaaggagaagctcgcctatgttgctcttgattatgaacaggagcttgatactgccaggagtagctcctctattgagaagagctatgagctgcctgacggccaggtcatcaccatcggagcagaaaggttcaggtgcccggaggtgctcttccagccatcttttattggtatggaagctcctggcatccatgaagccacatacaactccatcatgaagtgcgatgttgatattagaaaggatttgtacggtaatgtggtccttagtgggggatctacaatgttccctggtattggtgatcgtatgagcaaggaaataactgcacttgcccctggcagtatgaagatcaaggtagttgcaccgccagagaggaaa

SEQ ID NO: 36781 - DNA, 268 bp, Oryza sativa
  Clone ID: uC-osrocyp036a08a1
ttggttttttatattcataggggtttttacttctttcacaaaaataagttattttcaagagagaaaacaaaactagaggtacaatcattaagacccgaaaatcggatagattaaaattctaaacaaaaaagcgtaaaactggacggacaaacatcccttgaggcccggagaaacccaacacaggcaaggcatcgcacacatctaggaatgccctgaagcaaagccatttgtctgaaaaagactgaccgatgtcatgacgacctacact

SEQ ID NO: 36782 - DNA, 493 bp, Oryza sativa
  Clone ID: uC-osrocyp036a08b1
cttacgcgtgggcggacgcgtgggtgctggtggttttcagggagaactaatttgcaaggttgtgggagaccgtgatgttaagttctgcacaaggacaactttaagcgacaatgctatcacaaatgcgatagatatacacagatctgcaagtggaagcttgcgtgttaccgtgtccaacaatgattgtggtgttcgtgaatttgacatggaaacatttcagctcttgaaccacttcagttataactggccagtaaatcacacatctgtgagccctgataggaaacttctggcagtagttggagatgatcgggatgctcttcttgttgattcaagaaatggaaaggtaacctctaccctagttggccatctggactattcgtttgcttcggcatggcaccctgatggccgcacctttgcaaccggtaaccaagacaagacctgccgcgtctgggacgtacgaaacctgtcaaccttcctctcagtacttaggggc

SEQ ID NO: 36783 - DNA, 393 bp, Oryza sativa
  Clone ID: uC-osrocyp036a09a1
tttgtttttttttttttttttttgaacactgcagaaacgcaattaactacataaaaaaatttgcatacttctatgttatctactggctgtagcctcaacatcagcacagccaacccaattctatatgcgctcatcattatcaagagcaagagttactttccaccaatattcaaagtaattgttctcacttaacacccatttgtccaaatcaagacaattgcaataagttaaataacgcacaaagagagtagctgacaaagaatgaaatgataaaaattacaagcaccatttcaccaccattttatccatgtagtgagaacccttctaagatccacagcaagctgatttctgagccgccgctgcctcggtttccccttccgatttgatcttgat

SEQ ID NO: 36784 - DNA, 475 bp, Oryza sativa
  Clone ID: uC-osrocyp036a09b1
ttcgaatctcctcccctcccccacgcaactcgccgcctgcgctgccgctgctcgtgagggggagacgacgccggaggagatcgccgccgccgccgccgccgcctcggacggccgcgcccccccgccgcgcgtgtaccacgggcttgggggattgattggtagcgatggcggcgccgccggctagggctcgggccgactacgattatctcatcaagctgctcctcattggcgacagcggtgtaggaaaaaagttgtctcctcctacggttctcagatggctctttcacgactagtttcattaccacaattggtattgacttcaagataaggaccgttgagttggatggtaaacggattaaattgcaaatctgggatactgctggccaagaacgctttcgaactattaccactgcttctacaggggagccatgggcatttcactcgcttatgatgtcaccgatgaattcttattcaa

SEQ ID NO: 36785 - DNA, 502 bp, Oryza sativa
  Clone ID: uC-osrocyp036a10a1
tttgttttttttttttttttggtgaactccgtgcattcaccatgataaacgacttaaatttcgcgtgcttttctgatgtctactggcctgagcctaaactttagcacagccaactcgcttttatatgcgctcatctttatcaagagcaagagtttctttccgccaaaatccaaagtaattgttctcacttaacacctatttggccaaacaaggacaattgctataagcctaaataacccacaaagagagtcgctgacaacataatgaaatgttcaaaattataagcaccatttcaccaccattttatccatgtagcgagaacccttctaagatccatagcacgctgatttataagccgccgttgcctcggttttccctttgaataatccttgatggtctgggctctggcttggaattagctctggagcctttgttggcccctcagcttcgaaaaaaaacctgttcacatttcggttgcttttcttcccattaaaaaacttga

SEQ ID NO: 36786 - DNA, 260 bp, Oryza sativa
  Clone ID: uC-osrocyp036a10b1
aaccctatcgtacaagacacaactgggggcctgttcttagcatgcacgccaggctcaaccagctcccaaggattgtcacatccccgtggtcgcctacgatgacgctcgttccctaagcacaagcaggtacaaaaaactgggcgggaaaacagacaactagtattaaacgcttcggctacaggggcagccgagtaccaccaggtctgccaccatttactgactgtgcaaagacacgttggctaatggtcaatggcccaaag

SEQ ID NO: 36787 - DNA, 393 bp, Oryza sativa
  Clone ID: uC-osrocyp036a11a1
tttgtttttttggtaatcactactaacacttgatagtaccatgcagtttcaaatgaattacagtatgccaggatggagacagtttcagggtctcctggatggattagtaatggcatggtgtttttagtacaccatgacaaaaaataatatgatgacctaccttgtaccgtttacacaacatataaattctctctatcactagcagatttgttgcaactattgaatagcaggtctctcaacaaagtacaacatgaatacaaagcaatacatccaccacaaaatatacagattcaatgtatgaagaataagctgtgggtgacctgaagggcgcattggaagccttaataacttggtcttcgagagtatgcacgacagtgcttgaaaaatttcaat

SEQ ID NO: 36788 - DNA, 371 bp, Oryza sativa
  Clone ID: uC-osrocyp036a11b1
gcacaaaccgcgtcttcttctccctctctacgcacatgcatcctcctagagagggagcgcgcgcaaggaggaggaacaagggctcctcggatcgggaccagctgaggatttgaacaagtcagcttgtcgccaccatggttcttgattcattatcatctgctcacaggaggtcacagaacacattttttctatcatccccaaagaagcttcaatcatcgaaagatgatgttggcagttggtctgcactggttgagcggcatcgcttcctcttgacaacactagtggttctggtctttctgtgcaccatctatctgtactttgcaggtaccttgggggcacctgatgcttgctctggattaacgggcactgaa

SEQ ID NO: 36789 - DNA, 62 bp, Oryza sativa
  Clone ID: uC-osrocyp036a12a1
ggcggcggccgtgcggtcgttggaggactggcacgaaatgaggctaatgataaatcaattta

SEQ ID NO: 36790 - DNA, 344 bp, Oryza sativa
  unsure (1)..(344): unsure at all n locations
  Clone ID: uC-osrocyp036a12b1
cttctttaagaagaggaaaagggatgctatcactcaggcttgtcagtggtggctggttggctcaagagtctgatgatctaacccctgaagatatcaccttcacaacagtgtccgagagagctcctcaagacagtgagctctctgatgccaaatttgcctggctttgtgtaaagcacgtaaagagtaacgccattgtgatagccaagaataactgcatgttaggcatgggaagtggccagccaaacagactggagagtctgagaattgctttcaagaaagcaggagaggaggcccaagggagctgctttggncagtgatgcattctttccattcgcttggaacga

SEQ ID NO: 36791 - DNA, 509 bp, Oryza sativa
  Clone ID: uC-osrocyp036b01a1
gcataaaacgagggaatatcccctcgagggatgaaatcactttcccaagtcggtctgaatgatacaatcacatgcatgtttagtttacaatctagtgctactaagattacattacacgtagaaaacctgcccaacattgagcatgctctcatgaggcacattgaagatggcactgttctccctgcagatcttcctcaggaaagcatacatgtagttgatgacaatcttcttgacgaaccctgaatccctgcgagctctgatcaccgtgttcccgaggatgtgcaccaccccggcgtccctgcacgcgttcaggaacgcgatctcgtcgccgacgctctggaacgccatctgccccgacgccggcatcacctggctgctgcccgtgtcgtcggacctggagttcaccggcacaatggagtcatggggcgacgtgcagctcatcacctccatgacattgttggtgccggtggggtcacgccgccatttgctgatccctggttatttgggag

SEQ ID NO: 36792 - DNA, 492 bp, Oryza sativa
  Clone ID: uC-osrocyp036b01b1
gctggcacagaagcattgtttgctgacctttcgtattttcctgtacaagctattcagattgctttcactgtggttgtgttcccatgccttcttctgcaatatactggtcaggctgcgtttatagctgcaaacacaaaccaagtcagccatgccttctatatctcccttccagctcctatactttggccagcatttgccgttgcaacagcagctgcaatagttgctagtcaggccactatatctgcaacatattcgattatcaagcaagcacttgccctagggtgctttccccgagtgaagatcatccatacttccaagaagtatctcggccagatatacagccctgatattaactggatcctcatggttttctgcatagctgtcactgcagggttcaaaaaccaatcccagattgcaaatgcatatggtactgctgtgatcatggttatgcttgtgacaacatttctgatgatccccatcatgctgctggtg

SEQ ID NO: 36793 - DNA, 494 bp, Oryza sativa
  Clone ID: uC-osrocyp036b02a1
gacaaaaatatgcacataaactgcagatgaaaaccatctggtcactttatacaagccgtacatcagctaaaagaagttcacgatgcctcagggctcaggcagacagaaactgaaaacgacgcagcaagttaaaaacaaattacaaaacctacatgagacaaaattaaatcgtagagatagtgtcccactaccaccaaagcaacattatttgcagaggttcctttttttcagcccacatgatcccgtggtctagttattattcgaaaatctccgtccgtcctcaaattcgatcgaattttaaatctctctctcctagaagagcttgaatagaattcctccgtgcgtggcgaagaatggcgcgaacaccagcgactcgacggccatgagcttgatgaggatgttcagcgacgggcccgacgtgtccttgagcgggtcgccaatggtgtcgccgatcaccgccgccttgtggcagtccgatcccttgggccccagcg

SEQ ID NO: 36794 - DNA, 510 bp, Oryza sativa
  Clone ID: uC-osrocyp036b02b1
gtacagcggtatagagagagatacacagagagagagagagagagagcagcagcaggtagcaggtcgaggagggtttgtggccatggcgatcctgtcggatgtggccaccgaggtgctgatcccgatcgccgccatcatcgggatcgggttctccatcgcgcagtgggtgctggtcgcccgggtcaagctggcgccgtcgcagccgggagcgtcgaggagcaaggacgggtacggcgactcgctgatcgaggaggaggaagggctcaacgaccacaacgtcgtcgccaagtgcgccgagatacagaacgccatcgctgaaggagcaacatcgttccttttcaccgaataccaatacgttggcgttttcatgtcgatattcgcggtggtgatcttcctcttcctcggctccgtcgagggattcagcacaaagacccacccctgcacatacagcaaggacaaggagtgtaagcctgctctgttcaatgccctgttcagcaccgtcttcttcct

SEQ ID NO: 36795 - DNA, 468 bp, Oryza sativa
  Clone ID: uC-osrocyp036b03a1
gcaactctgcatcgattgatgcaagcaggaagcattcctcgttacaaatttctgtatacatctagaaaaagcaaacacatgtacacccggggtacatattatcatgataagactcgaagttattcatacataaaaacattgtatttctgcaaaaccatgatcaacaagcaaactctgttcctacttgctactctctcatgtgctgctaaccgtcctcaacatcagggcactgagctccagtctgcaccttgacccctagcaggctagcacatacatctcagaaaagcaaggacataatctgcctcctttcctttgtcccacagcgaagaacaggtgctacgatctcggaacagacacagctctgagccctgttgaagattcaagtccatcatctaccttgtatatacaagtcagcctgcgaaaatgttcaggagcaagtaacatgaggcatgcaggaatccatgagca

SEQ ID NO: 36796 - DNA, 438 bp, Oryza sativa
  Clone ID: uC-osrocyp036b03b1
gtcatggacccggcttggccacacttgcagattgtgtatgaactattcttaaggtttgtccagtctcctgagaccgatgctaagctggccaagagatacgtcgatcatggtttcattatcaagctgcttgatctctttgactcggaggatcctagggaaagggagtatttgaagacaatacttcataggatatatgggaagttcatggtgcaccgtccattcattaggaaggcgattaataatatcttctacaggttcatatttgagacagaaaagcataacgggattgctgagctattagagattttggggagtataatcaatggttttgctttgccactcaaggaagagcacaaattgtttcttgtgcgagcattgattccacttcacaaaccaaaatgtgttagcatgtatcattaacaacctgcatattgtgta

SEQ ID NO: 36797 - DNA, 304 bp, Oryza sativa
  Clone ID: uC-osrocyp036b04a1
gccttcttccgtcgtctagcccgcgcagagcgcgcgcctgctcaccagccagaggcggtgcgcatggccgacgcccgcttgtcgccgtcgcccactcgctggcgccggcaccattgcctggctgggttgcccccgtcgactgctgcgaccagccgccgtagccatcgcctcctcccggcggctagcccgcgcagagtgcacgcctgctcgccggcaggaggagctgcgcctggccgccgcccgcacgtcgtcgcctggccgctgcccgaacgccgaccaatttgacgtcgcctgtgctgcccag

SEQ ID NO: 36798 - DNA, 307 bp, Oryza sativa
  Clone ID: uC-osrocyp036b04b1
ctgggcagcacaggcgattacttattgggcggcgtgcgggcagcggccaggcgacgacgtgcgggcggcggccaggcgcagctcctcctgccggcgagcaggcgtgcactctgcgcgggctaggcggcgggaggaggcgatggctacggcggctcgtcgcaggaggcgacgggggcaacccagccaggcaatggtggcggcggcagcgagcgggcggcggcgacaagcgggcgttggccatgcgcaccttctctcgctggtgagcaggcgcgcgctctgcgcgggctaggcggcgggaggaggcgat

SEQ ID NO: 36799 - DNA, 377 bp, Oryza sativa
  Clone ID: uC-osrocyp036b05a1
ttttttttttttttttttttttttttttttttttttttttttttttttttttttttttttttttttggggggaacaaaactagctaatggttccagcatggcactatttttgccgcaagggctttaaaaaaactttacccattatttttccaacaaacatcacaggggggcgagcttaattgccccgcccaaaagccatattgtaagaggggaaaccagaaaagaaggcaaaagacctggcccgggaaaacgccaatctcctttttttccaggaaaaagcccccgctgttttgacactggcccgagcgggtcaaccttatccaaactggcgcgaaccccagggacttggatcggggtaggggggcacaattccttgg

SEQ ID NO: 36800 - DNA, 402 bp, Oryza sativa
  Clone ID: uC-osrocyp036b05b1
gtctgtgtgctgcggctccccgtcggcggcgggggaggcgggggcgacggggtggggatcgacgcgctcgtcgtggcgggcgacgtggcggagacgcgggacaacttcgcgcgcaccatggccgcgctcagggagcggttcggggccgtcttctacgtccccgggaaccacgacctctggctccgccgcgagaacggccgctacatggattcgctggagaaactgactgcattgcttgatgcgtgtagtgagctgggtgtggatacaggcccaagaataataggtgacttggggatcataccattgttctcatggtatcacaagagctttgacaaggaaaaggatgttaacagtgttcgcgtcccttccttagagatggctttgtaaagatttccatgcttg

SEQ ID NO: 36801 - DNA, 473 bp, Oryza sativa
  Clone ID: uC-osrocyp036b07a1
gcaacaacattgagccatatgtattatgtttagggttacacaccaaagctaggagtcactcaaactctttacaatcgtctactagcaagacaaaagaaaacccggtggacagaaatcctggtcgtgatacaattgtttgaaacaccttcctgtgtgctactatgttcgccgaacgacgaacccatcttgcattacattatgtgattccgcaaagcaggaacagtagttttttttttagagcacactggttgtacaaaatgcaggaaagtgaaaaacgtagaaattaaatgcagcacattttaaattcctacatactacacctataagatatgcagattatacagatgcgagctgtgggatggaaatcctgccgattattggtcgagatccgtcggcgtaccatcgttgagtcgttgacggatgagcacacgcatcaaaaacttgagagtgggggagacaaacatcacacagca

SEQ ID NO: 36802 - DNA, 488 bp, Oryza sativa
  Clone ID: uC-osrocyp036b07b1
ctatgttctcccgtacgccgtgcccagcccaaccgcggctcaggacgacgctagctcctcgccggcggcgactcagttcgctcgaccgggacgggacgacggctcccctctcccgcgaagctcgccgacggcgacggcgaccgccacatctcgtccatgcgcagctccggtcggagattcctgcctttcagcttcagtcactccatgaagcacacagattggagatccaccagccctgctgtgtgatgtttgtctcccccactcatcagtttttgatgcgtgtgctcatccgtcaacgactcaacgatggtacgccgacggatctcgaccaataatcggcaggatttccatcccacagctcgcatctgtataatctgcatatcttataggtgtaggatgtgggaatttaaaatgtgctgcatttaatttctacgtttttcactttcctgcattttggacaaccagtgtgctctaaaaaaaaaactact

SEQ ID NO: 36803 - DNA, 522 bp, Oryza sativa
  Clone ID: uC-osrocyp036b08a1
aggagaggaatttggggattttccacagttcattgatctacccctgaaggggaaatataaatatgtacaaaagagatgcgaaaatactaaactacccctaatatcttaacacccccactcaaatgcaatgtgtatacaataatattgcatttggagtgtaactaaacatgagaacacaaactaaatattagcctatctttaaagtcttgatgatgtcgtcaaagtgtgccaattcttagatgatgatgaagaaaagatatatccccttctcaatgaagtggatctcggagccttcacaaactgttcttcggcccttggtaccttgaagccttcacgaaccgttcttcggctctttattgatttggaaatgtggttgatgatgatgatgacaatggaacttcacaaactgttcttcggtcctttgactgatgatgatgttgatgaaggcccttcacaaactgttcttcggacctttgctgattgatgatgatcatgatgacaagctccgacatggagacgatg

SEQ ID NO: 36804 - DNA, 419 bp, Oryza sativa
  Clone ID: uC-osrocyp036b08b1
cttacgcgtgggttcatcgtctccatgtcggagcttgtcatcatgatcatcatcaatcagcgaaggtccgaagaacagtttgtgaagggccttcatcaacatcatcatcagtcaaaggaccgaagaacagtttgtgaagttccattgtcatcatcatcatcaaccacatttccaaatcaataaagagccgaagaacggttcgtgaaggcttcaaggtaccaagggccgaagaacagtttgtgaaggctccgagatccacttcattgagaaggggatatatcttttcttcatcatcatctaagaattggcacactttgacgacatcatcaagactttaaagataggctaatatttagtcttgtgttctcatgtttagttacactccaaatgcaatattattgtatacacattgcatttga

SEQ ID NO: 36805 - DNA, 479 bp, Oryza sativa
  Clone ID: uC-osrocyp036b09b1
acattcggcattgattttaggcattgaacaagacacgggggattctaaatcttcaagaaatagcaaggtgtgggcaaaatcttctgatgtggatttctatcctcattttgacgccaatcactcagcaaaacatcaatccaaagaaaatgctatagttgcatacgatcccaataatgcacctgagacccctgttgatctagatgaatcagatatgaccccaagcatccaggaggcgttgcacagtggtgcagaatatgtaagaaaggaggtgccactttatgtatttccgaccaggcatctgctaaagctggacaccacattaacttcttactgtgatatgcaacatgtcgttttcgaagaggaaaaatcagcatataatcaagccatgcatcaaaatattcgtgatgggaagatccacccacttacatctattcaccatgcatctacatacaactcatctttctgcaaataaatggata

SEQ ID NO: 36806 - DNA, 522 bp, Oryza sativa
  Clone ID: uC-osrocyp036b10a1
gataacaaacaagaaaaacttatttgcaacacaactacattcaactgacacagctgggcctgaagttcatttccgcctgaacagcataggatacagatcatacacacacccaaacactgaaaagtgctaaccatgctggcagcactagtctttacggaagatgatgatacagatcagatgcatgccttgcgactatgttacaccaccatttacagactacagagttttcctttcccaacaacagctggagatccaaaaatctcctaatgcagcgctgtgaggattgtagatccttccaccttgaaggttgcaccgcaaatttcttcttctttggcaggaactgcggtcaccttgtgctttgggttctcatagcacttcaagcctccaactccaagagcattggaatagaagcagccttgtgggaaaggtgcaagagacttgccacacgatcctttaagcaggtcaatgttgtcagagaaggcaacagatccatcagcagtaatcccccaatacagagacacc

SEQ ID NO: 36807 - DNA, 184 bp, Oryza sativa
  Clone ID: uC-osrocyp036b10b1
gttgttagcttcgttttcttcttgtttcatcaatccaaggagtgtggaaggccacacgccaagattatatctatgctaatttgattagcagtaggattaattcagtggctagcgtagcttgattagttggtttaattagttggagagtaaagaagatgttgggagcgttcacctctgatgctct

SEQ ID NO: 36808 - DNA, 455 bp, Oryza sativa
  Clone ID: uC-osrocyp036b11a1
ttggtttttttgataacatacatgaaaaacttatttgcaacacaactacattcaactgacacagttgggcctgaaggtcatccccgtctgaacagcataggatacagatcatacacacagcccaaacactgaaaagtgctaaccatgctggcagaactagactttacggaagatgatgatacagatcacatgcatgccttgcgactatgatacaccaccatttacagactacagtgttttccttaacaaacaacagctggagatccaaaaatgggctaatgcagcgctgagaggattgtagatcctttccaccttgaaggggggaccgtagatttgttcttatacgacaggaactgcggttaccttgtgctttgggttctcataccacttcaggcctccccctgcaagagcattggaatagaagcagtcttgtgggaaaggtgcatgatacttgc

SEQ ID NO: 36809 - DNA, 220 bp, Oryza sativa
  Clone ID: uC-osrocyp036b11b1
tctcttcactccccacctgaccttgcctttttagagagagaaagagaagagaacgcgctctaccaggagagagagagagaggagtcacctcacctgcacctgagctcaagagcgagagagagagagagagaacaggcggaggctagatgggtgttaccctttgaaccagtgcccatacttttgcctaaagcaaacacccgaacctattacccttacctgt

SEQ ID NO: 36810 - DNA, 424 bp, Oryza sativa
  Clone ID: uC-osrocyp036b12a1
gtaggctaagctagccatgccgtgtaggtaacccttaatataagcccttgagcaataggaattaaccattgatcatacatggcaaatttatgttatctataagcctttaaatgccttaatctccacggtaagacaatcacattggcatggccgtgatgtcatcgaaattccacatgagcggagccgccacctcttggctctgtccgtacgtcatcgccggcgccaccgccgacaccggcacgacgacggcgccaccgccgacggcgctgaactcgtaagcaaccgccggcggcggcggctggaagtaaacgctggccacgtcgacggcgtcattaacgctgtactccaccgccgtcgtcgtcatcagctgctgctccctcagtccggcggcggcgggcgtcatggccatcgggtagaggtagga

SEQ ID NO: 36811 - DNA, 314 bp, Oryza sativa
  Clone ID: uC-osrocyp036b12b1
tctcgtcaccgcgatcgatcgatcgccgccggtttagatttccttcctacgcggaccgcacccacgcgctaggtttagctagctagtttgcttgcgcgcaagcgtcgatcgagctagctagtgaagatagatatgtgcggcggcgccatcccgctgatcagcagccgcggccccggcggcaagaggagcctctccgccgccgatgagctctggccgccgccgccgcagcacgccagcgacgacccggccgagcaagcggcggcggatgttgaggagcaggagcagcagcccgcgtcgaggaggcagcggcgagg

SEQ ID NO: 36812 - DNA, 504 bp, Oryza sativa
  Clone ID: uC-osrocyp036c01a1
aatgtcagggggaagccatccaatcccttaagctgttactggcatatattaaagacagattttaagataatacaagaaaagaagcaaattcaacgagatcaaatgttctcaaattgctatgcttatttttcatgacaatctccacggcactagctttgtcatgctctccagagagtttcagaaataacttgcaaaaaacaaaggcaaaagactttcaacacaaaagactactcctagacgacaacactgatctggcccttctcgagcatgtcgtagaaggatctagtcttcctctgctcgttccagtgatgcatcttccacagaccaccagcgaccagcccaagggtgagcccaatgcagatctccttcaccacgctcggccccttgagggtcgcatgtgcaattctgccacctgccatttgcttgctgttgagctcagatgccttgccgccggtggaggaggatagaacccgcgccgcctgcctgagggaaaggaggaggaag

SEQ ID NO: 36813 - DNA, 489 bp, Oryza sativa
  Clone ID: uC-osrocyp036c01b1
ctatgtcttcctcctcctctccctcgcggcggcggcgcggcgtctatcctcctccaccggcggcaaggcatctgagctcaacagcaagcaaatggcaggtggcagaattgcacatgcgaccctcaaggggccgagcgtggtgaaggagatctgcattgggctcacccttgggctggtcgctggtggtctgtggaagatgcatcactggaacgagcagaggaagactagatccttctacgacatgctcgagaagggccagatcagtgttgtcgtcgaggagtagccttttgcgttgaaagtcttttgcctttgttttttgcaagttatttctgaaactctctggagagcatgacaaagctagtgccgtggagattgtcatgaaaaataagcatagcaatctgagaacatttgatctcgttgaatttgcttcttttcttgcattatcttaaaaacctgccttaatatatgccagtaacagcttaagggatt

SEQ ID NO: 36814 - DNA, 89 bp, Oryza sativa
  Clone ID: uC-osrocyp036c02a1
gtaaaccggtcacaaatcccttttcaacgattcacttagacggaccggtagagcactgtccatttagttcgagacgataagagggggag

SEQ ID NO: 36815 - DNA, 486 bp, Oryza sativa
  Clone ID: uC-osrocyp036c03a1
aactactggtggttcgtgtaggggacggaggggtggacggggctggtgatgctggtgctcatggcggtggcgttcaccctcgccacgccgtggttccgccgcggccgccttcgccttccccgcccgctcaaccgcctcacggggttcaacgccttctggtactcccaccactgctttgtcatcgtctacgccctcctcatcgtccacggctactacctcttccttaccaaggattggttcaagaaaacgacgtggatgtacctggcggtgccgatgttcctgtactcgtgcgagaggctgacgagggcgctccggtcgagcgtgaggccggtgaagatacttaaggttgcggtgtaccccggaaatgtgctgtcgctgcacttttccaagccacagggtttcaagtacatgagtgggcagtacatctttttcaactgtgcctgcgtttcgccgttcaatggcacccattcttcatcacgtcggccc

SEQ ID NO: 36816 - DNA, 267 bp, Oryza sativa
  Clone ID: uC-osrocyp036c03b1
tttctttgtttggttttttttaatatttccggtgcttctcctcctctgcacaaaggggggctttggattattcttccagagcaaaaaacccattaaattatctggccaagcctggccacaatcaagcaatccctactttgaactaatccctttacatttccaaaatgtatgtcatcataccttggatatgtataaaactttgtatgtaccaaacatggcctttcgaaaactttggtattgattcccgataaccagaaattctccctt

SEQ ID NO: 36817 - DNA, 486 bp, Oryza sativa
  Clone ID: uC-osrocyp036c04a1
attcacagattggaatactagatgtgatacatcactgtcaatccgtaggcagaattgatactacaaaaagcatcctactcagactatactatgatttctaagaatgcatagctataacgtccacttattcgagcagtaatcgccagcaaaatggaacagcatcccttgatctccagaaggcatccctcttctattgctagaccttggaacttcagaggggaaataagcgtcgcctactctgaaatctgacactgggttgctacatccaccaaaagttggtgtcgacagcaacatagaattacgagcactgaaacaaggatccggtgagaactcggagccatatcgtgaaagtgacagatttgccctgaaatgatttgagaggttttcccgacttgttgctgtcaaactgaaccttgaatgatagccatcagctgaacacaactcattttgagcaaaagagtctgtttgcaaccggaacaaaccagc

SEQ ID NO: 36818 - DNA, 373 bp, Oryza sativa
  Clone ID: uC-osrocyp036c04b1
gtcgtttcgttcctttttctctccccggtggaggaagcgaggtgtgcgccggcaccgagcggagcggtagccgcgcggcgccggcgacgagcggggctccacccatcctcctcctccgaccggcggctagcgggagcccgacagggcggatctggcgtgacgcggccctccccccccccccttccccgggggggcgccggcgtggcctcccgggacctccgccgatcctctcccctccttcggccgccatgcctctcctccttgtcctccgaccgccgtggtgaggtcggtgtggtctcgtcctgcgtctaagcgttgtatttgtcttttctgtctcctttggtgcgtcttttagcggatactttagctatta

SEQ ID NO: 36819 - DNA, 516 bp, Oryza sativa
  Clone ID: uC-osrocyp036c05a1
ataaagtagcatggattcagagttccagacacgctagggtaccagtataaaacattatcaaggtctctacatccagaatgccacaggattctcaagcatttcactactaactccttgaggaatgtttttgtactctcgaaattggcggctattgccagtcgtaagttctccattcttaccatacatcatagaaaatgtcaccaattgaataaacggcaccgagactgagtgatccaggcagcactccacgacgcagaatttgcttccaccacccatgctaacgagggtgacacccgtgaccaactcatgatcagacacagtagtagctagttcctccctggtgtatttcaccgcctggccattctcgcaatcgtcagatatcacatccattgagcatatgcgccaactggtggggtgccaggttttctgctgagcccaacccaggcgtccaactcagcgatgaagtacgcacgaccggagaacggagctgccactggccatggtctttcacataca

SEQ ID NO: 36820 - DNA, 297 bp, Oryza sativa
  Clone ID: uC-osrocyp036c05b1
atctgttccaccatccatgggtgagggtgaggtggccggtgctcaccgcactaccctggggctcgcgcccactcgccggggcgccgatcctctgcggtcgcaggcgtgaggacccaaaccatggcgccgctgctcctcgctcgcccgcggcacatctggctcgatggaccaaaacacgccacctgccgccgccgccgtccgcggacggcgcttcctcagatctccgagcgcaccggatgccgtcgtcgctcccccgagcgctccgactcgtcgtctgcttgctgggttggagcatta

SEQ ID NO: 36821 - DNA, 412 bp, Oryza sativa
  Clone ID: uC-osrocyp036c06a1
atataaagccgaagatgttttatataggggagagaacgtgacatacttttaattactttgggggtgaattgaaggggaacaagcaactgctggagagatagtacactctggcacacacgcacaatttgacggcagagactgatgcacaagcggtacacgcacacgcccaaaattagcaggctccagccccggaattaacagagcgagcaatttacgtaccccacacgaaccaccaatcaaccaaaggtagcgccactcccccgtgcacgcgcgcgcgttttatgtaactctctacggcgtgtacgaagcaggagtgacacgacacaaaaccacacacaaagacgtagctagggatgacgagaccgagatcgactggtaattttccgagttagaggacacgatcgacgacatc

SEQ ID NO: 36822 - DNA, 150 bp, Oryza sativa
  Clone ID: uC-osrocyp036c06b1
cccgtacgttctccagttcgaagacggtgagggcggggattgactgctggctccccccgcgtcccaccccaaaagaggagaggtcttgggaggaaccatccatgggggaggacctacacccagccaaagtggaattccgatcataccccg

SEQ ID NO: 36823 - DNA, 518 bp, Oryza sativa
  Clone ID: uC-osrocyp036c07a1
ggaagaccataacatcaagaactctccttgaaaattttgtaatttgatccgcaacgattcagatgcagatgaaacactgctgattcccactcagattacacacaatacaaatacaccgacaaactgcctcaaaaaccaccaaattgattcaaaagtaaaacgggtatgagggatcttcccaccgagactgactaaacctaaccacagacaattggatccactggacccagattattcaaaaacagatggctatgacggcatcgtcctcgcaaccgaagggaacttgcagctatggatatcctcacttcgcgctggcgagctgggtgcggatgagcttggcggccgaaaccatgttggtaagggcgggcttgacctcgttgtacttgcgggtcttgagaccgcagtcagggttcacccagagaatgttagtgtcgagcaccgcgagcatcttgttgacgcggtccgcaatctcctctgtggacgggatcctttgggaagggatgtatagacaccagggc

SEQ ID NO: 36824 - DNA, 466 bp, Oryza sativa
  Clone ID: uC-osrocyp036c07b1
tttaggacaagcttgtggtctcgacttcctgctcactcatgcacaccgctgtggatcttgtaaatgagaccaagctcgatagcgagattaagtcatggctcgcttttgctgcccaaaaggtggttgaggtgaatgcccttgctaaggcattggctggacagaaggatgaggcttactttgcagcaaacgctgctgctcaggcctccaggaggtcatcacctcgtgtgacaaacgaggaagtccaaaaggctgctgctgctctgaaggggtctgaccaccgccgtgctaccaatgttagcgctagactggacgcacagcagaagaagctcaaccttccagtccttcctacaaccacaattggttcattcccacagactgtggagctcaggagagtccgccgtgagtacaaggcaaaaaagatctctgaggaggagtacattagtgccatcaaggaggaaattcagca

SEQ ID NO: 36825 - DNA, 488 bp, Oryza sativa
  Clone ID: uC-osrocyp036c08a1
tttttttttttttttttttttttttttttttttttttttttttttttttttttttttttttttttttttttttttttttaaaaaaccaaaaggaaaggggggtaaagtcaacggaattagggggggcttcgaaaaaaaaaaaaaaaaaaaaaaaaaacgggcttggggaaaagggggggaaaaaaagcaggggggaaaaaaaaaaaaactgtttggggcggggttccaaggggggaaactatgttgggggacaaaaaagggggaacaggcttttcaaagggtttttaaaaattgggccgcccaaaattgggtatggtaaatttcgagggggggagttaatccttttttggcaccgctttggtgaacttgaaagccgggaaattccggacgggacccggggggggaaccatttttcctaaagggggggggaataaaaggtgggggaaaaaagggaaaaaggtggtcccgggggaaaagggtattccgct

SEQ ID NO: 36826 - DNA, 293 bp, Oryza sativa
  Clone ID: uC-osrocyp036c08b1
ctatcaagtacaacatggtggtgcaagaggaggatgagctgccgcctgagaaattagcgatagcaaatgtgggacggcaagatgctaagaagcacttggaagagcatgtctccaatttgatgtcatcaaacatagttcagacgctaggaaccatgctcgatacagttgtattttagatcactactgctgttatcccaacactgtacccagagctcgtttattttttatttttttatgtttatcgaagcctaccataattcagtgaacttaacgccagttacatttgggttatg

SEQ ID NO: 36827 - DNA, 396 bp, Oryza sativa
  Clone ID: uC-osrocyp036c09a1
aaaaaaccaaaaggaaaggggggtaaagtaaaaggaaatgggggggggttggaaaaacaaaaaaaaaaaaaaaaaaaacggggttggggaaaaggggggggaaaaaagggggggggataaaaaaaaaaatgggatgggggggggtcccaagggggggaacaaggggggaggaaaaaaaagggggaaaaggcttttaaaaggggttttaaaaattgggggggccaaaattgggaatggaaaaactcgaaggggggggctaatctcctttttgccccgggtgggggccctggaaagcccggaaatccgggaccggacccggagggggaacacactgtcccaatggggggagggataaaagtggggcgaaaaaagggcaaaacattgttccgggggaaa

SEQ ID NO: 36828 - DNA, 379 bp, Oryza sativa
  Clone ID: uC-osrocyp036c09b1
ctatcaagtacaacatgtgttgtgcaagaggaggatgagctgccgcctgagaaattagcgatagcaaatgtgggacggcaagatgctaagaagcacttggaagagcatgtctccaatttgatgtcatcaaacatagttcagacgctaggaaccatgctcgatacagttgtattttagatcactactgctgttatcccaacactgtacccagagctcgtttattttttatttttttatgtttatcgaagcctaccataattcagtgaacttaacgccagttacatttgggttatgaaaaaaaaaaaaaaaaaaaaataataaaaaataaaaaaaaataaaaaaaaaaaaatataattaaatttaaataaaatataccaat

SEQ ID NO: 36829 - DNA, 134 bp, Oryza sativa
  Clone ID: uC-osrocyp036c10a1
tgggttttttttttttatccatttaatccttttatctttcttctcctcccatctaaatcattatcaaggtcttaactcttccaaccaaaaatatttctcgaagcaacatcactacgtaacttccttgacgcacc

SEQ ID NO: 36830 - DNA, 382 bp, Oryza sativa
  Clone ID: uC-osrocyp036c11a1
gtaatcaagatagcgctatattagtatatttcacttgcaaaatacaacaacggaatcagaaagctgccagccaaggccatgaacgctgcaggcgccacggcattgcagcagcaatctcacacgattacaacacggataaatacagcaagctcaaaaaggaaaaaaaaaacacggacggagaaacaacgtaatctgctgatgagcgtacgagaagccttcaggatcctgaattcctccctttcttatttcggtgcacgtatcgtctcttcctggatcttgtcgcgttcgcgggtggactggttcgatcagcagatgggcaggggctcgccgttccactccttgaggcactcgagcatcgggtcgatgagcttgcgctcgctga

SEQ ID NO: 36831 - DNA, 392 bp, Oryza sativa
  Clone ID: uC-osrocyp036c11b1
ctgcagcctctctatagtctcagctcttcttccaccaccacccagctcctcctcctcctcctcgtcgttgttcgccaccaccgctcggagagatggcgagccagaccgccgacgccacggggttcgtcgcgagcgacccgctgtcgtggggcaaggcggcgctggagatgacggggagccacctggacgaggtgaagcgcatggtggcgcagtcacgggaggccgtggtgaagatcgaggggtccagcctccgcgtcggccaggtggccgccgtctccgcggccaaggaccgcctccgcgtgggtggtcgagctggacgaggaggcccgcccccgcgtcaaggccagcagcgagtggatcctcaactgcatcgcccacggcggcgacatcta

SEQ ID NO: 36832 - DNA, 292 bp, Oryza sativa
  Clone ID: uC-osrocyp036c12a1
cgtactgtaggttaatctatccatgcctcgaacacttcccaaataataccaccgactcacataggtatacaccactggccatacccgtcaagccactcagacatcattgcattcaaattacataatttcaaccgggatacatccatattaggaaggtccgtaacgctacataaggcccaaacaatgctgacccgcaccaaaatgggctttctccatgcctgaaaggcggtgaaacctgtgataccttaacgaggacaatgcctccgtccttactgcaaaacacaggagcaac

SEQ ID NO: 36833 - DNA, 295 bp, Oryza sativa
  Clone ID: uC-osrocyp036c12b1
tctcacgcgtccggttctagatcgcgagcggtcggaaatcaatctactactctgactcgtacgcagccgctgggagaagctagctagtttgctagcgctcaagcataccagcgaactatctagtgaagatagatatgtgccgcgtcgccatactgcaggatcagcatacatagtcccggcagccagatgagccatttcaccgtcattgaggtcttgccgccggcggccgagtacgccagcgacgacccgaccgaccaagctgggatggatgacgaggagcatgagcaaaattcgc

SEQ ID NO: 36834 - DNA, 342 bp, Oryza sativa
  Clone ID: uC-osrocyp036d01a1
agaaaattaacccgtaacaaagcacgcgtattttttcgggtgaaaaaaaaataaaaaactgaaaaatttagtctcagggaaatttatttgagcatggggtcccaaaactcatggggggaaaaaccaaaaaaaagaagcttagccaagggaaattttcaacaaaattgccccatttttggggggggtttgcttaggggcacttcagggaacgtggccatggggatgcgattatgagaagcagaaggtctttccacacgtaaatcgttccggggaagcaccaaggcaggcaggccatcttgaatcccggggggttcccgccgccatgcccgaaccggtccgggg

SEQ ID NO: 36835 - DNA, 117 bp, Oryza sativa
  Clone ID: uC-osrocyp036d01b1
acgccggtccgcctcctcggtccgttcaggggacctagatcgaggggggacctcccactacttacacggcgacatggcgacgccaccggcgaggccctcgtcggtaaccgtcatgaa

SEQ ID NO: 36836 - DNA, 517 bp, Oryza sativa
  Clone ID: uC-osrocyp036d02a1
atatatatataagcgatgctagaaagtcttataatatgaagtatttaagaacgacatgtgtgtattcaagaacatgcatgaatctcagcatatatattttttcgaaaagaaaaaagtaaattatagcaatttttgttttgaacatactaattaagaatcagtaatctcagcagtcaaccaggttttatttagactagttgcgaaacggagtacctgcagaccctggcctctgaataaacgagccccggtctgcagtagtaccccttgctcgggctgcagtgcctgtcctcggagcagacgcagcggccctccagcgcgcagccgtcggccttgggcagctgctcctccccgccgacgaccttgtcggaccaccggctgtcgaacagcccccgcgggtcgagctgccgcttcgccgcgccgaacttgtcccagctcgggtacttgccccgcacgccccggaacgccgtcagcctgttcttggcccagtgcgggcgcgccccgtgcttgacgaacgcca

SEQ ID NO: 36837 - DNA, 259 bp, Oryza sativa
  Clone ID: uC-osrocyp036d02b1
gctcgttgcgggccgtgatcgacgcggcggaggcgagcgggctgagcctgacggcggcgccgtactgggaaggggtgagcgtcggggggctcgtcagcacgggctcccacgggagctcctggtggggccgcggcggcgccgtgcacgaccacgtggtggcgctcaggctcgtcgtgcccgccggcgcggcggacggttgggccaaggtggtggcgctccggagaggcgactcgctctttaacgccgatttagtcttcct

SEQ ID NO: 36838 - DNA, 471 bp, Oryza sativa
  Clone ID: uC-osrocyp036d03a1
gatgtctaaaattgggacatttctattgcattcttatgtcataattcacttaatacatgaaattgacagctgattatataactttaaactttgtactatgaacaatttgcgcgcggcaatgctatctagtagtatcgatcaggaattcactttcctgcagttgagcctgacctcgccggttgacccggtcaacgggccgatgttcccgagcctgatcatggacgcggcgaagtccgacgagaaggcggcggcgttggagctgtacagctgcaccaccgagtccaccggcccgttgttgaacagctcctggtcggagtgcagcagcccggcgccggcgacgaggttgcggtagtagccgttgtcgaacgcgtcgggggtcagggagtccagcggcgccagcgcggcgtcgccgccggacgccgggcaggactgccgtggtgcgacgcgaacgccgggctcacgttggcgtcc

SEQ ID NO: 36839 - DNA, 206 bp, Oryza sativa
  Clone ID: uC-osrocyp036d03b1
tggagtttgagcctgcgccatggctgtcggcgggagagggagacggccgctgctcctgctcctgctcctcctcgccgtggcgctggcgctggcggcgcgcgcgcgggcgcagctgtcgccggggttctactcggcgagctgccccaccgtgcacggcgtcgtgcggcaggtcatgtcgcaggccgtcatgaacgacacgcgcgccg

SEQ ID NO: 36840 - DNA, 477 bp, Oryza sativa
  Clone ID: uC-osrocyp036d04a1
gatcaaccagcaaatacagctgctattatttcacaagatagctcatttcggagaattacataacacggctctttgctaagatatacaatcatacaaggtaccatccatatttgataaagtagaaatcagcaattttaaaccttgaaggccagggatgagacttccatatcggcacgcaaacgcgaccgatatcatggtgtcctctctcttttcttttttcttttctgtactctatcctgcattagtttcagtctgtggtcattggccccgcaatacaacagcggaaacgtgccctgcggacatttctcataacctctatctcggcattctcaagcatgacaacgatctcggcaaatgatggcgaacttcagggtttgcgtcccaacagcaagtcatgatcttgctcagagaatccacacaatcctgcgggattgcaggacgagagcccctgtttacgacagcaaatgcagcctgaac

SEQ ID NO: 36841 - DNA, 468 bp, Oryza sativa
  Clone ID: uC-osrocyp036d04b1
cgatatttccccttcccttctttgtcgcctccgactccgactccgactcctcgtgagctcgccccgccgcctgcgccgccgatcccgcgaggcgcgccgccgccgttcgtcctgctgcttccgccgcatcccgataccgtgggagcactgaagaaaactgagaaatggatgtttttcagcgattctactgtttcgtaaagcaaccctactgttagtgttggttgtttgaagatgattgaggggtcaaggtttcagaatatgttgggcggtgctggaattggaggtggtataggttgcagaggaaggcaagaaaacgagatgaatggcttccacaatatgccctactaccacaaggtcggggagagctcccacatgttcgtggataacgccgacaacctgaacatgatgaactttgttggtggttcggttgccatggcggaggatacatgcacgtgtgatcaaactagt

SEQ ID NO: 36842 - DNA, 426 bp, Oryza sativa
  Clone ID: uC-osrocyp036d05a1
ggcaacatggatctctctagttctctataccctttcaattaagttaaaattcagtatgtttcaggatacaaaaaatgagagagatttttcttgcaacacacaaaagttacaatcacctcgatggttgctaaggtgagcaatagatgaactgaagaactccattgggagctaggtaggcatacctggttcagagtcacagcttgctgctagcttgatccttctttggcctggtggtcgacatccactgccggccgatcgccaccagctcgccggaatccttcttccggatctccaccgtcaccgccgtcatcttccctttctgctccaccaccctgccgtccagctcaacttcctcatggagcttggccggcgagaagtaggagatgtcgtagtggacggagaccttgatgatgccctccaccgaca

SEQ ID NO: 36843 - DNA, 366 bp, Oryza sativa
  Clone ID: uC-osrocyp036d05b1
tctcctctccgccgcacgccggcgaaaaccagtcgcgcgcccgcatgggcggcagcgctgcggcggcgccgccggccccggcgtggatggccgccggtgcccggaggtggctggaggaagccggcgtcgccttcgacggctccgaccgccgcgccttcaacgcgctgcccctcgccggcgcgcgcgtctccctcgccgaggccggccgcgccgtctgctcgctccgcgtgaccgccgagctcacggacgcggaggggaactggcacccgggggcgatcgcggcggcggcggacgacgtgtgcgcagcggcgatcatggtgtgggagggcatcattaaggtctacgttcactacgacatctactact

SEQ ID NO: 36844 - DNA, 289 bp, Oryza sativa
  Clone ID: uC-osrocyp036d06a1
acaagggaaaagaaatacttttatccctagggaccaaaaaacccataccattcgttcatttgaccaaccccactaggttaaaaaacaaaacactgccttacaaagggggggcccctgctgtccgtaccaaaagggggcccaaaaaacccggccccgggcggaaatttcctcccccccccaaaagggaaacggggggggggcccccccctcccccgggcaaaccccccccgcgggataaatccttttccttttccttaacaggccccccatggccgtttccccttttaac

SEQ ID NO: 36845 - DNA, 194 bp, Oryza sativa
  Clone ID: uC-osrocyp036d06b1
caagcccaagtcgcgtctctctcgaagcagagtagagaaggagaggagcggagcgccatcagccgtccgatcgagtgatccgatggctctcgctctctccacctctgctgctgctgccgctgccgccgcggcgcgggcgctcgcggcgagggtgacgacgactaggggttacgccgcgtttgttgccctttccg

SEQ ID NO: 36846 - DNA, 415 bp, Oryza sativa
  Clone ID: uC-osrocyp036d07a1
agggggaactataatatctacaggaaaaaatttatttatttccattggaatggaaaagtcaatattttacatatagccttccaaaagtttaagggctttaagtaggaaccgcaaaaaaaaaaaaaataacaaagatgacaaaacaatggaatgggtggcattacacactttaaatgagcccgaatggacaattttcccaaggggcaggcggcaccaaaatcactatttcccggacattagggtgaccaaaccttggttttcaaacagggtgttcatgtcccaaaacttacttggggatgaaagggtaattagggcgaccaccacggattttattgaaggcctcaacttggggtctttttgggggcacacctttgcaagttgtgtcagcttgagaatggaatcaaaaggaaaatct

SEQ ID NO: 36847 - DNA, 316 bp, Oryza sativa
  Clone ID: uC-osrocyp036d07b1
tgtcggcgccttccccttccagatgtcccgcggccagatctacacctccgtcgccgccaactacaacaacctcaccaccgtcgagtggctgcaggccaccaacagctacccggccaacaacatcccggacaccgccgtcatcaacgccaccgtcaactgctcctgcggcgacgccagcatctcgccggactacgggctgttcctcacctacccgctccgcgccgaggatacgctcgcctccgtcgcggcgacctacgggctcttgccgcagctggacgtggtcaggaggtacaacccggggatggagagcgcctcg

SEQ ID NO: 36848 - DNA, 176 bp, Oryza sativa
  Clone ID: uC-osrocyp036d08a1
ttttttttttttttttttttttttatttatttttttatttttttttatttttttttttttttttatttttttttatttattaataaattaatttttattttaataaaaaaaaaaaaaaaaaaaaaaaaaaagaggggaaaaaaaaaaaaaagaaaaaaaaaaaaaaaacaaggacg

SEQ ID NO: 36849 - DNA, 362 bp, Oryza sativa
  Clone ID: uC-osrocyp036d08b1
gaaggaatcggactcgactcctatgagggacgatggacgaaaaatcgcgggtgaaaaggacgtgacgaccggaaaaatacgaatatttatatatatgtgtgtgttggaggaataccacgaggaccttcggccgggcctaccaaaaccaaggacaagcaagggcgcaggccggaggtaagcggcgaaggtcgaagagacaacataggcgaaagccacacggcgaaagttgtggcatggagtatacaaccttcgctgaagatggaccttgccggagggacatacggtcgaaggccgcgaggcgaaagccttgccacgaagggcatgggttttgccgagtgtcgaacctcaccgggagaaggccc

SEQ ID NO: 36850 - DNA, 479 bp, Oryza sativa
  Clone ID: uC-osrocyp036d09a1
gaatcaagataccattttgctattctttaccaagcatggtgtcaaaagtacatgcaactgctcaaaactaagactacacagtagtactgacacaaggtgagactcaaaaaacggagtgaaacagaggcaaaagcatcagttataaaatttgcaagttctcggtatgtttctccagtcccagagataagcttgacaaccattcatggctctttgattgcacacatgacaaatggcttcagcttgcagtgcagaatagaagcctgacggtgaaaaaccgatttctctgttgcttttgcaccatggcggagaactcccggcatggtagaagatcgaatacaggatcagaatcttgcaccttactttttgccgaagtctgcactgtagtgggcgctggattccagcttcttggcgtcggtcagcttcctgggagccttcatgaagccctatggacaacgtagtcccgtcaagacgaattggag

SEQ ID NO: 36851 - DNA, 295 bp, Oryza sativa
  unsure (1)..(295): unsure at all n locations
  Clone ID: uC-osrocyp036d09b1
aaanaaaaaaaaaaaaaaacaattttttttttttttaacaaaaatgggttaaaaaataaaatcaactgcttaaaaataaaaataaacattttttttttaaaaaaggggaaattaaaaaaacggggggaaaaaaaagcaaaacccccatttataaaatttggaaggtttcggaatttttttccaggcccaaaaaaaaattttaaaaccatttatggttttttttttgcaaaaattaaaaaatggtttaattttaatgaaaaaaaaaaacccgtaggaaaaaaaaccatttcttttt

SEQ ID NO: 36852 - DNA, 452 bp, Oryza sativa
  Clone ID: uC-osrocyp036d10a1
gtagtaacagggacttttattgcaatatttgtagttaatacaccttgcaatcattcttacttagtactaatacacattgaaatatgccataggtaaaatctttaatagctatatatccaagccatattatcgtgtgagatccttatatccaagccatattatcatgtggataattaacatgtccaatagctatatccacaccatattattccccatcttcttgataacttgatacacataggatacgagatgggccttaggcatttgcactggcatcgacaggcttgaactcctggagctccttgaagtccatccatggtttctcccagaccttagcttcatagagcttcttggcatccccttccttcacctcaattgtgaaatagtacaaagtgccagcgacaacttgctgcttcacactcacaagcttctcgaactccagcagagaattg

SEQ ID NO: 36853 - DNA, 516 bp, Oryza sativa
  Clone ID: uC-osrocyp036d10b1
ccggattggtagcctccctgctcgtgctgcattcgctagccacgccgtccgctcaggccgaggcgcatcgcgcagggggagaaggggaggagaagatgtcgtgcgacggagggccggtgcttggcggcgtcgagccggtggggaacgagaacgacctccacctcgtcgacctcgcccgcttcgccgtcaccgagcacaacaagaaggccaattctctgctggagttcgagaagcttgtgagtgtgaagcagcatgttgtcgctggcactttgtactatttcacaattgaggtgaaggaaggggatgccaagaagctctatgaagctaaggtctgggagaaaccatggatggacttcaaggagctccaggagtttaagcctgtcgatgccagtgcaaatgcctaaggcccatctcgtatcctatgtgtatcaagttattaagaagatggggaataatatggtgttggatataggctattggacatgttaattttccacattattaatatggcttgga

SEQ ID NO: 36854 - DNA, 335 bp, Oryza sativa
  Clone ID: uC-osrocyp036d11a1
acagattagctggcttgtttcagtccttcttgtccatatgaatttacatcaagagcttttttggctacaaacccgataacacgtggcgatgaaaaacattacatcattgactgccctttgctcacttttgagaagagtgcacagctatgaaaaggtacgatctgtgaacactccgcggggttagaacaaagagagacctgatgcttgcagttttcaggagcctgcaaagttgctctaagtttatatttggatccccgccaatgtcagacttcttcaggaggggatcaacaaaacctttcagtcctgtatgcattaggagggaatcagatgtgata

SEQ ID NO: 36855 - DNA, 351 bp, Oryza sativa
  Clone ID: uC-osrocyp036d11b1
ctgtcacaacacattttgtctgtcctagacgaggacgagatgcctggtgataaattaatcatcgcaattgccggacggcaagatgcttagaagcatttgactgatcctgcgcccaacgtgacgccatcacacatagcggagacgctgggaaccatgctagagacagctctatttgagagcactactgctgttatcccaacactgtacccatagctcgactacttggaatttcaggatgggtatcgacgcctaccatagctgagcgaactctaacgccagctacatctgggtcatgaaagaccgacgctgcagcgagctctttcgccttaagcgcattgacaagaacaaggt

SEQ ID NO: 36856 - DNA, 473 bp, Oryza sativa
  Clone ID: uC-osrocyp036d12a1
gacacacaaacaatagtttaatttattagcaagtcaaaatttcttgaaagaataccatcgactcacttgtgtctacaagccttgagttatacttcttgcaacacagacaacactacagataccatacattcattttacctgtttcactcgcttttaggacgttctataacctcacatctggcgctaccatgctgaccggaccaaaaccttgttttccattggagggaatggaatgaagctctctctctctctcttctctagctcactagctgctgactgccatagacagggtaggctccatatgcagcagcatacatgttagggtgcgggacgggggaggcataaccgtatccacccgagaatggcgtcccatagtacatattggttcttcggctgccagaatcagccctagactgtttatgtgatgggctgcggccccatgaaaggcgaactgcctgctttccaatgactga

SEQ ID NO: 36857 - DNA, 271 bp, Oryza sativa
  Clone ID: uC-osrocyp036d12b1
ctgacgcgtgggcggacgcgtgggccaccctcgcgagccaagctaccattctcctcctcggcggcggcggcaccaaggcttgccagcatagagaccgcgacaaccacgaccactaccgaccgaggcgagggcatgatcatgccgcacgaatgcgaatctgaaacccacgcaatgcccaggaattgtaatgaagtacagtatatcacggatcaactatttgtatatatatgacttgatccatatatttacccgacacaagaaatcagcagct

SEQ ID NO: 36858 - DNA, 483 bp, Oryza sativa
  Clone ID: uC-osrocyp036e01a1
aagaagagggatatatatatagcattggttctgcacttctgcatgctaaagtactccacatgatacagcaggttggctttccatccataaggttacaaatgggcaggattgccgtttctgttataaaccaaaggagttgcaagttagagtaaagcatttatagtcgcatcatgcatacagtttcagtacaagatacaacacagcgaactggcaatagattgcttttttgtaaatcttagcactccaatgcagcttgagcttgattagttccaggtgttgacagacggtcctgtgactggttgctcatctagggcacggcgcaactcctcagagaagttcatctgatgaggaagtttcatgtgaccatgaccccatgatgatccactagatccagagtacatcaccggcttatcaggggaatcatatgactgatcattgtacaagttcattgctgcagcccaacggtcattgagaagctgggca

SEQ ID NO: 36859 - DNA, 170 bp, Oryza sativa
  Clone ID: uC-osrocyp036e01b1
tctctctcgtcgggaggtttttgttgggaagagggtggcaggaggaggaggaggtcttttttttcctttctccctttcctttcctgatcttctatatcttccttttttccctgcttccttctttatttttctccttttcttctttcttcttttcccttctttcacttttc

SEQ ID NO: 36860 - DNA, 529 bp, Oryza sativa
  Clone ID: uC-osrocyp036e02a1
aggagtcgtgcaaaatgtctagtcgcctcagaaatggttgtattccaagcgtcgttttccgttggatatgagtaccacatattgctacaatgcatgtccttgttctgctttcaatagtcaagctatcaaatgcgtccacaatctacttctctccgggcaggcccttgctaacacatcctccaggctccccaacgaatgtagcctttcttccagctttagtttcacagccggaacttgctttgatatccagagaatgtagagggctgcaagctcagattggacacatgcctcaccaaattcatcggcaggggcattcaggcagtctgacaggaggtatatctcctggactaggaagagatccaccagcgatgtgcctgcagcacactctgtttcctcactgctgagcaagaacttcatccaccattgtgagaggaacctacgatggatccacaaagactacaccaacacactagcacaatcaacatagggggacaacattcactagaaattattgcactaacataaaaat

SEQ ID NO: 36861 - DNA, 481 bp, Oryza sativa
  Clone ID: uC-osrocyp036e02b1
gtatttattcccatctactttacggaaccttcatttcctagcagataattatccgaactcatcatattagcatttcacacagttccttatttaactggttattaaattacttttttttgccgggtggttattaaattactttgacatttcacacttgtagtgataaacagtgtacaacaagatagtttgatcctttatgcagaaatcaaagatgaactaccgtgcgtggaggcatcgctgctggcttattccctacatgacaagagaacaggttctgaatgagttaaagaaatcaacaagatggaacgagttacatgtccgctgacactgtttgttttcactaccgacggtccctactgcttgcattactagacagttgccatgtagaggacacagaagattcccttgataggaagtcagaagttcatttactgtggaagggattgttgttttttattaaaaatctatacctgctttacta

SEQ ID NO: 36862 - DNA, 471 bp, Oryza sativa
  Clone ID: uC-osrocyp036e03a1
ggcaatattcatctcacagaataaatcaaaaatctagaaaaaggacatatcacataatcaacaaattcatgcatcacacaatcaaatattcatcaacaagtttacatcactgaatcaaacatcaaacatcattaaatcatcgaatcaaacatcaacaatggcacagccggcaagcgaaggagacggttgggggtgctcactggtggcaggagagacaagggagcccaccactgtcgcccgtggggagcccaccgccgtcgttgccgctacctactcctcgccggatttggcagaggggagggctccgccgccgccattacctcccctcccgccagatctggcagaggggaggtcgtcgccgccaccgcccgtgagccacgccacttgctgctgccacccctcctgtcgtcgttgactcccctcccggccggatctggtggagcgggggcaccactgccttccctccggccg

SEQ ID NO: 36863 - DNA, 177 bp, Oryza sativa
  Clone ID: uC-osrocyp036e03b1
ctggtcttactctcttgtttttcgtgtagctctcttctctatctacctcccttctctacggcgcactaccgacggttggccggcggaggcggcagtggtgaccgcgccctcccctccgccagatccgggccatccggtgggaggggaggcggcaggtgggagctagaggagagccct

SEQ ID NO: 36864 - DNA, 174 bp, Oryza sativa
  Clone ID: uC-osrocyp036e04a1
tttttggttatatcggaccacactaagattcatttattcatacatttgatcaaattatacgagacgagattcttctttgcgtataaccacacagatgggcaagcccccattttacacatactatatagttcaacacaataacttgcgatcacaacgatctggttgtatgatgac

SEQ ID NO: 36865 - DNA, 290 bp, Oryza sativa
  Clone ID: uC-osrocyp036e04b1
ctgaggtgggcaggctctccctccccctcccggttcggctcggttcgggtcgggtcctgttcgatctcggctcttccttcggctcgggggttggcgggaaagcatggcggcgccggatgttgagtaccgttgcttcgtcggcggcctcgcctgggccacccactaccgctccctcgaagccgctttctccacctacggcgagatcctcgagtccaagatcatcaacgatcgggagacggggaggccgcgcggtttcgggctagtgaccgctctcgagcgagctagccctg

SEQ ID NO: 36866 - DNA, 463 bp, Oryza sativa
  Clone ID: uC-osrocyp036e05a1
gcacaagaagccaaacgtgagagcttgtacaaaacttcagctctcttcaatgttgactacgctaattaaaattgtaactccataaaaactcggctacgccgagaaaactgtaattacaacagatacggcgtagccaattcacgcaatgcgcacccatacggctacagtatggttcatttaacgtctgatagacgatttcttaaggtgctgccgcaggtggcgacaaatactgaaaacagcgaggtaatccaataaagaaataacattggaaatcctctccagcggcaacccaagtctctaaatgatcataatcactcgagttaccctgcaacgcaaatttgtacccgggttgcgaacgggcagttccatttgtagaattgtagttggtgttacgggcaaaataacaacgagcgtcattttcccaaggcacttaaattcaacagtaggatttactttcgaatta

SEQ ID NO: 36867 - DNA, 471 bp, Oryza sativa
  Clone ID: uC-osrocyp036e05b1
attgctgtttatggtgatattattctcgccactcctaatagcacagtggatgcaccagttgatattaatgtttttatatcgatgggagatgattttgaagtatataatccaggtaatggatttcaatattatggttttgttccccaatctggaacggagttacacccagtttcaaacacgaccgaggagctaaatgctccattaaaggatgagtctttaatgattgggggcaaacatgtcgtgaatgataagattccattagtgtatatgggcgagtctataaaatcctttagaacattgttgaagaggtataatatgcatagacgtgatatgttttcaaatactgctggagttaaggcttatcacggcatacgaccgcagtttcctccattgcgtggccaatatgggggtgctgaggatttgactgccacagtgatccttatatgtatgtaaaccagttacttttgcact

SEQ ID NO: 36868 - DNA, 425 bp, Oryza sativa
  Clone ID: uC-osrocyp036e06a1
atcacaaggatcacttggggcattgatagtaccataatacttctagcatccagatatagtaactatgcttaaagttgaacatgaaaggggggaaaagatcagcagatttgagccagcattgctcaactccacaaaagattgcacgccacaaccatctgtcaccacataacaactatcagccatgctagaaggctagaactgcccatgcaggcatatattatcaactagacacacacacaaggactcataaccatcctccaaaataaaaggcgcgcaatagtgattaacacggctggtgatttcattgcaggtaccttctactaatctagtgcttcttatctttcaaaggacccttgggaatcttcgataggtatttttcttcaaagaggggatagtgctttttaaatacaatttcagacttctta

SEQ ID NO: 36869 - DNA, 587 bp, Oryza sativa
  Clone ID: uC-osrocyp036e06b1
ccccgcttgttcctttccgtcattcccgggctctctctgtttgccgcctcttctcccacgcttggctgctttcttgcccgccccccctgcggggcgctgcccccgacgctcgcccccgctgcggggggcggtggttcttctttcttcttgctctcttcttgttctctttcctcctctgtttcttcttttctttcccctccttctccctcccttccctttttttcttgccccttctttcccctcctccttcttccctcctttcttcttttctctcccccctcccttccctctccctccttcctcttctcctccctccttcctcttcctcttcttctttccccctttcttcttctttctgtcctccttctctccttttcccctcttcttttcctctctttctcccctcttcttctttctcttttcttttcttcctcccccctccctcctcttctttttcttttcctctttcttctctctcccctcttctctttttccccttttcttttccccccccttcttctttctttctttctctccccccttcttcctccttctctttttccttaatgccctccccttctcccttt

SEQ ID NO: 36870 - DNA, 288 bp, Oryza sativa
  Clone ID: uC-osrocyp036e07a1
aaacaagaagatctactttgagaagtagatcaaaagagaaaaataaataaggttttggaagcatacatgcatataaggaaattaataaaggcctgaaatcacgaaagattacaagatgccacctaataaacctcgtgcaagagacaaaagtgtcttagatgccactaattatttcttgacgtccgattggataaaacagacaaaagcttgatagattggggatttgtgggaggcggtcgtcctgaagatgggtttttacacgaaatgcctgaccaaaaagaaattttg

SEQ ID NO: 36871 - DNA, 306 bp, Oryza sativa
  Clone ID: uC-osrocyp036e07b1
tcgttattatggaaggacctgtgagcgcgtcgatgggtgtcatggtccctttgctgtccaagctcatcgagagcatggaacagccgaggttcaaggacctgaagaatgacttgaagtccctcagggccgagctcgcatccatggaagctgtaatgctcaagttcgccacgcaggacgacactgacctgctggtgaaggagtggatgaggcaggtgcgggaagtgggctacgacaccgatgactggatcgacagccaccctctggtggcctgcggagacgaagggttcacgcatcttcagcctgaac

SEQ ID NO: 36872 - DNA, 459 bp, Oryza sativa
  Clone ID: uC-osrocyp036e08a1
aaattaacttgtatatagctaggatacaacaatactctctctgcccccaatcgccggcgcaaagttagtagggtcctagttcgccgtggccgctgccggcctgctgcttccgcagcctttccgattgcacgccgtgcggaaagggtagttcaggttgttgcactccgggcaggtccagctcccttccggagcgtccttgtctttgcgagatggggtagcattagatccagggcttggccttggagctccacatttcttcatattgcaactgtttctgaaggaaaagttgacattctcacactttgggcagatccagtcattctcagccattccatctgggcctccacgacgcttgcgtgaagcagagctgtcattattttccactaatgctccaccagaccatgggctagaaaccggcattggagatcctctaaaaccataaccatatcggcctagctc

SEQ ID NO: 36873 - DNA, 425 bp, Oryza sativa
  unsure (1)..(425): unsure at all n locations
  Clone ID: uC-osrocyp036e08b1
ctctcgctctcttcgttctcggcggcttctccgcctccgcctccgccgccctcttctcctctcgcctcgccgccggcgccgccagccaccgcgcgggtcgggcgggccgtatcttcctttctgttccgatggcttctgcgaaggtggagaaccgcggcggcggtgggttcggttcgaagaggtcacgcaacgacgtgtctgtaagggagggggactggacttgtcctcagtgtggtaatgtcaacttcagttttagaaatgtttgcaaccgcggagcctgtggtgcaccccgtccatcaccgagtctaagcccaagagtgccacctcctcctgctgctggatatgatcggccacatcttggatatgatcggccacatcttgtttatggtagtgctggcaccccacctnctattcctcttggatct

SEQ ID NO: 36874 - DNA, 342 bp, Oryza sativa
  Clone ID: uC-osrocyp036e09a1
tttttttttttttttttttttttttttttttttttttttttttttttttttttttttttttttttttttttttttttttttttttttttttttttttttttttttttaaaaaggaaaagggggagaaataataaaggggaaaaaaatgaaaaaaggcaaaaaaattttcaaaaaaaaaaaaacctgtgggaaaaagggaaaaagaaaaaaaaatatttaccaaaaaaaagggggataaaactttaggaaattaaaaaaaagaaaaaaccatagagtaaaaaaattggaaaaaaaaaaaaagataattaaaaaaagggggttaaaaaaaaaatgaccccacat

SEQ ID NO: 36875 - DNA, 489 bp, Oryza sativa
  Clone ID: uC-osrocyp036e09b1
tctagaatccccatagctcaagcaaagggagagagcagcagcagcaagaggagcacgcggggagctagctagctccgccgccgccgacgagctccggcggctcgccgttatccgctcgctgatcgagccgtgtgcgggtgagaaagaaaaagaaaaaaaaaagatcgcgcctttttggcggcttcttggggtgtgaatccacggcttccccggggtaggatcttgatggggctcgaggaaggcggcgcgatgagggcgctgatgcggcggaagcaggtggactccgaccgggtccgcgccgccggcggccaccagctcgccaaggagctctccgttacgcagctcgtcgcgattggtgttggttcaacaattggagctggagtatatgttcttgtgggaacagttgctcgggagcatgctgggccgggattgacacttatcatttctgatagctggaggggcaagtgcactctcagctttctggtatgc

SEQ ID NO: 36876 - DNA, 312 bp, Oryza sativa
  Clone ID: uC-osrocyp036e10a1
ggcaacaaaagcaaatggcaattggggggggaagttcttacagcggttttacaagggggggcgactgaacttaaaaagcccaagcagttcggatttttaataattactaacaccggttccacaaacaagcgaaactaaattaatcaagggggtacatccattcattcaacaaatcccaccggtttgattaacaacagtaacggggatgataatttaagctggaaacaacaaatcatgcccctggttgactggcaccccccaccctttttaaaaaacacttccttaaatgcaaacgatttgaccaagtccaac

SEQ ID NO: 36877 - DNA, 479 bp, Oryza sativa
  Clone ID: uC-osrocyp036e10b1
ctttcgccaacggcggcggcgccaacatggtggccagcggctactccaccggcaccgccctcggcgccgaaatcatcggcaccttcgtcctcgtctacaccgtcttctccgccaccgacccaaagcgcaatgcccgcgactcccacgtcccggtgctcgcgccgctgcccatcgggttcgccgtgttcatggtgcacctggccaccatccccatcaccggcacgggcatcaaccctgcccggagcatcggcgccgccgtcatctacaaccagaagaaggcatgggacgaccactggatcttctgggcggggccgttcatcggagcgctggcggcggcggcgtatcaccagtacatcctccgggcggcagccatcaaggcgctggggctcttccggagcaaccccagcaactgagcttagatagccatggctgctctgctgctgctggcctggttggacttggtcatatcgtttgcatgt

SEQ ID NO: 36878 - DNA, 451 bp, Oryza sativa
  Clone ID: uC-osrocyp036e11a1
tttgtttttttttttttttttgttttttttttgagacatattcttagatgatcacaaaattgatgcgaaccacatgaagccagaaacagttttaccatactatctttaacctgaaggctcaggcagtcaggctagtaagctaacaaaaacaaaagattcaacttttgaagacacctttagggcacacaaaaggagaacattctgcggtagatgggagatcttataaaggactacaaggctaccaaaaacttgacaggggcatagttcttctgccagcagataaactatcagattggcccagttaatcaacacaatgaacatcacgacactgtcgatcaaccaatattacaagcatcttttaggagatagagaataaaacctatacccttaatctgggccttctgttctccttatcaccatttgatttcttcacctggctggttttctcccc

SEQ ID NO: 36879 - DNA, 401 bp, Oryza sativa
  Clone ID: uC-osrocyp036e11b1
tcgctcctcttccttcccctcgccgccgccgccttctcgtcgacgcagccatgtcggcggcgcagcagcagaagcacgaggtggaccgggcgacggtggccggagccgtggccgcgctgttcaagtggatgcgcgcgcgcgcggcggaggctccaccgaacctcctcgccgacgagcgcgacgacctcctgctcctccagctctccctccgccgcatcccgccctcaccgacgaccaagccgcgcctccttccgctcccccaccccgtcatcgtccccggcgagtcggcctccatctgcgtcatcttcgacgaccgtcccaagttccgcttcccgggtcgcctccgacctgctcgacgcgttcaggtcccaccacctccccgttttcgaggttaattccgt

SEQ ID NO: 36880 - DNA, 287 bp, Oryza sativa
  Clone ID: uC-osrocyp036e12a1
agctgcaaatttcatatgtcgggtaaatatatggatcaagtcatatatatacaaatagttgatccgtgatatactgtactacattacaattccaggacattacaaagatttcagattcgcattgcggcggcatgatcatgcccccgccacggccgggaggaaccagggatgtcaagggctcaaggctggcaagccttggtcgcgatggcagaagcatactcagagatggctggatccggcgattgcctcaggtgcacgatgaccgggagcagctccgacgatcggag

SEQ ID NO: 36881 - DNA, 287 bp, Oryza sativa
  Clone ID: uC-osrocyp036e12b1
ctccgatcgtcggagcttctcccggtcatcgtgcacctgaggcaatcgccggatccagccatctctgagtatgcttctgccatcgcgaccaaggcttgccagccttgagcccttgacatccctggttcctcccggccgtggcgggggcatgatcatgccgccgcaatgcgaatctgaaatctttgtaatgtcctggaattgtaatgtagtacagtatatcacggatcaactatttgtatatatatgacttgatccatatatttacccgacatatgaaatttgcagct

SEQ ID NO: 36882 - DNA, 434 bp, Oryza sativa
  Clone ID: uC-osrocyp036f01a1
aaagaacagccaaccggcgtcgaaggaaaagacatgcttttatttctcatcaggtggcagtacaaattaacagcaatttggtgaaacatgttactacatatgaaacagacaaaattacattctttataaatgcaaaacaatccttcttctccatgacttctaaacagctcattgccgaaaggaaatgcccgcaaacatgtgtgctgaagtgaggtaatctcccttatttgggcgttaaaccacttgataattggctgttaccaaacgagccctctgcgaatactttggggggttaccatcctttagaggacgaattccagtaaccttcaaatcgctgaatgtactagatgcggaaaatccaattgatatggggaaaaatgttgatggatcagctggggggacaacaaaatccatggagccacttgggtttgact

SEQ ID NO: 36883 - DNA, 488 bp, Oryza sativa
  Clone ID: uC-osrocyp036f01b1
ggtttatccagttgcagattgtaaaccaggatgtacctggacttagcttcaaaacacaccccaatatcaacaaagatttgtttaacagtcaacaagttgtgggggcaaaagatccaaacaggccattcccaagtggtcaaaatgaaactcctctggttaagtggagaattcatgggatggatgagtcatcgttacctctatcagtcaactgctggccatcggtatctggaaatgaaacttatgtcaacattgaatatgaggctgctgagatgtttgacctgcacaatgttgtcatatctataccattgcctgcacttcgggaggctccgagtgttagacagattgatggagagtggaggtatgattcgagaaactccgtgttggaatggtccattcttttatcgatcagtcaaaccacagtggcttcatggaatttgttgtccccccagctgatccatcaacatttttccccatatcaattggatttt

SEQ ID NO: 36884 - DNA, 416 bp, Oryza sativa
  Clone ID: uC-osrocyp036f02a1
ggggggggggggccccataagggaaattttttggaaaaaaaaaaaaaaagggggaaattggtttttttttgggtaaaaaaaaaaaaaaaaaaaaaccccccctttggggggttggaaaaaaaaagccccaaagtgggaaaaaaaaacgggggggaagaaaaaaaaaaacccggtttgggggggatttttgggggggaaaaaaaacttttaaaaaacaagggggggaaagggtttttaaaaaaaataacttcaaagggggaaaaggcctattggtgggcccccttttataaaagccaaaccgggggaaaggggccccaaaggggggccaaccccttttttccaaaaaaataaaaaccggaagggaaaaaggcaccccccgtatatttggggggaagatttttaaaaagggggggggg

SEQ ID NO: 36885 - DNA, 487 bp, Oryza sativa
  Clone ID: uC-osrocyp036f02b1
ctgcctcccatgtatcattgttattttatatgctgtgtctgatcaggagggagcatcggaagatgatattcgccaaattccaagatacaaatttcggaggatggatgagcctgaaaagcaatctgtcaacatgactggatcttccggtggaataatgatagaatgtggcaccaaccaacctattgaaaaagtacttgcagctgaagatgcggagtgctgcatttgcctgtcagcgtatgatgatggtgcagagctgcgtgagctcccttgtgggcaccatttccactgtgtctgcattgataaatggctgcacatcaatgcgacttgtcccctatgcaagttcaatgttcgaaaaaacagtagcagcagtggtagtgaagaagtataaatctccacgagagaatccaagcataatcggtatttagcttctcgtcccacgcgacttctgtcacaactgtggtacttttcatgtcatatcccctagagt

SEQ ID NO: 36886 - DNA, 487 bp, Oryza sativa
  Clone ID: uC-osrocyp036f03a1
agggaaaagctcatggaatccctttattatttagggggtcaaaggaaacagcagcacaccagtctcgggtctagtattagcaaaatgaaagttacagcattgccgcagcggttgcgaaagaaaatcagcacattctggttccccagtgtgccagggagctcgaagcaaactgttaaactcgttcaatccagcgtcaagagtgagtaggtcagaggagatctcattttttccaccgccgagcttgctatcttgagtccacaacagggcccttaggaagcgcagacaggggtacgagagcgtgagatttttgggggctatcggagccagggatcttttcctttggccggctcaacaccttcctgacctcgttagctagctcgatgattgaatcatcttcatggcatatgttggacaatgcctttttcattgagaaccggtaatccctgtaattcccattggggccattggcttgagcaatttgccttgc

SEQ ID NO: 36887 - DNA, 187 bp, Oryza sativa
  Clone ID: uC-osrocyp036f03b1
tcttcatcccaaccagagagcttgcggaagcgggggtttggtgcggtcgcgcgcgtgtgaggggggagagaaggccaggaggaggcgactccgtctcctgagggaggtataaatccgatacctcctcctgccctgctcgatcgcttgctcgcctgcactgttctcactttgtcctgttcctttcttt

SEQ ID NO: 36888 - DNA, 235 bp, Oryza sativa
  Clone ID: uC-osrocyp036f04a1
aatacatgaaattgacagttgattatataactaaaaaaagcggactagtaaacaaaaagcgcgcggaaatgctaactaggagtatcgaacaggaaataagaaatctgtaaaagagcctgaactaaaagaaagacccggtcaacgggccgatggtcccgagacagaacaaggacgcggcgaagtccgacgagaaggaggcggcgctggagctgtacagctgcaccaccgagtccac

SEQ ID NO: 36889 - DNA, 511 bp, Oryza sativa
  Clone ID: uC-osrocyp036f04b1
gtattatactagcttgcttgttcaattcaatcgagcagtagctaattgcatagtgatcgatcgatctgtatagatggtggtggccggcaagaagcagggacggcattctttttctgcatcatcatcgtcgtcttcgtcttcttattgttcagtagtgcagctgggtcatcatcagcgcccacagggtgaggaccctctcatcggcatcaaagcagcagcagcaggaggaggaggaataatgagaaagggcccgtggacggagcaggaggacgtgcagttggtttggttcgtgcggctgctgggcgaacggcggtgggatttcttagcaaaggtgtcaggtttgcgcggcggcgggtgatgagcatatgcgtgcgtgcatctaatctatcgattaattgttgatgatgtcgatcagatggatggatgcatgcctatgccgtacatagtagatttgatgatagtaactgacataaatataatgtatgcgtgcgatcaacgcttggtgttggat

SEQ ID NO: 36890 - DNA, 470 bp, Oryza sativa
  Clone ID: uC-osrocyp036f05a1
aggggaaaaccaaatccattacagaaaggaccatggattgaacaaaacaacttggatgattgttaattacaaaaaggagctcatgaatggtccaccatttgtacaaccgtttcattttttaaacccaggtagcctacgcgattcattaattaattcctacatcttcttttttgagactctactattaaccccagtttttacaagagttcctgcctcacctggagccttgataagatatttggagatctcactggggttgtagtagcgctcgaagaggaaatacttcctttcatcaatctcagccacgccttgcagcgttttactccttagatcaacagagataacccatcccttatcatccaagcgattgatcttggacaggaaagaaatgacatccccatccatacccaagggggggaaacctgtgaccagcctcctcaatggcttctttggatcattgccaatttttg

SEQ ID NO: 36891 - DNA, 496 bp, Oryza sativa
  unsure (1)..(496): unsure at all n locations
  Clone ID: uC-osrocyp036f05b1
gttttctcctcctcctcatcgctgattaggattcgattcgaccggatccctcgccgccttcgccatggatgatggtgatgagcccgtcccctacgtcatggatgagggtgtgctactacccttgctgtttccgccgccgctgccggccgacgacgacgccaccggcggcgtgagcccaagctgggtgtacctcgaagacagagcttacgtctcccccgatgccgtctccaactccaccaccgtcttctccaccaccaccaccggcgtaagcatccatgtctccttctgcctcgcccgcccgccgcgcctttcctacctctgcgtccactgcccccgccccggcgacggcgagggcgcctaccggttcactgtcgatccccaagtcctcggcacgcacaccaatgtagccctcctccgngttccgcaccccaacgatgggctccaccgcggcatcaaatcctacgactacttcgtctacacggtccngccaggcccg

SEQ ID NO: 36892 - DNA, 70 bp, Oryza sativa
  Clone ID: uC-osrocyp036f06a1
tttttggttttttattttatttgttttttattttattctttatttatcctctttttatatttttcctaac

SEQ ID NO: 36893 - DNA, 340 bp, Oryza sativa
  Clone ID: uC-osrocyp036f06b1
tttatctcgtgggcttctccccctgctttctgctcctgacgcgagagcaagaagaagaaaaggccatggcggagaagagggcttcttcttgaggcagctgcttcgctttcctcaccccccaaatcgcgccagaattcgatcttttccggcggcggctggtggagcgcaagatcgcgctgcgcgtttgatgggcaaggcgtgttcttggcggagtttcttgggagccgcctctcgtcctggatccgtggcggccggcgacatcctgggccggggaagggtttctcggatccggttcttgctaatccgatcggaatccgagcggatggggtcagcgatggat

SEQ ID NO: 36894 - DNA, 453 bp, Oryza sativa
  Clone ID: uC-osrocyp036f07a1
cgacaaatgtactgcaaattttcactgagggggcacggtaacaatacatgaacgggtgaacccgataaagtatatatgtacatcgatgaaggggcaaacaacaaaaaaaaaaaaaacgactccctacaaaattgctggctgtgtgagaacagccgtcataaggtatttacacagcaggaaacaaaaagcctgcccattatcatcatcatctactcattaggttccagccatttcttcaggttgcaaagggcctctgaagacaggctcttgcaacatctaaccctcctgatcggcgcctgctccgaagacggtgaaccaccaccgagctcagatccaaagcagatgactatcaccgtgaggttgtcaaaggtctggagcctcttcgcctccatggcaagctccctcgcgcacctttgggggtcatcgtgtcgtcggagccccttgcggactatg

SEQ ID NO: 36895 - DNA, 200 bp, Oryza sativa
  Clone ID: uC-osrocyp036f07b1
ttctttctcctctttgtgttcacgcaagaagaagaacaagtctccgtgttcgtgttcgttgtatgttttccccggaaagaagctttgattgcagccgagtcaaaatctttcgagagagagtgctttgcgtgtgatcgagagaggtgttgttggaagcttggttggttgggggagttcttggtttggtttgtggggggtgg

SEQ ID NO: 36896 - DNA, 501 bp, Oryza sativa
  Clone ID: uC-osrocyp036f08a1
aagtatgaataagaagctggcatatacttcggctagtagcattgcaacgcaaacagtatgacaaggtaccacgcattgtttaagagctaagacaaagacaaaactgatgcatccaacgtaccaaaaagaaagcgaacagcagcagtcagatagctatgagaagagaactaggagagggataactagaagggacagaatggcatccatgggtccatgacgtttagtcgacctcctccatcttgctctcgccggcgtcgtcctccagcggcggcatgtcggcgtcagcctcggcggactcgtcctcgtcgatgctcaggccgagcttgagcatgcggtggatcctggtgccgaaggtgttggggtcctccaagctgaaaccggaggtcagcagggcagtctcgaagagcagcattaccaggtccttcacggacttgtcattcttgtccgcatcggcacgcttgcggagctcgtccatgatggcatttctccgggtgatctcca

SEQ ID NO: 36897 - DNA, 67 bp, Oryza sativa
  Clone ID: uC-osrocyp036f08b1
ctaaccctagccgccgtttcagccgcagccgcagccgcgcgtcgtctcctccgcccgcgagctcctc

SEQ ID NO: 36898 - DNA, 395 bp, Oryza sativa
  Clone ID: uC-osrocyp036f09b1
ggtttatattaagctagtcgtaatttttatacttttggcataatggttgtcggaaaaatttaagtatttaaatttcccgaagtctgttgatctaacttggtaggttggatactgtttcattagtatctttttatgctaagtttgaggagaaattttatccgtaacagatgatatctggttccgtcagaatagtttagcacagcgactgctggtaatggtcggcacccggataaactggtgccgatttgaattatcctaatattaatttttaaagtatggctttaaagcagcctaatttagttttttcgttatagataaagtgttaaaatttaacttgggatatttttttctgccgttttgggcttattatggtccaattatttaattgttgaatt

SEQ ID NO: 36899 - DNA, 498 bp, Oryza sativa
  Clone ID: uC-osrocyp036f10a1
ataggatcaaaacatttctattaccacaactttttaaggatggaattgagtagcaatactttcaccccaaaatacagtttagcgacaatatcttagaaaagccgcttgctttgccgccatggctggcaagctgagcagagcagctaacacaaagaacacgagatcactataaaccaaacggcaacgaacgaagaaaatacagggtcttttttgtctgaagatacacgaagcggttcgttttcttttatttttagtctcctctcctcctcgatgatgggtgtatggcaatggcaatggcgatgggatcttggcttagttgatgggaaggggctcgccgttccactccttgaggcagtcgagcatggggtcgatgagcttgccctggctgatgccgaggaacaccttgttgcactcctcgccgggggacttgagcttctcgccggtgaggaatacgcagccgagctcctcgcggacgaagcggtagagcgggaacgaccg

SEQ ID NO: 36900 - DNA, 488 bp, Oryza sativa
  Clone ID: uC-osrocyp036f10b1
tcgcttccttctcctccggctcttcttcagtatcgaatcctctcttctcctcgtgcccaccaccaccaccgtagcaatggcgggcaacgggccgatcaacaaggaggacccgctcaactggggcgcggcggcggccgagatggccggcagccacctcgacgaggtgaagcgcatggtggcgcagttccgcgagccgctggtcaagatccagggcgccaccctccgcgtcggccaggtggccgccgtcgcccaggccaaggacgccgccggcgtcgccgtcgagctcgacgaggaggcccgcccccgcgtcaaggccagcagcgaggtggatcctcaactgcatcgcccacggcggcgacatctatcggcgtcaccaccggcttcggcggcacctcccaccgccgcaccaaggacggccccgccctccaagtcgagctcctcaagcatctcaacgccggaatcttcggcactggctccgatggccacac

SEQ ID NO: 36901 - DNA, 477 bp, Oryza sativa
  Clone ID: uC-osrocyp036f11a1
gcagtaagcttccttacggaaaatatgcagtaacttacagcaatttccgttgacaagagattcactcaccatgaatggatgagtcttaagtaaaatctaatataggatggtgctggccacatcttccaacccaccatagttcaactaaaactaaaataaactaaatctcacttttaagggtacccgcagatcagcctgcacccatctgtactcggtgctcatgaattgctaacaccgactacagccttcacaaagaattttgcactatattttctatgaatggttgctatactggattcaacaaccaaatgaaaaaagcttacatgttgcagcagccaaaattgatctacagaaaaatggaaacaggggctccctcggttaggcaacaaaacttgcagaggtggtgaggcgagcaaccaacaggtcaatcggtaaagggaggaagaacacaaaaaagagttacacgttttgcgatca

SEQ ID NO: 36902 - DNA, 502 bp, Oryza sativa
  Clone ID: uC-osrocyp036f11b1
tatttgttggtcacaagcactggcagtgtgaagataggggatttcagtgttagtcagatttttgaggatgatgatgatctgctttggaggtctccaggtactcctgttttcactgcaccagaatgctgtcaaggttcagcctaccatggtcgggcagctgatacatgggcagttggcgttactctgtattgtatgattactggtcactatccatttctaggagataccttacaggaaacttatgataagattgtcaatgatccggtgcaaatacctgacaacatgaacccccaacttgctgatttgctggaaaggcttctctgcaaagatccagcaaatcgtatcaccctgcaggctgtaggtgagcatccttgggttgctggggaccaggggccagttgttgaatacttctgtagatgtgggtttggccgaagaaagagagatgatcttaagggagaagtacaatagcaaaggcttgttcacagtttatcatccgatggtt

SEQ ID NO: 36903 - DNA, 93 bp, Oryza sativa
  Clone ID: uC-osrocyp036f12a1
tttggttttttattatttttggtttttttttttttttttttttttttttttttttattttattattttataaacaaaaaatttataatttaat

SEQ ID NO: 36904 - DNA, 392 bp, Oryza sativa
  Clone ID: uC-osrocyp036f12b1
tttatctgaggccgttggcttggaaatgagaggaatgggccaagatactgcatatcatcctggtctttatttaacagctgctcaaagagaggcagttgaggcactgattcaagaactcccgaagttcagactgaaagctgttcctacagactgcagtgagtgtccaatctgccttgaagaattccatgttggcaacgaggtccgtgggctcccgtgcgcgcacaatttccatgtggagtgcatcgaccagtggctccggctgaacgtcaagtgcccccgttgccggtgctccgtcttccccaacctcgacctgagcgcgctcaacaacctccggccatcctccgagccggaccggtcgtcggccagcgaggtgacagcggcgacgatggcgc

SEQ ID NO: 36905 - DNA, 361 bp, Oryza sativa
  Clone ID: uC-osrocyp036g01a1
agggaatagtaatacaaacaatttatattttgaacaataaacacagtacaaattctagaaaaagcagtctagccttatcatacaatggaaaagagcatgagggctaaaaagacacccattataacatactacaagcaaactgagtagccttcagcagactttattaaataggcctagtgcagtacgacaaatactcatgaaagcaaaacttccaacacagcatttgctgaaaattttttaaccatgtttgggccattgagctggtggtcagaaacaagactatatggttgaccgaccttccactggttatgccaggagtagatcggtagctgcaaggtgaagggggcccatagagactctt

SEQ ID NO: 36906 - DNA, 239 bp, Oryza sativa
  unsure (1)..(239): unsure at all n locations
  Clone ID: uC-osrocyp036g01b1
gtttgtgttctgtgccaccattggatgctggaattgagccatggctgccaagctagctcgcctccacagtctccgcgaacgcctcggtgccaccttctcgtctcatcccaatgagttgattgcactcttgtctaggtatgttaaccagggaaagggaatgctccagcgtcaccagctgcttgcggagttcgatgccttgatcgaagctgtctaanagaaatatgcggcctttgaagaca

SEQ ID NO: 36907 - DNA, 302 bp, Oryza sativa
  Clone ID: uC-osrocyp036g02a1
agcagggcaatcaaaatgagctaaaaggtcatctagcacttgtttgtttaaatccagccgcgatgaggcttggcggaactctattttttccaagtactcgacgcaccactgaaatatacaacattacccaaccccaatccacacttctcgaaaacatcgctgtcacatttgaccggcacatgaaccatgaaaatatacggtagtagctacatgctctgtaaccgagccatttaccacaaaagggtagtagcaatcatagcggccattgtcatgaaggtaccaaccatggcagcagacgaagc

SEQ ID NO: 36908 - DNA, 472 bp, Oryza sativa
  Clone ID: uC-osrocyp036g02b1
gtggccctcgaaccagatgttctgtctgcattgcagttgcctgaatacagataccacttggaggccttactctatgcacatgccgttccaggcaccatcttgtcaagcaacattaccgatggcgaaactgttgattccttgaatgggccattgacgtttactgtcaatgaccagggcgtctttgtcagcggtggtggcttcaacctcagtcaagtggttgaggctgatgacgaggcatccaacggtgttgtccacgttgttgatcaagtcttccttcccaccaacctcgtgcaaaccacatggcaaaaccttctagacgtgcctgaaggatttgatgttctcaaggaattattggaagcgacaaatttgaatgtggccttggaatcgtcggaacctcttaccatttttgcccccagcgatgatgtctttgctggagtcagccaagaaacccttgacgcactcaacttgactg

SEQ ID NO: 36909 - DNA, 368 bp, Oryza sativa
  Clone ID: uC-osrocyp036g03a1
gataaaatcaagcctttacaaccacttattacattgtctttgatacaaagtcaaaagtagcatcgagaagaaaacaatttaattaagcacgccatgggccatggaagaaacaaaactagatgtatatggctgcctgtcgcagcctcacaaacttagcttggatacgcatggcgtgccacatacatgtctttagtgtcacagagtgatttttttggaggcgcccaaggcgagtgccgtctgcctgaactcgagcatcttgtcggcgtcatccggcaagacgcccctggccgcatcggtggcgcggaagaaatccttccacgcggccagcgccggcgttctcgccgggtcgatcatcctgggcccgatca

SEQ ID NO: 36910 - DNA, 482 bp, Oryza sativa
  Clone ID: uC-osrocyp036g03b1
agtagttcgagaacgagacgtggcaatggcgggagacggcgagctgaagctactggggatgtggaccagcgcgttcgtgctcagggtgcgcttcgtcctcaacctcaagtcactgccgtacgagttcgtggaggagaacctgggcgacaagagcgacctcctcctcgcctccaacccggtcaacaagaccgttcccgtcctcctccacgccggccgccccgtcaacgagtcgcaggtcatcctgcagtacatcgacgaggcctggcccgaccgcccccccgtcgtgctgccctccgacccctacgagcgcgccgtggcgcggttctgggcggcatacgtcgacgacaaggtgcggctggcgtggctggggatcctgttccggagcgagacggaagaagagagggcggcggcggtggcgcatgccgacgcggcgctggagacgcttgagggcgcgctctgtgagtgctccggggggaagcccc

SEQ ID NO: 36911 - DNA, 515 bp, Oryza sativa
  Clone ID: uC-osrocyp036g04a1
ctcagaagtcagaactactcagaatacaggtttaagaattgtgtaactatttattactcatcacttaggtacttcctccattttatattataagactttctagcattgtctacattcatatgtatattaatgaatctagacatatatgtatgcgtagattcattaacatatatatatatgctagaaagtcttataacctgaaacggatggagtaattacctcaggttggtacacatatgtacatgcacgaatttcgatgcacaaacacaagcagagctgggtggttgaccgttgacacagccgaagctaactctctacgtgttacaccatttctctcttcttgaacaggttgatcgatctcacttgccggcggccatggcgtcgtagaagcggctcctcctgacctcctcgggcgggatgaaggcgtcggggccgagcccgggcacgttgaacgccacgtcgtcgatggtccacgactcctccatcgcgttacgacgcgggcggcgcgaacgccg

SEQ ID NO: 36912 - DNA, 60 bp, Oryza sativa
  Clone ID: uC-osrocyp036g04b1
cttactcttgggggcggaggagccgggccgggcgcggcggaagtcgtcggtgctgcaggc

SEQ ID NO: 36913 - DNA, 480 bp, Oryza sativa
  Clone ID: uC-osrocyp036g05a1
actgacaaatcatgtttatttatgtaaccctgtgtagtagaattttcaataagttacacaagaaaatccgacaaatataatgtacacctgtgtaaaacaacatgcaggaaatggcttccattgacagcatggcctgcactcactcaaatgcacaagtactgtactgaaactactgaaagttttctaacgcctctctttggggaagcccaggagggcaagaatcagtgcaaagaagctgccgtttatcagtcctctcaggatcttctgcttctcaatcgtgtaaggtgggtacctagcagttgcctcccctccgaagccgcggatcaggacggccttcttgtgggtgaaacaatcgaagctgaatttgccatggtaggagccgatcccggtgtcgccgactccgccaaatggcaggtgcggattggcgagatgcagggcaacattatttacaagcattcctcctgctgggacattggacac

SEQ ID NO: 36914 - DNA, 393 bp, Oryza sativa
  Clone ID: uC-osrocyp036g05b1
ctcgccaagcctcgcattttgttttacctccacgagatatcattggcaaaggcagcctgcacatttgccttgaaggggttgaagaattggatgaaacctgagaaggtacctgccgccctcacgacattcccatcaactgcacaaattgtgtcagagcctcttggtgtcgtcctagtcatctcagcatggaactaccctttcttgctctccatcgacccagtcataggagcaattgctgctgggaatgccgttgtgctgaagccatcagaaattgcaccagccacctcagcattgttcgccaagctgctacctgaatacgttgatagcttttgcataaaagtggtggagggaggcgttccagaaacaaccgcactcttagaacaaaagtgggat

SEQ ID NO: 36915 - DNA, 528 bp, Oryza sativa
  Clone ID: uC-osrocyp036g06a1
aaaaattgtacatgattatcattgggtttattttttgtttctttctagaagtccagccaaccgctataaccataccgcataacgatctatccatcgttccccctcttaatcctcattgggattctatttgggttttttttcaaatttgtagatgtcccatcaaccgtcaccactcaatttctttacaggcatgaccatgatccaactgcttatattttttaatccgagaatttgtaagtcttgagagcaaacgtagagacttctttttacattactttattaaaataatagatagaatattttatttatataaaactacatcgatcaatatacaccattaaaatttagatcctttaaatacttcactttttattattaatatggtgatttccgccgcttctcagcattgccccattctcggagtatgagctataacatatggaccctaaatacagagaaagctattaggggatcttgttactaagaaatttattttaaaaaacatattgcttctaaagattatgcgat

SEQ ID NO: 36916 - DNA, 432 bp, Oryza sativa
  Clone ID: uC-osrocyp036g06b1
cttcactgttctatatgcatatgtgtgggtaaaggttcatgacagtctggggtcagattcttaaactacatcatggaaatggaaacctatgtatcgattagactgactgtgtttttctattaatggggataaactgggcagctcatgttctcaatgtaagagtatatgccctcataaaattttggggaagatatgcttcagcttatttatcagagctttcttgtcggtaattgacctggtaagtttattctacttgcgtcaagtggttcaatggttgtagtgccctttcgtataattttcctccgtttaattgcctgtaaaatttccggctttggtcttacttaacctggacgtgcacaaattttcggtttttttcgggtccgggattaccttggaactttgcgcaactttttttttcaggcttgcaatttt

SEQ ID NO: 36917 - DNA, 430 bp, Oryza sativa
  Clone ID: uC-osrocyp036g07a1
gggctacaataatcttaccaggctactgctataatttagcaagatgaaacaaaggaatgtcagttaaggtagataatatattagactcaattaaacaggggctatttacaaggaggtggcagcttagtgctgagagagaggaagtgcagggtgggagggctgagcttacttttctacgcataccaacatttatatggtaggactggcggctgacaacttacctcaccaaaatagaaaaccaaaactgcagcaaataagagtgcaacttgaccaccaaggacaagcaccatctacaaatagggtactttgagcttatccaatacatcaaagggggaaaaaaagcattaactccactacgaaatgcattttcttataacgatgcatcgcgttcttgtcttccatgttacttcaaaagacgttaccagatggg

SEQ ID NO: 36918 - DNA, 338 bp, Oryza sativa
  Clone ID: uC-osrocyp036g07b1
gtgccgtcagcctccaacacaagagctggtggccaaggatctgcacggtgtggaatggcgctttcgtcacatattcagaggtcaaccacgaagacaccttttgcagagtggctggagtgtgtttgttagtgccaaacggcttgttgctggggatgcctttatctttctcagaggtgagaacggggaactgcgtgttggagtcaggcgtgcaatgaggcagcaaactaatgttccatcttcagtgatatcaagccacagcatgcatcttgggggtctagccacagcatggcatgctgattacacagggaccatgttcactgtctactacaagcctaggc

SEQ ID NO: 36919 - DNA, 93 bp, Oryza sativa
  Clone ID: uC-osrocyp036g08a1
aaaccaaaacaacatgagtttactaaaatgtgagctccataacataggttgagcaaatgatagacacgagagaataaatcgacctgatggaca

SEQ ID NO: 36920 - DNA, 202 bp, Oryza sativa
  Clone ID: uC-osrocyp036g08b1
tgtatacaaatttgggcagagcgattgcgatcgaatttcacccagagtccacacaaactttcgattcgatttctccgatctcgcagcggtggcggccatggcgcagaggacgctggagctgacgctgatctcggccaaggatctcaaggacgtgaacctcctctccatgatggaggtctacgccgtcgtcttgctctccggc

SEQ ID NO: 36921 - DNA, 114 bp, Oryza sativa
  Clone ID: uC-osrocyp036g09a1
ctctaattaattaatatttacttgggggaaaaaaaaaaaaaatttaaaaaaaaaaaaaaaaaaaaagaggggtccacaaaaaatgaaaaatacatgacaaaccccttctaaaaa

SEQ ID NO: 36922 - DNA, 506 bp, Oryza sativa
  Clone ID: uC-osrocyp036g09b1
ctagaccgacacgctggacccggcctacgccgcggcgctcgaggagcagtgccccatcgtcggcgacgacgaggcgctcgcctcgctggacgacacgccgaccaccgtggacaccgactactaccagggcctcacgcagggccgcgcgctgctgcacacggaccagcagctgtaccagggcggcggcggcggcgacagcgacgagctggtcaagtactacggcgagaacccggacaagttctgggaggacttcggcgccgccatggtgaagatgggcaacatcagcccgctcaccggcgacgacggcgagatcagggagaactgccgggttgttaaccagtgagtgatcgatcgatcctggtgtggtcaagcgacacacgacacgagtcatcgccacgaatttgcatggcacctgtggtagctggtggattcttgaagggtgtgcttgcatgtacttctgattttgtgatggcctgctcctgtatttgaattgtttgaaaaatatt

SEQ ID NO: 36923 - DNA, 432 bp, Oryza sativa
  Clone ID: uC-osrocyp036g10a1
aaagctgctaattcctttaatttctcctagctaataaatccttcacaactttaacttgatcaaatcaacaatggcgacatgatgatcagaagaaccagctgccactggccgcctccacctcctcctgctgcctcgctccggcggcgagcctgatccggttgccgccgccgcgagcgaaggagaaagacgacgacgccgaccgccgcagcccaccgcccggctcgccgtccgacctgaagctgccggaggagctcgagccgccggagccggacgaatacccgccgccgccgcgtttcttgctgctgcctttcctccggagcaacgggagcgggaagcacccgtacgccggcgccgccgcgggctcgtcgtgatcagcttcgtgggcggcgccgaacaagtccggcgccgtggttggcttggggagcgaggtct

SEQ ID NO: 36924 - DNA, 303 bp, Oryza sativa
  Clone ID: uC-osrocyp036g10b1
ttgaattgaaagatcatgatgagaaatcaagaagagatcgagaggatcgaagctgtaatctccgtagagatggcggcggcggcaatggatgactcgttcaggagggcgggggcgataccgttcaagtgggagatctgcccggggacgcccaagcacgccaggagcgcgagcgcctccgcggcgtttgtgtcttgtttttttcaccttttttctcctcttccttttcttttttcttttttctttacttcatttttttttttctatcttgtacttcttctctctcatcttttttcatctttcttt

SEQ ID NO: 36925 - DNA, 90 bp, Oryza sativa
  Clone ID: uC-osrocyp036g11a1
ttgggttttttgacaatcaggggttcttattttttttctaatctaatattatttaattgcaaaaagcctcaatttgagcctacactttcc

SEQ ID NO: 36926 - DNA, 74 bp, Oryza sativa
  Clone ID: uC-osrocyp036g11b1
caatgacaagagtttctttgtgcgcaacgccctcgacctaatttcaaacgtgaaatatgtaggacggcacccta

SEQ ID NO: 36927 - DNA, 518 bp, Oryza sativa
  Clone ID: uC-osrocyp036g12a1
tttgtttagcaccgaaataagaattcaattagcatcacgcaaatgtttacaaaagtttatcattgctctagcaagattgcccaagacattagggcagaccaaagtttagcatgccaagagttaaactctatattaatacatggaaatagctcacaaaagttgccacacataacatcttccagtttttactttgcatagaagctccactatcccttcggcgccggacgcttgccgacagctttccaggtgactttcacagaaattgtgctaaaatcaccaagcttcaccacttcatcttcaattccatgaaaaccagcaccaaatctgtgctcccatcttacacggggcagcttctcaccaagaccaatacctgctggagacccttcgatacaaagatcaaggtgactacgtcgcaccaccgccacaacagaactaattctatgaccagattgtgcagcaccttggaagagaggatcacatcgctgaagccactagttttggcatataacttcaaatta

SEQ ID NO: 36928 - DNA, 499 bp, Oryza sativa
  Clone ID: uC-osrocyp036g12b1
tgtacgcgtgggattttttatgtaggaaagcaccgcccttttacagttgatgattttcccaggcttagtagtgaccattctgtgcagactgatgcactctttgatattccacatcttcgccttggaggcccgtcaccgctcagtcttttccgtgcattcaatgatcctctcactgataaacgcaggcattggtttggttcttattaccgactcgatgatgaatctgaaatcagtgtcgacagcgctggggccgttgattgcttaaatgggtgtaggtgcctttcgaagaatttgctccagttcattgacctgaaaatctccggctatcgccatactcagcctggacgtgccaaaatcttcggcttttttgcggtgcgggatgacttggaacctctgcgcaactatgtctttaggcatgcaatttacaattatgaagctgtatctgtgaagccaaagacgggtatggcgtgtttaccattgactagccctgcttgaggta

SEQ ID NO: 36929 - DNA, 320 bp, Oryza sativa
  Clone ID: uC-osrocyp036h01a1
agggatcacttattcattatagttcttccatgctgctctaccacagcaaaacgtttcagacaccatcaaaccagacttaaggatacacattacaggtaaatagtacacaatgaaacgggacacgaccaaggaccagaccagacaaccatagctccattggggaagacaaataggcagacttgtgaaccctagaacagcagcagctccatggctgaggacttactggccaccacggaggcggagcaccaggttggagtgtggacttccttctggatgttggaaatcccgcaggggtgcggccatcctcaagctgcttacca

SEQ ID NO: 36930 - DNA, 299 bp, Oryza sativa
  Clone ID: uC-osrocyp036h01b1
ctgtatccccaaaatcgcagagaaaaaaaaatctcccctcgaagcgaagcgtcgaatcgccttctcaagatgcagatctttgtgaagaccctcaccggcaagaccatcaccctcgaggttgagtcctcggacaccattgacaatgtcaaggccaagatccaggacaaggagggcatccccccggaccagcagcgtctcatctttgctggcaagcagcttgaggatggccgcaccctggccgactacaacatccagaaggagtccacccttcaccttgtgctcaggctcagggaggcatg

SEQ ID NO: 36931 - DNA, 477 bp, Oryza sativa
  Clone ID: uC-osrocyp036h02a1
acttgtataggaaagaaatacgatagcattgggatagcaaatatagtcttacaagttttgctctacgatggattgtacaaaatatatgttgaaagctagtgtcaccatcgtgcatagattctggaatgtttacagatatatgtattggaacagtgggaatgcatgttagaaaaattgagttccaggtggtgcgccttgagcatgcatattttctctcttcagtctttctgccttcgccagtttttctgccctgactgtctgtgcattgcgtataagaacactattttgtggggtgcattcagcactctgagcattttcagacaagtttcctgtttttggaggcctgcctcttcttttaggctgagtattggcaggaatagttgcatcctttcgaggatacatagttgcatcctttcgaggccttgccctttttctaggttgactactagcgttaacatatgcatcgttggatgagat

SEQ ID NO: 36932 - DNA, 418 bp, Oryza sativa
  Clone ID: uC-osrocyp036h02b1
gttcctcctgttgatcatcgttttggtgaatttctagaagggcggaaagtaaggaaaccttttggggacaagcattttgtagggaaagtggacaagtatgatagtgaaagtaactggtacagtgttgtctatcaagatggagaccaggaggatctcgagtggaaggaagtggaggagatcatgctgccattggacataactatcccgctgaaaacacttatttcggataaattcgcacttcaaaatacagctcctgtcttcaaacctaaggtgggtagaccaagaaaagtctatgctataacggatggcaacacaaacaatgctatggaagatcagatgatgactggagcgggaaatgaacattaattcaataacttactaagcgttggttcagcatctacattcaacgatgcatatg

SEQ ID NO: 36933 - DNA, 411 bp, Oryza sativa
  Clone ID: uC-osrocyp036h03a1
gaagagctgaaaaccaaaatttagttgctactattatttatttctatattttacacaccaatctaaaatactattgttcctcacaaaattaaagcttgcaaagtcacaaggatacaagatccacacacacaatcccacaaactttacacaggcactttgcaggcttgcagcacaacgcccagttgcagctcaaaagcaagcaaggcaaacggacgtctggcccacatgtcagcctcacagtgaaggtgaaacaccatatggcatagtgcagagttcagacttcagacaagctcaaacattcagagttcagttcagcaagatcgtcagtcgagcagaagagaggcctgcctgaccaggtggcctctgcgctcgaacacctgcctcctgcgcctttcgaggtccctctccacg

SEQ ID NO: 36934 - DNA, 85 bp, Oryza sativa
  Clone ID: uC-osrocyp036h03b1
agaatgaatgagcgcgccgcgccatgtgcggcggtgcgatcctcgccgatttcaccccggcgagggtgccccggcggttgaccgc

SEQ ID NO: 36935 - DNA, 146 bp, Oryza sativa
  Clone ID: uC-osrocyp036h04a1
gatgcaaagctatatatagctgaaggcgtgcaaccaagaacatgcatgcctccgcacacacaagtaccatttctcacaccaaacatactacgtacacatagatataattacagcaacatcagatatatataaacgcgcttataatt

SEQ ID NO: 36936 - DNA, 146 bp, Oryza sativa
  Clone ID: uC-osrocyp036h04b1
aattataagcgcgtttatatttttctgatgttgctgtaattatatctatgtgtacgtagtatgtttggtgtgagaaatggtacttgtgtgtgcggaggcatgcatgttcttggttgcacgccttcagctatatatagctttgcatc

SEQ ID NO: 36937 - DNA, 447 bp, Oryza sativa
  Clone ID: uC-osrocyp036h05a1
acaataaaccaagtttaagaaccttgatgtatgctttgcaagtttgtggatctaagtgaaacctcctgacaagtttaaggactgccggtgcattttactcaaaaaagaatgtgcagcaaaatcaacagcatgtgattagcttccattaactcggaaaggccacataatattctccatgcgactgcaagaatattgtcgcctcgatattcatgtccaacaaaatcaacagccatgtgattagtacagtatgagcatgtggcttttcaacgagctcagcattttccatgatatttccatctagtgctccttgtatatttatgattcaatcgtaatcttcagaatgtttggacctatatgatgttagactgactgactctcctccagaaggtcagaaactccccaggtgatctgatatactcacaacttggacgtggcattcagcaaaat

SEQ ID NO: 36938 - DNA, 315 bp, Oryza sativa
  Clone ID: uC-osrocyp036h05b1
ctgtgatcatcagatcagagcaagaggaggtagctcgatgcgcggggcggcggcggcggggaggagatgatgaagccgcagcacggcggcatggcggggcatggaggaggaaggacgaggagccccttcctgacgtcgtacgcgctcacgctcgccttcatcaccttcgtctccgtcctctacttcaaggacttctcctccacgctccaccaacccttcctcacccgccctcctccccaccgtcgtcagatcgcccgcccccgcgccccgagccaccaccatggccggcggcagcagctccggtggcggcgatgt

SEQ ID NO: 36939 - DNA, 522 bp, Oryza sativa
  Clone ID: uC-osrocyp036h06a1
tttttgttggtggagtacacgacacaaccaactaaattgaacactattaatacatagtttaagttacatcatgatttattatgactggcaaagacccaaaaaaaaaaaaaactctcacacaatgcaaacaatagtagagtttagatgcagtctatacctgactagaaaggattatgtagtagctgcagaaggtcgatgagcgtgacaaactgtaaccatatacgacgcatacacgacgtatattatgtatcacaaacgacgtagaaaattaacagatacggtacaccatgacttaatcaaagaaagctgattactatgctggttggacacttgctaaccgcagggcaaacttaaggctacagcgacgacatcagttaaatctaggccaacttagacgtaaatggttatcttgcgttttttctcttcccttgaaaaaaaagcattgagaagctttcaccaacatgtcatctaaacttgcaattagcttagatttattggattgaagtgctcttactgccgata

SEQ ID NO: 36940 - DNA, 404 bp, Oryza sativa
  Clone ID: uC-osrocyp036h07a1
ggggcaaactggagatacactgccagctcattctccttatttttactagtaacagcttaggattaagaacaaactgaagaaacactgcagtattgtcagaaaacgtagcagaaacaaaggattgcgacaacacaaggtcattgactgagcccaaagccctcgactaagaagaaatacagggattcatccatcagttggggtggggtttgaagggctaggcatagcgagtagctatgaacagtgcaggatttacaggagtacagactatttggttgttctagactttgcccttccagaggcactcaagggagggaccattgctattgggattgcctgcatgagtattgttcagtaagagatccctgagatgaggtggtgggtgaagacccatgggagaagcacgt

SEQ ID NO: 36941 - DNA, 205 bp, Oryza sativa
  Clone ID: uC-osrocyp036h07b1
gttatagcttctaatcactagccggcgagcgacaccgacgggcgcgcgaggcggcggctcacgagcagcgccaccgtgggcgcgagcggtcggccggccggacgccaaggagagtggccacgtgtttttatcaagatggagaccatgagggtctttcgtggaaagaagtggaggattatcatgctgtcctttgaccttaattttc

SEQ ID NO: 36942 - DNA, 365 bp, Oryza sativa
  Clone ID: uC-osrocyp036h08a1
aacatacgcaaactgatattatcacaatgttagccgatgacaatggaaagagtaatctaggtacaagcggatcattgacggtggagacaagacattggttggaccacaacacccaccagtggcgccaacaaggagcgctatccgttataggacgagagaaaaagtaaaacatcacgatgtgaagtgaaactgaataattttagtagacgatgatgatgatggataggctccttaggacgcccgccgcccttagcgtcttgctgctcccatcttgtccactggaagggtcactcggcatcggattcatcctctttcgtgcccttgtcggaatcctcattattgacctcggacttggacttgcagat

SEQ ID NO: 36943 - DNA, 291 bp, Oryza sativa
  Clone ID: uC-osrocyp036h08b1
tctcttctcttctctggtggtgtgggtgtggccctgtctcccctctccttcctcctctcctttcccctcctctcttgccccctctcacaagagagagagcgccagactctccccaggcgaggattcagccatgaagggggccaaatccaagggcgccgccaagcccgacgccaagttggctgtgaagagtaagggcgcggagaagcccgccgcccagggcaggaaggggaaggccctgtaggaccccaacacggcctagaaggctcccttcggtttccttggttttatgga

SEQ ID NO: 36944 - DNA, 418 bp, Oryza sativa
  Clone ID: uC-osrocyp036h09a1
agcgcggcaataaaacattgcattgaattctgaacgataaacaccaggaaccggcgtttatttgaggcaagcactgcccaaaatctcgcaaaagtactgaaaccttagacatagtacacatccatggcaaacatggatgccaaatgacaactacagaaaattatcaaattcgaatgcagctgacggcttctcctgctgaagatgcatattttcccctccattacttggatgtgctctctccatcgacagccaatgggacggcgctggccaggctgcggtatttcagagcatagaacatctcaatgtaacggcgagtctcgcgcctctcaaggttgcttacgtacttccagaatccatatacaccagtcaaggtcatcagcctctcagagtacagcttccaggtgtacttctcgtaaat

SEQ ID NO: 36945 - DNA, 372 bp, Oryza sativa
  Clone ID: uC-osrocyp036h09b1
ctcgtctctgaccaccattggttcctgaaattgagtcatggctgccaagctagctcgcctccacagtctccgcgaacgcctcggtgccaccttctcgtctcatcccaatgagttgattgcactcttctctaggtatgttaaccagggaaagggaatgctccagcgtcaccagctgcttgcggagttcgatgccttgatcgaagctgacaaagagaaatatgctccctttgaagacattctccgggctgctcaggaagccattgtgctgccgccctgggttgcactggccatcaagccaaggcctggtgtctgggactacattccggtgaatgtaagtgagttggcagtggaagaagctgagtgttctgagta

SEQ ID NO: 36946 - DNA, 492 bp, Oryza sativa
  Clone ID: uC-osrocyp036h10a1
aaggctaagtttatttcaattggatcatatgcgtcagaaaatcccaaggaaggatacaacttgaggaaaatttgatggtgcttaaaacaacacttgtatacgatgctcatctcgatcgatcggcttgactgcctacaatcaatacctgttgttaagcttatcagcgttcctaaaacaaacaaacaaacatacaaacaccaactccacaggcagtaaactttctatccaaagttgaactgaaagcctccaggaaagccgcccccggggaatcctcctcctccatggaatccaccatcgtaatggaatgtgtattgctggccacctcccccaaaaggattgaaaccaccacctcctcctcctcccatattcatctcatcaagatcctctcctcggtcgtatcttacacgtttatcttcgtccccaagaaccttataagctgcagcaatttctcgaaacatgttttctgcttcttctcgcttatctacattttta

SEQ ID NO: 36947 - DNA, 437 bp, Oryza sativa
  Clone ID: uC-osrocyp036h10b1
cctaatccatcccatccggcctcggcctcggcctcggatttcgcctcctcgcccgccgcttccgccgcgagcagaggtggcgcccggcgtcctcctgcttccaccgcatcgtcgctcgccggcagaactaagagagcatggtggcgatggcgcggtggccgtggagggtgctgctgccgctgcttctccttcactcctcccccgtcttcttcgtcttcgctcaagaaggccaagataatgatccctctactttgttcaaacgagccttagaaatgatgaacctaaggaaatatgatggatcacttggtctgctaaatgctgtgctggaggttgaaccaaatcactcagaagcttacaggcagcgtgcatctgtgcttcgtcacaagtgcaggtacaaggaagcggagggtgactatagcaaatacctggagctaaaa

SEQ ID NO: 36948 - DNA, 288 bp, Oryza sativa
  Clone ID: uC-osrocyp036h11a1
tggggttttttaattttgggggttaatttttttcaaaacccccttattcgaacatagtcccctgtattatccaaagaatccacaccttgcagcgcatgggaaataaaaacttttacacattgacaaaagcaatggtatattttacccggtttataactttggaccataggcacaaagaatgttttggacggggtctattgagccatggtggatccaatacaaattccggatgctttgggaccattttcgattgttttactaaagaccgaggtgttttatttgggtccc

SEQ ID NO: 36949 - DNA, 399 bp, Oryza sativa
  Clone ID: uC-osrocyp036h12a1
tttgttttttttatctggggggattatgttactcgtgcgatgccacattcagataaatttggagtacaaatttactaaaaataacaaatccccaaattgtacttgcactaacaccaagatattacaaaaagtaaaaaaatcaagcctcacactccaaagaagactcctccctcgcatcacttgtcggcgtggtcgcttcttccctccccccagccaaatttcgtcaaattcaaacagaaaccatttttttacagcatccgacggttgattttggtctgaatttctactacactccaacgtgaaaaaaaaaaaaaaaaaaaaaaaaaaaaagggaaaaaaaaaaccacatttggaaccaattgtgtaaacttataacccagggaattccgggccttaacc

SEQ ID NO: 36950 - DNA, 239 bp, Oryza sativa
  Clone ID: uC-osrocyp036h12b1
gttttagatcgcgagcgacgccctgacgcttgggaaattattgatagcatacgtcggacggcaagacgctaagaagcccttggaagagcttgtcttcaatttgacgctctcaaacatcgtttagtacgctggaaccatgcccgatactgatgtaatctagatcactactgctgtgatcccaacactgtacccagagctcgattatttctaattcattcatgtttatcgaaacctaccat

SEQ ID NO: 36951 - DNA, 505 bp, Oryza sativa
  Clone ID: uC-osrocyp037a01b1
tgcctcagccaaactgcccacctgacaatgtctttggtctgtatcgtagggaaaggcaggagaacgcaagccataagtctttgccatgtgctttctaaggtacaatggtgttagttggtgtgtggctgaatcttcttaataatcatctgatttttttttattttttttttatttttttgttttgttttaattgatcatttattttatgttctttcttttattttatatttatttttcttgattaattgtttttttttttttttcttttttttttatattttttttttattttttattttaattttatttttttattattatttttttttttatcatattattaatatttattaattatatttatttatattgatttattttttttatttagtttatcttttttactagttctttttggccaccatttttttaataatttgatattaatatctcatttatttttttaataaaatattctatttttatgtaatattatttatataaa

SEQ ID NO: 36952 - DNA, 368 bp, Oryza sativa
  Clone ID: uC-osrocyp037a02a1
ttttgtttttgttggaattgtgggatacaactattttataaaacccaaagagaggggcaaaaattaatagagtaaatatcagctgttcttcatcaatctagagctccctttgggtatacatgcttctttgttgatgaacaatattatttgcgaacagcttaaatatgtactaaaaaaccatctcatttgaatcaaattaagcaaacgaaggggaaaaattaattgaaagaaagaacttctttttttttggttagctaggttgctatgagcctttgatgatcatgccaccatctgctcctgctccggccactgcgcgaatatgtcgccggcggcgtggccgtccttgacaagagagttcacccatgaca

SEQ ID NO: 36953 - DNA, 541 bp, Oryza sativa
  Clone ID: uC-osrocyp037a02b1
ctgtcccagctccacgctcatatcctcaagcaggccggcgacatgcccgcgttcagctccatggcggacaccacgcagatgcacatgccgacctcgccgatggtgggcggcccgaacaccgcgttcgggctggaccactccatggcgaaggcgatcatgagctcccgcgcctcggcgttcgccaagcgcagccagagcttcatcgaccgcggaggccgcgccccggcggcgcgttcgctcatgtcgccggcgacgaccggcgcgccgtccattctctcggactggggctcgccggacggcaagctggactggggcgtccagggcgacgagctgcacaagctccgcaagtcggcgtcgttcgcgttccgcggccaatccgccatgccggtggcgacgcacgccgcggcggcggagccggacgtgtcatgggtgaactcttttgtcaaggacggccacgccgccggcgacatattcgtgcagtggccggagcaggagcagatggtggcatgatcatcagaggcttatagccacctagctaacc

SEQ ID NO: 36954 - DNA, 382 bp, Oryza sativa
  Clone ID: uC-osrocyp037a03a1
gcgagaggaaacgacgatatataattaagttgatggaatcaatcaaaattaaaggatgcgggtagtagtgaccagtgacagttagcagcggcgaactggcgatccgtttaataagctgtctagttgggattaggaagtcaaaggaacatgtgactgacatatagatcccatcgttcacgggtccacatatcagtaaccgcgtcaggagaaagtttacgttggaggatccgcttccgtctagctagttgtagttgttgctggccgccggcgccggtgaggtgaggtagacggcggcgcgacagacggggcagcgggaggcggtctggacccatggcacggcgcagccccagtggaagcggtgcgtgcaggggaggttcgccac

SEQ ID NO: 36955 - DNA, 455 bp, Oryza sativa
  Clone ID: uC-osrocyp037a03b1
gctttttatagaggtagctgagcaattggcatggccatgcgttagagagagagagagagagagagtgcatgagcatgatgagctctccttctccctctccttaatttagacataaacttaattagctatgccgctcctctctctaatctcccctccaaagattatggttggtaggagatggatgagttcctgatcatcttcttgctctaaaatggaaggtttccaatggattccagcttctgaatcttgcagctagctaggtaggtaggtagctggtagcttagctaggcagtcaggcagatggtgtgttgttgcttctgctgtgatcgctcgcatacgtagataaggttagaggttgatcgctcggtagatggtactgatggccgggatgcttcccggagtggagtgcgcgcggcggcgacgtctccggcagggcggcggagaggcgccgtgcg

SEQ ID NO: 36956 - DNA, 408 bp, Oryza sativa
  Clone ID: uC-osrocyp037a04a1
caccaaaatgctggggccagtttttataccaaaaaagaaatacattttggcctttttttaacatacaacacacacacacatttcagctttcctcagggggacatcttctcttctatgcaaccgtggaactgaatgaacaaatgatctgttgcagggcacaccatggaacctgacaacttgaagctcaccgaatttctgggtttcactcatcatgcataagccagcaaagtagccaacacaatcgaaaataccaaaaccgagagtgtcaatggttgttttgtcagaggacttgcattaggcaaccatggatttgcatccgggggtggcatgacacaattatcaccattgaagtacacgcggtgtgggaaggcccatcccttgtcaaaggtgaagtccttggaatcctta

SEQ ID NO: 36957 - DNA, 453 bp, Oryza sativa
  Clone ID: uC-osrocyp037a04b1
cgcggcgcggcggaccatctcaatttgcctgccgctcctcgtcttccggtggggcggaggagggggacgccgggcgggcgggcgctcgcattccggagcggggagcgcgagctcgatcgggcggggatatggcggtggggggagccgggagctccagatccgtggcgccgtgctgctgctgcgccgtgctgctcgcggcggcgctgctcttctccgcgccggccaccacagaggcttatgatgcgctggatccaaatggaaacatcacgataaaatgggacgttatgtcgtggactcctgatggctatgttgctgggggcacgatgttcaactatcaacaatttcggcacattcaggcacctgggtggcagctgtggtggacatgggcaaagaaggaggtcatttggtcgatggttggagcacagaccactgagcagggcgattgcttaaagt

SEQ ID NO: 36958 - DNA, 337 bp, Oryza sativa
  Clone ID: uC-osrocyp037a05a1
gaagaagaatagttcccttctccattttattcacacatgagataaattcaggttttgaatcatgcatcataatccatgaccaattaattgaccacaactaaattaagcgatgattaaaagtcaccatatacacatggacacaatcgactggagcaacaataatatgaacaccaccagcagatgggagagacaggatcatacagagccaacacatggatgattggattggatggatgacctctcttgcattctttattttgcaattcttgatcgaactgaccgagatcggatcagatcttcttcaccacgatccagtcttcctccccatctgagaacc

SEQ ID NO: 36959 - DNA, 60 bp, Oryza sativa
  Clone ID: uC-osrocyp037a05b1
cgcaggacccgcccggaatttcctgggaggccaccaagtattctatgaacgccagaaggg

SEQ ID NO: 36960 - DNA, 367 bp, Oryza sativa
  Clone ID: uC-osrocyp037a06a1
tttttgtttttttttagtataccaactcactagttcagtttcactagatagaaagcataccacatgacacagcactgcattcttaattacgtacacaccacaagactggagaggaaggactacatcatcgtacagacgccatagatgtctcaaaacatctttattcttagcacttatttaactaggatgcatttcttcagtctcaggtcttagatcacaaactcagaggaaacacaaagttacagtgacaataactcatcacttgtaactggatcaaactactagcttagcagtactaggcccttccatctccttggtttcgtcaggaggttgcttgctttacttgccgcagttggcggggttgcag

SEQ ID NO: 36961 - DNA, 258 bp, Oryza sativa
  Clone ID: uC-osrocyp037a06b1
tcagattctcagagtgagtgttcgtgtgttgggcgatcagggcccactgcccagttcgatcgatccgtgttgatctttgaaagaaagatgtcgtgctgctgatgaaactgcggctgcggatccggctgccagtgcggcagcggctgcggaggatgcaagatgtacccggagatggctgaggaggtgaccactacccagactgtcatcatgggtgttgcaccgtccacgggtcatgccgaggggttaggaggccggcgc

SEQ ID NO: 36962 - DNA, 446 bp, Oryza sativa
  Clone ID: uC-osrocyp037a07a1
ctcaagcagcattacacgtgctgacacatccgcagtctatgatgtccaaacaagctgttgctggtagagcgcaccacagctgctgcttctgtgcggctcatgggcacatagcagacttaggcagcaaaccaagcctgctgctgcatgctgctacataccagctacttgtgctgcctgtgaggcagcgagcgctctgacagtgctgtcagggcgtcctgcttacttcttgcccttgcccttgccgcccttggcctgctcctccaccaggtaggtggtggtgcacttgccgcagtacacgcggtcaaagtgggtggccatgaagatgccagggccgcactgggggcactgcttccgcaggcgggacaccttgccggagtcgtccaccttggagaacttgggcacccggagcttgacctttttgtgcttgtgcttctgctttttgggct

SEQ ID NO: 36963 - DNA, 404 bp, Oryza sativa
  Clone ID: uC-osrocyp037a07b1
tttacggcacaggcgaggcctctgccgagtatcgtggcagccatgcagattttcgtgaagacaggtcagacccacctcttcgaggtgggttcaagcaccactgttgctgatgtgaaggagctcgtgcagtctcgcgagggtgtcgatgcctctgagctgtatgccgtgttcaacggcaagcctttggctgacagcgagctgctgagcctggctggtgttgaggaggagcagaccctgtacatcctgggtcgcctgctgggtggtggtaagaagcgtaagaagaagacctacaccaagcccaagaagcagaagcacaagcacaagaaggtcaagcttcgggtgctcaagttctacaaggtggacgactccggcaaggtgtcccgcctgcggaagcagtgccccca

SEQ ID NO: 36964 - DNA, 286 bp, Oryza sativa
  unsure (1)..(286): unsure at all n locations
  Clone ID: uC-osrocyp037a08a1
atcaaaaaaaaaaaaggatgataaaaaaaatttacttatataaaaaagaaaaagaaaaaaaataaaaaggctatggggggcgtgagaacaaaaaaagaaaagaaaaataccttataaaaaacctgccggtagtaatttttaaaaaaaagagagagaataaaagaaaaattttaataaaaaaagaaaaaaacaacaattttttgtgaaaaaaagttgggggaaaaaaaaaaatttacaggaaaaaaacnggggggaaaaccaaaaaaaagaaaaaaacccccctttt

SEQ ID NO: 36965 - DNA, 265 bp, Oryza sativa
  Clone ID: uC-osrocyp037a08b1
ttcacgcgtccgaaaacgtcgttttttttcttctttttttatttctctctctctctctctctcaaactgtgtttattacgagagttttgataagctagtggtgatggagattgagaaaaataagaaacaaataacagcgtggagataaaaaaatcgacagggagcttgacagattgtttcattctttggtcgtcatacccacaagtacttgtaaatatcatcagttcactgaaagaaaaagtacttgtgaacactgttactagtg

SEQ ID NO: 36966 - DNA, 142 bp, Oryza sativa
  Clone ID: uC-osrocyp037a09a1
ttgtttttttttcttttttttcttttcctttctcctacactctttttgttgaacaaaaataccccttctcgacttattcccaataggtacaccctccaccccctctctgcccacctaatgtaccttgcccccatcccaatct

SEQ ID NO: 36967 - DNA, 515 bp, Oryza sativa
  Clone ID: uC-osrocyp037a09b1
ctacccaatagtgaatataccacaaagctatttatagtctaatggttacaggccttgcaacctaagctaactgattgccttattttccatctgtcccactaactgagcatgcaatcttacagaaatgcaatggcaaaagaaaaaaaaggagcgaaaatagatatcatctgtctcatgccttctgttctgtggtcaaatcaccccatctgacgttgtactttgctgcaaggtagtgagcccctacaggaccgcggcttccataagggtatagctcaggggctatccgcttctcttccagctccttgagtaagggagtgaagagctcccatgcggcatccaactcatcagaacggataaaaagccttcgctctccttcaatggcatcaagtaagagcctctcataagcatctggtatctccttggagtaccttgctgcatagtgaagattcaaattacttctatctagtctcataccaagaccaggaattttgttgttaatcttcaagtagatagct

SEQ ID NO: 36968 - DNA, 443 bp, Oryza sativa
  Clone ID: uC-osrocyp037a10a1
gggtacaacattttctttggcctttctttaaacgcccattggagaaccataataaccctttttggcttattcccaatctgaatacactccaatttctcttttaccccctaatttactctctatctatctctctctctctctttctcagaatatatgcacacaaaagaatatcaaacatttgatggtgaagaagaagaagaaagaaagaaagaaagaaaaaacaaaattaaaaaaaaattactctcacatgatgaactgaactcatctagaagtggtagtagtaccatgtaatgtggccaaccaaattgctagagcagcagcaaataatccagggcaattcaatcatcatcttcatcatcatctcatcagggacaggacacctcggattttccggacatgggtgcaatttttgccaaccaagcaccaccattgcatctgccgat

SEQ ID NO: 36969 - DNA, 212 bp, Oryza sativa
  Clone ID: uC-osrocyp037a10b1
gtcgtcgtcgtcgtcgattgcgaactcgatggatgggggccatgtctgatttcgttgtgggtggtgcaggggagctgaagaagatggtggcggcgcgaacggggctgcatccggacgaccagaaggtgatgtacatggacagggagagtgactccaacgcgttgctgtacatggccggcgacaaggacagttacacgctggtggtattctag

SEQ ID NO: 36970 - DNA, 365 bp, Oryza sativa
  Clone ID: uC-osrocyp037a11a1
gaaggcgattatctctgaactcactcaaaaaatagctcaaaaaatgttgacaatgattccatgagattatcagttggatcccgggaaaacccagaaatttggtaggattttggttcaactatcttgtaatatttaactctgaatatgaagcagaaaattgagcaaacactagagccctactggtcatataactttgaatctggagcagctcaacgagatttttatttgagaaatcactgtatcggatagctttccacctgaatttagcgagatggccttgagcctttttacttagactcatggtttttaaattttccttatttagggaaaaacctttgggtattctttttaacccttgaattaaa

SEQ ID NO: 36971 - DNA, 366 bp, Oryza sativa
  Clone ID: uC-osrocyp037a11b1
gtgccatccaagtatcctatcgaacgcaagatggctctggttgctcaggcctccaccatcgcgcagttcgccggagtggacgcctacggcctgatcaagatgatcgccgaggcggcgcaacagggcgacgtgcctgcagctcgcgcggcgcctcaagatgatcggagatcttctcaagcagctccacggtgcgcagctgatgcagcagccggagacgaggaacccggtggagcagctggaggagacgctccggcgagcgtacctgctcgtccggtcatgccagggccggagctacgtgtaccgctgcttcatgggaggccggcacgccgacgagctaggggaagtgcagagtgagatcgccttcta

SEQ ID NO: 36972 - DNA, 80 bp, Oryza sativa
  Clone ID: uC-osrocyp037a12a1
ttttgttttttttttagaacaccaactcacttcgtcacttttccttagatagaaagcataccacatgattcagccctgca

SEQ ID NO: 36973 - DNA, 454 bp, Oryza sativa
  Clone ID: uC-osrocyp037a12b1
tgtcaaacagaaggtactcaatgaaagtggtgaagtttctggggaaaactaaaaagggccatttaagccatatgaatgaaactgctgatggggccatgcaagctcctcgttataatcaaagtgtccagcgtgctgattcagctgttcggaatttgatgtttcaaggatcaggccatctatttactgaaaaagacatcatcggtatttatagaaccccaatgctagatcaacttgggaggtcccgttatagtcttttccagaaggaggtacaagtcacaaaaaatcaacggggaaatgcaaatgagcgttatgcatggcttgcttgcactaagggtactatggaggagatgatgatgaatggtgctctgaaatagcaaaacctctgagggcccaatgatggcgttggggctcattttgctccagcaaactcctcaatatctgtgttggtttatct

SEQ ID NO: 36974 - DNA, 542 bp, Oryza sativa
  Clone ID: uC-osrocyp037b01b1
gatacaccaaaagttgtttttgcttgcaatatgcattgagagaaagaaatcattgagtcgcgagaagggtactgatcatgcacatgaagatggtatttcaaatagcgtggcacaaaataagactcgtaaaggatcagcaggtgttgtcccctcaatgatgcttctgaatacatttcaagaaatgcatgcaccatatactcaggatgcatttttgatgactgaagatatgcatgaagaaaggctccatgctgctgaagcttttggcaatgctgttggattatctggtcaattggaacgagatgtattatcttctgatatgtctgcttttaaagctgcaaatccagatgctgtttttgaagattttattcggtggcactctcctggtgactgggtgagtgaggacagagcagagggttcttcaggttggccacccaaaggaaggctttctcagcgtatgtctgaacatgggaatatgtggcgtaaaatctggaatgacgctcctgctttacctgtctctgaacagaaatatctgcttgatccta

SEQ ID NO: 36975 - DNA, 389 bp, Oryza sativa
  Clone ID: uC-osrocyp037b02a1
cagaaaatccactgccactatatgatgttacagatatcggctacctgtgtcaatatttacaggatgttacacatctctcatcaaatcgatttcacactacaaaaaacccataaaacgaaacaatcaaaactctttaccattcccatcccaatcttgaatgcatttgctctccaaattatagcaaagaatcaagaacatagccaacccttcatgggatgacgagcatcccacgtttcaacaagcagtcagatcgtttcctttcatggtctcacgaatctatctagctccactatcatcgaacgatgactcggatgcagaatcatctgatgttgagatggagcttgtttcgcatgaactgccgttttcggggtccaatgaaaatgatgttg

SEQ ID NO: 36976 - DNA, 527 bp, Oryza sativa
  Clone ID: uC-osrocyp037b02b1
ctgtttaggaatgggctgtcaaaacaaatgaaacaagtttcctttgtcgacggactctctgatgatgctcaagtttcgagggaagagaggtcattccggttatggattaatagccttggaatttctacatacatcaacaatgtgtttgaggatcttagaaatggatgggtgcttcttgaggtgattgacaagattgctcctggctcagttaattggaaaatggcaaataggcccccaataaaattaccattcaggaaagtggaaaattgcaatcaagttctgaagattgggaaagaactaaaattttccttggtgaatattgctggtaatgatattgtgcaaggaaacaagaaactgatattagcttttctgtggcaattgatgaggtacaatatccttcaattgttaaagaatctgagattccattcaaatggtaaagagatcacagataacgacatactgatttgggcatacaaaaaagtaaaggattctggaaagcattctcgaatggagaagttcaggataga

SEQ ID NO: 36977 - DNA, 392 bp, Oryza sativa
  Clone ID: uC-osrocyp037b03a1
aattaattacatatttttctgatctgtaaacttcccggtgcaacgcacgggcacttttgctaaaccaaacaacacttttggtcaatatacacactctgtaatcacccggtgcaacgcacgggcactttgctagtatatatatatatgtaaccagtaatcaacacgtaggacacaggttttcttgataatttattaagcaagtagcttagtaggagtcgacagcatcaacgaccatagagattgcagcggttttcttgatggggtacatgccgtacagggcgatgccacatagcccagacttcgctgcaatgtcacgcttcatccggatgtaacccattttaccccaccctgttccccacgagttcttaacgatccagtacttggtgttgtcc

SEQ ID NO: 36978 - DNA, 527 bp, Oryza sativa
  Clone ID: uC-osrocyp037b03b1
tttgtaaatagctaataattaagagacgatacaggcgctaacacacatggagatgaaaaatccattggcagtagggctgttggctctgctggtggcagccatggcggtgacggcggcggcgcacgacgacgacgacgtgccattcaccgacgaggacctggagtcggagcagagcatgtggaatctgtacgataggtggcgcgccgtgtacgcctcgtcgtcgtcgcacctcggcggcgacatcgagagcaggttcgaggcgttcaaggcgaacgccaggtatgtcagcgagttcaacaagaaggaaggtatgacctacgagctcgggctcaacaagttcgccgacatgacgctcgaggagttcgtcgcatagtacgccggcgccaaggttgacgccgccgccgccttggcttccgttccggaggccgaggaggaggtggacggcgatgtccctgccgcttgagactggagacagcacggagttgtcactcctgtcaaggatcaaggctcgtgcgggagcttgctgg

SEQ ID NO: 36979 - DNA, 388 bp, Oryza sativa
  Clone ID: uC-osrocyp037b04a1
gggatacaaacaattaattaatgttatggtagctgaatgcaggcaagtttttacaggtcatcccaactccctcttacaacaccatatacacaataatttcgacaaaatgatgaggttattgattgatttcatctttttttccttttaatatatgatcatcccttgctcctcacagagggtgtagcagcaggtaatacctgccaatgtctgttgcaaggtgctacatttaatttggagtgcaatctgatcatggaccaattgtgccggtgtcgaagtacagtgtcgtcccggaggaggatccttcggtgaccccctccatgagcgcgaaccgcatgttctccgatggcttccagtgcctcttcctttggttgatgaaccagttgttgat

SEQ ID NO: 36980 - DNA, 489 bp, Oryza sativa
  Clone ID: uC-osrocyp037b04b1
ggttcaaggaagaactcacgcggccgttcgacgaggcggcctccttcctcaccggcatccacacccagctcgcctccctctgtggcggcgcgccgccgcccaccgacaactccgatgaaatggtggggtcttcagaggatgagccgtgctcaggagacgccgatgcagcagattttgggcaagaacacagctcccgcttggctgaccatgagctcaaagagatgttgctcaagaagtacagtggctgcctcagccgcctccggtccgagttcttgaagaagaggaagaaagggaaactaccgaaagacgcgcgatcggcacttatggactggtggaacacacattaccgttggccttaccccacggaagaggataaggtgaggctggccgcgatgactggcctcgacccgaagcagatcaacaactggttcatcaaccagaggaagaggcactggatgccatcggaggacatgcggttcgcgctcatga

SEQ ID NO: 36981 - DNA, 159 bp, Oryza sativa
  unsure (1)..(159): unsure at all n locations
  Clone ID: uC-osrocyp037b05b1
agatgtgtgtcgctgcggtacgaaaaaggatgggtgtgagaggagagagaaagctttgtggatgtctcgcacgaaataccccnacagctctaggccaatcctgacttgatcatcaccaacttcagagacggaatactggcttcttgcttgcttgcacac

SEQ ID NO: 36982 - DNA, 356 bp, Oryza sativa
  Clone ID: uC-osrocyp037b06a1
acaaaatccaaccaaacatagaacgtagaggaagagaaatcgaacgagaagaataataaaaaccgcacaaattccgtctttagtccgtgcattgcgcactctcctccctctgattcataccgctctgaacattcccacaaaccatatcccaatatcattcacaaattctaatcccaataaacttaatatcccaattcccaaatccaattcgaatatcagcgcaaaaaaaaaatattccaggaaagggaagataattccaaccatttacattatgtaggagggtagggggtgagccgggaaggtctttctgcttgatccttggtcccaacttttcttgctttgccacccttgtccgt

SEQ ID NO: 36983 - DNA, 551 bp, Oryza sativa
  Clone ID: uC-osrocyp037b06b1
tggcttttgagcgctacacctagtgcgagcgaaggcgacgcggctgggggtggcggctgtctggcgcagctcggcggctgcctggcgcgacggtgcgcgcgggaggaggtggagaggtcatctttttttttttttaactattttttatattttcttatttttcttaatttttgttttgttttgttgtttttctttttttcatttattaatatttttttttttttatttttattttttccaatattgtacttttctttattcttctttttatttttttttttatctttttttgatttattttttttatttttttattctttttatttttatatttttcttactttttcttttttttatatttttattatttttattttttttaatcttctttttttccttttttttttttcttatttttatttttttttttttttattatttttactctatatatttttattttatttttattttctttatttattttttttctttttatctttttaatttttatatataactttcttttttttattattattttaattttt

SEQ ID NO: 36984 - DNA, 444 bp, Oryza sativa
  Clone ID: uC-osrocyp037b07a1
aggttcaaatccaacttattcataaagcatactgctgtcccacaggaaactgtttcataaaactaacatatcatacggactcgatggtccattaaaccagacacaagtagacatcagcaccacaaatacttgacgaacagaggctcgggatgaccaggcacatcggcagctccaccaaactggctgattactgaccaccacggaggcggagcaccaggtggagggtggactccttctggatgttgtagtcggcgagggtgcgtccatcctccagctgcttgccagcgaagatcagacgctgctggtctgggggaatcccctccttgtcctggatcttggccttcacattatcaatggtgtcggagctctcaacctccaaagtgatggtcttcccagtcaaggtcttcacgaagatctgcataccaccacggagacgaagcacca

SEQ ID NO: 36985 - DNA, 519 bp, Oryza sativa
  Clone ID: uC-osrocyp037b07b1
ttcacgcgtccgcccacgcgtccgcggacgcgtgggaaaaatttctccccaatctcgcgaggctctcgtcgtcgaatcgaatcctctcgcgtcctcaagatgcagatctttgtgaagacattgaccggcaagactatcaccctcgaggtggagtcctctgacaccatcgataatgtcaaggctaagatccaagataaggagggcatccccccggaccagcagcgtctcatcttcgctggcaagcagctggaggatggcaggacccttgctgactacaacatccagaaggagtcgacccttcaccttgtcctccgcctccgtggtggcatgcagatctttgtcaagactctgaccggcaagactatcacccttgaggtggagtcttctgacaccatcgacaacgtcaaggccaagatccaggacaaagagggcatccccccagaccagcagcgtctcatcttcgccggcaagcagctggaggatggcaggacccttgctgactacaacatccagaaggag

SEQ ID NO: 36986 - DNA, 439 bp, Oryza sativa
  Clone ID: uC-osrocyp037b08a1
acgcaatatgagcacaactatataacttaataagcacattggggtttccaatttgtcctgacacatctggacaacagacagctgctcattaagtcaaaccccggtgaagttgttaagcctgaccaattcaaggcaataaacgatgagggaatgccaatgtaccagaggcctttcatgaaggggaagctctacattcatttcacgggggagttccctgattccctggcgcctgaacaatgcaaggctctcgaggctgggcttccaccgaagcctgcatcccagctgacagaaatggagatagatgaatgcgaggagaccacgatgcacgatgtcaacaacattgaggaagagatgcgcaggaaagcccaagctgctcaggaggcgtatgatgaggacgatgagatgcctggaggtgcccagagagttcagtgcgcgcaac

SEQ ID NO: 36987 - DNA, 485 bp, Oryza sativa
  Clone ID: uC-osrocyp037b08b1
gaacagcaaaggaagaaatgcatatttagatgcacaactctacgagtctcacggtgcaagcatagccatctgaccacaaaaaatgttgagccactgcacacggtgcagtgtcagttgtagcattcacaacataccgagtttctttttaggaggtaaaactctacgagtctcacagcatagtaaaacgtagccagctattactagatacgagtagcattttttaagtcgcaaacaaaagggatacagtcccggcttaaggggtgtaaaatcagcttcactatcttcatgttcgccgcaacgggaaacagagcacaatcatctttgggtccaaaaatttacggcaaacctttgcgacgacgttgatttgtgaaccaatgacgagtttcctagatgacatactctgcttactgttgcgcgcactgaactctctgggcacctccaggcatctcatcgtcctcatcatacgcctcctgagcagcttgggc

SEQ ID NO: 36988 - DNA, 312 bp, Oryza sativa
  Clone ID: uC-osrocyp037b09a1
ggagaaaattttatatccataaagattcatccaaatatgcccaaaaggatcatttcttgagctagatatcctcaccttacagttgatttaacatggatcccgcccatgaattctcaagagggactattcacttgattattacaaggatttagggctctcaatactagccttttttacagggaacccagggccggaccaggtagtatatgggagatacagctcataaaagggaagcagccatgtcaaacagcacaaggcccaggggtcatcttctgccccctctcatctaaggctagggtatgaacaaaagcc

SEQ ID NO: 36989 - DNA, 407 bp, Oryza sativa
  Clone ID: uC-osrocyp037b09b1
agatgcgtgtcgctgttgtttgaaaaaggttgggtgcgagaggagagagacagtggcgtggaggggagagagcgagcgccaccgccgccgccgccgcctcatcctcctctctacccgcgccgccgcgcctagctatctctaggaagggaggagaaggggccgggtgcgcgcgcgctcgctcgctcgctcgtctcgccggatctacagccgccgccgccgcctccggtcgttctctgcttgggatctatctcgtgagccaaagccatggccgtcgtcgcgccgcctcatgtcccggtcgacgcgccgtctcccgctgctgctgctgctcctactgccccggctcctgccgacgccgccaccgctgcccccgtctcggatcaaaccacggatctgctgccaaagttgcc

SEQ ID NO: 36990 - DNA, 397 bp, Oryza sativa
  Clone ID: uC-osrocyp037b10a1
gtaccgaaaaagcgtttgctcaaaaaaatcacccacgggcttttaatgggtataaagcgacgccgtttccttaacttaatatatatcccgttcctttcatacctttcaaacattatttgccattccaaaactacattttctatcatccaggttggggtgcaaccaaaaggggctggagttgcttgacaactgggtatgaacaaaaggcaatatattcattataaacaacaggtttctgccatctgaaccatgccccaccttgatgagagaatcgtgccaatttacacattggtgcttgacgcttacattataccatttcggatttgctcggtgatatccttgacatggcctgggccttgagggctgaacacccgttttttttgggagccatccccaa

SEQ ID NO: 36991 - DNA, 457 bp, Oryza sativa
  Clone ID: uC-osrocyp037b10b1
gattctaaatctagtcaaacacatttttgtgttagctgaagtattatcctctctttttttttctgttgtgcacctatttgcatgttgaaagagttggaatctttgtctggtatacattttaagcatgttatttcgatacccacaattcatactattcttccaagattggtttacatgcttatgtggaattctagtcccagaatactgtctgatggaacttggctgtatcaaacggaaatctggcattgggctgtctgcatcggttatctatcgacggaaacttacgtgcttaccaaattttaaactctgtgattgcttcttcctcaggcgctggatattccattcatgataaccaatgctctctctgctcggtctaagacccattcctaatgtgagtttttgtcctcaaacatttttttatcttagtacttgttagtgataagcagttcattttttg

SEQ ID NO: 36992 - DNA, 342 bp, Oryza sativa
  Clone ID: uC-osrocyp037b11a1
ggaaacaaggatgctacaatatattattgcagaaacggcaccaaggccgtttctattattcataggtaacatcccagcaacaagaggagacagagcaccaaccacacaccacattccactgaactcacccccaactaaatcaaactagaaaactcccaaattcaatcgaccttactttcttaaggaaaaagagcagtgcctaggaatgcaaagcatcctgaaatatctctcttctcttttcatctctgaaaccagagaatggaaacaaagcaaagaaactccaatgctctcctttttcaaaggcttaacctgagatgttggccagcttacttgttcgacggg

SEQ ID NO: 36993 - DNA, 414 bp, Oryza sativa
  Clone ID: uC-osrocyp037b11b1
ttgttcgttttgaagtctggccgtacctggaaacattcactgatgatgtcgcgcacgaaattgctggagagctccaggccaatcctgacttgatcatcggaaactacagtgacggaaaccttgttgcatgcttgcttgcacacaagatgggtgttacccattgtaccattgcccatgcgcttgagaaaaccaagtaccccaactctgacctctactggaagaagtttgaggatcactaccacttctcatgccagttcacaactgacttgattgcgatgaaccacgctgacttcatcatcaccagtaccttccaagagattgccggaaacaaggacactgttggtcagtatgagtctcacatggcattcaccatgcctggtctgtaccgtgttgtccacggatttgatgtttttg

SEQ ID NO: 36994 - DNA, 415 bp, Oryza sativa
  Clone ID: uC-osrocyp037b12a1
ggaatcaaaaaaccggaagaaaagcaaaactttgctctgggaataaaaaagtcaagggcccaaaaccaaaaccagggggggccccctaaaaaaccccaaacggatctttaaaaggggaaaagtctaaaactggccccaagtccccaaaaacaacaacgggacaaagccccacaaaaacccaagggggcctgcaaagcaaagcagggtttttccggccaaccggccgggaacgggaacggtcaaaaaacgggccaagggggggggttcccgcccataaaaaaacccccgggggggggcggaacaaaatccccggggggggggcccccctttaccccgggggggggggaatcaaaatatcccgggaagtggtaattgacaagcccccccccttgcctttttaccccccccccccccc

SEQ ID NO: 36995 - DNA, 383 bp, Oryza sativa
  Clone ID: uC-osrocyp037b12b1
tttttacaacgtgaggaaggcactccagaggctccaaggggtggattacgtggacgtggacagggtgagggggaaggtgacggtgacgtgttctccttgtcacatcatggttcttcgtgctttttggtgcttctgttgtatcttctttctttgttctttttttttcatctccttttttttttctattttatttttctttcctttttttttctctattacttatctttctaactacattttatttttctttttgactcttttttcttcatcttattatattttttaccctttctttatttcttcttatttcatttcttttttcgttctactctcttattttttttatttttattttaacttttcttctcatatctttcttcttt

SEQ ID NO: 36996 - DNA, 433 bp, Oryza sativa
  Clone ID: uC-osrocyp037c01a1
gccacaactaattcagcaattgcattaaagatgaaaaaaaacccaacatttccgactgattactctcatttttgctgctccttcctagcaaataaattatctgaactagacctaactttcatcatcatcaccaccggaggaactccatgctcagcagcacatttggagggcattgtaatatgagtgcccacaggtggctaaagcataaggtccactccatctaaaagaaaatactataaggatacataaccagcgaagccaactatgactattagttagtagcagcggttggggaagcagaatcactctcggtcagcgcttctcaattgtcaagccgtttgcaccctcagaaaccacctgacggatggcgacacacggtgtccattcaggaatcaggatgaccaaaaatgcatcgatcaactgcgcgatgatc

SEQ ID NO: 36997 - DNA, 541 bp, Oryza sativa
  Clone ID: uC-osrocyp037c01b1
ctctgtcatggggtcctttaagaagatgaagcaactaaacacagagattcaacttttgaagacactcaagcataagaacattgagaaaatgtttgcttcatgggttgatggggagaagaagactgttaacataatcacagagttgttcacatccgggagcttgacacagtaccgcagaaagcacaagaaagtgaatatgaaggctatgaaacgatgggcaatacagatattaacagggctagaatatctgcacagtcagaagccagcaattatacacagggatttaaaatgtgacaatatattcataaatggaaatcatgggaaagtgaagattggtgattttggtttggcaacattcatgcagcaacagaaaaaaagtataaaaggcaccttagaatttatggcaccagagctgttaactgggcattacaatgaattggttgatatatattcatttgggatgtgcatgcttgaaatggtgacatgcgaatacccatacagtgaatgtaaggcatggccatatattcaaaaagattgatga

SEQ ID NO: 36998 - DNA, 473 bp, Oryza sativa
  Clone ID: uC-osrocyp037c02b1
ttatagtctcgtcgtcctcgcatctccactcgccagtgggcatgattaagatcggaatcaacggcttcggaaggatcgggaggctcgtggccagggtggccctccagagcgaggatgtcgagctcgtcgccgtcaacgaccccttcatcaccaccgactacatgacctacatgttcaagtacgataccgtgcacggccaatggaagcacagcgacatcaagatcaaggactccaagactctgctcttgggcgagaagccggtcaccgttttcggcatcaggaaccctgacgagattccgtgggctgaggctggtgctgagtatgtcgtggagtccaccggtgtcttcacttgacaggagtaggctgctgctcacttgaagggtggtgccaagaaggttgttatctctgcccctagcaaagatgctccgaggttgtctgctgtgtcaacgaggaccagctcaccgcagatgttg

SEQ ID NO: 36999 - DNA, 422 bp, Oryza sativa
  Clone ID: uC-osrocyp037c03a1
tttttgtagaaacattttttttccatgtattttgaggaacatgcacatatcaacatacatgtaatacgatgttgaattaagcaagcaaatttaagcatgcagagtgcactgcttagcacacactgcatgtgttgctagctagctagctccatctagttccctctcttctcatcatgattgacacttgataaaattaagcaagatttagctagctagctgagctgatctgatcaccatgcatgcatgcaagcaaggccaattcaatttcaagctcgccggccatacaccacacagcacatatacggtgggtaaaacaaaaacaaaaaggaaatcatacacaacattgattcattcatccattctcttaattaattgacttgaggttgaggagcatatatatacgtgcgtggcatgcatgcata

SEQ ID NO: 37000 - DNA, 514 bp, Oryza sativa
  Clone ID: uC-osrocyp037c03b1
ttctacgtcgtggctgctgctggcgtgggtgagcacggtggcggggaacctgtcgctgctggggtcggcggcgaacctgatagtgtgcgagcaggcgaggagggcgcccaggaacgcctacgacctcaccttctggcagcacatcgtcttcggcgtcccatccaccctcatcgtcaccgccgtcggcatacccctcatcggcaagatctgatctcatctcatcgacccatccaaattaattaattatgagatcgacaaacatccaagcttgctaggctcgtcgtcgtcgtcgtcgaccaccgtaccatatatatgcatgcatgccacgcacgtatatatatgctcctcaacctcaagtcaattaattaagagaatggatgaatgaatcaatgttgtgtatgatttcctttttgtttttgttttacccaccgtatatgtgctgtgtggcgtatggccggcgagcttgaaattgaattggccttgcttgcatgcatgcatggtgatcagatcagct

SEQ ID NO: 37001 - DNA, 331 bp, Oryza sativa
  Clone ID: uC-osrocyp037c04a1
atatccataaagattcatccagatatgcacaaaatgatcatttcttgagctagatatcctcaccttacagttgatttaacatggatacagcacatgaattctcaagagtgactattcacttgattattacaaggatatagtgctctcaatactagtcttctttacagggaactcagggccggatcaggtagtatattgtagatacagctcatagaagggaagcagccatgtcaaacagcacaaggcccaggggtcatcttctgcctcctctcatctaagtctagggtatgaacaaaagccggcaagcaacagcgaccggtgttccacgcct

SEQ ID NO: 37002 - DNA, 194 bp, Oryza sativa
  Clone ID: uC-osrocyp037c04b1
ttcttctcttctctctccttttgttgcttccatttctcgttcttgcacggggaagaggagagaaagatgtgtgtcgctgtggtttgaaaaaggttgggtgtgagaggagagagaaagtggagtggaggggagagagagagagagagagagtgagagagagagatgggttcttgtgcttcggttcactaggtcct

SEQ ID NO: 37003 - DNA, 256 bp, Oryza sativa
  Clone ID: uC-osrocyp037c05b1
ttctcggcgcattggcggcgccaccgcccggccaccattattcgccgcataacgatgatctcgcgagcagcggcggcaccaacgacgacggcgatggcggcgcggccgtggtggtcttcgacgacaccgagggcgccaacgaccgcctcagctgcgagtcggggtacttcgatgacgccaggcatgctaactagcgccgccgcacccatcccgacgccgtcattatcgttgcggatgtaacttgtcactctgaatg

SEQ ID NO: 37004 - DNA, 288 bp, Oryza sativa
  Clone ID: uC-osrocyp037c06a1
gggcctaaaaacccccttaaaaaaaagggggccttttttatttacaggttccaaaaagttttacagatactctaacaaaaacaggaaaaactttttttcccacggggtgggaaaaaagcaatttgggcaaccaccccgaaaatttaaaaaccggggccccttgtttaacaattttgagttaaaaaaggcctcgcccgccaaagattcaaaaaaaagcgcttcccatataaattaggggccgtgcaaaagcaagccaagaaagaacccgtttttttttgttaaaggggg

SEQ ID NO: 37005 - DNA, 374 bp, Oryza sativa
  Clone ID: uC-osrocyp037c06b1
acaatgtaactcggtttcatcatgctctccactgcaactgttgtcattactgctggtgtggccgttgttggtctttttgggatgaatatcggtatatcgctttatgctgatcctacaaatgaggaggagaaacgagcatcaaacatgaaattttgggaaaccactttgggaaccattgctggctgcacggttatgtacatagtagccatgggttgggggaagagaagcggactgctgcaataatgagggtgccacgatgaatcacacaagttgacgattgctagcctggtcagacaaagctctataaacaagaagacaacatagggctcgactgtttaccttcttgaacatatataactgctgcctctgttggc

SEQ ID NO: 37006 - DNA, 470 bp, Oryza sativa
  Clone ID: uC-osrocyp037c08a1
cgtacaaatacaaacaaacctttactacgtacacaaaaataaggtatcttcaagagagaaatcaaaactagaggtacaatcattaataccgggaattcggttagcagaaaattcgaaacaaaaagctttcaaactggaagggtcaaacattgcttgttgcccggtgaaacgcgaacacaacaatggcattgcatacattagagaatgcctctgatgcggatgccatcgtactgaaaaaacttgaccgactgagacgatcctacactgcacactacctggacagatttgttccagtacaccaattgacttcaccttacgcattggcccatggccaacagccctcaggtgctactgaaaccatgggacgcatgcaaacaatctgcagatcacgtctcaatgagctgataatggaacaaatgtgcccacaaactgagaagcacttcatgtggacgatgcctggaccagattca

SEQ ID NO: 37007 - DNA, 524 bp, Oryza sativa
  Clone ID: uC-osrocyp037c08b1
cgcgctcactgtctcgcttcagcggaggagctctctagaaggagcagaggagtcccccccaagcgatcgattcgatcccctccgacgccgatcgcctaggcgaagtctccgagaaacactggagggatggctgaagaggatatccagcctatggtctgcgacaatggcactggaatggccaaggccggctttgctggtgatgatgcacccagggctgtctttcctagcattgtaggcaggccacgccacactggcgtcatggttggtatgggccataaggatgcctatgtgggtgatgaagctcacaccaaaagaggtatactgacattgaaatacccaatggagcatggtattgtcaacaactgggatgacatggacaagatatggcaccacaccttctacaatgagctccgcgtggctcctgaagagcatcctgtattgctgaccgaggctgctatgaaccccaaggcaaacagagagacgatgacccagatcatgctcgagaccttgaactgcccagcgat

SEQ ID NO: 37008 - DNA, 65 bp, Oryza sativa
  Clone ID: uC-osrocyp037c09a1
ttggttttttttaaagaaagagaaagcttgacaccttacacagctatgaggtaccagtcaagaga

SEQ ID NO: 37009 - DNA, 290 bp, Oryza sativa
  Clone ID: uC-osrocyp037c09b1
tgtcttacacacgcgtttcttgaggaaccgactgctggcctcaactggggtgtgtactagtatctgatggactggttgctccagacacatccatatgatcttggcaaggacaatgagccgcatgaagctacaaggcttgaatgtggagctgtgactggaaccataggccagactgtcgcttaccctcttgatgacatcacgaggagaatgcacaaggttgcttggaataatgcagcaactatagtcactggagaaggcaaagaggagctccagcccaaagcgtacgaccg

SEQ ID NO: 37010 - DNA, 76 bp, Oryza sativa
  Clone ID: uC-osrocyp037c10b1
tcttaactccggacccacggccggccaagagtggggttattttaacatcttctacggcgactcacctggcggagga

SEQ ID NO: 37011 - DNA, 450 bp, Oryza sativa
  Clone ID: uC-osrocyp037c11a1
caaacagaaaccattttttttacagcatccgacggttgattttggtctgaatttctactacactccaacgtgaagaagaagaaaaaaaagaagtaaagcaacttttctttttgccccccgaaaattttgcaatgcggcccctaggatttgggcgacgtcactagaaggtccacttccagatcttgactcggatcctgacctggcacacgcgcgcgacggtggtcgccggcggcggcgagggggtggtgtcgtcgacggacgcggcgggagacggcgcgtcggcgacggagagcttgacgccgcccttcttcttcttcgccggcggcggcggcggcgccggggcggccaccttgatgccctcgcagtggacgagcacgccgattttcttggtcttgaggccggcgaccttgacgccggccttgggctccaggtcgagggtgatggtgaact

SEQ ID NO: 37012 - DNA, 390 bp, Oryza sativa
  Clone ID: uC-osrocyp037c11b1
gctgctgctgcggtggtggcggctggcaacggcgccggtggcccgcccaagatgtaccagcgacccatctaccgcccccaggcgcccgccgccaagcgccgccgcggcgggaggtcgtcctgccgcttcagctgctgctgctgcttcttctacgcggtactcgtcgtgctcctcctcgccttcgtcgccgccgtcgccggcggcgcgttctacctcctttaccggccgcaccgtccggtgttcaccctctgcgttgcccgcgtcgacaagctcagcctttgctactgcgacaccgcgccctctatcaccgacttcatggacgttacgcttaccgtcatgatccccaacaagatggcttgtttacctttacgactacttttgtcgttaccg

SEQ ID NO: 37013 - DNA, 342 bp, Oryza sativa
  Clone ID: uC-osrocyp037c12a1
ccaataatccggaggtttttttaaaaggactcatcttaacatccataacaagcaaacgatagttgtttccgacaccaacattagaccataacgagtcaactgacaaccatagactagaccaaaaataccgcggactgcatagataaaacatcagtgtcgagcagaaggaaccgctcagcacttgaccttcttcagcccatgagagaagtaaaggaaggttgggtcggtggctccgtccttgtagtaggcaaacaccaagccggccttatcatgcatgcttttaccaacaaagaactgaaggtccttgagctttccaagcaagtacttggtggcccccttaat

SEQ ID NO: 37014 - DNA, 255 bp, Oryza sativa
  Clone ID: uC-osrocyp037c12b1
ttgtgctcgctactcccccctcgccgagagagctctagggtttccgctgccgaatttttttttaattcggggggagagatttgaagaggcggcaccatgttggtctaccaggatctgcttaccggtgacgagctcctgtcggattcgttcccctacagagagatcgagaacggcatcctctgggaagtcgatggcaagtgggtcgttcaaggagctattgatgtggacattggtgccaacccatctgctgagggt

SEQ ID NO: 37015 - DNA, 413 bp, Oryza sativa
  Clone ID: uC-osrocyp037d01a1
ataggatcaaaacatttctattaccacaactttttaaggatggaattgagtagcaatactttcaccccaaaatacagtttagcgacaatatcttagaaaagccgcttgctttgccgccatggctggcaagctgagcagagcagctaacacaaagaacacgagatcactataaaccaaacggcaacgaacgaagaaaatacagggtcttttttgtctgaagatacacgaagcggttcgttttcttttatttttagtctcctctcctcctcgatgatgggtgtatggcaatggcaatggcgatgggatcttggcttagttgatgggaaggggctcgccgttccactccttgaggcagtcgagcatggggtcgatgagcttgccctggctgatgccgaggaacaccttgttgcact

SEQ ID NO: 37016 - DNA, 544 bp, Oryza sativa
  Clone ID: uC-osrocyp037d01b1
cactaccttctcctccttttcttcttcagtatcgaatcctctcttctgctggtgcccaccaccaccaccgtagcaatggcgggcaacgggccgatcaacaaggaggacccgctcaactggggcgcggcggcggccgagatggccggcagccacctcgacgaggtgaagcgcatggtggcgcagttccgcgagccgctggtcaagatccagggcgccaccctccgcgtcggccaggtggccgccgtcgcccaggccaaggacgccgccggcgtcgccgtcgagctcgacgaggaggcccgcccccgcgtcaaggccagcagcgagtggatcctcaactgcatcgcccacggcggcgacatctacggcgtcaccaccggcttcggcggcacctcccaccgccgcaccaaggacggccccgccctccaagtcgagctcctcaggcatctcaacgccggaatcttcggcactggctccgatggccacacgctgccgtcggagacggtgcgggtggccatgctcgtgcgcatcaacaccctcctccagg

SEQ ID NO: 37017 - DNA, 402 bp, Oryza sativa
  Clone ID: uC-osrocyp037d02b1
tagtacacgagggtgttcttcgacatgaccggggggggagcttcggcggggctgtgcccgtgatgcccctgtacgcgaaggacgtgccgcggacggcggagaacttccgcgcgctctgcaccggcgagaagggcgtgggcaagagcggcaagccgctgcactacaaggggtgcaccttccaccgcgtgatcccggagttcattgtgccagggcggcgacttcacccgcggtatcggcacgggaggggagtcgatctacggcgagaagttcgccgactgaggtgatcaagttcaagcacgaacagcccccggcatcctgtccatggcgaacgccgggcccaacactaacgggtcccagtttttcatctgcaccgtgccctgcagctggctggacgggaagcac

SEQ ID NO: 37018 - DNA, 334 bp, Oryza sativa
  Clone ID: uC-osrocyp037d03a1
ccattaagatttatccatatttgctcaaaatgatcaccacgggccccaaatgtcctcaccgtacagtggcgttaacatggaagcagcacaccaaatcaaaagagagacccacccccagaagaggaccgggaatccaacgccccccagaactaatccaagaacacagggctaatcaagcccagcccagggcgattcattgttgacacagccgatagaagggaagaaaaggtgtaaaaccgcccaaagcccatgggtaattagggagccgactactaaagaggactgggtctggacaaaggccagggggaaccggccacccgtaggacaggcggcc

SEQ ID NO: 37019 - DNA, 527 bp, Oryza sativa
  Clone ID: uC-osrocyp037d03b1
tttttacgagggtgttcttcgacatgaccgtgggcggagctccggcggggcggatcgtgatggagctgtacgcgaaggacgtgccgcggacggcggagaacttacgcgcgctctgcaccggcgagaagggcgtgggcaagagcggcaagccgctgcactacaaggggagcaccttccaccgcgtgatcccggagttcatgtgccagggcggcgacttcacccgcggcaacggcacgggaggggagtcgatctacggcgagaagttcgccgacgaggtgttcaagttcaagcacgacagccccggcatcctgtccatggcgaacgccgggcccaacactaacgggtcccagttcttcatctgcaccgtgccctgcagctggctggacgggaagcacgtcgtgttcggccgcgtcgtcgagggcatggacgtcgtcaaggccatcgagaaggtgggatcccgcggcgggagcaccgccaagccggtcgtcatcgccgactgcggccagctctcctagatctgtgctgtt

SEQ ID NO: 37020 - DNA, 346 bp, Oryza sativa
  Clone ID: uC-osrocyp037d04a1
gggacaaaccaaaatacattacgactggactgaatccagcaaattatgatattcttacacgatccattttaacatgacagagatcaaatgatggatcgatcaggggtacataaaccccaagaggaccaggttttcatagacttatttgacatcattaacaaccacgaccacgataattgacgacgatattgccgacatgatcgatttcataggactatttgaccagcagtacgaagaccccgtaaaagttgcccacaaattaagagtccataaacttaatatatagttttgatcataagatcggcagttgtacagattcagaatctaattgacaaacacaaacccc

SEQ ID NO: 37021 - DNA, 348 bp, Oryza sativa
  Clone ID: uC-osrocyp037d04b1
tcttgaagaaaaaaaaacacgacgaacacgttaaaaaaaggtcgaagagaagtgggagacccaaaccgcgaacaatgtgtggaggcgccatcctcgccgagttcatcccggcgccgtcgcgcgccgcggcggcgaccaagcgggtgaccgccagccacctgtggccggccggctccaagaacgccgcccgcggcaagagcaagagcaagaggcagcagaggagcttcgccgacgtcgacgacttcgaggccgccttcgagcagttcgacgatgactccgacttcgacgacgcggaggaagaagacgaaggacacttcgtgttcgcgtccaaatctcgtgtcgtcgccg

SEQ ID NO: 37022 - DNA, 452 bp, Oryza sativa
  Clone ID: uC-osrocyp037d05a1
gcagacaatgccattgcagcacacaactttattgacttatatgcttgatgctgataaatacttatttcctcccagaacattatttcttcgatatactacgatgtcgacctatgtccaacagtcttctccaggctgagataatgagattctcatcataattctttctacaggacggttaaaatttaatggcatttacagaaaaatcttatgaccaagagaagggccttcatggattcatccactctgtgcttcagagaacatcagatgtgtgaagggcatgtcaaaaagcagagcttcaggcactcacagtctcaaacacgcgacctaatcatggcactaacatcatcgagcaattgggactccttgcagctgggataagatttgattcttgataataagatgagatcctttttattaccaaagagctgggatggggttactagtcaagggga

SEQ ID NO: 37023 - DNA, 553 bp, Oryza sativa
  unsure (1)..(553): unsure at all n locations
  Clone ID: uC-osrocyp037d05b1
ctcgagaatcaggtgatgctctgatccatttgatcagttcgttagatggtttgatgaagctgttactgctggtctacgtgaaccaaatgctatggctttaacaactgccgataaggagggaaaaccttcgtcaagaatggttcttttaaagggtgttgataagcagggatttgtttggtatacaaattatggtagccagaaggcacatgatttatctgagaatccaaatgccgctctgcttttctactggaatgagatgaaccggcaggtaagagtagaaggttctgttcagaaggttccagaagaagaatctgagaagtatttccacagccgcccacgagggagtcaacttggtgcaatagtcagcaagcagagcactatcattcctggaagggaagttcttcagcaggcgtacaaggaattggaacaaaagtattctgatggcagcgtgatcccaaaacctgattactggngtgggtacagattaacaccaaaactttttgagttctggcaggcncacagtctcgactgcatgaccggcttcagtattcac

SEQ ID NO: 37024 - DNA, 442 bp, Oryza sativa
  Clone ID: uC-osrocyp037d06a1
agatcaaacgcagcatgtcgaattaacttgaaccgtatggaagttagcgaacttctagagattgcaaacagcaccacgaaagtctgctgaattcgggtataaggtggagtacattacaaaatggattcatcggtgcatcctgaggattatgacgggtctgtgggctgatgggaagaagaaacttttgcttatcagctcaggtccttttgatcttcgagaacgtcccggtctctgaaaaataggtgctctgagttccacttccaagcaggttgccgtgggcctgtggatttgacaactctatcccctgaactggtgtaaacgccaaactagaagtcagccccgatgttgcaccactgctaccatagctcttctccttgaatttcttggaaattttgcagaaagtttgcttggtgcagttgacacgcgtagcttttcacttcct

SEQ ID NO: 37025 - DNA, 535 bp, Oryza sativa
  Clone ID: uC-osrocyp037d06b1
ttatttgggtcctccctcctccgcctcctccgccgccgccccctgtatcccaccggctcgccggagagtccgcctcgccgccgcggcctcacgggcgcgtatccagcctcgcggagagcgtgcggaaccgcgacccgtactagggcagcgcgagagagaagctgctgcgcctgcgctgcaaaggtctacagttggagctcttgctgctgcttggaagacttcggacaagaacctaagatcatggcaagccttgctgattctttcttagcggatcttgatgaactttcagacaatgaagcctatcctgaggaagaaaatgctgaggcagtgggcacggaagagattggtgatgatgatatgcctgacctcgagtctcttaattatgatgaccttgatagtggttcaaagcttcagaaaacacaacgttacaatgacattatgcaaaaagttgaaaatgcacttcagaaaggtacagatttttccaatcaaaggtcgatcctggaggaagatccagaataccagctgattggtgatt

SEQ ID NO: 37026 - DNA, 167 bp, Oryza sativa
  Clone ID: uC-osrocyp037d07b1
atcgccaagccattcgtaggagaagcgctgaaccgcctacgaaggggtaaacactacaacaaatattgcaatgccagcggctgacggaactactgattagtacacgaagctggtgggcaatgaattgtgaagtcttcgatctgaaggacctcgatgactagcactac

SEQ ID NO: 37027 - DNA, 527 bp, Oryza sativa
  unsure (1)..(527): unsure at all n locations
  Clone ID: uC-osrocyp037d08b1
ttacgctggtgttcgtctgcgtcaagtacctcccggtgtacaccgtgccaccggatgagaggttcctggtgaagcggatcggccccaagaacttccacatgttccggtgcgtggcgcggtacgggtacaaggacatccacaagaaggatgacgacttcgagaagatgttgttcgatagcctgattctgttcgtgaggctggagagcatgatggaggagtacagcgactccgacgagtacagcaccctgatgatgagcctcccaaataacccagggatcagcaatggcggcgtgaccaccaccggcaccaacaatgtcatggaggtgatgagctgcacgtcgacccatgactccattgtgccggtgaactccaggtccgacgacacgggcagcagccaggtgatgccggcgtcggtgcagatggcgttccagagcgtcggcgacgagatcgcgttcctgaacgcgtgcagggacgccggngtggtgcacatcctcgggaacacggtgatcagagctcgcagggattca

SEQ ID NO: 37028 - DNA, 369 bp, Oryza sativa
  Clone ID: uC-osrocyp037d09a1
agcgggggatcaaacacaaacacaaacacatgcagtattcatacataggagtacagtatacagtagcatatatgtatagtactagtagaaaggcagaaaaagcgcgagggacgacgccatcacgcacactctgctagctacacacaaacacacacaaggagcccgaactaacctcgggcgcggccccgccatctcatttttcaacctttgggggtcaaaaagccatcgactttgcatggacttcattcattcattcctccttccttcctttgctttggatcacaccacaatggaggggagaaaaaagatctttatagcttagcctccctgttttacttattgggccatcaacgccatgagagccttttt

SEQ ID NO: 37029 - DNA, 229 bp, Oryza sativa
  Clone ID: uC-osrocyp037d09b1
tcgttgacgcgtgggtcggtctcgccgtgcgggtgtctcttgtgagcaacagcacgcgccgcggtcggcctccccttaaatttcttcggctcatggcccgggcgggtgtgtgatgtttaatattcatattatcgaatttccgttaagctttacaccagtacctgtagaaagcacaagatttttgttgtttatgttttttattactattagtctatatcatattttaaca

SEQ ID NO: 37030 - DNA, 355 bp, Oryza sativa
  Clone ID: uC-osrocyp037d10a1
ccaaccacttcaatttctccttccaaactgcatcgtatcgacatataattacgactcaccagatgtattgttctacagactacaccagaaaaccagatgataagtctgctgctggcggaatacacgcagtaggaccggcagttactgatatatacagtcatatatatacacaaaccaacaccatgacaacactaatattagcaccacaggagcactgtacaaatctaatcttatgaggaaggcatcggtagcggtctcagcaatgggctgaaatcactgatgcaagaaatcttccatgagtgttatgttcattcagcagggatgtcagaactttggcccttttctgggttagggg

SEQ ID NO: 37031 - DNA, 520 bp, Oryza sativa
  unsure (1)..(520): unsure at all n locations
  Clone ID: uC-osrocyp037d10b1
tcagagtaaggtttattctaaatgcaagctccatctggttgatcaacaagaaggttcggcttctaaggtggagctggtggggaggaataccgacaatgtggaaattagccatggaagcagttctggtgacaaaatgattgctgagttgaccgaggaggaattgacattgcaaggtgtgcccgcagatgagactcagacagacatggaatttggggagtgggaagggattgaaagaactgagatagaaaagaggtttggtgtggcagcagcgtttgcatctagtgacgccgggatggctgccctgtcaaagcttgatagtgatgtgcagctgcagctgcagggactccttaaggttgccattgatggtccatgctatgactctacacagccacttaccttgaggccttcatctcgtgcaaaatgggctgcttggcaaaagctagggaacatgtatccggagacagctatggaaagatacatgaatnctttgtcagaggctattccaggatggatgggtgac

SEQ ID NO: 37032 - DNA, 366 bp, Oryza sativa
  Clone ID: uC-osrocyp037d11a1
gacccaaattaactgctcttcattgtaatgcaaagagaggtactgtatatggtcgatcctaaaacaatgctcgacccaaattcttattgggcttgaaaaacagacaatgagatcaaaagacatgtgtcaaatgttgttccaggtcaaaacacgtaacaaaaaaaccaagcttttcccaagcgggagcttgacaaaacattcagtgagcaacagccttctgagccttgtttgggaggatgttgtccgggaggatgagctccggcgggatctcacggaccacgccgagcattgaatcatactcctcgtttttgtgggcatactttttcctcagcattttctcgagctcgatcttgtcgaaagtcttgg

SEQ ID NO: 37033 - DNA, 518 bp, Oryza sativa
  Clone ID: uC-osrocyp037d11b1
gcgggaaggttcatcctaccataattggaaacaatgttacaataggtcatagtgctgttctgcacgcatgcaccgtcgaggatgaagcttttgttggtatgggtgccactctgcttgatggagtggtcgttgaaaagcacagcatggttggtgcaggatcgcttgttaagcagaacacaaggattccttctggagaggtctgggtcggtaatcctgccaagttcctaagaaagcttactgaagaggagatagcgttcattgctcagtcagcaacgaactacatcaatctggcccaagtccatgctgccgagaattccaagaccttcgacgagatcgagctcgagaagatgctgaggaaaaagtatgcccacaaagacgaggagtatgattcgatgctcggcgtggtccgtgagatcccgccgtagctcatcctctcggacaacatcctcccaacaaggctcagaaggctgttgctcactgaatgtttttcaagcttccgtttggaaaagcttgttttt

SEQ ID NO: 37034 - DNA, 320 bp, Oryza sativa
  Clone ID: uC-osrocyp037d12b1
tcgtactctccccccccccccccctccaaacgcttgttaaaatccctcattcccatcacctcagcacgtacgaacgagagtgatcgatcgctagctcgccgagatcaccagcctcctcgtgttcttcttcttcttcctctcgatctcgaggagggtgccatgggtaccatggttggccatgtcgcgccgggcgccggcttcatcctcatcggcatgtggcagctgttcaaccacatccggctgttcgcgctgcggccgagctcgtacgcggcgccggtgtggttcccggtgcgcggggtgcgccacctggagcttatact

SEQ ID NO: 37035 - DNA, 427 bp, Oryza sativa
  Clone ID: uC-osrocyp037e01a1
agtaactcaaaatatgatcaaaattttgtatgctattctcaacaaatacaccaagaataaagcttacaatcagcgtgagttgtaacatctcttattgcataaagaatggtattacaaagttacccatcttctcttttctctcaagctcttccttttcagcaatctgtttcagcgtagtccacccctttcttgcccgcttccttgaactaccagacatctgagcagaaccacttgctacagatttatttttcacacggtcctttggagctgacttggtaggcattgtaggggccttgccagtaactgaacttggcatctcccctttcttgttctgaatgcttcttgtcttgaccagttctgcagaatccttatggtccgtcacatccaccagtttgttcttttgaggagtaacaaaacttgatccgac

SEQ ID NO: 37036 - DNA, 399 bp, Oryza sativa
  Clone ID: uC-osrocyp037e01b1
tcttttatggacccttttattaaccatagaaccacccatatatactgccataggacctttagtgcacggctttgtatagtctagggtgaagatttctggttttgtatttaagggacctaaaaaaatctcgctgtatatactgccataggacctttagtgtatggttttgtatagtttaggggtgaagatttctggttttgtgtttaaggacctaaaaaaaattaagttgaggtacctccggtgaacttattcttttatatatcaacatgccctcgaagtctcgaactggaaacctgaaaggcgaaaagaagctagtccaaattaagcggcggcgtggcccaaccggtccacaacgacccagacactctcgccgttgccgactcctcgccttcgcttact

SEQ ID NO: 37037 - DNA, 368 bp, Oryza sativa
  Clone ID: uC-osrocyp037e02a1
atgtgaaactaggttttctgttatgaaatgttcattacgacaattatgactaattggcagcattccaaaatattcctcaacgttgacactccatgccacacaatacaatcgaaattcctagaataggcaacatttccgagcatattggagacaagaccaacatcaccactcgaatgacactgagggggaaatatacaggggaagaagcaaaaatgctatctttaggtagtcgcttgacaacagacagttaagtgtagtgcacctgttgtagcactcgcttactcccccttgtgctccttatctttcagagcatttcctgtgatttacgaacaatgcgtctaacctgtttcttgaaatcgtccctcttt

SEQ ID NO: 37038 - DNA, 541 bp, Oryza sativa
  Clone ID: uC-osrocyp037e02b1
tgcgaactctccacgcctcctcaaataaagctcgtcccgaggaagggcggggacccaccccccccaatcgccaaaaccctaactccgatccgatcgagctctgcttcccatggcgactgccgcgagccaggcgagcctcctgctccagaagcagctcaaagatctcgcgaagaaccccgtggatgggttctcggcggggcttgtggacgatagcaacgtgttcgagtggcaggtcaccatcatcggcccgcccgataccctgtatgatggaggctacttcaatgcaataatgaccttcccccagaattatccgaatagtcccccatcagtaaggtttacctctgagatgtggcatccaaatgtttatcctgatgggcgcgtatgcatttctatccttcatccacctggtgaagatcccaacggttttgagctttgcagcgaacggtggacacctgtgcatacagctgaaagtactagtctgagcatcattttcgatgctctcttgtccaattatgagtcttcagcaaaattgaagcggata

SEQ ID NO: 37039 - DNA, 414 bp, Oryza sativa
  Clone ID: uC-osrocyp037e03a1
cgcacaagaagccaaacgtgagagcttgtacaaaacttcagctctcttcaatgttgactacgctaattaaaattgtaactccataaaaactcggctacgccgagaaaactgtaattacaacagatacggcgtagccaattcacgcaatgcgcacccatacggctacagtatggttcatttaacgtctgatagacgatttcttaaggtgctgccgcaggtggcgacaaatactgaaaacagcgaggtaatccaataaagaaataacattggaaatcctctccagcggcaacccaagtctctaaatgatcataatcactcgaggtaccctgcaacgcaaatttgtacccgggttgcgaacgggcagttccatttgtagaattgtagttggtgttacgggcaaaataacaacgagcg

SEQ ID NO: 37040 - DNA, 545 bp, Oryza sativa
  Clone ID: uC-osrocyp037e03b1
gtgcgtatgccgtcattctttttgagaattggtcgggatcaatgaagtttagatttcaagttgtgtgttctagttttcataaagggcgtttgcgtattgtgtttgatccaacaggtgctcaaacaaatcctgagttgaatgtcgcgtattctcacgttattgatatttcagatactcaagattttaccatagaggttcctcatatgcaaacacgaactttgttaactagggctgaaccgccatttacactggttaccacacaatacggcactactttgttgccaccgttgtccactggtaatggaactattgctgtttatggtgagactattctcgccactcctaatagcacagtggatgcaccagttgatattaatgtttttatatcgatgggagatgattttgaagtatataatccaggtaatggatttcaatattatggttttgttccccaatctggaacggagttacacccagtttcaaacacgaccgaggagctaaatgctccattaaaggatgagtctttaatgattgggggcaaacat

SEQ ID NO: 37041 - DNA, 325 bp, Oryza sativa
  Clone ID: uC-osrocyp037e04a1
atcaacgggcgcgacaatgttaagatgacaaaaatttgcccataaactggagatgaaaaccatctggtcactttatacaagccgtacatcagctaaaagaagttcacgatgccccagggctcaggcagacagaaactgaaaacgacgcagcaagttaaaaacaaattacaaaacctacatgagacaaaattaaatcggagagatagggtcccactaccaccaaagcaacattatttgcagaggttcctttttttcagcccacatgatcccggggtctagttattattcgaaaatctccggccggcctcaaattcgatcgaatttt

SEQ ID NO: 37042 - DNA, 497 bp, Oryza sativa
  Clone ID: uC-osrocyp037e04b1
ctgttttatagagagagagacacagagagagagagagagagagcagcagcaggtagcaggtcgaggagggtttgtggccatggcgatcctgtcggatgtggccaccgaggtgctgatcccgatcgccgccatcatcgggatcgggttctccatcgcgcagtgggtgctggtcgcccgggtcaagctggcgccgtcgcagccgggagcgtcgaggagcaaggacgggtacggcgactcgctgatcgaggaggaggaagggctcaacgaccacaacgtcgtcgccaagtgcgccgagatacagaacgccatcgctgaaggagcaacatcgttccttttcaccgaataccaatacgttggcgttttcatgtcgatattcgcggtggtgatcttcctcttcctcggctccgtcgagggattcagcacaaagacccacccctgcacatacagcaaggacatggagtgtaagcctgctctgttcaatgccctgttcagcaccg

SEQ ID NO: 37043 - DNA, 373 bp, Oryza sativa
  Clone ID: uC-osrocyp037e05a1
gtgcaaaacacatatcatcctttaacatgacacatgcatgctgcaagtgctccttgccaggggtgggatgcacggccctagggtggacataacatagatacactggaatgaccaatcaatgaccggttgtatagcttgatgattacaaggaacataaatgctccaaatactaatcagataaccacagacctaaagggcggatattgtacgatatacaaatagcaaacctagggtaggtgacggcccagctagacagcacacggcccaggggcaatctgttgactgcgttataatgaacagaggcaataaacaacaatcgacaggtcaaaaggcccggcagtccgcgcaggcctgatggcaaaggtgctttatt

SEQ ID NO: 37044 - DNA, 532 bp, Oryza sativa
  Clone ID: uC-osrocyp037e05b1
agatgcgagtcgctgttgtttgaaaaagggtgtgcgtgcgaggacagagagagtgcagcggacgtgctagagcagacgccagctactacctggcctcctcctttccccctcgaccccggtcaccaccaccctgctcgtccaccgcacctccctcttcccgacccgccgcatcctctcgccctgctgctccgcgctctcccaagtggcggcggcgccggaaaccgtcgaccactccgacggcgacgagccccagggggatgtgcaggttcagctacctctcgaccggctcttcgtgccgcccggggcgagcgtgtccgcgggggacgccgaggcggtgaccgcgcgggtcctcaagggctccaacatcgtgctgggcccgtacgcgcgcggcgacgcgaacgtgatcgccgcggacttcgtgaagagcagcgtccgccccgatgactgccccagggacgggctaccggagttcgcccttgttggccggtccaacgtcggcaagtcgtcgctgctcaactcgctcgtccggcgc

SEQ ID NO: 37045 - DNA, 320 bp, Oryza sativa
  Clone ID: uC-osrocyp037e06a1
attaaaataataaataaattatatttaaaaaaataaatttttttatttaaaaataaaaataaaacaaaatttcaaccacaaataaataaaaaaaaaaaaataaagaagtgaaaaaaaaaataagagaaaaaaaaaaaaattaatttctgggcataggttttaaaattttaaacttaaaaaaatgttaacccaaaaaaaaaatcccttaaaaaaaaaaaaaggaccttggaaaagaaaaaatctttataaaaaaaaaaattatctacgtgcaaattaaaaaggttcataaaaaaaaaaaaaaaataatgggatggaatttt

SEQ ID NO: 37046 - DNA, 515 bp, Oryza sativa
  unsure (1)..(515): unsure at all n locations
  Clone ID: uC-osrocyp037e06b1
ttttcgcgtccgattctttcaggatgacatttcaacagtatttaaaatggctgataaagacaactccggcactctaacactcaaagagataaatgatgttcttgaagacatttgtataagatacccacaagtagaactgtatatgaaaagtatgcacatgcttgacattagggatttgataaaagatgccataggtgattctcacaaggagtcgatggtggttaacatagaggagttcaaaaaagctctgtctcatgtggattcccaagctaaaagtattccagcaacagctcaggttgcagcacaacaaggacactatcttgctgaatgttttaacangatggaccaatgcaaagaacatccagaaggtcccgttgcgcatgacaggaacaggatcaggacgacacaatttccgccatttcggtacaagcatcttgtgcaatttgcacctttgtgtggagaggaagctgctgcagagctcccaggcgactgggtttccattggccatagcactc

SEQ ID NO: 37047 - DNA, 436 bp, Oryza sativa
  Clone ID: uC-osrocyp037e07a1
ctatgttgtcgtattttcgtcagatactgttcatcgttctgaactactcagacaagctaggatagccacaatctcgcgtgtgttcagagtgttctagctaacagggtgagcttcacagatagagctgctacattttgattgaaattctcgatttttgttgtcccaggtatggggcatacgtcgcttccctgatgatggacccaggccaatgcgagttgtgacggtgtgcatccttttctggctgccattaagttaacacgctcaaatatttcagcatttcttctcgagattcgctggttgaaatctaggaagatgcttgcgaacatcctgaacagatagactccactagtttagctccaccagaaaagaaccctttaccaagtgggctgtaagctactattcccattccaagttctttgaaatggaaataagaaaa

SEQ ID NO: 37048 - DNA, 438 bp, Oryza sativa
  Clone ID: uC-osrocyp037e07b1
tggacgcgtgggtgcagcgatgcttgcagtgagttgtatggtactagcattaacccctatgtatgtgagtggccagagcccacgtagcatcaccaccgagaatcgcgcgcgcggcggagagaaattaatcgatcgatcgatcgatccgattccggccggccatggcagctgctgctccggcgacggcggcggtgcggcgcatgaagctgggctcgcagggtctggaggtctcggcgcaggggctgggctgcatgggcatgtccgccttctacgggccacccaagccggaggccgacatggttgcgctcatccaccacgccgtcgccgccggcgtcacccacctcgacacctccgacatgtacggcccccacaccaacgagctcctcctcggcaaggctctgcaaggcggcgtgagggagaaggtggaggtggccacga

SEQ ID NO: 37049 - DNA, 463 bp, Oryza sativa
  unsure (1)..(463): unsure at all n locations
  Clone ID: uC-osrocyp037e08a1
gaaagtaaaaacaaatacataaaccgtacgtacacgtacacgtaaaacacaatggcacgtacctcaacacatgcgttgagaccgtgcgtacccaaaatataatgtacactaattaaccagcaacagagtcatcacatgcataanaattcaaactcaagtatgaaattaaatcaacacactcacacaaacattgagaaatttcacatgaaaaatctctcagtttacctactggcgccggcaaccgccgccgccgccgccgtggacgtacacggcgagttcgccgcgctgcctacgccgatggaggcggcgcctggaacggcatgggcacgttcacggtcgggatggacggcatcggcggcagcgtcaccgccggcacggcggggatgccggcgggcatcggcggcagcgtcaccgccggcacggcgggcatcggtggcaacgacaccttcggtaccgtcgggat

SEQ ID NO: 37050 - DNA, 383 bp, Oryza sativa
  Clone ID: uC-osrocyp037e08b1
tataaaaaaacacacacacacacacacaagctagtcttgctgcaatggcttctagtgtgagcttcatggccacggccatggcgatggcgtgcgttctgctcgccgccagcagcagcagaacgtgctacgccgcccgcatgttggccgacacgccggcgacggcggcggcggcggccgcgcctcccgccgccctccctgtcctccccgccgtgccggcgctgcccaccactctgccgcccatgccggccatcccggccgtgccacaggcggcgctgccgccgatgcccgccgtgcccaccgtgcccgcggtcgtccctaacgcggcggcgctgccgccgatgcccgctgtcccggccattccggcggtgccgaaggtgtcgttg

SEQ ID NO: 37051 - DNA, 329 bp, Oryza sativa
  Clone ID: uC-osrocyp037e09a1
ggaacggagaatcacacaccagagcatgttagtggagaattcttacaaaatggggacattaagaataaaaaaactaagaaaaaaaacatatcctccggattagtcgttatctcacatatgaggctccccaactggtcatacttgcatttgggttcatgagctcgtccatttacaaattgcaaaggctaaaggcatatagttgccaaatgagaaataattgattcattaggggggggttgaagtattactatttattttactggtttttacatatataaaaagggtggggtttattttctttaggtccaaaaatttttggccaaattttt

SEQ ID NO: 37052 - DNA, 538 bp, Oryza sativa
  Clone ID: uC-osrocyp037e09b1
ctcctctctcatgcgcgtcgcctcctcgccctcctctcgccgccgctgcaccgcccccgactctctccccagtcaggtcacttcatctaccagcgaggagaccaggggcatcgaatccggtgaccacctcctctccgcaggcgattccggctgcccggacaaaagggtcgtgagccaccaccaccatcttctccaccctgcttggtgtagtgccaaatccactggcaggccgtcgatccggcgtttggtctccccccggtggatccgaccgctcagagcctcgccggcgccgaggacagcgagctcgcgcggcggctcaggggccccgccgtggccatggggaagcgcctcagcttcatgaacgcgtacctcgccgaggactgcaaccccgtcaggtgctgggtcatcaccggcggcgtcgcgttcgtcacgctcatcgtattaagtgtagggaggtgtggatgataccccagtagagctgcccaagaaactctacataggtcccccaagggccaaacaattcaacttcctgatggag

SEQ ID NO: 37053 - DNA, 477 bp, Oryza sativa
  Clone ID: uC-osrocyp037e10a1
ggtgtccgctttctcgccttccgcaacgagcagtccgcgggctacgccgccgccgcctacggcttcctcaccggctcccccggcctgctcctcaccgtctccggccccggctgcgtccacggcctcgcgggcctttcccacgccaccgtcaacgcctggccgctcctcatggtctccggctcctgctcccagccagacgccggcaggggcgacttccaggagctcgaccagatcgccgccaccaagcctttcatcaagatcgccgtcaaggcaaccaccatcgccgacatccctcgcctcgtcttccaggccctcgccgccaccgtctccggccgccccggcggctgctacctcgacatcccatccgacgtccttcaccaaaccctcacggaatcggaggccgacgccctcatcgacgctgccgccgccgattccgccaaatccgattcttcttcacccaagcacaagtccctggac

SEQ ID NO: 37054 - DNA, 549 bp, Oryza sativa
  Clone ID: uC-osrocyp037e10b1
ttcttatttcagggtctgtgatataagatgttcttccatgggtgtccgttttaatttcaataggacattgcttattaactgggacctgcgttctggtatgatacaaacaccttcagttcttatgctgcattctaccgctctctgcaccagcataaggatcaatgataacatttatcaccgctggcttcctggcacgaaacgactctgaaagggcggattttagctcatctggtgtctcaacaagataaccttttcctccaaaagcttccatcattttatggtaaccagcagctggaacgaaagaggttggggcaggatcatctttgtacggtccggttatctcatcagggcttctccgatcaccgccataaactccattattgttgaagacaattacaacaacaggcagctggtaccttaccaatgtctcaacctccattgcactgaatccaaatccagaatcaccctccacagcaaccacaagtcgatcaggctcagcaactgcagctgcaacacagaatcccaatccaactcccattgtcccccatg

SEQ ID NO: 37055 - DNA, 299 bp, Oryza sativa
  Clone ID: uC-osrocyp037e11b1
ggaccggtccagaatttctgggattaacaaacctactccaaataaagtgacgacccagccaccagagtgatgaatttgagcgctcgacgcggaaccagatgctagatcgagaagtagaaattcttaaaggaaatgcttacattagaaaaattcgatcttttctattaaagatgggcttggaaagcagcgatcttgaaacagtatgtgttaaggatcgactactaacaaacgaatgtattgatcaaatagctggtcttgctttgagtcataaacataagcattgtacaatttcagaccct

SEQ ID NO: 37056 - DNA, 389 bp, Oryza sativa
  Clone ID: uC-osrocyp037e12a1
ctctgaaatctaactagtagctggccttattcagttctctgtggtatgtcttccaacctaatagaactgggacctatttttaggtgccaaaaatactccagaatgtccaaggtaccacagcaagcggtacattgaacaaaccaaataaataaaacaacaaaaatcgattacaattgcgacaaacatcatacctagcgacgtgggtacagatcccaacctaagtctggctcttttcgcttcaatactggcaccccagagctgccaccctgtgacatgttacccatgcgctcgtccacaaacatggtctgaccttggaaagacacaggccaatagcttgcaccttccctacgtgcaccttcatatgaccttccatagttgaagaccatgct

SEQ ID NO: 37057 - DNA, 350 bp, Oryza sativa
  Clone ID: uC-osrocyp037e12b1
ttgtcctcaagaacctcatctgtattcccagctcgattgcactttgaaggtgaactgggatggaaaggttctgcagccaccagtgcttttcgaccggcttctcctcggtgtactcccgatggagagaaatcagtatctgcctcttcacagagaacaggcaatgctctgtttgacttgaatgtttctgaaagtgacaatgctactgctggtgaaccactttcagcagccatccttccgctttcttctgacatagtgcgaaaggatgcctctgcaactgttggcctgaatagccttgaacttgaccttaattgtccatgtgacgatgaggaagctgcaatcaccacatgtta

SEQ ID NO: 37058 - DNA, 251 bp, Oryza sativa
  Clone ID: uC-osrocyp037f01b1
cccaccgcgctcgagacgctcgagggggggtttttatacatgttcggccgcatgcccccgacatatggcaagctccagaagctcaagttcttgggcctcttgggcaacaaccttaatggcgctctctcggatgagctgttcgagctctcgacattggagcagctcatcatcggttacaacgagttcagcggctctatccctgacgtcattggcaatgtagccttgttccagttcctttacatggcgatcgg

SEQ ID NO: 37059 - DNA, 77 bp, Oryza sativa
  Clone ID: uC-osrocyp037f02a1
tttggtttttttaaagaaaaaaattttttttttttttttttttttttaccttgtgtttgtataattttttttttggg

SEQ ID NO: 37060 - DNA, 417 bp, Oryza sativa
  Clone ID: uC-osrocyp037f02b1
tttatagttggcccccattcctcccccaccccggggttctctcctccgccgctcgcgtcgccgcctttttcccctatggcgctgccgaatcaggggaccgtggattaccccagcttcaagctggtcatcgtcggcgatggcgggactggtaaaactacatttgtgaagaggcatctcactggagagtttgaaaagaaatatgagccaaccattggtgtcgaagttcaccctctagattttaccaccaactgtggtaagatccgcttctactgctgggacactgctggacatgagaagtctggtggacttagggatggatactatatccatggccaatgtgcgataattatgtctgatgtcacttcaaggctgacataccagaatgttccaacatgtcatagggacttgtgcagggtg

SEQ ID NO: 37061 - DNA, 456 bp, Oryza sativa
  Clone ID: uC-osrocyp037f03a1
gtctggtgcatcgagggcgccgccgtgatggagtggctcggctcgcgcggcgggtggcgcgaggtcggcccctcccccccgggcctcaaggccggcaccgcccgcgccgtctgcgtcggcggcggcgagcgcgtcgtcgtcaccggcgccatcgaggactccgacggcgggtccggccgccacgccctctgggtgttcgacgtaaagaccaagaactggaccgtggttcgcccacctccagagttcgccggattcgccttctccgtcgccgccgtccgcatctgatccgatccgatccgccattgacgacgaaccccgccaagatccaagatctcgatctggatccagctgctccgcctcaaggagatctctactacacacaaccaaatactactctactctactagaacagtagtatgtgcacacgaaaagaatcacaaggagaagagaagggga

SEQ ID NO: 37062 - DNA, 494 bp, Oryza sativa
  Clone ID: uC-osrocyp037f03b1
gttctagatcgcgagctgctgccctttttttttttttttttttgagacagaagatggactctgcaatctgcacctcaaacggctggtcataatatgtacaatggattggattattgctactcataaccataaccatggttgaacgatggaggatgaggaggggatccaagatcatccccttgattcctccatggttttcttggacaaaaacaccacactcatcatcatcatcatcctcacaacaacaacagattggggagagatagagagaggagaggagcttcacaaactcaccactagcttcctctccttctcttctccttgtgattcttttcttgtgcacatactactgttctagtagagtagagtagtatttggttgtgtgtagtagagatctccttgaggcggagcagctggatccagatcgagatcttggatcttggcggggttcgtcgtcaatggcggatcggatcggatcatatgccgacggcggc

SEQ ID NO: 37063 - DNA, 443 bp, Oryza sativa
  Clone ID: uC-osrocyp037f04a1
cagtgagttgtccacctttatcttcatatgttttagttagctaagctacattgtcagataagattacttgagcatcacgtacggttgtgacatgaacatcatgattcaggtacaaaaaaaactgtctcaacgatgcatcaaagtatcaaacatgtaaaagaccgaaggaatctgccgtcgcaaggaatcatgcaaaagactgaagttcagtgagttgtccaccttatcttcacacctgccctctcctcatcctattcaccacctgccctcccccccccttctctagatcctcatcctcccgaggtttctttggcacaactggttttgctttgatgttgcgaaaactcagaagtgtcttagcacttatttctttgattccagcatcttttagcagcttaatctcagatgtcttcaccaaaacaactgtacagagatttttttgg

SEQ ID NO: 37064 - DNA, 521 bp, Oryza sativa
  Clone ID: uC-osrocyp037f04b1
ttcttttttccccaacgcgttctcaaccctactccatcccacttcgttgtcatctctgatgaatcttttctctcctgctgcaggctgcgcgtgcgcggaggaaaggaatctttatggagccaaaatttcgcagagataggaatggaatccttacgaagccaaaatttcgcagagaggaggatatctgcttgaggaaaaaaaggacggggtctcccttcctgcatcagaaccgcgtgatgatgttaccgtttgatgtgacgtaccttagtttgtacgcgagattcaacaagatgaaggggccggtgggcaaggcgtcacttatttgcggaggaaaggaaacccatgatgccaaaattttgcagatcggagatggaggagattcagttcattgtgtgcaaaaaagacgactgatctccccctgcaaatgtgtacggaggaagcctatgattggtattacaactcgtattgatgagcactacaccatggtgtatttcgagatccctgcgagcgtggattcagca

SEQ ID NO: 37065 - DNA, 407 bp, Oryza sativa
  Clone ID: uC-osrocyp037f05a1
gttatcatcaaccacatgctgatctacgtataactgggaaccaaatgaatagactattaaacttactgttttttttacagcattaatagaagcaaacaaaacactatcacatctctatcagcaagggatgtgaatcaccacagtctacagaacaagtcactgccactctgtgttttccaatttaactcttggcttgaatctgattccttggggaaaacgatttcctgtgtaggagtgcctatgatatgcatgaccctttctcctgtgctctatgattacaatctttaaaatccaaactatagatgaaaaatggacccttgttatccttgaggttagaacaatggatctgcttttctgtgctatgcaaccaaccacaaattgaactatattgggcaaaaaacaatccc

SEQ ID NO: 37066 - DNA, 250 bp, Oryza sativa
  Clone ID: uC-osrocyp037f05b1
gtaactgttctcccgcatgacctcaagagagctcagcctaaggcgggcagcagctaagccagaggccgggatggagctctgcgccgtcttcttctcctcggtcttctccctcctcctcctcctcctcctctcagcagccaatgacgtcgtcgtgtcggcgtcgacctcatgcaccttaaggacctgaaccaactttggccagttttgcctagaccactacaacacccgtcacggaattctgctctgcgcc

SEQ ID NO: 37067 - DNA, 220 bp, Oryza sativa
  Clone ID: uC-osrocyp037f06a1
acagcaaccaatttattttcatattgggggcccgggcccaaacaaaaataagaaacaaaggggccatataattttttaaaaaaaggggaaaaaccaacccaaatttttttccggggggaacatcacgggatacatttataacagcaagctaaaggacgccactcctttttttttttttccgttaacggaatttgagccattgaaggggggaacgtggggt

SEQ ID NO: 37068 - DNA, 342 bp, Oryza sativa
  Clone ID: uC-osrocyp037f06b1
tcctggtcttcgtctccgcctccgcccttgggttgatatccagaatcagtctgcttggttcgccaccaatggcgaggctagccggcgttgctgctctctcgttggagctcgtcttgctcggcgccggcgtgccccggccgccggccgacgccgcggcgaagacgcaggtgttcctctccaagctgcccaaagcgctcgtcgtcggcgtctcgcccaagcacggagaagccgagcacgccggcgagaacacggtgacggtgacgtggtcgctgaacacgtcggagccggcgggcgccgacgcggcgttcaagaacgtgaaggtgaagctgtgctactcgccgg

SEQ ID NO: 37069 - DNA, 466 bp, Oryza sativa
  unsure (1)..(466): unsure at all n locations
  Clone ID: uC-osrocyp037f07a1
aagtaaatatatcatatattcgattatatatatatatataatagcagacaggttacatccattagaactcagaatcaccggaattgaacatcaaaagtacaacacaagcagcagcagcatcagccagcagcaaacgacatgattacccacgcttttggatgaagaacaagaagtacgagaagaagaagacgatggtcgaacaccttgatcgagctcaacaatggcgatcgatcaccaatcacctacttggtgaactcgatggcccaggcgttggcgtagatgtaggtggccttgaagccggtgaatccggcggcgcgggcgagctccctgaactccctcttgtacctctccttgccgccggggttgtgggcgagcatgatcatgtcgacgtggaacaccccctgcttcctcgccgtcgcgtcggagctctccgggagnacgcacttcaccaccaccacctttccgt

SEQ ID NO: 37070 - DNA, 510 bp, Oryza sativa
  Clone ID: uC-osrocyp037f07b1
ttttccgacaagctgccgtccaaggcgaacccggcggcggccgacatggtggaccgcatgctccgcctgctcgcctcctacaacgtcgtcaggtgcgagatggaggagggcgccgacggcaagctctcccgccgctacgccgccgcgccggtgtgcaagtggctgacgcccaacgaggacggcgtctccatggccgccctcgccctcatgaaccaggacaaggtcctcatggagagctggtactaccttaaggacgcagtcctggacggcggcatcccgttcaacaaggcgtacgggatgacggcgttcgagtaccacggcacggacgcccgcttcaaccgcgtcttcaacgagggcatgaagaaccactccgtcatcatcaccaagaagctgctcgacctctacaccggcttcgacgccgcctccaccgtcgtcgacgtcggcggcggcgtgggcgccactgtggccgccgtcgtctcccgccacccgcacatccgggggatcaactac

SEQ ID NO: 37071 - DNA, 452 bp, Oryza sativa
  Clone ID: uC-osrocyp037f08a1
aaagaaaaaaaaatctgaatattgttctcctaattacctgtgttttggagaactaaactaacaagaaaacgtaacatggatgggggacataaattacagatcgtcgggtggtggcagagtgtaagaatactttattccccacacttcttagacaaacgaggaacaaatttcgccaggcaaatgaggaacaaattgaaaggaacaaaactggaagagacttggaaaatacagtacctgcatgtcttgttggtcgtgagtcttgtcaatccatacagatctttataccaatcagtccatacacataatgtttaggtgttataacggcatcaatggatcttcttaatctttagcgagtgatgcttgccattttctgtaggattcctcttaatatatacagtgtttatagtcgtcttgacatgttcacagccatcacactccacttttccaggctt

SEQ ID NO: 37072 - DNA, 505 bp, Oryza sativa
  unsure (1)..(505): unsure at all n locations
  Clone ID: uC-osrocyp037f08b1
ccccaattcccaaattttttaacctaaccctagctttgcaaggagacgggcggcggggggcgctgcgtgcggcgtgcggtgcggcggcgggcgcggtgtacggcggcggcgagccggcgaccgcggggcagccagccaggcaggggcggctgccggctggacgcactggcgcagcatctcctagggtggcggcggagcgggcgcacggccgtggaggcgtcgacgcaggaagaggaccactcggcttggcgccagggcgcggggcagcggctgactcgtgaggcagcggcgcggcgcggcctgcggcgacagcggcattgcggcgcgacgcgcggcctgctgcgacagcggcagtgcggccatggacgacaagctctacccgcctcgaggcccagcgcgaagaaatcaagtcccgagccccgagcgagcaagattaatccccaggtgcgggtgcagattatcttccatacatgtttggngctctactgggactccatggcacatg

SEQ ID NO: 37073 - DNA, 427 bp, Oryza sativa
  Clone ID: uC-osrocyp037f09a1
agccaacgtatgacttgatgcattggccatccagatggcactgagcaattgtgcaccgctacaattcaatgatcaaacatggtaaaactcaatatctcccaaggaaaacccctccattttccacaaatctaagtaaagaatcaacacgagaaaacaagtggaagctatgatgtgcaagggagaagaatttcaggggctctgctcgattcgtggccggcgaggccgtgccaccaccgtgcgctgctgggactggcacacctgcgccgggaacttgcacccgaaccggttggtcaccattgatccccaccgtccttccatcgccggtgttgctcctttctcccctggcgtgctgccgccgccacgccggtccattttttcaatggctttcctcatgcttgtgcactcacgcttcaagttctggacccgg

SEQ ID NO: 37074 - DNA, 396 bp, Oryza sativa
  Clone ID: uC-osrocyp037f09b1
ttcattattgagagctccctcgtctctcgtctctccctggtgtccttccccttctctgattcccatagcgacagcaaatgagcaaacacatcacaccccttcctttctcccgagaaatgccttagctcatagcagagttttttttttcttcttcttcttttttcgccattgctgttgtctgcttcgttcttccaaaggatcacgagatgcaggggaggaagatgaagagcgcgagggagatggccagggaggagaagaatcatcatcatcatcatcagcagcagcagcagcagcagcaatcgagctccaaaggccaagcatggttctgcaccaccggactccccagcgacgtcgtgatcgaggtcggcgacatgacattccatctccacaagttcc

SEQ ID NO: 37075 - DNA, 411 bp, Oryza sativa
  Clone ID: uC-osrocyp037f10a1
gcacaagaagccaaacgtgagagcttgatcaaaacttcagctctattcaacgttgactactctaattaaaattgtaactccataaaaactcggctacaccgagaaaactgtagttccaacagatacggcgtagccaatttacgcaatgcgcacccatacggctacagtatggatcatttaacgtctgatagacgacttcttaaggtgctgccgcaggtggcgacaaatactgaaaacagcgaggtaatccaataaagaaataacattggaaatcctctccagcggcaacccaagtctctaaatgatcataatcactcgagttaccctgcaacgcaaatttgtacccgggttgcgaacgggcagttccatttgtagaattgcagttggtgttacgggcaaaataacaacgag

SEQ ID NO: 37076 - DNA, 512 bp, Oryza sativa
  unsure (1)..(512): unsure at all n locations
  Clone ID: uC-osrocyp037f10b1
tttcataaagggcgtttgcgtattgtgtttgatccaacaggtgctcaaacaaatcctgagttgaatgtcgcgtattctcacgttattgatatttcagatactcaagattttaccatagaggttcctcatatgcaaacacgaactttgttaactagggctgaaccgccatttacactggttaccacacaatacggcactactttgttgccaccgttgtccactggtaatggaactattgctgtttatggtgagactattctcgccactcctaatagcacagtggatgcaccagttgatattaatgtttttatatcgatgggagatgattttgaagtatataatccaggtaatggatttcaatattatggttttgttccccaatctggaacggagttacacccagtttcaaacacgaccgaggagctaaatgctccattaaaggatgagtctttaatgattggnnggcaacatgtcgtgaatgataagattccattagtgtatatgggcgagtc

SEQ ID NO: 37077 - DNA, 438 bp, Oryza sativa
  Clone ID: uC-osrocyp037f11a1
aagctcaaaccaaaccagtaccagtactagttaattctacatgcatgatcgatccttcaacttagtacaggctccagcatgatggagaaagcatgaacacttatgttacatgtctcgatttggaatctaatatcatcatgatctcgattgatttctcttaatttcaacacctttctctctccataaccaggagattactactatactatatatagatagactagtgttcgcatggcctcatcgtcttcacctcatgcatcttgattcttgacatgggctaatagcagctgagcacaacgatgaaccatcttggaagatggcaaaaacattcagagacaaaccaccgctcgtcgatcgatcacacagtgccagacacggcgggagcagcgtgggtggtgaggtcagcgaccgtggggcggcgggggatcaccgggaaga

SEQ ID NO: 37078 - DNA, 528 bp, Oryza sativa
  Clone ID: uC-osrocyp037f11b1
tttttcgagcacattacacaggagtggccacggtcgtctactacgctttctacttagctcacatggttgaagtaacgacactgatgaacttgctcatgcactctcttgagagcaaaaatctacattaagagaaccaacctgccgttagatatgatggagtcgaggtacgtcaaggtggattcgcgcttcttcctcgtcgacgacaactcctcctcctcctcctcctcctgcgccgccgccggcggcggtggcggcgacggcgattaccactacctcgacgcctgcttcctctgcaagcgggacatcaccttcaaccgccacatcttcatgtacaagtacgtaccacgaccaccatcttgattttttttttctctcgttcaatctcatgcatatttgattgattgattggttcttcgattattcagtgattcatttattgattgattgcgtatatatgtgttgcttgtgcagggggaacgcggcgttctgcagcgacgactgcaggcaggaccagatggacatggactc

SEQ ID NO: 37079 - DNA, 480 bp, Oryza sativa
  Clone ID: uC-osrocyp037f12a1
ggcgctaccgcctgcgccgctcaggtgctcgcgttgagcatcgcgccgcaaccgccgccaccgcagccgccgccacagcctgaaccgcagccaccggacttggcatgtccaacggtggagctttccatggccacgccgtcaccacagcctccgtcgcagtccgccgccgcagtccgccggacttgacatggacagtccttggagctttccatgaccatgccgccgccacaaccgccaccacagccgccgccgcagcctgagccgcatccgccggacttgacatggccagccttggagctttccatggccacgccgtcaccgcagtctccaccacagccggcgtcgcagcctgagccgtacccgccggacttgacatggccagccttggaggcttccatgaccatgccaccgtcacagccgccgtcacatcgccggcgcagcctgagccacagcctgcacacttcgcatggacatatcctt

SEQ ID NO: 37080 - DNA, 529 bp, Oryza sativa
  Clone ID: uC-osrocyp037f12b1
tttttcatgccagttcacctatcgtcagtcttcgagttgctgcctcttccactgtcccagtgaaggctcagcaggttcttagcatgatcaggacagaacctttctctcttaagagttttctgtcaccgaattccatcaaggatcaaaagatgagctgctggactcgctttgtgtatgattgcaatactgaacttatccgtcttcaaattagggatcagaaggcaaagaacggcatggttgtcgctcgggagttggtcggagtaacaaagtcatcaaagaaaccatttaagctagcagagttcgtggacaacaagtggtcactgagcaactctaacttatgcatcactaatgacatgaaaccaagcaaggatggctctatacttgagctcaaatgtgacaacaaaacgatcaaactctaccagggaaagaggctagaatttcaacggaagtgcttgcacaatcacgcagaggagaatgcttcagctattactgctgtgaagttctctgctgaacatccctatggcaaagc

SEQ ID NO: 37081 - DNA, 422 bp, Oryza sativa
  Clone ID: uC-osrocyp037g01a1
gaattgaaccgtttacctcagtttgtgcgtgcacttctttaaacagaaccaaaacatcctaaacacactacacaactctgaaaaaacaaaacaatactcgagtgatttttaccaaaacaatagagcccttcaaaatttgacttggtgttttctgccctacaaaagacttcatcagcttacttttagctcattattaactacataataaactcaaatcaaacataaccttgtgaaaaacgtcagctaatatagtagtgtaactcatcgtgtaaaataaaaacgagtgtcttatccttttggtataacatgtagccgccatgctgtttacacgacccaaattacagccatttaccttcggattgacctcaagaaaacaaacctttcgcagcagagacggaactgttatccagaacctccatggg

SEQ ID NO: 37082 - DNA, 537 bp, Oryza sativa
  Clone ID: uC-osrocyp037g01b1
tttttgtccaatttaagtgaaataagctcttggtgttgcccagaatttacagcgctcctgcgccttaatatcaactaattgtgtatgatttaaccgctcagctctttcactttgccctttctgtatttatgcatgtacgagaaggctagtaatgttttatatatttgcactgtgagaatttcttttcttggatagtcagcaatgtaacctcttttgcaagctgtagaatatgatcatatgttgtcctccttagcattatgttagtttctgtacgttgaagtacgagaatttatgttcttgaagcaaaaagttatttagcatttgtctattcatcatagtttgtactatgtagaaattgtagcattctctcgtcgttttaaggtgacctgaagacaagttcaacctgaagtcacccgaagaaaggagtattcttgcgaatcaaacttggttgaggtggccgtctgggatcttgacatctgaagcttgacatctgaagcaagatgatgatgtttgctgtgatcacctgtgctcatacat

SEQ ID NO: 37083 - DNA, 363 bp, Oryza sativa
  Clone ID: uC-osrocyp037g04a1
tttttggtttttttttttttttggtttttttttaaaaagaagcttctgacatttattatttcatcgatgattccaaagcgcgcaaaagaaaatcgaatccaaacaaacaggttgggcttctctctctctctctctctctctctctctctctctctcctccaaatctttggaaagaagaaaaaacaggggaattaaaggcttttaaaacaagaggagaagagagaaactttgaaggaccctcatatgtatgaccctcatgtggtgattcaattgggttatttagtagcaggggttttgttgcccttgggggggcaagaggcccccttgttgttgcccctagacctttacccttgccagggcccc

SEQ ID NO: 37084 - DNA, 295 bp, Oryza sativa
  Clone ID: uC-osrocyp037g04b1
tggtcgcgtgggtttctttcgtcttcagttaaaatttgaagatggagaagaggaaaaattcagacagagatcgacatggagacgaaggtgaccgtgggcgtcgtcctcctgctgctgtgcctgtgcggcggcgccgcgtgcgccgccggccgcagcggcggcgagttctccattgtcgggtactcggaggaggacctggcgtcgcacgaccggctgatcgagctgttcgagaagtgggtggcaaagtaccggaaggcgtacgcgagcttcgaggagaaggtgaggtggttcgtgg

SEQ ID NO: 37085 - DNA, 90 bp, Oryza sativa
  Clone ID: uC-osrocyp037g05a1
actatttaagagctatgacggcgcagtgcaccgcgtatcgtcaagcatctggagtcctcctttttagtcggccgctcctctttatctttt

SEQ ID NO: 37086 - DNA, 405 bp, Oryza sativa
  Clone ID: uC-osrocyp037g05b1
ctctctctctctcctcactcattctctcgcccctcgcgccaccgcgcctggagctctcgccgcgcctcgcctcgccgacgaagacgacgaggaggtcggtggtcgtggtggtctggtttggtgtccatccatggcggggcagcagccgccgacgggaggagccgaggacgacttcttcgaccacttcttcagcatcccctccgccgccgcggccggcgccggcggcgtcggcggattcggctcgggtgaccaccaccccttcccgctcgcgctcagcctcgacgccgagggcgccggtgccgccaggcgcctcctcgacggcggccacgacggcggcaggacggaccgggaccccgtgcagctcgccggcctcttcgccccggtgttcggcgccgtcgtcggagt

SEQ ID NO: 37087 - DNA, 228 bp, Oryza sativa
  Clone ID: uC-osrocyp037g06b1
gtcagtttgcttgctaggtcctggtgtcactttttgtttgtagaatctcaatctatccccttctatatggttgatttctacatatacgtatgtagaggagatgtgaatgatctgtggttgattgatggctcatttattgaatgatgccgccttttatcaattctcagcgcatatcttaccatgactctgtttattttaccctgcccattcgccaaatttattgattga

SEQ ID NO: 37088 - DNA, 74 bp, Oryza sativa
  Clone ID: uC-osrocyp037g07a1
attgtagaggagctatgacgtcggatggacgcggtcggcagggtgggtcctgtggggcgggcggcccttttttt

SEQ ID NO: 37089 - DNA, 465 bp, Oryza sativa
  Clone ID: uC-osrocyp037g07b1
tgtaccatagccagaccagttggccatctatggaaggatcttccattcccagtaatggctttaatttgatgggtgctcacccagaatcagcacagcatggtaattatgcatttccaactagtcacatcagccagtgctttcaacctactagcaatacatggatttcccagtctgcaaatggtattgctgatggaataccacagtgggaatatgtcaatggaatgaataatgctccaggcagattttcccgttcaggtatgacagaaacagtgaatggaagcttccgtgaatatcagaatggcccttcaaccttatgtcgagggcctttaccctattttcatcagcatgctggcatgcatgctcataatctgcttgatcatacacaagtgcaagctccttaccaacaatgccacaataatcctgtcttacatggtgtaaatcattctggcaaccgttccatttggt

SEQ ID NO: 37090 - DNA, 376 bp, Oryza sativa
  Clone ID: uC-osrocyp037g08a1
agcagagaaagcaacacattgccctgaactatatacagagtctttgtagtttgtacacaatagatcaggccatcacgagccattgagcaatttggcacagtatcttgcagaggcagtcaggcagaggaagagatgcccctctctccgttttacatggcgaagttgcaatcggcagtaggattcggttcacgctgctgcatgcctcggccgcgcggcgaccagacgggggcgggccagaccggcagccggagccgtcacaacgcacgctttcgcgggggcggtggctccgccttctttttcgagctgtgcatggttcacattacctgcacgtcctttgtaccccctggtctgcacgtcctggtggaggtcaaggatt

SEQ ID NO: 37091 - DNA, 238 bp, Oryza sativa
  Clone ID: uC-osrocyp037g08b1
tgtgtgtttgcctcttgtgggagggagaggcgaagccgcgaagcaggcagagccggcggctgcgcgtgccagccacggcgaggctcggcggcggcaagccccggcggccggccgagccgtgcggcggcggcggcgaggcgcggctgcccggggggaggcggcgggcggcgcggcagcagatcgggacgcgcgtcatggcgtggtggcgcgccagggtcgtcgtgcccgtgcgccgtgc

SEQ ID NO: 37092 - DNA, 362 bp, Oryza sativa
  Clone ID: uC-osrocyp037g09a1
ggctccaacaccattcattaattgaactgaaccggggcaatttcaagggattccacattacatcatccacatgttaccacattcaaaggaaacaaaagtttaaacatcagccctaaagttttgcccatcaaaacattattctttcatcgaatccctaacataaaaaaagcgttggcgcggtacaaacgcccccgccgagggaaacggggggggaaaggaagttttacattaccattgtagggggggtttgcaattacgggatgtcccaaggcttgggctccggaacggtgacgaccatcccctggagctccggtgtgagcaccacctggcaccctaaccgtgcgtgcttgtttagctcccgg

SEQ ID NO: 37093 - DNA, 450 bp, Oryza sativa
  Clone ID: uC-osrocyp037g09b1
ttgacgcgtgggcagatctcccacctcgaaccctagccatggcgatcgcggcgcgcgccctgcgccgcatccccctccacctcgccccctccctctcgcgggccttctgcgcgctctcgccggccgcccccgccccggccgctgcctccgccaaggtcgccgaccgcatcgtgcgcctcctcgccatcgacccggacggcgcgcgccgcgaggtggtcggcctgtccggccagaccgtcctccgcgcgctcgccaacgcgggcctcatcgagccggagtcccaccgcctcgaggagatcgacgcctgctccgccgagtgcgaggtccacatcgcgcaggagtggctcgacaagctcccccctccttcctacgaggagcgctacgtcctcacccgcgcgtcccggaccgggagctaacaagcacgcgcggctcgggtgccaggtcgtgctc

SEQ ID NO: 37094 - DNA, 450 bp, Oryza sativa
  Clone ID: uC-osrocyp037g10a1
ctcacgaacagataactagaaaatgacaaatgttttaacacaagttaatacgacagtatcaaaataaggcacaatagaggtgaaaatacaaaccgacaacataattctgacagtaccaggaaatacaatctagaaaccacgaagaactagcaaccttgaatctgcttcggtgctactcccatgctcagccaaacttttctagtccaatttgaagactcttcttaagcatcactggatcaacaaactttattccttgtcatcactacctgggctacgggagccagcacgctgtggtgatggtgaaacactgcgtgaaggaggtgaaccttttccatttgtctctttttcaggacttccattgcgagcagggctcctgcgtggtgttgatcccttgagaggagggctagcgctgtgccgagtaggcgatgcactatgaaatgagcggctccg

SEQ ID NO: 37095 - DNA, 365 bp, Oryza sativa
  Clone ID: uC-osrocyp037g10b1
ttgtctaggtctcccacgcggcggcggcggcgggcgggggtttctcgccatgtcgcacttcgggaggtcggggccgccggacatccgcgacaccttctcgctcctcgtcctcaacatcagcttccgtaccacagccgacgacctcttcccgctcttcgaccgctacggcaaggtcgtcgacgtcttcatcccgagggatcggaggactggggactcgaggggattcgcgttcgtgcgctacaagtacgctgaagaggcgcagaaggctatagatcggcttgatgggcgtaatgtggatgggaggaacatcatggtgcagcctgccaaggttgggcccaatgcggagccattacgaaatggaagga

SEQ ID NO: 37096 - DNA, 188 bp, Oryza sativa
  Clone ID: uC-osrocyp037g11a1
ttaccgtccgcgtggagcgcttaagtgttcaccttgagtatcagtggggaaccggctggaccggaatcgcccgcacactctgaagccgaaccaccggcctgagcatgaacttctgggggaactcacattggcaagatccgcccacaacagcctagagccagaaaccaatctcacgcatgcgcgcgggg

SEQ ID NO: 37097 - DNA, 277 bp, Oryza sativa
  Clone ID: uC-osrocyp037g11b1
tggcatgccagttcacctatcgtcagacccagtgttagctgcctctgccactgcccgagtgaacgctcagcaggctctcagcatgatccggtcagaaccttactctcttaagagttatctgtcaccgacttccatcatggatcaaaagacgagctgctgtactcgctatgagtatgatcgccatactgaacttatccgacttgaactcagggatcagatggcaaagaacgaggtggttgctagtcgatagtaggcagagttgcatgaccagcaatgc

SEQ ID NO: 37098 - DNA, 455 bp, Oryza sativa
  Clone ID: uC-osrocyp037g12a1
ggaccatgggcaaatcacacaacaaatagtgtcatccctccattatgtgtgatctccacaccagcatacagcaattaccaaacagaaagaaggagacgagctagtacagtttttaactagacgaaaagaacaactaaaactacttgatcccatgatcttcccattctttgttcttccagccacaaaaacctgtctcttcctctgcttcagttcctccagtcgattccctgtttccttcctttgctgatttgtctcacacctccagccgtcttctatcaaagttccagccatacttggaattatataatctcttttgcaacctgctttagcaagtcgaagtgtcgaacccacattgtagacttctttggccttccaccgacctcacttgtaatgttttactcaagcccactccataccacttgtacaatgcttcgatctctctatgatatttggct

SEQ ID NO: 37099 - DNA, 311 bp, Oryza sativa
  Clone ID: uC-osrocyp037g12b1
tcggtagttgttgggcccccggcccatttagcccactcccaccccagcctccgcccccacccccgtgtgccggcggcggtgtagatggtcgtggcgtggtggccgtcgcgaggatttcgggtgcagagtacggtgacttgggtgccgcactgaatctatgattcgattttacctgttttggttggatggaggagaaccggagaagtggtgtttctagtatttaggttgacattgaaacatttactcatgtgttgttgccagttgccactactattttttaccatttttaacacctattgtgtttatgctta

SEQ ID NO: 37100 - DNA, 395 bp, Oryza sativa
  Clone ID: uC-osrocyp037h02a1
gtagcatcaaaatgtatctattttattattacaatctgtgtttattcagtttttggtgcaagaatattatgaattatgtacaacaagtccatgcatgatatctctttatacaatcaatgaatacatgaatggtcactgctcggtatgcaatcctgcgtgtataaatcacaactaggtagtagtagggtagcaatgatcaaggcatcttgatatataggcgactcaatttgatcaagaggaggatgccaagagattcttgaaccactgcactgaattctttgggtatttcttccggttcttgtagtctacgtagtataatccgaatctcgaggtgtatccagcggcccactcccagttgtcaagaagagaccatgcaaaaatacccggaacattac

SEQ ID NO: 37101 - DNA, 436 bp, Oryza sativa
  Clone ID: uC-osrocyp037h02b1
ggtccggaattactggtcaacgcattactagctttagtaattgaaccatatgtaacgctctatcactgtgacctttcacaagctttggaggacaagtacactgggtggcttgacaggcagatcatcaatgattatgcggtatatgctgagacgtgcttccaggcatttggggacagggtgaagcactggatcaccttcaacgagccccacaccgtcgcggtgcaggcctatgacagcgggatgcatgcaccgggccgctgctcggtgctcctgcacctctactgtaagaaagggaattcaggcaccgagccctacatagttgctcataacatgatcctctcacatgccacggtttcagacatatacaggaagatattcaaggctatgtcagattggggagctgggtcttattttgaatgtttatgggactatccat

SEQ ID NO: 37102 - DNA, 67 bp, Oryza sativa
  Clone ID: uC-osrocyp037h03a1
tttgggggtttttataacgtatagggttttcccttttttttatttttttttgtcaaaaattaatttt

SEQ ID NO: 37103 - DNA, 345 bp, Oryza sativa
  Clone ID: uC-osrocyp037h03b1
ccgctccggtcccggttcgatccaccggggcgtttttcgttaaaaaaaggtcgaagagaacgcgggttggttccatttccgagaacaatgtggggaggccccatcctccccgagttcatcccggcgccgtggcgcgccgcggcggcgaccaagcgggtgaccgtctgccacctgtggccggccggctccaagaacgccgcccgcggcaagagcaagagcaagaggcagcagaggagcttctccgacgttgactgacttcgaggccgtcttcgagcagttcgacgatgactccgacttctacgacgcggtggatgaagactaaggacacttcgtgtttgcgttcaa

SEQ ID NO: 37104 - DNA, 355 bp, Oryza sativa
  Clone ID: uC-osrocyp037h05a1
atgttataaattctgaatcaagtattttacattcatgtacaacaacgctagctacaaagtgaaaacatggatcgggagaataatgtctctctctaaccactagggcaatctcaatctacatcccggcctaatgaagctattagttacaactactgtaaatcatcaacctttatccctccagcaagatctaggggatgaggtctggtctattttacaacattcatgaacttgtaattttcatttaacaggctaattttcattcatgaatttgtgatggccataaggagcaagcaaatttttcatttaacaagcagcggcaattagaatctcgccttttagaaacacattcgaacaa

SEQ ID NO: 37105 - DNA, 496 bp, Oryza sativa
  Clone ID: uC-osrocyp037h05b1
ttcaacgtgctgggtgttagtcaataggagaccctatatactctttgagttattatggtgcttcctcctgcccatcttggccaattctttactaatgtgtgcaatttatagacacctttctcagaatcatttgcccagtatctagcgtcatcaaattcatctatttgtccaccaccggaatacttcgccaaccttttgtttggccttgttaataatgtcatacctcctttgagttgcaagtccaaatcaaacccatcggatgctgctggcagtacagcacgcacaacttataacaagccttatacatcttccgctggaggaatcagtaactctgatggtcagagggcattttatcaaaatcaggagcctgaatgatatacacagcttgttctggaaacagcaagccgagacgccccctcacttggtaggccaccttctcaaagacacgggagcctcgacttgaaaacctagcacacagcgccagcatacggagtca

SEQ ID NO: 37106 - DNA, 108 bp, Oryza sativa
  Clone ID: uC-osrocyp037h07b1
ccttttcttacatggacaacgaaagaactccaaaagagttttactgtatcgtgagcttgcccagacagcacagcaccgagttgttgaccgcgagagatgtttcaccct

SEQ ID NO: 37107 - DNA, 468 bp, Oryza sativa
  Clone ID: uC-osrocyp037h08a1
gcattacacattcatgaccattattttcgtgaacaagcaaggtgacatgcatgcattcaccaagataaaagacttaaattacaagggtgttactgatgtttgatgatcaacaccaagctatagcaagcataggtgcgctctggcagctgtctacaacttaacccttcttcattcttccagtgcataataatccattaatccacccaaagagatcaatctctagctagacaagagccacacacacacacacacacactaccagttatatactctgttgttgcacccatcaaaccatgagcatacacgtgcatagcatcaagaggaaccagccttttcagcaggatggctgctcctgatgttatgcagctaattaacccaaatgcaagcatgcatgcatgtgatgtaatatgtaagatatgatctctatattttcattgattcttcagctagcttaattagccagccgag

SEQ ID NO: 37108 - DNA, 187 bp, Oryza sativa
  unsure (1)..(187): unsure at all n locations
  Clone ID: uC-osrocyp037h08b1
gtggagagagtgagcaaaagctagagagagagagtgagtgagagaaagagagatcaagtgagtgctaccttgttgcttggttgctagtatagctagcttgcttgggtggaagatcatatcagcatatcaagggagagggaatatggataggggagccctccacanaccatcagctctagcgggggag

SEQ ID NO: 37109 - DNA, 386 bp, Oryza sativa
  Clone ID: uC-osrocyp037h09a1
agcgcagaaatagccatggtatatttatagttacagaaataatcctcaaacgcacggatacaccattgtaacatttcactcaaaagtattccaaggtatcgtatttattcaatccaagggatgatttataaaagagagaactctgctaatatcttaatacatacatatccttgcggtgatttttcgtccgacacccccttccccccctaaaatcccagtcggaattccatatcacacaaatagaatcccacattgagcacaccttcttttcaaatgccacattatcacaatcgtcacaggaccggcttcgtccgtcgggggtgcgcaccagcagcccccggcctggaatcccaattgcgagccaaaaaaaagaaagttcgattcaa

SEQ ID NO: 37110 - DNA, 321 bp, Oryza sativa
  Clone ID: uC-osrocyp037h09b1
gtggcgggcgttggcagcaggcgacggcgccctcccggcaggaggggagggggcgaacaagggcggtgcccttccctccgccggatccagcgggaggggaggcggcggcagcccgtcggcgtcccagcggcggtggcgccctcccctccgttggatccagcgggaggggagccggcggcggcccggcgtacctgcgacggcggcaccctccccttcgatctagctgtatgggaatttttggataaaatttgggtgtatatgcttcagtttttcttggctctgattctatttgtctgatttccagggggatttagggagggg

SEQ ID NO: 37111 - DNA, 477 bp, Oryza sativa
  Clone ID: uC-osrocyp037h10a1
actcgccgaaagccagctaagatccctgatcattgtttgctgagcgtacaacacaaaagaacagtaaaaagggggaaactgtttgcaagttgaaaagggtaaagagaattgtttacctgttgtatgcaaaaggaaaaatggcctggcggatgaaactacaacacctcaaagacatcacagaccagttctctccagggcgggaacttggtaaaggtgggtttggagtggtctacaagataaccattgcgactgtcgaactccaatctatatgttgctgtagtcgaattggaatatagctgttgtttatctacaaaacttatgggaattcttgcaaatgggaaacccatagcggtcaagaggcttcaggtcatgccaggaatacaggacagacaatttaataatgaggttcatcatctcatgggacttaagcaccagaacatagtacaattaattggctactgtgatgaaagacaagag

SEQ ID NO: 37112 - DNA, 431 bp, Oryza sativa
  Clone ID: uC-osrocyp037h10b1
aatacttaatggggctctttactaaaaagatactaccaaatagacagtacgaataattacgtgatgaaacacaaccctcaagcccactaccagagaagaatcaacataaacttgccctgtcatctgtaaacagagtagcaacaagctgcttccgaaaggcatattaaaaaaaaaactcgaatattaggaaataacctaatatcaaataattagaaggggtgaggctttgaacccaggtcgtctagcccaccaccttgtggaggtagcaggaagacccctgagcatttctcgaaaggcatatacaatgcagaatgacgagtggcctcgtgtgccaccacataggagccgagacgccacctcaattgagagcataccctcgtaaagacacgggagcctcgacttgaaaacctagcacacagcgccagcatacg

SEQ ID NO: 37113 - DNA, 370 bp, Oryza sativa
  Clone ID: uC-osrocyp037h11a1
ttttgttatcaggaagtactatgcaattcataataggcggttcaaccaaaattacgagttacaacaaggtcccataaattagaactgatactacatagacatttattcagtgcatccaaggagagtctcatatcccttcgtaagtctataaagaaggaagctcttatagttccatcctgtcaaagggagaaaggggtcgaaacaacggcattagccggctgtgggcaagaaaagacggattctcgttatctctagctcaggtccatgccgtcttcaacttggcttgggattggagacacagcggtgtaggaccttttgaatgaggatggatgcagttgtgcaccaagcctgcgcttaaaggagcaccctt

SEQ ID NO: 37114 - DNA, 518 bp, Oryza sativa
  unsure (1)..(518): unsure at all n locations
  Clone ID: uC-osrocyp037h11b1
ctccctgccattgtcctgctcgagtgctccgctcggctcgctgcgaggttggtgctccgcgggtccacgcggcgttgcgagagtgagagagagaggacgaggtcctcctccttccgcgtcccccgctcgctgtttcatccgcttcttcctccctccatcttcgcttgtgagctcctccgcgcgtcgcgagccttactgaaacttctgatccctccgaaaccgagaaaagaggggaatctgtgaagagattttagcagcagtgcaatggaggtatttggaaaatccgtgattgctgagcccagcaatgtgatttacttgtccagtattcttaacacagaagggccaatccctagtcacaagtgtgacaagaattgccagaacgagcacgtctttggcaacatgtaccgttgcaaactgaccgggaccacgcacatctgcgacaaaaactgtaaccagaggatcctctacgacaaccacagctngttctgccgggtcagcgggcagctgtttcggctctt

SEQ ID NO: 37115 - DNA, 403 bp, Oryza sativa
  Clone ID: uC-osrocyp037h12a1
ttttgtttttttttttttttgggttttttttttttggccccacattattattcgacaaaggaatataatactgtaacaagggaagctttgaaaaggacgtccggaagttaaaacgggcaaaataaaccccaaagcctgctttgggggatgcaagcctagcacgaggggatgggtcgactcaccaggaacacaaaacgattttcccagatgagatggtaagcatggaacgcttatagtatgtacccggggcacaaacaccacacaggggagcgctttcaggactggtgatccaggtaggcatctttctccggcttggtctcgccactgaggtaccccacaaggcttccggaaacggcggagacccaggagacgctgcgtgccaaccaggccgaaggagtggccg

SEQ ID NO: 37116 - DNA, 494 bp, Oryza sativa
  Clone ID: uC-osrocyp037h12b1
tcgttggaaactctgggtccatatgaacaagttgcggtcacttccatcatctatctgcgagatgagatcattgtacctcctggatgcacatttcaatgaactatgtggtctgccatctgccatagggaaactttcaagtcttgaaattctgaacctgagcagcaactttagtgacctgaaggatctccctgcttctttcggtgacctgctgaatctgcgcgagcttgacctcagcaacaaccagatccatgctcttcccgacaattttggtcggctggataagctagagaagctcaacctggagcaaaatcccctttctatgccgccaatggagatcgtgaacaaaggcgtggacgcggtgaaagaatacatgttgcagaggtggcttgacatcttgctcgaggaagaacggatgagcatcgcagcagcggagagccctcaagcaccgaccactccttcggcctggctggcacgcagcgtctcctgggtctccg

SEQ ID NO: 37117 - DNA, 543 bp, Oryza sativa
  unsure (1)..(543): unsure at all n locations
  Clone ID: uC-osrocyp002a01b1
ttcctcgcctcgtttcgtctagttgagcagccgcgacgagcacggcggcgacgacgacctccgccgcgacgatggccgcgcgcctcctcctcctcgtacttttcgccgtcgtggcagcgcgcgtaggcgcagcggcggcctatcagcccggatctgctgaggggcacacgatcgcgggccgcatcaagatcgatgctgcaagtgcaattgcaaagggctttggtcttccagccaagacatcaaacacaaaagtgatacttaacggtggtcagagggttacatttgccaggccagatggctactttgcattccacaatgtgccagctggtactcatttaattgaggtctcctcattgggctacttattttcaccagttcgggtagacatcagtgccaggaatcctgggcacattcaagcagcattgactgaaaacagaagagttctaaatgagcttgtgttggaacctctcagagaagagcaatactacgagaaaagggagcctntctncattatgtcacttttgaagagccctatgggtatga

SEQ ID NO: 37118 - DNA, 493 bp, Oryza sativa
  unsure (1)..(493): unsure at all n locations
  Clone ID: uC-osrocyp002a02b1
gttagtcgccgaatcggaggaagaagcagcagcttgcggcggcggcggcgaggcggagatgtcgtaccttctgccgcatctgcactcggggtgggcggtggaccaggccatcctcgcggaggaggagcgcctcgtcatcatccgcttcggccacgactgggacgagacgtgcatgcagatggatgaggtgctagcggcagtagctgagaccataaagaactttgcggtcatctacctggtcgacatcaccgaggttccagacttcaacaccatgtacgagctgtatgatccgtcgacggggatgttcttcttccgcaacaagcacatcatgatntgatctggggacaggaaacaacaacaagatcaactgggccttgaaggacaagcaggaagttcatcgacattgtggagaccgtcacagaggtgctcgcaagggcgtggtttggtgattgctcccaaggactactccactaaataccgntactaagctata

SEQ ID NO: 37119 - DNA, 403 bp, Oryza sativa
  Clone ID: uC-osrocyp002a03b1
gtagcctctctatagtctcagctcttcttccaccaccacccagctcctcctcctcctcctcgtcgttgttcgccaccaccgctcggagagatggcgagccagaccgccgacgccacggggttcgtcgcgagcgacccgctgtcgtggggcaaggcggcgctggagatgacggggagccacctggacgaggtgaagcgcatggtggcgcagtcacgggaggccgtggtgaagatcgaggggtccagcctccgcgtcggcaggtggccgccgtctccgcggccaaggacgcctccgcgtgggtggtcgagctggacgaggaggcccgcccccgcgtcaaggccagcagcgaggtggatcctcaactgcatcgcccacggcggcgacatctacggcgtcaccaccg

SEQ ID NO: 37120 - DNA, 327 bp, Oryza sativa
  unsure (1)..(327): unsure at all n locations
  Clone ID: uC-osrocyp002a05b1
ttcatctggaggtaattcaatgcagagacagagtatgctgttgcacaagcaatttctatgcaggaagcacacagacgtagcaataactggctgccacctgcatggactgttttgcttctcgcaattttaggttacaacgaatttatattccttctaaggaaccctttatatctgctggggctcttcgtcgccttcgtagtatcctatgctgcatggttgcaatatgacatcacagcctattttcgccatggcacgctctcaggtcttctgactattacatctngggtttctccccacaataatggacatcataacagcagtcatcaa

SEQ ID NO: 37121 - DNA, 223 bp, Oryza sativa
  Clone ID: uC-osrocyp002a06b1
cttcgttgttccagaagcttctggaaagtcggggaaacctacatggcgtacggcgatccggtggacgcgcacggcggaggcgaggcaacaattgaaggtagaggcggaccagtgcctctacctgacgagctgccagctgcacgatctgagcgaggtggagatcccgcccaccctggaggagctcgaactcacggcgaaccgtctcgtcgtcgacgacccccgc

SEQ ID NO: 37122 - DNA, 515 bp, Oryza sativa
  Clone ID: uC-osrocyp002a08b1
gtaggtcgtgctggagaagatgagccgggtgctggcccagggtgtccctgcattcacccctgccaccactgttgatgctgacctaaaggacctcagcctggtgatggaccacaacatgtcggtggccagctttaacgctgcccccgcttacctgcccaagccggcgcctgcaaggtggtgcgtgctacccccgcacccaagaaggagtgaggttgcccccccggcaaagaccgtcgaggaggcccctaaggctgcccctgtgcagcagtacttcccggcacccccccccaacgtggcgggcgcagctgccatctcgattgccatgcagtcggctgcctcgaagctggccggccccctaagggctgctgcaaccacccagatcaaccggctgcgcggaagcgccgggcgcgctggcatgccgatgattgctcccaggtcacccctcgaaaggtcgaacgtcaccgtgaacaggactctggtgcctctatggaggccaagagcacgacgacgatgct

SEQ ID NO: 37123 - DNA, 514 bp, Oryza sativa
  unsure (1)..(514): unsure at all n locations
  Clone ID: uC-osrocyp002a09b1
atttcatttcttcttcttcgccgccgccgccaccttccaccccttcagccgccactccaatccaaggaggatgagtgaagaggacaccaatgctgctgctgggcagcccaggcgcgcccctaagctcaacgagaggatcctgtcctccttgtcgaggagatcagtagctgcacatccgtggcatgatcttgagatcggccctggtgctcctgctgtcttcaacgttgttgttgagatcaccaagggaagcaaagtgaaatatgagcttgacaagaaaactggactgattaaggtcgaccgtgtcctatactcatcagttgtgtatccccataattatggtttcattccaaggacactttgtgaagacaatgatccaatggatgttctggtcctgatgcaggagcctgttattcctggttccttcctccgtgctagagcaattggccttatgcccatgattgaccgggtgagaaggatgacangatatagcagtatgtgctgatgatccctgata

SEQ ID NO: 37124 - DNA, 221 bp, Oryza sativa
  Clone ID: uC-osrocyp002a10b1
acttcagcttaagcaaatctgttttgcgaagcacaccgcctctcgtcaataattaaggcacagtggatgctctgttcagaaatgcgcaacaaccgagctcgaagcccatgtattccttctacgggaccctatagatctgctggggctcttcgtcgccttcgcagtatcctatgctgaatggttgcaatatgacatcacagcctattttcgccatggcacgc

SEQ ID NO: 37125 - DNA, 148 bp, Oryza sativa
  Clone ID: uC-osrocyp002a11b1
aaacgacacaggggaaacttatggaaacatccgccgaactctccggagggttccgcagcggcggcggaattcaaggacacgtgaggcggaccagtgcctcgacctgccacacgggacgaagcacgatctgagcgaggaggagatccca

SEQ ID NO: 37126 - DNA, 506 bp, Oryza sativa
  Clone ID: uC-osrocyp002b01b1
gcttgtgatcgatcgatttcgggtacgtatcaatggcgtccaaggcgttcgctctgttcctggccgtgaacctcgtcgtgctcggggtggcaagcgcctgcggcggcagcccgtcgtgcccgacgccgacgccgtcgaccccgacaccgtcaacgccgacgccgacgccgtcggcgttcgggaggtgcccccgcgacgcgctgaagctgggcgtgtgcgccaacgtgctgggcctgatcaaggccaaggtgggcgtgcctccggcggagccgtgctgcccgctgctggaggggctcgtcgacctcgaggcggcggtgtgcctctgcacggccatcaggggcaacatcctcggaatcaacctcaacctccccatcgacctcagcctcatcctcaactactgcggcaagaccgtccccaccggcttcaagtgctaagcagcgtgcatatgcaatgcctgcatgggttgatcctacgtacggtgattagttggctttgacgactcttga

SEQ ID NO: 37127 - DNA, 530 bp, Oryza sativa
  Clone ID: uC-osrocyp002b03b1
gtttcagatcgctcccagccattctctcctcgacggtctcgtcttccccacccctcgcctcctcgcgcgctcggtgagagaagcgaagaagaagaagaagaggaggaggaagaagccaggctaagccccgcggcatggcggaccagctcaccgacgaccagatcgccgagttcaaggaggccttcagcctcttcgacaaggacggcgatggttgcatcacaaccaaggagctgggaaccgtgatgcgttcgctggggcagaacccaacggaggccgagctccaggacatgatcaacgaggtcgacgcggacggcaacggcaccatcgacttcccggagttcctcaacctgatggcacgcaagatgaaggacaccgactcggaggaggagctcaaggaggcgttcagggtgttcgacaaagaccagaacggcttcatctccgccgccgagctccgccacgtcatgaccaacctcggcgagaagctgaccgacgaggaggtcgacgagatgatccgcgaggccgacgtcgac

SEQ ID NO: 37128 - DNA, 513 bp, Oryza sativa
  unsure (1)..(513): unsure at all n locations
  Clone ID: uC-osrocyp002b05b1
gtggaggagggggtgtagatccggcgggcggcagcgatgatgaagtcgctgctgccgcagagccagctgcggcggtcggcggcggcggcttcggcggcgcggtcttcgggaggaggcgcggggtcgggcggcgccgatggggccggctccgacggcggcgcgggcgggcgtgcccccgccacgtccacgttctggttcctcctccacgcgctctgctgcctcgtctcgctcttcctcgggttccgcttctccaggctcctcttcttcctgctcttctccaccaccgcgctctactcctccacctcgtcgtccttctcctccgccgtgctccgcgccacgacgacgacgacgaccaccaccacaaccaccacgaccaccaccaacaccttcaccctctccttccaagccaacccaaacccttccccatctaacctctccaaccacactgccctggacgcggcggnggcggccgggcacacgcagagccacgtggtggtggggcggcatgggata

SEQ ID NO: 37129 - DNA, 519 bp, Oryza sativa
  Clone ID: uC-osrocyp002b06b1
cttaagggaaactttgctatgatttctcaaacttggagaagttttttggagataaagcagtcaaagaagcaattggagttggcgaccttgaatttgtctcatgcagcactactgtttatcaagcaatgctgacagactggatgagaaacttggaagctggcatcccagctctacttgaggatgggatcaatgtgcttatatatgctggagagtatgatcttatatgcaattggcttggaaactcgaggtgggtccactcgatggtatggtctggccagaaagactttgtatcatctcatgaatcgccatttgcagtagcacggtgccgaagctggtgttttgaagagccacgggccactcagcttactcaaggtccacaatgctggtcacatggttccaatggaccaacccaaagcttgcctggaaatgctgaggagatttactcaagggaaactcaaggaggaatggcttgccgagcttctgagcaccgatgatgctggatgtgataaaatccactga

SEQ ID NO: 37130 - DNA, 487 bp, Oryza sativa
  Clone ID: uC-osrocyp002b10b1
cccacgcgtccggatcgatcctgtagccctagccgccaggctcctgcgccctgccgctcctgccgcgtttctaccaccaccggcgccgtctctacgccgccgccgttggtgcagtgtcgccggtcgccaccaccaccgtcgccgctgtgctgctgctccgttttctgctgctgttcggtggattgatttgcagagcagcaggtttggttctgcttcttgatttgtgtttgtctccagcgtggtgaagtcccaatttctcctactgctgtgtgtcctgaccagctacttcgtgagttgctgcagtagccaacaactagggggcagggcaggaagagcagagaagtcaaggaattgggaggaagagaggcaaggtgggggattttattttccaagatttcacaaattgatctcaaagttgatttttctcacagtagggctgaagggtagctccttttagtcctagaaattcaattgcacgtgggatcga

SEQ ID NO: 37131 - DNA, 157 bp, Oryza sativa
  Clone ID: uC-osrocyp002b11b1
cttctccattttttttctctcctctgcttttgaaggaactcgagaagcatcagccgcatctctactactactactactacccttgctctgtctgatccaagtccaggcagcagctagctagcgtggtggtggtggagtcgacggggatggggtggtg

SEQ ID NO: 37132 - DNA, 503 bp, Oryza sativa
  Clone ID: uC-osrocyp002b12b1
tttatctggtgcttgagccacattgaaacattaagtacctgggactggaatgatgggagtagagaactgaatatagatgatgctcgttccttggcaactgataggtggaaccttgaccatgtggactattttgttgattgtcactactctctgcccgacgacaagttatgggtgattggcggcacaactgcagggacaataggttacttccctgtaagagctggtcttgaaggggcaataggttccgcggaagctatccttgaaggaggccatacagacgttgttagaaccgtatatccagccgcaaacactcatactgggcaaaacaggggcatttttggatggacaggtggcgaagatggtcgtctgtgttgttggcgctctggtgaaattgctgagatgaacaagtcttggatctctagttcattagtgtcaagggttcaaaagaaagctaatgccgacacagccatactaactgatgcgatatatgtccgacacatatg

SEQ ID NO: 37133 - DNA, 512 bp, Oryza sativa
  unsure (1)..(512): unsure at all n locations
  Clone ID: uC-osrocyp002c01b1
gtcaagggaagctattgcattgctattggatttgtcagacatcccgcaagttcggcagaggattggcaggattaaaggcagtatagtaatgctagtcacattaagaaatgcacatgaaccaggtacccatgatgatgcagagaaattgctgcacatgttgtcatccaatccgcaaaatgtgctcctgatggccgaggctggttattttcgaccattgatacattacctgaaagaaggttctgatatgaacaaggatcctaatggcaactgctatttctaaaatgttcctctctgagccgatgaaatcttcccttggagaagatggtngcagttgagcctctagtggaaatgtttaaatccggaaatcttgaagccaagcactcggccctaggtgccttacttaatctctctagctctctacaaaatgcagaaaatttgataaattctggcataacaggaccactgcttcaacttctattctctgtcacgtcagtgttaatgacccttagaga

SEQ ID NO: 37134 - DNA, 503 bp, Oryza sativa
  Clone ID: uC-osrocyp002c02b1
gtaaatctccccgtctcgtcgtctcctccgctccttgcgccatctcgcggctgaacaggggaggggcggcgatctccatccggcgagcggagcaggggaggggaggggatcttgacaatggttggacctgggcataggaacagtcacgggaagcgtcactctgattatgctgaaaatggaggtggcaagagaaggaatcctggtgatgatacatatgctcctggtccagatgatactgtctaccgctatctttgcccttctagaaaaatagggagcatcattggaggggtggagaaaattgctaagcagatgagggccgacactcaagctaagataaggattggtgagagtgtatctggttgtgatgagagagttatcacaatatttagctcaagcagggaaactaataccctagtagatgcttgagataaggtttgccctgtccaagacgctctttttagagttcatgaaaagctatccatagatgatgatattgggaatga

SEQ ID NO: 37135 - DNA, 518 bp, Oryza sativa
  unsure (1)..(518): unsure at all n locations
  Clone ID: uC-osrocyp002c04b1
ctcggcgaggcgacgaactcatcacctccactctctgctgcaacacgagtgaatcggaggcggcacgatgcgcaagtgggcgctctcctccgcgctcctcctcctcctcctcctcaccacactccccgatccagctaagaagctccaagtcaatgctgatgacagcactgatgagttagttgatccgccgaaggtagaggagaagattnggtggtgttccccatggcctgtccacggactctgaggttgttcagagggaggctgagtcaatctcgaggaagaccctcaggagctcagcggagaaatttgagttccaggctgaggtgtccagactcatggacatcatcatcaactcactctacagcaacaaggacattttcctgagggagctcatctccaatgcttctgatgctttggacaagattaggttcctggctctcactgataggaggttttgggcgaaggtgacactgctaagcttgaaatccagattaagctggataaagagaagaagattc

SEQ ID NO: 37136 - DNA, 487 bp, Oryza sativa
  Clone ID: uC-osrocyp002c05b1
ctgacgcgtgggtggcggccgccgccgccgcggtgccgtggccgccaaggtctcgtcgccgcaggtgatcggggccaccatgccgtcgctggacttcgagacatccgtcttcaagaaggagaaggtgtctctagctggccatgacgagtatattgtgaggggcgggaggaatctgttcccgctgctgccggaggcgttcaaggggatcaagcagatcggcgtaatcggatggggttctcagggtcctgcacaagctcagaacctgagggactcacttgctgaggcaaaatcagacatcgttgttaagattggtctccggaaaggttctaaatcttttgaagaagcacgcgcagctggatttactgaatagagtgggacacttggagatatatgggagactctctcacgtagcgatcctttgctggtggtgatatcagatgctgctcaagcggattactatgaggaaatttttttacacatgaaaccc

SEQ ID NO: 37137 - DNA, 476 bp, Oryza sativa
  unsure (1)..(476): unsure at all n locations
  Clone ID: uC-osrocyp002c06b1
gtttgacaagactggaactttaacaattgggaaacctgtagtgactaaagtaatagcttctcacagagagggagatgaaaatacaaaggattcctgtaacaatgaatggactggtgagattctgagtttggcagcaggtgtagaatcaaatacaacccacccgcttggaaaagccatcatggaagctgctcaggctgccaattgcctctatctgcaggcaaaagatggatccttcatggaagaacctgggtctggtgctgtggcgaccattggcgagaaacagngtttcagttggaacacttngattggatcaggaggcatggaagttcttcacaatccatttgctgatggagaaaattttggtcagtctgttgcatatgtagctgtggatggtactctagctggacttatttgttttgaggataagctgagagaagattctcatcaaattattgatatcctatctaagcaaggga

SEQ ID NO: 37138 - DNA, 503 bp, Oryza sativa
  unsure (1)..(503): unsure at all n locations
  Clone ID: uC-osrocyp002c07b1
ctcaaccgcatccccggcgaccgcggcggttcacagcaggtctgtattgaggagttgaatcatattctggctgaagtgaatgctcaaatcctcccttgccgtgatgacctttcttcaataaggactatagccggtggtagtgtcgccaacacaattcgaggtctctcagcaggttttgggatatcaactggaataattggagcttgtggagatgacagcagggcgttttgtttgtcagcaacatgagctttagtggagtagacctcacaagattaaggacaaaaaaggggcacactgctcagtgtgcatccttggtcgatgcaagtggcaatcgcaccatgcgcccttgcctatctagtgcagtcaagctccaggccaacgagttcaaaaaggaggacttcaaaggctcaagtggttggttgtacgatatgcaagacagaacatggaacagatcctngaagctattaggattgctaaacaagaaggtctctcagtatcattgg

SEQ ID NO: 37139 - DNA, 485 bp, Oryza sativa
  Clone ID: uC-osrocyp002c11b1
gttgcggcgaaggatctgaagcgtgggtacgtggcctccaactccaaggatgaccctgccaaggaggctgccagcttcacctcccaggtgatcatcatgaaccaccctggccagatcggcaacggctacgccccagtgctggactgccacacctcccacattgccgtcaagtttgctgagctggtgaccaagattgacagacgatctggtaaggagctggagaaggagcccaagttcctcaagaacggtgatgctggtatggttaagatgattcccaccaagcccatggttgtggagaccttctctgagtaccctcctcttggtcgttttgcggtgcgtgacatgaggcaaacggtggctgttggcgtcatcaagaacgtggagaagaaggacccaaccggtgccaaggtgaccaaggctgccgccaagaagaaatgatcctcgttcaagtggggggttgcgtgtctgcatttaagatatctagc

SEQ ID NO: 37140 - DNA, 473 bp, Oryza sativa
  Clone ID: uC-osrocyp002d03b1
gtaaaatttctctccaatctcgcgaggctctcgtcgtcgaatcgaatcctctcgcgtcctcaagatgcagatctttgtgaagacattgaccggcaagactatcaccctcgaggtggagtcctctgacaccatcgataatgtcaaggctaagatccaagataaggagggcatccccccggaccagcagcgtctcatcttcgctggcaagcagctggaggatggcaggacccttgctgactacaacatccagaaggagtcgacccttcaccttgtcctccgcctccgtggtggcatgcagatctttgtcaagactctgaccggcaagactatcacccttgaggtggagtcttctgacaccatcgacaacgtcaaggccaagatccaggacaaagagggcatccccccagaccagcagcgtctcatcttcgccggcaggcaactggaggatggcaggacccttgctgactacaaca

SEQ ID NO: 37141 - DNA, 463 bp, Oryza sativa
  Clone ID: uC-osrocyp002d04b1
gtcctccaacctggccttcagccgcaacccgagcttggactacgggttcaagggcaccgagatcgccatggcctcctactgctctgagctccagtacctcgccaaccccatcaccaaccatgtccagagcgcggagcagcacaaccaggacgtgaactcgctgggtctcgtctcggccaggaagaccctggaggcggtggacatcctcaagctcatgacctccacctacatcgtcgccctgtgccaggccgtcgaccttcgccacctcgaggagaacatcaagagctccgtcaagaactgcgtcacccaggtggccaagaaggtgctcaccatgaaccccaccggcgacctctccagcgcgcgcttcagcgagaagaacctcctcaccgccatcgaccgcgaggcccgtgttcagctacgccgacgacccgtgcagcgccaactacccgctcatgcagaagct

SEQ ID NO: 37142 - DNA, 380 bp, Oryza sativa
  Clone ID: uC-osrocyp002d07b1
cttctcctccccctctttaccttttcctcctcggttcggttccgtggttcgtctagggtttagtgggttgagatggcggcgccggatgtcgagtaccgctgcttcgtcggcggcctcgcctgggccaccgacgaccgctccctcgaggccgccttctccacctacggcgagatcctcgactccaagatcatcaacgacagggagacggggaggtcacgtgggtttggcttcgtcaccttctcctccgagcagtcgatgcgcgacgccatcgagggcatgaacggcaaggagctcgacggccgcaacatcaccgtcaatgaggcccagtcccgccgctccggcggcggaagcggtggctacggcggcggcggtggcggcta

SEQ ID NO: 37143 - DNA, 514 bp, Oryza sativa
  Clone ID: uC-osrocyp002d08b1
cttggtggtatctatggtgttctgaaccagaagagaggacatgtgttcgaggagatgcagaggcctggtacccctctgtacaacatcaaggcttacctccctgtcatcgagtcctttgggttctcaagccagcttagggctgcgacatctggccaggccttcccccagtgtgtgttcgaccattgggacatgatgacctctgatcctcttgaagctggctcgcaggcttcaaccctggtgcaggatatccgcaagaggaagggtctcaaggagcagatgactcccctctccgatttcgaggacaagctctaaatttttggccgccgcatgtgttgtgccgttacccttacatgttctagttggtctactgctaagagaactgctttcgttgtcgtatttcatttcccttttgtcgaatgcatgtgtttcacatcaacaatcctatgttcgcgtgctactgagaaactatttttactctgtcgtgatgtacggatgtggaacctggatcatcttt

SEQ ID NO: 37144 - DNA, 491 bp, Oryza sativa
  unsure (1)..(491): unsure at all n locations
  Clone ID: uC-osrocyp002d12b1
ctgacgcgtgggcgctaatccatcaacctatagcttaacgatcactgccattgcaatggcgcggtgcactttgctcgttctcctcgtggcggcggcggtggcggtcgtcccgctcgccgccggccagccgtgggctacctgcggcgacggcacgtacgagcaggggagcgcctacgagaacaacctcctgaacctggccctcaccctccgcgacggcgcctcctccaggagatcctcttctccacgggctccaacggcgccgccccgaacaccgtctacggcctcctcctctgccgcggcgacatctcccgcgccgcctgctacgactgcggaccagcgtgtggagggacgccgggagcgcgtgccgccgcgcagggacgtcgccctcgtctcaacgagtgctacgcccgcctctccgcaaggacgacttcctcgccgacagggtggggccggngcagctgacgaccctcatgagcagcaccaacatcagc

SEQ ID NO: 37145 - DNA, 504 bp, Oryza sativa
  unsure (1)..(504): unsure at all n locations
  Clone ID: uC-osrocyp002e02b1
attgtctcctccaggatgagctctcatgacataaatactgctcacacaagatttcagtcagcagctgagctccatgacttgtctctgaggcctgagctcagttctgactgccgagctgagacctcaggtcttcttcttcctccaatctctcacacgaaagaagaaagtttttaggaagctaggagcagcacacagtccttctctccctctcttcttgctatacagtgtgtattcaagagtgcttctgttcctgaaaattaaacaaattgataataattttcaaggaagtatgaaactaatagcttttggngttgttattattgggggtatatacaatattttgctacacctgattccgaagtcatagcattgtatgaaataaggacaatgctcaatgacagtcgcggcgtactgaatggctggaataataatcaagttagtccctgctattttccttcatcagttgtaatcaagatcaaaagtcatttcataactttgagctca

SEQ ID NO: 37146 - DNA, 408 bp, Oryza sativa
  Clone ID: uC-osrocyp002e04b1
gtgggcgatgcgggcggcgaaacaagccgcgtcgcccccgtccctctcctcccctcccacgcctcgccgccgccggcaaagctgggcggctgcaaggacggcggcggcagggctctctctctccaccgctcgcagtggagttggacggggcgccggcaaggcgccgacgacgaggaagaaccgacgacggcgaccagatccggcgccgggatgcacggatccggtacccccatggccggatctgctgctccgggcggcggcgagccgggtcggcaagtcgcagcatcgcggcgtggagggtggtgccttccgcggccggagggccgcgtcgacggccggagggcggcctcggtggcgttggaattggcagcggggcggaggacgcggcggcatgaccgtggctgcggc

SEQ ID NO: 37147 - DNA, 270 bp, Oryza sativa
  Clone ID: uC-osrocyp002e05b1
ttataatccctcacacaaactgccacacatatcaagaacaaaaccaaatttctcttaaatatatatagctttaatggagggcgaacgatcctacgtcactccgccgccccctccgccgccgccgccgtcgcctacgacgcacgtcacggtgatcgtcatcgtggtcccgatcgtgggcgtcatctgcctcggcctcctcgccgcgctgctgttcgtcgtcttcaggaggcggcggcgcgcgcggcgcgacgaggaggaggaggaagcgaa

SEQ ID NO: 37148 - DNA, 510 bp, Oryza sativa
  Clone ID: uC-osrocyp002e08b1
ttgatgtcaaggccacagctggtgacacccatcttggtggtgaagattttgacaaccgcatggtcaaccactttgtgcaagaattcaagaggaagaacaagaaggatatcactggcaaccccagggctctcaggaggttgaggacagcttgtgagagggcgaagaggaccctgtcctccactgcccagaccaccattgagatcgattccttgtatgagggcatcgatttctactcaaccatcacccgtgccaggtttgaggagctcaacatggatctcttaggaagtgtatggagcctgtggagaagtgcctcagggatgctaagatggacaagagctctgttatgatgttgttcttgttgggggctccactaggatcccgagggtgcagcagctcctgcaggatttcttcaacggcaaggagctttgcaagaacatcaacccagatgaagctgttgcttatggtgctgctgtccaggctgccatcttgagtggtgagggcaacgagaag

SEQ ID NO: 37149 - DNA, 532 bp, Oryza sativa
  Clone ID: uC-osrocyp002e09b1
gtcggttggagctattgaagggcatcagtggttcatttaggccaggagtacttacagctcttatgggtgtcagtggtgctggaaaaacaacattgatggatgtgttggctgggaggaagaccagtggatacatagagggtaacattaccatctctggctatccaaagaagcaagaaacttttgctcgtgtatcaggatactgtgagcagaatgacatccattcaccaaatgttactgtctacgagtctcttgcattctctgcatggctccgattgcctgcggaaattgattctgcaacaagaaagatgtttattgatgaggtcatggaacttgtggagctttcccccttaaaagactccttggttggattgcctggcgttagtggattatcaacagaacaaaggaaaaggctaacaatagcagtggagctagttgctaacccatctatcatattcatggatgaaccaacatctggacttgatgcacgagcagcagccattgtcatgagggcaataagaaatactgtggacac

SEQ ID NO: 37150 - DNA, 527 bp, Oryza sativa
  Clone ID: uC-osrocyp002e10b1
aacgaaaccacgagcagcggctgatcggtaagcggtagtggtagtagtagtttcgtttgtacgttgacccaagcagcagatgccaattgcagcagccgcggtcacctcgccaccggccgccgcgcaggtgcacggtgtcgtgccaaggcatgcctcgccgacgccacagcagcgggcggcgccgcggcgggagcagtcgccgctgaacccgagctcgcagtcattccggtcggcctcctccggcaccgagctcgcaggttccgcggcgacggaggcctcccgggcgcacatcgccaaccttgaccgggttctcgggaagccaccgcaggtgccgaggccggcgagccacgcggcggcgagcaagcaggagcggcagcagcaggacggggagctggagccgctcaacgtcaggcacggcctgctcaacgcgctcaacctgtccttcttcgtgcccatgcccgggatgcgggcccgcaccgccgccgacgagcacatgtcggctcgcagcctcatgcacatgcagcagc

SEQ ID NO: 37151 - DNA, 464 bp, Oryza sativa
  unsure (1)..(464): unsure at all n locations
  Clone ID: uC-osrocyp002e11b1
ctccctcgtttccatcctcccgaatcttcttcttctcttcttgcggtgactgagaagaaaaaaaaaagaaagagaagaaaaattgctacgagattccttcttcgtcgccgccgctgctgctgcgttatccccaaggtgagagctttttgtgctttgagcctttggatggtgtggtttggtgggggcgctgatggttggggacctggngtggtggtgtttgcccgtgcacaattcgttcccttcttcttttttttttttttgttgttggatgctcgtgtaggctgtggtttctttgcttgctgacttacagtggatttttggtggggttggnggggtgcgattctgagggtgatcggcctcaaaggtggacgctttggctggattggttcttgggttgagtgaatttcctctttgattttgctgcagttggtgtgtggtcatgccttgcctggtggttgattgga

SEQ ID NO: 37152 - DNA, 526 bp, Oryza sativa
  Clone ID: uC-osrocyp002e12b1
ttctttacgcgtccgttttactcggagatcatcaacgagagtttgatcgagtctgtggattccctgaacccattcatgcatgctcgtggggtggccttcatggttgataactgctccacaacagcccggttgggatcaaggaaatgggcgccacgcttcgactacatcttgacccaacaagcttttgtgactgttgacaagaatgctccagttaatcaagacctcatcagcaatttcttctccgatcccgtccatagtgccattgaagtctgtgctcagttgaggcccaccgttgacatttcagtgcctgctgatgcagactttgtgcgtccagagctgcgacaatcttcgtgaagtttttgccaactccaggggcacctcataaactatgtcagtatctgacggtttcaactctcaaagctatgtatcactatttgagaacctaaatgtaaacttttggagtgtaggattgtcgtttggttgtcactggactagcgctggtgttggcatgaataaaatagtggtt

SEQ ID NO: 37153 - DNA, 330 bp, Oryza sativa
  Clone ID: uC-osrocyp002f01b1
caacgttggattgcttctgattttggcgatggagtgagaaagacagcgcctacctatgacggatctatccttactaatgcaatcctgcgtatggaccttgctgggcgtgacctcactgacagcttgatgaagattcttactgagagaggttactccttcactaccactgatgaacgggaaattgtaagggacatcaaggagaagcttgcatatgtggcccttgactatgagcaggagctggaggctgcaaagagcagctcatctgtggagaagagctatgagctgcctgatggacaggtgatcaccattggggcagaaaggttccgatgc

SEQ ID NO: 37154 - DNA, 372 bp, Oryza sativa
  Clone ID: uC-osrocyp002f03b1
tttctcctccggttcttcttcagtatcgaatcctctcttctcctcgtgcccaccaccaccaccgtagcaatggcgggcaacgggccgatcaacaaggaggacccgctcaactggggcgcggcggcggccgagatggccggcagccacctcgacgaggtgaagcgcatggtggcgcagttccgcgagccgctggtcaagatccagggcgccaccctccgcgtcggccaggtggccgccgtcgcccaggccaaggacgccgccggcgttcgccgtcgagctcgacgaggaggcccgcccccgcgtcaaggccagcagcgaggtggatcctcaactgcatcgcccacggcggcgacatctacggcgtcaccaccg

SEQ ID NO: 37155 - DNA, 503 bp, Oryza sativa
  Clone ID: uC-osrocyp002f05b1
ctacagcaacacggtgctcgacgccgagatgtccgggttctggacgaagctgccgctgctgcgcgcgctgatgctggcgcacccggagacggagctgctctggtgggtggactccgacgtggtgttcaccgacatgctgttcgagccgccgtggggcaggtacaggcgccacaacctcgtcatccacggatgggacgggcgccgtgtacggcgccaagacgtggctcggcctcaacgccggcagcttcatcatccgcaactgccagtggtcgctcgacctgctcgacgcctgggcgcccatggggccgccgggccccgtccgcgacatgtacggtaagatcttcgccgagacgctcaccaaccggccgccgtacgaggccgacgaccagtcggcgctcgtcttcctcctcgtgacgcaacgcaccggtggggcgcaaagtgtttcttgagaactcgtcaacctgcacggttttgggcggacatcgtcataggtccaggagatg

SEQ ID NO: 37156 - DNA, 408 bp, Oryza sativa
  Clone ID: uC-osrocyp002f06b1
gtccgcggagggtgtccgcgtccgagtcggaggctgctgctgctcctgctccagcggaggagtaaggtgtttggtttggccctgcgcttagatccaccaaagaactgctgctattttggcatttccttggagattattcatgatttcctccgcttatgatcactagtacctttatataagtattaggaatgtgtgcttgagatgatgaattgatgtttgttacttgaacctggtaccttgttacaaatgtttaagctatatcataggtgcatgtttgccctcgcatatgtgatatgtataaggctattcttgaatctgtttgtgcatggttgcatgagctcatatgttctgattatttagctgaatgcagttgaaatgtaatactagtggttccagagttccaggagt

SEQ ID NO: 37157 - DNA, 324 bp, Oryza sativa
  Clone ID: uC-osrocyp002f09b1
gtgtgatgaggtggcgaaggcggcggcgctgatatcgccggcggcggtgacgacgtcgtggctgctgctggcgtgggtgagcacagtggcggggaacctgtcgctgcatggggtcggcaggctaacctgatagagcgcgagcaggcgaggagggctctcaggaacgcctacaacctcaccttctggcaggacatcgtcttcggcgtcccatccaccctcatcgtcaccgccgtcggcatacccctcatcggcaagatctgatctcatctcatcgacccatccaaattaattaattatgagatcgacaaacatccaagcttgatt

SEQ ID NO: 37158 - DNA, 365 bp, Oryza sativa
  Clone ID: uC-osrocyp002f10b1
cccttcccttgtttgcttggaaggagagggggaagaaaagtaggaggacgcggttgcgggttggtccagatctagggcaaggcggtggccggagtttgagctgggcccgccggcggcgagatgaagcagtcgatgcggagccggcaggagccgcggcgggtgagcaacggcgtcatcatcgccgccatgctgctctccctctgcgtcctcagcatcgtcaaggccagatactgctccacccccttcgttaagcccgacgaccagctacaggagcagatgaactccagcatcaggatggagaccgacgagccggcgaccatggcggcgggagagcaagaggaggacgaggaggaaggagagtttgc

SEQ ID NO: 37159 - DNA, 518 bp, Oryza sativa
  Clone ID: uC-osrocyp002f11b1
taaagcattcgcatccacgagaccactcgaacccgacccgcctcgccgccgccgccaccgaagtaatcccttaattggtcaaaatgtctcgggaggagaatgtctacatggccaagctggccgagcaggctgaaaggtatgaggagatggttgagtacatggagaaggttgcaaagactgtagatgtggaagagctcactgttgaggagcgcaacctcttgtctgttgcttacaagaatgtgattggtgcccgccgtgcctcctggcgtattgtctcatccattgaacagaagggaggagggtcgtggcaatgaggaacatgttactctgatcaaggagtaccgtggcaagattgaagctgagctgagcaagatttgcgatggtatcctgaagttgcttgactcacaccttgtgccctcatctactgctgcagaatctaaggtgttttacctcaagatgaagggtgattaccacaggtaccttgcggaatttaagactggtgccgagagaaaggaagc

SEQ ID NO: 37160 - DNA, 345 bp, Oryza sativa
  Clone ID: uC-osrocyp002g02b1
cttgctcctcctcgccgtgagcttggtcttcgccgtctcctctccccacgcgcagatctaagcctagggttagggtttgtgtagctcgcagcgatggcgatcaagaggaccaaggcggagaagaaggtggcgtacgacaagaagctctgccagcttctcgacgagtacaccaaggtgctcatcgccgtcgccgacaacgtcgggtccaaccagctgcaggagatccgcaagggcctcaggggcgactccatcgtcctcatggggaaagaacaccctcatccgccgctgcatcaagggtgcacgccgacaacaccggcaacaaggaggtcctcgagctcatgcccc

SEQ ID NO: 37161 - DNA, 460 bp, Oryza sativa
  unsure (1)..(460): unsure at all n locations
  Clone ID: uC-osrocyp002g03b1
ttgacgcgtgggtggacgcgtgggcggacgcgtgggcgggtactcctccactcctctcgtctcgcgtgagtactcgcgacctcaccgccggcggcgacgagcggcggcggcggcggttgaggaaggaagggggagggagagcaggaaatgcggatgctgtccaaggcgtgctcgctcgtggcctcctccctcccgcggtgctcatcctccgctgcccccacgatcagagggcagccgtcgttgctgccaagcgtgcgcaaggaatggcttggcaagccgctgctgtacggaatcggcacgctgctcgtcatgcctctgaggacgctgacggggtgggcangatgtttggcgctgggcggtttctctgaacatgaccagcgtcttgtcgtcgctgcaaattgagctcgcaccctgcctttangataactatgcttacatnctacatgatgttgatactgga

SEQ ID NO: 37162 - DNA, 376 bp, Oryza sativa
  unsure (1)..(376): unsure at all n locations
  Clone ID: uC-osrocyp002g04b1
cgaggatttcccagagatacccagcggctatcgacttcggccgtggtgatatgttccggcaggtggatttctgcgtgtgaattaagagcttgctaaagttattcatgttggtgtgatgggcctgtgagtgtgggtgcttgggaggagatttcttgggttttttccccgagcaaaatcaatctgctcgtgcccttgagatttcagttccgcccataagaactccaacgcacatttagcattcggagagtaattttgttaggttaaaagtatggtaagttataggtngatggtattgttttttctttttcttggcaaacttaggtcccagatctcattgagcgccgatttgagtcggggttttagcaagcgtctggga

SEQ ID NO: 37163 - DNA, 441 bp, Oryza sativa
  Clone ID: uC-osrocyp002g05b1
gattcctgttctggagactcctgaaggtgctgtttttgagagcaatgctatcgcgcgctatgttgctcgcttgaaggacaacagctctctttgtggttcttctcttatcgactattctcacattgaacaatggatggacttctcagcaacagaggttgatgccaatattggaaggtggttgtacccaaggcttggttttggcccttatgttcctgtgcttgaggaatttgctattacttattgaagaggtcattgggtgctctgaacacacaccttgcttcaaacacataccttgttgggcattcagttactctagctgatattgtgatgacatgcaacctatattatgggttttggttcggatcttgatcaagagtttcacctccgagttccctcatgttgagcggtacttctggacaatggttaaccagcccaacttca

SEQ ID NO: 37164 - DNA, 460 bp, Oryza sativa
  Clone ID: uC-osrocyp002g06b1
ctatagctcatcagtgttatagataagatatcttgtgagtgtttagggttttcgataattcggtcgaccattcgttggttcttggtggaagggagggaggttcttgtttggtgatgtcttgtacctccccagacccgcccgattactgctcggccgcatcgcctgagcttaagctataccaagccttcatcttctccgtgccggttttcttcacgttcgtcttgcttctcttcttctacttgttctacttgcgacggcgcagagcaaactggcagtccttgcgcatgaggactaataacttgatacggggagataaccccagattggagtgcggcataaagaaggagatgcgggaaatgttgcctgttgtggtcttcaaggagagcttcttgatcagggaaacacaatgctctgtctgcttagcagactatcaactcgatgagcggctccagagaatacc

SEQ ID NO: 37165 - DNA, 425 bp, Oryza sativa
  Clone ID: uC-osrocyp002g08b1
gtagatctttgtcaagacactgaccggcaagaccatcaccctcgaggtggaatcttctgacaccatcgacaacgtcaaggccaagatccaggacaaggagggcattcccccggaccagcagcgtctcatctttgccggcaagcagcttgaggacggcaggacccttgctgactacaacatccagaaggagtcaacgcttcaccttgtcctccgtctcaggggaggcatgcaaatcttcgtgaagactctgaccggcaagaccatcaccctcgaggtggagtcttctgataccatcgacaatgtcaaggccaagatccaggacaaggagggcattcccccggaccagcagcgcctcatctttgctggcaagcagctggaggatggcaggacccttgctgactacaacatccagaaggagtccaccc

SEQ ID NO: 37166 - DNA, 463 bp, Oryza sativa
  unsure (1)..(463): unsure at all n locations
  Clone ID: uC-osrocyp002g09b1
ttcgcctcctcctcctctcgccgctcgcagcgaaaaagccagcgcctcccagcgcccacgcgatcccgacgaatcgaatcgagtccgagacgccgatctcggattcgagaccgttgatttcaaccaacacaagccctcctccggatcgatccgctcctcttcagccatggcaggaatggcacccgaaggctcccagtttgatgctaagcactatgacagcaagatgcaggaactactgcaccaaggtgacaatgaggaattcttcacttcatatgatgaagtttttgagagttttgatgacatgggcctccaagagaaccttctcagaggcatctatgcttatggtatacaaaaagtcttatcccttttccattgtttcaacaacacatattttggtgatgttacaaatccctgtactttgatggtaggttttgagaagccatcagctattcagcanaggggg

SEQ ID NO: 37167 - DNA, 494 bp, Oryza sativa
  Clone ID: uC-osrocyp002g10b1
gtccactcgtgccccaaggcgaaggagatcgtgcagtccatcgtagcacaggcggtggccagggagaccaggatggcggcatccttggtcaggctgcattttcatgactgctttgtcaaggggtgtgacgcgtctgtgctcctggacaacagcaccaccatcatcagtgagaaggggtcaaaccctaacatgaactccctcaggggtttcgaggtcgtcgacgagatcaaggccgccctcgaagcagcttgccccggcaccgtctcctgcgccgacatactcgccctcgctgcacgcgattccactgtcctcgttggtggcccgtctggggatgtgccacttggccggagggactcactgggtgccagcatccagggctccaacaacgacatcccagctcccaacaacaccctccccaccatcatcaccaagttcaagcgccagggccttacatcgtcgacgtcgtagcccttcaggtggcccaccattgcatg

SEQ ID NO: 37168 - DNA, 512 bp, Oryza sativa
  unsure (1)..(512): unsure at all n locations
  Clone ID: uC-osrocyp002g11b1
gtcgagaccactacaagcagcaactagcttagctagctagctactggtgatcaggcacgagctagccggccatggcgaggcgtcgccatgcttgctttcttctcctgctgcctctgctggtgctgcagcttcttcttgctgggggaagcttggttgatgatcttcctgctgcaactcatcaggtgccgaggttagtagggccacagcgcaagttacagcagcttccaaacccaaggccacagccgcaaccattgccccagccaaacccaaatccacagccacaaccactcccacagccacagccacagccacaaccacaaccacaacctctgccacaaccgcagccgcaaccacagcctttaccgctaccaggcccacaaccattaccgcaacccggcccgcagccgaacccaaacccccaaccgttaccacagccaaacccaaatccccagcctttacctcagccagacccgacgctccgncgttgcctctgcccagcctaaccaaacaac

SEQ ID NO: 37169 - DNA, 433 bp, Oryza sativa
  Clone ID: uC-osrocyp002h01b1
ctgaaggtgatattcagtttttcagagtgagtgctcgtgtgttgtgcgatcagtgcccactgcccagttcgatcgatccgtgttgatctttgaaagaaagatgtcgtgctgcggaggaaactgcggctgcggatccggctgccagtgcggcagcggctgcggaggatgcaagatgtacccggagatggctgaggaggtgaccactacccagactgtcatcatgggtgttgcaccttccaagggtcatgccgaggggttggaggccggcgccgccgccggagcaggagcagagaacgggtgcaagtgcggcgacaactgcacctgcaacccctgcaactgcggcaagtgaagcaagcaacctcctgacgaaaccaaggagatgggagggcctagtactgctagctagtagtttgatccagttacaagtgatgag

SEQ ID NO: 37170 - DNA, 325 bp, Oryza sativa
  Clone ID: uC-osrocyp002h02b1
tggtaccggtgcgggatccggggcggagacccacgcgtgcggtaatcttcaggccagagcgcgagcgagaagaccggaggcctgctgctacgttcttggggagggccctgacgaagcagacgggtcggaagtcgaccggcgggaaggcgccgaggaagcagctggcgacgaaggcggcgcggaagtcggcgccggccaccggcggcgtgaagaagccgcaccggttccggccgggcaccgtcgcgctccgggagatccgcaagtaccagaagagcacggagctgctgatccgcaagctccccttccagcggctcgtccgggagat

SEQ ID NO: 37171 - DNA, 264 bp, Oryza sativa
  Clone ID: uC-osrocyp002h03b1
ttgaagcccacctaattccattcctcgggattcctctcccctcgcctcctcgtcctccccctcccaggggatcgccggagaggaatctcgcggaggaaaaaaaaagaaaagggcttgcccgtcgtctaagttaaaaggaagccatggagcacaaggagactggatgccagcagccagaaggcccgatcctttgcatcaataactgcggcttctttggcagagcggctaccatgaacatgtgctcaaagtgccaccaggagatga

SEQ ID NO: 37172 - DNA, 538 bp, Oryza sativa
  Clone ID: uC-osrocyp002h04b1
ccggccgccaccgtcgccgcgatcccccacctccgctcgccggaaggggcgccgtagccccgcccctcccctcccccctctccggtggctggcccctctccggcgatggggagcgccgacctggtgctgaaggcggcgtgcgagggctgcggctcgccgtcggacctctacggcacgtcgtgcaagcacaccacgctctgcagctcctgcggcaaatccatggcgctctccggcgcccgctgcctcgtctgctcggcccccatcaccaacctcatcagggaatataatgtacgggccaatgccaccacagataagagcttctctattggaagatttgtgactggtttaccccctttctcaaaaaagaagagtgcggaaaacaaatggtctcttcataggaggggttacaaggtcgccagattcctgagaatatgcgggaaaaatacaataggaagccatggattttggaagatgaaactgggcaatatcagtatcaaggtcaaatggagggatcacagtcatcaacagctacatacta

SEQ ID NO: 37173 - DNA, 513 bp, Oryza sativa
  unsure (1)..(513): unsure at all n locations
  Clone ID: uC-osrocyp002h05b1
ctggtccagcaggttcggagatttatcaggaaacattgataaaggcacttgcaaaacatttcggtgctaggctacttgttgttgattcgcttttgttgcctggggcgccttcaaaggacccagagtcgcagaaagatgctgcgaagtctgataagtcaggggataaggctggtagtgagaagttggcaattcttcataagaaccgctcttccttggcagacgctatgcacttcaggaggccagctgtacaaccttctagtgtgcatgctgatatcgtgggtacatcgactctgcattctgcatctttgcccaaacaggaatcatcaacagctacatccaagagctatacttttagagaaggggatagggtaagaatgtgngggtccagctcagcaatcgtcattgtcgcaaaggggacccagttatggttatcgaggcagagtgatgcttgcttttgaagaaatgggtcttccaaattggagttcgatttgacagcagatccctgatggtatg

SEQ ID NO: 37174 - DNA, 512 bp, Oryza sativa
  unsure (1)..(512): unsure at all n locations
  Clone ID: uC-osrocyp002h06b1
ttcgccgtcgccacggacacgagagcggtgggtgagttggccgggttggcggttggttccgcggtttgcattacgtccatcttcgcaggggcaatttcaggtggatcgatgaacccggcaaggacgctggggccggcgctggcgagcaacaagttcgacggcctgtggatctacttcctgggcccggtcatgggcacgctctcgggagcatggacctacaccttcatccgcttcgaggacacccccaaggaaggctcctcccagaagctctcctccttcaagctgcgccgcttgcggagccagcagtccatcgccgccgacgacgtcgacgagatggagaacatccaagtgtgataggacgacgagatgtcgtcgattcgtgtcctcttactcggaaaattaccagtcgatctcggtctcgtcatcactagctacgtctntgtgtgtgttttgtgtcgtgtcactgctgcttcgtacacgccggagagagttacataaaacgcgcgcgcgtg

SEQ ID NO: 37175 - DNA, 280 bp, Oryza sativa
  Clone ID: uC-osrocyp002h07b1
agagagagacggggccggtggcggtggcatgttcctgcggaccctcctgatcggtgaaagaaggatggcgttctccggaggaaactgccgctggaaacacctgtgcccgtgcggcagccggtactgaggacgcaagatgttccctgtgatggatgaggaggggttcactacccacactgtcatcatggctgagataccttccaagggtcatgcccacggagcttgaggcccggaccccccccttaccgggatcagacaacgggtgcaagcaggacttcaa

SEQ ID NO: 37176 - DNA, 407 bp, Oryza sativa
  Clone ID: uC-osrocyp002h08b1
ttcgaccgccactactggacacggcccagagcgagcctcctcctcctctgcaccaccggagatggcttccgccgcgctgccggaggccgtcgcgccgaagaagaagggcaacgtccggttcgccttcgcctgcgccatcctcgcctccatgacctccatcctcctcggctacgatatcggggtgatgagcggcgcgtcgctgtacatcaagagggacttcaacatcagtgacggcaaagtgccaggttctcatgggcatactgaacctatactgcctcatcggctccttcgcggaggggcggacgtgggactgtatcggccggcggtacaccatcgtgttcgccgccgacatattattcgcgggggcgttcctcatggggtacgccgtcaactacgccatgctcatg

SEQ ID NO: 37177 - DNA, 415 bp, Oryza sativa
  Clone ID: uC-osrocyp002h09b1
ttcatgggctcctacgttcaaggcgaggatgaggttcccgtgtactaatctggagcagagatcgtgcagaagctgcaggagaaatggaagtcgacgggggcgccgttcccggcgatgtactcgagcgtgctcggcggcatcatcctggacccggcgatgatgtccgtcccgctcgacgaccacatggtccaccgcggccacggcgtgttcgacaccgccatgatcctcgacggccacctctacgagctcgacccgcacctcgaccgcttcctccgctccgccgccaaggcccgcatcggcaccccgttcccgcgcgacacgctccgcagcatcctcgtccagatgacggcggcgtccaactgccggagggggtccatccgctactggctcagcgccggcggcggcgacttccttc

SEQ ID NO: 37178 - DNA, 534 bp, Oryza sativa
  Clone ID: uC-osrocyp002h11b1
agacgcttctctcctcctttaatctcaagtctctctctctcgtcctcgcatctccactcgccatgggcaagattaagatcggaatcaacggtttcggaaggatcgggaggctcgtggccagggtggccctccagagcgaggatgtcgagctcgtcgccgtcaacgaccccttcatcaccaccgactacatgacctacatgttcaagtacgataccgtgcacggccaatggaagcacagcgacatcaagatcaaggactccaagactctgctcttgggcgagaagccggtcaccgttttcggcatcaggaaccctgacgagattccgtgggctgaggctggtgctgagtatgtcgtggagtccaccggtgtcttcactgacaaggagaaggctgctgcttcacttgaagggtggtgccagaaggttgtcatctctgccccgagcaaagatgctccgatgtttgtctgcggtgtcaacgaggacaagtacacttcagatattgatattgtctcaaatgctagctgcaccacaaact

SEQ ID NO: 37179 - DNA, 570 bp, Oryza sativa
  Clone ID: uC-osrocyp004a03b1
gactctatgaggatcgcctactttagggaaaatacaccgaaaggagaattttgcttagtcattgtcttttctacaccggaggacaggcccagcttctgtgaagaaaatctacgggacgaattgagaagtttaatggctaaagggttaactcgctcccaggctagtcggcaattggcagaagaaactaaactgccccgtcggcaactttatcaactcagtttggaattggaagccgatggttgaaacctgattctttgggaacattcatggcaacatccacctctggaaattcactaaatttttcgctcaggtgttttagattgggccgctagccattgttctaattctgcgaaatcagagcagtccaacagtacttctcccaactgttccaattgaggcactgtgagaatgtcaattctcgacaaattaactgcattcaactctccaaaacgatgtctaatttgtttgagtagcaaagatttttgtccacgttcgatgccctgttaaatggcctgaagcatccaacttgcttgttaactgcataaccaccttccgtttcaggggggaaaa

SEQ ID NO: 37180 - DNA, 436 bp, Oryza sativa
  Clone ID: uC-osrocyp004a05b1
cctgcaggttgactatagaggatcgccggtgaacgaccctggccctgccgctggacaaaaatcgggccttatttttacccaaaatatccccctctaaattgacccaatcccacggctgcaataactgcaaattcgctatgatgaaggtatggagaatcaccgacacgttagaccagacttagacgcagtccgacacggactaacagatgccatttaccgaaatactacccttgggcaccaaacagggagctaaatattcctgccattgcttctgtaaactgcccactgagccacagctgagcaaccaggcgttattgatttgttcattgctcaataattgccctaccccgtacacgtggccggaaacaaaatgcccccccacttttccccccacccggagggaagttttaatgttgaccgctgagcgcctttcctt

SEQ ID NO: 37181 - DNA, 548 bp, Oryza sativa
  Clone ID: uC-osrocyp004a10b1
cctgtaggtctgactgtagaggatcgccaaattttttctgccagggaccattgggatttcccgctaagagttgctgtcaaaaattttcttcccaaggggtcaggggtcgccattgccccggactcaaaccttctagggttaagcaccaagttgctgctgacttacctttgccctgttggggagagcgaccagtaacctgtatttgcacccgcaccaatcgtagggtagggaagcccactgccgctgtcattcgacgtacctgacgattgcgcccctccgttagggtaatgcttaaccaactggtgggaatggaggctcgataacgaatgggaggatttctggggggaaaatctggttcagtgataattttggcgatcgccggtctggtagggtaatccgcgaaagttatgccccgccgcaggggttctaggtcttcgtccgttggagagccttctacttgggcaaaataagtacgttggtgggcaaactccccgtgggccaaacgatgcttgaagttacccgtggttgtgagcagcaatagtcctttg

SEQ ID NO: 37182 - DNA, 494 bp, Oryza sativa
  Clone ID: uC-osrocyp004a11b1
cctgccggttgactctagaggatcgccggtgaacgatacagttcctgttgcttgcttgcccggaaacgatgttttgcttggtctatggtaatgaagctgtccttggcgtcgatcgccgcctgaagtggttctacactattattaaggcccttatattcaccgatatttttggccaggatgtaacggagtccaactaatactaagaattgtttcttgccaaatttttcgttgtcgagggcttccgcattccgacccaaaatccccgcctccttcatggcccgctgatggagaaacaaagaactctccgaaactaactcttttccctggaagtaacgaccgaaaacccgttgaaaccaacgaccgaatccattttccgcactaaaaacccctttttgccaccaagtcttttttagggtaggcacaatgggaggacgtatagctctaaccatgggaggattttggtaattggatcatggcggcattatataccaaaa

SEQ ID NO: 37183 - DNA, 529 bp, Oryza sativa
  Clone ID: uC-osrocyp004b06b1
tatataggaacgcgcaccatccgagccgatatcagccactggaggcttccatcgcaatgcttcctttggcggggcagcgtagggaattcctaaaaaggagccatgttcctcagaaactgagccaatcaagcgtcctccggatacctgaacttcaaaggagtttctctcagtgacaaagcttgctttcattttgagaagtaccctacatggatttttgacatgctagctttaatataccgactatcctgattggaagaaaaaagggatttgaatatctagcgtaacgtcttgatcccaccatacaagtcggtctgagcgagaggggttacaacggaagaactcggaatccaggtcgccgtcatagccgctggtgcccagcccaagcgggatgtattgaaccagtaaaacaactacaaaaatcctgggactggatgcctaattaggttgtgacaaagtaagccaaaaggacagattagagatagcttttaaggcgtggggagcattggccggcataacaataaacacccct

SEQ ID NO: 37184 - DNA, 508 bp, Oryza sativa
  Clone ID: uC-osrocyp004b07b1
atgcctgcaggtcgactctgaggatccgccccacttaaatctgctcctaccagattagcttcctgcaaattagctctcccgcagattagcttccaacaaattggcccggaaaagattagcccgaaaaagattggcattttccaaattaacttggtgtaaaaaactgtcgctcaaatctgcattacttagattggcagacaccattttccgtcctgacaaatccttctcttttaaattagcccaacgcaaatctgccccggttaagtcccgatagtagggtcgattgtggttttcttggtgatggtgctgggaactggaactgtggttgtggttggtctggtgatgatggtgatgggattgaggtggacgatcgccggggggcgggtaaggtggagaagatgtggccttgggcttggatttgggtttagctttgggagctttgctggtctggttctttttggaatatgggaagttttagcgcttaacttccgctccaataatttcttga

SEQ ID NO: 37185 - DNA, 562 bp, Oryza sativa
  unsure (1)..(562): unsure at all n locations
  Clone ID: uC-osrocyp004b08b1
gggaagtagacttattttttcaccagtgtaggttaattccacttccgttaaaattagaccctggttatcccccaaaaactcgtctacttctcaggttttaccatggtaatcgaggcaataacgatattttcaatcaggggcggtgaacagagttctgtcaaaatttaattggcttccactgcaagaatttcatactcaaatccaagcgggcaatgctggcatttttacccttaatggtgagataggcccgatcgccaatggtacggactcgcagcgtagttaaatctggggtggcaatgtaaccttgacggtacaaataaccctggactaaactccgccagcggtcatctttaaccaggaatttatgttcaatctcgatggccacaacctccgccccccgatgttgcaagttttatttgatgattaccggtaagctcaacaatccgataggtttccattgtcctatacatttctgggcaaacgagtgggctttcatctgtattcttccatggcccacaaaaattttgaggccaccactgacaggattggtgttggngggcat

SEQ ID NO: 37186 - DNA, 410 bp, Oryza sativa
  Clone ID: uC-osrocyp004c02b1
tcgatctttactaatttttagtcaatttctgcctcgatacttctaacctttttttagtcaaatgtattggtatagcctcactccccttgatattctcctactccgggatgccaaacccttcacccctggcgatcgggcctgggctggcagtatttttacccccaatggtcataccttagcgggagcagtccggagtttgttgccccaaaatcaaaccatcagcctaatagggccattgtcatatcacaaggaaaccctttattttcctcggccgatgggctttgtcggtaaaacccccctgatacctttgcctcggcacgatgccaccagtcccttacgaagttcaaatgtcgtgggataaaacccaacctgactccttagcacccctggaaactttttcccaaacggat

SEQ ID NO: 37187 - DNA, 512 bp, Oryza sativa
  Clone ID: uC-osrocyp004c04b1
tcgactctattaggatcactgcactaacgctttgccctccgcaatccccggtttattcgtcttaaattactccataattcgccgtaataggcactggtaactttcaaaccacctaaggctcccctcagcttcaccaagggattttttccgtagtaaaactcaaacgcgttctgcaggggattaccacccctaccccccaccggagcatagatttgaatgtcccgccaggaaaaaaccaaaattgtcggctgaaattcatcaatacattcatcaagggcccggttgaaatccaggggaggaatggtgcctaaatcgaaaatccgctgggcggtcgccggaaaacatttatggacatggtccgccagataaatcaccccaatggggaaaatcgggttacagggaagacgaacgtacaaaaggcgatcgatcatggcgttggggcactggtagggtgagaacagaacgggagggactaccccacttacttacaattgtaatatatcttaacgatt

SEQ ID NO: 37188 - DNA, 538 bp, Oryza sativa
  Clone ID: uC-osrocyp004c06b1
ttatgttcagtagagcagtccggcagctgttcgggggtcagctttgggatttgcctgatcgacccctaccagtgtattaatctacaaaaattaagattgacattcgtatgtacaatttaccggatctatcctcttgtactaactttacaaaatggaagggaaaatgtgttgaccaaagatgtcaactactaagcatagtcaattgcaaatcggccgggtggtttgcttctctccaagtatgggagattctccaatcttcgaaagacgctcgtactttcttgatcttatgaagaaggggcttacttccattccgtaaggatcaattaataagggtattattcctacgaaacaactaccctttatcggtaatctattattagagaataaatgaattggctctttctgctttcatgtataagctacgtcatatggagtgtgatagaggatatctagggctggtagagttgattgaaataataatccgtagggatagctgagaattgctcaagaacaagagattacttttgatgagagttat

SEQ ID NO: 37189 - DNA, 428 bp, Oryza sativa
  Clone ID: uC-osrocyp004d05b1
ctattgcatctgcaagagcgatcgagagagaaaaacaagatctatctatagcagctagctagctagcacaagaacgatatgccggtcttcactgcatcattccagtgtgtcaccttgtttgggcagccagcatcggcggccgacgcccagccattgctgcaagggcaacggccgttcctacaccttcacgctcgccgccgtcgaccatgcgggcccatgctaataagcaaatcaccgccgtacccggcctcggaagaaacacgcgaatgggaagcagatggacaacatgaacacacggatgaactaagagagacgacgacaaccatgatcgatggcatcaggacagcactgagatcaatcggagagggagagattagcatctcagcctatgacacttcgttggttgcccttctgaagaggctagatgg

SEQ ID NO: 37190 - DNA, 586 bp, Oryza sativa
  unsure (1)..(586): unsure at all n locations
  Clone ID: uC-osrocyp004d09b1
atgcctgcaggtcgactctgaggatatgacctccacattggttccaaggtaattgaaaaaggtggcggtggtttgggctttgactttgccgatgaccaagcggagtctcagtacaatcgcattcgttccttggtgaatgaagagttgaaaaactacttccgccctgagttcttgaatcgtttggatgaaattatcgtcttccgccaattgaacaaggaggaagtcaaggaaatttcggaaattctcctacgggatgtgtttgcccggttggtggaaaaagaaatttctctccaggtcaccgacaagttcaaggagcgcattgtggaagaagggttcaacccagcctacggtgcccgtcccctccgtcgggccattatgcgcctgttggaagacgtgttagccgaagaaattctttccggccgnctcaaggaaggtagccaagcgctggtggacattggtgaagacaaccaagtggtggtcatccccggtgaaacgagggaactgattgcccccggcgttgaataattaggtcccccaagcggccattaccataggatgaagggaggactagaggtcttcccttttt

SEQ ID NO: 37191 - DNA, 454 bp, Oryza sativa
  Clone ID: uC-osrocyp004d11b1
gctaccctaaaagcagaaacgggagagcctttaactccctacatctatgttcaaatagaccgactcatcaacaacccagaaacctagttccctagttggctttgaataaatcggattcctatgacaggacacgaaattttgataagggatgagagaaaggacgatgccggtctcattactgaagtgactattgcggccttcgcgcccctagagattagtaaccacacagagcagtgtatcatcgaagctcttcgttccgcaggtgctataaccctgtcattggttgcacaagtgaataagtcgcgttgtgggacatattgcatttttccctgtggccatctcggacggcacaaaaaactggtatggactcggcccggtctacgtgttacccctataccagcgtatggggaattggtaagctcttattcaggaaggactgtcacagttgaagggc

SEQ ID NO: 37192 - DNA, 536 bp, Oryza sativa
  Clone ID: uC-osrocyp004e04b1
cccactcgtccgggcttcctctctccctaatagcaaccttccagttggtctggagttgatcaaggctctaaacgtgaagctggagccaacaaactcaaagaggaagaagaacacggagagtggctcccatcctatccaaggtagaagtgaacaacgttagcattgcaacatcccaagccccaatatggtgacagtgagagaggagatgcgcaagggaccatggacagagcaggaggacctgcaactggtatgcactgtccgcctgttcggtgaccgccgttgggatttcgttgccaaagtatcaggtttgaggggtggggacctgcaaattagggctcaataggacaggcaagagctgccgcctccgttgggtgaactacctccaccctggcctcaagcatgggcgcatgtcaccaaaagaggaacatcttattattgagctccatgctcgttggggtaacaggtggtctaggatagcaccgaggctgccagggcgcacagacaatgagatcaagaactactggaggacacacatg

SEQ ID NO: 37193 - DNA, 480 bp, Oryza sativa
  Clone ID: uC-osrocyp004e08b1
gtcgtcttctccccttcttctcctcctcctcctcgattcggagctccacccgcagccatggctaagaactaccccgtcgtgagcgccgagtaccaggaggccgtcgagaaggccaggcagaagctgcgcgccctcatcgccgagaagagctgcgcccctctcatgctccgcctcgcgtggcactcggcggggacgttcgacgtgtcgtcgaagaccgggggcccgttcgggacgatgaagaccccggcggagctgtcgcacgccgccaacgcggggctggacatcgcggtgcggatgctcgagcccatcaaggaggagatacccaccatctcctacgccgatttctaccagcttgccggagttgtggccgtcgaggtgtccggtggacctgccgtccccttccacccaggaagggaggacaaacctgcacccccacctgagggccgtcttcctgatgctaccaagggttctgaccaccta

SEQ ID NO: 37194 - DNA, 557 bp, Oryza sativa
  Clone ID: uC-osrocyp004e10b1
gaagagaaagttagcatcctgaaagctgctttggtacatgtggcgcggaagatgcctaaaaatgcccatgcacattttatgttgggtttgatgtaccaaaggcttggtcagccacagaaggcaatagcggcatatgagaagtcatctgagatattgttacaagatgaagaagaagttcgaaggcctgatttgctctcatcagtgaggatacaccatgctcagtgcattttgcaaacaagtatgggtgacacttttgatgaagagcttgaatctggtgaactagatgaaatccttgttaaaatgaagagttcagttgaatctgaccccagacaggcagctgtttggaatatccttggtttggttcttcttcgtagtggtcagcttcagagtgctatctcagttttatcttctctgacggttgttgctccagattactaggactctcttgcgaatcttggtgttgcctacattcaaagtgggaatctagaactggccacaaaatgctgtcaagacttgctataaaagatcttaccgcccagctgctctggtgactatgc

SEQ ID NO: 37195 - DNA, 402 bp, Oryza sativa
  Clone ID: uC-osrocyp004f03b1
cgttaaaacccacaattaccatggttttatcgcccaggagttactcttacgggaaatgttaaattatcccccctacggcaagttaattttgctccgttgtctggggaccaatgaaagggaggtggaaaaaacgatccaggcgatcgccgttttgtgtgaacaacttttacccaagaccgtggagattttgggacccgccccggccagtattctccgcattgcccaacggtatcgctggcagttgttagttaaatatcccagcttcatcaaagtaattttgccgctggagagaattaaacaaatttgccctagctccgtttacctggatattgacgtggacccccttagcattgattagggttggcacaaccattatttaacgaacaaacacgccaatggcat

SEQ ID NO: 37196 - DNA, 527 bp, Oryza sativa
  Clone ID: uC-osrocyp004f06b1
atagggataagctggcagcgcctggacggacccggtcacggaatatcactgggtcgaccgcacgcgtacgttgattcgtgggcggacggcatggggagtactctgtagtcgtaatagcttgacgtatagatagcggatttgtctttgccacaggcgccagtggccggctttacgggggggagtcaagttaaccaaggtgcttgaggggggtaaggagtggggaagattatcagttattttaactaagatgttgctaaattccccattcctaaaccggtccggggcagaaacccaatcttccattgccccactaatcgacgccataacgccattgactaagcttttcccgcactgatgggtctaatttgtgcacccagccccgttgcttttcccccaagggtttaccctttggcgatcgccgttgactctttttgccgtactgtttagcctgttggcgaacttgagcttgactctgatccaccttctgggccagaagatgggccgacatccattttgcaccggaaccc

SEQ ID NO: 37197 - DNA, 403 bp, Oryza sativa
  Clone ID: uC-osrocyp004f07b1
ggcgtcgccgctgtctgtgctggggttcgacgccaatggcccgtcattcttccggcacctgacgctgaccgatggcgacgaccgcacgctgccccggcggcggctgatcaagatcttggtgatcggcgcgggcaacgtgggcatggccatcgcgcagacgatcctgacgcaggacctggccgacgagatcgtgctgatcgacgcggcggcggacaaggtgcggcgcgagatgctggacctgcagcacgcggcggcgttcctcccccgcgtgaacatcgagtccggcacggaggtgtcgctgacgaggagctcggacctggtgatcgtgacggcgggggctcggcagatcccggaggagacgccgctgaacctgctgcagcggaacgtgtcgctgttccggaag

SEQ ID NO: 37198 - DNA, 312 bp, Oryza sativa
  Clone ID: uC-osrocyp004g01b1
ccgctttgtcgatacgagaaaaaccaccccagggtttttgttgtaggcaaaacatgccaggcgttaggggggagccatgaaccatctccttggcctgggtgacgcgggcatggtcatggataatcatattcaagcggtggggattctgacaaatgcagtgaaagccctacagcatgtattacaatgtgcgtgggacatcgaagtgacaaccatcgatttcatggaagtacaggaggcgatcaccacccatgtggcaattattttgcaagataatatgggcaccgacaccatggccactgccgtcagattaat

SEQ ID NO: 37199 - DNA, 414 bp, Oryza sativa
  Clone ID: uC-osrocyp004g02b1
tgaggagcgcctctgggggagcttgcgttaaaccgctaaaagcaaaggatcgcgcattttttttaaccagtgctaccccgattaaataaaacaacatggcagtgttgctcagcagccgatagcgcagtcccagccaaataattcggggttccctaggataggtcatcaggcaaaaagcggcgctcgccaccacttccagggccacataaagactcataaaatccggacaaagaaaaggggaattaaggctagcgtggagaatgatcagtcgggcataacataaggctgagcggccggaattccagcaatagaccaacaccgcccatgtgaccatggcattgctccataagtactaagaggaccgggcatacagtggagaaacaacgcccaaactgactgagaaacaccaacact

SEQ ID NO: 37200 - DNA, 537 bp, Oryza sativa
  unsure (1)..(537): unsure at all n locations
  Clone ID: uC-osrocyp004g06b1
ctggattcttgacaatctcccgctagttgtttctgtgttaaggcaagataagaacattgcttaccaaggtggctatcatgttggtgtcaagggccagtacaccggaagcaaggaagagaagtacttcattcacaaccatttgtcatttttagtgaagtaccacaaggacgatgattcagaactttctagaatagtgggatttgaggtcaagccatacagcattaagcatcagcttgatgataaatgggatggcgtgaacactcgcctgagcacatgtgaccctcatgctaacaagcttgtaacaagttctgactctcctcaggaggtcgaagctggcaaagaaatcatattcacctatgatgttcactttgaggagagtgacatcaagtgggcttcccgttgggacacctatcttttgatgactgatgatcagattcactggttttctattgtcaactctctcatgatcgngcttttcctgtctggtatggtcgcaatgataatgcttcgcactctatatagagatatctttagata

SEQ ID NO: 37201 - DNA, 386 bp, Oryza sativa
  Clone ID: uC-osrocyp004g08b1
ctcgtcaaaccccaccccgaagcaaccgccgccgtcgtcgaatccgacaccggcgaccccaatccgcgccgccggggcccgatccccactccgatccgtcgtaatccggacggtccccccgagcgcgcgcggtcggaggaggcgccgccttcgcccccgatgtacagcaacttcaaggagcaggcgatcgagtacgtgaagtatgcggagcaggaggacaatgccggcgactacgtcaaggcgttcccgctatacatgaacgcgctcgagtacttcaagacccacctcaagtacgagaagaaccctaagatcaaggaggccattaccgacaagttcaccgagtacctgcgccgcgccgaggagatccgcgcggatctcgatgaggg

SEQ ID NO: 37202 - DNA, 595 bp, Oryza sativa
  Clone ID: uC-osrocyp004h05b1
gtcactggcttttcacttagtaacttcagcaccagagtggaacccaaatttagtgaccgcttcccctggttgcgttgcgccactggctaaaaaagcagcaatgctgtccgtggtgccggcacaaaccaaataatttttagggaatttttctgcgttggcaatgctgggagataagcgggaaattgctttaccgggggcaattactggaggtaaaagggcaaaccaagaagcattttttaaccaatcaggataggttaaattgtggggattgtagcccagcttgagggcattgtgataatcactaacgggtctgccaccatggagcaaacttgctaaccaatccgcttgatgacaaaagtaattagctcgttcaaactccggttgttgggagtaccaaagcagtttggctaggctagaagtagcactttgcactaaatgatctgctggagctattgctgataataaatgcttaacttctttgcccccgtcatcgttatacaacagaggctccattaacccattgccttggctatccaacagtaaaaccgtggaggaagtgccatcaatggctattcgctggatttgactgctagtt

SEQ ID NO: 37203 - DNA, 547 bp, Oryza sativa
  Clone ID: uC-osrocyp004h10b1
gtctcctcctctcctcccaatccccaatccctgttcggcttctccttcctcccctccgcggccgatcgcgatggaaccctgagctacgtggttggtgcttcaccgctggagtagagttctactatagtagggtttgggggcggcggtctcggaggagggaggaagcctttggccatggcgagcgacgtgcccatgagcccggagctcgagcagatcgacggcgaggtccaggacatcttccgcgccctccaaaatggatttcaaaagatggacaagattaaagattcaagtaggcaagctaaacagctggaggatctcacagcaaaaatgaaggagtgcaagcgtttgatcaaagagtttgatcgtatattgaaagatgaggagtcaaacaaccctcctgaggtccacaagcagctaaatgacagaaagcaatatatgatcaaagagttgaattcctatgtcaccttgaggaagacatatcaaagtagcctaggtaataataataagagggttgagctctttatatgggcgctggaagtagtgacct

SEQ ID NO: 37204 - DNA, 549 bp, Oryza sativa
  unsure (1)..(549): unsure at all n locations
  Clone ID: uC-osrocyp004h12b1
cttccctttctctgcattactcaagaagctggacttgcagtacacttttctcaccactgaagatcactgccaactcattgcaaaatgtcccaacttactagttcttgcggtgaggaatgtgattggagatagaggattaggggttgttgcagacacatgcaagaagctacaaagactcagagttgagcgaggagatgatgatccaggtttgcaagaagaacaaggaggagtctctcaagtcgggttgacaactgtagccgtaggatgccgtgaactggaatacatagctgcctatgtgtctgatatcacaaatggggccctggagtctattgggactttctgcaaaaatctttgcgacttccgtcttgtcctactcgatagagaagagaggataacagatttgcccttagacaatggtgtccgtgcactgctgaggggctgcacgaaacttcggaggtttgctctatacttgagaccagggggactttcagatacaggcccnggctatattggacagtacagtggaattatccaatacatgcttctggg

SEQ ID NO: 37205 - DNA, 298 bp, Oryza sativa
  Clone ID: uC-osrocyp005a02b1
gggccccggtccggggtcttctggtcgaccgatatgtgcgactacgcacatcgcgagggcgacctccgcgacgtggtggaggaagagcaggcacttgtgggggcggaagctgtcggaggcggttgatcgcaggacgtatctcggcgctcgcgacaagaggccgttgctcgtgcgcgccgtggcaacctcgcgcggcgaggccacctgcaacctcgcggagctcataacaacctcaccaagaagcgcatcttccgggccgcgatcggtacgcgcgacggctaggggcacgacgagttca

SEQ ID NO: 37206 - DNA, 223 bp, Oryza sativa
  Clone ID: uC-osrocyp005a04b1
tgaccttttaccggccgccaactacaatccgtgcaagtgcagacttaacccctctcacaagaaaaagaggcgcaatgatttgggtagcacacagacatcactggggacaaaaagacggacaccgtcaagcccgacaccaaccagaaaccaacgagggagggcgcgaagaagcccgccaccaagggcacgaaggggaaggccggcaaggaccccaacaagccca

SEQ ID NO: 37207 - DNA, 471 bp, Oryza sativa
  Clone ID: uC-osrocyp005a07b1
gtgcggacatggcgttcgcgcactacgggcccttctggcgccagatgaggaagctgtgcgtggtgaagctcttcagccggcgccgcgccgagacgtggctcgccgtgcgcgacgagtccgcggcgctcgtgcgcgccgtggcggcgtcgcgcggcgaggccgccgtcaacctcggcgagctcatcttcaacctcaccaagaacgtcatcttccgcgccgcgttcggcacgcgcgacggcgaggggcacgacgagttcatcgccatcctccaggagttctccaagctgtatcgcgcgttcaacatcggcgacttcatcccctggctcagctgggcggacaccaacggcatcaacgcccgcctcgtcgcggcgcgcaccgcgctcgacaggttcatcgacaagatcatcgacgagcacatggagcgcggcaagaaccccgacgacgcctacgccgacatggtcgacgacatgc

SEQ ID NO: 37208 - DNA, 446 bp, Oryza sativa
  Clone ID: uC-osrocyp005a08b1
ttacacacttgaagaaaaaaaaacacgacgaacacgttaaaaaaaggtcgaagagaagtgggagacccaaaccgcgaacaatgtgtggaggcgccatcctcgccgagttcatcccggcgccgtcgcgcgccgcggcggcgaccaagcgggtgaccgccagccacctgtggccggccggctccaagaacgccgcccgcggcaagagcaagagcaagaggcagcagaggagcttcgccgacgtcgacgacttcgaggccgccttcgagcagttcgacgatgactccgacttcgacgacgcggaggaagaagacgaaggacacttcgtgttcgcgtccaatctcgtgtcgtcgccgcgcccacgccgcggcaacacgagagcccccgccgtgccaccgccggcgacagcacccgacgactgcccgccgcgcggactgaagcgagaattc

SEQ ID NO: 37209 - DNA, 458 bp, Oryza sativa
  Clone ID: uC-osrocyp005a09b1
ttaatccgccgcgagtcgcgaccatttcttgcgagtagtagtagaggggagagtgagtgaggggcgtgctgcaatggcgactgaggaggttgtccctgaggttccggtgaccgaggtggaggctgccgcggcggaggaggccgtccaggagaccacggctgcggaggagaaggccgccaagccggccaaggagaagaagaaggccggcaggccgccgaaggagaagaaggaggccaagccggccaaggagaagaaggtgaaggaggccaaggccaagaagccccgcgtcgacgacgcccacccgccgtacgccgagatgatcatggaggcgatcgtggcgctgaaggagaggactggatcgagctcccaggccatcggcaagcacattcatgccaaccatggcgccaacctgccgcccaacttccgcaggcttctatccggcaacctcaagaagctca

SEQ ID NO: 37210 - DNA, 408 bp, Oryza sativa
  unsure (1)..(408): unsure at all n locations
  Clone ID: uC-osrocyp005a11b1
tgtctgcgttgcgtggattccccttcccgccgatccggcgatggattcggcggcgagagcctcgcagtcggcggcgccgccgccgcccggcgccggggtccgcgtccgcgccccgctgattagatactggtctgaaaactgttgttgatgctagaaagtttgttcctggagcaaagatgtgtatgcaacctgatgtcaaacccaacaagtgcaaatcaaggggctctcgtaaggagaggagccgaactcaagcaccacttttgcctggtcttcctgatgaccttgctattgcttgtctcatacgggttcctcgagtggaacatcccaatcttcggatagtttgcaaaagatggaaccgtctcttatcttgggattactattattccttgcgcangagaaacgggatgg

SEQ ID NO: 37211 - DNA, 375 bp, Oryza sativa
  Clone ID: uC-osrocyp005a12b1
atatacctctccttcctccctccctcgccgccgcgggctgcttcctccctccctcccgccgcgtcccgccattcccggctgattactcgagccgccgcggagcagatccgtgccgggataggcctctcgctcgcgcttcggtcccccgtctcttaccggcggataaaccctaaccggagaggaggaggagggggaggccatgagggggaagaagccgcacaaggagctcaagctctccgtgcctgcgcaggagacgcccgtcgacaagttcctgaccgcgagtggtacattcaaggatggtgaactgcggcttaatcaaagagggttgcagcttatatccgaggaaactgcagatgaacctcagtcaacaaacct

SEQ ID NO: 37212 - DNA, 476 bp, Oryza sativa
  Clone ID: uC-osrocyp005b02b1
ctcgcggctcgacgcgttacccttttcacccgccgccggctgcgtctcccttcttgtcacccaccgtcacggtggcggtgcgaggggcacgaggctggggacaccacaaggcaggcacgattcgacaggccggcggagccaagcggagggcgccagcctcgttgtcgtcggcttcttccgccgcgcggaccggccgctgccggcgcagggaggcgcccccgccgccgccggcggcacagacaccgtctccgctgtgggagatgggggtcgactactacaaggtcctcggcgttgaccgttgcgccggggacgacgacctcaagaaggcctaccacaagctcgttatgcggtggcaccccgacaagaaccccaccaacaacaagaaggaggccgaggccaagttcaagcagatctccgaggcctacgaggtccttagtgatccccagaacgcacaatctatgatcaggtaggggaag

SEQ ID NO: 37213 - DNA, 480 bp, Oryza sativa
  Clone ID: uC-osrocyp005b03b1
ttttagttgtcgccgcagcctcctctcggctgctcccatcctcttcttcgagttagcttcctccttattcaaccatgggtaaggagaagacgcacattaacattgtggtcattggccacgtcgactccggcaagtcgaccaccacgggccatctgatctacaagcttggaggtatcgacaagcgtgtgattgagaggttcgagaaggaagccagtgtgatgaacaagaggtccttcaagtacgcgtgggtgcttgataagctcaaggccgagcgtgagagaggtatcaccatccatatcgccctgtggaagttcgtgaccaccaagtactactgcacggacattgatgcccctggacaccgtgacttcatcaagaacatgatcacgggtacctcccaggctgactgtgccgcgctcatcaatgacttcaccactggtggctttgaggctggtctttccaggatggccagacccgtgagca

SEQ ID NO: 37214 - DNA, 86 bp, Oryza sativa
  Clone ID: uC-osrocyp005b07b1
ttttccgttaaatcctaagagttgctcattcttggcttgtatgattctgatcacccggttctcttaaagttctgaactttattgtc

SEQ ID NO: 37215 - DNA, 259 bp, Oryza sativa
  Clone ID: uC-osrocyp005b12b1
cgaacccaaatactcatttaagagagggcattggtagctccagagcggtctgcttgcgaagttgcgacgggtgccatggccaagcccgcctcccgcgctgccaagcccggatgggcgccgaagaagcagaaggtaaagcccttctacgacggcggcggatcctcccacccgccttataccaccaaggtggacgacggcggcacggagcaaaacgagaggacccagtagggggagaagcagcacaagcacaagcagcacc

SEQ ID NO: 37216 - DNA, 382 bp, Oryza sativa
  Clone ID: uC-osrocyp005c03b1
ctgctctttactctaattttattgtttgagcaacgccttgctggccctgctatggtgcatccatctcaggcagttgctaaaggtccaaaatgggcagacttattcgaacctggagtgaagcatgctctgtttgttggcatagggatacaaatcctgcaacagtttgctggcattaatggagttgtgtactacactccacaaattcttgagcaagctggtgttggtgttcttcttgcaaacattggacttagctcctcatctgcatctattcttattagcggactgacaaccttgctgatgcttcccagcattggtattgctatgaggctcatggatatgtctggaagaaggtttcttgtgcttgcaacaatccctatcctga

SEQ ID NO: 37217 - DNA, 446 bp, Oryza sativa
  Clone ID: uC-osrocyp005c05b1
cgccgcctcctcctcctttcgccttctcccgtcttctccttcgagttagctacctccttattcaaccatgggtaaggagaagacgcacatcaacatcgtggtcattggccacgtcgactccggcaagtcgaccaccacgggccatctgatttacaagcttggaggtatcgacaagcgtgtgatcgagaggttcgagaaggaagccgctgagatgaacaagaggtccttcaagtacgcgtgggtgctcgacaagctcaaggccgagcgtgagagaggtatcaccatcgatattgccctgtggaagttcgagaccaccaagtactactgcactgtcatcgatgcccctggtcaccgtgacttcatcaagaacatgatcacgggtacctcccaggctgactgtgccgtgctcatcattgactccaccactggtggctttgaggctggta

SEQ ID NO: 37218 - DNA, 379 bp, Oryza sativa
  Clone ID: uC-osrocyp005c07b1
ccaagatgttttagctgtagataccatcctcctttggttccgcaagggttcaaacccaaagggcaggcaatctttcgtcaaagcactggaaccttttgttaaatggctggaggaggccgaggaggaggaataaatggtgctactggaggctgtgcgaatgtattgtttgaatatttccttatatcccaagtttccagctaaagttatgtatcttttgctcccttgatactgggccgaccattttatgatcacatgctgatcctaatagtctactgaatgttaaaatcccatgcaagaagttattccaggatttgctaaattattggttgttacacaccaaaaactctaacttgagcatcgttaaaagcccaacttttcc

SEQ ID NO: 37219 - DNA, 442 bp, Oryza sativa
  unsure (1)..(442): unsure at all n locations
  Clone ID: uC-osrocyp005c09b1
tccacgcgtccgcttctcgctggtgtcgaggagattccccaaaaacttggcccccatttctttcgcatcgtcgtctcgccttgccccgtccactaaccctagcggcaactgcgatctccaaccgctcgatctctcgccggaggctccagatctgcgggaggtagtcgacctcgtcgccggcggtggggtttccgaatcgggggcgaagatgacggaagcgtgggtgcggcacaagcccgggatggcgagcgtcaaggacatgccggtgctgcaggacgggccgccgccgggcggcttcgcgcccgtgcgctacgcgcgccngatccccaccaaggggcccagcgccatcgccatcttcctcactaccttgggcgccttcgcctgggggatgtaccaggttggccaggggaacaaggtccgccgtgcactcaaagaggagaaa

SEQ ID NO: 37220 - DNA, 338 bp, Oryza sativa
  Clone ID: uC-osrocyp005c10b1
gttggctacttctccctttctttaccttttcctcctcggttcggttccgtggttcgactagggtttagtgggttgagatggcggcgccggatgtcgagtaccgcatgcttcgtcggcggactcgactgggccaccgacgaccgttccctcgaggccgccttcttcacctacggcgagatcctcgactccaagatcatcaacgacagggagacggggaggtcacgtgggcttggctgtcgcaccttctgctccgagccgacgatgcgcgacgccatcgaaggcatgaacggcaaggagctcgacggccgcaacatcaccgttaatgaggcccagacccg

SEQ ID NO: 37221 - DNA, 294 bp, Oryza sativa
  Clone ID: uC-osrocyp005c11b1
ttttccgttacggagcactccgcccttgggcacggagccggccattgaagccatggggcagggtcaggctccaccgcctgatccaagacatcggccaccgagactccggcgactacctcaccagggcgcacgggagacacaagaatcccaaccacgaccggaccttcaacgacaacaacgcgacggtacttgacctaaaggacagctaacccgccggggacaaggtgattgctattgagcataagcacgagggttaagcagggaccatgccaagcattggcctggggacagaat

SEQ ID NO: 37222 - DNA, 410 bp, Oryza sativa
  Clone ID: uC-osrocyp005c12b1
tgtttgaccccctcttttctctccgattctgcgaggcgacatcggcggcgagaggcgggctagggtttcgagcaccgccaccgcgcgccatggccgaggccaaccagtaccagatcctggtgcggctcctcgacggccgcacacgctgcctccgcttctcgacgacgaccgtctccggcgcggcgctcctcgacgccgtctcggcgctctcccgcgtccccgccgcgtccctccgcctcgtcaccggccgcctcgacgtctcgccgtcctccgtcctcgcctcctgcgccgacggccgattcccctccgcatccgcgctccttcgtctacgcggaggcaagggcgggtttggctcgctcctccgtggcgccgcctccaggccggccagaagaagaccagcaacttcgacg

SEQ ID NO: 37223 - DNA, 469 bp, Oryza sativa
  unsure (1)..(469): unsure at all n locations
  Clone ID: uC-osrocyp005d01b1
gtgaactcccgcgtcgcccacgcgcaggcgacacggggggcgaaacctagctccgccgcccccttcttccccctttccccacctcgccgccgccggagctcaccgccggaaagttggccggcgagttaggagggcggcggcggggccttctcctgtggtggcgtcccctcttggcgcgggggaggcggcgaaaaccggcggcggggagtggcggcggcgagctctccgggcaagacgatgacggatctgcggttgctgtcaccggatctggcctggcccaggccggatccggcggaagcggccggcgttgtggcgcagcgcgaacgaaggaggtatggctggcagcggaggggcgcccctctctggcggcggagacggctcgcgaggccggcgcgcgcgccgacacacgcaagcggngcgcgaggcgtcgcccggtggagccgtcggcggcggggcacatctgcggctc

SEQ ID NO: 37224 - DNA, 416 bp, Oryza sativa
  Clone ID: uC-osrocyp005d03b1
ttaacctgtctgtccttcgcttctcaaatcttgtttttgaacctctatggtcaaggcagtatataaggaatgtgcagctgatattctcaaaggaattcggcactgaaggacgaggagggtactttgataggtatggaattatccgtgacataatgcagaatcatcttcttcagatactagccctatttgcaatggaaactcctgttagctgggaggcagaggacataagaaacgaaaaggttaaggttctgcgttccatgaagcccttgcaactgaaagaagtggtgatgggacagtacaaaagtcatacaaggggtggtaccacataccctggatacactgaagataagacggtgcccaaggatagtgaaaccccaacattgctgcagctgcacttttcataaataatgctagat

SEQ ID NO: 37225 - DNA, 210 bp, Oryza sativa
  Clone ID: uC-osrocyp005d04b1
tcttcctttcctcaggtcggggcgctggctgagaccgagcggcggcggctcgttgcgatcggggcagcaccccgcttctcccgtccaatccggcggtggctcggtgacgagaggaggggcggcgagagctcggctcctccctcgcctcttctcccctccaatcccggtggcagcggcggcggcggctccgcgacaaggaagggcggcggg

SEQ ID NO: 37226 - DNA, 540 bp, Oryza sativa
  unsure (1)..(540): unsure at all n locations
  Clone ID: uC-osrocyp005d05b1
ctttcaagaagatagcgtgatccatgggatacaacgaggatgatctccctttagtatcatttcaatctgtttctaagggatattatggtgaatgtggcaaaagaggaggctacatggagattactggcttcagtgctccagttagagagcagatctacaaagtggcgtcagtgaacttatgttccaatatcactggccagatccttgccagcctcgtcatgaatccaccaaaggctggagatgcatcatatgcttcatacaaggcagagaaagatggaatcctccaatcattagctcgccgtgcaaaggcattggagaatgctttcaacagtcttgagggaattacatgcaacaaaactgaaggagcaatgtacctcttccctcagcttagtctgccacaaaaggcaattgacgctgctaaagctgctaacaaagcacctgatgctttctatgcccttcgtctcctcgaggcaaccggaattgtngttgaccctggatctggattnggccagttcgctgcacatggcacatcagatgcac

SEQ ID NO: 37227 - DNA, 542 bp, Oryza sativa
  Clone ID: uC-osrocyp005d06b1
ttgacgcgtgggcggacgcgtgggggccaagtggtcagcttcaacaacaaccttcgccgcgatcgccatcgccgtcctccttgccgccgggcacgctctgccggcgatggtcgttcattgcgcggcggcgaggggcggcgccgcaacgaccacagccgccggcgccgtgcgcaggctgctggtgcgggtggtggtctcgccgccgaccggcgacagctacctcggcagggttaacacgaaccccggtccaagccccggccccggtcactccggagcggcgcgcggatgagccggtagatgtccctacggcggatttaattagcgatcgataataagctacttgctccgtttcatattataaaactttatagtattgcctatattcatatatatgttaatgaatctagatatatatatatgtgtctaaattcattagcatatatataaatattaaccatgctaaaaagtcttttaattaagatgaaatggacgtagtacatgattaagtttattatacatgtgtgttaagaacacacacatat

SEQ ID NO: 37228 - DNA, 502 bp, Oryza sativa
  unsure (1)..(502): unsure at all n locations
  Clone ID: uC-osrocyp005d07b1
ttcctaccaccaccaccaccgccgcagccatggcgaccgggtactaccgcggcggcggcggcgccagggaccacgccgacgagcccgacgacttcgacgagtacgaccccacgccgtacggcggcggctacgacctcttcatcaccttcggccgcccgctcccgccctccgacgagacctgctacccttgctccgctccctccacctcctacgacgccccgcactactccgccgacgagccctccccctacgcccaccactccaagccgcagcccgcctacggcttccgcccccagcacgagcagcagcagcagccgtcctacgcctcctccggctaccgcccccagcacgagcagcagcaatcctacggctcctctggtacggatctaagccccagcccgcctatggcttccgccctcaggccgaggaggagaacacctacggctccggctatggatctgggtacggtggtggaggaaggaagcagcangaagaggagagc

SEQ ID NO: 37229 - DNA, 484 bp, Oryza sativa
  Clone ID: uC-osrocyp005d08b1
ccaatccccgtatcactatatccacacaagcttcgcagctcgcgcgccgcgggaggggagggagaaaagctcgcccccgagatttttctcctctcctctctgctcgtgtttcttggattggtccatatatccacggttcttgggggcgcggcgcgccgccattgatctggttttggttttgtgaggaggagaagctgcggtggtgctggtgctggtgctttcttgatctgatgatggcgagcacgacgtcagcgacggccgccgggggcgcgttcgccgccgcgaagacgcgggcggggtcgtcggcggcgggcggcggcgcgtgcgcgagggtcgccgccggcgggcggaggcggtccggcgtggtgctgcggtgcgacgccggcgtggaggcgcaggcccaggcgcaggcggtggccaaggccgccagcgtcgccgcgctcgagcagatcaagatcttcgccgccggtacatgaaggaaaga

SEQ ID NO: 37230 - DNA, 450 bp, Oryza sativa
  Clone ID: uC-osrocyp005d10b1
ttgcaaggagccttatccatccacctgtgaagaagccatccaagcttggtgaaaacttaacgagtcttgctgcagtagtggagaatgagcacaagcgtcttcttgcgaggaaatcaattattgaaaaacgcaaagaagatcttgagcgccaaatattggaaaaggaaaaggaagaagaaaaaaagagattgagtgttctcaagaaatctgcagaagatgaaaggataaggcttctcaatgatgtaaaattgagggaacaggagaggatccgtcgacaattggttgaaaaagaaaagatagaggcagaagaactgcttcagaaacagataaaggagatagcaaagagaggaggaaaaaaacctgtccttcagggggaagttactaaggaggctgtgatggaattggctatgaatgagcagtttaaggagcgctcagagatggagacaaaac

SEQ ID NO: 37231 - DNA, 354 bp, Oryza sativa
  Clone ID: uC-osrocyp005d12b1
ttgagcaagaagctcatctactcctcctctcgcatgggagacatggccaccatcgcgtccagcctcctcaagacctgcttcggtggcgcgcgcctccccggcggcgacagaaaccccaccgtgtgcgtcgcgccgcgcaccggaggcgccatctggaactccatctcagcgtcgtcgtgcactcccccctacgacctcaacgccgtcaggttcagcctcatcaaggagtccatccagtcccgcgagatgacccggcggtacatgaccgacatgagcacctacgccgacaccgacgtgtgcatactcggcgccggctccgcggggctcttctgcgagtacgagctctccaaggac

SEQ ID NO: 37232 - DNA, 407 bp, Oryza sativa
  Clone ID: uC-osrocyp005e01b1
caatcctctgcttccttttcggtttcctccttcctcaccatggcgctcgcgctgcgctgccccgccgctgcctcgccgacgccagccaagagcaccttcccgccctcctcctccccgtcggcgaggaggctcccgaggaggccgcccgccagctgcaggtgctactactacggcgacggcggcggcttacgcaagaactacgaccacatccccaagcagttccgcgaggagaacctcaaagatggcctgatggataatcacaagaatgttcctcaagtcctttatggcttaagccctgctcagatcgaaatgtacatgaacgatgatcattcatatgagcggccatcacagagagctacagaggacagcctttctgcttctaggagctatgatgaatttggcatgta

SEQ ID NO: 37233 - DNA, 446 bp, Oryza sativa
  unsure (1)..(446): unsure at all n locations
  Clone ID: uC-osrocyp005e02b1
tgtgagtttcccggattacccggactcggagttcaggaaggtgttccgcatgtccaaggccacgttcgaggtggtctgcgacgagctcgccgccgccgtcgccaaggaggacaccatgctccgcgccgccatcccggtgcgcaggcgcgtcgccgtctgcgtctggcgcctcgccacgggggagcccctgaggctggtgtccaagcgcttcggcctcgggatctccacctgccacaagctcgtgctcgaggtctgcgccgcgctcaaggccatggtgatgcccaaggtggtgcgctggcccgaggccggcgacgcggcagccatcgccgcgcacttagaagtcatctccgggatctccggtcgtggtcgcgcgatctacaccacccacgtactgatcatcgcgcccaagtccaacgttgactcctactacaaccgncgacacacgg

SEQ ID NO: 37234 - DNA, 509 bp, Oryza sativa
  Clone ID: uC-osrocyp005e03b1
tttgcccatactccagagtccagccgacccgacccaaacctcaccgccgccgacgccgttgccgccgccgccgctgcgtgcgcccctgcggaaatctagggtcctcggcggcgtccccctcgctccgaccccagttctctgcggcggcctgcgcgacgcgccgaccggccgaaggctgcgcgttgagctggccatgcaggtggtggggacggccgccgccttctgagcgggggggacgccgtctacagcgaggaggcggtcctgggattcagggaggaggttttctcgaagcatgaccgacgggagaggttcagtctcagcagctgggtactcccaattggaggtcagaagagttagctatcgacctgcaggaaccgaacaaaacttgttgaatgacattagcctcaatcgtaaggagacaagtttttgattactttctggacgaagcgggagctgacaaactactcttttgcagcttttggcaggtctatcggtacctacccatggga

SEQ ID NO: 37235 - DNA, 339 bp, Oryza sativa
  Clone ID: uC-osrocyp005e04b1
tttcagctgaagggaaccatattgcgatgggctgatggctgcatgctgggtgaaccagacgtccatgctcgccaatgaatgggggatgctgatcgtggtgctgtgcagatacgccgcccacctcgacctcgcgctcctcgacgggggtcgtcggcccaaggtcagcggcttgccggtgctcctactatgggcggcgtaccagctgggcggatgggccgggacgcacactgtccggagggtgtcacctcagggagacgaggaccaagtagcccgacctcttgatggtgtacatgcccatggtgtttatgaggaacagatgcccggtttctttcagcaatt

SEQ ID NO: 37236 - DNA, 514 bp, Oryza sativa
  Clone ID: uC-osrocyp005e05b1
cgcgctcgctgtctcgtgtcagttgcggagctctctagaaggagcagaggagtcccccccaagcgatcgattcgatcccctccgccgccgatcgcctcgccgaagtctccgagaaacacttgagggatggctgaagaggatatccagcctattgtctgtgacaatggcactggaatggtcaaggccggatttgctggcgatgatgcacccagagctgtctttcctagcattgtaggcaggccacgccacactggtgtcatggttggtatgggccagaaggatgcctatgtgggtgatgaagctcattcgaaaagaggcatactgacgtcgcgataccgacactagcatggtattgtcaacaactgggatgacatggagaagatatggcaccacaccttctacaatgagctccgtgtggctcctgaagagcatcctgcatagttgaccgaggctcctatgaaccccaggcaaacagagagaagatgacccagatcatgttcgagaccttcaactg

SEQ ID NO: 37237 - DNA, 429 bp, Oryza sativa
  unsure (1)..(429): unsure at all n locations
  Clone ID: uC-osrocyp005e06b1
ttcaaactcgacgcgccactcgacagcgaccccgcagccgatccatcccgccgacgaagcagcagcaaccgccacggtgcgccgccgccgccggtaccgatgtcgacgagctccggcgccgactcgtccccgcccgtctcgggcctcgactacgacgacaccgccctcaccctcgccctccccggctcctctcctnnctcctcctcctccaccgacgaccccgaacgcaagcgcgccgcccacgccgaccacgccgacgccaagccgccttccccaaaggcgcgggctggtggggtggccgccggtgagggcgtacaggcggaacgcgctgcgggaggacgccgcgagggcgaagctggtcaaggtggccgtggacggcgcgccgtacctgcgcaaggtggacctcgcggcgcacgccggctacgcgcc

SEQ ID NO: 37238 - DNA, 500 bp, Oryza sativa
  unsure (1)..(500): unsure at all n locations
  Clone ID: uC-osrocyp005e07b1
gtgggtgtgttcctgtctcccctctccttcctcctctcctttcccctcctctcttcccccctctcacaagagagagagcgccagactctccccaggtgaggattcagccatgaagggggccaaatccaagggcgccgccaagcccgacgccaagttggctgtgaagagtaagggcgcggagaagcccgccgccaagggcaggaaggggaaggccggcaaggaccccaacaagcccaagagggctccctccgctttcttcgtttttatggaggagttccgtaaggagttcaaggagaagaaccccaagaataaatctgtcgctgctgtaggaaaagcagccggtgataggtggaaatccctgaccgaagcggacaaggctccctatgtagccaaggccaacaagctcaaggccgagtacaacaaggccattgctgcctaccacaagggcgagagcactgncaagaggcacccgccaggaggaagagaggacgaccaggaga

SEQ ID NO: 37239 - DNA, 386 bp, Oryza sativa
  Clone ID: uC-osrocyp005e08b1
ttagtatcgaatcctctcttctcctcgtgcccaccaccaccaccgtagcaatggcgggcaacgggccgatcaacaaggaggacccgctcaactggggcgcggcggcggccgagatggccggcagccacctcgacgaggtgaagcgcatggtggcgcagttccgcgagccgctggtcaagatccagggcgccaccctccgcgtcggccaggtggccgccgtcgcccaggccaaggacgccgccggcgtcgccgtcgagctcgacgaggaggcccgcccccgcgtcaaggccagcagcgagtggatcctcaactgcatcgcccacggcggcgacatctacggcgtcaccaccggcttcggcggcaccttccaccgacgcaccaaggac

SEQ ID NO: 37240 - DNA, 463 bp, Oryza sativa
  Clone ID: uC-osrocyp005e09b1
ttgccttcacctccctgctcagctcagcagctcagggacttcgaggatgatggaatccaaagcagccatgatggtgaccatcctgctctgctgctcctccatctcaccggcgttcgcgcagaagcacaagggtccgcccgccgcggcggccgtgagcctcccgccgtcgccggcgccgtccccggcggcgccgcgccacgtggacctcgccgacctcctgagcgtggcgggtccgttccacacgttcctcgacctcctggagaagacggacgtgctcaggacgttccagagccaggcgaacggcagcaaggacgggatcacggtgttcgtccccaaggacgcggcgttcgcgtcgctggcgaggtcggcgacggcgaacctcacctccgaccagctcaagtcgctggcgctgtaccacgcgctgccgaggtactactccctcgctgagttcaacaggctgggc

SEQ ID NO: 37241 - DNA, 490 bp, Oryza sativa
  unsure (1)..(490): unsure at all n locations
  Clone ID: uC-osrocyp005e11b1
tccacgcgtccggtattctgccgtgattaccatggtacgtagtcaaattgccctcgtcccgttccatgtgatggaggcgtggtgtgatgcatttttgcacgatgaggatgcttatcttgagtgtcgtcaaaccgtgcaaaccaaccccgtcaacggagagaccaagacccccgggcagaatatctatctcaagaacatctgcaatgttgaggttgaccctgacggtgtgcgtgctgccatcatcatgcataagcgtgttggaggcgaggatgaggacgctgttctcgtttacttgccatccatgcgccgcgggacggacattattcaccatttccttcctcgtgggtatcaaatccccgtcggcacccattcgtactttgcgggtatcaatccgtacacctatggtaccgacaccaagactggcatgtgccaatacgctgcanatacgaagtatgaggactggccagcagcacatgctatcgtgtccagc

SEQ ID NO: 37242 - DNA, 485 bp, Oryza sativa
  Clone ID: uC-osrocyp005e12b1
ttacgatatcatccatctcacccgtcgacaccgcctccgttcacagcttctattctcccagaaacggacaagagggggaggaggcgagcagaaggctcaaggagggagaccatgcgggtgatgagccatctcctcctccatggaggagagctcctgctgcttcatgcagcggcggctggtcaggctcagctgggtagcaaccaagactgatccgactgaagcggaggcgctgaacgcggagtacgcgaagctcgggcagcacgcgtcgttgacaacggcgacatggaacattagcggcgacccctgcaccggcgccgacacggacggaaccgctatccacgacaaccccaacttcaacccggccatcaagtgcgactgcacctttcagaacaacaccgtctgccggatcaccaagctgaaaatatatgccttagatgtgcctggcacgataccacatgagctgcggaacctcacgcgcttgaccc

SEQ ID NO: 37243 - DNA, 200 bp, Oryza sativa
  Clone ID: uC-osrocyp005f01b1
agcgacgcgtccctctgtaccttataggcgaaagattgtcacggagggctaaggcactctctgagaccggggtccttacctctgcgaccagttcactggggaagtctacaggagcaatgcctactgcgaaagcaacaacaaatcctgttctatcttcgaatgcctgaataccgatggttaggcgtcgttatattagtgga

SEQ ID NO: 37244 - DNA, 488 bp, Oryza sativa
  Clone ID: uC-osrocyp005f05b1
caaagagttcgacatcttgaagggccacatcgtcgcgacatctccagccttcgccaacaggctccctcacatcttcaagaaccccgactcatacgaccccgaccgctacgcaccaggcagggaggaggacaaggcagcgggcgccttctcgtacatctcctttggtggcggcaggcacggttgcctcggtgagcccttcgcctacctacagatcaaggccatatggactcacctgctgaggaactttgagttcgagctggtctcccccttcccggagaccaactggaaagccatggtcgtcggcatcaaggacgaggtgatggtcaacttcaagcggcggaagctcgtcgtcgacaactaggatgccaccttcaaccttaagagtcgatgcttgtcgcgctattcgcctttatttctcttcttttccctttctgtcagtatttgatccgtgtaagtttctgccagctttgtatagggtgtttcagtcg

SEQ ID NO: 37245 - DNA, 467 bp, Oryza sativa
  Clone ID: uC-osrocyp005f06b1
tgtacgtttccgtttacccccaccgacgagaggcggagagggaggggagctagggtttttcggggcggggatggcgcggagggggagagtgcagctgaggcggatcgaggacaaggcgagccggcaggtgcggttctccaagaggagggcggggctgttcaagaaggcgttcgagctcgccctgctctgcgacgcggaggtggcgctcctcgtcttctcccccgccggcaagctctacgagtactcctcctccagcattgaagatacctatgatcgctatcagcaattcgctggagccaggagagacctgaacgaaggaagtacaagcatcaacagtgatgaaaatgcaagtatacactacaggcttagggacataacggcctggtctctccaaaacaatgctgacgagtcggatgctaatcagctagagaaactggagaaactgctgacaaatgctttgagggata

SEQ ID NO: 37246 - DNA, 386 bp, Oryza sativa
  Clone ID: uC-osrocyp005f07b1
tagcacacgcgcaccaacgcatcatacatcgctacatcccagcgagatagctagggagaaagataagaggaaaactaaggccgagccaggcatgggttgctatcatctgggcaagttcgtgtcgaaagctctcggaaaatgcaacgtgcgcgagagggggtggcgggaggagaggctggactacaccatggactacccgcccggcccacccacggagacgtactacatgcggccggtggcgcgcacggacaccttcagcgccgccaacttcgtctacgtgatcccgactgcagagccggcgcaccagcaatcccccgagccccattcacagacaccgccggcgacggcacagcaacagcaacacgggcccgagcacgagcaccacc

SEQ ID NO: 37247 - DNA, 354 bp, Oryza sativa
  Clone ID: uC-osrocyp005f08b1
ttccgccgtgttgccgccgccgccatgggctcctgcctctcctccgacctgcctccccgcgccggcgccggcgcgggagcgtcacccgggtggccgcagcggtggcggaggaggaggcagcggggggtggagcggggcggggctgtttccggcggcggcggcggcgtcttctccatcggcgtcggcggcaagaagctgcaccacggcggcggaggaggaggggagatgacggaagaggagctcgcgaaggtcgaggggagggtgtgcgtcaacggcgcgagcgcggcggcgtgcctgcacacgcagcaggggcggaagggcaccaaccaggacgccatgggcgtgtgggagaac

SEQ ID NO: 37248 - DNA, 428 bp, Oryza sativa
  Clone ID: uC-osrocyp005f09b1
ctggaacggttttacattcagtttcaaacacgaccgaggagctaaatgctccattaaaggatgagtctttaatgattgggggcaaacatgtcgtgaatgataagattccattagtgtatatgggcgagtctataaaatcctttagaacattgttgaagaggtataatatgcatagacgtgatatgttttcaaatactgttggagttaaggcttatcacggcatacgaccgcagtttcctccattgcgtggccaatatgggggtgctgaggatttgactgcagcaagtgatccttatatgtatgttaaccagttacttttgcactgggttcgacacgcatttcaaggtcacagaaggtccatacggtataagttgctggttgggcagtatgatgcgagttacaaccatatgactggggtagtgatgcgt

SEQ ID NO: 37249 - DNA, 482 bp, Oryza sativa
  Clone ID: uC-osrocyp005f10b1
tttccgttgagaagcctcttttggatctatccattcgggtcaccgtggcagttcggtaattttggcggagaggaggaggaggacgacgactacaacaacgtgatgggtcttctcgacaagctgtgggacgacaccgtcgcggggccccgccccgacaccggcctcggccgcctccgcaagcacgccgccgcccgccccgccgccgtcaagatcaacgacccgacaggggacgcggcgatggtggccgtcccgctcgacgacgccggccggggcggaggaggcgccggtgaaggtgacgcgcagcatcatgatcaagcgccccgcggggtacccggcgtcaccgaggagcgcggccagcacgccgccggccttccccgacggatccacccctcccatctcgccgttcgccggcgccggtggtcgcttcagaggaaatcatcgtccgacgcatatgagagggcaacacctgtgacaaccagtca

SEQ ID NO: 37250 - DNA, 420 bp, Oryza sativa
  Clone ID: uC-osrocyp005f11b1
tttccggttctgtaatggctatgcttttgatgaacttttccctgatgtgatctcgtccgctattgattgcgcaattgatgcgggaacagcagtattttttgatcctggtcctcgaggaaaatctctcttacatggtacccttgatgaacagagggcacttgagcattctctgaggctcagtgatgttctgcttttaacatcagacgaggctgagtccctgacgaacatcagaaacccaatccaggcagggcaagagttgctgaagagggggattcgcacaaagtgggttgtcataaaaatgggctcaaagggatcaatcatggatacgaagagtgctgtctccagtgcaccttcatttaagattgacgttgtggacaccgctggatgtggagatagctttactgctgctatagcttttgg

SEQ ID NO: 37251 - DNA, 385 bp, Oryza sativa
  Clone ID: uC-osrocyp005f12b1
tgtttgcttagctcagcttagctgtgctgcgggtccttttaattcataagccagcagctagctagcaagcaagacacacatatatgacaggccagctctgtatccctaagtaagctgtatactccatatagctagctaaacacaggaggagtggaggaaggagaggctagctgatctagctatctgcagtgattaggtaaaatgatggcttctgataggtcggaagcagaaaggatcatatagtacttcaagggcaagagcatcctcatcactggagcaactggcttcctcggcaagattcttgtggagaagatactgagggtgcaacctgattgtcagaagatctacctgctcgatcgggccatcgaccaagcatgtgcaaacc

SEQ ID NO: 37252 - DNA, 217 bp, Oryza sativa
  Clone ID: uC-osrocyp005g02b1
tatccgatactagaacgcgagcgggcggcacggaccgggtttcttttaaagcggattcggcttgacgacccagccaacgtacccccatggacgccttcgccggatccggcaatgcctccagaggcgccggcgccggcgcgtacgagggcagctactactccctgctcggcattcggaagaacgcgatcaacaccgacgtgcgcgccgactacaagag

SEQ ID NO: 37253 - DNA, 440 bp, Oryza sativa
  Clone ID: uC-osrocyp005g03b1
ggtcccggttccgggttcccggcacgcgcccgtttttcttttgctcaaacagcagcaacagccagcgccggcttgcttagataagggcttcgccctcccaagaagaagaagatgtcttgctgcggcggcagctgctgctgctgcagcggctgacaatgcggcggctgctgctgcggatgcaagatgatccctgctgtggaggccacagtcactaccaagaccttggtgctcgctgctccatccaacaaggcgagctctggaggaatggacatggcagtggccagccgccagaacggaggctgcggctgcaacacctgcaagtgcggcacccgctgcaacggctgctactgctgctactgcaactgactctatcgtcgtctactcccgactgcctgaggatatatcgtatggatgctgctactgtcgatcagagctttgat

SEQ ID NO: 37254 - DNA, 557 bp, Oryza sativa
  Clone ID: uC-osrocyp005g05b1
tcccctctccctctctttctctctctctctctctcccacgccaaacgcagtgccgccgacgccgccgccatcgagccgccatcggttcccgccttcagatcgatggcgtcggcacccctagggccggcccggccttcgcgccgccgtcgattcccgtctctccaccgcgaccctcacgccgaccgtcaacgaatcctgactcaagatcgacgccgccgacaccccacccagcgcgtcgattcccgcctccagatgatgccgccggcgctccgccggtgctccgccgagtgcaccgccgccccaaactccgccccacctcgatctgattcgccgagagaatcattcctgttgagccagcgaccccgacaactcttcttgccaccaacaccaccgtcttctccctttgtccagccaatcgccgggaaggcatcgctgcccttttcccctgatcgagtgctcgacctgcctggacacggtggtctacggcaagtctgcctggactcgggattctcacactgtcagctctggatctgcctttatcatagacattctcccac

SEQ ID NO: 37255 - DNA, 490 bp, Oryza sativa
  Clone ID: uC-osrocyp005g06b1
gtgagcgccaccaccaccctctccacctccgccaccaccaaaatccgcgcggcgccgccccaaaaccctaatccgcgcggcccaccgcatcccgcggcgctcagatctagggcatcccccggcgatggcggaggcaagggcgacgaggcggcgggcggaggaggcggagatggaggcggaggcggggacggagggggacgacggcgacggtggcggcagcagcgactacacgtcggaggacgagggcacggaggactaccgccggggagggtaccacgccgtccgcgtcggggactcgttcaagcagggcgcctacgtcgtgcagtccaagctcggatggggccacttctccaccgtctggctcgcctgggacaccggccactccagatatgtggcgctgaaggtgcagaagagtgcacagcactacacagaggcggccatggatgagatcaagatcttgaagcagattgccgatggtgatcctgatgac

SEQ ID NO: 37256 - DNA, 397 bp, Oryza sativa
  Clone ID: uC-osrocyp005g07b1
atgttcttgtttttctttttgttcttgttgctctgatcctccatcgctgcctactaagaagacgtatacgatggacgacgagatcaggtgatcatggggactcaggtggcagataactacccaccggccaaggatggccggagcgcgcaggagaaggcgatcgacgactggcttcccatcacgtcgtccaggaacgccaagtggtggtactccgccttccacaatgtcaccgccatggtcggcgccggcgtcctcagcctgccctacgccatgtacgagctcggctggggacctggcatcgcggtgctgatcctgtcatggatcatcacgctctacacgctgtggcagatggtggagatgcacgagatggtgcccgggaagcggttcgacaggtacc

SEQ ID NO: 37257 - DNA, 392 bp, Oryza sativa
  Clone ID: uC-osrocyp005g09b1
ttgcaattaaaatatttcaacgtgctgtaaaggcactccctgattcaggagtactaaagtatgcctttgctgaactggaagagtctagaggagcaattcagcctgctaaagcaatatatgagtctcttatagctgagaatgcgggaatgacttcacttgcacatattcagtttattcgatttctaaggagaactgaaggcattgaagcagctcgtaagtactttctggatgctcggaaattgccaggctgcacttatcatgtctatgttgcttacgctacaatggcattttgccttgacaaggatgcaaaggttgtgaaaggaattatcttgatgtttttttaatataaaaaatgcaaacatggtttttagggtatttatactgttttattt

SEQ ID NO: 37258 - DNA, 396 bp, Oryza sativa
  Clone ID: uC-osrocyp005g10b1
tttcgtttaagaaaaagttagatcacaggagagctgagagctcaaagagttgggaagccatggcgggagggcagctcaacgtgctgagcacgctcgaccaggcgaagacgcaatggtaccacttcatggcgatcgacatcgccggcatgggcttctttaccgacgcctactacctcttctgcattaccctagtgaccaagctgctcggccgtatgtactacaccgacgattccaaggacacccccggcgcgctcccgcccaacatgaaagccgtcgtcaccggcgtcgcgctctgcggcacgctgcgcggccagctatacttaggatggctcgttgacaagctcggacgcaagagcgtgtatggactgacgctgattctgatggtcgtgtgctcgg

SEQ ID NO: 37259 - DNA, 407 bp, Oryza sativa
  Clone ID: uC-osrocyp005g11b1
gaaaaaggaaaataaaatccccaatccaaaacacactccgcccctccgatccccccctctctcaaaccctagctccccccctccccaccaccaatcccccacgcgattcgccggatgcgcccgcccgacgcggcctaggcccctgcggttcaccggcggcggtggggcgagagagcgcgcgccggcgaccggcgaagaggaggggggggcggtcgatggagccgcgcgtgggcaacaagtaccgcctcgggcggaagctcgggagcggctcgttcggggagatctacctcggtactaacgtgcagaccaacgaggaggtcgcgattaagctggagaatgtgaaaacagagcatccacaattgctggacgagtcaaagctgcacaggatacttcagggtggaactggg

SEQ ID NO: 37260 - DNA, 433 bp, Oryza sativa
  Clone ID: uC-osrocyp005g12b1
tgttcgtgacatgaacggcctcaagctcgccggattcagcaccacgaagctgggcctcggcagcagcaggaagaggacgacgcgccgccgagggatccggcagcggccatgggggaaatgggcggcggcgatcacggaccccagcaagggcatgcgcgggtggctcggcacgttcggcaccggcgaggacggcgtcatggcgtacgacatgaaggcacgccggatccgccgcaagaaagccaaggtcaacttgcgcgacaccgtcgccgacggtcccaagcggccacggcgttcttcggcgaaacattcgccgcataagcagaaggccaggtcctcggcaccgtcgactgcgagcctgaacgccagcgatgccaagtccaagaccaacaacaaccgggtcagctcgggtgggagcaggaccgacactaccgac

SEQ ID NO: 37261 - DNA, 314 bp, Oryza sativa
  Clone ID: uC-osrocyp005h01b1
attgaagttaaacaggaaaaaaaatcaaacagagagaataaatattgcccatctgtgaaactcgcaaaaccctagcgcggcggagatgtcgcacacgagggtgttcttcgacatgaccgtcggcggagctccggcggtgcggatcgtgatggagctgtacgctaaggacgtgccgcagactgaggagaactaccgcgcgctctgcaccgcggagaagggcgtgggcaagagcggcaagtctttgcactacgaggggagcaccatacaccgagtgatcccggagttcatgtgccatggcggggaattcacccgcg

SEQ ID NO: 37262 - DNA, 102 bp, Oryza sativa
  Clone ID: uC-osrocyp005h02b1
cggtaccattgtttacttaggttccctgccaaactctaaatgccagctgatcaaagactaaacaccaatcgataactccgactctactaccgactaacttaa

SEQ ID NO: 37263 - DNA, 372 bp, Oryza sativa
  Clone ID: uC-osrocyp005h05b1
ccactgaggaccccatttttgttatggctgcccctgaaagggcagcggcactggttcaagatgcctcatcgctgaccacggagccgtcgcaagccatataaggcagagggcatgtgcctgccttgcaaaagcgagtagatgatcgaggaaccgctttaccgggggcggctgctgggggccaaaggggaactgaagaagcttattctgaccaaacaggataggctaacatgtggggaaaggtgccccacttgagggccttgagctgatcaccaacagatgtggctccatgtggcacactggctgacctactcggtcgatgacaaaagtaattacatcgggcaaactcggagtgcagcgagtcctcacacatgc

SEQ ID NO: 37264 - DNA, 480 bp, Oryza sativa
  Clone ID: uC-osrocyp005h06b1
gtttttcttttgtgacttatatagtgtaggtttacttccagcttcgtcgattaccagacggcaccggcgtcgcgcgagcgagcttgatcttgcgccttgtgcctgctagctgcttcggcggcggcggttatcttcttccgatctgtaacagccccgatcaagaaaggatccaacccacctaggaggactaacctgaacgtgctaatgagttcaaagctagtaacatcacctctgaaatccatggagcagggccatctagagcaacctctgcgcgatccgcaggcgccggcggagcagcatgacatggggttatctcccctgacgctcctcggcttcgccttcctgaccttcaactcgggaatggcagtgtacagatcagatagagacttggcaaccatcttcatcgtggtcttctcctacgttgacctcgtatcgctcttctactttctccgattatttgagaagacgccgccggagtcg

SEQ ID NO: 37265 - DNA, 402 bp, Oryza sativa
  Clone ID: uC-osrocyp005h07b1
cggtaccattgttcacttaggttccctgcaaaactctaaatccaagctgatcaaacactaaacaccaatcgaaatctccgattctactaccgattaactcaataaataggcgatcggagattggagtctctgttcatcggccagatttcaaaatccgagcgacggacatcgactacgaatggggtcaagatggagtggagagagtatttgcctcatcttcaaccgtatcggtagcagataaagcaatcgaatccgtggaggagacggagaggctaaagagatcactagcggattcgttgtacggaacagatcgaggtttaagcgcatcgagtgatacgagagctgagatcagcgagctcatcacacaggtcgagtctaagaaccctactccagctcctaacg

SEQ ID NO: 37266 - DNA, 465 bp, Oryza sativa
  Clone ID: uC-osrocyp005h08b1
gtcgacgttggcgcagtgcgagcttatgtggtgttcgcgaatcagacagatgtatcggcgtactactgtatgcttggtgagaaggccatggtagtggagggtttctgggacgagaagaggagcaggctgtgtctgaaagggtgtcacgttgcgaattcgggaccattccgtgcggatttggcggtgggtgagtgtgggattggcatgagcttctggttccccgctgtgtggtcactacaggaacggagcttggctgcaggtttggtctggaacacgagcctgaagagcggtgagggcatagctgcaagctccaacacaatagctccatactttaggggaagtctttcgggtctgaagtataactacaccaaggttgatgaggcaaacaagtattatgagaagtatggcttgaacaagaagagaaagggaaagctccctgatagcaattcatatcgggacttaaca

SEQ ID NO: 37267 - DNA, 325 bp, Oryza sativa
  Clone ID: uC-osrocyp005h09b1
gtcgaagccaagccaacccaaccacacgccaatccactcggaatccgcctagggtttcctcctcttcctcttcccctggcggctgctgctcggcggattctgctgcggaggaggagggcgccgggggttggggctgcaagctggtccgatcagcttttcctgctgctgaggtagcgggagcgacaaccagggcatttcttgtacaaggatgaacagcctgccccggctcaaataatatttgcggttggatttattttttttcgacatgaacgggcagccaaggtttcacgatatgataggcggtggtggcaagggaatgcaagat

SEQ ID NO: 37268 - DNA, 379 bp, Oryza sativa
  Clone ID: uC-osrocyp005h10b1
atgaaccacttttactttctcctcctccccccgatcggatcgggccgggtccttcttctccggcgtcggcaccgccgccgcagataggagaagatggccgcacttgatacctttctctttacctcggagtctgtgaacgagggccaccctgacaagctgtgcgaccaaatctcagatgctgtgcttgatgcctgcctcgccgcggaccctgacagcaaggtcgcttgtgagacctgcaccaagacaaacatggtcatggcctttggtgagatcaccaccaaagctaacgttgactatgagacgattgtcagggagacatgccgtaacatcggttgtgtgacagctgatgtcggtctcgatgctgaccactgcaaggtgc

SEQ ID NO: 37269 - DNA, 379 bp, Oryza sativa
  Clone ID: uC-osrocyp005h11b1
cgcgaccgtgtggtgcttgggcgacgccgacggcgagggggacggcgccggcgcggccgagccgggaaagacggggccgccgctgccgcccgggtggaagggcggctcggggtccggccaggggtccagccccgacggagcttggaggtatggctggggctgggccgctagccctggcggcaagggctccgggttcgggtttgggtacggcggcagcagacgcgaatgaggcggcggccgtggcggcggcggcggaggaagcggtcgagcatatggttacggtggaggatactgtggccaccctcgaggctttggaagtggcagaggcggtggcggcggcggcggcggccgcaactatggtggccgcagcagggggatt

SEQ ID NO: 37270 - DNA, 484 bp, Oryza sativa
  Clone ID: uC-osrocyp006a02b1
acctttttatgtgggttcttatgaactttctctacaaacatgcaagtgcattggggcttatgtgaaaagcaagaaaaatcaaagtcagatatgttggctatggcaaaaggttaagtcaacagaagacagaggattccaaagattcctggacaatgtgcagtacaaaaccactggaatcatactctatgagcgtgtctccggagagggttatgtcagcactggtggtattgaaaccacaaaggaatttgtggataagctggatcttaaacctggacagaaagcgcttgactgcgagtgcggaattggaggcggcgacttctatatggctgaaaactacgatgcccatgttcttggtattgatctttcaatcaacatggtttcatttgcaatcgaacgtgccattggacgcaagtgttcggtcgagtccgaagctgctgattgcaccacacagacctacgcaccaaatacatttgatgtgatctac

SEQ ID NO: 37271 - DNA, 477 bp, Oryza sativa
  Clone ID: uC-osrocyp006a04b1
ttttgaaccgtcctgctgtgttcacgcaatacaatcttctgaagtcctctcttgttccttctgtgctcaaacatcaaaagcagctctctcctaagttctcttgattgtttgtgctcctaaattctgttgtttgagcactcaaacatttcccttactggtcaatcttagatcacttgttgattattggtattggcattatttggtgaagcatttctgcttgtaccttaaacaaaggtctctgttgtcttattggtgctgaaggcaagatatacactgcagtgatggctcaaacttgcttgccacctggctttcgttttcatccaacagatgttgaacttgtttcatactatttgaaaaggaagattatgggaaagaagcctcttattcaagctatatcagatgttgaactgtataaatttgctcctgggatcttactgctccatcctgtctccagagcagagatcttgaatggtcttc

SEQ ID NO: 37272 - DNA, 484 bp, Oryza sativa
  Clone ID: uC-osrocyp006a05b1
ttagttgctagggttgagagagcaccacgcgcggacgctgctcatccactacaggtgggatgtcgaaaggattttcgagctgcttgatcagaaggggagggacaggctcttctcggaggctggtatccctctccaacctgctaataatcccggctcgccctcctcaacggaggtaacctgcaatgtttgctatgacgatgtgcccctctcggacgcctccaagatggactgcggccacaactactgcaatgaatgctggacaggatatttcattgtgaagataaatgagggacaaagccgccgtatcaagtgcatggctctgaagtgcaatactatctgtgacgaagcaataattcgtaagctagtaaatgcaaagcggccagatattgcagagcgctatgcaaggttcttgttggaatcttatattgaggacaatgatacagtcaagtggtgcccctgcacaccgcattgtggaaatgctata

SEQ ID NO: 37273 - DNA, 322 bp, Oryza sativa
  Clone ID: uC-osrocyp006a07b1
gaaagcttgcaaaagtagaggagagacaagaaaattgcatgaagataacatttttgaagaggagtttggcagcttgaagaactctggtcaaggagcatggagtgaactgagtaaagtagtagcgtcaaacttatctgaaagtgttgtctcgctggcttcattcgatggggatattatgcattctgcatgcacaggcgtagttatcaaaactgatttatttggcacaagttacctgacttcagctagcctgattagatcttttgatgatgaaagcaagatcatgccatttgtgtctattgaagtacaccttccaaaaaacaag

SEQ ID NO: 37274 - DNA, 319 bp, Oryza sativa
  Clone ID: uC-osrocyp006a08b1
ctcacacttgaagaaaaaaaaacacgacgaacacgttttaaaaaggtcttactgaagtggcagacccaaaccgcgaacaatgtgtggaggcgccatcctcgccgagttcatcccggccccggcgggcgccgctgcggtgaccaagcgggtgaccgccagccacctgtggccagactgcgttaagaacgccgtccgcggcaagagcaagagcaggaggctggataagagcttcgccaactgtgacgacttcgaggccgccttcgagcagatcgacgataactacgacttctacgacgcgaaggaagaacacctatgacac

SEQ ID NO: 37275 - DNA, 482 bp, Oryza sativa
  Clone ID: uC-osrocyp006a09b1
tttctgcgagtgcaatggccttcccgaggtggccaactactggaagcaggtcatcaagatcaacgactaccagaagagccggtttgtcaaccgcgttgtgtcctccatgttcaacacagtctccggcaagaagatcgccgtccttggctttgcgttcaagaaggacactggtgacaccagggagacaccagccattgatgtgtgccacggtctgttgggtgacaaggcacagatcagcatctacgacccacaggtcaccgaggaccagatccagcgggacctcgccatgagcaagttcgactgggaccacccgatgcacctgcagccgaccagccccaccgcattcaagcagggagcgtggtgtgggatgcatatgaggccaccagggggccatggtgtctgcatcctaccgagtggacgagttcagaccttggactaccgaagatctttgacaacatgcagagcctgattcgttttgatgg

SEQ ID NO: 37276 - DNA, 421 bp, Oryza sativa
  Clone ID: uC-osrocyp006a10b1
ttcgtcaccccaccccgatcccctccccgccgtacggtcgcagaaggaacccgtcttctagaaggaggacgagggctacctctctctctctatcttctgccatggggagctccgcgaggaaggagcaccagttcctcgccgagcttggcctcgcgccgcgtaaccccggacccttcgcctgcggcgcctggggcggctcgggccccgtcgtcacgtccaccaacccgacgaacaaccaggtcatcgcaaaggacgtggaggcgtccactcgtgagtacgatgaggtcatgcgcgcctgctacgatgccgccaagacctgcatggcgattccagctccaaagcgaggtgaaattgttaggcaaattggtgatgcattgagagcaaagctgcatcacctgagcaggcttgtgtcacttgagat

SEQ ID NO: 37277 - DNA, 534 bp, Oryza sativa
  unsure (1)..(534): unsure at all n locations
  Clone ID: uC-osrocyp006a11b1
gccactaatagcttctgtcaagattcccttctaggagagggctcacttggtcgtgtttacaaggccgatttccccaatggaaaggttcttgcagttaagaagatagatagttcagccctttccttgcaggaagaagacaattttcttgaggctgtatcgagcatgtcacggctaaggcatccaaacattgtgccacttacagggtattgtgttgagcatgggcaaaggcttcttgtttatgagtacattggaaatggaacactgcatgatgtgctgcactactctgatgagttgagcaggaagcttacatggaacatccgtgtaagggtagccctagggactgctcgggcgctagagtacctgcatgaggtgtgcttgccatctgttgtgcatagaaactttaagtcctcatacattctactcgatgaagagcataatccacatttatctgactgtgggcttgccgccctgacacccaacacggagagacaggcttcaactgangtgtttggctcattggatacagtgccccga

SEQ ID NO: 37278 - DNA, 468 bp, Oryza sativa
  Clone ID: uC-osrocyp006b01b1
ctccagtctccactcctctgtttcctcccacctcggctcgaaggaatggcaagcggtagtgaagctgagaagtcacctgaggttgtgctggagtggcctaagaaggacaagaagaggcttctacatgctgtttaccgtgttggagatttggatcgcaccattaaatgttacacagaatgctttggaatgaaattactgaggaaaagagatgtgcctgaagagaaatatacgaatgcatttcttgggtttggacctgaggacaccaactttgcacttgaattgacatacaattattggtgttgataagtacgacattggagcaggatttgggcatttcgctattgcaactggtgacgtgtacaaattggctgagaaaattaaatccagttgttgctgcaagatcactcgtgaacctggtcctgtcagggaggatccactgtgattgcctttgcacaggatctgacggta

SEQ ID NO: 37279 - DNA, 473 bp, Oryza sativa
  Clone ID: uC-osrocyp006b02b1
ctctgctgctgctgctgttgatcctcgtcgctgctggcccccaggcaggcagagctgcaaagccaatcccaaatctccagctcatgaccaaggagggcggcagttcaagaatcatccaggacgacatcataaaggcaatcaacaagcatcccaatgctggctggacggctgcacggaatccatactttgcaaactatactactgcgcaattcaaacatatccttggagtgaagccaacaccgcatagtgtgctaaatgatgtccctgtcaaaacttatccaagatcgctgatgcttccaaggagtttgatgccaggtctgcatggtcacaagtgtaacacaattgggaccatacttgatcagggtcactgtggctcgtgctgggcatttggtgctgtggaagtgtctccaggatcgtttctgcattcatttcaacatgaacatttcgctatctgtcatgacctagtggcatgc

SEQ ID NO: 37280 - DNA, 470 bp, Oryza sativa
  Clone ID: uC-osrocyp006b03b1
ctccagctctcttcccttcctcgtccagttccatctaatcagcttctcgtcgagatgggccgcaagttcttcgttggtggcaactggaaatgcaacgggaccactgatcaggtggacaaaattgtgaaaattctgaatgagggacagattgcttctacagatgttgttgaggtggttgtcagcccaccttatgtgttccttcccgtggtcaagagtcagctgcgcccggagatccaagttgctgctcagaattgttgggtgaagaagggcggggctttcaccggtgaggtcagcgctgagatgcttgtcaaccttagtattccctgggttattcttggacactctgaaagaaggagtttgttgggtgaataaatgagtttgttggagacaaagtggcatatgcgctctctcagggcttgaagggcattgcatgtgttggtgagactctcgagcagcgggaatctggatcg

SEQ ID NO: 37281 - DNA, 476 bp, Oryza sativa
  Clone ID: uC-osrocyp006b04b1
ttcgttctcgtgacctagaatatcttttcggcagatatggaagaatacgtgaagtggagttgaagcgcgactacgcgtttattgaattcagtgatccccgtgatgctgatgaagcgcggtataacctagatggcagggatgttgatggaagccgcattcttgttgagtttgctaaaggagttccacgtggtgctgctggtggttcacgtgaatatatggggatgaggacctcctccaggaacaggtcgctgttttaactgtgggattgatggtcactgggcaagagactgcaaggctggtgactggaagaacaaatgttatccgttgtggagaaagaggtcacatagaaagaaactgccaaaacagtccaagaaatctcaggcgagagagaagttattcgcgctccccatcgtcacgccgtggacgtggtcatggtcgtagtcgtagctatagccggagccggagcatgagttaca

SEQ ID NO: 37282 - DNA, 500 bp, Oryza sativa
  unsure (1)..(500): unsure at all n locations
  Clone ID: uC-osrocyp006b05b1
tgttcctctcccacaccgccggccgcgtcgcccctcccctccgcctccgccgctgccgccgccgcctccctgcggccccagtttccgtttcccaagcgagtgtcccaagccgcgttgagggagcgggcggcgctccccccgtcgcccggcgcgtggcatcccgcccggccgcccgcccggatccggccggggcctcccaccgcgggggacggagcgcgtcctccgccgccgtcgccgccgccgccatttccggtggtcgacttcgccctgaccgagggagacggtctcgtccctctcttgtctgctgcagcttcctagctcctgggctgcctccccccgcggcttctcgggcgccgcgatgtcggagggcaggngaggtaacggcgcgcgagtgatggtccgggaggcggcctgcaacgccatcgcgggcggttcggctggtgtgatctccgcacggtgctgtgcccgtggacgtgatcaagacgcggctgcaggtgtac

SEQ ID NO: 37283 - DNA, 457 bp, Oryza sativa
  Clone ID: uC-osrocyp006b06b1
ttgtctcgtgggcggacgcgtgggcaccgactccgagaggctcatcggagatgctgccaagaaccaggtcgccatgaaccccatcaacaccgtcttcgatgccaagcgtctcattggcaggaggtttagcgatgcttctgttcagagtgacattaagctctggcccttcaaggtgattgctggacctggtgacaagcctatgattgttgtccagtacaagggtgaggagaagcagcttgctgccgaagagatctcctccatggtcctcatcaagatgcgtgagattgctgaggcctaccttggcaccaccatcaagaatgccgctgtcactgttcctgcctacttcaatgactgccagaggcaggccaccaaggatgctggagtgattgctggtctcaatgtcatgcgcatcatcaacgagccaactgctggcgctattgcctatggtcttgacaag

SEQ ID NO: 37284 - DNA, 485 bp, Oryza sativa
  Clone ID: uC-osrocyp006b09b1
tttcgttttgctagcaatggcaggcaccaagcttgcagctcttgggttcgttgtcctcttgagcattggactagccagtgctgcaagagtagaaagatactccagttcccaaggttcaggtacaggaggtggagagggaggaggatatgtgaacggagggggagctgggaaaggagtcggggctgggtctggtagcagtaactcttatggtgctcatgcaagtggtggaggtggcggcggaggtggtggttacagccaatacggtggatcaggatctggtatgcggatacggcacgggctcaggctcaagccaaacttcacaaaatggatactatggttatggtgggtcatccagtgctagcggtgctggtgttggtggtggtgccggacaagcccgtggttactggccatccaatggtcatgggtccagcagtggtacgggctatggctctagcactgctaataactactactatggaccatat

SEQ ID NO: 37285 - DNA, 461 bp, Oryza sativa
  Clone ID: uC-osrocyp006b12b1
ttctttccacccagcgactcgccggaaccctagccctagatcccgcgcggcttgccgtcgtgctagccatggcgtccctcaaggagctcctcccgacgcccaaggcggcggcgtcgacgttctacgaccacagcagcgacccgtggttcaaggagcggtatggcggggagtcggcgcaatccgacgcggcggcggcggcggcgaagccttcgggccccgccaagcccgtgccgccgtacgggaagcgtggcgggttcgtgccgcggcggccggaggacttcggggacggcggcgccttcccggagatccacgtcgcgcagtacccgctcggcatgggccggcgcgacgagaagggcggctcgaagatcctcgcgctcaccgtcgacgccaagggcagcgtcgccttcgacgccgtcgtgtagcatggtgagaacgcctctaagatcgtttactcaaagcac

SEQ ID NO: 37286 - DNA, 471 bp, Oryza sativa
  Clone ID: uC-osrocyp006c02b1
atcaccttgagtccttgacgccgcgtctagggtttcttcgatccacttgacgccgcgtcgcaggcactcctcgtcttcctcggtcgaagaaaagcggcggcggcggcggcggcggcggaagctgccgccttccttcaccccaaggcccaacagatcgaggacgctgacattatgttgcagctacctttctcccccaaagagagttggagttcaccagtcaattcagccattgggcacgtgcggaaaattaggaggagggctggtcattttctctcaagaagctccaagaataaggctgctcacagtaagggggggacagacaaccaagtcatttgatctcagggcgacttacattcgggctctattcaagatgtctgggctactctcagcgctgaagttgcatcaaaattgtctaaagccggtgtttctctggctttgtctgatggaaacataccgatatatgcatgctca

SEQ ID NO: 37287 - DNA, 480 bp, Oryza sativa
  unsure (1)..(480): unsure at all n locations
  Clone ID: uC-osrocyp006c04b1
ttttccatcgctcccatccgcgtcgctcccgtcccaggggcggcacggacggcgcctcatcctcctccgccgcctcctcccttctcctcccctttgcctcgccaccgcccgagcggcgcgtcggcaaagccgaccggccacaaggacggcggtggcggggccctctcccctcctcgaggaagccagcggcggggacaccggggctgctcgggagcggcggtccgcggcgcgggaggcggcgccgggggttgtcgtgtcggatccggccacgccggagtcggatccgtctcccccggcagcggatctggcccctccgtgtccagggccgagcaacagcgagcggcggtcagcggcgcgggaggcggcgccgagggggtcgtcgcggcgaatccggccacccggaggtgggatccgcctcccctggcggcggatccggcctccccgcatccaggggccaagcgacngcgagcctcgcggcga

SEQ ID NO: 37288 - DNA, 497 bp, Oryza sativa
  Clone ID: uC-osrocyp006c05b1
cgaaaagaaagattagttcaaagtccacagcgagagatgctcagtttcagagcataaatacactctagaatgctgaattgaccattatcggatcaggaggaccttatgatgcagagaacaatgcagctcgttctcagggtgaagagatcgtcgggtttactacaccaattctccactgcggcgaactcgcagaggttaatttctttcatgattttctgatcattctgtgttcatgtgtgtagatcatggtgatcgattcgatgcaggttggccgggaaggtggccgtcatcaccggcgccgccagcggcatcggcaagggcgtccgcgaagagagttcatcggcaatggcgccaaaggttatactcgcccgacgtccaggacgacctcggctgcgccgtcgccgccgagctcggtcctgggcgacgtacacacagtgcgacgtcacggacgagcgcatgtcgcccggcggtggacctcccgtggcgcgcacgggcgc

SEQ ID NO: 37289 - DNA, 504 bp, Oryza sativa
  Clone ID: uC-osrocyp006c06b1
ctcagtcctgcaccgcgcatcttcactctgcgcgcgtgtttgctaaaattagaggcgctcgccaaggttggatcctcgagcttttatgatcacgactaaaactcttcgtcttgagccaccgacggggtatatgaagatggctacattcaccgccttaaatgggggttcacccaaagcaacagagggtgtcaacggcacagcaccggaattggacagaagagaaaatggacagcagcagaccaacagcgcagaggccagatcagctaccgaccggagagaaagagagacctggccggcgacaacagcaacagcaacaccagcaacaacaacaaccgcgatgtcgtgacaggctcccatttcctgggtgatggctatcaggattccgactcaactcacaagcggaagcgcgccctatcagactcaccaaggagagagcaccaaccttcaccgtccgagaggtacgagccatatggaccacaccggcctcattctgagtcacgtgat

SEQ ID NO: 37290 - DNA, 241 bp, Oryza sativa
  Clone ID: uC-osrocyp006c08b1
atgagcatgaggccctttctttgcggatgggggatcttggctccactggacgccacttggcaggcactcctcgtcttgcttggtcgatgaaaatcagcggccgaggccgcagcggcagaagctgccgtcttccttcaccccaaggcccaacagatcggggacgctgacactctgttgctgctacctttatcccccaaagagatggtggtggtcaccaggcaattcagccatggggcacgtg

SEQ ID NO: 37291 - DNA, 487 bp, Oryza sativa
  Clone ID: uC-osrocyp006c11b1
tcgatccagcatatcgatttgtatggatactggaacatattcttgaaccatgcatatcacttctgacacttcacacaatgggtcaaacatcaaaaggttgttcgagatataatccagggctccaggcttgctgttgcagatacattcaatttagtccccattgaaattaatcttgtaagttagggtgtgggtggtttgaaaatcctccacttagccttcacagagaatgatcttgagaatgaaataccaaatacagtatacacggtttgaggtttccggatggtttctgctgccactggacctcacaaccctacaaaggtttataatcaccaagagtccaggacacaactggatagtcacattgccgtatgttacaactagcattcagctggtaatggtatggtactaatgaaaaactgacatcaggataggagcatgctatttttcctttagggagacaatcatatttttcatatctacggagcga

SEQ ID NO: 37292 - DNA, 494 bp, Oryza sativa
  Clone ID: uC-osrocyp006c12b1
tcatccgcctgttgatgatcccaatggttatgagcttgcgagtgagcgttggacaccagtgcatacggttgagagcatagttctgagcatcatttcgatgctttctggtccaaatgatgaatcaccagcaaatattgaagcagctaaggaatggagagagaagagggatgacttcaagaaaaaggttaggcgccttgtaaggaaatcacaagaaatgctctgaagaaaccggcagtactggggaaagttaaccataccacgtcacatgtgcatgatttggctgtcgatttccaaatgtcagttgacactagcaattcacttctccccctctgtactttccatagtgtgcctggtggtggtcgcggcttcgtctcccatgaaggctgaatagcactgggacatgtttgtcacctattctaaagctctggttgtatctgtgtggcttgggctgtaacgttgagaatacttgaatactgccactcatcacatttttc

SEQ ID NO: 37293 - DNA, 265 bp, Oryza sativa
  Clone ID: uC-osrocyp006d02b1
tttgtttgagagagagagaggggagggggggggggggaatcgtgcgagggaggggtgggtttttcggtctatatctgagttatgaatcgctcccgcgcgccatgtcatgcgaccaggaaatcggcagcttgacatagtccttcctccgctgttggttgggcgcctgctgatagacctggttcgccaccaggctgccgacaccggagacaactttcggcggctgcctaccacacaaggcgaccttcattcccgaccaaacagacct

SEQ ID NO: 37294 - DNA, 482 bp, Oryza sativa
  Clone ID: uC-osrocyp006d03b1
ctccgttgccgtcccctcccctccgcccccgatctacgcctgggcgcccgcctccgcgcccctagatcaccgtcggcctgagtcgccgggctcgtcgtcgccaagccgatcccctccgcagggagctaatacaggaaaattactttagtttctactcagcattcttgtgtgataatggcgttagcagcaatctacagccttttcatcattaacaaatctggcggccttatatactacaaggactatggctcagcagggaggacggacaccaatgacagtctacgcttggcaagtctttggcattccatgcatgctatctcccagcagctgtcccctacacctgggctgtgaaggcattgaccttctacaagcccacaactttgatctccattgcttccagtccctcacgggacaaagttttttgctgtatgcgatactggtgctcaaaatatcgagactctactgaagtcatatacgagctc

SEQ ID NO: 37295 - DNA, 500 bp, Oryza sativa
  unsure (1)..(500): unsure at all n locations
  Clone ID: uC-osrocyp006d05b1
tcaagaaccaggtcgccatgaaccccatcaacaccgtcttcgatgccaagcgtctcattggcaggaggtttagcgatgcttctgttcagagtgacattaagctctggcccttcaaggtgattgctggacctggtgacaagcctatgattgttgtccagtacaagggtgaggagaagcagtttgctgccgaagagatctcctccatggtcctcatcaagatgcgtgagattgctgaggcctaccttggcaccaccatcaagaatgcncgttgtcactgttcctgcctacttcaatgactcccagaggcaggccaccaaggatgctggagtgattgctggtctcaatgtcatgcgcatcatcaacgagccaactgctgccgctatttgctatgngtcttgacaagaaggccacccacgctggtgagaggaatgtnctcatctttgacctggangtggtacctttgatgtttccctccttaccattgaggagggtatctttga

SEQ ID NO: 37296 - DNA, 323 bp, Oryza sativa
  Clone ID: uC-osrocyp006d06b1
cgcgggcggacgcgaggggtccaagtggcaagttccaacaacaaccttcagtcggatcgccattgaacgaactccttgccgccgggcacagctctgacagcgatggtggttcattgcacggcggcctggggcagtgcctcaacgaccacagccggctgcgccatgcgcaagctgctggcgcgggtggtggtctcaccgccgaccggggacagctacctatgaagggttaacactaaccccggtccaagccgcggccccagccactgggcagcggcgcgcagatgatccccatgaagatcgtacggcggatttaattagcgacc

SEQ ID NO: 37297 - DNA, 479 bp, Oryza sativa
  Clone ID: uC-osrocyp006d08b1
ttcacgcgtccgcctcactccatttcgcagtccatgaccaagtgaagctctcgccgtctcgcggagacgccaccatggcgagggcggcgagggggaaggcgccgaggccgaggccgaggccgccgcgcgggctggcggcgagcctccggcggctcctcgccggggccggcggcgggctgggcgtcgcggcggcggcgtacgtcggggtggactacctgcggtacctctccccggcgtggcacgggcggctgatgccggcgctgtgggcggcgctggcgctcgccgccgcggcgcgggcgccgttctaccgtcactggtccgccgagctccgcgccgcgctgccctttctcggctccatcgccttcatgctcggggccttcctctgcgaggccgtcttcgtccgcttcgtctccgccgtgatggggctccagtggcacagatctgctgtccactttctgacactgggcaatggctgcttc

SEQ ID NO: 37298 - DNA, 488 bp, Oryza sativa
  Clone ID: uC-osrocyp006d09b1
ctcttgcatgtgtaccttatggccttatatttgcctcattcattccattctttcttgacattcctgtcacatcacgatttcgtatttttggtgttaacttcagtgataaatcattcatatacctagctggcctgcagctgcttttatcttctgggaagcgttctcttattcctggtatttgtggtctgattgctggttctctctatcgtctgaacgtgcttggcatccgcaggatgaagatgccacaggttattgcatcatttttcgcaagaattttcgcaccttcttcgggaggttcatctaggccctccaagagtctggtcggaaacatgagttctcgtcacgccgtgctgtgcagaacaatcagccatctggattcgctcctgtcgtggagcccccagaatcttcaatcgctatgcttgattcgatgggctgtgatggaaatgctgcaagacagggcgctatgcgagccagaaatgacatcaaca

SEQ ID NO: 37299 - DNA, 368 bp, Oryza sativa
  Clone ID: uC-osrocyp006d10b1
ccttcgtctctctctctcaacttccaccaccgcatcggggattcctcctcccctcacctcatcgccatgttccgaaccttctcgaagcttcgggaggcggcggcgccactcaccgccgcggcggtgcggaggtgctgctccggaggcggcggcgggcggatccgcgcggaggccaattgcccgcgctgcgcggcccacatgtcggtccaattctccctccagccactctcgacgcccccgccggccgccgcgtctggtggcggcggcggagatgggtcgcatagccatcaccatgactgagcgagccgtgtgcccccgcgtgcagcgcggcgttcctgttccgagcgcacccggatcgagcccctgcg

SEQ ID NO: 37300 - DNA, 398 bp, Oryza sativa
  Clone ID: uC-osrocyp006d11b1
tttgccgcggggtcagccgcgctgcatcagggggagggtaagctacctgttgcgcgctacaaagatgctgaggcacaaggcacatctctcacatagaaccctttagctactgcacataacatacagggtgcaacagagctgccaagatgctgttgcccacgggatgtggaccatatctgagtatctgtgccgaagaccatctctgatgaaggtcaacctcctggcatctggatgctcagaacgggcatgattgcgcttacaggaaatgtggatgtatcccgccatgtcgatcattgcctatgaatagctgatcccaacgtgagtggcatgagtgttgaatgggcattcaatttgactggacatacaaggctttctgtgacttgcctaatgggtgagca

SEQ ID NO: 37301 - DNA, 427 bp, Oryza sativa
  unsure (1)..(427): unsure at all n locations
  Clone ID: uC-osrocyp006d12b1
tccgccgccgccgcagcttcctcctctcgccatctcccgtcctctccttcaagtcagctacctgcttaatcaaccatgggtaaggagaagacgcacatcaacattgtggtcattggccacgtcgactctggcaagtcgaccaccacgggccatctgatctacaagcttggaggtatcgacaagcgtgtgatcgagaggttcgagaaggaagccgctgagatgaacaagaggtccttcaagtacgcgtgggtgctcgacaagctcaaggccgagcgtgagagaggtatcaccatcgatattgccctgtggaagttcgagaccaccaagtactactgcacggtcatcgatgcccctggtcaccgtgacttcatcaagatcatgatcactggtacctnccagctgactgtgccgtgctcatcattgactc

SEQ ID NO: 37302 - DNA, 341 bp, Oryza sativa
  Clone ID: uC-osrocyp006e01b1
ttcgctttctccctcgccaactcgcctaccctccccacccccgcgtcggcggcggcggcagcggcagcggcagcgacggagcctcgccggcgtgaagcgtactcacccgacaaaacaatgaggaggtatagcccaccttatcgcagtccaccaaggaggggatatggtggcagcggaagacgaccccctaggcggggatatggtggacggtaggaacagggttctggcagtctcctggtccgcctcatatcctataagctgcagagcgggggatcttagagttccttgtgaaaggaatggacctgttcgagatgtttacctgccaaaggattattataccg

SEQ ID NO: 37303 - DNA, 479 bp, Oryza sativa
  Clone ID: uC-osrocyp006e02b1
tcgattaatttctccccaatctcgcgaggctctcgtcgtcgaatcgaatcctctcgcgtcctcaagatgcagatctttgtgaagacattgaccggcaagactatcaccctcgaggtggagtcctctgacaccatcgataatgtcaaggctaagatccaagataaggagggcatccccccggaccagcagcgtctcatcttcgctggcaagcagctggaggatggcaggacccttgctgactacaacatccagaaggagtcgacccttcaccttgtcctccgcctccgtggtggcatgcagatctttgtcaagactctgaccggcaagactatcacccttgaggtggagtcttctgacaccatcgacaacgtcaaggccaagatccaggacaaagagggcatccccccagaccagcagcgtctcatcttcgccggcaagcagctggaggatggcaggacccttgctgactacaacatcca

SEQ ID NO: 37304 - DNA, 419 bp, Oryza sativa
  Clone ID: uC-osrocyp006e03b1
ctcttctcttctctctctttttgttgcttccatttctcgttcttgcacggggaagaggagagaaagatgtgtgtcgctgtggttcgaaaaaggttgggcgtgagaggagagagaaagtggagtggaggggagagagagagagagagagagagctgatagagagatctgttcttgcgctctacctcacaaggacctcgggttccccaagacgctgtttcttgcgtcaccgcctaccaatgatcaccaggcctcacaccgtatgggtggcggtggcggtgcgtctgttgatctcaaacgatttgtgcaacctctcgctccggctgcaggtcttggcgtcaggatccccacttcctatagcagggatgaaatgttctctgtctccctggcatggccagactctgattgctaggacaacttct

SEQ ID NO: 37305 - DNA, 510 bp, Oryza sativa
  unsure (1)..(510): unsure at all n locations
  Clone ID: uC-osrocyp006e05b1
caccaaaccagcacatgtcgttgtctctctccgaaatatcatttcgttttttaatcatcttttcctcctcttcgctaatcaccatgatttgcctccgagccgccttccccttgacctcctccttctcctcctcccctctccgccgcctcgccctcaagccctcctcctcccgcgccgccgccgacgccgacatgtcgtccgcccccgccaccgccatcgccgcgccggtcgagcacatcgtgctcatcaaggtccgccccgaggcggccggcgtcgggcgccgccgcggcgatggtgtcctcgctgcaggcgctgtccagcgtggtgcccgggctgtcgtacatccacgtcggccccgtgctccgcctccggtcgccggcggcggaggcgctggggccgacccacgttcttcactcccgctacgccaccaagcccgacctggcggcgtacgcggcgcacccggcgcacgtcgtcgccgtgcatgggcacgtncttcccacgcgctcgaca

SEQ ID NO: 37306 - DNA, 486 bp, Oryza sativa
  unsure (1)..(486): unsure at all n locations
  Clone ID: uC-osrocyp006e06b1
ctccacgcgtccgcggacgcgtgggctgacaagctctctctctctctcttctctctttgggggtggttcttggtgcagagccgatctgcggcggcggcgggtgtggggggctcgaggagccgctggtcgggaagaggaggaggaggaagaacggccgccctgacacaatggcagatgtcttaggatgttacactataaagtcccatggaaccaaagtggcgagacttcacatgtacgactggataatacttctactccttgctgttatagatggactgttgaacataattgaaccttttcaccgtttcgtcgggagggacatgatgactgacttgagatatccattgaagggcaatactgttcccttctgggctgttccgctcattggaattgtattgccttgtgccatctttggtggaatttacttcaaaaagaagaatttctatgatttgcaccatggcatactgnggatcctatactctgtgc

SEQ ID NO: 37307 - DNA, 331 bp, Oryza sativa
  Clone ID: uC-osrocyp006e08b1
accgttctttagttgaaaagagttattagctacctgtcggtcaagtaacaacaattgttgcgcagtggttaaggcgcccaacggggatgttccaaccatccatgatccgtctgtaggctggttgtatctacgagacctcctacatgtccatcatgaagtgcgacatttatatgaggaacgacctttattgcaacattgtcactctccggtggaacaaccatgttgccaggcatcactcctcgtatgaccacggagatcactgccctatccacgagcaggatcatcactaaggtagttgcttcacactaatggctagtacactgtatggatc

SEQ ID NO: 37308 - DNA, 490 bp, Oryza sativa
  unsure (1)..(490): unsure at all n locations
  Clone ID: uC-osrocyp006e10b1
gcagggcgccgacgcgttcggccgagccagcccgcgcgggcgtcggctccgcgcgcggccaagccggccgcacgggcgccacctccacaaccccctcccacctccgcctcggcccccaccgaaaccgtcatcttcatcctcccccgggccggcgtcgcggcgtggccgactccgacagccgccggacgcatcggccccgccttcctccacctcggcgccttccctccaccgccgcgacagccgccgtcttcgtcttcctccgttgtgccgccacgccgcgtcgagcaccgccatctcgcgtgcccctctgcctcgttgcattccccgtcgccgcatcggctgtcgttgccgcgccggcaccggtcccgcctcgtgcgccgtcggaacgccggctgccgtcgcagtgccccgcgcccacgcccgtcttcgccctgcgccgctcggtggaaaggagcanagagggggacgagaggagagatcaagagaggag

SEQ ID NO: 37309 - DNA, 504 bp, Oryza sativa
  Clone ID: uC-osrocyp006f01b1
tccaaaaaagaaaaaataatttcgttttcttttcttctcttctcttctcttgttgcggcgaagggggagaggaaggtcgaggtcgacgagatgggcggcggcaatgggcagaagtcgaagatggcgagggagaggaacatggagaagaacaagggcgccaaggggagccagcttgaggccaacaagaaggccatgaacatccagtgcaagatatgcatgcagactttcatctgcaccacctctgagaccaagtgcaaagagcatgctgaggcgaagcatccgaagagcgaccttaccgcgtgcttccctcacctcaagaaataatggcggtggcatctctctgctcaatcagaagagaaaaagagaagctgccataatccactagtatcatcttgtatgcaatgactggttgccctatgtatgggtctaaactttggtcagctgctgctgcttttttggctgtgtgcctcatctaatatgtaatgctctatcaacctcttgtgc

SEQ ID NO: 37310 - DNA, 262 bp, Oryza sativa
  unsure (1)..(262): unsure at all n locations
  Clone ID: uC-osrocyp006f02b1
actgcttgaattcgaaacatggattcgaaacggaggggttttgagttcaaattgtcttgcctggcgcaaatcttgcaaaacaagaagagggggaaaaagagagagtaacagacatgaggggtgaagggggaaaacgtgcgggctccggctggccctaccgcccccttcccgtacgacgtgctccttgcggcgagcggcgacggcgacccctcgtcgccgcggccaccgtctccatcgccgncgacgtcttcttcgtcgccgc

SEQ ID NO: 37311 - DNA, 373 bp, Oryza sativa
  Clone ID: uC-osrocyp006f03b1
tttggtcaatatgggggtgctgaggatttgactgcagcaagtgatccttatatgtatgttaaccagttacttttgcactgggttcgacacgcatttcaaggtcacagagggtccatacggtataagttgttggttgggcagtatgatgcgagttacaaccatatgactggggtagtgatgcgtagacggtttgatcaggataatagttggtctgatactaggttggatgtcgcattgaatacatctcaatcagttatggcacgtacatggatagctgaaggcccgttagattatcctgatggaccgaacggtgccgtctattttaattcgagagtaaaatctactgttgaatttgaagtgccttgggaaaatg

SEQ ID NO: 37312 - DNA, 467 bp, Oryza sativa
  unsure (1)..(467): unsure at all n locations
  Clone ID: uC-osrocyp006f05b1
ctccactcgtccgcgagagtttgattcgaatcgaagctcctagtcttctttaccatgtgaagaaatcaactggttcagcatcaagaagcagccatggccgccgttcgcgtggtggcgccggcgccttcggtgctgctgcttgtggcggcggcggtggtgctgcttcacctggctcgcgccattgccggcgcggcggacgaggccgcggcgctgctcgcgttcaaggaccgcgtccgtggccgccgacccggggcggcgcgctcgcgggctgggccaactccaccacccccggctcgccgcggccggtgggcccggctgtctcgtgcgccgccgctcgcgtccgggcgctcgacctcagcggcatgtctnttttcggccgactccgcttcgacgccctcctcgcgttttgggcgctccggcgcctcgaccttcggggcaacgccttcacggcgacctctcgcgccacg

SEQ ID NO: 37313 - DNA, 475 bp, Oryza sativa
  Clone ID: uC-osrocyp006f06b1
gcacatactacaggatggaaggacacagccagcccacgcaggcccgccgccgccgccgacatggacccttcggcgccgtccggtagctccgccgacgcctcggcgtcctcctcttcttccgccgtagaggacctcgccccgggcatggcggccatgagcctccaagaccggttcgagttgctgcggggcatcggcgaggagtgtatccaggaggacgagctcatgaatctgctgcagaaaaagcccgtccccatctgctacgacggatttgagccctccggccgcatgcacattgcccagggcattgtgaagacaatcaatgttaacaagatggtcagggctggatgcaaagtaaaaatttggatagcagactgggtttgctcagctcaacaataagaggggggtgtgatctaaaaaaaatccagactgttggacggtacatgattgagatttggagagcagctggtatgaaatc

SEQ ID NO: 37314 - DNA, 502 bp, Oryza sativa
  unsure (1)..(502): unsure at all n locations
  Clone ID: uC-osrocyp006f10b1
tcgttatgctgaggatgaccacataaaagattatgctgcatgggctatttcatttcttagaagcaggtggctatcaaagaatcagattatttttgatgatgattgttctcaaagaaattctagtgattccaatcaatcgacaagtttttctgatgaaagcttagtgtggaacttaagtcagtggttgagggatcttaacttcgaaaagcctgatagtatggtgtcaacaagtacagtcgcaactgttttgagatgcctttccaaagctcctagattgccatctatagactggggggttattgtgcggcggtgcatgaatgttgaggtacacattcctgatatgttgacgaatcatcatgatcctaaattattgagggaagaatgcctatatatttctctagctcatgcaagtcatatcagtcctcttctgcactttattgatgatctgacagacttatncagattcaggagattagaaataaatntgcagtccattttgctc

SEQ ID NO: 37315 - DNA, 495 bp, Oryza sativa
  Clone ID: uC-osrocyp006f11b1
ctctcccaagagctcatttcctcgctctgatttcatcatgaaatcgcagaagaacaacctgcctcttcccaagcgatcggctgccatcgctgcgccgatcgctctcctcctagtggtcgggctcatctcgctctatgacttcaccttcgctgatcgctacccgaacattgacgccgcctcgtcatcgtcgtcgtcgtcgtcgtcgccgtctccggccaccgtgagtaagtgcaaccttacgcggggcgatgtgggtgccggacggcgaggcgccgtactacacgaacctgacgtgcccgttcatcgacgaccaccagaactgcatgaagttcggcaagccgagcctcgagtacgtgagctggaggtggaagccggacgtggtgcgagctcccccgcttcgacgccgcgaggttcttggaggccatgaggggcaaatcctggcgttcgtcggcgactcgctcgccaggaaccacttcaagtctttgctgtgcctct

SEQ ID NO: 37316 - DNA, 485 bp, Oryza sativa
  Clone ID: uC-osrocyp006f12b1
tcgtaaacctccggcctccgcaccgtgcgcgccagctcagcacgtcggcggcggcggcggcggcggcgacggcgaggggagagatggacgccgcgatggagtcggcggtggggccgcacttcagcgggctccgcctcgactcgcgccgcctctcctcctcctccctccccacctccccctccgccgcctccagcaacggctgcggcggcaacgacgcccccgccgcggttaacgggttcgcgccgccgtcgcccccctccgtcgccgcagccgctgaggaggggagcaagcagcccttcgtgatcggtgtgtcgggagggacggcgtctgggaagacgacggtctgcgacatgatcatccagcagctgcacgaccaccgtgtcgtgctcgtcaaccaggattcattctaccgtggtttaactgaggaagaatctgaccgtgtgcaagattacatctttgatcacccagatgcatttgatacagag

SEQ ID NO: 37317 - DNA, 248 bp, Oryza sativa
  Clone ID: uC-osrocyp006g01b1
tttgtcttggcgtgggtgagagagatcggaggagatcccgtggcctcctggatgaggccgccgacacctgccatgctggccctggcccttgtggctcgcgctcgccgcggcggcactgctaggtgccgcggaggaagacgcggccactgaggatgcctacctgacgctgctagaccgagaccaacacgtcctccgtgtacgcgtgctggccaagtccatccagaacacgggtacgcaccgggacctgg

SEQ ID NO: 37318 - DNA, 422 bp, Oryza sativa
  Clone ID: uC-osrocyp006g03b1
gttcttcttctctctctcttgtcactcatcatcatcactcttcagcttgcttggttggttggtggagcttgggagttgaggtcaaatagccatcgatacacactcctctttcttttctctcttcatttctttctttacatcgtctctttcttgatttcccaatctactaagctcctactagctctgtgctctgctgcttcctcccatccatggcggcggttgccagcgacccacctacctacaagtagcttaagctcaagctcagctcagatcggagaggggtggtagaggtagtagcagcagttgagagagagagtgaggatggagagcagatggaggaaggccaagatgtcgctggggctcaacctctgcgtctacgtgcccaagacgcttgacgatcgcgactcggcgtccccgggtcg

SEQ ID NO: 37319 - DNA, 444 bp, Oryza sativa
  Clone ID: uC-osrocyp006g04b1
tccacgcgtccgcaaaacgatatctctgctacacgtgcaagcatgttgtgcaagattgtgttcctcggccttctgtgtgggctcgcttcggctcagtcaaactatgacttgctcaaggatgcttactggagcacagtaaccgagcagtcggactcacactgcagaattgacgttcagttctactaccgcaactacttggctatgaacaccggcattacatgcgccactcctggcctgtttgctggtaccttcgccttgagtgcaactgacatgtacatccagtacgccagcactcccgaaggcgtttctggcctggctttaatgaagttcgcctatgctttcaccaacaatggcaacactctcactctgacagctgcgggcctcgtgcctgtcgttctgcagaagcagcctgctgaccctttccggatggtgtttgggatggca

SEQ ID NO: 37320 - DNA, 424 bp, Oryza sativa
  unsure (1)..(424): unsure at all n locations
  Clone ID: uC-osrocyp006g06b1
ttagaccttgactggcaagaccatcacccttgaggtcgagtcgtctgacaccattgacaatgtcaaggccaagatccaggacaaggagggcatccccccagaccagcagcgtctcatcttcgccggcaagcagctggaggatggccgcacccttgctgactacaacatccagaaggagtccaccctccaccttgtgctcaggctcaggggaggtatgcagatcttcgtcaagaccctgaccggcaagaccatcaccctcgaggtcgagtcctcggacacgatcgacaatgtgaaggccaagatccggacaggagggcatccccccggaccgcagcgtctcatcttcgctggcaagcagctggaggacggacgcacccttgccgactacaacatccagaaagagtccaccctccancttgtgctc

SEQ ID NO: 37321 - DNA, 299 bp, Oryza sativa
  Clone ID: uC-osrocyp006g07b1
ctagcctcttatttatttggaattaatctggatatttggtcacattcctgggttttctgcctgcttgccatctgtgattgcaaagctccacagtgcgaatgataagtatttatcaacaccaacatcggccacatcatcctcaaaaatggaggatacacagtggaatttctcttttacattggtctggaaccactgcgccgtggcttgtgcttgggaacttcttcattaagatcgccacatcaacagctcaagaatatctcaaataacagcaggatatagagatggagcttattactgat

SEQ ID NO: 37322 - DNA, 460 bp, Oryza sativa
  Clone ID: uC-osrocyp006g08b1
gcgagcgcctgcacctactgcccggagccgccgacgccgaagccgaagccgccggcgccgaggccgccgacgcccggcggcggcgccgggtcgtgcccgcgcgacgcgctgaagctgcacgtgtgcgccaacgtgctcggcctcgtgaaggccaagatcggcgcggtggcgccgtacgagccctgctgctcgctgctcgacggcctcgtcgacctcgacgccgccgtctgcctctgcaccgccatcaaggccaacgtgctcggcctgaacctcaacatccccatcgacctcagcctcatgctcaacaactgcggcaagatctgcccatccgactaccagtgtgcttaatcacattgggacactgcagccgatcgatcgatcgatcgatgacagtgtgctacacgtcgtctacatgttttggtgggtgcttactggagcagtctgactctctgacttggaa

SEQ ID NO: 37323 - DNA, 385 bp, Oryza sativa
  Clone ID: uC-osrocyp006g09b1
tctttcagccacacacacaccactccatttctgagctcttctagtttgagtgagagagcagcagaagggagtagtgcaagatgccgatccgcaatatcgccgtggggagccaccaggaggtgtaccacccgggtgcactcaaggcggcgttggccgagttcatctccaccctcatcttcgtcttcgccggccagggctccggcatggccttcagcaagctgaccggcggcggagcgacgacccccgccgggctgatcgcggcggcggtggcccacgccttcgccctgttcgggcggtgtacgtcggcgccaacatctccggcggtcacgtgaacccggccgtgaccttcggcgccttcgtcggcggcaacatcaccctgttccgc

SEQ ID NO: 37324 - DNA, 340 bp, Oryza sativa
  Clone ID: uC-osrocyp006g10b1
ctaggccgggcgttcatttctctgacctagcatctctctcaatccgggcgccgtcatgtaggagccgatcaagaagcagcagcaactgctgcccgccgctgcggcttgacatccgcctccgacgccggggtagaccaccctggatacactgctggacgcgtccgccgacacatatgaggaagaggacgagaagaaacagcgactgcccacctgctcggtgacggaaccgcggacagggcctccgtgagtggcatcataggtgcggagggccaagataccgaatacgctggtcgacacctacgacgaggactggatacgacgggagctcaagggcctgatc

SEQ ID NO: 37325 - DNA, 342 bp, Oryza sativa
  Clone ID: uC-osrocyp006g12b1
ctgatcaagagctcttaattagctagctagtgattagctgcgcttgtgatcgatcgatctcgggtacgtagcaatggcgtccaaggcgttcgctctgttcctggccgtgaacctcgtcgtgctcggggtggcaagcgcctgcggcggcagcccgtcttgcccgacgcctacgccgttgaccccgacaccgtcaactcctacgccgactccgtaggcgttcgggaggtgcccccgcgacacgctgaagctgggcgtgtgcgccaacgtgctgggcctgatcatggccaaggtgggcgtgcctccggcggagccgtgctgcccgctgctggaggggctcgtcta

SEQ ID NO: 37326 - DNA, 259 bp, Oryza sativa
  Clone ID: uC-osrocyp006h01b1
cccacgcgtccggcggcggctgcctcccctcgcggagacttgtcggtggtcaccgccgccgccgccttgccttcgcctccaagcaatcttgacctagccaacctcacctgctccccctcgcgcgcgcaaaaaaaaaaaaaaaaaacagagagagaaagagagagagagagagagagaggaaaacctagctcgcctcgatggcggagatcgaggtggtcggcgacggcggcggcggcggcggaggtggaggggcgaagca

SEQ ID NO: 37327 - DNA, 261 bp, Oryza sativa
  Clone ID: uC-osrocyp006h02b1
ctacgtctctgcggctgaggcggcggagcgggagccgtgcggcggcggcgcgcctaggagggaggagaaggagcggtggcgccaggtgctggtcgtcggctgcctggtggcgctgctcctcttcgcgttcttggtgctcgggcgggagagcgcgtcggaggttctgcagatagcgaactccaagctgtccgccatgaacggagggtttacgacgaaaaacccttctcatggcggtggcgccgccaagcatgccgacgagct

SEQ ID NO: 37328 - DNA, 385 bp, Oryza sativa
  Clone ID: uC-osrocyp006h04b1
ccccactcccatccccgccgccgccgtgccactcccatggccactcaacggcctgtcggcgtcctcctcctcctcctgctcgccggctgcgcgctgccgatcgctcgatcccgcgcggggccaagaacggacgagggtggcggaggtggcgcggtggcactcgacacgagacacgagctcctgcggacgcacgggctgtcgggtgggctgccgcctcgcggggtggagtcgtacagtgtcggctaggccaccgggctgctggaggcgcgactggtggagccgtgctaccccaagtacgacgaccgtgacctgcccttcttgcacaccgtggtgctatgctacctgcatcttcgcgcgcacccacgctttgagggcctgtcccagg

SEQ ID NO: 37329 - DNA, 495 bp, Oryza sativa
  unsure (1)..(495): unsure at all n locations
  Clone ID: uC-osrocyp006h05b1
ttccaatccgccatggctagtgttctcgccgtccccctcctgctgtgcctgctcgcctccgcctccgccgcccgcttcgccccggcggacaaccacctcctcgcctgcggcgcgacggcaccggccgtgctccccgacggccgacgcttcgtccccgactccggctgcgcctccacgcgcctccgctccccggcacctaccctcccgtccgcggcctccagcgcggccccgcagccgacccctctccacgccgccgcgcgggtcttctgctgccgcgcgtcctacgacctcgccgtccgccgccgcgggtaccacgtcctgcgcctccacttctaccccttcgagcccgcgctcgcgtccgcgcgcttacacgtcggcgccgccggattcctcctcctccacaacttctccgcgtcggcccncgtcggaaggagttcatcctacccgtccatccgacgtnctcgtnctaccttcgtccccgagtcgggctctacg

SEQ ID NO: 37330 - DNA, 467 bp, Oryza sativa
  unsure (1)..(467): unsure at all n locations
  Clone ID: uC-osrocyp006h06b1
cttttgtgcgtattttagttgcaaactttattgctccgcgttcttcctttctctgtgtttgtttgtttccagttgccactaaccagccagagccccgggggggagaagagcgagagaggaggagaaatcttgcagcaatccctcgcttagattcgccattaccgccgcttttgttcccaccaagattaccaccccctcctcctcctgtgctcgagcgctcgcatcgcatttcaggctgcttcttgattctgcgaggaggttgaaatctctcgcggtatgatctgatttcgggttgattttcgtcacgcggtggattccttccccccaacactattccggtgccaacccttttttgttttttgtttttttttgtggctgttcttggcgtcgcctctactggctttttgccgtgctgcagattgcaacagctgccatcngttcgttccggtggagtgcaccccttcatc

SEQ ID NO: 37331 - DNA, 379 bp, Oryza sativa
  Clone ID: uC-osrocyp006h07b1
tcgtttcaggctcacacacaggcacacacacttgccgatggagcccaccggcacgatcgtcttcgccaccgtcggcgtcaccaacttcggcttcgacgtcttctccgccgccgtgccactgccgccgatggaggaggacgccgagcgccgccacacggacggcgtatccgtgaacttcaacgcgcagttcgtcgacgatggcggggaggaggtggcgttcgcgtcgtaacgaggcggcgcggcggggctgttccggtgccggccggggcccgagcatcgggccgagcctgtgccgacggtggaggggagcctgttccatgaccgcccgacagtgaagggcgggaggttgtacttcgtctccgcccacgagcagccgtcg

SEQ ID NO: 37332 - DNA, 398 bp, Oryza sativa
  Clone ID: uC-osrocyp006h08b1
ttaaaactccacactgatcctcttctactaataaggcagcgggagcaggatgccattgcaagaataaaaaataatccaatcaagatggctgagataaagaaatcagtggaagctgagaaaaagcaaaaggaagaaaagaaagagaagagaaagcacaagaagcgccatcatcacaaatcaaagagtaagaggcatcactcaagtgagaactcagattcagaggaaagtgatggcagggatgagagaagaaagagtgttcaggcctcagagcataagagagaagagaaaaggtcaagacatgataagaaggatcacggacaagattcagaagacgatgaacgaaggaaaagacggcatgcaacgtcagaagatgatgagccaaggtacgtcacataagg

SEQ ID NO: 37333 - DNA, 331 bp, Oryza sativa
  Clone ID: uC-osrocyp006h10b1
cgcccgcggtaccgaccgggaactgtgaattgctggagccgacgcatgcgttcattcaaatagaacggaaaggctttcgcattggagggcataatcgcgagggcattgcgaagcttctagtacgcgttggcgagctctggtttctaacggacgctgtgcgaccacccgaagctccccaaggggaagactgtagccctcttcgtgcttgactgatggtgcgaggccaaccccgacaagtacaactgcattcatgtcgcccagacgcccttcatggatgccctcaagaatggtgctctcgacaagcggagactagtgaagtctcatggaacag

SEQ ID NO: 37334 - DNA, 503 bp, Oryza sativa
  unsure (1)..(503): unsure at all n locations
  Clone ID: uC-osrocyp008a01b1
tcttgttatctcctttgctcttctactgctcatcctcctcttctactactcgtcctctttgctctattcacagctagcaacaagaaggaggcttacacatgcatgtgcacggtctctgccggacgcatatgaatcaggcatgaatagggggcacatcagcagctcggagctcatcgacgccaagctcgaggaacgccggatctccacggccaagcactgccccagctgcggcaacaagctcgactgcaaaccggattgggtggggctaccggcaggagtcaagttcgatccgacggaccaggagttgatcgagcacctcgaggccaaagtgagggaagaaggctcaagatctcatcctctcatcgatgagttcatacccacgatagaaggggaggacggcatatgctacacccaccctgagaaacttccaggtgtgacaagggacngcctgagcaagcacttctttcaccggccgtcgaaggcgtacacgacggggacgagga

SEQ ID NO: 37335 - DNA, 524 bp, Oryza sativa
  unsure (1)..(524): unsure at all n locations
  Clone ID: uC-osrocyp008a02b1
ctagcccaccatgtgctgcggttccatcctctccgacctcatcccgccgccgcggcgggtcaccgccggcgacctctggctggagaagaccaagaagcagcagcagcagaagaagaagaacaagggcgcgaggaggctgccactgcgccaagaggaggaggatgatttcgaggccgacttcgaggagttcgaggtggattccggcgagtgggaggtggagtccgacgccgacgaggccaagccgctcgccgcgccccggagcggcttcgctaaaggtggattgaaaaacactactgttgctggtgctgatgggcctgcagcaaggtctgctaaaaggaagagaaagaaccaattcaggggtatccgccagcggccatggggcaaatgggctgcggaaatcagagatcctcgaaaggtgtccgcgtctggcttggcaccttcaactctcctgaggaagctgccagagcttatgatgctgaagcacgaaggattcgaggcangaaggccaaggtcaatttcccaga

SEQ ID NO: 37336 - DNA, 335 bp, Oryza sativa
  Clone ID: uC-osrocyp008a03b1
ttgcttgtggggacgaacacgttaaaaaaaggtcgaagagaagtgggagacccaaaccgtgaacaatgtgtggaggcgccatcctcgccgagttcataccggcgccgtcgcgcgccgcggcggcgaccaagcgggtgaccgccagccacctgtggccggccggctccaagaacgccgaccgcggcaagagcaagagcaagaggcagcataggagcttcgccgacgtcgacgacttagaggccgtcttcgagcagttcgacgatgactccgacttcgacgacgcggaggaagaagacgaaggacacttcgtgttcgcgttcaaatcttgtgtcgtc

SEQ ID NO: 37337 - DNA, 284 bp, Oryza sativa
  Clone ID: uC-osrocyp008a04b1
gtttgaaggacatttctttgtttatctcaatcagtggacagcgctaaggtttcaatcaatggccattcaatgtcctaacgtgttctacggaaggccgcgaagaagtctcggtccagttggacctggttcatattggtatgactaccgttctggattttgcggtgtcattggacatgagtgtagagacatcatccctccatttataaaggaatgtaattatgcaatgcctaaaaattgtgccggtgggaacacacgagatattgtcaatggtactgaactttatc

SEQ ID NO: 37338 - DNA, 314 bp, Oryza sativa
  unsure (1)..(314): unsure at all n locations
  Clone ID: uC-osrocyp008a05b1
ctctgagagtgatttctangnttatcagaagcagcacattccagcatatccacctatttctgaaaaagtttctgcaaatgagaatcacaagaactccaatagtatttcaacatccagtaatggaacaccttctcctgattatgcctttctaagggtttctgatgtcaacgtgcaaacacaaacagtaaaaccaccacctcctctgaagcagacatctaaattgcttaagaggagagagattttagcagaaggagatgtccatcttgaaaatcacagctgtcctgcagcctcttctgctcatgccccttcaaaca

SEQ ID NO: 37339 - DNA, 165 bp, Oryza sativa
  Clone ID: uC-osrocyp008a06b1
ctgtgccagccgtccgtatggttatcagaaaccctacagagcgagatcgacacctattactgtagaaggatgagattgtgtcaatcactggagctgcgatcatgttggatcatgcagtaatggaacaccttcctctgagtatgccatatttcggatttctgatgt

SEQ ID NO: 37340 - DNA, 452 bp, Oryza sativa
  Clone ID: uC-osrocyp008a07b1
ggctcctacgctttctttaaggtgccagctggtactcattgacatgaggtctgcttattgagctccttattgtcaccgggtcgggtagacatcagagccaggaatacggggcacattcaggcctgattgactgaaaacagaagagctctaaatgagctggtgttggaacctctcaaagaagagcagttctactagaaaagggagcctctgtccattatgtcactactgaagagccctatgcatgtgacgctagtttatatggtcataatggacttcgttatgcccaaagcgatagcaaacatatagcccgtagagataaacaacgctcaagaacacatgaggaacttccctggttcatcctgtattggtctattagcaagagcgaacagctagacatactacacggggatactgtatgggttaagaaagtgtatgatgggatgaagagcagt

SEQ ID NO: 37341 - DNA, 496 bp, Oryza sativa
  Clone ID: uC-osrocyp008a08b1
tgacaatgccagcatccatgagcatggaaaggaggatcattcttaaggccttcggtgccgagttggtccttaccgatccacttctgggcatgaaaggtgcaatccagaaggcagatgagctggcagcaaagatgcctaactcttacattctccagcagtttgagaaccctgcaaacccaaagatccactatgagacaactggacctgagatttggaaggccactgctgggaaagttgatatccttgtctctggcattggaaccggtggtacagtaaccggaacaggaaagtacctcaaggagcagaaccctgagatcaagatctatggtgttgaaccgacagaaagtgcaattttatctggaggaagacctggtccacacaaaatccaaggtataggtgctggttttgttcctggtgtacttgatgtcaatctcctggatgaagtggtccaagtctcaagtgatgaagccatcagcatggcgaagcagctagcgtt

SEQ ID NO: 37342 - DNA, 357 bp, Oryza sativa
  Clone ID: uC-osrocyp008a10b1
ccacctgtcttctagacagcaacactctgcgggggggaggaagggggaggagatcgcgactctcggcgtgagcgcggtgggcgcggtggcgcggagggcatcaggatggcggatgagctcgctcctggaggtgtcccggaagctgaagaatgagctggagacgctgacggacaacccggaactgatagcctcgatgggcgcgctctacaccttctacgtgcagaacaccccgcaggcgcgccgtaacctcaagtcctacgtcgagcagcgcggactgaccatcaaccgccattttctcgacgccttcctgcctgaccacaaggcgttggatcgcgtcagggggaggtgcacgcgctc

SEQ ID NO: 37343 - DNA, 550 bp, Oryza sativa
  unsure (1)..(550): unsure at all n locations
  Clone ID: uC-osrocyp008b01b1
tttatttgtgtccaataagtggtttggcgctttgatatttggtggagttttatgtggacgacttgtatcatgataattatgagccacgagtttattatggttcatggtagtgttttcagtggaaaattcgtaattttgatagaatagaaagactcttgacataacttaggatgcgcaaacctgcaaagaatggaaagttgattcaaaaagaaagaaagaaagaatgggagttagggcttgggtttcctctgtggcgcgctagttccaatttcatatcatgcagtgcagtctcatttctatttttattggatgaaagcccttatccatgttgaggactgctatgccctgctttatgcatcaagttgcagaatgaacttttgttatttcctgagcactttgtgacaatgttccccatcttctgttaaaagataaaccagggaacatgataaaatattgatgcagattgttgtgcatttacgagactcttctgaattctgatgctccttattcatgacanggcttaattattcagtctaacaccaaacatatt

SEQ ID NO: 37344 - DNA, 313 bp, Oryza sativa
  Clone ID: uC-osrocyp008b02b1
tggtcttgtgggcggacgcgtgggcaccgaaccatacccaacaagcgtcaaatcgcgtcgacgccaaaaacctcatgcacgtccaggaatctggaatatattccgagacttttacacgcattccagtcatcactagtgtagcggatgctgcttcttccccggggaggtctatcggatcttgatggagacccatataggatccgtggacggtgcggtggcggcggcggacaacggtgcggtggggtgcccgtcgtaagttgtggggtgcccgatgaccttagcgcgcactgcgcccgtgtctgacgacgaggcg

SEQ ID NO: 37345 - DNA, 437 bp, Oryza sativa
  unsure (1)..(437): unsure at all n locations
  Clone ID: uC-osrocyp008b05b1
acgttaanattatgccagaatggttggggcagcacgtttcccttgaatacattaccatcattaattgtcccaagctaacatctctgcctaaaagcttactgaaccttaccgctttaagagaactgcggttgaagggatgcgaagggctggagacgctaccagaatggctgaggcttctcagaactgccaaggtgacttttacacttgatcgcttgaagaatattatcgctctcagaactgctgttggagggatgtgaagggctggagatatcaccagaattgtttggacaccttgcttcgctaaaatgcattgaaatccaaggttgtcccgatttgacagatttacctgaaagcatgaagaatcttattgctcttgatgagctatggttgggaggattcagtagcctaaccggatggatgggaagttcatttgtctg

SEQ ID NO: 37346 - DNA, 546 bp, Oryza sativa
  unsure (1)..(546): unsure at all n locations
  Clone ID: uC-osrocyp008b07b1
agaacagctttgtctttgtttacagcaaggacaaccctaatctgctgtttagcatgtgtgggtttgaggttcgtatactaccaaaaatacggatgactcaagaagcgtttagtaacaccaaagatggagtctggaacttgcagaatgaacagacaaaagaaaggacagctattgcctttctaagagttgatgatgagcatatgaaagtgtttgagaaccgtgtcaggcaaatccttatgtcctcagggtcaactacattcactaagattgttaacaagtggaatactgctcttattggtcttatgacatatttccgtgaagcaactgttcatacccaggagctcttggatttacttgtcaaatgtgaaaacaagattcagactcgcataaagattggactgaactcaaaaatgcctagcaggtttccgcctgttatcttctatacacccaaggaaattggaggtctgggaatgttatcgatgggtcacattctgataccacagagtgatctcaggtacagcanacagacagatgtggtgtgcacat

SEQ ID NO: 37347 - DNA, 473 bp, Oryza sativa
  Clone ID: uC-osrocyp008b08b1
tgacaatgccagcatccatgaacatggacgggaggatcatttttaaggccttcggtgcacccatggtgcttaccgagccacttgtgggcatgataggcgcaatcaagaaggcagatgagctcgcagcaaagatgactaactcttacattgtccagcagtttgagaaccctgcatacccaaagatccactatgagacaactggacctgagatttggaaggccactgctgggaaagttgatatccttgtctctggcattggaaccggtggtacagtaaccggaacaggaaagtcacctgaggagcagaaccgtgagatcaagatctatggcgttgaaccgacagaaagtgcagttaattctggaggaagacctggttcacacaaaaaacaaggtataggtgctggttaatgtcctggtgtacttgatgtcaatctcctggatgaagtgctccaagtcttaagtgatgaagccatc

SEQ ID NO: 37348 - DNA, 462 bp, Oryza sativa
  unsure (1)..(462): unsure at all n locations
  Clone ID: uC-osrocyp008b09b1
ttttcgtccacgcgtccgcggacgcgtgggtgaactccgcgctgtgatggaaattttagacttcatgtgttctggtgtcaaccaagccacagatggatcagaagacatatttgattcagtaataccggacgatggttgcaggctggtatcagctgtatcgtgtgtatatattgacccatatggttctcatttactgagtaacatagatacatccaggataagatttgctcacccagatcttccccagaatatttgcaacacgttgggcataaagaagctttctgatgtcattgtagaggaactggatggaaaagaagaactaaagatggtgaatagcatttgctctgttactctggacaaaataaaagagaagctgcttagtaaatcgttgcacgatgcgttaaggattgttatgatnggtgtattcactcattttcctttcatttgagcactcaatctggc

SEQ ID NO: 37349 - DNA, 433 bp, Oryza sativa
  Clone ID: uC-osrocyp008b10b1
ctagatcgcgtgcggctgcccttttttgtttttatttttttttttttttttttttttttggttggcacacggccatgaacggctgagatcgcacacacatagagacagacaatgtactttcagaaacgcacccattacacgatgaaaaccaatcaaacacgaaaaaaaaaaagcacaaaagaccgacaaacaacgcctgcgacgacggaggcatgtgggggccagagaggggcaccgcgtcactgacgctgggccccaccgccctcgatgacaaactcttttatttagccccacgtcacgcgtacccacacacacctacggagtcgagtactaccactccagctcactcaactcatcactcgctacacgcaacacgtacgtacaactccggcgagtctccggcggcggcggcccgcgcgggccatgcatgtac

SEQ ID NO: 37350 - DNA, 264 bp, Oryza sativa
  Clone ID: uC-osrocyp008b11b1
agacagttaaatgttccgagaacggatggggcagcacgtcgctctggaattcgcgccaagacgagtcggggctaagctaacacatctgcgcgagcacagcagagcacagcagggtatcctggacctgggcccactggttgagataaaggtacagacccatagagctaggtgcacacagtgatggagccacgcatcagacacaagctccgtgttggccgaaagctatgaagcggctcatacggggagagctaccttggtaccaat

SEQ ID NO: 37351 - DNA, 353 bp, Oryza sativa
  Clone ID: uC-osrocyp008b12b1
cggaattcccggttccggctcgacccacgtttacttatacccgtggtcccatccagttcagtggccctggaagcaacgatgcgaaccacaccttgatgttggaactcggcgccgaggcatagagagacacgacgataccgacgtgtaccttttaaattttttgttcttacagttttgaaaagttgagatggaacctcgcagagtgacctgcaggctccatatttgtggagtgctcaataagaggttccattgggagtttctgtggagtagagatatgtgtaccaataataactgatgttagctatgcatgatccattgctccatttttacacagaagttaacttggttttatt

SEQ ID NO: 37352 - DNA, 555 bp, Oryza sativa
  unsure (1)..(555): unsure at all n locations
  Clone ID: uC-osrocyp008c01b1
tgttgttcaatgtacttgccaacaaagtacaacctataggttccaccattgatcaaaggttgaaatcatctgccaacaatccagctctcaccagtgtacctcaaggtcaccatagagatgccccagttcctcttgcaacaaaaatgtaccactcacagggaaactaccggcttcgattggaactcggtcagctttaccgccaatcatgttcagagcattcaggcagctattcaattccgaactcatcacaggagaatggcttgatggtctcgcatttatcaccaagagataattcatcattaaatgttgctcagaagagctttgttcctcaaacaaagtctatggaccagcttcttgcgagcacaccagaatcatgccctgtaatcccgcagcaagtagcagcaagtgtgccaaaccgacangcaacaaaatctcagaaagcagaggttcaagtatctgcagtaaaaaacgaaatggcaagaagcagatgcagcaaagatgctgttcggcattcaaaaaacacaggtaataagaaggccatcagcaaagaaacgg

SEQ ID NO: 37353 - DNA, 509 bp, Oryza sativa
  Clone ID: uC-osrocyp008c02b1
atccgatccaggccatggcgtgtatccatccagagcgtgaaggcccgccagatcttcgacagccgtggcaaccccaccgttgaggttgatatttgctgctcggatggaacatttgcgagggctgctgtgcctagcggtgcatctactggtgtatatgaagctttggaattgagggatggtggttctgattacttgggaaagggtgtcctcaaggctgttgacaatgtgaactctattattggaccagcattgatcggcaaggaccctacagaacagactgtcattgacaacttcatggttcagcaactggatggaaccaaaaacgagtggggctggtgcaagcaaaagcttggtgctaatgctatcctggctgtctcacttgctctatgcaaagccggagctattatcaagaaaattccgttgtatcaacacattgctaaccttgctggtaacaagcaacttgttttgcctgtgcctgctttcaatgtcatcaatggtggatcacatgc

SEQ ID NO: 37354 - DNA, 501 bp, Oryza sativa
  unsure (1)..(501): unsure at all n locations
  Clone ID: uC-osrocyp008c05b1
ctcttcttccttccacttctcattccacagccatggcggagtcgtgctacgtgcgcgtcctcttcctcctcctcctcgtcgtcacgccccttccgatctccattgcttcacctctcaagcttcggctatctgcctccgaggtcgccgcgcttgaggcgcacgcgccgacgccgccgtcgccgtccccgcccgacacgccgacgacctacttcgaggtggaccggccgcaccgaccgccgccgggcagcttcggcccgtgctccacgctgctcctctcccactccttcggtttcacctacacgctcccccccgtcacggcaccgtactccccgacgtcctgcctcgccgacgacgggggccgtgcgtcggcgatctccctcgcacgtctcgagtggcgcgccacctgccgcggcgtccagttcgaccgcatcttcngcgtctggctcggcggcgtcgagctcctccgcagctgcacggcggagccgaggccccagggcgtcg

SEQ ID NO: 37355 - DNA, 496 bp, Oryza sativa
  Clone ID: uC-osrocyp008c09b1
ctctcctctcctctcttccccgcctccccccgcctcgataccctgcaagccctagctctctctcgccgccaatggagtcgcaggtgctggtggcgctcgccctctcgctcgtcggcggcctcagcacgtccatcggtgcgctgtttgtgattttgaatccgacgcctaatcttaagatgcttgggcttctacagggttttgccgctggacttatgttgagcatttcctttctagatttggcacacaatgcattgaattctattggtttcttgaagggcaacctttggttttttgctggagttcttttctttggtttggttgtcaagtttattccagagccaactgttgtgccaacagctgatgcaggcaagaagcagactgacgatgatggttcgggtaaagatatgatgaaaaaacatcgtcggcaagtattattcagtgggatcattactgctgttggaatcagcttgcataactttccggaggggatggcagt

SEQ ID NO: 37356 - DNA, 513 bp, Oryza sativa
  unsure (1)..(513): unsure at all n locations
  Clone ID: uC-osrocyp008c10b1
ctctccgcccatttcttctctccacctgcgatccatccgcgcccgcgaggaggagggagccggacgccgtcgtggggagagcaggggagagaaggagaggaggagatcgccgtcgccgtcgccgtcgccgtcgccgatctcgagcgggagcggagatggggctcacgttcacgaagctgttcagccgcctcttcgccaagaaggagatgaggatcctcatggtcggtctcgatgcggccggtaaaaccaccatcctctacaagctcaagctcggcgagatcgtcaccactatccccaccatcggttttaatgtcgaaactgttgagtacaagaacattagcttcaccgtttgggatgttgggtggtcaggacacgatcaggcctctgtggaggcactatttccagaacacccagggcctcattnttgttgtggacagcaatgacagagagcgtgttgttgaggccagggatgagctccaccgtatgctgaatgaggatgagctacgtgatgct

SEQ ID NO: 37357 - DNA, 408 bp, Oryza sativa
  Clone ID: uC-osrocyp008c12b1
tttccgtgtaacttggtccactgcaatggaggggccagttctggaccagattcaccctcctcgtgctctggaagttgagtggggcctctctgcgctctatgtcctgatggttaccatagtcccaggacaactggcccttgtactgcttgtccaagccgagcaacatccgaggcagcgtcagtattgatcacaattctgattgtgctgattgtggtcttgttgtactgggccgtattgcgggcagatcgtgagctgatcgaagagcacaagcagcggttgaattggaagatggaggattggttcgaggaggattaccaagagcagcgcatgacatctgtgtatcgacgcgacgactcgaccatttacagtttaccgaaagccaagccgaatgtgacctacaagatgaaa

SEQ ID NO: 37358 - DNA, 564 bp, Oryza sativa
  unsure (1)..(564): unsure at all n locations
  Clone ID: uC-osrocyp008d01b1
gtgggtgtgtccctgtctcccttctccttcctcctctcctttcccctcctctcttcccccctctcacaagagagagagcgccagactctccccaggtgaggattcagccatgaagggggccaaatccaagggcgccgccaagcccgacgccaagttggctgtgaagagtaagggcgcggagaagcccgccgccaagggcaggaaggggaaggccggcaaggaccccaacaagcccaagagggctccctccgctttcttcgtttttatggaggagttccgtaaggagttcaaggagaagaaccccaagaataaatctgtcgctgctgtaggaaaagcagccggtgataggtggaaatccctgaccgaagcggacaaggctccctatgtagccaaggccaacaagctcaaggccgagtacaacaaggccattgctgcctacaacaagggcgagagcactgtctaagaggcacccgccaggaggaaaggaggacgacgaggaggaatctgacangtccagtccgaggtcaatgatgaggatgacgactagggcagcgaagaggatga

SEQ ID NO: 37359 - DNA, 480 bp, Oryza sativa
  unsure (1)..(480): unsure at all n locations
  Clone ID: uC-osrocyp008d02b1
gcttcttctgatggattgcgtagaattagcctgaataagaagagattggacaagaagaccttggacggtgcaaaattggcaagggaggaaagccatcgtctgagagccgacggtttaggtgatgacatagttcctttggacaactacctggacacgcagtactttggagagatcggcatcggcactccaccacagaacttcactgtgatattcgacactggaagctccaacttgtgggttccatcagtgaaatgttatttttcgatagcatgctacttacaccacaagtacaagtcaaaagggtcgagcagttacaaaaagaatggagaatcttgcagcatttcctatgggtctggatcaattgcttgtttcttcagtgaggatagcgtgctagttggngatcttgctgtgaaaaatcagatgttcattgagacaaccagggaaccgagccttactttcatatcgggagtttgatggaat

SEQ ID NO: 37360 - DNA, 526 bp, Oryza sativa
  unsure (1)..(526): unsure at all n locations
  Clone ID: uC-osrocyp008d04b1
tttcgttgtctcgcgtcagcggcggagctctctagaaggagcagaggagtcccccccaagcgatcgattcgatcccctccgccgccgatcgcctcgccgaagtctccgagaaacacttgagggatggctgaagaggatatccagcctattgtctgtgacaatggcactggaatggtcaaggccggttttgctggtgatgatgcacccagggctgtctttcctagcattgtaggcaggccacgccacactggtgtcatggttggtatgggccagaaggatgcctatgtgggtgatgaagctcagtcgaaaagaggtatactgacattgaaatacccaatcgagcatggtattgtcaacaactgggatgacatggagaagatatggcaccacaccttctacaatgagctccgtgtggctcctgaagagcatactgtattgctgaccgaggctcctatgaaccccnaggcanacagagagaagatgacccagatcatgttcgagaccttcaactgcccagcgatgtacg

SEQ ID NO: 37361 - DNA, 334 bp, Oryza sativa
  Clone ID: uC-osrocyp008d06b1
tttatttatcgaccgcgaacccactcagagctagagctatgtgcgggggcgcgatcctcgccgacctcataccgccgtcgtgctccgggggacacaccagaaagaacaagcggcggaggatcagcgactactaggacttccaggtcgacttggaggagttagacgacagagacgacgactccgacttcgacttcgaggccgaggcggtagacgagtacgacaaaggcgctgtcgacgaccacagcggggacggcgcggtggatcttgcgacgactgcgacgatcgcgtcggagattccacatgagcgtcatggcgcgaggcggttccgttgagt

SEQ ID NO: 37362 - DNA, 539 bp, Oryza sativa
  Clone ID: uC-osrocyp008d08b1
cgcgttttcccgcggctacgcttccggggagaggagattttcaaaaataaattcctcatccacatcctcctcttcccctagctcctaggcagggtctcgtctcgactccgaatcttagggtttctcctccccgctccccgccgcgggcgccatggaggcggtggtcgtcgacgcggggtcgaagctgctcaaggccggcatcgccttgcccgaccagtccccatcgctggtgatgccgtcgaagatgaagttggaggtagaggacggtcagatgggcgacggcgcggtggtggaggagggtggtgcagccggtggtgcgtggcttcgtcaaggactgggacgccatggaggacctgctcaactacgtcctgtacagcaacattgggtgggagattgggatgagggccagatcctcttcacagagccgctcttcacacccaaggcacttcgggagcaactggcgcaacttatgttcgaaaaattcaatgtttcaggcttttatgactctgagcaggctgtattggcactttatgcagttg

SEQ ID NO: 37363 - DNA, 516 bp, Oryza sativa
  Clone ID: uC-osrocyp008d10b1
cgctcatacccgttgcgacacaaatccgcctcctcttccgctcgaatttacgattctgcccccctccgctccaccgcgcgaaggcgaagccggtagccatgaagctggaggtgatgccgaagcagagggccatggaggccgagcagagggaggaggccatggagatgagcgggctcgagctgtggaagcacgagaagcccgtgtccatggtggtgttcctcccgccgccgccgccgccgtcgccgattgtgccggcggcggcggacgaggtcgcggcggcgtgtggtgaggaggcgacgctggtgccaccgctcaacttcgcgatggtcgacgacggcatcttccgctccggcttacgcgcggccgacaacttccggttgctcaagtcgctcaacctccgctccatcgtgtacctgtgcccggagccgtacccggagacgaacgcggagtttctcgacagaacgggatcaagctcaccagttcggaatcgaggggcgcaagggaccattcgtcaca

SEQ ID NO: 37364 - DNA, 537 bp, Oryza sativa
  Clone ID: uC-osrocyp008d11b1
gctcactattatgaataaacagtagctaagctagctatagctacgtttttgttcatatgctgttgttgctgccggctgcttggccgcggggaagcatggcggcggcgatggcgttcctcgcggtggtctgcgcggcggcgatggcggcggtgagcggagcggaggaggtgtacgagttcggctccggcgcgtcgttcatcttcggggactcgctcgtcgacgccggcaacaacaactacatcccctcgctgtccaaggccaacatgacgcccaacggcatcgacttcgccgcctccggcggcatgcccaccggccgcttcaccaacggccggaccatcgtcgacatcatcggagaaatgttgggccagacggactactcgccgccgttcctcgccccgaacacgaccggcggcgcgctgctcacggcgtaactacgcgtaggaggcgctcggattctcacggcacaggagaattttgtgacaggatcggatggatctcaggtggatacttcacatacgaggagcagctgacatctct

SEQ ID NO: 37365 - DNA, 468 bp, Oryza sativa
  Clone ID: uC-osrocyp008e01b1
tctactttctcctccggctcttcttcagtatcgaatcctctcttctcctcgtgcccaccaccaccaccgtagcaatggcgggcaacgggccgatcaacaaggaggacccgctcaactggggcgcggcggcggccgagatggccggcagccacctcgacgaggtgaagcgcatggtggcgcagttccgcgagccgctggtcaagatccagggcgccaccctccgcgtcggccaggtggccgccgtcgcccaggccaaggacgccgccggcgtcgccgtcgagctcgacgaggaggcccgcccccgcgtcaaggccagcagcgagtggatcctcaactgcatcgcccacggcggcgacatctacggcgtcaccaccggcttcggcggcaccttccaccgccgcaccaaggacggccccgccctccaagtcgagctcctcaggcatctcaacgccggaatctttcgcactg

SEQ ID NO: 37366 - DNA, 462 bp, Oryza sativa
  Clone ID: uC-osrocyp008e02b1
ttttgttcgtctctccctccctccctccgactcgcaccgcacccaggccccagcccacgcggggttcggattccctccgccgccacccgcgagagggagacgccggcgccggcgatcggtgaccgatggcggcggcggcggtgcgggtagacaaggccacgagcgagctgctgctcggccccgactggaccctcaacatcgacatctgcgacgccgtcaactccgatcacgggcaagcaaaagaggtgattaaagctttgaagaagcgtcttcagcacaaaaattcaaaggttcagttttttgctttgacgctattggaaactctaatgaagaattgtggggatcatgtgcattcacaagttgtagagcgtgatatactgcaagagatgatcaaaatgttaagaagagactgattgcagttgagggacaaaatctagtactcttgaatcttggcagagcatt

SEQ ID NO: 37367 - DNA, 469 bp, Oryza sativa
  Clone ID: uC-osrocyp008e04b1
ttccgtcgagccgcggaggcgacccctcccccgccgccgccaagatgcagatcttcgtgaagaccctgacggggaagaccatcacgctggaggtggagtcctcggacaccatcgacaacgtgaaggccaagatccaggacaaggaagggatccccccggaccagcagcgcctcatcttcgccggcaagcagctcgaggatggccgcaccctcgccgactacaacatccagaaggagtccaccctccacctcgtgctccgccttcgcggcggcgccaagaagcgcaagaagaagacgtacaccaagcccaagaagatcaagcacaagcacaagaaggtgaagctcgccgtgctccagttctacaaggtggacgacgccaccggcaaggtcaccaggctcaggaagggagtgccccaacaacgactgcggcgcgggcaccttcatggccaaccacttcgatcgccactact

SEQ ID NO: 37368 - DNA, 523 bp, Oryza sativa
  Clone ID: uC-osrocyp008e07b1
tttcgcagcctcccttctcctctgctcgccccgccgccgccgccgtctccgcgccaccgccgcccccgagatggccccgaagaaggacaaggccccgccgccgtcgtcgaagccggccaagtccggcggtggcaagcagaagaagaagaagtggagcaagggaaagcaaaaggagaaggtgaacaactcggtgctgttcgaccaggccacctacgacaagctgctctccgaggtgcccaagtacaagcagatcaccccctccgttctctctgagagactcaggatcaacgggtccctggctcgtagggccatcaatgatttgatgacacggggcctaatccgcatggtctcggttcactcaagccagcagatctacaccagggcaaccaacacctaagtgtgagggtgacatgcatctttgtttgccctgaatgtgtacggggggcttgcctactctagaacagctgttacctttgtcgagtttgctaatgttatgttaaatgagctacttgtgatggtcagc

SEQ ID NO: 37369 - DNA, 513 bp, Oryza sativa
  Clone ID: uC-osrocyp008e08b1
tccactcgtacgctagaaccctaggtggagcgcgaatacagctactggaatccattgaaaaaccctcgttaacccacgcatcgatctcgtcggcagatcgtggaactcgcatagatgcgggggtgttcttttcttttctttttcttgcagaacagatcggattttctgtctcttttcatcgcgaggagatagatggcggtgggaggcacaggagggacgacgcctacgcctccatcgacctccccatcctgggcctcctcttcgccaccatggtcgtcggcggctacctcaagaacgccggcatgttcaggcacctgggccggctgctggcgtggaggagccagggcgggcgcgacctcatgtgccgcgtctgcgtcgtcaccgcgctcgccagcgcgctcttcaccaacgacacctgctgcgtcgttctcaccgagttcgtgctcgagctcgccgccgagcgcaacctccccgcgaagccgttactgctcgcgctcgccaccagcgccaaca

SEQ ID NO: 37370 - DNA, 510 bp, Oryza sativa
  Clone ID: uC-osrocyp008e09b1
tggacgcgtgggtcaaaatcagacgcaagttcagaactttggagaacctttctttatggttattcgtgaggatgaaaccctttcttctattaaagaacggatacagaaaaaactaaaagttccagatgaggatttctcaaagtggaaatttgcctacatatcacttggtcgcccagattattttgaggattcagacactgtagcttcaagatttcagcgaaacatgtatggagcttgggagcaatatcttggactggagcatccagacacggctcctagaaagacacacaacgctaatcagaaccgccattcatttgagagacctgtaaagatctataactagacttgagaaatttgagtgacgtgccgccatccaacaccaagcaagggcctgaaaagtgctggcttgaataaattgtgtaccataattgatggtaggacgggttgctcaggtttttcgatggagctagaaagcatgcatggtgtttcctgaggagacgttttttagta

SEQ ID NO: 37371 - DNA, 346 bp, Oryza sativa
  Clone ID: uC-osrocyp008e10b1
tttccttataatgttgtgtatgatttcctttttgtttttgttttacccaccgtatatgtgctgtgtggtgtatggccggcgagcttgaaattgaattggccttgcttgcatgcatgcatggtgatcagatcagctcagctagctagctaaatcttgcttaattttatcaagtgtcaatcatgatgagaagagagggaactagatggagctagctagctagcaacacatgcagtgtgtgctaagcagtgcactctgcatgcttaaatttgcttgcttaattcaacatcgtattacatgtatgttgatatgtgcatgttcctcaaaatacatggaaaaaaaatgtttc

SEQ ID NO: 37372 - DNA, 504 bp, Oryza sativa
  unsure (1)..(504): unsure at all n locations
  Clone ID: uC-osrocyp008e11b1
tttcctgtagctcccagctcgtgggacaccttcttccacgaagcaaccacagcaaggcaatagcgccacccaccgctcgcatccacagctgctgattcgtaggaggagcaggccagggagggattcgttgattttatttggcagggaaggagatccgagaggaagaaggggaatatagatcgatggggaagtacgtggagctgctcgacatgggggtgcgcatcgccgcgcggttccactcccactgcccgcagacggcgaggatgtactaccacccgccgccgtcctacttctcgtcgccgtcttcctccgccgccgccggttcggccgacgctngcngccgcggctgcgcgggcttcgccgcgaagaggatgccccgggccgccgccgacaccgcggagatcatcctctacgccgtcgtctaaagttagcctctagactctcgatccagacgctttcacgcgaaatggaggaatgtatntttctttggttttctttaagaag

SEQ ID NO: 37373 - DNA, 470 bp, Oryza sativa
  unsure (1)..(470): unsure at all n locations
  Clone ID: uC-osrocyp008e12b1
tgaaagaaaagaaaaaaaaaaggaaaatcgtgtctcgtctcgtctcgtcttcgtctcccccgattcccgagcagcttctcgaaaccctcgcggcctcgattccggcgatggcggagcccaacccgcaagtggagagggaggtggaggtggaggaggtgaggaggccaaagctgaggtacttggagttcgtgcaggtggcggcagcgcaggcgacgatctgcctcgcggggctctacgcgcttgccaaggaccacgccggcccgctccgcccggcgtcgacgccgtcgagtccgccgtcaagggcgtagtcggccccgtctacggacgcttccatggcgtccccctcgacgtcctcgccttcgtcgaccgcaaggtggatgacacggtgcaagagctggaccgacacctnccgtcgacgctgaaaggccgtcttcgtcaggcttgcgcggtggcccgcggcgtgccggacg

SEQ ID NO: 37374 - DNA, 373 bp, Oryza sativa
  unsure (1)..(373): unsure at all n locations
  Clone ID: uC-osrocyp008f03b1
ctgaagtcaagttacataggatatgccgcatgctgatcaagatccatagcgtggttgaggaggccaaagggaggcagatcaccaaccatggcaccctcgggtggctctcggagctcatcgatggcgcataccaaggccgttacttgctcgacacgatcggatgcggggagcctgatcttgatgacaagaatcgcgatgaggtagatcccaagcctttctccttgtccaagttcaatcctgcaaagcgtgtgcgcgtcgcggctatcaccgtgaggaacatactgtctcgccacgacatcngtgttgatgagattgatagggtggatgagagcttgcaaagcatgtgtgggtgatctcaaggagttcatgatgc

SEQ ID NO: 37375 - DNA, 527 bp, Oryza sativa
  unsure (1)..(527): unsure at all n locations
  Clone ID: uC-osrocyp008f04b1
ttcgcttccacaaataaagctcgtcccgaggaagggcggcgacccaccccccccaatcgccaaaaccctaactccgatccgatcgagctctgcttcccatggcgactgccgcgagccaggcgagcctcctgctccagaagcagctcaaagatctcgcgaagaaccccgtggatgggttctcggcggggcttgtggacgatagcaacgtgttcgagtggcaggtcaccatcatcggcccgcccgataccctgtatgatggaggctacttcaatgcaataatgaccttcccccagaattatccgaatagtcccccatcagtaaggtttacctctgagatgtggcatccaaatgtttatcctgatgggcgcgtatgcatttctatccttcatccacctggcgaagatcccaacggttatgagcttgcgagcgaacggtggacacctgtgcatacagttgaaagtatagttctgagcatcatttcgatgctctctagtccaaatgatgagtctncagcanatattgaagcg

SEQ ID NO: 37376 - DNA, 489 bp, Oryza sativa
  unsure (1)..(489): unsure at all n locations
  Clone ID: uC-osrocyp008f05b1
tttacttcctccacctcctcctcctccccccgatcggatcggcccggctcctcctgctccgacgtcgacaccgtcgccgtagataggagaagatggccgcacttgataccttcctctttacctcggagtctgtgaacgagggccaccctgacaagctctgcgaccaagtctcagatgctgtgcttgatgcctgcctcgacgaggaccctgacagcaaggtcgattgtgagacctgcaccaagacaaacatggtcatggtctttggtgagatcaccaccaaggctaacgttgactatgagaagattgtcagggagacatgccgtaacatcggttttgtgtcagctgatgtcggtctcgatgctgaccactgcaaggtgcttgtgaacatcgagcagcagtcccctgacattgcacaaggtgtgcacgggcacttcaccaagcgccctgaggagattggtgctggtgaccagngacacatgtttggatatg

SEQ ID NO: 37377 - DNA, 372 bp, Oryza sativa
  unsure (1)..(372): unsure at all n locations
  Clone ID: uC-osrocyp008f06b1
tcgtttattttttctgcctttgggtcatacgacgaccgggcgcactctggcgccgccgattcattcttgattgccctgtgaggatgtataaaggctccatcatactcgatgaacttgttggaggctcctaaagagtaaccaaggggcacttgctcaggtggttagatcatccgttagggctggcttgaaaagagcaactacgggtgcaaagaaaggatcccgtgttgcactaaaacggggaacacactgagaccatcgttgtcctaagtgtgatcttgagtaccgttatttccaccgtggacgacgatggcctcccatatgtaggggggcatccttctgatttgacctaccttgccngtcgaggtgctgcac

SEQ ID NO: 37378 - DNA, 449 bp, Oryza sativa
  unsure (1)..(449): unsure at all n locations
  Clone ID: uC-osrocyp008f08b1
tttccgtttctcctccccctctttaccttttcctcctcggttcggatgccaggttcgtgtagggtttagtgcgttgagatggcggcgccggatgtcgagtaccgctgcttccacagcagcctcgcctgtgccaccgacgaccgctccctcgaggccgccttctccacctacggcgagatcctcgactccaagatcatcaacgacagggagacggggaggtcacgtgggtttggcttcgtcaccttctcctccgagcagtcgatgcgcgacgccatcgagggcatgaacggcaaggagctcgacggccgcaacataactcgcaatgaggcccagtcccgccgctccggcggcggaggcggtggctacggcggcggcggtggcggctacggcggcggtcgtggaggcngcggctaccgaggaggtggcggcggctgctaccggcgccgtga

SEQ ID NO: 37379 - DNA, 465 bp, Oryza sativa
  Clone ID: uC-osrocyp008f09b1
tgtgtgagcttgcgtcggcgcccaaggtggcgcttggatcgatcgcgttcgcggtgttctggatgatggcggtgttcccgtcggtgccgttcctgccgatcgggcggacggcggggtcgctgctgagcgcggtgctgatggtgatattccacgtgatcagccccgacgacgcgtacgcctccatcgacctcccaatcctgggcctcctcttcgccaccatggtggtgggcagctacctccggaacgccgggatgttcaagcacctggggcgtctgctggcgtggaagagccagggcgggcgcgacctcatgtgccgcgtctgcgtcgtcaccgccctcgccagcgccctcttcaccaacgacacctgctgcgtcgtcctcaccgagttcgtcctcgagctcgccgccgagcgcaacctccccgccaagcccttccttctcgccctcgccttcagcgccaacatcg

SEQ ID NO: 37380 - DNA, 537 bp, Oryza sativa
  unsure (1)..(537): unsure at all n locations
  Clone ID: uC-osrocyp008f10b1
ctcgtcggaggttccttccgtatcccccgcgtgcagcagctgctccaggacttcttcaacgggaaggagctctgcaagagcatcaaccccgacgaggccgtcgcgtacggcgccgccgtgcaggccgccatcctcaccggcgagggcaacgagaaggtccaggacctgctcctcctcgacgtcacgccgctgtctcagggcctcgagacggccggaggcgtcatgaccgtgctgatccccaggaacaccaccatccccaccaagaaggagcaggtcttctccacctactccgacaaccagcccggcgtgctcatccaggtgtacgagggtgagaggacgcggaccaaggacaacaacctgctcggcaagttcgagctctccggcattccgccggcgcccagnggtgtcccccagatcaccgtgtgcttcgacattgacgcgaacggcatcctgaacgtctcggcggaggacaagaccactcggcagaagaacaagatcaccatcaccaacgacangggccgtctgagcaagaggata

SEQ ID NO: 37381 - DNA, 506 bp, Oryza sativa
  Clone ID: uC-osrocyp008f11b1
ttttctttgcagcgaagtcccagctacctggcgcgtgcattcattcatgtgtggatagacacctactgaactccaccgggagagagaccggatcgacctcgcgctttctccgtccaatcgaccatgccgacggcgtcgccagcccacgcggtgttcttcccgtacccggtgcagggccacgtcgcgtcggcgctgcacctggccaagctcctacacgccaggggcggagtccgcgtcaccttcgtccactccgagcgcaaccgccgtcgagtgatccgatcccacggtgagggcgcgctcgccgtcggcgccccggggttctgcttcgccgccgtccccgacggactgccgtcggatgacgacgacgactgcccgttcgaccgctgcgatctgctcttgtccatcgaggcctgcgtgccgcactcgaagaagatcctcgacgaggccgtcgcctgggggcactcgacacctgcgtcgtcttcgacgtcgaccacgttctgctcgct

SEQ ID NO: 37382 - DNA, 198 bp, Oryza sativa
  Clone ID: uC-osrocyp008g02b1
acccgtccgatcttattggcacttccatcacattcttctaattgtcatcactagcttctagctagcttaattaattaattacccatggcggaggagaagcaccaccaccacctgttccaccacaagaaggacgacaagccggccaccgtagtagactcctacggcgagggcgtctacacgtcggagactgtgaccacc

SEQ ID NO: 37383 - DNA, 190 bp, Oryza sativa
  Clone ID: uC-osrocyp008g03b1
accttttctttcacaatacgggcatacacagcctagggcgcaatggccgacattagggttcatttattggacaacaacatggaaagcactcttgtgaacatgagtgtaaacagaccgttcaccataccagtggaaacatcggctggcatcacgatatgggacacaacaacatttgctgtcatgcaaaacc

SEQ ID NO: 37384 - DNA, 541 bp, Oryza sativa
  unsure (1)..(541): unsure at all n locations
  Clone ID: uC-osrocyp008g04b1
tgtctgtctacaatccgtgcctacaaagcctatgacagaatggcaaacatcaatgggaaatcaatggacaacaacatcagattcactcttgtgaacatgagttcaaacagatggctagccatccgtctggaaacattgggtggcatcatgatatggttcacagcaacatttgctgtcatgcaaaaccaacgagcagaaaatcaaaaggcttttgcctccacaatgggtcttcttcttacttacaccctcaatatcaccaatttgctcacggctgttcttcgtcttgctagtctggctgaaaacagtttaaatgctgttgagcgggtaggaacatacattgagttgccttctgaggctcctcctgtcattgaggatagcaggccacctcctggttggccatcatctggtgttgtcaagtttgaagacgtcgtgcttcggtaccgaccagaacttnctcctgttcttcatggcatatctttcatcattaatggcagtgaaaaggtaggaataagtggcagaacaggagctggtaaatctagca

SEQ ID NO: 37385 - DNA, 540 bp, Oryza sativa
  unsure (1)..(540): unsure at all n locations
  Clone ID: uC-osrocyp008g05b1
ttcgcctcctctcggctctcgctctgcgccacaggcccacagcgccggccgtcgcccatcggcggcgtcgggtccctctccctcctgcagtcctgctcgagctcgacgacgacgacgagtctatgcctcaagccctaaacagctcctcataggaccacccaacgaatcgatcctagagccgccactgcatcgtctcctcgtccgccgccgccgccatgtgggcgctccgccgcgcgggcaaccccctcagggtccgtgcccaccaagctttgagtgcccgtggttgtgcaaaccttgaagtaattctaaatgcagatgcaaagaatgtggaagagcatcatgagggggactgtcagaaattggattgctgtcatcaaccaaagccattggtctgccaaccatcattctcatcaggccgtttcatgtggagtaggggtttctcttctcaggcacgtgcangttctggtgataagcangatgagttggaggaagggttttctgatctgagggtccaccagagctcataaacggattagattg

SEQ ID NO: 37386 - DNA, 299 bp, Oryza sativa
  Clone ID: uC-osrocyp008g08b1
tccacacgaatcgaaaccgccattggagggagcagctgccgtttcttggtttcatttcttgggagttcaattggagagcgcgcttgaggtgtttgttgttgttgcgccatgcaccataccagggctggcgccgccgatggcgccggcggcggaggagaggacatcgtggaggccggggcggaggcgccgtcgccgcagagggagcggctggtgccgcacagcgggccactgagcaagaggtccgggatgaggaagagcgcgaggttcgcggagtcggtgtcggcgccgctgtccgcgcc

SEQ ID NO: 37387 - DNA, 485 bp, Oryza sativa
  Clone ID: uC-osrocyp008g09b1
gttctagatcgtgagttgccgccctttttttttttttttttttaaaacacatcaactttgttaagcaagagcagaattaggggataaaccccattacataaccaaggataaaagctgaaagcaaaagagccacccctgagaagggagggttaactgaactacgaaatcaatcttcctgaaataacctaatagcagaaaaaggagcaagtcgatagggatctgcggcgaagccgcgacgactgctaccctgggcctcaaaagatgtgcactccgcttgacaaaccgttaatccccatcagctgcctccacggaaacggcacaagaccgaggtttgttgctgagccgtagattttggtgtgtgcatcactggactcagcgaaggatccccacgaggctcatcattgaatctgaggagctctaacatcaaccctgtcaactgaaattgcgcagattgttcgagctcaacccgaatgacaaacccagca

SEQ ID NO: 37388 - DNA, 497 bp, Oryza sativa
  Clone ID: uC-osrocyp008g10b1
ctcctctgctcatcctttccccagatctccagccccaggagctccggagggttcccaatggcggtgaaggtctatgtcgtgtactactctatgtatggacatgttgctaaactagctgaagagatcaagaagggtgcttcatctattgaaggtgttgaggctaaaatatggcaggttcctgaaactctccatgaggaagtacttggaaagatgggcgcgcctcctaagccagatgtgccaacgatcacaccacaagaacttactgaggctgatggaatcctgtttgggttccctacaaggtttggcatgatggctgcgcagatgaaagcattctttgatgcaaccggtggcctgtggagtgagcagagccttgcaggcaagcccgccggcatcttcttcagcactggtacccagggcggtggtcaggagactacaccgttgacagcaataactcagttgactcaccacggcatggtgtttcgtcccggtcgggtaca

SEQ ID NO: 37389 - DNA, 384 bp, Oryza sativa
  Clone ID: uC-osrocyp008h01b1
ttattatggcgtcttatcatccagcaaagtctttagactcttttggtaatagtcctcttgtgtctgaggatgctgtgattgagtcgcagagaccacatgttttcttggatccaactaacagtcagggtggagacatgattttgcctttttattggcgccataattatatggatatagtaaatgccgattggggtagtatgggtcagatcgatatgagatctttacctattttacgaagtgtgaatggatcaaatgaaactatttccattattgcgtatgcgtggtgtgaagatattgagttctctggtattacacagtttgagcctgcaacaatcgtgcctcagtcaggttccgagattgacgaagcttatgctaaaggattta

SEQ ID NO: 37390 - DNA, 244 bp, Oryza sativa
  Clone ID: uC-osrocyp008h03b1
cctgcttttaaattttatggtcaatgtgctccgcttaatttggataaggaggtccatagctatctccattcttacaatgtcaggagcagcccaaggtggagagaacatggatatttatcattggaacctttgttgagatctttgtaagtctatatatgaataaaagcattctgacaatgcttgcttttttcagcgcgacagggtacatcgcgtcgtggctcgtcaggctgctcctcgaccgggg

SEQ ID NO: 37391 - DNA, 479 bp, Oryza sativa
  unsure (1)..(479): unsure at all n locations
  Clone ID: uC-osrocyp008h04b1
ttggactactactttattaagcccgtgggccgtgcggcccactgatccgcaccggcacggcggcatgcgagatgccgccgccttggagctccacgccgccgacgccgcggcggcggcgcggccggcgatggtggccgccagcgatcactacgcgcggctcctgcagctctgccagacggcggctaacccgggcgctggccgtgccatccacgcgcgcgccgtcaaggctggcctcctcgccagcgcctacctctgcaacaacctgctctcctactacggcgagaccgccggcggcgccggtgggttgcgggacgcgcgacgcctgttcgacgagatccccttggcgcggcggaacgtgttcacctggaactcgctcctgtcgatgttcgccaagtccgggcgcttggccgacgcccgcggcgtgttcgcggaaatgcctgagagggatgccgtctnctggacagtcatggtcgtcgggc

SEQ ID NO: 37392 - DNA, 520 bp, Oryza sativa
  unsure (1)..(520): unsure at all n locations
  Clone ID: uC-osrocyp008h05b1
ttgagaccccgcgtaccccggcgccggataggccgccgcctcccgtgccggtgcgcgttcccgtgccagagccccagcccgagcccgagacgccgcaggcgtcgccgtcgccgcctcccgcgcccgatccgccgacgccgctgttgtttccggagtcggcgccttcgacgccgcgcgaggagtaccacacgccgccgtcgtcgctggacgaggcgcgtgacgaggcgctggtgcctcatcaggagggcgtcgtcgacgtcaacgggggatcggaggccgtcgacaagagcccgcagctctcgccggtgcggctccaggtgtcgccctcgccccaccggttgctcccgcctgcgccgggctctcccgtcgtcaacggtgaagatggcgccgtcgggacggagcaaggtcgccgtccgggacgcccgcaacttcacctcgcgacgggccgtcttttccgacgccgtcgangggtccctcgcatgtcgtcgcctcgcgtcgctacgcgtcgtaccgtgactca

SEQ ID NO: 37393 - DNA, 411 bp, Oryza sativa
  Clone ID: uC-osrocyp008h08b1
agctggccgcctcgcccggcccgatccggaccggccgggtcggcccgccccacgcgtgcgtttatatcgcgctctctccggagccaaggcgaggaggctgaggcggcggctgccgctgtggagcgagacgagatcgtggagtccggcaccccacccccgtacttcgcttcacacgaaaaggaagggaggaagatgagctccgagtctgaggcggcgcccgggaccgggaagctggtgtgcgtcaccggcgcgtcggggtacatcgcgtcgtggctcgtcaggctgctcctcgcccgcggctacacggtccgagccaccatccgggacacctctgacccaaagaaaacactacacctgcgtgccctggatggagccaacgaaagactgcatttgttcgaagcaaatctgctg

SEQ ID NO: 37394 - DNA, 329 bp, Oryza sativa
  Clone ID: uC-osrocyp008h09b1
cttcgcctctacctgctgcatgccgctttaccccttctcgatgcggggttggattccgacgagatacttgagccgacgagagtttgattcgaatcgaagctcctagtcttctttaccatgtgaagaaatcaactggttcagcatcaagaagcagccatggccgccgttcgcgtggtggcgccggcgccttcggtgctgctgcttgtggcggcggcggtggtgctgcttcacctggctcgcgccattgccggcgcggcggacgaggccgcggcgctgctcgcgttcaaggacgcgtccgtggacgtcgacccggcagcgcgctcgcgggc

SEQ ID NO: 37395 - DNA, 555 bp, Oryza sativa
  unsure (1)..(555): unsure at all n locations
  Clone ID: uC-osrocyp008h10b1
ttcatcatctccatcccgcctcaactccgccgctcgatcgcctccacccgccgccgttccgtctacctctccgacccccggcgggcgccgccgccgccgccgcgcctaccatggctaatacgctgcgattgtatctcacttgcataaggaacactctggaggctgccatgtgcctgcagaatttcccttgccaagaggtcgagaggcacaacaaaccggaggtggagctaaagactagccctgaacttctgctgaacccagtgctcatttgccgtaatgaagcagaaaagtgtttgatagagacttcaatcaactctattcgtattagcatgaaggtcaaacaggcagatgagctagaaaatattcttgcaaagaagtttcttaggtttttatcaatgagagcagacgcattccaagtgctgaggagaaaaccagttcagggttatgatatcagtttcctgatacaaactaccactgtgaggacatgcacaagcataagctcatagatttcattgggtcagttatggaggacatcgacanggagatcagtgagct

SEQ ID NO: 37396 - DNA, 471 bp, Oryza sativa
  Clone ID: uC-osrocyp008h12b1
tccggcgagaagatcttcaagaccaagtgcgcccagtgccacaccgtcgacaagggcgccggccacaagcaaggtccaaacttgaatggtctgtttggaaggcagtcaggtaccacccctggttattcctactctacggccaacaagaacatggctgtgatctgggaggagaacacactttatgactacctgcttaatcctaagaagtacatccctggaaccaagatggtcttccctgggttgaagaagccacaggagcgtgctgatcttatttcctacctgaaggaagcaacctcttaaaaggagtggagctgtcgtaacatgagacaatcggacaattcattctacagttaaataaaaatatttagacatctgggtcgctctggttttacagggtgcaatccacgagacaattatcttgttatattttgttcttatggtttatgggttccatatcttaggtttagcagg

SEQ ID NO: 37397 - DNA, 347 bp, Oryza sativa
  Clone ID: uC-osrocyp009a01b1
ttgactcgtgggaacgccgcctacttcgcctccgccgccccaccccccgccgccaccaacggcaccgtcgccttcgccgtcgcctacccttaccctgcgccgccgccccactcccactgccaccggccacatactactacggacgcgtaccaccaccgccactacctacgagctactactcctaaccacgacgcctacgcgcctcaccgcgctacgtccagctgcctgcgccgcctcctcggactagagatccacgcattcctcctgctcggcgccgacaccttcaacgtttggattctcctgggtccccgcaagccggacttgtccgttgagtacctcaccctctg

SEQ ID NO: 37398 - DNA, 532 bp, Oryza sativa
  Clone ID: uC-osrocyp009a03b1
atcacttccaccactcaccacgcgccacccacccccgcaccgcacgccaagatccgaccgccgccgccgccgccgccggagtagggagagggagaggagatggggcggagggcggggtcctacccctactacgtggaggcggcgccgccggtggacgtgaacaagaacacggagtggttcatgtaccccggggtgtggaccacctacatcctcctcctcttcttcgcctggctgctcgttctctccgtctccgcctgctcccccgggatcgcgtggaccgtcgtcaacctcgcccacttcgccatcacttatcacttcttccattggaagaagggaactccatttgctgctgatgaccaaggcatctacaacagactaacttggtgggaacaaattgataacgggcagcaacttactcgtaataggaagttcttgactgtggtacctgtggtgctgtacctgatcgcgtcacacttgaccgactacaaacagccaatgcttttcctcaacaccattgcagttctggtactag

SEQ ID NO: 37399 - DNA, 451 bp, Oryza sativa
  Clone ID: uC-osrocyp009a06b1
tttacttttccgcaggcttgaccctctgaagtttgacgatgtgaagagtataaccctcaggagatcaaagcttgtgaaatggttcatggagccgttctttgaggaccttgtgtctgggtgctttgtgcggattgggattggcaagtcaaaatcagggacccctgattacaggctatgcatagttagaaacgtggatgcgaatgaccctgaccggaagtacacgttggagggctacacgacgtgcaagtacctgaatgctgtgtgggacaatgaggctaatgctgctcggtggcagatgactcaagtatcagactgctttcccagagaagaggagttcaagaagtggctacaagtggctgagacgaatggtgtgcgagtaccgacttcgcaggatgtattggagaagaagatgccattcacaggcctacaactttgtgtatttagcacatac

SEQ ID NO: 37400 - DNA, 504 bp, Oryza sativa
  Clone ID: uC-osrocyp009a07b1
tcggataaatttctccccaatctcgcgaggctctcgtcgtcgaatcgaatcctttcgcgtcctcaagatgcagatctttgtgaagacattgaccggcaagactatcaccctcgaggtggagtcctctgacaccatcgataatgtcaaggctaagatccaagataaggagggcatccccccggaccaggagcgtctcatcttcgctggcaagcagctggaggatggcaggacccttgctgactacaacatccagaaggagtcgacccttcaccttgtcctccgcctccgtggtggcatgcagatctttgtcaagactctgaccggcaagactatcacccttgacgtggagtcttctgacaccatcgacaacgtcaaggccaagatccaggacatagagggcatccccccagaccagaagcgtctgatcttcgccggcaagcagctggaggatggcatgaccctagctgactacaacatccagaaggagaccaccctgcaccttgt

SEQ ID NO: 37401 - DNA, 448 bp, Oryza sativa
  unsure (1)..(448): unsure at all n locations
  Clone ID: uC-osrocyp009a08b1
tcgtttacgcgtgggtttaggcggcagcggtggtggtcgagaagcactatacgtacgtcatcctcagaggaggatctttagcgggatatgaggcacgagagctcgacaagcagggggttaagccaggggagctatggatacatgtcacaaggtggccgtggatccttatgagcgctctgctctgaccaagggatacctatttcctcagaatgctataagactgccaggatttcatgtgtgtgctgccagaggcggagagaggctatcgtccgaatggtactcagagaaaggcatagagttgatcctgagcactagaattgtcaaagctgaacttgcctccaagactntgactagtgcaactgctgcaacctctacatgtgatatattgatcattgcgactggctcctcaatcatcaatctatcagattttggcactcaaggagctgat

SEQ ID NO: 37402 - DNA, 316 bp, Oryza sativa
  Clone ID: uC-osrocyp009a09b1
ttcgtcttgcgagtgcaatggccttttcctggcggccattttattgtaagctggctcgttaagatcaacaacatgccagaagagacggagaggcagaagacatgggacctccatgggcaacacactcacacgcaagaagagcggcgcactaggaggagcggacaaaaaggacagtggcgacagcagggacacaccagccattgatgtacgccacggatggatcgccgacacggcaaaaatcagctatctacgacccacagaacaccgaggaccagatgcaacgaaaccaaacgatgagcatgtaacactgggacca

SEQ ID NO: 37403 - DNA, 483 bp, Oryza sativa
  Clone ID: uC-osrocyp009a10b1
tcgatcaggagcaaattaagcctcgaccagctaatcaattaattgagcttgtgctgttagccgtgtcatctatagctcgctagcttgccatggcgtcctctgctatggcggcggaggcggaggcgtatgctgtagtggtggccgcgacgacgagcagcgcgcagcttgacccgcacttctacgacggcttgtgcccggcggcgctgcccaccatcaagcgcatcgtcaaggaggccgtcgcggcggagccccgcatgggcgcctcgctcctgcgcctgcacttccacgactgcttcgtcaacggatgcgacgggtccatcctgctggacgacacgccattcttcacgggagagaagaacgcggcgcccaacatgaactccgtccgcggcttcgacgtcatcgaccgcatcaaggacgccgtaaacgccgactgacgccgcaacgtcgtctactgcgccgacatcgtcgtcgtcgccgcgcgcg

SEQ ID NO: 37404 - DNA, 420 bp, Oryza sativa
  Clone ID: uC-osrocyp009a11b1
tcgttttactgccaatccttccttacgactcggcggctgttatccacatagccgccacgatccccaaacgccaagccgacccgtcaaatccccgtcatgctgaaggcccccacggatgcgcgcctaagctcaagatgtaggcagggaaggtaaccaccacgccggctctggataaacgggtgttgcaacaacaacaacaaatacaacgccgccgaaaaccgcaagaataacttcagacgccggcgcgacaccaccagcaacggcaaccactacctaacgatgagaccaaacgttcctcatgtggatgagagagaggacatacatggacagctcccaggagatggcgaccccaaggaccgccacgttctaggcgcacgaggaggagaagaaggccgccacgttggacgatcccgaagaggt

SEQ ID NO: 37405 - DNA, 545 bp, Oryza sativa
  Clone ID: uC-osrocyp009b01b1
ctgaaccacaccccatgttcatttaagccacatcccatcccatgccagtccacggcgaggttgagcgatctgaaaaaaaatcatcagcgacgagcagcaacaggtttgttctctgaacttctctgatctttttagaagcaggtaacacacaagaaaggtcctgtcccaagaaggtacttctttcgggtttattagatcgaaagaggagttcttgtgcgtacaggttctttctcatcccatcaacttctcctaggaggaacagagatccagagaaccttttttctcttctggattcttgccgatttttaggcttactttgcttttctaaggccagaaagggttgttttgcaatacccttctagttcatcctctcaaatttttcttctttctattcaaaagctttttctttctttgcaccctttggttctctacttttattgaggaacagggctgatttttcacttctcgcatgcaaaaagcacccctttcttctttcctgtttttaagatttacatacccttgccatcttcatcttctaccttcat

SEQ ID NO: 37406 - DNA, 446 bp, Oryza sativa
  Clone ID: uC-osrocyp009b02b1
tttacttgtgggctcgagctgatctactagctacctagtactctcatcttcttcactagcttttgctagatcaattgcagcaatggcggcgaaggcagcgctcgttctagcggtgagcctactggtggtggccgtggcgagcgcctgcacctactgcccggagccgccgacgccgaagccgaagccgccggcgccgaggccgccgacgcccggtggcggtgccgggtcgtgcccgcgcgacgcgctgaagctgcacgtgtgcgccaacgtgctcggcctcgtgaaggccaagatcggcgcggtggcgccttacgagccctgctgctcgctgcttgaccggctagttgaccttgacgcccgcgtctgcctctgcaccggcatcaaggtcaacgtgcttgggcctaaacttaaaattcccaattgaccttagccccattcttaacaac

SEQ ID NO: 37407 - DNA, 539 bp, Oryza sativa
  unsure (1)..(539): unsure at all n locations
  Clone ID: uC-osrocyp009b03b1
atcagatacgcctccgtttccttctcctccacctcctcccaccccctcgccgatccagatccatcgccggggaggcgccagccatggccggcggcgggggcgccggcggcatgtcagagtcggtgctccgcaaggtgctcctctcctactgctacgtcggcgtctggatcttcctctccttcgccgtcatcgtctacaacaagtacatcctcgaccccaagatgtacaactggcccttcccgatctccctcaccatggtccacatggccttctgctcctccctcgccgtcgccctcgttcgactcctccgcgtcgtcgagccgccctcgtcgcccgccatgaccccgcagctctacacctccttcgttgttcccatcggcgcgctctacgccatgtcgctgtggttctccaactcggcctacatctacctctccgtgtccttcatccagatgctcaaggcgctcatgcccgtcgccgtgtactccatcggngtgctctttaagaggagacctttaggttcgtctccatgctcaacatgc

SEQ ID NO: 37408 - DNA, 491 bp, Oryza sativa
  unsure (1)..(491): unsure at all n locations
  Clone ID: uC-osrocyp009b04b1
ttgttttatgaatttaccaggagtagattgtttcaatataaaggaaattgcaaagaaggagagttatttaactacattccaatggtccgatggaggatttggatttttatggaattcacgtgtttccccgatgttgtggcgagctgtggcaggacctcctgcccaagcatggtttcctgcttgtgcgtatgccgtcatgccgtttgagaattggtcgggatcaatgaagtttagatttcaagttgtgtgttctagttttcataaagggcgtttgcgtattgtgtttgatccaacaggtgctcaaacaaatcctgagttgaatgtcgcgtattctcacgttattgatatttcagatactcaagattttaccatagaggttcctcatatgcaaacacgaactttgttaactagggctgaaccgccatttacactggttaccacacaatacggcactactttgttgccaccgntgttcactggtaatggaacta

SEQ ID NO: 37409 - DNA, 442 bp, Oryza sativa
  Clone ID: uC-osrocyp009b06b1
aaaacatacgccctctctctatttttatgcaaggaaatatcccgaatggactattgccaccagcacttccacctttgcgtgactatgatcctgctttgtcattattacttactaacccaccattggctactatggttcatggcacaacatcatcgtccatgggcaatgcagctactgtttctacacaaccacaagagattgtgaatccaggtgctttatccaaccctcaattgaatcaatctaaaccaagctccagcaccagcattgcttgtggctcttcactaccttataatctcacgcttcacccttatgctcaagcaactatggctcttgggtatgcaagcatgataggctacccatctcttgcctcaagttatacatatctcccgcctcctgcctttcagcaaccatacataatacagaggcctattgcaccaagcag

SEQ ID NO: 37410 - DNA, 528 bp, Oryza sativa
  Clone ID: uC-osrocyp009b07b1
tcgtgtatgcagatgccagggaagcagaaaatatagtggaacgggttacaccccgtctgcaacatgcaaattgtgctgttgttctctctgctgtaaagataatccttttacaaatggagctcattactagcacagatgttgtccgtaatctctgtaagaaaatggcaccccctcttgttacgcttttgtcagcagaacctgagattcagtatgtagcgttaaggaacattaatctgattgttcagaaaaggcctactatacttgcacatgaaattaaggtcttcttttgcaagtataatgacccaatatatgttaagatggaaaagctggagattatgataaagcttgcctctgacagaaacatagatcaggttctattggaattcaaagagtatgccacagaggtggatgttgactttgtccgcaaagctgttcgtgctattggaagatgtgcaattaagttggagagagctgctgaaaggtgtatcagtgttttgcttgagctgattaagataaaagttaattatg

SEQ ID NO: 37411 - DNA, 524 bp, Oryza sativa
  Clone ID: uC-osrocyp009b08b1
tcgttctcgccaagcctcgcatggagtcctacctccacgagatatcattggcaaaggcagcctgcacatttgccttgaaggggttgaagaattggatgaaacctgtgaaggtacctgccgacctcacgacattcccatcaactgcacaaattgtgtcagagcctcttggtgtcgtcctagtcatctcagcatggaactaccctttcttgctctccatcgacccagacataggagcaattgctgctgggaatgccgatgtgctgaagccatcataaattgcaccagccacctcagcattgctcgccaagctgctacctgaatacgttgatagctcttgcataaaagtggtggagggaggcgttccagaaacaaccgcactcttagaacaaaagtgggataagatcttctacacaggtagcggaaatgtgggccgcaatagtgacggcagcagctgcaaagcatcttacccctgcggctctagagcttggcggaaaatgccctgcaattgttgattctaatactga

SEQ ID NO: 37412 - DNA, 436 bp, Oryza sativa
  Clone ID: uC-osrocyp009b11b1
tcgtttgacttgagttgctgagctctaacgacgagagcgcgcgtaccagcgaggcaaagatgtctagcttcaaatcgccagccattcctctcgccgctcttgtcatcaccgtactccacattgccgccacccatgcgcagatacccgccgcgacgacgacaggtgccgccgtctccgccaccaacccacagaatggcggtggcggcgtctccggtggcgtaggcgccaccgcgggcggcgcgcacgagcccctggagctgtacatgcacgacatcctcggcggctcgagcccgacggctcggcccatcaccggcttgctcggcaacatctacaacgggcaggtccccttcgcgcggcccatcggcttcgcgacgcccaagaacggcgtcccgatccgcaactccaatggcgccatccccacgtacaacggcaacaa

SEQ ID NO: 37413 - DNA, 529 bp, Oryza sativa
  Clone ID: uC-osrocyp009c01b1
tttctttctctctcaccgacggcagcggcgggctcggcaccggcggcggcggcctcgaccgccgatcgccgacgccccgcgccgcctcctcgctcatcaggatgggctcggcggtgtgtgccggtgccggcgtgctcggtgcgccagacccgcgacgtcgccttcgaggccgaggacgcgctcgacgacttcctccggcggcagtccactttggtcgcggtcgcggcgacgtccccaacctccatgacgtcgtcgcctcggctactccggagcccactgcccctggccggatttggaagccagctacacaacgacgggcgccggcctgccgttcttcgccctcggcctacaccggcttcccttccgacgtcgccgccttgagctcctcctcacgccctccccgccggccctttccgatctgctctacccaagccaccacgacgaccagatccaggaagtctctccatcgctctggtcctgacagtggctggaggaccccggccggttgcagcacttcatccccgcaaaa

SEQ ID NO: 37414 - DNA, 512 bp, Oryza sativa
  Clone ID: uC-osrocyp009c02b1
gtaaatcatcatatggctgattatcttgcaatgatttcaaaggagcatgggggtatcatgagatttatccaggtttcttccctaggagcatcggcctcttctccttctagaatgctgagggccaaggctgctggggaggaatctgtgttgaaagaatttcctgaggctacaattatgaggcctgcaactatgattggcacagaagatcggattttgaatagatgggcacagtttgccaaaaattggggtttcctccctcttgttgattctgggtctacaaagattcagcctgtttatgttgtggatgttgctgctgctattgtcaactccctcaaggatgacggcaccagcatgggaaagacctacgaacttggtggaccagagatttatactgttcatgagctggctgagctgatgtatgagacaatacgtgaatggccacggtacatcgatgttcctcttcctattgcaagggctatcgcatctccaagggaaatgctgctaaacaaagt

SEQ ID NO: 37415 - DNA, 446 bp, Oryza sativa
  Clone ID: uC-osrocyp009c04b1
cggcgccggcgtgtccgagctccgcgccgaggcgaaagggaaggagaaggaggaggagcgcgtggtcctggcggatcccgacgtcgccgggagggtcgcgctgggtctcaccgtcgacgcgccgagggggcgcctgctcatcgtctacgccgaccggttgccgcggttcgcgtactccgccgtcgccgcgtacgacctcgcctcgtggcgccgcctcttcctcacccgcctcgacggaccaggtgattcaacgctcgccgacgacgtggccgtcgacgaggaaggcaacgcgtacgtgacggacgccaagggcaacaagatctggaaggtgagcccggacggcgagccgctgtccgtcatcaagaacgccaccttcttccagaggccagggtggatcaacaacttcgtcggcctgaacggcatcgtctaccaccccaacggctacc

SEQ ID NO: 37416 - DNA, 507 bp, Oryza sativa
  unsure (1)..(507): unsure at all n locations
  Clone ID: uC-osrocyp009c05b1
ttaaatccaccttgcctcgcctcgcctcgccggatccagatctccaccgcctcgcctcgccgcgccgcgccgccaccaacccactcgccgtcgccgtcgccggcggcggatcggccccacatcacctcggcctccccgagcaaaccggcgggggacgcccccgggcaacgggcgggcgaagaggggcgcaatggagcagctgcggacgatcgggcgggagctggcgatggggtcgcagggagggtgggggcagtcgaaggagttcctcgaccttgtcaagtccatcggcgaggcgcggtccaaggcggaggaggaccggatcatctcgcgggagctggatcacctcaagcgccgcctcgccgaccccgacgtgccccgccggaagatgaaggagctcctcctccgcctcgtctacgccgagatgctcggccacgacgcctncttcggccacatccacgccgtcaagatgacccacgacgagtccctcccgctcaagcgcacgggcta

SEQ ID NO: 37417 - DNA, 492 bp, Oryza sativa
  Clone ID: uC-osrocyp009c06b1
ttcgctatatcgaagatgaagaagaagaagaagcgtggtggcggcggcgactacgactgggaggccgccttccgggagttcatcgctggcgacgacgacgacgacgacggtggtgtttccatgttcccttctggtgcagggacgatggagacgaccacagaggtggcgccggcggcggaggtggtggagaggccgcggcggtggctaatggtgaggcggagctacccgtaccgcggcgtccggcagcggccgtgggggcggtgggcgtctgagatccgcgaccccgtcaagggcgcccgcgtctggctcggtaccttcgacaccgccgtagaggccgcgcgcgcctacgacgacgaggcgcgccgcatccacggccacaaggaaaggaccaacttcccgaccgacgagccttcgctgccggtgccatcgcaggcgccgatctgctttctgctcgacgacgacgacgacgacgacggcgtggtccgtgaaaca

SEQ ID NO: 37418 - DNA, 536 bp, Oryza sativa
  Clone ID: uC-osrocyp009c07b1
ttactctctggtacggtgcaactgtcggtggcgtatcccaaagacatgtctgtgaacccgacgactcagaacaaggcgtaccactacagggggtacaacttcaccgtcagcatgttctggtcgccgttcctggtgaaggcgcgtgagcccgaccacgacgggtcggcgcacacgggccactggagcctgtacctcgacgagcccgaccagtcgtggatgttcgagatctcgcggatcgactacgtgctggtgtccgccggcaactggttctccaggccgtcgctcttctactagaagcgacggctggtcggctgcagcttctgcagcaggcagtacggggtgccggacctgacgctctactactcgcagcgcctgacgtggtgcgtggcgctgaaggcgatcaacgacctggagagcctccacggtcgggtgatcgtgcggatgctgtcgccgatgtcgcacttcgagaacgggacgtgggaccagggctgcaactgcaagcggacgcagccgttccggagcaacgagacggtgat

SEQ ID NO: 37419 - DNA, 513 bp, Oryza sativa
  unsure (1)..(513): unsure at all n locations
  Clone ID: uC-osrocyp009c08b1
tgttcgttgctatcatgtccctgcgactgcgtctcgccttccgtctactcttctgctactgccttctcctcgccgccgctcatccgtcgtcccgccgtctcctccccctgctcgtcgtctccggcgccgaacgcacgaacgtcgccagcctccctggcctagatggcgcgctcccttcccgcttcgaaaccgggtacgtgaccgtcgactaggagaacggcggcgagctgttctactacttcatcgagtcggagggcgaccccggcgccgaccccgtcctcctctggatcaacggcggcaaccgctgctccgtcctcagcgcgctcttcttcgagatcggtccggtgaagctggcgatagagccgtacgacggcggcgtgccgcggctgcggtacaacccctacacgtggaccaaggtcgccagcgtcctctttgtcgactcgccggtcggcgccggcttgtacttctcccgggaccccaggggtacgacgtaagagacgtctncttcacgct

SEQ ID NO: 37420 - DNA, 522 bp, Oryza sativa
  Clone ID: uC-osrocyp009c09b1
tcgtgtacgcgtgggtagggttttaggaggcaacacgccgccctgcgccgccgtcgccgccgccgccaccgccaccgccaccgtcagattctcctaagcggcgatggccatggcacggcgttccgcctcccgtctcctctcctcgttccgccccttctcgctcctccttcaaccgctcgatgacgccccttcgctctcggccgcggcggcagcagcgtcggcccgccgggggatgtcttcggcgtcggcgctgcgggcgcgggacgagaaggaggtggcgaggtggcgcgagtcgatggaccggatgcggaatatcggaatctccgcgcacatcgactccgggaagacgacgctgacggagcgcgttctgtactacaccggccggatccacgagatccatgaggtgcgtggccgcgacggcgtgggcgcaaagatggactccatggacctcgagcgcgagaagggcatcaccatccagtccgctgcaacctactgcacctggaatggataccaggttaatat

SEQ ID NO: 37421 - DNA, 367 bp, Oryza sativa
  Clone ID: uC-osrocyp009c10b1
ctttccgaccagtacgtttatccacctgcgactcatccgcgcgcgggaggaggttggatccggacgcccgcgtggcgagagcaggaccgagaaagtcaggaggagatcgacggtgtcgtcgacgacaacgcatcaaatctcgatcgggagacgaactgggggtcgacgacaccaagctgctgaggcgccaataaggccagaaggagatcaggatcctcagatccggacgaaacgcgctatgaagaaccaccatgctatacaagctcaagatgggacaaagcgacacgactatgcccaccatgaggctcaaagtcaaaacgggtgaagacaggaacatttgcttgaacctgggggatgttggtggtca

SEQ ID NO: 37422 - DNA, 536 bp, Oryza sativa
  unsure (1)..(536): unsure at all n locations
  Clone ID: uC-osrocyp009c11b1
tctacttggtttccctatcttggaatcatttaaatctcttttcgatgagttcctgaagagattgactgaccgagctgtagaaattcgtgtttctgtaattgagcatttgaaaaaatgtctgatgtcaaaccattcccgtcctgaagctcaagagattatcaaggcactttgtgacagattgttggattatgaggaaaatgtgagaaagcaagtggtagctgctatttgtgatgtagcttgccattcacttggtgcagtcccagttgaaactatcaaacaagttgcggagcgtgtccgtgataaatcagtttctgtgaagtgctataccatggagagattggctgacatctacaagttctattgccagagtggttctgatagctcagtaaattctgatgattctgagtggattgctggaaaaatattaagatgcctctatgacaaagattttagaccagagtcaattgaatcagttctatgtggntcattgttncaccagagtattcaacaaggaaagagtgaaacattgggtaact

SEQ ID NO: 37423 - DNA, 531 bp, Oryza sativa
  Clone ID: uC-osrocyp009c12b1
tcgttgacgcgtgggctcctacgattcgaaaccctagctcgtctctctctgcgctagattccatggcgacggcgggtagtaggaagggcgggaggggccggaaggcgctgacggcggtgctggacaacgacgctaacatatccgccgggaaggccgacgtggccgctgccgccgggatcctgtcgccgccgcagaaggcgaagagggcgacgtcgaagagcagcaaggggaaggccgaggctgcggcggcggcggaggaacaggcgtcggtggtggacgcggtgtcggagctgcaggggatgctggaggagctgcggctggagaaggagaaggcggaggatatggtgcaggagcgggacgaggtcatccgcaggaaggaggaggagcagggtcgcctacaggccgagctcaagaggtccagcgcgccaggaggtcaagcccaccgtgagcattccctcgagaaagcattgatcgagaaagaccaggagggagagatgaagagggcaagggcaaggcccgtcatgacaggaa

SEQ ID NO: 37424 - DNA, 301 bp, Oryza sativa
  Clone ID: uC-osrocyp009d02b1
ggccttggttttgttgcttgcgatggtcacactggagcatgcttcgatggtgagacactggcgcgtgctattcttagaagcgtcggtgttggttgtgactgtaccgacaacgttcatgaggagtttgacaggaagctgttactactgaaccacctgtggctacagatatattgtcggacactataaggggaacgtcagatatgttgctgattgatgtgacccggagcgcgatactgtcaggagtagctcctctattgggaagagctattacctggctgccggccgggtctgcagcatttga

SEQ ID NO: 37425 - DNA, 528 bp, Oryza sativa
  Clone ID: uC-osrocyp009d03b1
gtcgctggcgtactcgagagaaacatcagcatccatggcgggcaagggcgagggtccggccatcggcatcgaccttggcacgacctactcgtgcgtgggcgtttggcagcacgaccgcgtggagatcatcgccaacgaccagggcaaccgcaccaccccctcctacgtcggcttcaccgactccgagaggctcatcggagatgctgccaagaaccaggtcgccatgaaccccatcaacaccgtcttcgatgccaagcgtctcattggcaggaggtttagcgatgcttctgttcagagtgacattaagctctggcccttcaaggtgattgctggacctggtgacaagcctatgattgttgtccagtacaagggtgaggagaagcagtttgctgccgaagagatctcctccatggtcctcatcaagatgcgtgagattgctgaggcctaccttggcaccaccatcaagaatgccgttgtcactggtcctgcctacttcaatgactcccagaggcaggccaccaaggatgg

SEQ ID NO: 37426 - DNA, 528 bp, Oryza sativa
  Clone ID: uC-osrocyp009d06b1
tttgtttcgcacttgtagctctcgacccccgcatctcatccctcctctcgcttagttcagatcgaaatcgcaaatggcgaagattaagatcgggatcaatgggttcgggaggatcgggaggctcgtggccagggtggccctgcagagcgacgacgtcgagctcgtcgccgtcaacgaccccttcatcaccaccgactacatgacatacatgttcaagtatgacactgtgcacggccagtggaagcatcatgaggttaaggtgaaggactccaagacccttctcttcggtgagaaggaggtcaccgtgttcggctgcaggaaccctgaggagatcccatggggtgagactggcgctgagtttgctgtggagtccactggtgttttcactgacaaggacaaggccgctgctcacctgaagggtggtgctaagaaggtcgtcatctctgctcccagcacggatgcccccatgtttgttgttggtgtcaatgagaaggagtacaagcctgacatcgacattgtgtccaatgc

SEQ ID NO: 37427 - DNA, 519 bp, Oryza sativa
  Clone ID: uC-osrocyp009d07b1
tgtctttcattttttgccagatcctgatgatagtagcattgatccagccaacacagcagtatcgtctgagcaaactgtggataacgaagacgtggagttaccaactaaggaagttccgtctgtggatgttgaaactaaaaccgatgaaatcaaagcaaatgagtgaaggggcaggaaatctcatgggctaaaatggcatagttgaccagaacagttgttagtcagatcggtcagaaagacaagcaagcctcacctgctcatcaggcatggacatgtacgaagcaaactgctgtacaataaaaagagtgtactatttttgccatccattgtggtctatccctgtacaaaaatgatcaccatgatctaaccgcacgctcgtcatcgcaacatctgaaactggtcaaatatttgtttcaagttcgccttcagttcatgggaaaaataggttggtgccaaacgtcatttgacagttagtctctgtgtcgtgtcttgatatatggaaaagaacattctttggat

SEQ ID NO: 37428 - DNA, 507 bp, Oryza sativa
  unsure (1)..(507): unsure at all n locations
  Clone ID: uC-osrocyp009d08b1
tcgttaacagttgcaggctaatcctccctcccttcatatctcagtatgcaatgaggttgaatcttctcttggagagacatcaaaagctctggagtctaatgtgactggggcagaaaacattgactcaaatatatctgcagatgacattgattgggacatctctttggatgataatggaattgattgggacattggtgctgttgaacaacctgtagaagaatctggcaatggttttggatcgtatgaaattattgatgccaatgtagagttggcaggttctgaaaattataattttggtatttcagatgatccatctgtgaacaagtctagttcatctgagcctggtatttgctgggacatcactgatgttaatcctgaagaaaatgctagtatacagaatgcttctgaatcaggacagtctcaaagtttagctgaagaaagaagccagttactagagaaggaatatagaaataatattcttgatgatttacttgangtaagagcatt

SEQ ID NO: 37429 - DNA, 518 bp, Oryza sativa
  Clone ID: uC-osrocyp009d10b1
tcgtttctctactcctctaatctcaagtctctgtttcgtcgtgctcgcatctccactcgccatgggcaagagtaagatcggaatcaacggtttcggaaggatcgggaggctagtggccagggtggccctccagagcgaggatgccgagctagtagacggcaacgaccccttcatcaccaccgactacatgacctacatgttcaagtacgataccgtgcacggccaatggaagcacagtgacatcaagatcaaggacttcaagactctgctcttgggcagagaagccggtcaccgttttcggtatcaggaaccctgacgagattccgcgggctgaggctggtgctgagtatgtcgtggagtacaccggtgtcttaactgacaaagagaaggttgatgctcacttgaagggtggtgccaaaagggttgtcatctgtgccgcgagtcaagatgctccgatgtatgtctgcggtgttaaccaggacaagtacacttcagatattgatattgtctcaaatgct

SEQ ID NO: 37430 - DNA, 518 bp, Oryza sativa
  Clone ID: uC-osrocyp009d11b1
tcgttgcaattacacctcatgtacaacagttctttgatgcaaatccaaacctagaaaaggttgtggttccacttggcgggacaatctttggtacaatgatggcttggtttgtcatgcctatcgttttaaggaggattcacaagtattcgatacagagtcctatatcagcacttttggggagctcaacaaagaatgatgtctcgtatgaaactagcctctggagtgcattggaggatcctgcgaaataccttatcacatttatggcattttcagaaatggctggattcaccgcaccaagcatatcagcttatcttccacaggcatggaggggtgcaattgctctctcttttgtctggttccttcataggtggaaaacaaacttcatcactaaagttgctgcctcaagtattgatcaaaccaggttgtcagcatttgataagatctcgtcattaggactgattgcactaggagtaatggctcttgcataggctcgtagtgtagctgctcagtcaatacta

SEQ ID NO: 37431 - DNA, 466 bp, Oryza sativa
  unsure (1)..(466): unsure at all n locations
  Clone ID: uC-osrocyp009e02b1
cttctcctcgtgcccactaccttcaccgtagcaatggcgggcaacgggccgatcaacaaggaggacccgctcaactggggcgcggcggcggccgagatggccggcagccacctcgacgaggtgaagcgcatggtggcgcagttccgcgagccgctggtcaagatccagggcgccaccctccgcgtcggccaggtggccgccgtcgcccaggccaaggacgccgccggcgtcgccgtcgagctcgacgaggaggcccgcccccgcgtcaaggccagcagcgagtggatcctcaactgcatcgcccacggcggcgacatctacggcgtcaccaccggcttcggcggcaccttccaccgncgcaccaaggacggccccgccctccaagtcgagctcctcaggcatctcaacgccggaatcttcggcactggctccgatggccacacgctgccgtcggagacggtgcggg

SEQ ID NO: 37432 - DNA, 543 bp, Oryza sativa
  Clone ID: uC-osrocyp009e03b1
catactcccaatttctttttcttaagactccttgctgctgtgtatctctctcatcattttataatgacacaattgtgaactgcccaacatgctcttgtggctgccaaaacaatgggacaagtcctggaagctgtgtaaatgagaattcaccttatttacaatctgccattgatggccctggcaaatggaccggtcagcctcttgtccaatgtacttctcacatgtgcccgatcagaatccactggcatgtgaaactcaactataaggaatattggagagtgaagatcacgattacgaacttcaactaccgcatgaattacacacagtggaatttggtcgctcaacatactaacttcaataatatcacccagctgtttagcttcaactacaagccacttactccatatggaagcaagataaatgatactgcgatgttctggggagttaagttctataacgatttgctcatgcaagctggtccacttggaaatgcacagtcagaacttcttctgcgtaaggatttcaaggactttacctttgaca

SEQ ID NO: 37433 - DNA, 411 bp, Oryza sativa
  Clone ID: uC-osrocyp009e04b1
ctgacacacactttcgttttgttaacactacggcctggtgcgcttctctgttggatgtttctcatgacacatattgggaagtgcacagcatgctggttgtaggtgccaaaacaatgggacaagcactggaagctgcaccaataagaattcagcttatttacactactctatcgaccggcctggcgtatggatccatcagtctgtgggtcagaggactagtaacatgtacaacaacatgatgcactggcatgtgatacttaactttcatgcatattgcagagtggagacaacgattactgactgctactaccgtgtggattacacactgcggaacttggtcgctgaagacactacctccgataatataaccaagatgatcatcttcaactacaaggcacttactcaatatgg

SEQ ID NO: 37434 - DNA, 521 bp, Oryza sativa
  Clone ID: uC-osrocyp009e06b1
ttgcgtcgctactcccccctcgccgagagagctctagggtttccgctgccgaatttttttttaattcggggggagagatttgaagaggcggcaccatgttggtctaccaggatctgcttaccggtgacgagctcctgtcggattcgttcccctacagagagatcgagaacggcatcctctgggaagtcgatggcaagtgggtcgttcaaggagctattgatgtggacattggtgccaacccatctgctgagggtggtggtgatgatgagggtgtttgatgaccaagctgtgaaggtggtcgacattgtggacaccttccgtcttcaggagcaacctccttttgacaagaagcagcttgtgaccttcatgaagcgctacatcaagaacctctccgccagctggatgcggaaaagcaagaggaattcaagaagaacattgagggtgccaccaagtacttgcttggaaagctcaaggaccttcagttttttgttggtgagagcatgcatgatgatggccgcttg

SEQ ID NO: 37435 - DNA, 523 bp, Oryza sativa
  Clone ID: uC-osrocyp009e07b1
tcgtttgattcactcaccagggcaggcaacactaatcccaaggctttgttatcaactgcggatgaagaatcatcttcccatttatttggcactgatttgcctgtcactaacaatgttagccagttagtatctcagtcccagctgaataaacttttgcccattgatgaaagcaggtcggatgacaaactgaccaaagatagcagtggtaatagggacacaagcaatttgcaaactgagaatattatatctgaaggtggcaggtcatcgatttctgaagacttggaagtgccatcttcaagctcgcacgcttctgagccttcatcatctggtcaagcaaagaaatcctcagaaagtctacctgcagattcttctttctctagaaaagttccttcttcgggggaatatgtgaatttctcccaaagaccttgtagttctacatcatcaacatctgagcgcattgctgcaaactcagttgcatgtgctccaggcttgtccccgagctcttcaatgggttctcttagct

SEQ ID NO: 37436 - DNA, 251 bp, Oryza sativa
  Clone ID: uC-osrocyp009e10b1
tgtgcgggggcggtgacgaccacgacggtgaggatgcatgcctgcatcgagccgcaggagggcgaggtcgggggcggaggtgcgatgatgggcgttgtgggccgcagacgccagtacgtgctccgatcgattcgtgacccaaactacaccgtatgctatcgtgaccgcatggagagcgagtgcattgacataacaaggtcgaggagatctaggttggagtgagcgctgaggaagggccagcttgcaggacg

SEQ ID NO: 37437 - DNA, 523 bp, Oryza sativa
  Clone ID: uC-osrocyp009e11b1
tcgttcgcataaataaaagctcgcaccaccgccacaatccctgctcctgcccagcccatcggttcccccctccacccgtctcctccgtctccggcgccggcgccggcgagctcgccccccgcgattcgtgccctccgatcagaggcgaggcgggagaagagatggggctcacgttcaccaagctgttcagccggctcttcgccaagaaggagatgcggatcctgatggtgggtcttgacgcggtcggaacgaccacaatcctctacatgctcaagctcggcgagatcgtcaccaccatccccaccatcggattcaatgttgaaaccgtggagtacaagaacatcatcttcaccgtgtgggatgtggggggtcaggacaagatcaggcctctgtggaggcattatatgcagagcacccagggtctcatctttgttgtggacagcaatgatagggaccgtgttgtcgaagccagagatgagctccacaggatgctgaacgaggatgagctacgtgatgctgagct

SEQ ID NO: 37438 - DNA, 359 bp, Oryza sativa
  Clone ID: uC-osrocyp009f01b1
gtcttctccgatcgcggcggaatggacggcggcgcggccacgaacgcatctggagtcgccgcggcggcagcggcggcggggaacggcgtgcaggcggtgggcggtggcgagagggcggaggacgcgtcgaagcagaacctggcgctgatgatggcctcgatccagaggacgctggggctcctccaccagctcaacctcaacgtctcctccttcagctccgcctcccagctacccctcctccagcgcctgaactcgctggtggcggagctcgacacgatgcagaagcacgccgagggatgcaacatccaggtccccatggaggtcgtcaatttgatcgatgacgggaagaatcctgacga

SEQ ID NO: 37439 - DNA, 349 bp, Oryza sativa
  Clone ID: uC-osrocyp009f02b1
caccaacacacccaccttctcctcctcttcgtcttcccccaattcaagaagcggaggagagagcgcggcgggggtggagagaaggttctagattgttctggaggtggagggatgtgggggcggcagtactggggcggcggccggcggccgagcggcggcagcggcggggtggtggtgatgttcgcgtggctgtcgagccaggagcggcaggtgcgggcgtacgtggagctgtacgcggcgctcgggtgggcgtgctctagtatgccactccgagttactcaccctgcatatatctgctaaggctgccatgcttgctgatcgggtgcttgcagaactagataaagaactg

SEQ ID NO: 37440 - DNA, 545 bp, Oryza sativa
  Clone ID: uC-osrocyp009f03b1
atcgatcaccaggttactgtagtagtacagatcggagcgagcgatcgatcgatcgaggaagaagaagaggtagaggttgtagatggctgtgtcggctggcggcggcggcggcgcggcggggcagttcggcgacacgacgctgacgaaggtgttcgtggggggactcgcgtgggagacgcagaaggaggggatgcggggatacttcgagcagttcggcgatatcctcgaggccgtcgtcatcaccgacaagaacaccggcagatccaagggctacggatttgttacattccgcgagccggaggctgctatgaaagcttgctttgatccgtacccggtgatcgatgggaggagggccaactgcaatcttgcatatcttggggtccagagatccaaggcagctgcagcgtctctgcaaccttatgcttggcatatgagggcaatgaagtccattatccagacaggcgggtggtggtgccagcttgagcatggcagatcatggcatccagcaggggatcccgacctacaatgtgtatgggtactcacct

SEQ ID NO: 37441 - DNA, 512 bp, Oryza sativa
  Clone ID: uC-osrocyp009f04b1
ctagatcgcgagcggtgttcttttttttttttttttttttttacagcaaggtcaccattcactcttggataccgaaatacacagattaaacttgtttcgacatctcatgcatccttacagataaaatactatctggtagcgattacaaaagttattttcaatcacttccacgcagctttggatcaagaggtgcacaaaactcttgtcctggttccttagaaacaaatatatattgtaatccaggtgcatatactcttcgacctgaaagaaaccacaggtcacaaaaaaaggccgccatggatcattcatttctttgaggaacggaagcctccgaaacccatcatggcagcaacatcagggtctatgtcctcctcaggttcattctgggcagccagctctttctttttctctgtcttcttttctttgcgttggcgcttcctctcctcatcctcttgctgctgtttcaatattctctcatgcaaatcttggtcactaaagctacctgggtcttt

SEQ ID NO: 37442 - DNA, 528 bp, Oryza sativa
  unsure (1)..(528): unsure at all n locations
  Clone ID: uC-osrocyp009f05b1
tttcctgcaaccgcttctgtaggagaggcagcgccgcgggcagccggccggagatggccggcgccggcgccggcgagagcctggacctccccgtggtggacctagcgtcctccgacctcgccgccgccgccaaatccgtccgaaaggcttgcgtggagtacggattcttctacgtggtcaaccatggagccgagggattggcggagaaggtgttcggggagagcagcaagtttttcgagcagccgctgggggagaagatggcgctgctgaggaacagaaactacctggggtacaccccgcttggcgccgataagctcgacgcctcgtccaaattcaaaggagatctcaatgaaaattactgtatcggacctatcagaaaagaaggttatcagaatgatgctaaccaatggccttctgaagagaatttcccatgttggaaggagacaatgaagctataccatgaaactgcacttgctactggtaaaaggatactctctctaatngctctgagtttgaatctcgacgttg

SEQ ID NO: 37443 - DNA, 513 bp, Oryza sativa
  Clone ID: uC-osrocyp009f06b1
ttccattatcgcggcaagctagcctcgagggaggcccgcctgcccgggcctcgggctccgggggcccggttcttgaggtttcttggtcgtggggtcgaggaggtggtgggtggtggtggctgcggcttggcgcgatgaacaaccacgcggcgggcgggagcacgagcaacggcggatccggggtcgacggggatggcggcggcggtggcggcgcggccaggaggaacaccaagatgcccaagtattccaagttcacgcagcaagagctgccggcttgtaaaccaattctaactccaaaatgggttgtatcggtgtttttccttgtcggcgtcatcttcgtaccagttggtgttgtttcgctgctagctgcacaaaatgttgttgagatagttgatcggtatgatgatgcatgcgtgccagccaacatgactgataacaagcttgcttacatgcaaaacccaaacatatccaaagagtgcacaaggactctgacaattacagaggatatgaatc

SEQ ID NO: 37444 - DNA, 428 bp, Oryza sativa
  Clone ID: uC-osrocyp009f07b1
cttgggtttacctccgcgccgccgcatcctccttcgcaagcctcgcctccactccccgcgccggcgccgccgtcgccgactcgccggacgtcaccctcgccccgcagccatggctgagcagactgagaaggctttcctgaagcagccaaaggttttcctcagctcaaagaagtctggcaagggtaagaagccaggcaagggtggcaaccgcttctggaagagcattggccttggcttcaagacccccagggaagcaattgaagggacatacattgacaagaagtgcccattcactggaactgtttctatcagaggcagaatcattgctggaacatgccacagtgcccagatgaacagaactatcattgttcgcaggactaccctcattttgcaagatatatcacaggtttgagaagagcattcaacat

SEQ ID NO: 37445 - DNA, 522 bp, Oryza sativa
  Clone ID: uC-osrocyp009f09b1
tcgttgcatcgtaaggatgggttggctctaacatagaccctactgtgccaccagagcaggtgacatatgctgttctcccacaagttggttattttgagttcattcctttggagaaaccaataggggaggagacagaaaactccgcctccattcattacatagaatcagatccagttggcttgactgaagttgaggtcggcaaaatctatgaagttgtaataactaactttgcaggtctatatcggtacaggctaggagatgtcgtgaagatagcacgcttccacaactccacacctgagctccaattcatctgtcgcagaagcctagtgctgagcatcaacatcgacaagaacaccgagaaagacctccagttggctgttgaggaggcatcaaagttcctggaaggagagaagctcgaagtcatggatttcacgagcttcgtggaacgatcaagcgatccagggcgctacgtgatcttctgggagctgagtggcgatgcgagtgatgaggtcttgagcagct

SEQ ID NO: 37446 - DNA, 518 bp, Oryza sativa
  Clone ID: uC-osrocyp009f10b1
gttatcgaccccttgcttccgccctttttttttttttattttttttttttttttttttttttcgaagaatcaactggggggctgtaataagccctgttcattgtatacttgctgtacattgcaaaagtttcagtatatatgccgggtttttgtgacatcttattattaccaaacattacagtcacatctcactgtatttctcgccagaaccccaatcttcaggttccggtgggaaatcaattcaccttgttgtcatccttcagtatttttactgtttggattctgtcttcctacatatatgcacatcagcacacatgcaactttaattagccttcgactaaatttagatgtctcaatcacaggctcacagccccaacagaatatattaaacaattgccacaggaagtgatataaatatcccaagaataacccctgtgctcatgatgtttgcgtgcaccttgtactcttcagcgtacacaaatgatgtcactgccagggggagagccgcctgcacaaca

SEQ ID NO: 37447 - DNA, 468 bp, Oryza sativa
  Clone ID: uC-osrocyp009f11b1
tcgttcaaggtgagcgacgaccaggtcgccttgctcacccagggcgacgccaacgacaagaagaacgtgctctcgctctggttcgacggcctcaagctcctcatcgtcaccgacggcgagaagggatgcaggtacttcaccaaggacttcaagggctccgtacccggcttctccgtcaacaccgtcgacaccaccggcgccggcgacgccttcgtcggctccctcctcgtcaacgtacgccaaggacgactgcatcttccacaacgaggagaagctgagggaggcgctcaagttctcgaacgcgtgcggagccatctgcaccaccaagaagggtgccatcccggcgctgcccaccgtagccgtcgcgcaggagctcatcagcaaggcacccaactagagctcctcggtttctgcgtcgatcgccgccattgggggcctccgaatctaggtcgacttaatttagatgct

SEQ ID NO: 37448 - DNA, 528 bp, Oryza sativa
  Clone ID: uC-osrocyp009f12b1
tcgttgacgcgtgggcggacgcgtgggcggacgcgtgggcggacgcgtgggcaaatccccctcctttttcttggtgctgctgctgctgcacgaagccacgagcgcctcgccacctcgggatcgcctccaagatccgattttgatcgccccgccgccgacgaattcgtcgagacccgccctcgccgtacctgcccaacggtgctcgatttggttgtagccttctggttctggtacttggctccatggacctatctttgatcttattatgattcttattacggttttaatcttctatatatatcggttgtggcttgtaattaggggaatagggggatcgtattagaacagtgaaagtttggaaaaattttccatggtttgtgtgtgcttaccaatcaaggaggcagttggaggcaagcctgttgttttcttgattggacactaaaagccggttcttgcttttaactgtgttggagttttattaaggatgttttctgttggtatttaatgaagtcgatttggtattcaaca

SEQ ID NO: 37449 - DNA, 419 bp, Oryza sativa
  Clone ID: uC-osrocyp009g01b1
gtgtgcctgatgctggtggtactacatgcggccagcatgtggagaaggttattgaaactgagcacactgacattcttcgtgttccatgcaggagtgagaatggtatccacctcatgtggatctaccgttttgatgtctgaccattcctggaaacatacactgatgatgttgcaaactaaataattagggaaatgcacggcggacctgatctaatcattgacttgaactgatatgtaaaccttggaaaagaaatcatggctcaagattacgagttacatagaattccagggttcaatccttgctgattatgggttacgagctctgatacatatagtgtgacagaagagacggtacaacacagttgagatggttcgctacatcacaagggatggatcatatgagataaggtgttagcgatg

SEQ ID NO: 37450 - DNA, 282 bp, Oryza sativa
  Clone ID: uC-osrocyp009g02b1
ccgtttggttccggacgtcagatgtgatcaccaaggcagagtacgctgctttctacaggagcttgacagacgactgggacgaacatctggctgccaagcgcttctctgtggagggccagctagaattcaaggccatcctgcttgtaccaaagagagcgccgtattatacgactcccgccacgaagaatcaagccaacgtcgaactgcacctacccgcgtgtgtgtatcatggacaactgcgaggagttgatcccagaatggctcacatttgtaaagggcatt

SEQ ID NO: 37451 - DNA, 311 bp, Oryza sativa
  Clone ID: uC-osrocyp009g03b1
gttgattttaacgtccaaagtggatttgagtttgaagatttatatttgagagctcaagaagagataccaatggctttgttatctgtgaatcaagtcatattgcaccaagattttggtgaagttgatttagtatttaaaaggagttttgatggtgtacctcattatcttatcattgaagtaaagcattcttattgcccaaatgtgcggcgtagaggccgaattcaattgaggagagttgcccaagctcttaattttttacaacctcgtgcaccattgttggctgttttatatacgccttatgggtatgagat

SEQ ID NO: 37452 - DNA, 510 bp, Oryza sativa
  Clone ID: uC-osrocyp009g04b1
ctagttctagatcgcgtgcggttgcccttttttttttttttttttttttttttttttttaagccaagaacgaatgtgtcatcatcatctaaataaaattgacagtaaattacatcagtagcatcatgaaaagatcatgtcttgtatgaaaccaaaaccaaatcgaaagaacagtacaacagtctggataatcacagctatggctacaagcaatgaaatggccgtaccaaaagctgcctgtccattcagggaaatggagaacgaatcattgatgagaagatgagaagatgatgccaaatgcccaattacactaacactgatggtgatgtaaaaaaaataaatgtaaggtgtaattacaggtgcagcaccgccatggatttcagcttgctggacatggcgtaggtgtccgcggcggcttttttccgcgcgagccggctccaccggtggtcgttggtgtccgagacccggcacgccgtcacgaagtcgagcaccttgccgaagaccctgaaca

SEQ ID NO: 37453 - DNA, 468 bp, Oryza sativa
  Clone ID: uC-osrocyp009g07b1
tcggtgtgtagcaattaactgaaactcaaatcgtcgaccgctaattaactgaggtattcagacaaagaataacaggcatcatgcaacggtggacgcgcaacgggatgctgaacttctcgcagccggcgtcgtcgtcgccgttcggattctacgacgccggccacggggcgtcgagcagcggcggcagccggtcgcacggctgcaggagccagaacaaggaccagcgcaacctggagaagaacctgaccaaggtgaggaaggagtggatgaaggtgaaggaggagatgggctacgcgaggctcctcagcgagcacctcagcgagacggtgacggagaccgaccggaaggtggctgccatgctcgaggagctcgaccggacggacaagtacatgcaggatatactgtcgtcccagcagaaatagtagtgacccatgacatcagatattcagatgcgtattttgatggatt

SEQ ID NO: 37454 - DNA, 504 bp, Oryza sativa
  unsure (1)..(504): unsure at all n locations
  Clone ID: uC-osrocyp009g08b1
gttgattttaacgtacaaagtgggtaggcgtctgtggtccatcgccgaggcccgctacctgaaccgcaccctggttctcgatctcggcgtctgtgtcgtcgtcgcctacgacgggggcatgcccgaggagggcaagcgcctcgccttctatattgacattgagcacctgcaatccgtggtcgggatcgttgaacacaagcggttctgggaggattgggacaagtggggagcacagggtcagcttggagtccgcatcatcgaggacagcagggttgcgcccaccaagttctccaagtcgagggatcccctgatcgttaggaaatttggggacgtggagccagggaattattggtacaatgtgtgcgagggcgaagctgagcatgtactgcgtccaccgcanggagcaatacgcacggcgccaagcttgatggacattgatgatggtatcatatcacggatgcaagtagattttgactctgttatgttggtggaatgatgggaacc

SEQ ID NO: 37455 - DNA, 359 bp, Oryza sativa
  Clone ID: uC-osrocyp009g09b1
ttctgctaactccgacctctcgacagaggtgcgtgctccaatgccttcccccctacaaccgtagccgaattccgcctccaccgcgatccgctcgtgccgcgctccaatgagggccttcatccgctctttgcagattttgcgattgttttatggggtgcaaccaggatgggcgagccgcttgttaaggatcggaagtccaacggggcgggggtttgggtggtggatcggaccgccaggtggccgggagggttggccctggtggtttcggggtttggtttcacccgacgcacgtggagaatcggaagacctgggagaggttagggctagggttatggggagcacggaggagcccgaccgga

SEQ ID NO: 37456 - DNA, 525 bp, Oryza sativa
  Clone ID: uC-osrocyp009g10b1
atggattttaagtttgtgtggtgtgtcatccatggcggacatggtgaagttcaccatggagtggcttcaggatcctctgagcctggcgatcgtcgtcacggtggccgtcctaatcatgcggatgcagcggcggcgcgcggcgccgttcccgccggggccgaagccgctgccgatcgtcggcaacatggcgatgatggaccagctgacgcaccgcggcctggcagcgctggcgaaggagtacggcggcctgatgcacctccggctcggccggctccacgcgttcgccgtgtcgacgccggagtacgcgcgcgaggtgctccaggcgcaggacggcgcgttctcgaacaggccggcgaccacggcgatcgcctacctcacctacgaccgcgcggacatggcgttcgcgcactacgggcccttctggcgccagatgaggaagctgtgcgtggtgaagctcttcagccggcgccgcgccgagacgtggctcgacgtgcgcgacgagtccgcggcgctcgtgcgcgccgt

SEQ ID NO: 37457 - DNA, 536 bp, Oryza sativa
  Clone ID: uC-osrocyp009g12b1
aaaacccaagctttgcttctgcgccggccggcccaccacctgcggtccatctcggccgccgccgctgtcgctgtcgcgatcgcgatccccgcctagatagactttcccaagaacccgccgccgccgctgcaggggtggcgtggcatcctggtagaccagctcgagccttcaggctcttttgcgccgtcgccgccgccgacggtcgatccgtgttcttggctcaagcggcgtcaatggcggcggcgaatgggagcgcctgccgcggaggcggcgtggacaaggagaaggaggagttcaagcacatctacagtgtgctcaaggaggatctgctcagggaccccgccttcgagttcaccgactcgtcgcggcagtggatcgatcgcatgttggactacaatgtacctggagggaagtgcaatcgtggtctctctgtggtcgatagctataagccgctgaagggcaccaatgttctaagacaggatgacatgtttctcgcgagcactctttgctggtgcgtagaatggcttcaagcttac

SEQ ID NO: 37458 - DNA, 322 bp, Oryza sativa
  unsure (1)..(322): unsure at all n locations
  Clone ID: uC-osrocyp009h01b1
gttagcgccatttacagaggattgctcgggttctataggtgaggctggaggcgcagcttcaccgtggacgcgtgatggcgccatggcctgcagagctgatggtacattgccagcttgcgcgccgccaggcaaggaggctgctttcgtgatagcatcgccagcactgcgccgagcccggctgtccctggctactggactgggctcaccacgaatccttgggccgtatcctgtcgatgcngcgcgttgaggaagataacctgctgatctgcatcgaccggaaggccaccttcaagagcagcgacgacgccggcagcgccaacta

SEQ ID NO: 37459 - DNA, 506 bp, Oryza sativa
  Clone ID: uC-osrocyp009h04b1
tttgttttgatgtttgatgtgctctattgtctttatcaaggcagaagatgagtttaaagttacaacacctatcccataaaggaatcaccgaggtgatcaaaatctttcttgtttgttactcttggaagattggaagaatcatcatcagattgggctgtgaagatcttcgatttaaataatggtgcaaaagtttactcaagaataaaggctgagatgctcttcaagtgataacaataattgttttggacttggaagacaatgtgacagctgcttgctatgcataaaacagagtgtcttattcaatataattggacgaaattaccctctctgaagttattggaagcgacgttgacttgtgacagcttcagatccttacaaatggacagcaatcatggatttctgttgagtcatgtggaatattatcttcattttgccaagtgcgtaagcaaaatgaatggttatcagttgcagttcattctagtatccatatgaccacagtttgatgc

SEQ ID NO: 37460 - DNA, 519 bp, Oryza sativa
  Clone ID: uC-osrocyp009h09b1
ttctgcctgatgctgttggtactacatgcggccagcgtgtggagaaggttattggaactgagcacactgacattcttcgtgttccattcaggagtgagaatggtatcctccgcaagtggatctcccgttttgatgtctggccattcctggaaacatacactgaggatgttgcaaacgaaattatgagggaaatgcaagccaaacctgatctcatcattggcaattacagtgatggaaaccttgtcgccactctgctggctcacaaattaggagttacccagggtaccattgctcatgccttggagaaaaccaaataccccaactcagacatatactgggacaagtttgacagccagtaccacttctcatgccaattcactgctgatcttatcgccatgaatcacactgatttcatcatcaccagtacattccaagatattgctggaagcaaggacactgtggcgcagtatgaatcacacattgcatttcacccttctgggctttaccgagttgtgcatg

SEQ ID NO: 37461 - DNA, 400 bp, Oryza sativa
  Clone ID: uC-osrocyp009h10b1
tcgttcgaagacacggacgcgacggcgggggcggagcgcggcgcgacccagaggcgacggctacggcgacggcgacggcatagctctcttctccggccgccaccttctctccagttccatgaaatcgactggtagggaaattccagataatttattcgatggtagtaattgtctgaagttcctgaagatttattgcttcagacagcatgacgaaagtcagggcatcattatagtgtctcctgctgctcagctcattccactcataaacctgtttagtttgtgatgtatctgagttacaaaaaatgtgtttaaactgagtgctcccacacagtgaaatgtgtgatatttgatactgtcgaaaacaacacctacctgaacaacgacgcgcacctacattagg

SEQ ID NO: 37462 - DNA, 412 bp, Oryza sativa
  Clone ID: uC-osrocyp009h11b1
tcggtcttcgacgccgaggggagagagagagaggccgcctggacgaacataccactgactggctcccactcgccagagcgccccgattgcggtcgggtttgatcgatggcattcatgcggatcctgatggagttgcaggacctgcgtaaggaccgtccaacatcatgcatcgcaggacatgcggttgaagacatgtttcattgacaagctactattattggaccatcatacaaagcactagctggtcgggtattctatgagaacattcattttccaccggattatccttttaaaccaccgaaggtctgtttccgtaccaagggtctccacccgatcattaatagaaatggcagcatgtgcctcgacatactcaatgaacagtgaagtcctctacttaccatatcaaaggttc

SEQ ID NO: 37463 - DNA, 514 bp, Oryza sativa
  unsure (1)..(514): unsure at all n locations
  Clone ID: uC-osrocyp009h12b1
ctgagcaatgcgttcgttatgtgttactgcggagcgcatatcgcgtgcacgtgcgcgtgcacggtgagagagaatactagttatgctttgcccaaagggaccggaacagtctagtctgtagctacctagcttcggctatttcaagtgcctgctgagcttattccggatcaatcttagcagctgatcctacttagaatgaagccacattaagcttaatgtagactgagacagtaacaagatgctcatttgaaaggaatggttatatggaagaatttgagtatttggcagtagcatgtatacacactgttctggtggttccagcacatgccatcatatcattatttacttgttttcccaaacaggctgatgttgatggaaatggaaccattgactatgctgagttcatatcagcgacaatgcacatgaacagattggagaatgaagaccacatacttaaagcatntgagtattttgataaggaccacagcgggtacataacagtttatgagttgga

SEQ ID NO: 37464 - DNA, 298 bp, Oryza sativa
  Clone ID: uC-osrocyp010a04b1
ttcatttaatacctgaaggtgcatgcattggtttgtattttataaacagacctgagtggatcatagttgatcatgcctgtgcagcatattcattcgagtctgtgccactttatgacactcttggtccagatgcaggtcagttcattgtcaaccatgcgacagtagaagctattttctgtgtgcctcaaacactaagcactctgttaagctttataactcaaatgccatgtgttcgccttatagtggtaattggtggagacaatgcaaatatgccatctaccccaacatttactggagt

SEQ ID NO: 37465 - DNA, 426 bp, Oryza sativa
  Clone ID: uC-osrocyp010a06b1
ctctcttccccacctcttcgttcctccgcctccgcctccgccatggaggtgttctactacctcgtcttcggcgggctcgccgccgtcgtggcggggctggagctcggcaagtccggcaaggaccgcgtcgccaccaccccggccttcaacgcgttcaagaacaactacatcctcgtctactcgctcatgatgtctggggattggctgcaggggccgtacgtgtactacctctacagccagtacggcttctacaagggtgacattggccgcctcttcatcgccggctttcggctcctcgatgctcttcggcaccatcgtcggatccctcgccgataagcaggggaggaagagggcgtgcattacctactgcatcagctacatcctgagctgcatcacgaagcactcgcctgagtacaagatcctgat

SEQ ID NO: 37466 - DNA, 338 bp, Oryza sativa
  Clone ID: uC-osrocyp010a08b1
tcgttaaacacgacgaacacgttaaaaaaaggtcgaagagaagtgggagacccaaaccgcgaacaatgtgtggaggcgccatcctcgccgagttcatcccggcgccgtcgcgcgccgcggcggcgaccaagcgggtgaccgccagccacctgtggccggccggctccaagaacgccgcccgcggcaagagcaagagcaagaggcagcagaggagcttcgccgacgtcgacgacttcgaggccgccttcgagcagttcgacgatgactccgacttcgacgacgcggaggaagaagacgaaggacacttcgtgttcgcgtccaaatctcgtgtcgtcgcc

SEQ ID NO: 37467 - DNA, 526 bp, Oryza sativa
  Clone ID: uC-osrocyp010a09b1
tcttcagaggctgcctcacgcatccctgtcgatctcggtcaagaatggggttgctgatgaggcccgtcgccttgctcatctactgcaccaccgcctccctcttcttcctcacctcctcctcctccgccgccatcgccggtggcacgccggacggctcggaggagtggggctatgtccaagtacgcccgaaggcgcacatgttctggtggttgtaccggagcccgcagcgcgtgaacaacaagggcagcacgccatggccgaccgtgctctggctccagggaggcccgggcgcttcgggcgtgggttatggcaacttcatggagatcgggccgctggacaccaaccttaaaccccgcccatccacctggctctccaaggccgacctcctcttcgtccgaatactatgatttgcttaatttcgatctcattatcttaaacaaattttctggagagagagagatagagatagagatagagatagagtagttgtaggttggtgaaggatgaattgaatggtgcaatgaga

SEQ ID NO: 37468 - DNA, 449 bp, Oryza sativa
  Clone ID: uC-osrocyp010a10b1
tcgttcaggttctgaatggaagtccttgaaggtccaatgggatgaagtcacaaatgttaatggccctgagagggtttccccttgggaaattgaaacatgtgatggcactgcacctgccatcaatgtacccctgcagtcagcaacgaaaaacaagcggcctagggagccaagtgaaactattgaccttcaatcactggaaccagctcaagagttttggctatctggaatgccacaacagcatgagaagacaggtattggttccagtgaacctaattgtatctctggacatcaagttgtttggccaggcgagcatccaggatatggtgccgtgagttagttcagtttgtcagaatccgctagtacttgaaagttggttgaaggatttcaactcttcaaacaagggtgtctcccctaccttgtagagatttcttaaaaaatttttcaggtta

SEQ ID NO: 37469 - DNA, 436 bp, Oryza sativa
  Clone ID: uC-osrocyp010b01b1
ttccttctctctgccgccgccgtcgccgccgcttgccccgtactcctcctcttcagcggcgatgaagggacggcaaggccagcgcgtgaggctgtacgtccgcggcaccatcctcggctacaagaggtcgaagtcgaaccagtacgagaacacgtcgctgctgcagatcgagggggtgaacaccaaggaggaggttgggtggtacgccgggaagcgcatcgcctacgtctacaaggccaagacgaagagcaacgactccaccatccgctgcatctggggcaaggtcacccgcccgcacggcaactccggcgtcgtccgcgccaagttccggtccaacctcccgcccaccttcatgggcaagaaggtccgcgtcttcatgtaccccagcagcatctaaaagcaaccaaggttcttgcctatgctgcgaaactgatag

SEQ ID NO: 37470 - DNA, 504 bp, Oryza sativa
  Clone ID: uC-osrocyp010b02b1
ttaaccctctccgactctccccttctcccactcttctccggcggcggcggcggcggcggcgggagcgcatcggagatgatcatcccggtgcggtgcttcacctgcgggaaggtgattgggaacaagtgggatctgtacctggatctcctccaggctgactacacagagggggatgctctggatgcattgggtttggtccgttactgctgccggcgaatgctcatgacccatgttgacctcatcgagaagttactcaactacaacacgctggagaagaccgagacagcaggttaagttgacccagcatgctccagaactcttgttccttattgcctttgttcacgaatgttccaaggaatttgtgtgatgatccatgctgcatttcaactatgtaactgttaccgtgatgcagatgatggaagtgatataacttgtgggcagagtacctctggttgtgtgtgaactttgtttcaagacttttatttcaaggggggtatgttcctg

SEQ ID NO: 37471 - DNA, 499 bp, Oryza sativa
  Clone ID: uC-osrocyp010b03b1
cgcgccgccgccgccgccgagcgcctggagcagcgtcagccatggccgtaggtaagaacaagcgcatctccaaggggaagaagggatccaagaagaagaccgtcgatccctttgctaagaaggactggtatgatatcaaggccccgtcggtgttcaatgtgcggaacatcggcaagaccctcgtgtccaggacacagggtacaaagattgcttctgagggcctaaagcatagagtgtttgaggtctccttagctgatctccagaacgatgaggatcaggcgtacaggaagatcagacttcgtgctgaggatgtgcaagggaagaacgtgctcaccaacttttggggcatgtcgtttactaccgataagctcagatcacttgttaagaagtggcagacactgttgaggctcatgtggatgtcaaaaccacagaccgctacatgctgcgtctggtctgtttcggctttaccaagcggggcctaaccaggtgaagaggactt

SEQ ID NO: 37472 - DNA, 277 bp, Oryza sativa
  Clone ID: uC-osrocyp010b06b1
ttcatatccgggtactctccatttgagcaagctgctcttgtgcttaatgcctcacgccgcttcagatatactctagaccttaaaaaggaggaagagaaagagatgataagaagaaaaatccgagcacatgcacaagtgatacgggcagcatttcttttcaaagaagctggggaaaaagatctcagagaagcttatactggtataaaacttgaaacggcctctcgcagttttccaattgaactggaaaagcttacagcattgaatagggatcatgata

SEQ ID NO: 37473 - DNA, 241 bp, Oryza sativa
  Clone ID: uC-osrocyp010b08b1
tggtgtgtaaaatattgaaataaataatagtagcaaagtcacaaggattcaagatccacacgcacattttcacatactttacacaggctctttgcatgcttgcattacatctttccagttgaagttcaaaagcatgcaaggtacattgtcttctgttccacatgctagtcttacagtgaatcgtgaaacaccttatggtattgtgcatcagttcacactttatcacatgctcaatcattca

SEQ ID NO: 37474 - DNA, 403 bp, Oryza sativa
  Clone ID: uC-osrocyp010b11b1
tcggtctattttagatggtgtggtggagtcatgggaaaatacgcagctggtggagaattgaagcctccaacaactgcttacagccgaggatctgggaagcacccacaacttatgccatccacgcccagatgggctgttgccaatggagctggagttatactaagtgtctgtgatgaggaagtagctcgttatgagacagcaaatttgactgcggcagctgttcctgcacttctattacctccaccgaccacaccattggacgaacatttggttgcggggctccctcctcttgaaccatatgctcgcttgtttcatagatactatgcaattgctactccaagtgctacccaaaggttgctttttggtcttctcgaggcaccaccatcatgggccccagatgcac

SEQ ID NO: 37475 - DNA, 466 bp, Oryza sativa
  unsure (1)..(466): unsure at all n locations
  Clone ID: uC-osrocyp010b12b1
tcgtgttctagatttggttaccttgcgtccttgccttttattcatcagtgcaattagggccaagcttttgcgtggccttgtcagagagatgaaaaagtacatatgcagtgcatcacttataattggttgtgcaacctcctcatccgcatgctaagtacaatgagttgaagatgatgtgctgcaagattgacatattgttttccaaaggaacataatagatcgggcagtttctgtgagctggatcagtacgggcatatgtgctaactgcctcctatgcagttgtgctttgcacaacgaagtgagtgtggttcatctttagagccatgttcaaagagagtntgggtgttgatcaattgtgagaaaatcatgtgtagaaatgccttgggatggtgtctaaatagggcaattgattcatctccgtgaatgctgcacaaatattttttgttgactttatggtgaacatgca

SEQ ID NO: 37476 - DNA, 409 bp, Oryza sativa
  Clone ID: uC-osrocyp010c01b1
agcttaaaccaaatccttgttggcattgatactttagacaaactggtagtagtacattaacccatgaaaatactagaatgagctatacatagaggacctttacttaagtagttctagcttacattgcatgcttgaggcttcaaccttaatgctgggtacttgagtacattaattactactgattgttaatgtgattatgctaactgatttttgaagcgagtgattatgctaattgctaattaaagtgagggactactgttcagtgtgttcatcagtgctggctttgtgtgatcaaacgaggagaggcttttactccgccatggccttcttcttgctcttcggccggagctccagcagcagtttcacgactgacctgattgacgggcggttatcgggaggctggacgcgc

SEQ ID NO: 37477 - DNA, 532 bp, Oryza sativa
  unsure (1)..(532): unsure at all n locations
  Clone ID: uC-osrocyp010c02b1
cactaccttctcctccttctcttcttcagtatcgaatcctctcttctcctcgtgcccaccaccaccaccgtagcaatggcgggcaacgggccgatcaacaaggaggacccgctcaactggggcgcggcggcggccgagatggccggcagccacctcgacgaggtgaagcgcatggtggcgcagttccgcgagccgctggtcaagatccagggcgccaccctccgcgtcggccaggtggccgccgtcgcccaggccaaggacgccgccggcgtcgccgtcgagctcgacgaggaggcccgcccccgcgtcaaggccagcagcgagtggatcctcaactgcatcgcccacggcggcgacatctacggcgtcaccaccggcttcggcgggaccttccaccgncgcaccaaggacggccccgccctccaagcgagctcctcaggcatcttaacgccggaatcttcggcactggctccgatggccacacgctgncgtcggagaccgtgcgggccggcatgctcgtgcgcattaacac

SEQ ID NO: 37478 - DNA, 510 bp, Oryza sativa
  Clone ID: uC-osrocyp010c04b1
tttggtttatttgcagagcgggaagcacaagtcttcatgtcgtactgctggattttgtgcactatgtgctcttcaaaaccatgttaagactgctctacagtcaactggaaaaatagtgacgccatcacagattgtcaagaacttgcgctgcatctcccgtagtttccgcaattcaaggcaggaggatgcacatgagttaatggttaatttacttgaatccatgcataaatgttgtctaccttctggagtaccaagtgagtctcctagtgcatatgagaagagcttagttcacaaaatatttggtggccgcctaagaagtcaggtgaaatgcacacagtgctcacattgctccaacaaatttgatcctttcttggatctcagccttgatattggtaaggccacgtctcttgtagggcacttcaaaatttactgcggaagagctcttaaatgggggagaaaagcaatatcagtgccaacgctgcaagaaaaaggttgtagcaaagaaaaagt

SEQ ID NO: 37479 - DNA, 517 bp, Oryza sativa
  Clone ID: uC-osrocyp010c07b1
tcgttcacgcgtccgcccaaaccctagccgccgtcggcggcgtactcgagagaaacatcagcatccatggcgggcaagggcgagggtccggccatcggcatcgaccttggcacgacctactcgtgcgtgggcgtttggcagcacgaccgcgtggagatcatcgccaacgaccagggcaaccgcaccaccccctcctacgtgggcttcaccgactccgagaggctcatcggagatgctgccaagaaccaggtcgccatgaaccccatcaacaccgtcttcgatgccaagcgtctcattggcaggaggtttagcgatgcttctgttcagagtgacattaagctctggcccttcaaggtgattgctggacctggtgacaagcctatgattgttgtccagtacaagggtgaggagagcagtttgctgccgaagagatctcctccatggtcctcatcaagatgcgtgagattgctgaggcctaccttggaccaccatcaagaatgccgttgccactgttcct

SEQ ID NO: 37480 - DNA, 359 bp, Oryza sativa
  Clone ID: uC-osrocyp010c09b1
tcgttaagatcctagcaacataggagtatatactactacatacaacaaacactcagatagatatgaagaagacgacattatcactagtcgtagggttgtgggctgtgctgctggtggcgacggcggcggcgcaggacgtcgacctgacggtgacggacaaggacctagagacggaggagagcatgtggaatctctacaagtggtggtgcagcgtgtactacgcgtcgtcgtcgtcgagggacctcgccgacgtcgagagcaggttcgaggcgttcaaagcgaacgccaggcacgtcaacgagttcaacaaaaaagagggcatgacctacaggctcggcctcaaccagttctccgacatg

SEQ ID NO: 37481 - DNA, 520 bp, Oryza sativa
  Clone ID: uC-osrocyp010c12b1
tctttcacgcgtccgcccacgcgtccgcccacgcgtccgcgcacgagcagcagcagcagcagcggcggccgcagcgcgagctctctctctctctctcgcggtgggcggcgggatgaaggtgtccgtcgtgtcccggagcggccgggaggtggtcaggggcggcgtcgagctcaaggactcggctaaggtcgcggatctgcaggatgccatctatgccaagactaagaagtattaccctgctaggcagcggctcaccctccctatccaacctggaaaatcaggaaagccagttgtccttagtgcaaaggccagcctatcagaatactgcgaaaagggttctggatccctgacagtggtctttaaggatttaggcccacaggtcttctacagcacgctgttcttctttgaatactgggtcctcttcttatctaccccatgttctattacttgcctgtctacaaatatttcggatacgagggagagccggtcatgcatcctgtccagacttacgccatgtact

SEQ ID NO: 37482 - DNA, 357 bp, Oryza sativa
  Clone ID: uC-osrocyp010d01b1
agcagtgttcaaataaatataacgattctgcgagaccaaagcagcacgctcggagcctgcatcccagctgaagaacccgcttttgctttcctttcataaatgaggtcaatttttttggtgcaacaaccgacttgagccactcttgaagcttcttgtcctcaaccttttcattctcttctaaaaatgctccaaggccttccaatactgcaggattagcacggtcaactgaaagatccacatcaagggctgactgatgaagggcttttactttccgctggacaaggacaactagatggccctgatccccttccccatggagagcctgcccgattccatctaccccaccttttgacaatg

SEQ ID NO: 37483 - DNA, 448 bp, Oryza sativa
  Clone ID: uC-osrocyp010d03b1
ttcgtttcccccctccacccgtctcctccgtctccggcgccggcgccggcgagctcgccccccgcgattcgtgccctccgatcagaggcgaggcgggagaagagatggggctcacgttcaccaagctgttcagccggctcttcgccaagaaggagatgcggatcctgatggtgggtcttgacgcggccggaaagaccacaatcctctacaagctcaagctcggcgagatcgtcaccaccatccccaccatcggattcaatgttgaaaccgtggagtacaagaacatcagcttcaccgtctgggatgtggggggtcaggacaagatcaggcctctgtggaggcattatttccagaacacccagggtctcatctttgttgtggacagaaatgatagggaccgtgtttgtcgagccaggatgagctcacaggatgctgaacgaggatgagc

SEQ ID NO: 37484 - DNA, 526 bp, Oryza sativa
  Clone ID: uC-osrocyp010d09b1
tctttgtgctccgccggcgccgcctacgacgacgccgccgcggcgaggtgcttcggcatggagcgcgagtgcgagagggggctcgtgaaagggtgcggcgtcgcggtggccgtcaggaacgcgctgtcgtcggtcgtcggccacaagtccggcggccacggcggcgcgccggcggcggcggcggcggcgtattaaatccctccgctgcacatgcacgctggccgctagtatgtactgctatctaatttgcgttttttccggggtgttctttgcattttgtacgccatagtacaaacatgtacgtacttactctacgtgataatatggaggagaagtaattaagtgtaaggttttagccgtgtacgtatttttttgtagccgtatacgtatattatacggtcatgcatgcatgtctgaaaatatgtgtgcttgttcagttgttccaaaagtgatgggtacattaccattgatatggtgacgatgagcagaatagatttgatctaaaaaaaaaaaaaaaggcggccgc

SEQ ID NO: 37485 - DNA, 360 bp, Oryza sativa
  Clone ID: uC-osrocyp010d12b1
tcgtgagcgtagccgtggtggagttgctggcgatggcggcggtggcggcggcgcaggcgccgggtcccgctgcgacgccggcggcgggcgccacggggccgccgaacgtgacggcggtcctggagaagggagggcagaacacgacgttcatccggctgatgaaggagacgcagcaggacacgcagctgaacagccagctgaacaactccttcaacggcaacggttacaccgggttcgcgcctaccgacaacgccgtgaacaacctcaagccgggcaccatcaacagcctgacgcaacagcagcaggtggcgctcgttcagggccacgtcctaccgcagttatactgcatggactactttc

SEQ ID NO: 37486 - DNA, 431 bp, Oryza sativa
  Clone ID: uC-osrocyp010e01b1
ttatttggcacgaggagactatctcctccccctcctcctcctctccccgccgacgaccccgccgagctacatctccgccgtgctgatcgcgtggagccgaggagaggagcggcggccaacgctacgaggagaggagagtgggggaggggaggggagcgagccttatcttacccgctccgccgaagcctatggactcggagcactggatctcgcgcctggccgtcgtcaagcggttctacgccgcgcagctcggccacgccgatcgagcggtgatagaggaggtggacatggacgaggaggtgaggccggagttcgcgtgcccctactgctacgaggaccacgacgtcgtcttcctctgcgcgcacctggaggaggagcaccctttcgagccccatgcggggccttgccctatatgtttgataagattgcaa

SEQ ID NO: 37487 - DNA, 500 bp, Oryza sativa
  Clone ID: uC-osrocyp010e03b1
tttttaccggaccggttcctaccaacctcaagaacctaaccaagcttgcagaattccatctagcaaacagcaatcttactggtccattgccagacctaactggaatgagctcactcagctttgtggacatgagcaacaacagcttcagtgcatctgatgcgccctcctggataaccactttgccatcgtcattgacttcactgtacctagaaaatctgcgcatcagtggggaggtaccgcaaagtctctttagtctcccttcaattcaaacactgaggcttcggggcaaccgtctgaatggcaccctaaatatagcagacttcagcagtcagctccaactagtcgatttgcgggacaactttatcacagcactaactgtaggaacacaatacaagaagactctcatgctctcaagaaaccatattgcaaccaagtgaacgacgacgtgcactgcaaagccaccggacaatcgaacccggcattgccaccatacaagacta

SEQ ID NO: 37488 - DNA, 547 bp, Oryza sativa
  Clone ID: uC-osrocyp010e05b1
gcaatctgttggccttgtttttcctaaaaacatcagtgttgttgctgtgtgtcccaagggaatgggcccatcagttagaaggctttatgttcagggaaaagaagtaaacggtgctggtatcaactccagctttgctgtacaccaggatgttgatggaagagcaacagatgtcgctcttggatggtcagttgctctaggttctcctttcacatttgctactactctagagcaggagtaccgaagcgatattttggcgagcgaggtattttgcttggggctgtacatggtattgtggaggctcttttcaggagatacacagagcatgggatggatgaggactcagcatacaagaacactgttgagtgcatcactggaatcatctttaaaactatttcgaaaaaggggatgcttgaagtgtacaatcattgacagaagaaggaaagaagcaatttatcgaggcttacagtgcatcatattatccatgcatggatatactatatgaatgctataaaatgtttcttctggaagtgaaatagagtgttgtttg

SEQ ID NO: 37489 - DNA, 373 bp, Oryza sativa
  Clone ID: uC-osrocyp010e06b1
atcgaaagggggcgggctatacgggtcacgcttacattgccgcgcgtgctgctgcatagaggatagatggatacaactaagtacgagcacgtgttcgtaacggtaccatttctggactggaaagaccatgtgattagcgagctttatctgctgggagagaataaccatttaatgaggtgccttctgatgatgaaagtcaggagaacacagtgttcagaccattcacagatgctgaattgaaagacactcacgcggatgcgtagggatactgactatgatcgttgctagcgagaaggatgcataggggcccgatgaacgacttgaaggcgagcgccgcgggctttaattttgttgcgtcacattctatgcacga

SEQ ID NO: 37490 - DNA, 365 bp, Oryza sativa
  Clone ID: uC-osrocyp010e08b1
cagggacagggattgatatgatcaaggtgctcaaggtcgccgtgctctgcaccgccaagctgccggcggggcggccgacgatgagggacgtggtgaagatgctcaccgacgccggcgccgggccgtgcagcccccgcggccagccgccggcggcgagggcttgcgcccggagcaagagctgctgctgaattttagagtagactctgctttctcgcctctgtctgcatctgcatttctgcagccaactctcgctgaattttaatctttgatgtgtactagggatcatactgtagatgataatgcatttgcaggtattttgtaaaatggttgacaattaaggtagtagtccactttaattatagttt

SEQ ID NO: 37491 - DNA, 495 bp, Oryza sativa
  unsure (1)..(495): unsure at all n locations
  Clone ID: uC-osrocyp010e10b1
tgttcgtgtccgtgtcctagaaaaacttctgcacacgcagccgacgcccttctctatctagctaaatctccattttaattcctctctctctctctttgtgtctttctcaagggaaaattaaccatcaaatcaatagatacaatgagcttgatcagcatgatggaggcgaacctgccgccggggttccggttccaccccagggacgaggagctcgtcgtggactacctctaccacaagctctccggcggcggcgagttctacggcggcgtggccatggtcgacgtcgacctcaacaagtgcgagccgtgggagcttccagacgccgcgcgggtgggcgccacggagtggtacttcttcagcctgcacgaccgcaagtacgccacggggcagcgcaccaaccgcgcacccgctccggctactggaaggccaccggcaaggaccgcgccatcgtcacccgnctgcgagccgtcggcggtgaggtggtcgggatgagga

SEQ ID NO: 37492 - DNA, 528 bp, Oryza sativa
  Clone ID: uC-osrocyp010e12b1
tcgttaggagtagattgtttcaatataaaggaaattgcaaagaaggagagttatttaactacattccaatggtccgatggaggatttggatttttatggaattcacgtgtttccccgatgttgtggcgagctgtggcaggacctcctgcccaagcatggtttcctgcttgtgcgtatgccgtcatgccgtttgagaattggtcgggatcaatgaagtttagatttcaagttgtgtgttctagttttcataaagggcgtttgcgtattgtgtttgatccaacaggtgctcaaacaaatcctgagttgaatgtcgcgtattctcacgttattgatatttcagatactcaagattttaccatagaggttcctcatatgcaaacacgaactttgttaactagggctgaaccgcatttacactggttaccacacaatacggcactactttgttgccaccgttgtccactggttatggaactatttgctgttatggtgagactattcttgcacttctatagcacagtggatgca

SEQ ID NO: 37493 - DNA, 412 bp, Oryza sativa
  Clone ID: uC-osrocyp010f01b1
ttcttacaaggcccgtggcctcctcgagatgtaccgcatcggcgagctcatcgtcaccggcagcgactactcgccgcagagcagcagtgctgacctcacgtccatcgttgagagccctacggcagcggcggcgcccgccgtgccggtgtcgaccgtcgcgctgtccaacccgcgggagaaggtgaaatgccggctcatggacaagaagagcctgtcctacaacgtgcgcctgttccggttcgcgctgccgtcgccggaccagaagctcgggctaccggtcggcaagcacgtgtacgtgtgcgcgtcgatcggcggcaagctctgcatgcgcgcgtacacgccgacgagctccgtcgacgaggtcggctacatcgagctcctgatcaagatatactttaagggcgaggacccc

SEQ ID NO: 37494 - DNA, 453 bp, Oryza sativa
  Clone ID: uC-osrocyp010f02b1
ttgacgcgtgggccgctcctctctctctctctctctctctcttttcctcgtgagttcgcccgccgcctcgcctgcgccgatctccatcgaactcggcgagcagccgaggcggacctgctgcctccttccgccgcaagcatcctcgccgccggatcataatattgctgattttgtatgatttgattcttgttgggtgagcccaagatgtctggaaatgacgataagtctcaggctgcagctgagagaataaaagcacaggccttatctgctgccaagggattgagcagaactcaagccgagcgagctgctgcagccgctgcccgcaatgtcaatgcttatgggcagaaagaagagggaccttcgcgctggcaggagaggaaggaggccaagagacagatgtatctgatgagtacagagaaggtgtgatactgggagtgaaaccaaaagctgcgc

SEQ ID NO: 37495 - DNA, 383 bp, Oryza sativa
  Clone ID: uC-osrocyp010f03b1
gtcacaggtgcttgcttagtttagcttagctttgctgctgctccttctcattcataagccagcagctagctagcaagcagcacacacatatatcacaggccatctctctatccctaattaagctatatactccatatagctagctaaacacaggaggagtggaggaaggagaggctagctgatctagctatctgcagtgattagttaaaatgatggcttctgataggttggatgcagaaaggatcatagagtacttcaagggcaagagcatcctcatcactggagcaactggctttcttggcaagattcttgtggagaagatactgagggtgcagcctgatgtcaagaagatctacctgctcgttcgcgccatcgaccaagca

SEQ ID NO: 37496 - DNA, 349 bp, Oryza sativa
  Clone ID: uC-osrocyp010f04b1
tttcttttctagcagaagaagataattaacctgctcatttttgtatgtgcagaaaaatcaaaacaccgaccaaaagcaaaaaaaacaataaataagggtgtagagagttgttgagttgggtccgcgaatcgtggtttcccactagcaagcgcaagcgcaggcgcaaacgcaaacgccgccgccggtatgccggagcacgggtcgaagcccgacatcttcttcgccggccgcttcaccgcaagcgccatcgctgcatgcttcgctgaggtgtgcacgatccccctggatacggccaaggtgaggcttcagctgcagaagaacgtggccgccgatgccgcccccaagtacc

SEQ ID NO: 37497 - DNA, 474 bp, Oryza sativa
  Clone ID: uC-osrocyp010f05b1
ggtcgggaggcttgattagctgttttatgccctgatcactggagatggaggaaagggaccctattgggaggtgctggggagcctggagcagcagaataggatgcttcctcctatgcctggactgactaaagctggatttagtgtggttgttcttgatggaaagctgcttgtcatggctggctatggtgttgattatggaaaagaatgtgtttctgatgaagtttatcagtatgatgctcgtctgaacaggtgggctgcactggccaagatgaacgtggcccgtcgtgacttcgcatgtgcagaggtcaatggtgcagtatatgttgctggtggatttggttctgatggcgatggcttgtcaagtgttgaagtatatgatccacaaagaaacaaatggacaataatagagagccttcgcaaccaaagtggggctcctttgcctgcagcttcaacggcaagctctacatcatgggt

SEQ ID NO: 37498 - DNA, 472 bp, Oryza sativa
  Clone ID: uC-osrocyp010f06b1
ttgatgcgtgggaagcgatggcatctcgtctcggtgcggcggcggcggcgtcctcctcgtcttccccgctcgcccgcctcgtctcccgccgtggccttgccggcgctgcagatcaccatgggcctccgaaggtcaacatttggcaagaaccgatgaacccggctaactggaaggaagagcaatttgtgctagccagcttagctatgtggggaggtattttttatggtgtcggcaggctttttagtgggaagaaggaagacaaaactactgaggcggcgccagcacaggcataataggatttaccagagccttatttcatgctgcaaacgtgcaactgtatgaaataaagaagaaatttatggtctgctttaagattgtatcgctaatggtaaattgtggcgactaatgggtgattttgtaagaggcgagatttttggggcctacacttgtcagccagcatgaataatcttta

SEQ ID NO: 37499 - DNA, 479 bp, Oryza sativa
  Clone ID: uC-osrocyp010f07b1
gtcgcccgcgccttctttgggggagaagcccacgagatcggcgacccgcgcaagcatgccgacggtctcccgcgaccccggatctctccaacatgtgtactgtcaagggacagaccaggagggagaggcctagaggagctcgccctcatggattgacgaagcagaagaggcaggaaataaaggaggcgtttgatctgttcgacacagataactctggaaccattgatgccaaagagttgaatgttgccatgagagccttgggatttgagatgacagaagaacaaattaaccagatgattgctgatgtggacaaagatggtagtggatccatagattatgaggagtttgagcatatgatgactgctaagattggagagagagacagtaaagaagaacttacgaaagcattcagtattatcgaccaagataaaaatggacgatatcagatgttgatattcagcgaattgcctaagaattag

SEQ ID NO: 37500 - DNA, 407 bp, Oryza sativa
  Clone ID: uC-osrocyp010f09b1
tcgtccacgcgtccgcccacgcgtccgcccgccgtgccgcccgccacggcctccctcctcagctgcggcgccaccaccggggtcggagcagcgtggaagctggctaaagtcgagccggggtcttcggttgctatctttggcctcggcgccgtaggattagcggtagctgaaggggccaggatttgcggtgcgtcaacgatcatcggcgtggatttgaaccctgagaaacatgaacttggaaagaagttcggtgtgacgcacttcatcaatccacaagaacttggggacaaacctgtcagccaagcgatcatcgagatgactgacggtggcgcggactactgcttcgagtgcatcgggctggcgtccgtgatgagcgatgcatttcggagctcccgagagggatgggg

SEQ ID NO: 37501 - DNA, 531 bp, Oryza sativa
  Clone ID: uC-osrocyp010f10b1
tcgttaaccgagagctcgctagtcgtcgtcctcgaaacgctcgcggcgactccggtggctgccgcgccgccgcctccggccgccgtaccagcctcacctcgcttcgatggaggatggagtgtctacttatactgttgatgaggctcttatttccatggggtttgggaaatttcaagcatttgtgcttgcgtactccggaatggccaagatatctgaggcaatggaaatgatgcttttgtcatttgttggacagtcggttcaagctgaatgggagctttctgcgcaggcagaatctctcatcacaagtgttgtttttgtaggtatgcttgtaggagcatattcttggggcatagtctcagacaactatgggagaagggttgggttcaatttcacagcccttgtaatggtggggctggtcttcttagtgcatttgcaccaaattacctttctttgatcgtgctgaggtttatggttggtgttggactgggtggtggaccagttttatcttcctggtttttggaattcattcct

SEQ ID NO: 37502 - DNA, 491 bp, Oryza sativa
  Clone ID: uC-osrocyp010f11b1
cttcagttacaatcttttttaggagggcagaagaatcttgcaggtgagcacctatattttctgggaagagagatcagtgataaggaagtggaggattcagcacaaaagaatatacacgacgaaccattattttgtgaaatgttcgacaccaatcctgagaagattgaggatgtttttgagccttcgtggatggtttccacagcttccatgaagtattcttctgaaacaggcttacaagacttgaaaaatataggtggctattcccaagttccttcgaagtgcaaagaaaatgccagtgactgtttgttcaatgataaagaattcctggatttcaaaaattttaacccaccaccgtcgaagaacccacagaaggacgattttgatatgaatgcgccttggaaaggaggtgaaaggagtcaccatggtggcagatcactgatgagaatgagctggctttactggttgcagaaagagcaatgcagcatattgag

SEQ ID NO: 37503 - DNA, 486 bp, Oryza sativa
  Clone ID: uC-osrocyp010f12b1
ccgcgcgccgccttacttctctcctccttcctcgacgcggcggctgctccagatcttctcttcccctcgcggcggcgtctcccgtccaatccagtgaactatcggctcagtaaaaggggaaaaaggagggatcttttctggacatttgaagcttacggacgacaagatgcaccttcttgcatcatttcacggccctacaggttttaagtctgtagctgatctgtcgggatggactccaagaagttcctacagctgcttgaagagaaaaagaagagaatccttgagaagaaagaagccccactgaaatgggagcaaaagctcgaagcagcagcgaaggcaaaagctgatgctgaagcaaaggaaaagaagcttaagtcaagaaagcacagaaggaggggccattcttcctcagactctgaagtgattccgacagtgatggtgatcggaagcacaggaagaggaaagaccgcaaaagcacaggaaaca

SEQ ID NO: 37504 - DNA, 401 bp, Oryza sativa
  Clone ID: uC-osrocyp010g03b1
cttcactgtcgttcatgcatgcgttgatgcatgcaggtgctttggcagtactgctggattgaattaatggatcaagactgaatttatctataggttcgccttcagcaccttgccggtgaataacgccggcaatgccgcgagccgtgtccgacgggggcgaggccatcgacgccgacatcgccagccggacgtcatcgcacagccacatggacggcggccatcatcatcatcatcacggccacaaggtcgagttcccaccgaagaagaagctcatcgacgagttcaccgacgccgtgaaggagacgttcttcgccgacgacccgttgcggaagtacaaggaccagccgatgtcaaagaaggtgttgatcagcctgcataacttcttcccggtgctggactgg

SEQ ID NO: 37505 - DNA, 525 bp, Oryza sativa
  unsure (1)..(525): unsure at all n locations
  Clone ID: uC-osrocyp010g04b1
ctaacgttcgccgtacttctttgaagttgaacgtgctccgccgccgccgttcccactccttctccgtcgccttcctctactggttctacgtcttctcatgaactcatcgccttcctcccaagaacaccatctccagcctctaattgattagatcttgatttctttttcatcctcctactagtttctttcttgtttctttggaatttttttgatctcttgaagagatccggttcttggattaagttttggacaagaaccgtactgtgaccatgtcgtcgccttcgcgccggagctccagcccggagagcaacaccagcggcggcggcggtggcgccgacgagcggaagaggaagaggatgctgtcgaacagggagtcggcgaggcggtccacggcgaggaagcagcagaggctggaggagctatcgccgaggcggcgcgccttcaggccgagaacgcgctcgtcgaggcgcagatcggtgcctacgcggnggagctgagcaaggtcgacggcgagaacgcggtgct

SEQ ID NO: 37506 - DNA, 547 bp, Oryza sativa
  Clone ID: uC-osrocyp010g05b1
ctctttgttttttgggttacttttgagcctttggatgcaacagccctggtaaatttcccttggctattgttttggccccaacaagagaactcgcgaaacaagttgagagggaattttctgattcttccaatgtggaaacgatctgtgtatatggtggaactccaattagccagcaaataagacaactcaattatggagttgatgttgttattgggacaccaggacgagtaattgacctgcttaaaagaggtgctctgaatctgtcagaggtccggtttgttgttcttgatgaagcagaccagatgttgtcagtgggttttgatgaagatgttgagacaattttggatagagtacctccaaaacgtcaaaccttgatgttctctgcgactatgccaacttggattcagagactcacccagaataccttaagaatcctgttacaattgaccttgtgggtgaagatgatcagaagctagcagaaggaatcagtctttattctatcgcttcagagggccatgccaaacctgctgtccttggagaattgatt

SEQ ID NO: 37507 - DNA, 510 bp, Oryza sativa
  Clone ID: uC-osrocyp010g06b1
ttcttagcaaaatccaagaaggggagagagagagagagatggatcctaggttgagctactgttgctacctccatggctgtctctgcgtgctgctgctgctgctgctgtgttcttggagagcagcagatgctcaggctcagcaaccaccacctcacactgatccaaccgaagcggcggcgctgaacgcgatgatggcgaggctggggctgagcgcgccgccgtcgtggaacatcagcggcgacccgtgcagcggcgccgcgacggacgacacgccgctggacgacaacccggccttcaacccggccatcaagtgcgactgctccgatcacaacaacacgctctgccacatcaccagactgaaaatcaacacgctggatgtggtcggcccgatcccagaagagctcagaacctcactcacctcatcaagctttggggggactcccgtgtcgctctctccagggcgacccgggaggcgaccgtcgccgaggcccactctccctacgtgcgcgc

SEQ ID NO: 37508 - DNA, 508 bp, Oryza sativa
  Clone ID: uC-osrocyp010g07b1
gccagagaggccatactcacacaagcacaacacaaaagtggccatggctctcctcctctcctaccccaggcgccacccatccatccacctcctcatcctctccgcctacgccctcttcctcctcccaatcttggatggattggagctgggaggagatgggctctacagggagatcctcagggatgagacggtgctcaggctcaaagaacttggcaagatatctgatggggaaggttaccttgagaggacatttttgagtcctgcctcaatcagagcctctgctgtcattatcagctggatgaaagatgccggacttaccacgtggattgatcaaatggggaatattcatggtcgatttgaaccgaccaactcaaccaaggaggccttgttgatcggatctcacatggacactgttattgatgctggcatgtatgacggagcttgggattatctctgcaatctctgctttgagggttttgaaagttctgggagactgaagagacttact

SEQ ID NO: 37509 - DNA, 434 bp, Oryza sativa
  Clone ID: uC-osrocyp010g08b1
tcgtccacgcgtccgctttgtcaagacactgaccggcaagaccatcaccctcgaggtggaatcttctgacaccatcgacaacgtcaaggccaagatccaggacaaggagggcattcccccggaccagcagcgtctcatctttgccggcaagcagcttgaggacggcaggacccttgctgactacaacatccagaaggagtcaacgcttcaccttgtcctccgtctcaggggaggcatgcaaatcttcgtgaagactctgaccggcaagaccatcaccctcgaggtggagtcttctgataccatcgacaatgtcaaggccaagatccaggacaaggagggcattcccccggaccagcagcgcctcatctttgctggcaagcagctggaggatggcaggacccttgctgactacaacatccagaaagagccaccct

SEQ ID NO: 37510 - DNA, 515 bp, Oryza sativa
  unsure (1)..(515): unsure at all n locations
  Clone ID: uC-osrocyp010g10b1
cagaacacatgttttttttttctgatgaaaggataaaggccatgagacagatgataatggcggaaacaattgaacacaggcagatagcactagatcgcctcttgccatatcagagacttgactttgaaggaattttccgtgcaatggatggacttcctgtgactattcgactcttggatcctccactccacgaattccttccagagggtaacgttgaggatatggttcgtttgttgtcttctggaaacgtatatactcaggaggaaattcttacaagaatagaaaaactttctgaagtgaatccaatgcttggcttccgtgggtgcaggcttgggatatcatacccagaattgacagcaatgcaagcccgtgctatctttgaagctgctatttctatgactgaacaaggtgttaaagtttcccagagataatggtgcctctcattggaacacctcangaactcgcccaacaagtagatgtaattcgtgaagttgccgaaaaggtttttgcaaatg

SEQ ID NO: 37511 - DNA, 473 bp, Oryza sativa
  Clone ID: uC-osrocyp010g11b1
tcgtcaagtctccgcggcggaggcgctcgcgtcgcgaccccgtcgccgccgccggcgatccgctccagccgaaccccgccgcaccgccgcggtagctgccgtcggcgaggtgcgtctcggcaccggactccaggaatcgtgctgctgctggaacgccgcgcccgctcagccggcggccgggcgtcccgcgtggctcgctggcatcgatcggggatcccttctacgggctcgccgtcgcggaggtttcaggggaccggcgcttggacacgctctttcctcatcaatctgctgacgttttgaaatattggaatgcttctgtcgtcgaatttggttatctacagcatctgaattggttataacttataacttataagtggcatgtctgcgaaggttccaaggcacctagagctaattccgttgggatggcagattgggctggtcttcagactgatatacttggtgtaattgtaaag

SEQ ID NO: 37512 - DNA, 521 bp, Oryza sativa
  Clone ID: uC-osrocyp010h01b1
ctcccttcctcctgcttttttatgcgactgctaattttgaagtgccatttctcatcgtcaaggagaggtggcattaatccgcagcaagtgctcgatgacagatcattattatgctcctctgaggcttattcttctcttgatattgagtgccacctgttttggctctgaacttgatgttcagtgcttgaaaaccatattccagtcagtgaccgatcccaatggtatactcaaatcctcatggagttttgtcaacaacggcacccctggttacatctgcaaatttactggggtggaatgttggcatccagatgagaaccgagttctttctttgcgtctcggcaaccttggtcttcagggtccatttcctgcaggccttcagaactgtactagtatgactgggctagatctgtcgagtaacaactttacaggactcattcctaaggacatttccagcaaataccatacttgacatcactggacctcttctacaataagtttcaggccaaatcccataaatattt

SEQ ID NO: 37513 - DNA, 538 bp, Oryza sativa
  Clone ID: uC-osrocyp010h02b1
ttatttagcagtcagtggacaccaattatgatataggtaattcaggagaaaatgacaatgagttatcatccagcacttccaaagcaagaagagatagcaagagatcatcacggcgtggatgtggtaaaaactcatcgatagaacaaaccccaatgccagtttttgcagaaaaagttttggagaagaccaggtgcatagcttgcatggctgcatccatttttagggcttccgtgatgtatataatagaagaaagcaaattgctacttgagagaaataggccagcaatcacaactttcatggctattgtgcacaaggggcatgactatgtccgcagcaaaattaagtatacttatcctatttgtcgggcatggatgtttagtgcttgaaaagtgatattgctcttgttggcagtttggttcaactgcaacataggggcttcgattctttgctacgcctagggacagactcacttcttacagtactttggtgccatacactatcagattttgcaatgattggactaaagaaaatgctaata

SEQ ID NO: 37514 - DNA, 500 bp, Oryza sativa
  Clone ID: uC-osrocyp010h06b1
cttgtgttaaccaccattttttggcatgccgctgtcttctatccatacaagagcaagtctgttcctcgcggagcattatttcgaagcgccagcttatctgcgttcttcggtattgctgagcttgtctcaactctggcgtttgcaatgttgctctgggcaacggtcaccgagggtctttaccgaagcaacaacatccaccatgacctgtatacccagtgccctactgcgaagactggcctctttggaggagccgctttcctggcccttgatgctgctctcttctggcttgtttgccagatgctagctctcaatgcaaggtctgactatctggatgaggatgacaagggcgattatggccagctttttgcttatgatgttgatggcacagaggtctgaggctatgactgggcagggtttcatattagtgtcacttagctatattatcttatcgacaaagctggatcgattggctctctaaaatctgtagatatgtgctatgc

SEQ ID NO: 37515 - DNA, 467 bp, Oryza sativa
  unsure (1)..(467): unsure at all n locations
  Clone ID: uC-osrocyp010h07b1
tcgtttcacgcgtccgcgaggggcaacgaagcgaggtcacggatgcgggcgatgccaccgccgtcttcttgtccctagatccatcaagtgaccagttctctgatcagtgagaataatggccgctgctgaagcaagggctgcttggcagcgtgctgcaaaccgttgcatcgttcaggaggatagaaaaagagcaccaaaactagcctgctgtccaccatcatcagaacagcagcatgtcaaaagcaatggaaattgtaggaattctgaagaccgccctgtgcccaatttcatgccattgagctggaatcccatgaactccagtctgccacctgatattagatggtggcttcagttacaaccaaatttaagagggcagaagaatcttgcaggtgagcacctatattttctgggaagagagatcaatgataaggagtggaggattcagcacanaagaatatacacgacga

SEQ ID NO: 37516 - DNA, 568 bp, Oryza sativa
  unsure (1)..(568): unsure at all n locations
  Clone ID: uC-osrocyp010h09b1
agatactcctggttttttgacaaaggagcaagtggaagcgtggaagccaatcgtagacggcgttcatgccaaaggaggaatatttttctgtcagatttggcacgtaggaagagtctctaataacacttttcagcctaatgggcaggctccaatttcgagcaccaataagtcactaaaacctgcagtaagagccaacggcatagatgtggctactttctcaactcctaggcgattagagactgatgagatcccttttgtcgtgaatgattacagggttgctgctagaaatgcaattgaagcaggatttgatggtgttgaaatccatggagctcatggttatttgatcgatcagtttctaaaagaccaagtcaatgatcgttctgacaaatatggtgggagcttagagaatcgctgccggtttgcgctagaagtggtccaagcgtaactgatgaaattggagctgacaaggttgggataaggctgtcaccctttgccagctattcagaggcagcagactcaaacccagaagctctaggcctatacatggcanatgcactaaacaagtttg

SEQ ID NO: 37517 - DNA, 522 bp, Oryza sativa
  Clone ID: uC-osrocyp010h11b1
tcgttgattcaaacccgccgtttccaagcttgctctcctctcccccccaatccttccctcccgagtggcagggtgctcgacgggatggcgcagaaggaggccaatggcagcagcaacggggagcacaccacccgcccgccgccgacgccctcgccgctccggttctccaagttcttccaggcgaacctgaggatcctcgtcaccggcggagctggcttcatcggctcgcacctcgtcgacaagctcatggagaacgagaagcacgaggtcattgtcgcagacaactttttcactggttcaaaagacaacctgaagaagtggatcggacacccaagatttgagctaatccgtcatgatgtcacccagcccctgcttgtggaggttgaccaaatctatcaccttgcttgcctgcttcaccaatcttctacaagcacaaccctgtcaagaccatcaaaacaaacgttatccgaaccctgaacatgcttggacttgccagagagttggagctaggattttgtgact

SEQ ID NO: 37518 - DNA, 500 bp, Oryza sativa
  Clone ID: uC-osrocyp010h12b1
ccggaagtcagaattgtttggaaaaaggaactcgaagtcgccgccggatttgggatttggagagcgcgcgaggtaaaccaaagttctttttccgatggctcgtactaagcaaactgctcgcaagtcaactggaggaaaggctcccaggaagcaacttgccaccaaggctgctcgtaagtctgctcccacaactggaggagtgaagaagcctcaccgttaccgccctggaactgttgctcttcgtgaaatccgcaagtaccagaagagcactgagctgctcataaggaagcttccattccagaggcttgttagggagattgcccaggattttaagactgatcttcgtttccagagccatgcggtgcttgcccttcaggaagctgccgaggcgtacctggtgggtctcttcgaggacaccaactgtgcgccatccatgccaagcgtgtgaccatcatgcccaaggacattcagctggctaggaggatccgtggtgagagggc

SEQ ID NO: 37519 - DNA, 468 bp, Oryza sativa
  Clone ID: uC-osrocyp011a02b1
ccctttgcgacgtcggccccgacctggagctcgacaccacccacggcaagatccgcctccacgacttcgtcggcgacgcctacgccatcatcttctcccaccccgctgacttcacgccggtctgcacgacggagctgtcggagatggcgggctacgccggcgagttcgacaagaggggcgtcaagctcctgggcttctcctgcgacgacgtcgagtcgcacaaggactggatcaaggacatcgaggcctacaagcctggccgccgcgtgggcttcccgatcgtcgccgacccggacagggaggcgatcaggcagctcaacatgatcgacgccgccgagaaggacaccgactgccgcgagcttcccaaccgggcgctccacatcgtcggaccggacaagaaggtgaagctgaacttcctgttccggcgtgcacggggcggaacatggctgaagtgctgcgcgcgaccga

SEQ ID NO: 37520 - DNA, 462 bp, Oryza sativa
  Clone ID: uC-osrocyp011a03b1
gttttgcactgcaggcctctgtcgttataaacaacattggcgtgatgattgcttacatgattatcattggtgatgtattatctggaacataatcaaccggtgttcaccatcgcggtatacttgagggctggtttgtagctcatctatggaattcacgtgccattgttcttattgcgacgactcttttcgtgtatgctgcattggtgagctttaagcgtgtggattcattgagatacacctctgacctatccgttgctcttgctgaggtttatgtcgtcattactgctggaattgctatcatcaaactcttcaatggaactgtaacgatgcccacactatttccagaactagatgggattagttgcatctggaagctcttcacagctagccctggtcttgtgactgcctacatctgacattacaatgtgcacagcattgacaatgagcttgaagacagaacac

SEQ ID NO: 37521 - DNA, 407 bp, Oryza sativa
  Clone ID: uC-osrocyp011a04b1
ctgtctcgtgggcgcgccgccaccttccccacccggtctagccgccctcgccgccgccggagcccgccgccggaaaccgcgcggacggccaggaaggcggcggtggggaaaaccagtcggcgacgatcctccccctcggcgtgggaggtggagtggcgagcgtcaggcggaagacggcgtccgaagaggtccacagggcgaatccggccacgccggaggcggattcggccccctcggcggctgatctggcctccccgtggccggatcgggtgctggcgacttcggtggctgctgaactcgcggcgctgctgcgtggactgtctatagaggctgacgtcatcgacaaggacagctatgaccggcggagctcgcagggacagagattgtagcagctggctggcggcagc

SEQ ID NO: 37522 - DNA, 452 bp, Oryza sativa
  Clone ID: uC-osrocyp011a05b1
ctgcgcctcctggtgccgctccggaattattgcgcccaaaggtccattatgtgtactactgggccagaaatctgggaggattctaaagggaaggtggatgtattcattggtggaattggaacaggtggaacaatatctggtgctggccgtttcctgaaagagaaaaatcctggaattaaggctattggtattgagccttcttagagctacatactctctggtggaaaacctggcccacattagattcaaggcattggggcaggatctgttccaaggaacttggatagtgaagttctcgaagaagtgattgagatatctagcgatgaggattgtgagacagcaaagcaattggctctttaagaaggattactggttggaatttcatctggggcaggatcagctggtgccattaaagttgcaaaaagaccagaaaatgctgtaaagttggtagt

SEQ ID NO: 37523 - DNA, 405 bp, Oryza sativa
  unsure (1)..(405): unsure at all n locations
  Clone ID: uC-osrocyp011a06b1
cttcctctgatcctccattgctgcaaaagaagaagaggtagacgaaggaggaggagatcaggtgatcatggggactcaggtggcagataactacccaccggccaaggatggccggagcgcgcaggagaaggcgatcgacgactggcttcccatcacgtcgtccaggaacgccaagtggtggtactccgccttccacaatgtcaccgccatggtcggcgccggcgtcctcagcctcccctacgccatgtccgagctcggctggggacctggantcgcggtgctgatcctgtcatggatcatcacgctctacacgctgtggcagatggtggagatgcacgagatggtgcccggaagcggttcgacaggtaccacgagctcgggcagaacgcgttcggcgagaaagct

SEQ ID NO: 37524 - DNA, 479 bp, Oryza sativa
  Clone ID: uC-osrocyp011a07b1
gcttgttcaattcaatcgagcagtagctaattgcatagtgatcgatcgatctgtatagatggtggtggccggcaagaagcagggacggcattctttttctgcatcatcatcgtcgtcttcgtcttcttattgttcagtagtgcagctgggtcatcatcagcgcccacagggtgaggaccctctcatcggcatcaaagcagcagcagcaggaggaggaggaataatgagaaagggcccgtggacggagcaggaggacgtgcagttggtttggttcgtgcggctgctgggcgaacggcggtgggatttcttagcaaaggtgtcaggtttgcgcggcggcgggtgatgagcatatgcgtgcgtgcatctaatctatcgattaattgttgatgatgtcgatcagatggatggatgcatgcatatgccgtacatagtagatttgatgatagtaactgacataaatataatgtatgcgtgcgatc

SEQ ID NO: 37525 - DNA, 500 bp, Oryza sativa
  Clone ID: uC-osrocyp011a08b1
attttctccggatgggcccatatccgatgaagcacttgagagagttcgtgcattgttagatgagataagacctatagatgttggcctagacaatgaagcacagattgctcgtaattggaataattcaacgcgtcaaccaaatggaagaagaggacgtaatggggctaaccagttcacatctccaatcaaatatttacacattcatgaaagtgaaagtttctctatgggtatattttgtatgccgccgtcatcagttattccacttcacaatcacccaggaatgacagttctgagcaagcttctctatggcacactgcatgctgaatcttatgattggattgatgtaactgatccaaccgatcaattacaggaactttcagtgagaccagcaaggcttgtcagagaccgtgaaatgtctgctccagagaccaccattctttatcccaatagaggtggtaacatccacactttcagagcgatcacaccttgtgctctctttg

SEQ ID NO: 37526 - DNA, 499 bp, Oryza sativa
  Clone ID: uC-osrocyp011a09b1
cgcgctcgctgcctcttgtcagcggcggagctctctagaaggagcagaggagtcccccccaagcgatcgattcgatcccctccgccgccgatcgcctcgccgaagtctccgagaaacacttgagggatggctgaagaggatatccagcctattgtctgtgacaatggcactggaatggtcaaggccggttttgctggtgatgatgcacccagggctgtctttcctagcattgtaggcaggccacgccacactggtgtcatggttggtatgggccagaaggatgcctatgtgggtgatgaagctcagtcgaaaagaggtatactgacattgaaatacccaatcgagcatggtattgtcaacaactgggatgacatggagaagatatggcaccacaccttctacaatgagctccgtgtggctcctgaagagcatcctgtattgctgaccgaggctcctatgaaccccaaggcaaacagagagaaaatgacccagatcatgt

SEQ ID NO: 37527 - DNA, 526 bp, Oryza sativa
  unsure (1)..(526): unsure at all n locations
  Clone ID: uC-osrocyp011a10b1
ctcgcatcgcatccatcctctcgtgtcgccgccggcggaggctgcggcgagccttcaccccccacccgcccaccgccggcgagccacggcgtgggcgacctcctctcctctcccgatcccctctcgcccttaggtaggggcttctccccagtccccaccacacgcgcgtgcgtggccgacgagcaccccaggttcggatcggatggaagaccagaagaaaaatgcaaaaccagaggggtcttctggctcgcaaaggggagctcccccggcacctgatgcaggccttcccaatccttttgatttttctcagtttagcaacttgctcaatgatccatctataaaggagatggcagagcagattgcaagcgaccctgtgttcacccagatggcagagcagctgcagaagagtgctcatgtgaccggngaacagggtggccctgcattggatcctcagcagtacatggaaacaatgacacaagtcatgcaaaaccctcaattcatgtcaatgcagaacgtcttgggatac

SEQ ID NO: 37528 - DNA, 495 bp, Oryza sativa
  Clone ID: uC-osrocyp011b01b1
ctctgctcatcccctccttatatctccagccccaggagctccggagggttcccaatggcggtgaaggtctatgtcgtgtactactctatgtatggacatgttgctaaactagctgaagagatcaagaagggtgcttcatctattgaaggtgttgaggctaaaatatggcaggttcctgaaactctccatgaggaagtacttggaaagatgggcgcgcctcctaagccagatgtgccaacgatcacaccacaagaacttactgaggctgatggaatcctgtttgggttccctacaaggtttggcatgatggctgcgcagatgaaagcattctttgatgcaaccggtggcctgtggagtgagcagagccttgcaagcaagcccgccggcatcttcttcagcactggtacccagggcggtggtcaggagactacaccgttgacagcaataactcagttgacttaccacggcatggtgttcgtcccggtcgggtacacc

SEQ ID NO: 37529 - DNA, 476 bp, Oryza sativa
  unsure (1)..(476): unsure at all n locations
  Clone ID: uC-osrocyp011b03b1
gaggatcttcgtgcctgagggccagccgctggagagcgagccgaatgagccgctgcgcgttaatgtgctcttcaagcacgtccagaagatgctgaacagtgacagtgctgtgattgccgagactggtgactcctggttcaattgccagaagctgaagctccctgagggctgcgggtatgaattccaaatgcagtatggttccattggatggtcagtgggtgcattgctcggatatgctcagggcgctaaggacaagcgtgtgattgcctgtattggtngatgggagtttccaggtgacggcacaggatgtgtcaacaatgattcgctgtgcacagaacagcataatcttcctgatcaacaancgcgggtacaccattgaggtgggagatccatgacggtccatacaacgtcatcaagaactggaactacactggccttgtggatgccatccacaatggagagggcaaatgctggac

SEQ ID NO: 37530 - DNA, 519 bp, Oryza sativa
  Clone ID: uC-osrocyp011b05b1
ccctcctcctgaaaggcgcttgaactgcctgattcccccaccacatggctataaggttcccataaaatggccaaaaagtcgtgatattgtgtggaaagcaaatattccgcacactcaccttgcacatgagaagtcagaccagaattggatgattgatgcaggtgagaaaatcaaatttccaggtggtggaacacatttccatcatggagctgacaaatatatagcaaacatagcaaatatgctaaagttcaaagataacaatattaacaatgagggaatgcttcgtacagttcttgatgttggttgtggagttgctagttttggaggatatcttctttcatctaatgtgatagctatgtctttggcacccaatgatgtacatcagaaccagattcagtttgctcttgaaagagggatccctgcatatcttggtgttttgggaacaaaaagacttccatacccaagtagatcattcgaattagcccattgttctcgttgtaggattgactggcttcaaag

SEQ ID NO: 37531 - DNA, 489 bp, Oryza sativa
  Clone ID: uC-osrocyp011b07b1
caccaatccgccatggctagtgttctcgccgtccccctcctgctgtgcctgctcgcctccgcctccgccgcccgcttcgccccggcggacaaccacctcctcgcctgcggcgcgacggcaccggccgtgctccccgacggccgacgcttcgtccccgactccggctgcgcctccacgcgcctccgctccccggcacctaccctcccgtccgcggcctccagcgcggccccgcagccgacccctctccacgccgccgcgcgggtcttctcctgccgcgcgtcctacgacctcgccgtccgccgccgcgggtaccacgtcctgcgcctccacttctaccccttcgagcccgcgctcgcgtccgcgcgcttccacgtcggcgccgccggattcctcctcctccacaacttctccgcgtcggcccccgtcgtgaaggagttcatcctacccgtccactccgacgtcctcgtcctcaccttcgtccccgagtcg

SEQ ID NO: 37532 - DNA, 498 bp, Oryza sativa
  unsure (1)..(498): unsure at all n locations
  Clone ID: uC-osrocyp011b09b1
ctcagtgtcaaccaccacaaccacaagcaagcaagccatacacatcaagaaggcgtctgcgtgcgaggaaatcatccggtttttcaagctaaaagcgtgaagatgagctcgtcgtcgttgagcaagaaggcgtcgtcgttcgtggtgacggcgagcatgagcgcggtggaggcgctcaaggaccaggcggggctgtgccggtgggactacgcgctccggtcgctgtaccagcgcgccgccgccgccaagcaggtcaccggccgcgccgtcccggtgtcgctgtcgtcgcagaccggcggcgcggcggcgtcctcctctcccgccgccgcgtgcggcagggccgccaggtcgaagaggtcggaggaggagaagatgcagaaggcgtatcacctcgtctgctggggacctaattaaaatctgttcttcaaattcgtgatttcgtgtagtagttttttcgtttgcaanttgtccacccctcattttctggtgtgtaaatcg

SEQ ID NO: 37533 - DNA, 464 bp, Oryza sativa
  unsure (1)..(464): unsure at all n locations
  Clone ID: uC-osrocyp011b10b1
ttgtcgcgtgggcggacgcgtgggctccggcgaggctcacgcgcgctccgaagcttcggatagcggcagtagtcagtgcattgatggcgaccgacgtggcagcgactgagcccgaggtggcggcggaggaggctgcggccgccgcgcctgagaccacggccaccgccggggattccaagccggcgaaggaggccaaggccaagaaggccgccgcgccgaggaaggcacgctccaccgccacccacccgccgtacgccgagatgatctcggaggcgatcgcgacgctgaaggagaggaccgggtcgagccagtacgcgatcggcaagttcctcgaggacaagcacaaggaccacctgccatccaacttccgcaagcagctgctcgtccagatcaagaagctcgtcgccgccggcaagctgaccaaggtcaagaactcctacaagttgccgncgacgcgcgcgccg

SEQ ID NO: 37534 - DNA, 471 bp, Oryza sativa
  Clone ID: uC-osrocyp011b11b1
gtcgccgccgccgccgcctccgtcgtcttctgccgccgagcagcagcagcagtgccttccaccatgccgaagcagatccacgagatcaaggacttcctcctgacggcgaggaggaaggacgcgcggtcggtgcggatcaagaggaccaaggacgccgtcaagttcaaggtgcggtgctccaagtacctctacaccctctgcgtcttcgacgccgacaaggccaacaagctcaagcagtcgctccccccaggtccgtgcctacatttcatccacctttttcactattgactctgttctggtgcaagtggtggtggtaggactgtgtttgttgatgcgaactgttaaaatttggttgcttctaggattataaaaaatggctggttgagacagtggtatggtatggttctgtatgtcctttgtaaattcagtttggtctgacatgctaatctgggtggactggtgataaatgcc

SEQ ID NO: 37535 - DNA, 432 bp, Oryza sativa
  Clone ID: uC-osrocyp011c01b1
ctaactcttgctactgatcttggaggacttcaagagcgaattacaactacaaagaagggttccattacatctgtccaagctatttatgtgcctgctgatgacttgacggatcctgctcctgctactacttttgcacatcttgatgctactactgtgttgtcacgacagatctctgagcttggtatttaccctgctgtcgatcctctggactccacatccagaatgctctccccccatgtgttgggtgaggatcactacaacactgctcgtggtgtccaaaaggttcttcagaactacaagaatcttcaggatattattgcaattttgggtatggacgagctcagtgaagatgacaagttgaccgtcgctcgcgcaaggaagatccagcgtttcttgagccagcccttccatgtggctgaagttttcacgggt

SEQ ID NO: 37536 - DNA, 493 bp, Oryza sativa
  Clone ID: uC-osrocyp011c02b1
ggatggacctcctgagggcatgccttgtaggtgcagctggaacaccttatcatgacaatcttttcttctttgatattttctttcctcctgattatcctcatgagccaccttctgttcactaccattccggtggcctccgtttgaacccaaatttgtatgagtctggcaaagtgtgccttagcctgctcaaaacatgggcaggaactggtagtgaagtgtgggaccctgaaaattcaactgttcttcaactgctgctgtcccttcaagctcttgttctcaatgaaaaaccttacttcaatgaggctggctatgacaaattcatggggaaagcagatggagagaagaactccatcacttacaatgagaacgctttcctgctgtcatgcaagtccatgacgtacattttacacaagccaccaaagcatttcgagaattttgtcaaggagcacttcacttgttgcgcgccgcacattctggatgcctgcaggcttat

SEQ ID NO: 37537 - DNA, 506 bp, Oryza sativa
  Clone ID: uC-osrocyp011c03b1
ctcgcttctccactagggtttctcgccgccgccgccgccgctcgccgtcgccgtcgccgccggatcagagatgagcgcatccaggccggatcaccggcggcaccacccgccgtttctccgggacctctcgtcgccgatctcctcggccgtgcggctgcccccggcctccctccgccgcgagacgcaaggttccaccaccccgccgccgccgccgccgccgctgctgttcctcgacgacctctcccaccactccccctcgccgaggcccgccaccccacctcaggcggcggccatgagcccctcgcctccccctccccaccgaggcggcctcttctcctccaccccgctgcgctccaatgggtccccctcccccgccgcgtggtggtcctcctcgagggaggagatggccagggagggctcgccggtcgatggtgtcgtgcagccgcagcagcagccgtctccgacgacggcgtctgggcagcagtcgcagcagcagaaggtgacgc

SEQ ID NO: 37538 - DNA, 402 bp, Oryza sativa
  Clone ID: uC-osrocyp011c04b1
agtttgcctgcacttggtgcaggactgcatccatttcgacatcaaatggttcggttgtctgaaacagctgacataaagcctaaatggagggtacttcttcagccaggagtcaggcatgccttgtgttatggaatgctgattcaagctcttcaacagttcgcaagaatcagtggccttctccgatacactcctcaaattcttgaacaggtcggagtaattaggttgttttcagacattggacttgatttccatacagaatcgatcctcataagtgcccttaatgcttcgctgatgctcccctgtataactgctgcaatgatactgatagatgtctgtggaagaagggttcttctactggtcaggatccgcttgctaacattatcagataggtgccatatcttt

SEQ ID NO: 37539 - DNA, 501 bp, Oryza sativa
  Clone ID: uC-osrocyp011c05b1
ggagtgtcactagctctccgattaccaaatctcaaagtcctcctgttgcgcgtgggccagcagagaataagaatattgttgataagcaaaggctagaagaagaaaagaaaaggtggggagtatctactttgctatgcggagtctgcataccatctacaaaccaaactgtttactatttattcgcttccctattcctcatttatgttgacagcatgctattcattaatcaacatttttaacatcctgttaaaattatattcatctaactgttgtttttaccagaatatatcttgaggtcagctctattggcaatctgtgctctaaatacattatttaagttcttttatgaagaataatgttttttttaaatgaccttcttgattatttaatctgcaaaacttttctttaatgaaacgactgcacgtcttgcttccaaattgttatggtctcttgttatccttgcatataactgttggcttaagatgttgaactctagctctg

SEQ ID NO: 37540 - DNA, 485 bp, Oryza sativa
  Clone ID: uC-osrocyp011c07b1
gaagaggagcggcggcgagatccaattccaatcgatccttgtgctgctgctgctgctgcgctcgacgatcccatccggatctcgatggcggccatggctcgccatctccctgctattcttcttctctcgtcggcgctgctcctcgcccttgcctccgcctccgcttccgctgctgctccggcgctggccgccttcgtcgatgccgcgtcgcgccgctacctgcgggatcagcaacaccacgaccaggccgcttcaatgtcactagaccaagtttctgcggctgtttctgtcttgcttggttttgcaccaccaccctcgctacctgcacaatcttcttcaaagttagacaagctgttactccctaacccatttgacagaccacgggctgttttcttgctgcaaatcgatggattccatgcctccgttgaaagcatcacatctgaagctggtagcatcttcaaaaccactattgatggtctaagcga

SEQ ID NO: 37541 - DNA, 461 bp, Oryza sativa
  Clone ID: uC-osrocyp011c08b1
ccactctacttctccttgcaacatcgtcgttagtcctctaacccaaggcattgacctgagcttgttgtgcgcttctgccttatctgcatcccctcccggccgagacgcgaccatctttctttcccgcttcgttagctgtctctgccgatcgatcggactggacggggagacatgaaggtgcagtgcgacgtgtgcgcggccgaggccgcctcggtcttctgctgcgccgacgaggccgcgctgtgcgacgcgtgcgaccgccgcgtccacagcgcgaacaagctcgccgggaagcaccgccgattctccctcctccaaccgttggcgtcgtcgtcgtccgcccagaagccaccgctctgcgacatctgtcaggagaagagggggttcttgttctgcaaggaggacagggcgatcctgtgccgggagtgcgacgtcacggtgcacaccacgagcgagctgac

SEQ ID NO: 37542 - DNA, 371 bp, Oryza sativa
  Clone ID: uC-osrocyp011c09b1
gtttctggctccatgcatagatgcatccaaggagggtgggacgccacacgtatatttgttttatctatgctaatctgagcattatcggaggagagctctagcagagggattggattaagtcgtagtagtcagataggtggtgtgtactgatactaatgagcttggagtatactgacaggacaatgacgtgcatgatgttggctgcgttcatggtcacgagaggctgaggtgctccatcgatctggtggtctgcaacggtcagacgtcataagccaaaactcgaacggaagaattatgagctcttatagatcacacacgcaacacgcacacagttctataagcttaagaacttgaacaactggagtactaat

SEQ ID NO: 37543 - DNA, 498 bp, Oryza sativa
  Clone ID: uC-osrocyp011c10b1
tgttcaaaccagcaaccacccgccgccgccgccatgtcgggagggatcgcacgcggccgcctcgcggaggagcgcaaggcctggcggaagaaccaccctcacgggttcgtggcgaagccggagacgatggccgacgggtcggcgaacctcatgatctggcactgcaccatccccggcaagcaggggaccgattgggaaggtgggtactaccctcttacccttcacttcagtgaggactatcctagcaaaccacccaagtgcaagttcccacagggctttttccacccaaatgtctatccttcaggaacagtgtgcctctcaattcttaatgaggatagtggctggagacctgctatcactgtaaagcagatccttgttggaatacaggacttgcttgatcagccaaatcctgctgatcctgcacagactgacggttatcacatttttatacaggacaaaccagattataagaggcgtgttcgtgttcaggccaagcag

SEQ ID NO: 37544 - DNA, 506 bp, Oryza sativa
  Clone ID: uC-osrocyp011d03b1
gaacgagctgaagctctcgtgcgcggcgcggccatgaaggcgtcgtcgtcgtcgcaggggcagagcccgaggacgccgtcgccgcgcgccacctccgccaccgccgagcacacgcggtcctcctcggagccgtggctcgtggcggcggcggtggcgagcacctgcgacgactcgtgcgtcaacgacgtcgagaacttcgcgcgcaccgtcgccgccgccaagtctaggcagctggtgggctcgtcggcggcgtcgcgccccgacatgctcgcgtccgtgctgtcccactacgccgccaagtggctccccgacgtggtggccgcgtcgtcgtcgtcctcgtcgccggcgacgtcggcgtcggggcggttcctgcccccggagagccccaccgccacgtggctcaagaagcggctcctcctggagtccctcgtcgccgcgctcccgcctgacccgccggctcccgccggcggcggaggagcggccgacgccggcatcacgtgcgactt

SEQ ID NO: 37545 - DNA, 507 bp, Oryza sativa
  unsure (1)..(507): unsure at all n locations
  Clone ID: uC-osrocyp011d05b1
ctcgcctactccttcgaccgcctcaggccgccatccaaccccgccggcgtcgaggtcgcccgctcatcatccttctccaccgccttccccgtctccgagccagggcagtacacgctcgtcttcgccaactgcctcggcggggggctcaaggtctccatggacgtccgctccgccatgtacaacgtcgacccgcccaccggcgagcgctcctacctctccgcgggggccaccgcgctcccgaccatcttcggcttcttcggcgtcgcctacgccgcgctcgccgccggctggatcgccatactcctgcgcaagcgcgccgccgtgttccggatccactacttcatgctcgccgtgctcgtgctcaaggcggtcaacctgctcgccgaggccgaggacaagtcatacatcgagcgcactggcacggcgcacggctgngacgtgctcttctacatcttcagcttcctcaggggatctcgctgntcacgctcattgtgctcatcggcaccg

SEQ ID NO: 37546 - DNA, 424 bp, Oryza sativa
  Clone ID: uC-osrocyp011d06b1
cccagagcaagaagctcatctcctcctcctctcgcatggcagccatggccaccaccgcgtccagcctcctcaagacctccttcgctggcgcgcgcctccccgccgccgcccgcaaccccaccgtctccgtcgcgccgcgcaccggcggcgccatctgcaactccatctcgtcgtcgtcgtccactcccccctacgacctcaacgccatcaggttcagccccatcaaggagtccatcgtgtcccgcgagatgacccggcggtacatgaccgacatgatcacctacgccgacaccgacgtcgtcgtcgtcggcgccggctccgcggggctctcctgcgcgtacgagctctccaaggacccctccgtcagcgtcgccgtcatcgagcagtcggtgtcccccggcgcggcgcgtggctcgcgggcagc

SEQ ID NO: 37547 - DNA, 462 bp, Oryza sativa
  unsure (1)..(462): unsure at all n locations
  Clone ID: uC-osrocyp011d08b1
attgatcttgagcaatgctctcttggatatgtatgccaaatgcggggaaatgaacacggccatgagagtctttgatgaagctggtgagagggatggcatttcgtggaacactatggttgccggattcgctaatgctggcttgttggaccttgctagcaaatatttcggtgaggcgcctgccagggatataatatcctggaatgcgcttctggctggatatgctcgatatgaagaattctctgcaacaatgatactatttcatgatatgcttgctagtagtgtaatacctgataaggtgactgctgttactttgatctctgcggttgccggcaaggggactttaaattcagcaaggagtgtccatggttggngtggttaaggagcatggtactcaagattctttcttagcatccgctcttgttgatatgtattgcaaatgtggaagtatcaagctagcgtatg

SEQ ID NO: 37548 - DNA, 488 bp, Oryza sativa
  unsure (1)..(488): unsure at all n locations
  Clone ID: uC-osrocyp011d09b1
tgattattggtattggcattatttggtgaagcatttctgcttgtaccttaaacaaaggtctctgttgtcttattggtgctgaaggcaagatatacactgcagtgatggctcaaacttgcttgccacctggctttcgttttcatccaacagatgttgaacttgtttcatactatttgaaaaggaagattatgggaaagaagcctcttattcaagctatatcagatgttgaactgtataaatttgctccctgggatcttcctgctcaatcctgtctccagagcagagatcttgaatggttcttcttttgcccacgagacaagaaatatcctaatgggtctaggacaaatcgttccacaccaaatggttactggaaaacaagtgggaaagatagaacgattgagcttaactctcgcattgntgggtcaaagaaaacactgatttttcatgaaggcaaagcacctaaaggcaacaggactgattgggtgatg

SEQ ID NO: 37549 - DNA, 479 bp, Oryza sativa
  Clone ID: uC-osrocyp011d10b1
agtaaatctagcttgctgtaaacacagttagttcgtaattatcgcatagggccatggggaagtacagtgtgggtctcgtggttttagggttgctggcccttgcgttttcgaccactgtgctggctgaaacacatgttgttggtgactccaacggttgggacttctctgtgtcgtttgatagctgggctgatggaaaggtcttcgctgctggtgacactcttgttttcaactacaaaccgggcgcacacaacgtgctggccgtggacgcggcgacgtacaggagctgcaaggtgggcagctcggcggactcggtggcggcggcgacggggaccgcgtcgttcctcctcaagaagggcgtcaactactacatctgcggcgtccccggccactgcgccgccgggatgaaactccgggtcgtcgccaactgatgaaactccggcgacagatcaatcccttattaattaaaactatgtgggtgt

SEQ ID NO: 37550 - DNA, 509 bp, Oryza sativa
  Clone ID: uC-osrocyp011d11b1
cttttctctccgattctgcgaggcgacatcggcggcgagaggcgggctagggtttcgagcaccgccaccgcgcgccatggccgaggccaaccagtaccagatcctggtgcggctcctcgacggccgcacacgctgcctccgcttctcgacgacgaccgtctccggcgcggcgctcctcgacgccgtctcggcgctctcccgcgtccccgccgcgtccctccgcctcgtcaccggccgcctcgacgtctcgccgtcctccgtcctcgcctcctccgccgacggccgattcccctccgcatccgcgctccttcgcctccgcggaggcaagggcgggtttggctcgctcctccgtggcgccgcctccaaggccggccagaagaagaccagcaacttcgacgcctgccgcgatatcaacggccgccgcctgcgccacgttaacgccgagccgccgctcgaggagtggaaggccgaggccgcagatcgccagctcgagaagctcgcggaggatt

SEQ ID NO: 37551 - DNA, 512 bp, Oryza sativa
  Clone ID: uC-osrocyp011d12b1
ccccacccttttctccatttcgtggccaactcctccgcagacctgcccttccgtatgggccttcccggccgtcgccaccgcggcgccatggccggccgcgccctcgtcgtgctgctgtggtgcgtgtccgcctccgtgttcctcccctccgcccgcgcgcagaccaccaccttcaccagcgccatcgacggcaagaaggcgaccaccttctccttccccacgttcgacaagtccctgatgcagctcggcgccaacctgaccttctccagcaacgccaccgtcagccagagcgcgctgcaagtcaccccggacagcagcaacaatcctctggactacctcgtcaaccaggccggccgcgtcttcttccccaccccgttcgtcctgtggtcctccaactcgtccaactccaccgccgatggcaagtacgtcgcctccttctcacggtgttcagggccaacctctaccgatcaaacacgaccatgaaaggagaggggctggcgtttgtcatcgcg

SEQ ID NO: 37552 - DNA, 499 bp, Oryza sativa
  Clone ID: uC-osrocyp011e03b1
gtgttggtttcagaaatcccatgctgcatatcatcagttgcacggcgagtcattgggtccaacatgcttaaagttaaagttggtggatgtgctcttcttgtttgcgcagcgaaagagcattgtcagaagcagatagagattctcagtgactcaagcttgtacattcaactaatccattctctagtcagtatgattcatatgacaaacttgccttctgaaaatgggagtggtgaaaacatatcagacattaaaatttctagacactccaaagaaaataacaacagcgatgaaactgtgtgccgcactgctgtaatctcaggtaacatgattccgctatggctgcttgctgtttttgcacgccatgacagcaaaacaagggctgaaattctagaagctggagcagtcgaaatgcttatggagaagatttctcaaaatgcattcctatatgtgggcgacgaagatagcaccccatgggtctgagccttacttgttgctttgc

SEQ ID NO: 37553 - DNA, 328 bp, Oryza sativa
  Clone ID: uC-osrocyp011e04b1
tgctgcgcctgctggtaccgccgcggcattctcggcgggacctatgcgtccgtgctttcggcgtcgccgcccttgggggtcgccatgacgactgaggttcaagaagaaccggatgaaactcgggcgcgtgtcgaccggtcacggtcggatcggtaagtatcggcaggaccctcgagggcgcgggaaccccggtggtatgcaccaccaccacgtcctgttcgacaagtaccaccagcgctacctaggcaaggtcgggatgtgctacttacacaggctcagtaacaggttccactgtcgccgcgttaacgtcgagcgcctctggtccatg

SEQ ID NO: 37554 - DNA, 486 bp, Oryza sativa
  unsure (1)..(486): unsure at all n locations
  Clone ID: uC-osrocyp011e05b1
ccggtatggcgctatggtacgagcacctgggaatgctggatgatgtgttccagcgccccgagagcctggagtgtgtgcagaacgtgaacaggatcgcggagaagtactgggacatgtactccagcgacgacctccagcaggacctccctggccacctcctcagctaccccattggcgtcgccagcgatggtgtggtgactgagctgcccgggatggagtacttccctgacacacgggcccgcgtcctcggcgccaagtcggattacatgccccccatcctcacctcatagacgaggaagcactacactacaatctgctggcttctcctgtcagtccttctgtacttcttcagtctggtggcgagatggtatggccgttgttcagaatttcttcagatagcagttgttacagttgtgaatcataaaagaataagtgcagtatctgtgcatggttgagttgggaagaagatcggngatgcaatgatgc

SEQ ID NO: 37555 - DNA, 480 bp, Oryza sativa
  Clone ID: uC-osrocyp011e06b1
gttaattcggaggcggacatacagctcgcgatcaagtcgctccgggcatcgagcatgtcgcatgagatggtcgaggtctcaactgtcactgacaggagggatgaaggtgcatcctccaggaagttcacaagaactgctagccagcagaggagtgtgatcatagaggactcgccgccgtctcccgccagcaatggcgacaaggagaaggaagatgaggttgcggagaagagatggagggtgtttgtgtggaagactgctgtttatctcatcactcttggcatgctcattgcacttctcatggggcttaacatgtcatggacagccatcactgcggctcttgttcttctggcgcttgattttactgatgcacaggcttgtctggagaaggtgtcatactcattgctgatcttcttctgcgggatgtttattacggtcgatggcttcaacaaaactggcataccgaacacactttgggagctc

SEQ ID NO: 37556 - DNA, 469 bp, Oryza sativa
  unsure (1)..(469): unsure at all n locations
  Clone ID: uC-osrocyp011e07b1
cggacgcgtgggccgcttcgaaacccccgacgcgaaggaagcgagacgaaaccctcgcgcgagccgcctccgccaccgccgcctccttccgaccagccgccgccgccgccgccgcgtcgccgaatccgggcgggggctaggcgcgggctccccgctccccgccgatcgaatccttcgagggagcaatggccggcgtggtgtggatgaggacgtgaggtgggagcgatggtggggatggaagggaaggggngatgccatcggtgacaccagtgaggactagtgaccggctgcgtaagcggcccaagtacttcggtcgcaattatatgtactacaatccagccatacgcaagangatgaagtctaagaagagagcggctgcatcacagattgccaagaagctgcttcgcaagtcagctgccagggcaccgcctgctgattctattggagcaaatctacgtcgttcaacacg

SEQ ID NO: 37557 - DNA, 492 bp, Oryza sativa
  Clone ID: uC-osrocyp011e09b1
ctagttctagatcgcgagcgccgccctttttttttttttttgctagtatactaataatatagatatcccttatcccaattttattacaaaggtacaaatatcacaactcacaaccaagagttgtactaataaaacacgctataatctgaaatgatcatatagctctaactttaatctgtgcaccgtgcattggatgcagagttaccatagtatgcggcgcatgagtatacgatggcgcaagctcaaactccaagcgttgaagaatcaggcacaatgccatcttggcctcaagcagcgcgaagttttggccgatgcagattcgtggcccccaaccgaacgggaggaatgcacccggatccttagacgccttagagatcccctcagagaacctctcaggtttgaactcatgcacatcacttccccaggtgtccggatcatggtggatgaacaacacggggattttaatgctgacaccagctgggtaagtgactc

SEQ ID NO: 37558 - DNA, 499 bp, Oryza sativa
  unsure (1)..(499): unsure at all n locations
  Clone ID: uC-osrocyp011e10b1
atctatccatcgatccattccgccccgcagcagcagcagatagctagctagctagcaaacaatggcggcggatcatgaattgcgagctgcagcagtggtgatggtggtggtggtggtgctgggcatggtgtcgacgtcgtcggcgcacgtgttcgtgggggcgtacaacacgacgtgcccgaacgcggaggacatcgtgtacaaggagatgaccagcatcctcgccaagtcgccggagctcgccgggccggtgctgaggctcttctccgtggactgcttcgtgggcggctgcgaggggtccatcctgctggactcgacgccggggaacaaggcggagaaggactcgccgctgaacaagggagtgaaagggtacgaggtggtggacgccatcaaggccaagctcgacgccgcctgccccggcatcgtcttctgcgccgacaccctcgacctcgccgnccgcgacgtcgtgcgcctgacgaaagggccgtacatcccactt

SEQ ID NO: 37559 - DNA, 491 bp, Oryza sativa
  Clone ID: uC-osrocyp011e11b1
atactagcttgcttgttcaattcaatcgagcagtagctaattgcatagtgatcgatcgatctgtatagatggtggtggccggcaagaagcagggacggcattctttttctgcatcatcatcgtcgtcttcgtcttcttattgttcagtagtgcagctggatcatcatcagcgcccacagggtgaggaccctctcatcggcatcaaagcagtagcagcaggaggaggaggaataatgagaaagggcccgtggaccgagcaggaggacgtgcagttggtttggttcgtgcggctgctgggcgaacggcggtgggatttcttagcaaaggtgtcaagtttgcgcggcgccggctgatgagcatatgcgtgcgtgcatctaatctatcgattaatcgatgatgatgtcgatcacatggatggatgcatgcatatgccgtacatagtagattcgatgatagtcactgacataaatataatgtatgcgtgcgatcac

SEQ ID NO: 37560 - DNA, 488 bp, Oryza sativa
  unsure (1)..(488): unsure at all n locations
  Clone ID: uC-osrocyp011e12b1
gttgactcgtacgctgtttccggcggaaagtagtgcggctagtccggtcgagacaggggacgcggctgccgccaccgcgaggtggagcgccgtgttgccatccttgtcctgcgcgttgatgatgccggcgagcatcgggttcttgacggcgagcgagatgaccgacttgtgccctttctcggccgcggcgtggaggaacgtcctgccacggtcgtcgcggagctcggcggtgtccggccacgccgacatcaggtcctcgacgacatggtggtggcccatcagcgcggcgacatggatggccgagagtccgtccgagtccttcaagaacgccgtggacggcggcgcggcgcgcacgattgcgcttacgatggagctgtcgccgtcggacgacgcgagatggagcggactgctgcctttgatgtcgccttgtccggacaganctcgtttccatttaatatcaggtcgaccatttcttgcaattatgaatg

SEQ ID NO: 37561 - DNA, 465 bp, Oryza sativa
  Clone ID: uC-osrocyp011f02b1
gttattcgagtgagccgccatgccaagacgtacatggagggcctcgtcggcgcgctcgtccggatgacgacgacgctgtacgaccccgacgtgctcctggcggccatggatcacaacttcacggcggtgctcaccgatctgctcgtgcggtcggcgggcagcgacgaggtgcagcggctcgcggcggtcggcctcgagaaccttagccaccagtcggtgaacctctcgcagccgccatcagaggagcagcggcgccccaagaagaagaacatcctccggcgcctgcgcgacgcgcacaccgggcgggtgcacgacaacaaccggaaaccgccgccggcggcgcagcagggacgcctttgcccggtgcaccggggcgtgtgctccccagccaccacgttctgccttgtggaggcccgcgccgtggaggcctcgtcggcggtctcgagagaacgagacggccgcgtg

SEQ ID NO: 37562 - DNA, 469 bp, Oryza sativa
  unsure (1)..(469): unsure at all n locations
  Clone ID: uC-osrocyp011f04b1
ctgactcgtgggctaaaatggagatggtcattctattgttctgtatttatcatgcggattttgctcgcgcacaaggattttgaaagcatgttcatcttacaagttggagaatattttcctttcatgtccatattatttgccagcaccgtgcacagacaagtcgttgttaacaatggaggttgtccaatcatcacggaactccttttcatgtgatgctacgtggcaagaacacaaattgatatgcaatgttgggtaacataacaaagaacattatgtgagaagatttctctatggttcctagctggatgagctggaattatgtgagaagaatattgtggtcttcgggctgttcgctgctttctgctagagaagtttggaagtatctacagttattttgtggtaaaggagaattgttgggtggtgagttttatgcagcgaangagatcgaacatgacatcctatgaggttt

SEQ ID NO: 37563 - DNA, 514 bp, Oryza sativa
  Clone ID: uC-osrocyp011f07b1
gttctgacaaaatcaattcttgagaacaataagtgctttttggtcgactgtgggtctgatttatttatatgggttggtcgactaacacaagtggaggagagaaaagctgcaagtgcagcagttgaggaattcattgctactcaaaataggccaaagacaacaagagtaacccgagtgattcaagggtacgagaatcatacattcaagtctaagtttgaatcatggccagtaaatagtgcaggaagtgctggcgcggaggaaggccgagggaaagttgcagctctgttgaagcaacaaggagttgatatcaagggagcctcaaaaagcagcgctccagtagacgaggaagttcctcctttgctagaaggcgatggaaaacttgaggtttattgtgtcaatggcagtgctaagactgctcttccaaggaggagcttgaaagttttacagcggagattgctatattgttctctatacatatcattctggtgacaagagagaagaatttatttgactt

SEQ ID NO: 37564 - DNA, 434 bp, Oryza sativa
  Clone ID: uC-osrocyp011f08b1
cccacgcgtccggcctttctctctggtagcttcgccttgctctccagcttctgcttttgctgccgcccatggccgatccggccgccgaggagaccgtccccgcgccgccgccaaccccggcggtcgaccccgccgagggtgcctcggacgcgccgcagccggtcgagctgcccgccgacaccgccgccgcctcgccggagaaggtgtcgtcgccaccaccggagccggcgccggcggtgaggagccgggggttcaggctgctcggggaggacacctccgtgcacaaggctcttgggggcggtaaaactgctgatgtactattatggaaagacaagaagacatccgctgtagtgattggtggtgcaactgtcatatggatcttgtttgaagtgcttgattaccatctcttgactctgctttccatgtgatgattg

SEQ ID NO: 37565 - DNA, 470 bp, Oryza sativa
  Clone ID: uC-osrocyp011f10b1
ctccctcctctcgctactagactagagagtaggtagagctagctttctagctcgtggatcgttaagtttgtagtcctgcccgggcgccggcggtgaggtcgcgatggccggcggcgcggtggtgagcacgggggcaggcaaggactaccctggcaagctcaccctcttcgtcttcttcacatgcgtcgtcgccgccaccggtggtctcatcttcggatatgacatcggtatatcaggtggtgtgacgtccatggacccgttcctgaggaagttcttcccggaggtgtatcggaagaagcagatggcggacaagaacaaccagtactgcaagtacgacaaccagctgctgcagaccttcacctcgtcgctctacctcgccgccctcgtctcctccttcttcgccgccaccgtcacccgcgtcctcggccgcaagtggtccatgttcgccggcggcctcaccttcctcatcg

SEQ ID NO: 37566 - DNA, 459 bp, Oryza sativa
  Clone ID: uC-osrocyp011f11b1
aatgcatgggtactggctgcaccatatcttctgctaagggtagtgatgatggttcttctattgatttggatttgaatcattttactctgggcaatgaaggtacttccaggcttgataagcgggcctgtgattctaggagggctttggataagcctgaattgaatcttgagctgtctttgtcatcccagtctgctattactggtgcagacttcactgcagcgactgaatataatagcccaagtctgcagccatactatatggacttagtgccaacagttgatgaaggatctacatctgctcgccgaccatctggttgtcaggtactgtctttccttaataagactgcaaagatgagtgaattttctccaaggaggttttcccaggtagctctaaccagagtcaaggtcccgctccaatgccaacattgcttcaactgccaaaaagtccagtagcctgtac

SEQ ID NO: 37567 - DNA, 481 bp, Oryza sativa
  unsure (1)..(481): unsure at all n locations
  Clone ID: uC-osrocyp011f12b1
acacctcctaatcaccacaaaggcttaaaaatctccagtctccatagagagaaagagagagaagagaaggcagcttgatttggggcgaggagacgcgatagccgcgataggctaagcagctggcagcggcggctgctgcgatggccggcgccgacgtggacgtcgggacggagctccggctggggctgcccggaggtggcggcggcgccgccgaggcggcggccaaggccgcgaagaggggcttcgaggagaccattgacctgaagctgaagctgcccaccgccggcatggaggaggccgccgccggcaaggcggaggcgccggccgccgagaaggccaagaggccggcggaggccgccgccgccgacgccgagaagccacctgctcccaaggcgcangcagtgggttggccaccagttcggtcgttccgcaggaacatcatgaccgtccagtcagtgaagagcaagaaggaagaggaagc

SEQ ID NO: 37568 - DNA, 73 bp, Oryza sativa
  Clone ID: uC-osrocyp011g01b1
atttttaccttgcctctgactcgatctcgcgcccgtgaggatggcgggagactcgacgccgccgacgacttag

SEQ ID NO: 37569 - DNA, 355 bp, Oryza sativa
  Clone ID: uC-osrocyp011g02b1
ctcactataggtaaagctgctcctcctgcacgcgccgcggcctgaaccggctggacccacgcgtgcgcgttcttcctgggctgagacccactactccgagccatcaagaacacacacatccagaacgcctaatccaatccaaaagctctaatcactcagactccatctctgtgaggtttgagagaggtaggtgcgctctatatctgagcgagttcttgggtcttccagcaggtagatcacttcatctgaggagcaatctttgtttttcctttgtttttgagcttctgttggtgtacaggacagagagctacagagtcttttagttagtggagttctgatctgaacttggtgtcag

SEQ ID NO: 37570 - DNA, 465 bp, Oryza sativa
  Clone ID: uC-osrocyp011g04b1
cgagaatttctccacctactttgagctgagcctgatcgattcgcgagatttccgttcatggcggcgaagtctttgagggagatcaggagagcggcggcggcggggattgggagtaggagatgcttctccggcgacgcggcggcggcggcggcggcggcggcgggggtggcggaggggaaggtgggaggaggagcggagacagacctccacctcttcgcagccataggcgccggtgaccgatggagtctaggctgccaagcccgctatcaaggaagttagtgaacctgccgtcctagagggcactgacactgcccctgagaacgagctgggcgattcagctggggaagcacaagccgtgcgcaatccagctgacggggaggtgcatgtttaccctgttggtgttcagacacagtctggtgaaaagcttgagttgcacctttaccctggaacttcctcatggatgtg

SEQ ID NO: 37571 - DNA, 484 bp, Oryza sativa
  Clone ID: uC-osrocyp011g05b1
gtgagatcgagggagctaattaatcaactagctagcttgcacaaattaatggcgtccaacaaggctttcgttgtgttcactctcctgatgctggtggctgcatctgccgtcgtcgacgtcgcctctgccgacggcaagtgcgggccttgcaactgtaaaggctgctgcgactatgacggcaagtgcatgagctactgcagcggccatagcggcccatgctgcaagtggaaaggcaagtgccacggctgctgctcatgagcacgacgaggcaagaaccgaacgaataatggattatgacaaataaaaacgcacacataaaaccttacagatatatgtatctgctatacatgcatgatgatgtgcttgtatagctacttaattatcccttagctgtttgcttggtcaataaaggattgcatctgctgtgtgtatactgtgtacacacggctagctagtatgtatgtatgtatgtatatgctcttat

SEQ ID NO: 37572 - DNA, 482 bp, Oryza sativa
  Clone ID: uC-osrocyp011g06b1
cgcatttgtcgcagaatagcaagttcgacttccacaaatacatcaagaggtcattagaggacgatttcaaagttgtcgttggcatcagcctcccattgtggtttgtcgcgatccttgtgctcttccttgatatccaagggttcggcacgcttatctggatctcttttgttccactcgtcgtaagtgcgaattatatatatttcttgacttcttgtgcaaatgaatagtcaacagaatcatgattttatcctacaaggtatgcaaaacatttgacaaaaaaaatgcatgccgttgtctttagatcctcatgttggttgggacaaagctggagatggttatcatggagatggcacaggagatacaggacagggcaactgtgatcaagggagcaccggtcgttgaaccaagcaacaagtacttctggtttaaccggcctgattgggtcttgttcttcatacacttgatactgttccagaacgcat

SEQ ID NO: 37573 - DNA, 483 bp, Oryza sativa
  Clone ID: uC-osrocyp011g08b1
ctcactcctctccccctccacgatctcgccgggatctccacggcggcggcggcggcatggcgggcaacgacaactggataaacagctacctcgacgccatcctcgacgccggcaaggcggcaatcggcggcgaccgcccctcgctcctcctccgggagcgcggccacttctccccggcgcgctacttcgtcgaggaggtcatcaccgggtacgacgagaccgacctctacaagacatggctccgcgcaaacgcgatgcggagcccgcaggagaggaacacgcggctggagaacatgacgtggaggatctggaacctcgcgaggaagaagaaggagttcgagaaagaagaagcctgtcgtctgttgaaacgccaaccagaagctgagaaattacgaactgatactaatgcagatatgtctgaagatctatttgaaggagaaaagggagaagatgctggtgatccctcagttgcgtatggtgaca

SEQ ID NO: 37574 - DNA, 478 bp, Oryza sativa
  Clone ID: uC-osrocyp011g10b1
cccacgcgtccgcggacgcgtgggcgaggccaatcattctctcccttcccctccgcctcgcgccgcctctcctctcctcgcccccctcaccggagccgaagcttccccgccgccgcgcggcagggaatatggcggggaagtcgaagggcgcgaggaacaaggcgaaggcgcagggtggaagccaggccgccgtcgcggcggagccggaggtgccggtgaccgatggagtcgaggatgccaagcccgagatcgaggaagttagtgaacctgccgtcgtagagggcagtgacactggcgctgagaaggagcagggcgatgcagctggggaaacacaagccgcgaagaagccagctgaaggggaggttcatctctaccctgtttctgttaagacacagtctggtgaaaagcttgagttgcagctaagccctggagactccgtcattgatgtcaaacaatttctcttggacgctcctgaaac

SEQ ID NO: 37575 - DNA, 466 bp, Oryza sativa
  Clone ID: uC-osrocyp011g11b1
cggtgctgcaatgcttgacgtacacagaaccatttgcggcctatttgcagagcgggaagcacaagtcttcatgtcgtactgctggattttgtgcactatgtgctcttcaaaaccatgttaagactgctctacagtcaactggaaaaatagtgacgccatcacagattgtcaagaacttgcgctgcatctcccgtagtttccgcaattcaaggcaggaggatgcacatgagttaatggttaatttacttgaatccatgcataaatgttgtctaccttctggagtaccaagtgagtctcctagtgcatatgagaagagcttagttcacaaaatatttggtggccgcctaagaagtcaggtgaaatgcacacagtgctcacattgctccaacaatttgatcctttcttggatctcagccttgatattggtaaggccacgtctctggtgagggcacttcaaaatttcact

SEQ ID NO: 37576 - DNA, 395 bp, Oryza sativa
  Clone ID: uC-osrocyp011h01b1
tttattcatccatccatctacgcgtagattttgcttttctttgctttgctttccagttgtaattttgtgtacgagtacagcacaagctcagctcagctgcttcagctataaaagcttctcactctctcacacacacactctctctctctgctagctcagctctagatccagcaatggcgcctcctccggctgcagctgcggcgttggcggcgtgcattctcgccgtcgccgacacccttgccggcgccgacgacccctaccggtttttcacctggaacgtcacctacggcagcatcaaccctctctggtccaccccgcagcaaggcattttgatcaatggccagtttcctgggccgagaatcgactgcgtgacgaacgacaacatcattctgaac

SEQ ID NO: 37577 - DNA, 481 bp, Oryza sativa
  Clone ID: uC-osrocyp011h04b1
ggtggaggcggcggaggacggcgagcggtcagtggcggagaggggagtgttcggggacgcggggtttgcgaggtggggggagctcttgcgcctcggatcggctcacttcccgacgcctcagcccccgccgcgccgcggattattgctgttaggttaaagggattgtggtagcgagaagcggtggggttgatggagtgcgtggtgcaggggatcatcgagacccagcatgttgatgctcttgaggttcttctccagggcctctctggtgtcccaaaagaacgtgtcagagtgcatgagctctgtcttaaaagtgggccaaatctaggagttgtcccatcagaggttcgtttattgtgtgacttagctcagtccacgccatcctggaccataagacatgttggaggtgccatgagaggtgctggtgcagagcaaatctcagtccttgtgcggtcaattgtagagagcaaagccagcaacaatg

SEQ ID NO: 37578 - DNA, 474 bp, Oryza sativa
  Clone ID: uC-osrocyp011h05b1
gcccggtcggtcagtgtgtgtcactgtctctcaccctcccaacgcttagacatttcaacgttctcctccacagcaacagcagcagcagcagcatctcctcttcttcaccgcatctgccagcctagcgagcctaatcaggtcttcgtcttcttcttcctcatccccgtgccaataccgatttcgcgagctccgatggattccgcgagagaggagacgtcgccatgagaggggaagccgagctgtgcgtgtagctcgctgcaatcgctgcgccggtcaagaaaccagccggaatcggcggctgattccggtggaggaagatgcggcggaaggcggccggagatgctgctctggtaggcggctgcttcttgctgctcctccaccctctcctctcccatggcgcggacatgccgttgggctcctccctctcgccggcgaaccaggcgttgtggtcgtctcccaacaacaccttctccc

SEQ ID NO: 37579 - DNA, 503 bp, Oryza sativa
  Clone ID: uC-osrocyp011h07b1
caaagagattaccatacattctcgtgcaccatgttatccatggtaaaggagaacctacatcatagatgttcctggagctctattaatttcgtccacctggttacggaaaacaccacagttaccccgactgaatgcaaccttcagctcaagagtgcaactaccaactttgtggccgatgatgagatatccctgttcatggctttgctactggtggaaaaaagggaaaccagaatttgcaaggttagataacattgagctgaaaattggcggatatgtgtaagtgctagagtacacttgcgatgtacaacaattttgacattttgtgtgttgcatgagaccgatagtaaaaacagcaccggtatgtaaccgaaaccagtagtgtttggagcctcggagctggactgcggtggttttgaaaggtgaaagttgattaaaagtacactcgaaacacttagtgaacttttttttagacatcagttaattactattacccggctttttgg

SEQ ID NO: 37580 - DNA, 497 bp, Oryza sativa
  Clone ID: uC-osrocyp011h11b1
gaaactagctccagttggcattcaagctctctctccctctccttgctagctgctcatcaacaatttgctatacttcccatggctacttacagtagctctgcacttttcatcctcttcttgcttccaacattcctgagcatggctgccagcacctactatgatatatatcctgtggagtgtggttgccctgaccaaaatgaggttaccatgcacttgtatctcaccagtttgttgctggagcaaatcacccaaaccgcaatgaagaatttgtgatagcctcgagctatcctaatggattcggtacaacactcgttgacgactggtatttaacagctacaaccaatcccaatgataatatcgttgcacgtgcacaaggcatgcatgtccaggctggccaaagcaatgctaacatgtggtacacttcccacaacattgtgttccaggatgacaggtttaagggatccacacttcaggtgatggggattattgctgcaagc

SEQ ID NO: 37581 - DNA, 482 bp, Oryza sativa
  unsure (1)..(482): unsure at all n locations
  Clone ID: uC-osrocyp011h12b1
cattggtattcctgccaacaacaaggggaagcagagcattggttgcctcttctggctgcttgctaggatggttcttcagatgcgtggcacaattctccctgggcacaagtgggatgtcatggttgatcttttcttttatagagatccagaggaagctaaggagcaggaggaagaggaggctgcagtaggtcctgaatatgctgcagttgctgagtatggtgctgctccaactgacaattggggtgaccagcaatggggtggagaggtccagcctcctgccctccctgctgcaccgactggggaatggggtgctgctccagctcctgtggctgcagaagggtgggatgcagttgctgttcctcctgccgctgctgctgctgttgcacctcctgccgnccctggatgggaagaaggcaatgctcccgcacctactgncttgtaggaaatgtgcggatcatcattcgtcagctactggaggaaaa

SEQ ID NO: 37582 - DNA, 553 bp, Oryza sativa
  Clone ID: uC-osrocyp012a01b1
ccccgtggtaatccatgtagcttttatcgggcggagtcatccaaagctactggcacataattagccttgctttgctatctcctcctgctgcgcggattgcgagaccatagacggtgagccatgactcgggatctgtttttgcgtcatacttctcaatgccagtcggcttaaaaacagccggccaatccactcgacgcaggtcacttgtaaaggctgcaactccatcttgatcatcttcgtagcggtctggtgaatgatgtcgtcgattgcctctttctgcatggtgacggttgattgtatcgtgaagatcgatgggttgccggtgacgtggcgagcaaggctactctacgtggtactccctgtgcctgtcagctaacgaatgaacagagcgttcagcatgatccctgctcctgcgattagatcctgatgcggcaacgctgaggcttggctggtgccgtgcagagaggcttggctagtgataatcttgatatcagagaggcggaactcggctgctagttgacgttcggacgcttaccgagttgactagaacaga

SEQ ID NO: 37583 - DNA, 547 bp, Oryza sativa
  Clone ID: uC-osrocyp012a02b1
cgcctctcgcctccgttttgctttggctgcggctgcggcggcgcccctctcctacaccggacgcgccgcggcttcctcgcgccgagcaccaccaccacccagacgacgaggacgagtttcgcggcgatgagctggctcgggaagctggggctgggcgggctggggggaagcccgcgggcgtcggcggcgtcggcggcgctggcgcagggccccgatgaggaccgcccggcggccgggaacgagttcgcgcagttcggcgccgggtgcttctggggcgtggagctcgcgttccagcgcgtccccggcgtgactcgcaccgaggtgggatacagccaggggaacctccacgacccgacctacgaggacgtctgcaccggcgccacctaccacaacgaggtcgtccgcgtccactacgacgtctccgcctgcaagttcgacgaccttctcgacgtcttttgggcgcgccacgatcccaccacgcccaaccgccagggtaatgatgttgggacccaatacaggtcaggtatctactactacacccctgagc

SEQ ID NO: 37584 - DNA, 520 bp, Oryza sativa
  Clone ID: uC-osrocyp012a03b1
atccagtttaaacactaaaaagatcaaagtatcaaacttgaccaagagaaaacaatattgtgttgtagcttagaagtgataagtcacacttgagatgatggcgccttcgcgtccaatggctagtgccgtcctcttggttgtgtgcacgttgatggctttgcaggcaatgggggcggacgcgtactacaacaacggcagcgacgactgcgtgacgatgcagatgttcgaggagtggatggccaagttcggcaagacgtacaagtgccacggcgagaaggagcaccgcttcggcatcttccgcgacaacgtccacttcatccgcggctacaagccgcaggtcacctacgactccgccgtggggatcaaccagttcgccgacctcaccaacgacgagttcgtcgccacctacaccggcgccaagccgtcgcaccccaaggaggcgccccgtcccgtctaccccatctggacgccctgctgcatcgactggaggttcaggggcgccgtcaccggcgtcaaggac

SEQ ID NO: 37585 - DNA, 291 bp, Oryza sativa
  Clone ID: uC-osrocyp012a04b1
acgttttacctctgtactaccccgcacgacacggcgcgacacggcgcaacgcgacgcgaggaggtgagcgcggatgccggcggacgcggcggcgaaggggatgaagctggagaggtacgcgagcggcgcgggcgcgatgctgctgctgcatcgggcggatgagcgtcaaggtcgtgtcggtgtcgtcgcacctgctgttccgcgccaccgtgctcgccacgatggcgctcgtgttcctcttcacgatccactacccgtcgctgctgtagcgctccttcacgctctcctacg

SEQ ID NO: 37586 - DNA, 438 bp, Oryza sativa
  Clone ID: uC-osrocyp012a05b1
gtttcgattttgctctctcgctcttctccctccaataattcgcttgccctctggtggctcaaagcccagggaaattgatggagaagaattggggtagccccatgccacctggttcgggctagatctccggcgagacggccgctgggagcagccgatccggccccgatccgatgggtggcgaggtgccggatccggaggggctgaaccgggcgctcagcttcgacgactgggtccccgacgaggcgctgcacctcgtgatgggccacgtcgaggacccgcggtacagggaggcggccgtccgggtgtgccgacggtggcaccggatggacgcgctcacgcgcaagcacgtcaccgtcggcttatggtacgtcgtgcgcaccttgcgcctacgggagcggttcccgcggctcgagtcgatctcgctcaagggcaagcccc

SEQ ID NO: 37587 - DNA, 444 bp, Oryza sativa
  Clone ID: uC-osrocyp012a06b1
tgcccctccggtcccgaatcccagtttcgtcccacgcctacgcttactcttgttggaatggcagggccggtcccgaccccaggaattgcctcatggacgtcaactcgtgttgcaaaagtactccagtctttctcattgacttggcctgcagcatttggtgtcattcacgcctgctatttgtctatatactatctgtctgcatgccaaacagcccatgtggcagctttgtcctcagcatttattgcgacgcatttagcatctggctttccagctatactgtcggcacttgctttgacatacaagtgaaatctctatggtgcactgacacattatagtagtgggcagtctgcaccatactatggagcggggcatgttgatcttcctgatgtattgaaactgggttctacaacaacagcaatcaatgctgtgatatggggagtcgtc

SEQ ID NO: 37588 - DNA, 536 bp, Oryza sativa
  Clone ID: uC-osrocyp012a08b1
ctctaccaggagtagattgtttcaatataaaggaaattgcaaagaaggagagttatttaactacattccaatggtccgatggaggatttggatttttatggaattcacgtgtttccccgatgttgtggcgagctgtggcaggacctcctgcccaagcatggtttcctgcttgtgcgtatgccgtcatgccgtttgagaattggtcgggatcaatgaagtttagattccaagttgtgtgttctagttttcataaagggcgtttgcgtatcgtgtttgatccaacaggtgctcaaacaaatcctgagttgaatgtcgcgtattctcacgttattgatatttcagatactcaagattttaccatagaggttactcatatgcaaacacgaactttgttaactagggctgaaccgccatttacactgtttaccacacaatacggcactactttgatgtcaccgttgtacactggtaatggaactattgctgtttatggtgagactattctcgccactcctaatagcacagtggatgcacct

SEQ ID NO: 37589 - DNA, 494 bp, Oryza sativa
  Clone ID: uC-osrocyp012a09b1
tcgtttaaaatttctccccaatctcgcgaggctctcgtcgtcgaatcgaatcctctcgcgtcctcaagatgcagatctttgtgaagacattgaccggcaagactatcaccctcgaggtggagtcctctgacaccatcgataatgtcaaggctaagatccaagataaggagggcatccccccggaccagcagcgtctcatcttcgctggcaagcagctggaggatggcaggacccttgctgactacaacatccagaaggagtcgacccttcaccttgtcctccgcctccgtggtggcatgcagatctttgtcaagactctgaccggcaagactatcacccttgaggtggagtcttctgacaccatcgacaacgtcaaggccaagatccaggacaaagagggcatccccccagaccagcagcgtctcatcttcgccggcaagcagctggaggatggcaggacccttgctgactacaacatccagaaggagtccacc

SEQ ID NO: 37590 - DNA, 543 bp, Oryza sativa
  Clone ID: uC-osrocyp012a10b1
ctgacgcgtggggcgctgctcgtcgtcgccgccgtggcgcagctcggcgcgtccgacctgaggacggactactacaacagcacgtgccccaacgtcgagagcatcgtgctcggcgtggtgaaggacaagatgcaggccaccatccgcaccatcggctccaccgtccgcctcttcttccacgactgcttcgtcgatgggtgtgacggctcggtgctgatcacgtcgacggcgggcaacacggcggagagggacgcgcccgacaacctctcgctggcgttcgagggattcgagacggtgaggagcgccaaggccgccgtcgaggccgcgtgccccgaccaggtctcctgcaccgacgtgctcgccatcgccacgcgcgacgccatcgccctgagcggtgggccattcttcccggtggagctgggcaggctggacggcatgaggtccagcgccagcaacgtcgccggcaagctgccgcagccgaacaacaccctcagcgagctcgtcgccatcttcaaatccaacggcctcaacatgtctgacatg

SEQ ID NO: 37591 - DNA, 514 bp, Oryza sativa
  Clone ID: uC-osrocyp012a11b1
ctgaggatgctgttgagttttaggatgagaatgtgatgaataagatgatgatcaaggaagtctctcacgagtggaacgtgatgaacaagcagaaacccatttggttgaggaagccagaggtgatcaccactgaagagtacgctgctctgtacatgagcttgacaaacgactgggaggaacatctggctgtcaagcacttctctgtggagggtcagctcgaattcaaggccatcctgtttgtaccaaagagagcgccatttgacctctttgacaccaggaagaagcaaaacaacatcaagctgtacgtacgccgggtgtttatcatggacaactgtgaggagctgatcccagagtggctcagctttgtcaagggcattgttgattctgaagaccttcccctcaacatatcacgtgagatgcttcagcagaacatgatcctgaaggtgatccgcaagaaccttgtgaagaagtgcgtggagctcctgtttgagatcgctgagaacatggaagacta

SEQ ID NO: 37592 - DNA, 467 bp, Oryza sativa
  Clone ID: uC-osrocyp012a12b1
ctgtagcaatggggggcaacgggccgaacaacaaggaggacccgctcaactggggcgcggcggcggccgagatggccggcagccacctcgacgaggcgaagcgcatggtggcgcagttacgcgagccgctggtcaagatccagggcgccaccctgcgcgtcggccaggtgggcggcgtcgcccaggccaaggacgccgacggcgtcgccgtctagctcgaccaggaggcccgcccccgcgtgaaggccagcagcgagtggatcctcaactgcatcgcccacagtggcgacatctacagcgtcaccaccggcttcggcggcacctcccaccgccgtaccaaggacggacccggcctccaagtcgagctcctcaggcatctcaacgccggaatcttcggcactggctccgatggccacacgctgccgtctgagacggtgcgggcgggcatgctcgtgcgcatcaacacc

SEQ ID NO: 37593 - DNA, 338 bp, Oryza sativa
  Clone ID: uC-osrocyp012b01b1
ctcgttttttctcgtcctctccacgcccccgagatctcaggagcacaggaggaagaagctcgtctctgccaccaaggaaggtctgaagcttgatgagagtgaggacgagaagaagcggcaggaggaactcaaggagaagttcgagggtctgtgcaaggtgatcaaggaggtgctcggtgacaaggtggagaaggttgttgtctctgaccgtgtggtggactctccctgctgtctagtcactggggagtatggctggactgcttacatggagaggatcatgaaggcccatgctctgagggactccagcatggccggcttcatgtctagcaagaagacca

SEQ ID NO: 37594 - DNA, 371 bp, Oryza sativa
  Clone ID: uC-osrocyp012b03b1
gcggctattgcggcggcggtggctacggtggcggccgtggtggcggcggctacggcggcggctacggcagccgcggcggcggcaactccgacgggaactggaggaactgagcggtggggccctcatggccaagttatctatctatctaatcgagctaccatcatcatcatccgatcgttatcatcgttagttttgtgtggaactatctagtttgtgttaactgtgtggttgcccatctgtgtttttgatcgcaagaagaaagctcgtctcgtttgctttgatcaaatgaatgaatgaatgaatcttagtgtgctccaagaaaaaatgagcacagaacaagatagatctaacagatcacaatcagaaaattg

SEQ ID NO: 37595 - DNA, 564 bp, Oryza sativa
  Clone ID: uC-osrocyp012b04b1
ctcggacttcttgttctttgtggtgctgccaattatggttaggcagagcgagctatgctagcgtgtgctcattctgtgctggcgttttgcagtacaaggtcgcgctgctgcagctgccggtgtcgccgcgcaaggaggagaacatcgcccgctcgcgcgcccgcctcgacgccgccgccgccgccggcgccacgctcgtcgtcctcccggagatatggaactgcccgtactcgatggagacgctgccgagccacggcgaggacatcgacggcggcgcgtcgccgtcggtctcgatgctgtcggaggtcgccgcccggaggaggatcaccatcgtgggcgggtcgatcccggagagatcatccgggcggctgttcaacacttgctgcgtgatcgggccggatggacagataaaagccaagcacaggaaactgcatttgttcgagattgatatcccaggagacatcactttcagagaatctgacacattcactgctggtcaagagcctaccatagttgacactgatgttggacggattggcatcggaatatgtcatgacatccgat

SEQ ID NO: 37596 - DNA, 545 bp, Oryza sativa
  Clone ID: uC-osrocyp012b06b1
acgcttatggttgatcttatggccttgctgtgattacaactcggggcaacaatgtatatgggccaaatcagatgcctgagaagctcattcccaaatttattcttttggcaatgagaggctcgccccttcccattcacggtgatggctcaaatgtcagaagctatctgtattgtgaggatgtcgctgaagcttttgaggtggttcttcacaaaggagaggttgggcatgtgtacaatattggtactgtgaaggaaaggagggtgattgatgtggccaaggacatatgcaagctctatggcttggacaccgagaaggtcatcacatttgttgagaacaggcctttcaacgaccagagatacttgttggatgatcagaagctgaagaaattgggatgggcagagcgcacactatgggaagaggagttgtagaaaacaattgaatggtacactaacaatcctgattactgtggagatgtcgcatgtgccttgctccctcatacaggatgttgatgacaccttgagctgaaaagcataactggactgatg

SEQ ID NO: 37597 - DNA, 531 bp, Oryza sativa
  Clone ID: uC-osrocyp012b07b1
gtctagtctagtctaccaccctcctctccaacctttctccttcctcctcatctcctcctccaagccgagccaccgaaattcctccaatcctacagttcgctcgcatctctccctctcctccccgtcccaggcgcggccaggacctccggatcggtgaaaagaggccgccttggtgcttcttggcgccgaatcttggggaggaggtcgctcagattcggatttagggtttttggtggtgagagggggaaaatggcgacggccgtggcgtgcgcggagagggcgacgagcgacatgctgatcgggccggattgggcggtgaacatcgagctctgcgacatcatcaacatggatcccggacaagccaaggatacactcaagctcctaaagaaacgcctgggaaacaagaattcaaaagtgcaaattctgacgctgtatgtgctagagactctaagcaaaaactgtggggatgttgtttaccagcaaatcattgagcgagacatattaagtgaaatggttaagatagtaaagaaa

SEQ ID NO: 37598 - DNA, 444 bp, Oryza sativa
  Clone ID: uC-osrocyp012b10b1
cgaagatcgctctcgttttggctaagctcgaggtcgccacgctgcggcagcagcagggacgcgcccctgccgccgagccagccgccgccgcccagtggagcgtcatggacctcatgttcggcggcgtcgacgaggagatcaacgggctgagggccaagctccgggcggccgtgcaggcggaggagaagagcaggaaggcggccgacgacctcaccgtcgcgctctccgccgtcaccatggaggccaagcaggtgaaggcgtggctgtccgacgcgcaggccgagctggaggacgccaacgccgaggtcgaccggctcagggagtcgctgcacgccgccgaggcggagctgtggtcgacgaccgagcagctcgacggcctcacgtcggactggaaggaggccgccgtttcgtggcgcgccagggagaaggtgcttctcgcgcgcg

SEQ ID NO: 37599 - DNA, 493 bp, Oryza sativa
  Clone ID: uC-osrocyp012b11b1
atatcctctcgaggtcttgattagcttgtacagtttgtcctcgagctctcgaccggctccggcaatggcgtccacggacactgagcagcaggaacacgcagtggcgctgctacaacccgaggttgaagaagcatacaccactgatgggtctcttggcgtcgatggcaacccggcgctgaagcatcgcacaggcggatggatggcatgccgcccgattcttggcaccgagttctgctactgcctggcctactacggcatcacgttcaacctcgtcacctacctcaccgccgagctgcaccagagcaacgtcgccgccgccaacaacgtgtcgacgtggcaggccacctgcttcctcacgccgttggccggagccgtcgccgccgattcctactggggaaggtaccgcaccatggtcgtcagctgctgcatcggcgtcgctggcatgctcatggcggctctgtcggcgcttctgccgctgctgatcaatgacacg

SEQ ID NO: 37600 - DNA, 488 bp, Oryza sativa
  Clone ID: uC-osrocyp012b12b1
ggccacggcgtacgcttatggttaatcttacggccacgcgtccggaatcggtcaagaggacagcttccctggatcattctgaaaagactgctgccctaaactcagctcgattccgtgcaatgataagcgggccaagcctgcagagctactctggagcatacgggcaattggatgaggtgggaatcattgaggccgacgactttgttgcagatgagttttgcagggcaaaatgccaatcagtgagcgagaagggcatccggaactgcatggacgacctcctggaactgaagcgagtctctcggatgagatgcggaagaagtgcaccacaattatcctgttttcattcagacttctcggtgggtctccgactgatggggaagctgctgttggagatgcgcaacctgctatcgcaggaggctgccaccatccatggattgctaggggggggcccactttgctgccgcagaagagcatcacagtggaacaga

SEQ ID NO: 37601 - DNA, 374 bp, Oryza sativa
  Clone ID: uC-osrocyp012c01b1
cttagctcaactttatgatataaaattccggaggaccgaatgtctgctctacatttacagagcgcttcctgtcagactgaaaataagcaagctgagacagactacgctacaagatgaatcctgtcaacgaggatacgctacaaccgatgtacagatgatgagctacctacaacaagatgacagacacaactctgttaattacatataaggaacactatctatacttgacataaaacgagtggcgggaaaacgcttaaaaatcaacctcccatggaggtcaagtggaacttgagaggatcagagaatcgggagcagccagtggatatgtgcttatacgacaatcatgcctggagagaacagcgacaccgggtggc

SEQ ID NO: 37602 - DNA, 550 bp, Oryza sativa
  unsure (1)..(550): unsure at all n locations
  Clone ID: uC-osrocyp012c03b1
ggaggagcttttcctcttctccattctatcttctgttggagaacagcagcaagcagaaaagggaccagggaatcaaaggcttcctgtatagatctttggaggaaagatcctttctttctgcaggaattcagggcattgctggtgtcctcttcagttgtgctaaatctgtgacgagtatgcgccgcgtccgggtctcatcccaccaatctccagtccacaagcttggtgattcacagatgaaattgacacccaaattccggcttgccacaacctccgcattgccgtcgtcgatgccggcctctgatttggagcaagcctcatgggagacacccctcatacctggccttcctgatgatgctgctctcaactgtctcctccggctacctgttgagacccatgaggcatgcaggcttgtgtgtcgccggtggcatcacctcctagctgacaaggcgcggttcttcatgcagaggaaggtgatgggttttcggtcaccgttgttgttcaccctggcttntcaccgttgcactggtaagatacagtggaaggtgct

SEQ ID NO: 37603 - DNA, 497 bp, Oryza sativa
  Clone ID: uC-osrocyp012c04b1
tttagcgtgcgagctagccagccagtgttagagcttgagctgcttgttcttcttctacctcctgcactcgcgtgctgcacaagtagctcagctagatagagcgtcagaaatggccagcaacaactcgagaacaaactccagggcgaactactccaacgagatccacgatctctccacggtgcagaacggcaccatgcctaccatgtactacggcgagaaggccatcgccgacttcttccctcctcacctcctcaagaaggtcgtgtcggaggtggtggccacgttcctgctggtgttcatgacgtgtggggcggcagggatcagcggcagcgacctgtctcgcatatcgcagctgggacagtcgatcgccggtggcctcatcgtgacggtgatgatctacgccgtcggccacatctccggcgcccacatgaaccccgccgtgacgctcgcgttcgacgtgttcaggcatttcccctgtattcaggttccgttctact

SEQ ID NO: 37604 - DNA, 508 bp, Oryza sativa
  Clone ID: uC-osrocyp012c05b1
ctccgccaagggcttctttgagtgcacccacgacgtcaccgacatcacctgcgccgtcttcctccggtccccgggcgcccagacccccgtcatcgtccgcttctccaccgtcatccacgagcgcggcagcccggagacgatccgcgacccgcgcgggttcgccgtcaagttctacacccgcgagggcaactgggacctcctcggcaacaacttccccgttttcttcatccgcgacggcatcaagttccccgacgtcatccacgccttcaagcccaacccgcgctcccatgtgcaggagtactggagggtcttcgacttcttgtcccaccaccccgtgaggcttcacaccttcttcttcctcttcgacgacgtcggcattcccaccgattaccgccacatggacgggtttggaaggaacacctacaccttcgtgacccgcgacgccaagggcaggtacgtcaagttccactggaagcccacctgcggcgtcagctgcttgatggacgac

SEQ ID NO: 37605 - DNA, 458 bp, Oryza sativa
  Clone ID: uC-osrocyp012c07b1
ctttgcacccaccgccactcgcagggatgcatggcgacgaagcaggtgcagcgcaccgacgaggacgcgacggtgttcgacgtgatctaccacggcgagcacacgtgcgtccacaaggcggtggccgccggcgccggcaagccggagacggagacggacacgaacgccgtcgtcgagagccgcctccacgacctgagctccggcctgacggtgcagatcgaggggctgacggcgccgccgcagcaacagcagggcggcggcggctggaacgccatgccgccgttctgcctgtcgtcgccggtgagcggcctggcgccgccggatcagcacaacccgttctccgcgccgtcgacgccggagaaccgtctcgccgccgccgcgtcgtcggcggcctcgccggcgacctccgactcgatggccgccgcgccgttccaccaggcggcggccggcggcggcga

SEQ ID NO: 37606 - DNA, 445 bp, Oryza sativa
  Clone ID: uC-osrocyp012c10b1
ttctcctccggctcttcttcagtatcgaatcctctcttctcctcgtgcccaccaccaccaccgtagcaatggcgggcaacgggccgatcaacaaggaggacccgctcaactggggcgcggcggcggccgagatggccggcagccacctcgacgaggtgaagcgcatggtggcgcagttccgcgagccgatggtcaagatccagggcgccaccctccgcgtcggccaggtggccgccgtcgcccaggccaaggacgccgccggcgtcgccgtcgagctcgacgaggaggcccgcccccgtgtcaaggccagcagcgaggggatcctcaactgcatcgcccacggcggcgacatctactgcgtcaccaccggcttcggagggacctcccaccgtcgtaccaaggacggtcccgccctccaagtcgagctcctcaggcatctcaacgc

SEQ ID NO: 37607 - DNA, 479 bp, Oryza sativa
  Clone ID: uC-osrocyp012c11b1
tctcgttctatggcgattcggccgtatatgaaaccttagtacggatggctcaggacttctcaatgaggtatccacttgttcaaggtcatggaaattatggttccatagatgctgatcctcctgccgcaatgcgatatacagagtgccgcttggattcactaacagaagccatgttcctgactgatctggagttgaatacagatgacttcgtcccaaactttgataattcacagaaagagccttctctgttgccagctcgtgttccatctctattgtcgaacggttcttctggaattgcagctggaatggcaacaaatattcctccttataatctgggtgagcttgctgatgtgctctctgttatgaatgaaaaccctgaagctactctgtaagaactactagaatgcatgcctggacctgactttcctacaggagggacactcgtgggaaatcaaggtattttggaggcctataaaact

SEQ ID NO: 37608 - DNA, 398 bp, Oryza sativa
  unsure (1)..(398): unsure at all n locations
  Clone ID: uC-osrocyp012c12b1
ctcgagcactctaagttttaactcgagctcatccatggccatcgcgacgacgaccttaccactcgcgccactcgccctcgcgccgccatcctccccgatctcccagtgctcgctcctcctgctgcgcccccgcgccccggccgccctctcgctccgcccctccgcgcgcctcctcgtcgccgtcgcggccagggagcccgagctcggcggatcgggaggcggaggcgcaggcgacggctctgggagcggcggcggcggggacagcgagaagccgcggggtggtgggggcgacgaggagggggaagggaggagtagaaagatgcancattttgctctccatgtatcaaaagaggaccctcgcctacgccgctcataactgagcgggaggtacgtcgggg

SEQ ID NO: 37609 - DNA, 525 bp, Oryza sativa
  Clone ID: uC-osrocyp012d01b1
tttattgtcaagtatgctgagcgtgggcttcgttctcttgctgttgcaagacaggaagtacctgagaagtcgaaggagtctgctggtggaccatggcaattcgttggtctgctgcccctgtttgatcccccgaggcacgacagtgctgaaactatccggaaggctctccatcttggtgttaatgttaagatgatcactggtgaccagcttgctattggtaaggagactggtaggaggcttggaatgggtacaaacatgtatccttcatccgcattgctcggacaaaacaaggacgcttcacttgaggcacttcccgtggatgagctcattgagaaggctgatggttttgccggagtcttccctgagcacatatatgagatcgtgaagaggttgcaagagaagaagcacatcgtcggtatgaccggagatggtgtcaatgatgcccctgctcttaagaggccgacattggtattgctgttgctgatgctacagatgctgcatgagtgctttcgacattgtgctcac

SEQ ID NO: 37610 - DNA, 510 bp, Oryza sativa
  Clone ID: uC-osrocyp012d02b1
ggtaattcggttgaattcatcctttctaacattggatatctgcggaatcttaaaatcctcacacttgacagaaataagatctctgtcttacctgaagaattgggttctctatcaaatcttcaacaactctctatttctcagaattctttatcacgcctgcctaagagtgtaggagatttgcgcaatatgttgctactcaatgtatctgacaacaaactaattgcacttcctgaatcaattggaggttgcagttccctggaagaattgcaggcacttggaaattcaattgaagacgtgccttcatcaatctgtaaccttgtttgcctcaaatccgtatcattgcacgggaataagattcgtcagcttccccaaaacctactgaaagactgcaaggctcttcagaacatatcgttggatgacaatccaatctcgatggaccagtttcaacaaatggatggtcttacggaatgtgaggcacgccgtaggaaaaaatttgacaaacagattgat

SEQ ID NO: 37611 - DNA, 536 bp, Oryza sativa
  Clone ID: uC-osrocyp012d03b1
tcagaactagctagttttatcttgcacttatctctgacttccttctcatttttgtttcattccatagctgaagcaaaatgggtgacaagaaacaagtgaagctaaaggttcggggtgcaagcgagactgaggtcaagaatgtacttcgtcaagaattcaaagaatctatcgactatagaaactacagcaaaaatccagagagcagcagtttgaaggtggaggtgcgagggactgtggatgtggggaagctctacgaacgcctcaagaagatggcatccagtgtcaagattgaatcggttattccggatgatgtaaaggaagaaatagagagatacaagaaagaccttgaaagtatgaagagacagaaggaagatctagagttaaagctaagggaaaaaagggaagaaaaaaaggctctccaggccgacaaaacagcagccgaggaagagcagaaaagattgaagagagacaaagaaaatctcaatctaaaggtagacacacagaggaaagagtacaggcgtctcgaggaggagaac

SEQ ID NO: 37612 - DNA, 543 bp, Oryza sativa
  Clone ID: uC-osrocyp012d04b1
ttttgatttccgcagcaccgcaccagagccaaggcggaggtagggttttagccggcggccatggcgctctcctcctcgctgctccaccgcctgctccgcggctctacccccgtctcttcctcctccgccgccgcctcctcaatactccgcgccaccttctgctcctcctcctcgtccgcccccttgcccaccgagtcgcccctttcctccgtcttcggcgacggcgccgaggtcagcaacgtgccgccgctgaccgcccccaagctcttcatcagcggcctttcaaggttaacgacggatgagaagcttaaaaatgcctttgctccctttgggcagctacttgaagcaaaagtcattacagataggatttctggaagatccaagggattcggttttgttagatatgctactttagaagaagctgagaatgctcggcaggagatgaacgcaaagtttctggatggatgggttattttcgttgatcctgctaaaccaaggcagcagaagcctgctcctcgtcctgacactgattcatcacacact

SEQ ID NO: 37613 - DNA, 479 bp, Oryza sativa
  unsure (1)..(479): unsure at all n locations
  Clone ID: uC-osrocyp012d05b1
ttcaagcccaagtcgcgtcgcaccgaagcagagtagagaaggagaggagcggagcgccatcagccgtccgatcgagtgatccgatggctctcgctctctccacctctgctgctgctgccgctgccgccgcggcgcgggcgctcgcggcgagggtgacgacgacgaggggttacgccgcgtcggcggcgtcgtcggcgatgaggcgggcggcggcggcggtggaagggaagggcgctgcggggatgacgcatgcgaaggacgggttcgtcgtcgtcggcggcgagggaggtgtcgtgggtgcccgaccccgtgacgggccactaccggtcctccaacttcgccggcggagccgacgccgtcgacctacgngccgcccacctatgccgcagctacgcccgcgcgtgatgcgcgcgacctcgccgtcgtccgaccgacgacgacgccatccatccatatatatctgcttcgcgtcaactact

SEQ ID NO: 37614 - DNA, 522 bp, Oryza sativa
  unsure (1)..(522): unsure at all n locations
  Clone ID: uC-osrocyp012d06b1
ctccgaccacctcgctcgcctcgcctcgacgtctccttccctcccgcctccaagcaacccctctcgccggaggaggaaaccctcctccgcttccaatccccaaatccccatccgctatatcaacccgatcccctccccgatcgttcgatcgttcgatcgatctcgccctcgactccaagccgacgagaggagttgaggagttgaggccatttcggtgcgtgcgcggcgggcggaggtgatcggtggcgtttcgttccgttggcggcgggcggaggtgattgctcgcgcggcgtggagcggtggggggagggatccgagcgggagggagagcgcgcgcggatggggtggcggagtcgcgcttcggcggtggcggtgctgtggatgctcgccgctgtggtggcggcggctgcgctggatcctgatcaggacgagctcgaacgcgcgtttccaatcgtcgaaccagatcatggtcacactnaactccgtcttgcataagagggtttgaagcaattaaaagaatcg

SEQ ID NO: 37615 - DNA, 540 bp, Oryza sativa
  Clone ID: uC-osrocyp012d07b1
ccagtacatattgaggttgaagataaagttatcactaatgatgatgtgctaggagatgctgtaccatatgatcagcaagatgctctgcgtgtcgtatgttatcgcttgctggaaatgccccctgtgagagggcatgcacagtttcctggatcacatcctgtctctcttaacagtgagaatttgcaactactcagacagcgatactactttgctacatggaaagctgatggaacccgatatatgatgcttataatgagggatggctgtttcttgattgatcggaatttttgcttcagaagagttcaaatgcgctttccccataggaatcttaatgaaggactacatgagatgactttgattgatggagaaatgattatagacacagtaccagattcaggattgaagaggaggtatttagcatatgatctgatggcacttgatgccgtgtcaaaaaccaagttgccattttctgaaagatggaggctgcttgaagatgaaataattcgtccacgttattatgaaaaaaaacagtttgagagt

SEQ ID NO: 37616 - DNA, 512 bp, Oryza sativa
  Clone ID: uC-osrocyp012d08b1
ttctacgcgtccggcacatgcaaaaaaaggttgcaaagccacgaaaagcttgggagattctcgatggcacggtccctcgcatgcgccttcttcttcgacgccgagccggtcggcgagaccgggcggcacgcgctggacgcctgcgcgctctgcaccaagccgctgcgccgcgatagcgacatcttcatgtacagaggggacacccccttctgcagcgaggagtgccgctacgagcagatgcacctcgacgccgcctgcgcgaggcaggccgcgagcgccaggcggaagcagcagcagcaggggcagcggagcaggcacgagaccgcgccggctgcgcccgtgtcccggaaggcgggggtgtccgtggcgagctgttgatgagctgcataccttaggtagacgagcgtgagcttgcaagatgtgatgaaggagttgttcttgctcatgtctggccggccgctgtgccgatggatggatctggtcggagtcgaagcagagaaaggacggatctg

SEQ ID NO: 37617 - DNA, 533 bp, Oryza sativa
  Clone ID: uC-osrocyp012d09b1
tttcaacacgctcaccaaggtcgacctggtggagaggacggccaagaactggcacgaggagggctccgtgccgtccgagcccttcttcgtgccacgccccggcgccaccgaggaagacgacggcgtggcgatatcgatggtgagcgccaaggacgggtcgggctatgcgctggtgctggacggcaagacgttcgaggaggtcgcgcgggccaagttcccgtacgggctgccctacggcttgcactgctgctgggtgcccaggaaaaggaacagcaagtaacacacacgccggtccatcccaacatgtcaccgccagtactgattcgtctctgctgcttgcgtcttgggtctgcgcatcgaatcacagtacaagtggaggcttggatttgtagctacgaaaatggcagcatgaatgcagtcaccgcttggtaggtggtctcagaaggaaagaaagacatacatacgctgcacgtggtgaactgttagtacgtgatgtatgaagtacccgaagatgtaatatacgtggaaatgaa

SEQ ID NO: 37618 - DNA, 451 bp, Oryza sativa
  unsure (1)..(451): unsure at all n locations
  Clone ID: uC-osrocyp012d11b1
ttctgggatcaccagtcgccaggccagcgcgaggttgtacgcggcaggacgacgaggcggcccggcgcgctctccccgcgccgccgccggggtcgcgggggacgaaatgccggcgtgttcggaagcagatcggtgacctgacctcccccgcgcggcgggatttcggcggccggaaggctggatctttgattcttgaggcgaatggtggtggaggggaggaggagggagggtctcncctttcctactctcctcgactcctccgccgacggccgattcccctccgcatgcgcgctccttcgccttcgcggaggcaagggcggatttggctcgctcctccgtggcgccgactgcaaggccggccagaagaagaccagcaacttcgacgcctgccgcgatattaacggacgacggctgcgccacgttaacgccgagcgccgtcttgaggagtgga

SEQ ID NO: 37619 - DNA, 388 bp, Oryza sativa
  Clone ID: uC-osrocyp012e01b1
ccgacgcagtgacgaggtcatgcacgtacttgatggcaagatcctgggcaatcctgacttgatcatcgataactacagtgacagcatcctcgttgcatgcactgcttgcacacaagatgggtgccacccattgtaccgtcggccatgcgcttgagactaccaagtcccactactctgacctctactggaagacgactgaggatcactaccacttctaatgccagtacacaactgacttgcttgcgatgtaccacgctgacttcatcatcaccagtaccttccaagagattgccgggaacaaggacactgctggtcagcatgagtctcacatggcattcaccatgcctggtctgtaccgagatgtacacagcattgatgctaccgaccc

SEQ ID NO: 37620 - DNA, 328 bp, Oryza sativa
  Clone ID: uC-osrocyp012e02b1
ggatcacattctgcctctgattttgtagccatccagagttccccatgaagcaaggctgacatgcttctttaatccagtgctgcattttataagcagctttgttgccaattcacttgcataacctgcacatataaagagggactgcaggctaggcgtgctagaagcagactctcaagctgtgagggagtcgtaactgaattttgatcagttcattcagttgcatgtccttgcatgccatggcctgtctcaagctcagacatgtgtgcctcactgtggtgcccttctccattggaatctccagctgtagagggcaaggaggagggggagc

SEQ ID NO: 37621 - DNA, 197 bp, Oryza sativa
  Clone ID: uC-osrocyp012e03b1
tcgattccctttatccccaaaagccccaaacccgaggaggcgagaggaggaggaggaggagctcgtcggcggcgagcgatggcggcggcggtggcggagctgtgggagacgctgaagcaggcgatcgtggcgtacacggggctgtcgccggcggcgttcttcaccgccgtggcggcggcggatgcgctataccacgt

SEQ ID NO: 37622 - DNA, 523 bp, Oryza sativa
  Clone ID: uC-osrocyp012e06b1
cttcggttccgtgccctccacacgatccccccccccctgcactctctctctctctctctcgcccgagtctcctcctcccgcacggaagcagtagtcccgcaggcggagctctctctctctctccggcaaatcggcgaggatggaaatgttctttggcagttttcttaatgaatcagcatcacaagagtacttctctggtcgtccaaatgtcgagagatgcccattcctgagaaacatcaatggagctacaacattttcattttcttctgctttgccagtagctgcccgaggagccaagggtccaatttttgaggacggaccaggctttgattcagcatttaaacttttccatggacgggatggaatagctccgctttcaggaaagtcatatgtacctgatgagaacaacagcgagagcgttgatgccaagcctgaacctgctctgccgtttaacccattggctgctagagctgccacaataagtctatctgcatttgggccattcggctttaacttctttaat

SEQ ID NO: 37623 - DNA, 71 bp, Oryza sativa
  Clone ID: uC-osrocyp012e08b1
ctctctctctctttctctccccctcgacgcggcgagatcaggaggcggaggaggctagggggggaaggcac

SEQ ID NO: 37624 - DNA, 362 bp, Oryza sativa
  Clone ID: uC-osrocyp012e09b1
ttctctctcttaacctttctctcctctctctctctctcttgagttcttggttgatcgccattgccgcggaggagctagaggagatgagatgaggggtgcggggtttctgctgctcgttgtgttcgccgttgccgtcgccggtggggcggtggctactgtggtgtatctggacggtgtccatggtggtgtggatgcagagtcaccatagtgtgtgccgcactagtagacgatggacgccgactaaactccaaacacttataaactagggacaatgctcattttaccctcaagaactcacaaactactggctgtgcccatacgtgtgccccaacagagcggtatgattgcacccggatccttag

SEQ ID NO: 37625 - DNA, 482 bp, Oryza sativa
  Clone ID: uC-osrocyp012e10b1
ttacgctagctgcattgtagtgagagagagaggcggccatggcgctggcgtcgctgccgaaggtggtgatggggtcggtggcgttcggtgtgttctggatgctggcggtgttcccgtcggtgccgttcctgccgatcgggcggacggcgggggcgctgctgggcgcggtgctgatgatcgtgttccacgtgatcagcgccgacgacgcctacgcctccatcgacctccccatcctgggcctcctcttcgccaccatggtcgtcggcggctacctcaagaacgccggcatgttcaggcacctgggccggctgctggcgtggcggagccagggcgggcgcgacctcatgtgccgcgtctgcgtcgtcaccgcgctcgccagcgcgctcttcaccaacgacacctgctgcgtcgtcctcaccgagttcgtgctcgagctcgccgcctagcgcaacctccctgcgaagccgttcctgctcgcgctc

SEQ ID NO: 37626 - DNA, 422 bp, Oryza sativa
  Clone ID: uC-osrocyp012e12b1
cttctcttctctcttccccggcggcgacgcggcggcgccggtcaaaccactcctcgccggcgaggggagcgcggatcgggctcgggaggaggctaggggtttggctcgctcgctcgctttcggcgtgcagctgaggcggtggacttggcggctgtggcggaggtggggaggtggaggctggaggggagatggatgggttcctgctgacgctgacggggctggactcgtaccccaaggtgcacgaggacttctacaagcggacgctctgcggcggcgccatcacggccgtcacctgcgtggtcatgctgccgctggtcgtcttcaagaccctctgacacaactgttccgagcgtaccatgcaccctactcagtgatgataccacggatatcaacgcagagcagcaccatgacatgaggcagga

SEQ ID NO: 37627 - DNA, 185 bp, Oryza sativa
  Clone ID: uC-osrocyp012f02b1
tcgtgtggagtttccccgccgccgccggcggcgccgccccccagaagctctcctgcttcaagctccgccgcttgcagagccagtccatggccgccgacgagttcgacaacgtgtaatcgccctgacgccatggacccacaccgtactgctatactgtatacgtatatacatatgtatgtatgtac

SEQ ID NO: 37628 - DNA, 380 bp, Oryza sativa
  Clone ID: uC-osrocyp012f03b1
tgtgagcttagctgcatgtaaagtttattttgaatggtaatgctttttattatggacgtattatggcgtcttatcatccagcaaagtctttagactcttttggtaatagtcctcttgtgtctgaggatgctgtgattgagtcgcagagaccacatgttttcttggatccaactaacagtcagggtggagacatgattttgcctttttattggcgccataattatatggatatagtaaatgccgattggggtagtatgggtcagatcgatatgagatctttacctattttacgaagtgtgaatggatcaaatgaaactatttccattattgcgtatgcgtggtgtgaaaatattgagctctctggtattacacagtttgag

SEQ ID NO: 37629 - DNA, 485 bp, Oryza sativa
  unsure (1)..(485): unsure at all n locations
  Clone ID: uC-osrocyp012f05b1
ttctctctcttcttcttgggaggctgggagctaccagcacaacacaccaaggaagctgagcaggtgcgttgatttcttgatatcatggccaagaggcacctcttgttggtgacaacttgtttgtgggctctgtcatgtgccttgctgcttcatgcttcctctgatgggttcctgagagtcaacctcaacaagaagagattggacaaggaagatctcactgccgccaagttggcgcagcagggcaaccgtcttctgaagaccggcagttcagacagtgatcctgtccctctggtggactaccttaacacccagtactatggggtgattggcctcggctcaccgncgcagaacttcacggtgatatttgacactggaagctccaacctgtgggtttcttcagcaaaatgctatttttcgatagcatgctaccttcacagcagatacaactcgaaaaagtcgagctcttacaaagcagatggagaaac

SEQ ID NO: 37630 - DNA, 387 bp, Oryza sativa
  Clone ID: uC-osrocyp012f07b1
tcttccgtttgagtatggtcacttcttcagttcttcctaaggtggttgatgatgccggcgagggcgaggccaaccctcgccgggcgaaatggtggtacgcgacgttccacagcgtcaccgccatggtcggcgccggcgtgctcagcttgccgtacgccatggctcacctaggatgggggccggggacggcggcgctggtggtgtcgtgggggatgacgctgtacacgctgcggctgctgatcgagctgcacgagtgcgtgcccggtgtgcggttcgaccggtaccgcgacctcggcgcgcacgcgctgggcccgcgcctggggccctggctcgtcgtgccgcatcagctcatcgtgcagctcggctgcgacgtggtgtacatggtca

SEQ ID NO: 37631 - DNA, 461 bp, Oryza sativa
  Clone ID: uC-osrocyp012f08b1
cccgtcctccttttccttttcccccatcccctcctccccggcggcggcggcggcgcggaggcggcggcacgggagcggctagtggtttcgtcggcggaggcggaggcggggccaagatgttcgggcgcgcgccgaagaagagcgacaacaccaagtactacgagatcctgggggtccccaagaccgcctcccaggacgacctcaagaaggcgtaccgcaaggccgtcatcaagaaccaccccgacaagggcggcgaccccgagaagttcaaggagcttgcacaagcttatgaggtattgagtgacccggagaaacgtgaaatctatgaccaatatggtgaagatgccctcaaggaaggaatgggtggaggcggatcccatgttgatccatttgacatcttttcatcattctttggaccttcttttggtggtggtggcagcagcaggggcagaaagcaaagg

SEQ ID NO: 37632 - DNA, 519 bp, Oryza sativa
  Clone ID: uC-osrocyp012f10b1
ttaccattgagatcgattccttgtatgagggcatcgatttctactcaaccatcacccgtgccaggtttgaggagctcaacatggatctcttcaggaagtgtatggagcctgtggagaagtgcctcagggatgctaagatggacaagagctctgttcatgatgttgttcttgttggtggctccactaggatcccgagggtgcagcagctcctgcaggatttcttcaacggcaaggagctttgcaagaacatcaacccagatgaagctgttgcttatggtgctgctgtccaggctgccatcttgagtggtgagggcaacgagaaggtccaggacctcctcctgttggatgttacccctctctctctcggtttggagactgctggtggtgtcatgaccgtcttgatcccaaggaacaccaccattcccaccaagaaggagcaggtcttctccacctactctgacaaccagcctggtgtgctcatccaaggttatgagggtgagaggaccaggacacgtgaca

SEQ ID NO: 37633 - DNA, 496 bp, Oryza sativa
  Clone ID: uC-osrocyp012f11b1
ttccgatctccaccaccaccaccaccacgcgggcgcgcgcaccaaccgggggggcttcgatgcgggcgatctcgtcggcagcgggggggatgctgcgggcgcggctgcgcggcggggcgcgcgtccgcggcggcggcgggcacggggaggggggcgggcggtggacgaccccggggcacgaggagcagcccaagggctacctattcaaccggccgtcgccgccggcgggggagtcgcggaagtgggaggactgggagttgccctgctacgtcacctcgttcctcaccgtcgtcatcctcggcgtcgggctcaacgccaagcccgacctcaccctcgagacctgggcgcaccagaaggcgctcgagcgcctccagcagcaggagctggcctccggggaggcccaagccgagtgatctgcgcgcctcatgtcacctcgaaccctagaatactgcatctgttttactcccaataagatgtttgagatgtgccggatgaa

SEQ ID NO: 37634 - DNA, 491 bp, Oryza sativa
  Clone ID: uC-osrocyp012f12b1
ttatgcttgatactgccaggagtagctcctctattgagaagagctatgagctgcctgacggccaggtcatcaccatcggagcagaaaggttcaggtgcccggaggtgctcttccagccatcttttattggtatggaagctcctggcatccatgaagccacatacaactccatcatgaagtgcgatgttgatattagaaaggatttgtacggtaatgtggtccttagtgggggatctacaatgttccctggtattggtgatcgtatgagcaaggaaataactgcacttgcccctggcagtatgaagatcaaggtagttgcaccgccagagaggaaatacagtgtctggattggtggttccatcctggcttctctcagtacctttcagcagatgtggatctccaaggccgaatacgatgaatctggtccaggcatcgtccacatgaagtgcctctaagtttgtgggcagatttgtaccattatcagctgattg

SEQ ID NO: 37635 - DNA, 421 bp, Oryza sativa
  Clone ID: uC-osrocyp012g01b1
acgatttttactctcgcggccgcagcctcttccacctcctccacgagaacagaggagaggggaggacgccgctgccatggccggcgaggttggcgatagcgaagggcgtggcgcgggggctggcctacctgcaccagacgctgtcgctcttccaccggccgccgcacggcgacctgaagtggtggaacgtgctcgtcgtcttcccggggcccggcggccgcggaggcggcggcggcgactcggtgccggtggccaagctgactgaccacgggtttcacccgctgttgtcgcaccacgcgcaccgtctcggggcggtcaaatgcccggagctcgcgcgcggaaggcgtgggctctgactccgcgccgacgtgttctgtctcggccttgtgctgcttgaggtggtcaccgcgaaggtccccgt

SEQ ID NO: 37636 - DNA, 371 bp, Oryza sativa
  Clone ID: uC-osrocyp012g02b1
acggtttttctctctctgtttgaagccacggtgaaaaagcttgggtgatttcttggaagcgaagcgtgcggggagaagaagaagaagacgaagaagaagaggggggaggaggaggagcagcatggctgagcacaaggaggagcacgcggtgatggagaagctctccgagaagctgcacggcgactcctcgtcgtcttcctcggactcggacgacgacaagaagggttcctcctcgtcgtcggcggcggcggccatgaaggccaagatctaccgactattcggacgcgagaggcccgttcactccgtcctcggcggcggcaagcctgctgatctcgcgctatggaggaacaagaagatctccggtggggtgc

SEQ ID NO: 37637 - DNA, 551 bp, Oryza sativa
  Clone ID: uC-osrocyp012g03b1
accttctctttccccactctcactctgccgcctaccacgccgtcgtcgtccttctccgggaacggccgggaactgcacctccattcccaccacctcagccgagcccctcccctctcgacctctcgcggctctctcccaacgctctctctctctctctctctcgctgtctctctccctcccttttctcaagccgtctcatggcgcctgcccacggtcggcggctggccagcaaaggcggcagcggcaaccacgccctcccctccgccagatccggcgggagggcaggcgcagtgagagggcctcctccgacgtcgaccgcaagacggcctccgcgccgctatctcatctgtccgttctctccccaccccgagcgatccatccattccccctcccctcaagcgattccccggttccccttcgcaatccgcactcaactcccttccaagatccgattccccaaccactgctcagtcgcctaaaccctagcgccgccatggattcggctacgctctcgcccaccaccaccagcacgcagcagctagatctgggac

SEQ ID NO: 37638 - DNA, 130 bp, Oryza sativa
  Clone ID: uC-osrocyp012g04b1
ctgatgcttcgcgctgccggaggctgacctcgccgccggcgactccgctcggccgccggagcagccagcgcgcgcggattcagtggccgaagaagcaaggatgatgcactgaggtggggggggggggggg

SEQ ID NO: 37639 - DNA, 467 bp, Oryza sativa
  Clone ID: uC-osrocyp012g05b1
ctaagttttccttacactgcaacagttgtcgaccaccaatagttcaaattctacatacatatatatgtacagtttggtcaacttgttatttattaggtgctttgctagatttgtttattactttattaaatttaaaacccccttctctttactttatcatgttacgtccacatgtactaacactgttaagccaaacccgtataagctatttaacttgcccatctattgttcatttgctcttgcacatctagttccgaacaaatattatcctgttgcatctaaatgcagattccggaagcctacagtcaaatcatttgtcttggactgtgaaattgttgcttatgaccgtgaaaagaagaaaatattaccttttcagatacttagcacacgggcccgcaagggtgttaccataagtgatatcaaagtgtcagtctgtacttttggctttgatattctttacatcaatg

SEQ ID NO: 37640 - DNA, 553 bp, Oryza sativa
  Clone ID: uC-osrocyp012g06b1
tttcaggaacttcttctgaagcttaatggtgaccgtgcaatttgggagtatccatttgctgtggctggtgtaaatataacattcatgctcatccagatgcttgatcttcaatcagttaaaccaaggtcgttcatcggagcagtttttctaaagctactttctggtaaagcctatgtttcataatcccttaggatctacaggagatgcttattgtttgtttcttttttgaacctaaactgagtcatgcatttgttcctttgcactccattagtgacctgtgatcaggctttagggtgtatgattgtacagatgttgcagctacaagaatttgtgtttcagtatatttttgttatataaaccagctctattgattttgcaaatagatgactattgtgttatgactattgatagtctacgtttgctaaattcactctaatggtctaaggtataccacactagtcatacttcttgaaacagacaacatatattagattggtgaaggatttagtaataattccctgaatatttgtttcatactatagtgctactaaaa

SEQ ID NO: 37641 - DNA, 498 bp, Oryza sativa
  Clone ID: uC-osrocyp012g07b1
caaagacactgttttgttttttgcaatagagatcagcaactccgccgtcgaaaatggctgaattttcttggctcacggcgctcggcttcatgttcctcaccttcaactccggcatggcgatctaccgctccaacggcgacaccggctccatcctcttcgtcggcgtctcctacctggaccttgtcgcgctattcgcctgcctccggatctatgagggcctggaccagcactcgcctcgtcgcggcggggtcaaggctgccgtctgggccctcacgacgctcctcaccgtcatgttcagctataaagtcgccgaaatcatgccgcttgtcgtcaagatcgtcgtgtgggcgatggcaacggccacgacatgcggcggcttctatgccttcttcatccacgaagagaagcagccgcagtacatggccgtgccggcctcggcgggcaagacgcccgccgatcgccacgatggctccacctaatagggatagcaggttgggc

SEQ ID NO: 37642 - DNA, 471 bp, Oryza sativa
  Clone ID: uC-osrocyp012g11b1
tgcttcctgcttttgattgtccgccatggcttctctcaccgatctcgtcaacctcaacctctccgacaccacggagaagatcatcgccgagtacatatggatcggtggatctggcatggatctcaggagcaaggctaggactctctccggccctgtgactgatcccagcaagctgcccaagtggaactacgatggctccagcaccggccaggcccccggcgaggacagtgaggtcatcctgtacccacaggctatcttcaaggacccattcaggaagggaaacaacatccttgtcatgtgcgattgctacacgccagccggagaaccgatccccaccaacaagaggcacaatgctgccaagatcttcagctcccctgaggttgcttctgaggagccctggtacggtattgagcaagagtacacccttcttcagaaggacatcaactggccccttggctggcctgttggtgg

SEQ ID NO: 37643 - DNA, 494 bp, Oryza sativa
  Clone ID: uC-osrocyp012g12b1
tttatgatggtggtgagagagagaatctcccccctgggtcttatgtagtattgcaattagagaaggaggagattttagcaccacatactcacttctgcttgatctgtggcaagggttttaaaggagatgctaatcttaggatgcacatgaggggccatggagacgagtacaaaactgctgcagctcttgcgaaaccttcgaaagattctagcttagagtctgcaccagttacaaggtactcgtgcccatatgttggctgcaagcggaacaaagagcacaagaagttccagcctctcaagacaatcctgtgtgtgaagaaccactacaagagaagccactgtgacaagagctacacctgcagccgttgcaacaccaagaagttctcagttatcgcggacttgaagactcatgaaaagcactgtggccgcgacacgtggctatgctcgtgtggaactaccttctcagcaaagacatgttatttgggcatgttgctc

SEQ ID NO: 37644 - DNA, 346 bp, Oryza sativa
  Clone ID: uC-osrocyp012h01b1
tttatccttttaccatggatcaccgcctcctcctgctcggtctcctcctcctctccccggcggtggccgccgcctcagtccccggcgaggaggagccgctgatccggcaggtggtcggcggcggcgacgacaacgagctggagctgaacgcggagcgccacttcgccagcttcgtccagaggtttcgggaagtcttaccgtgaccgccaccaggacccgtaccggctctccgtgttcaaggccaacctccgccgcgcgcgccgtcaccagctgttcgacccctccgcggagcacggcgtcaccaagttctccgacctcaccccggccgagttccgccgggcctacc

SEQ ID NO: 37645 - DNA, 467 bp, Oryza sativa
  Clone ID: uC-osrocyp012h02b1
cagcttcgagcaaagtgcgtgttcttgagagactgaaaatccataatcatacattgatgcaggctgaaactcattcaggacgcccacaccaaattaggatacaccttgcatacattgggcatactgttgtagatgaccctctatatgacattgagaggaaggcaaaatttgatgaaccagaacctactagtacggctgattcttttgcatatgatggaggttatgagagacccttgcaacccgtccctggagattgtgggtaccacctacatgcacattggctaagtctttggcatccaactaccaaaggagggaccggtaaaatgaataatattgaatttgggtgctattctgtacctgactcgtacaatagctttcaatcccaggaactggggttaaattcatatatcgaagatgatcaaaatcacagctcctctgccacatatcctacagactagagaggaaca

SEQ ID NO: 37646 - DNA, 552 bp, Oryza sativa
  unsure (1)..(552): unsure at all n locations
  Clone ID: uC-osrocyp012h04b1
ggcatccacccggaccttcagcttctcatcttcgctggcaagcagctggaggatggcaggacccttgctgactacaacatccagaaggagtcgacccttcaccttgtcctccgcctccgtggtggcatgcagatctttgtcaagactctgaccggcaagactatcacccttgaggtggagtcttctgacaccatcgacaacgtcaaggccaagatccaggacaaagagggcatccccccagaccagcagcgtctcatcttcgccggcaagcagctggaggatggcaggacccttgctgactacaacatccagaaggagtccaccctccaccttgtcctccgcctccgtggtggcatgcagatctttgtcaagacactgaccggcaagaccatcaccctcgaggtggaatcttctgacaccatcgacaacgtcaaggccaagatccaggacatggagggcattcccccggaccagcagcgtctcatctttgccggcaagcagcttgaggacggcaggacccttgctgactacaacatccagaangagtcaacg

SEQ ID NO: 37647 - DNA, 530 bp, Oryza sativa
  Clone ID: uC-osrocyp012h05b1
tttctctctctctccgcccatttctcctctccacctgcgatccatccgcgcccgcgaggaggagggagccggacgccgccgcggggagagcaggggagagaaggagaggaggagatcgccgtcgccgtcgccgtcgccgtcgccgatctcgagcgggagcggagatggggctcacgttcacgaagctgttcagccgcctcttcgccaagaaggagatgaggatcctcatggtcggtctcgatgcggccggtaaaaccaccatcctctacaagctcaagctcggcgagatcgtcaccactatccccaccatcggttttaatgtcgaaactgttgagtacaagaacattagcttcaccgtttgggatgttggtggtcaggacaagatcaggcccctgtggaggcactatttccagaacacccagggcctcatttttgttgtggacagcaatgacagagagcgtgttgttgaggccagtgatgagctccaccgtatgctgaatgaggatgagctacgtgatgctgtgctgctg

SEQ ID NO: 37648 - DNA, 442 bp, Oryza sativa
  Clone ID: uC-osrocyp012h06b1
ctctctctccgggccgccctttttttttttttttttttttttagactatgtttctgcttagcgtaagttttgcgtagaacttgtaaatgtcatttaaagttctggtccttattttcatgtggaatttgtggagctaggatgggttggattatgtggtttatatcgttattaagttatcttataactgcctgtcgtggatgctcgtatttttaggggagactctaccgaaatttctaataattttgggagttagtggtttttgagtgtattttggtgtggcactctaggtaggtggctacctggagtgttacaccgtcgtcctcgtcgccgctgtcgtttcgccaccgctgctcccgttgtcgtcgctgtcattgcactgccaccgctctcgtcatcgtcgccgcgcagccgctcgtggtcaccgtcatccttgtcgtcacca

SEQ ID NO: 37649 - DNA, 471 bp, Oryza sativa
  Clone ID: uC-osrocyp012h08b1
ttttgccacatcccatcccatcccagtccacggtgaggttgagcgatctgaaaaaaatcatcagcgacgagcagcaacaggtttgttctctgaacttctctgatctttttagaagcaggtaacacacaagaaaggtcctgtcccaagaaggtacttctttcgggtttatttaatcgaaagaggagttcttgtgcgtacaggttctttctcatcccatcaacttctcctaggaggaacagagatccagagaaccttttttctcttctggattcttgccgatttttaggcttcctttgcttttctaaggccagaaagggttgttttgcaatacccttctagttcatcctctcaaatttttcttctttctattcaaaagctctttctttctttgcaccctttgtttctctacttttattgaggaacacggctgatttttcacttcttgcattcaaaaagcaccccttttttctt

SEQ ID NO: 37650 - DNA, 543 bp, Oryza sativa
  Clone ID: uC-osrocyp012h09b1
gtccagccttatctcctttccccccaccacctccaagatatttccccacctccgccgccgccgccgccatggagtccggcctcgtcgcaagccaccgtctgcgcgtccccttcgccgtcgaccaccaccgccaccacccggccgcgccgtcgcacctcctccgccagcggcggggcagcgtcgccgccaccccactccggctcgggctccacctccccacgccgaccccgctccgcctccccgccgcgctcccgctccgcccttccctcccgcctctccgcgccgccgtcgcgtcggcggcggcaccggagccggtggggtcggcctcgcccaagttcctgggcgtggagacgaagacgctgaagaagatcgagccgctggggctcatgttcttctgcatcctcttcaactacaccatcctgcgggacaccaaggacgtgctcgtcgtcaccgaccagggcagcagcgcggagatcatgccgttcctcaagacgtgtgtcaacctccccatggccactcggttcatgctgctctacaccaagc

SEQ ID NO: 37651 - DNA, 513 bp, Oryza sativa
  Clone ID: uC-osrocyp012h10b1
ttttcggtctgcgtattgtgtttgatccaacaggtgctcaaacaaatcctgagttgaatgtcgcgtattctcacgttattgatatttcagatactcaagattttaccatagaggttcctcatatgcaaacacgaactttgttaactagggctgaaccgccatttacactggttaccacacaatacggcactactttgttgccaccgttgtccactggtaatggaactattgctgtttatggtgagactattctcgccactcctaatagcacagtggatgcaccagttgatattaatgtttttatatcgatgggagatgattttgaagtatataatccaggtaatggatttcaatattatggttttgttccccaatctggaacggagttacacccagtttcaaacacgaccgaggagctaaatgctccattaaaggatgagtctttaatgattgggggcaaacatgtcgtgaatgataagattccattagtgtatatgggcgagtctataaaat

SEQ ID NO: 37652 - DNA, 417 bp, Oryza sativa
  Clone ID: uC-osrocyp012h11b1
tttaaagcggcggcggcggcgacggcggcggctgcgggtccgatggatctggtggaggcggaggcggaggagcagccgccggacgaggacggcgacgaggaggggtacgtcgaggcggaccccgcaggccgcttcatccggtatgatgagatcgtggggtcaggggccgtcaaaacggtctacaaagccttcgataagctggagggtgtcgaggtagcatggagccaatcccggatcgatgactctgtcatggggtcctctaagaagatgaagcaactaaacacagagattcaacttttgaagacactcatgcataagaacatcgagaaaatgtttgcttcatgggtgatggggagaagaagactgtttacataatcacagagttgttcacatacgggagctcgacacagtaccgga

SEQ ID NO: 37653 - DNA, 338 bp, Oryza sativa
  Clone ID: uC-osrocyp013a01b1
catgttaaactacagttactttgagacatacatatgagctaatgagggggggatgaatctgcagagcctggaaattatcaaccaaagctttaatattggcgacgtgaagccagcaaacatggaggagctaactgaggagatcacatgtgcggagttccacccagcttattgtaatacattagactatagtagcttggtggtctagagaaagcgcgactatacacaaaggctagcattgttgtggaggcctgcgaccgggagctgaggagcatgaaccacctggatcgagatcctttttttacagagataattgcatcggtttcagatttaaaatttgc

SEQ ID NO: 37654 - DNA, 242 bp, Oryza sativa
  Clone ID: uC-osrocyp013a02b1
ttttgttataaatgataccaaggcaagagggaggcagggcacggtgagagtgccatcgctgagatggacatcagcaaggcgctgggcgcaacggcggcgagggcggccaccttggtggccatggctgagggtcttctggtggtggtctacttgtacgagccgtaccggaaggtgtggcacgtgccgggtcccgtgcctctgccgatcatcgggcaactccacctgctggccatgcacgggcc

SEQ ID NO: 37655 - DNA, 334 bp, Oryza sativa
  Clone ID: uC-osrocyp013a04b1
tttacttgtccgatctccccaagggggatatggtggggctacgatagatacatctggctgggagggtactaattcgacttacacggactccaccccctgcaccatgccggactactacaaccagcggcgaggcgccctcctgaggagactcatacttgtcgtcatatacgtcgtgaccttgttcatcctggatgtattcgctgtcaccaatcgcggatcctcgtcgcagttctcacaaaggatcgcgaagccactggaaaatgctgagcgacccgacaactttatgctcgccaagccccgggcaccgggcaccggcgacaaggaccttctggga

SEQ ID NO: 37656 - DNA, 354 bp, Oryza sativa
  Clone ID: uC-osrocyp013a05b1
gggccggaatacctgggacgtcccttgcgaccgtgacttctgggcatagcccatcgtccccggggggggttgacttgaaaaggggggggctcaaccagccagtgaagaaggagaagaaagagaagacagagaaaaaagaaaagaaggagaagaaaaaagagaaaaaggcgtcgtcctgcgagcccaaacgcaagatcgcaggacttctactcggtttcaaacatcgtagcttggtcgaggcgcatgctacattgtgcatctggccaagcgcaacgagaccggcgactagggtgctgccaaagtgatctgcaagaaagatcttgggagggactatcaaaaagaatttgagcgcga

SEQ ID NO: 37657 - DNA, 319 bp, Oryza sativa
  Clone ID: uC-osrocyp013a06b1
ctgatgctactgatggttcatattttgcataaaattccgagatttcacttgatacatgtggatgacctggagttttgtgctaatacttgctatcatgtgaatcagctgtaggtagcataattggcaagactgaagattgctctcatctggggtcagaaacatttgtcggttgagtgctcgaactaaactatgtttgcgtcttgccgtagattggatctaaacaatcacgttttgtgttctctatgaggctggaccaatctaagtattggactgatcaacctgctgatctcccttaagcgaaccggtctgctgtggtcac

SEQ ID NO: 37658 - DNA, 371 bp, Oryza sativa
  Clone ID: uC-osrocyp013a07b1
tttcgtttatactccggctcttattcagtgtcgaatcctgtcttatgctggtgcccaccagcaccaccgtagcactggcggtcatcgggccgatcaacaaggaggacccgctcaactggtgcgcggtggtggcctatatggtcagaagccacctcgacgaggtgaatcgcatggtggtgcagttgcgtgagccgctggacaagatccagggcgccaccctccgtgttgtccatgtggtcggcgtaatctaggtcaaggactgcgccagcgtctgcgttgagctcaacgaggaggcccgctcccgtgtcaaggtcaacagcggttggatcctcaactgcatcgtccacggtggagacatatacggcgttact

SEQ ID NO: 37659 - DNA, 430 bp, Oryza sativa
  Clone ID: uC-osrocyp013a08b1
tggaactgctattctgcggccaaaacagcctttgttttggcttattttttgtctgaatacaatgctcagatttccttcgaagtgttcctggatatgtatgacaggaactttcatatgtgtagaatgctttgtgttaaattaagtaagacactggacatgatgaatcatttggcccatggcatctcagatctgtgtgactcaggtctcaaatataacgcttctaaggttgaaatgctttgttcctgaagtttatgaatttgtgattatgcatatattatcttgcccttctttttctagtttaaaacttcatgtttacagtccatttgcagctgcaatagatttgctggaaaactaatagagcaacttgttttcccagattagccaagtttgatcagattgttcacgtgttatggctggacatcagtataat

SEQ ID NO: 37660 - DNA, 478 bp, Oryza sativa
  unsure (1)..(478): unsure at all n locations
  Clone ID: uC-osrocyp013a09b1
ctcacctctcatcaacattcgcgacgacgaaaagaaaaaaaaaaaagaatctcgtctcacccccaatggcgcagatcatcgacgggaaggcggtcgccgccgacatccgccgcgaggtcgccgccgacgtcgccgncctctcctccgcccacaacctcgtgcccgggctggcggtggtgatcgtggggagcaggaaggactcgcagacgtacgtgcagatgaagcgcaaggcgtgcgccgaggtcggcatccgctccgtcgacgtcgacctcgccgaggacatctccgaggcggcgctcgtcgccgaggtccaccgcctcaacgccgacccagccgtccatggcatacttgtccagcttccattgccaaagcatattaatgaggaaaagatattgaacgagatcagcttagagaaagatgttgatgggttccatcctctgaatattggcaagcttgcaatgaaaggcagagacccact

SEQ ID NO: 37661 - DNA, 399 bp, Oryza sativa
  unsure (1)..(399): unsure at all n locations
  Clone ID: uC-osrocyp013a10b1
tttactgcgtcacccagggggccaagaaggggctcaccatgaaccccaccggcgacctctgcagcgcgcgcttcagcgagaagaacctcctcaccgccatcgaccgcgaggccgtgttcagctacgccgacgacccgtgcagcgccaactacccgctcatgcagaagctccgcgccgtgctcgtcgagcacgccctcaccagcggcgacgccgagcccgaggcctccgtgttctccaagatcaccaagttcgaggaggagctccgctctgcgctgccctnggagatcgaggccgcccgcgtcgtcgtcgccaacggcaccgacctcgtcgccaaccgaatcgtcgagagcccggtcgttcccgctctaccgctttcgtccgcgaggagctcggctgcgt

SEQ ID NO: 37662 - DNA, 364 bp, Oryza sativa
  Clone ID: uC-osrocyp013a11b1
gctaaatgtaccgccagaacgagtcggccctctcctgcttctacctcttcctcctctggttcttcttcttgaaatagactccacgccgcgccaattcccagcccgagcgggagccagctgctcaatccgtcgttgagattggttgcggtttgctctagcttgtgaactcggcggagatttttggttttttgttttggttttgggtttggttggggaaaggggttcgaatcgatcggaaagggtgttacgactcgattggcttgccctgcttctgtgactggagtttggcatctgaaccaacgtggcggaggggttgttgggaaaaagcatgagaacggcggcgagggagcgacttcggcacgtc

SEQ ID NO: 37663 - DNA, 223 bp, Oryza sativa
  Clone ID: uC-osrocyp013a12b1
tccacgcgtccggaagctcaagtacagtttgcacttgagagaggcatgccagcaatagcatctgctatgggcaccaaaaggctcccataccccagcaggatctttgatgtcaatcattgcgctcattggagggtacattggcacatcgaaggagggatgctattgctggaactgagccgcctattacgcactggtggttactacgcacggtctgtcactcctg

SEQ ID NO: 37664 - DNA, 471 bp, Oryza sativa
  Clone ID: uC-osrocyp013b01b1
cacgttgtgttattaatgataccagggcacgagggaggcacggccggctgagagtgagatcgctgagatggacatcagcgaggtgctgggcgcaacggcggagtgggcggtcaccttggtggccatggctgtgggtctcctggtggtggcctacttgtacgagccgtaccggaaggtttggcacgtgccgggtcccgtgcctctgccgctcatgggccacctgcacctgctcgccatgcacgggccggatgcgttctccgttctcgctaggaagcacggtcctgtcttcagatttcacatgggaaggcatccactgatcattgtggcggatgcggagctgtgcaaggaagtgggcctgtagaaattcaagagcattccaaattgaagcatgccctcctccattgccaaatcttctatccataagaaagggttgttcttcataaggtgaccgaggtgggacgtcatgagaaa

SEQ ID NO: 37665 - DNA, 384 bp, Oryza sativa
  Clone ID: uC-osrocyp013b03b1
ttgtcttctgaatctatctctcgagcggccgcggatcctgctaataggagttcctccgtctacgccgcgttgtcggcaatgtccgctctggagctatatgcatacacgatccggtgcggatgctgggacccgctccgacgggcaggcgccatgccctggggcacccaaattctgccgaactagaaccctagccaggaagcgggaagccttatcgcgactgctcaagctataccagccttgatgcggctgagaatgctgcctttggctacaacgcggaggaagaagttgaactcggtgaattggctgataatgacggagatgatgcagctccgcaagaccgtggagatgaaaaatgcccttacgttcaagaacagtgtttgttag

SEQ ID NO: 37666 - DNA, 381 bp, Oryza sativa
  Clone ID: uC-osrocyp013b04b1
tggactcgtgggggaagtccaaaaggctgctgctgctctgagggggtctgaccaccgccgtgctaccaatgtatagcgctaggttggacgcacagcacaagaagctcaaccttacagtgctggctacaaccacaattggttcattcgcacagactgtggagctcaggagagtccgccgtgagtacaaggctaaaaagatctatgaggatgagtacgtcagcgccatcaaggaggaaatcagcaaggttgttaagatccaggaagagcttgacattgatgtgcttgttcacggcgagcctgagagaaacgatatggttgagtactatggtgagcagctttctggttttgcatttactgccaatggattgggtgcaatcctat

SEQ ID NO: 37667 - DNA, 356 bp, Oryza sativa
  unsure (1)..(356): unsure at all n locations
  Clone ID: uC-osrocyp013b06b1
ttggattgggtgggggaacccgcggcacctcgcgttgtgggaccccgcctcggcggcggcggcggaccactgcagatgggaaggcgtgacctgctctaatgccaccaccggcggcggcggcggtgccggcgtggtgacggagctgtccctgcacgacatgaacctcaccgggacggtgcccacggcggtgtgcgacctcgcgagcctgacgcggctcgacctctccaacaaccagctcaccgacgcgttccccgccgcggcgctgtcccggtgcgcccgcacttcgtttcttgacctcgccaacaacgccctcgacggcgctctgcccaacacgtcgnagggttgtccccggcgat

SEQ ID NO: 37668 - DNA, 462 bp, Oryza sativa
  Clone ID: uC-osrocyp013b09b1
tggaatagccccgcggatgctatcaatcctcggatgatactgcaggtgctccaagagctcgagttggattcccccaagagcacagaaaatgaagaaatagggcgcttgatcactcctcaggaggcctgtaatcgtattgcagaggttgtccatgaagccgttaaaaagatggagcttgttgctgaagagaaaatgcgactctacaaaaaggctcgcattgctgtggaggcctgtgaccgggagcttgacgagaaggccagagagcttcaggagctgaaggccgagaggctgcgcaagaagcagcaggtggatgagctagagagcattgtccggttgaagcaggccgaggccgagatgttccagctgaaggcaaacgaggcccgtcaggaggctgacaggctccagagcatcgcgcttgccaaatctgagagggccgagcaggactacgccagcctatacctg

SEQ ID NO: 37669 - DNA, 415 bp, Oryza sativa
  unsure (1)..(415): unsure at all n locations
  Clone ID: uC-osrocyp013b11b1
tttccccccacctcgccgccggcgaattcctcgcctccgccgcgaccgagcccccgccgctcttggggcttcgctcgcttctccagcgcaaccctcccccccctcccccgccgccgccctcacacagggttctcttgcgggttggggatctcatcgcggcggcggcggcggactaataagggattccggccgatggcgtggcggcgcgtcctttcgcaggtcgcaaggaacccgatccgcatatgcaatctgcaatgaaataatatatgccaacccatcgaggattctaggaggtgacaccatagcaggtggaacacttagaaacttacatgagagtatcagtcagctatgttggtagctttgcacgcangatgcgacagatggactcacccagtgaagcctctctgctgaaaga

SEQ ID NO: 37670 - DNA, 464 bp, Oryza sativa
  Clone ID: uC-osrocyp013c01b1
tccacgcgtccgcagagacacacctcaccagcttgatcaagagctagccaagccaaatggagctcctgccatggcttctcggcttcgtggtcaagtacccggagatcatggcgtccgccgcttgcttcttgctgctcttctgcaggtttaggaggaggagcaagcggattccgacgaactggccggtggtcggcgcgctcccggcgatcgtggcgaacgccgggcgcgtccacgactgggtgacggagttcctccgcgcggcggcgatgtcgcacgtcgtcgaggggccgtggggctcgccgggggacgtgctcatcaccgccgacccggcgaacgtggcgcacatgttcacggcgaacttcggcaactaccccagggggaggaggtcgccgccatgttcgacgtgctcggcggcggcatcttcaacgccgacgcgagtcgtggtcgttccaacagtcggaggc

SEQ ID NO: 37671 - DNA, 487 bp, Oryza sativa
  Clone ID: uC-osrocyp013c03b1
ctccaggttctgaagggtttttttgtgggtggcgccaccagcaaaagtaacccatgtcgtctagcagatctagctagcttgcccaagctgaggaagctgagcattagcactgggcggcgagcattagtggtacaggaagatgagctgaacaaattgcaagggtgcacagccctagagtccttgactataacatggggagcagcagcagctgcacaagggccgaagcgtcaactgatatctggtgttgaaggaagcatcaaaggaacctccatgggatcagagctgttgcttcctccaagacttgagaagctggacctgcggcgcacccccatggagaacttgatgcatttgcttcatccaggaaatgctgagaacttgaagagactgtatattcgaggagggaagctgaagagctttggtgatgtggaaggttggaatgtctagacgcttcgtgtgaggtttctgaaagtcttggagtgtgattggg

SEQ ID NO: 37672 - DNA, 402 bp, Oryza sativa
  unsure (1)..(402): unsure at all n locations
  Clone ID: uC-osrocyp013c04b1
ctggactgcaaaacagtggtggttccacttcctctcgctctgatggaagtgaatatgatattgtaccaaaatcatattcctctaccccacgcaacttcccaagtcgtcgatcattcctgtcaaagccaatccatccgctctcgtttgcagagcatgcactagaagggcaagaaactgatagccctgttgccaatgcaagcaccagcagtcctatgccctcggagttcaaggcaataggggatgatccgcccgtcaggtctgatggactacgcctacgccagtggcagtcatggnggagtcagcaaactggagtgccgcaagtagattgtatcttaccgatttatcagaacgacatgatgctgaacgctctggaccactgcgttccataacataatggataga

SEQ ID NO: 37673 - DNA, 218 bp, Oryza sativa
  Clone ID: uC-osrocyp013c06b1
cgacgtcctcctcccacacgcctatcgtcatcctcgcgatcgccgcattcatccatccactccccccgcacgccgaaggaataacctagaccagagacgaccaaggagagcgtctccgatggtggtggtggtggtgggaggcggaggaggaggaggaggaggacgaggggtgaagaaggaggagggggaggaggaggcaaggggaagaggaagaggac

SEQ ID NO: 37674 - DNA, 483 bp, Oryza sativa
  unsure (1)..(483): unsure at all n locations
  Clone ID: uC-osrocyp013c08b1
ctctctctctctctcctccgcatcaccaccaccgccgccgacgagctccggtcgccgccggcgagaggcgccgcgcgatccgggagatgccgccgctcacggggcccaagtccggggacgctctcttcggcagcgtcgagcgcgtcaacgcggagctgttcacgctcacgtatggggccatcgtgaggcagctgctcacggatctggaggaggtcgaggaggtcaacaagcagcttgatcagatgggctacaacattggaactcggttggttgatgagttcctggccaaatcaaatgtataagggtgtgttgacttcaaggagactgccgatgtcattgcaaagcttggattaaaatgtcttggggtgtgactgcaactgtcaccaattgggatgctgagggtacaagctgcagctntgtattggaggacaatcntcttgtagattttggtgaacttcctgatacttgccaaggtcttcagta

SEQ ID NO: 37675 - DNA, 413 bp, Oryza sativa
  unsure (1)..(413): unsure at all n locations
  Clone ID: uC-osrocyp013c10b1
tttgtaacctgcgaccaagcgcaaacgacgaagccacaattcctgacattagcaagacccatgactatgaggagctgatgaatagccttaatactactcaggcagaaagcgatgagatgatgaactgccaaaatccttgtggtggggaagggtcagaaccgattccaatggaagaccatgatgtgaaggagagtgatgatggtggtgagagaagagaatctcccccctgggtcttatgtagtattgcaattagagaaggagggagattttagcaccacatactcacttctgctttgatctgtggcaaggggttttaaaagaagatgctaaatcttagggatgcacatgagggggccatggagaccngagtacaaaaactggctgcagctcttggcgaaaccttcgaaggattc

SEQ ID NO: 37676 - DNA, 361 bp, Oryza sativa
  Clone ID: uC-osrocyp013c11b1
tggacgcgtgggccgcgtcgtgccttttgactcctcccacctcaaaaccgcgggccgcatcccgcgccgccgccgcccaccggcggcaaccacccgccaccgcgagcgaacacccctatataaaccgccacgccacgccacggccaccaactccgaacacgacatggcgccctctctcctcaccaccccgtcccaggccctggccctcgccccgggcgccgccgccagccgcgtcggcggcggcggcggcgtgtcgcgcgggtgagcttcccgtccggctcgcgtccagcgccgaggcgcctggggatgcggggcgggcgttcgtggtcgatcgagatggagacgcccgagagcgagccgc

SEQ ID NO: 37677 - DNA, 55 bp, Oryza sativa
  Clone ID: uC-osrocyp013d01b1
aagggaaagaccccggcccggcagggaccggaacccccgggccgacccacgcgac

SEQ ID NO: 37678 - DNA, 447 bp, Oryza sativa
  Clone ID: uC-osrocyp013d02b1
cttcgttgccaagcgtctcattggcaggaggtttagcgatgcttctgttcagagtgacattaagctctggcccttcaaggtgattgctggacctggtgacaagcctatgattgttgtccagtacaagggtgaggagaagcagtttgctgccgaagagatctcctccatggtcctcatcaagatgcgtgagattgctgaggcctaccttggcaccaccatcaagaatgccgttgtcactgttcctgcctacttcaatgactcccagaggcaggccaccaaggatgctggagtgattgctggtctcaatgtcatgcgcatcatcaacgagccaactgctgccgctattgcctatggtcttgacaagaaggccaccagcgttggtgagaagaatgtcctcatctttgaccttggaggtggtacctttgatgtttccctccttaccattga

SEQ ID NO: 37679 - DNA, 319 bp, Oryza sativa
  Clone ID: uC-osrocyp013d03b1
tctgactcctcctcgtcagtttgcccgccgcggcgccgccgccgccgccgccgatccccatccatcccgcgagcgagcagggcgccgtcgttcgtcctgctgcatccgccgcatcctgtaaacatgaaccctttaaagaggtcattggaatcatcttctcaggaacatgaagcaggcaaacagaaactgcagaagagagagtgtcaagatttcactcccagaagatatcagcttgatgtctatgaggttgcaatgcggagaaacacgattgcgatgcttgacacaggagccgggaagacaatgattgctgtgatgctta

SEQ ID NO: 37680 - DNA, 419 bp, Oryza sativa
  Clone ID: uC-osrocyp013d04b1
cttcctcctccccaaaccctagtcgccgccgccggcgtactcgagagaaacatcagcatccatggcgggcaagggcgagggtccggccatcggcatcgaccttggcacgacctactcgtgcgtgggcgtttggcagcacgaccgcgtggagatcatcgccaacgaccagggcaaccgcaccaccccctcctacgtcggcttcaccgactccgagaggctcatcggagatgctgccaagaaccaggtcgccatgaaccccatcaacaccgtcttcgatgccaagcgtctcattggcaggaggtttagcgatgcttctgttcagagtgacattaagctctggcccttcaagggtgattgctggacctggtgacaagcctatgattgttgtccagtcaagggtgaggagaaagcaagttgct

SEQ ID NO: 37681 - DNA, 454 bp, Oryza sativa
  Clone ID: uC-osrocyp013d05b1
gttgcggtagactggttttgcttcctcagctcaacccgctcgagctgggagcggttcgttagctgtgcaccaatggcgtcatccagggcgtcggcttcctgtgccctcttcctcgcccttcaacctcctcctcttcgccatcaccaccgcctgcccgtcctgcggcagcggcggcggcggcggccatggccattacggtggcggcggcagcagcggcggaggcggcggctacggaggaggcagcggcggctactgaggaggcggcagcagcggcggcggatactgcggcggcggggggtcgtcgactagcgggtggtacgggaagtgcccgacggacgcgctgaagctgggggtgtgcgcgaacgtgctggacctgattaaggcgaaagcgggggtgccggccactgagccgtgctgcccgctgctgaacgggctggtggacctggaggccgcc

SEQ ID NO: 37682 - DNA, 466 bp, Oryza sativa
  Clone ID: uC-osrocyp013d07b1
ggcttccactgatggtaacgacgatagtgtatatcctattgcagttctaatcgacgaattaagaaatgaagatgtgcagctccgtcttaattcaataaagaaactttcaacaattgctctagcattaggagtagagaggactcgaaaagaactaataccatttttgaccgagacgatctatgacgaagatgaagtattgttggcgcttgccgaacaacttggaatgttcacaccgctggtgggaggtccagagcatgtgcattgcttgctggcgccgctggaaagtctggcaactgtagaagagacagtggtgcgtgacaagcagtggagtcgctccgaatcattgtagcacagcactccccgagtgatcttgagaatcactttgtgccgttggtgaaacgattgtctagcggcgattggtttacctcgagaacatcagcatgcggcctatcagcgtatgttatgc

SEQ ID NO: 37683 - DNA, 361 bp, Oryza sativa
  Clone ID: uC-osrocyp013d08b1
cccagccattctctccgcgacggtctcgtcttccccacccctcgcctcctcgcgcgctcggtgagagaagcgaagaagaagaagaagaggaggaggaagaagccaggctaagccccgcggcatggcggaccagctcaccgacgaccagatcgccgagttcaaggaggccttcagcctcttcgacaaggacggcgatggttgcatcacaaccaaggagctgggaaccgtgatgcgttcgctggggcagaacccaacggaggccgagctccaggacatgatcaacgaggtcgacgcggacggcaacggcaccatcgacttccggagttcctcaacctgatggcacgcaagatgaaagacaccg

SEQ ID NO: 37684 - DNA, 427 bp, Oryza sativa
  unsure (1)..(427): unsure at all n locations
  Clone ID: uC-osrocyp013d09b1
ctgaagtctgggagatcatctgttctactggatgttattatcggactcatctaccctgttctctcattacagccaatgatccaaactggcggaccagatctgcattgttatcatatctcaggacatttacgtacaggcatacattcattctttccagctcagagaaatcacaaatttggcaaacaattgagaagttacttgtggatagtcaagttgaggttagggaacatgctgctggtgtccttgcaagcttaatgaagggcatagataaagacctctctaaggactttcgagatcggtcatatgcacaagctcagcgtatccttcatacacggcnaggaggtgcaaagtcaggccactctgttgctactatccatggtgcagttcttgctttgacggctttagtgctttctgttccatacgacat

SEQ ID NO: 37685 - DNA, 360 bp, Oryza sativa
  unsure (1)..(360): unsure at all n locations
  Clone ID: uC-osrocyp013d12b1
tgtactcgcacgccgcgacgcctctgctgaacatttcgctctcttccaagatattttttcctcccacgattccttcctcccatccctgtggggattcatcggctcatccgtactagcacaagatgtgcgagggtgtgcgggccgccggcgacgccgccgccgccgccgacgtcgacgtcatcacctcctccggccgccggaggatccccgcgcattccactgttcttgcgtcgggcgtcgccggtgctggagagcatcctgcagcgccgcctgaagaaggagaggggacgccgccggcggcggcggcaaggtccgcaggcccgtgtcccggatcggcnggcgtcaccgacgacgccgcgg

SEQ ID NO: 37686 - DNA, 404 bp, Oryza sativa
  Clone ID: uC-osrocyp013e01b1
ttccattaccaccgcgccaacccttcgccgccgccggggccgacgacgacgaggacgacgacgatcgaaatggcctcctccaccaccgcctcctcccagctcgccctcgccctcggcatccccggcctcggcggcctcctcatccccaccgacgccgccgccaccaccaccaccaccgccgagggcaacgatctccacgccgacgcctcccaccccgtcctccgcctcgccggcgccgtacagcactacgagggggggggacgaagtgggtactctctcgtcgcgcgccaggccggcaagggcgatgatgagaatgagaggccatacgcggagctctggatggggacgcacccggcggcgccgtcgtcgctggcggcgacggtggagttcctgagggagtggct

SEQ ID NO: 37687 - DNA, 494 bp, Oryza sativa
  Clone ID: uC-osrocyp013e02b1
ctgaagtgatcggcggttgctgtggcggagcagctttcttcttcctggggcagggcagggggaggtctcgttgcgatggcgggaaggggcgagatgccgatgaggcctgtgcggccagggccgccgatgcagtaccgggggcctcctcccatggctcgcgcgcgcgtcgaacccgtcgatcgcgagaagacgtgccctctcctgctccgggttttcacaaaggttggtggccatcaccaaaatgaagagtttgccgtgagaggaaaggagccgaaagatgaagtgcagatatacacgtggaaggatgccacactccgagagctcactgatcttgtgaaagaggttgctcttgcagcaagaaaaagaaatgcaaggctttcttttgctttcgtgtaccctgataagcatgggtcgttcgttgtcaaagaggtgggttcaaccttctcttatggccatgggaggggagatgatgctaaaactcttgcagagctagg

SEQ ID NO: 37688 - DNA, 405 bp, Oryza sativa
  Clone ID: uC-osrocyp013e03b1
tggatcctgcacagttgctttttctcgccaagaactcggtaatcccaagccctgtgtgagtgagatccagctttacaagaaggttttgggggttcttggtcagctctgccagcagagtgacactggatgattgcataaatgaagctagctgaatgtagattgcgaaggcttcctttcctgcgtacggccatatacacttttatcatggcaccgcgccacaggttttcaactagaaggcctctctggattgacatcttgattgcttttgtctgtgcagcaggcattggagcctatctttatacaccccagcatatacacacctggttacttggagtcatcaaattcctgtagatctcggactgctccagaacctgctgcggtttacgctgatgatgagattgctgc

SEQ ID NO: 37689 - DNA, 470 bp, Oryza sativa
  Clone ID: uC-osrocyp013e05b1
tctcattcccaccccaagaacaccaaagccgggtccggttccatcccagtccacggtgaggttgagcgatctgaaaaaaatcatcagcgacgagcagcaacaggtttgttctctgaacttctctgatctttttagaagcaggtaacacacaagaaaggtcctgtcccaagaaggtacttctttcgggtttattagatcgaaagaggagttcttgtgcgtacaggttctttctcatcccatcaacttctcctaggaggaacagagatccagagaaccttttttctcttctggattcttgccgatttttaggcttcctttgcttttctaaggccagaaagggttgttttgcaatacccttctagttcatcctctcaaatttttcttctttctattcaaaagctctttctttctttgcaccctttgtttctctacttttattgaggaacagggctgatttttcacttcttgca

SEQ ID NO: 37690 - DNA, 464 bp, Oryza sativa
  Clone ID: uC-osrocyp013e06b1
tttgcttggagcggtggcgtcccaatccaatccattcccaatgcgacttctcaggaggatcccgctgctcttggacgagtccgaatgggattaaggccatcggggtgtttcgtctagtgcattggtggctggatgttttgcttgctgaggaagcgaggttgagctgggagggagggctctggtgtggtgttgacgaagagtgttttattgtaggttgacaggatcatgacatgcaactggaaaatgcttgattatgtttgatagtacgaggattgtccgagtttctgagattattgccttcaaggaggttgaagctgcttgtggtgatggagtagctcagttcaagcaatgagatgcaggaattgtggccactaggtgaagtagaccaaaagggaaccaggttcccttgtgcattgtttggacacctctgcggtggcttttggctggctccctcataggtcatg

SEQ ID NO: 37691 - DNA, 467 bp, Oryza sativa
  Clone ID: uC-osrocyp013e07b1
ttttggtgcagaactaggtggttgaatgggcatgttacattgaagatgacccacgtgcagctcattctgagcatgtaggcaaccgattgcatatgtctggcactggaaattcgatgtcagaaaatcaatcagggagtgaaaaaaccatgatagctggcagtgagggtgagtaaactctggacaattgggacctcaagatgcaatcatgctcaacagtaacttactgctgggggcacaattcaatggaaaaagaaggacttggaattaaactacagactcttaagaaaatgaagagtctaaaaagcaaatttcagagactgagtctttaatgggtattgaactgggtaaaagtccattggcattcatgggattaaacaatagagatcatgaatatcaaaggcatagagagaatatagcttcagcacctggaagatctgaacagccattggtgatgaaaaactggtcag

SEQ ID NO: 37692 - DNA, 467 bp, Oryza sativa
  Clone ID: uC-osrocyp013e08b1
tggacgcgtccgcccacgcgtccggcagactaccctggggtgagggatgcttggatggaagtagcggcttctcaagggcaatcattgttatctgttgatatctcttgctctgatgtgactgatggtggactgaatcaactcaaggattgcatcaacttgcaaagtttgtcatgcaattactgtgatcagatatcggagcatggacttaaaacattgtcaggcctctcaaatgtgacatccctgagctttaaaaaatgttctgctgttactgctgaaggagctaaagcctttgcaaacatggttaatttgggtagcttggaccttgagcgatgtccgaagattcatggtggacttgttcatttaaaaggcttgagaaaactggaaaagctaaatttgaggtattgtaatggcatcacagattctgatatgaaacattatcagatcttacaaaattgagagagcttcac

SEQ ID NO: 37693 - DNA, 462 bp, Oryza sativa
  Clone ID: uC-osrocyp013e09b1
cgccgtccccattcccatccccatcctcctttgcaccttcgcgccgcctcttgaccgcatcagcgtgcgcctctcgcctccgcctccatcgccgcccgtgcgccgcctccaaccagcctacctccgcggctccgcctccatcgccatgcgccgactccagccgggccgcctccacctccagccggcgcgcctccacttccatcgccgtatgccgcctccagccgacccgcctccgtctccatcgccgtgcgccgcatccagccagccggctgcatcccggctcggtggtggtcctggtggaagatgacagccatggccatgagaagctgatttcttttctaaatcgtgttcgatttgcttcttttcttgtctaaatcgtgcttgatttgatggtgcaccaattgtagtgtgtcatctgcgatctaattgtttgattattcgatcttgcactgattatttgat

SEQ ID NO: 37694 - DNA, 428 bp, Oryza sativa
  unsure (1)..(428): unsure at all n locations
  Clone ID: uC-osrocyp013e10b1
ttgggcagcagctgtgtttgagcggggtgactcggtcgaccaattctcaaacgtgcgccaccattagcggcagttttctaagagaaatgcaaagcaaagcagtggtgcaaaatcatcatggtggtcagtccaatggagcatactctggcagtaagatctataccgaaaactaaatgcaggaaacacgtaatcttctccggtgaaaggtgtaacagtatattgnaagatcttttcatgtaacattttgcactaataataatttatgcgaataaggggcatgcatgctcaatgtttgttttgtcaaggtgttccacacgaaacactgagaggagacangtggttgcaaatgttgaagggcctgaaaggggtaggcctgatcatggataatttggcccaaatcaaatctggcctgcctnngatcgntgtcc

SEQ ID NO: 37695 - DNA, 483 bp, Oryza sativa
  Clone ID: uC-osrocyp013f02b1
ctcgctcgctcgctccttctcgttccggattactgccaccgcatcctcgccggagccaaggtccccttccaccgccgccggatccaaccatctgccttggccggccccatcctgcactgcactgcttccgccgttttggatccgggctcccttctgcactgcactgcttccaggtccccagatcggcgaggggcgcacggtctcacatgatgttgtgatgtgctcatagggagagtggctcaggagattggggcttggggtggatcaacaacttgatgagggaggccggtggcaaagtatctaggaaggccccacgatgcagatccatggcagagcagcttctcttaagagctcagttgcgacgccggcgcaagatctcgcgcagctgtgcgggaatcatgcagcaacccatggatgattggtgggtcgagcaacaggcatgcacacgataatcgccatcattaacagaggaagtgctttgag

SEQ ID NO: 37696 - DNA, 479 bp, Oryza sativa
  unsure (1)..(479): unsure at all n locations
  Clone ID: uC-osrocyp013f04b1
gctgcctggctgtcggttaggttgcggtcggggtgggcgaggctggtggtggaggaggaggaggggagaaggcggatcgtgaggtggaggaggggaaggaggatgtggaggagggcggtgtgtgtaaggatctggtgctcgtcgaggacgccgacctcgtcaaggatccggaggaagccgtagcaactgcagcacttcaggaagaaatgaaagcgctcgttgaatccttctcagttggtgctggggcggcattcaccgctatgcaactacaggagcttgagcagcaatcttgtgtctaccagtatatggctgcccgtgtgcctgtgcctactcatcttgtctttccaatatggaagagtgttactggtgcatcttctgaaggcgcccagaagtacccgacattgatggggtgtgcaaccactctgcttggactttgaaagaacccagaaccagaacctgngaggtgccggctaactgat

SEQ ID NO: 37697 - DNA, 447 bp, Oryza sativa
  Clone ID: uC-osrocyp013f05b1
tcagctccggcctccggtactggcatctcttgctgctcaccgcgctggccgggaatggcatctgctggatcaacaccgtctcctacctcctctgcatcaacaacttcgcgtcgaacagccgcgtcgcggtgagcctcgccaccagctacctcggcctcagggccaaggggtaaaccacctggcccagacgttcccggggctggccaactccaagacgaagacgtacctcctcctcaatggccgtcgtgccgctgttcgtcaccgtcatggtggccgccgtccctcagggtgttcgacctcaagagcgctggcggcgagctcggacgcggcattcctcgtcatgttccgcgatcacgctcgccacgggcgctgcgcgggtggtcggcagcatcggctcgacggcgaacgggctgtcctccaggagcacatgatcagcttcggcgtgct

SEQ ID NO: 37698 - DNA, 357 bp, Oryza sativa
  unsure (1)..(357): unsure at all n locations
  Clone ID: uC-osrocyp013f07b1
ctggaacggagttacacttcagtttcaaacacgaccgaggagctaaatgctccattaaaggatgagtctttaatgattgggggcaaacatgtcgtgaatgataagattccattagtgtatatgggcgagtctataaaatcctttagaacattgatgaagaggtataatatgcatagacgtgatatgttttcaaatactgttggagttaaggcttatcacggcatacgaccgcagtttcctccattgcgtggccaatatggnggtgctgaggatttgactgcagcaggtgatcctatatgtatgttaaccagttacttttgcactgggttcgacacgcatttcagggtcacagagggt

SEQ ID NO: 37699 - DNA, 473 bp, Oryza sativa
  Clone ID: uC-osrocyp013f08b1
gtcgtcgtcttcctccgccgaattccccaccccaccggcggcgcgaccgggcggagatgtaccacccgacgagaggcggcgtccgcggcggacgggatcaattcaaatgggatgatgttaaggttgacaagcaccgagagaattacctcggtcatagcattaaggctcctgttggaagatggcagaaagggaaggacctgttctggtatacaaaagataagaaatctgactcagaagatgctctcaaggaagaaatcaggagagtgaaggaagaggaggagcagtccatgcgggaggcacttggcttagttcctaagcgtagtagtcgacctaagggcaaccgattagataagcatgagtacgcagagcttattaagcgaggatcaactgcaggagacttgggtgctggacatgctgaagcagcacaagtgcagggtctaggtttatacaagggtcctcgcagagaggaagaa

SEQ ID NO: 37700 - DNA, 463 bp, Oryza sativa
  unsure (1)..(463): unsure at all n locations
  Clone ID: uC-osrocyp013f11b1
gtcggggatggcaggtgcgcccatggcgtcggccccgccgtacgacaacccgacggctgggttccccatcgcgatcgtgatcgccatcgggttcatggtcacctcgctcatcctcgccagctactacttcctcgtcgtccgctgctggctccgtggcacgggcggcggaggcgccgccggggccgggctgctgcaccgctcgcgccgcgagagcgcggcggagcgcgtcgccgcggtgttcttcaccgactacgaggccgaggttggaggcgggctcgaccgggctgtcgtggcggcgctccccgtcgtcaagtctcgccgcgccgcctcggtgaagtcggcgtcgcgcaggagtgcgctcggtgcctgtcggagttcgtccgggacgagcggctcangctgctgccgagctgctccacgcgttccacatcgactgcatcgacacgtggctccaccacaacgt

SEQ ID NO: 37701 - DNA, 471 bp, Oryza sativa
  Clone ID: uC-osrocyp013f12b1
tttcctttattataatgagtatgttatgcggaacctggccagggggtacaccagaaaggatcttggtgtcagttacgttaaggaaaaaagactgagagttaacatgggattaaaaaacctgcgtgacaaagtgaagcagcaccaagaaaaagtaggggagaagtggaatacagtggcgaaactccaggaagagtgggtggaaaatgcagatcgatgggttgctggttttctggagaagtttgaagaaggctgtcactcaatgggaactgccatcaaagagcggatccaagagaggctcaaggcgcaatccagggatttcagccttctacagtatgatggcgaggatgttgacgaggatgaggacgacgacgaagatgtcagagaataatgccaccactgggaatattcgtcaagtataatatatgtacatgcgctgcatgtagcaaatcttcaaatctgggcatgtcatgc

SEQ ID NO: 37702 - DNA, 476 bp, Oryza sativa
  Clone ID: uC-osrocyp013g01b1
ctgatgttgctaggaattttggttattgtcgtccacctgtgacggagaatgcagctccccgtagaccgacggttgtttctaacatggcattaaccaacacgccagataatgttgaaaaattaaccactgatgataagcaagagcttagtatagatccaagtattatgaatttaccaggagtagattgtttcaatataaaggaaattgcaaagaaggagagttatttaactacattccaatggtccgatggaggatttggatttttatggaattcacgtgtttccccgatgttgtggcgagctgtggcaggacctcctgcccaagcatggtttcctgcttgtgcgtatgccgtcatgccgtttgagaattggtcgggatcaatgaagtttagatttcaagttgtgtgttctagttttcataaagggcgtttgcgtatggggtttgatcaacaggtgctcaaacaaatcctgagttga

SEQ ID NO: 37703 - DNA, 352 bp, Oryza sativa
  Clone ID: uC-osrocyp013g03b1
tttcattatcgaattctcatgtctcctcgtgcccaccaccaccagggtagggatggctgacaacgggccgggcaacaaggaggacctgctcatctggggtgcgggggttgtcgacatggccgagagccacctcgacgaggtgaagcgcatggtggctgcagttcctcgagccggtggtcaagatccagggcgccacactccgcgtcggccaggtggccgacgtcgcccaggccaaggacgccgccggggactccgcgcacctcgacttgggggtgcggccgatggtcaaggacaccacctagtgcgtcctgaggtggatcgacatcttctggcgcctgctcaaggagcggat

SEQ ID NO: 37704 - DNA, 289 bp, Oryza sativa
  Clone ID: uC-osrocyp013g06b1
tttccatctccatttccttcatcagaggttgttctgctcagtcagaggcatcctttgccaaaaacatttatctgcttcaatggcaacttcttggtctgttgctttcactatcttcttctcctgtattctcctgcttgaaaccatctcttcttcagcatctcttgattgctcatatggttcagctcaagtgaagatactgtccagctcggtggtcagtgagcagcaaaatgtgtaccttttcttgaagccgtttcaaaccacaagatcatgcagcgcgaggcggctcgcc

SEQ ID NO: 37705 - DNA, 404 bp, Oryza sativa
  Clone ID: uC-osrocyp013g07b1
ggcgtcttcgtactcgcctctctccgcgccctcctccgccgccgctcgccgccgttcgtctccgccgccaccgccgccgccatgagggagtgcatctcgatccacatcgggcaggccggtatccaggtcgggaacgcgtgctgggagctctattgcctcgagcatggcatccagcctgatggacagatgcccggtgacaagaccgttgggggaggggatgatgcttttaacaccttcttcagtgagactggtgctgggaagcatgtcccccgtgctgtcttcgtcgatcttgagcctaccgtgattgatgaggtgaggactggtgactaccgccagctctttcaccctgagcagctcatcaatggcaaggaggatgcagccaacaacttgcccgtggtcactac

SEQ ID NO: 37706 - DNA, 299 bp, Oryza sativa
  Clone ID: uC-osrocyp013g09b1
ttgcgtggtcgtactcctagatcagaacaagtgaagggcaacagtatccaacattccaggctgcttgccaggctcctggcatcctatgagatgatcgggagtggatgtccgctatagttgatgcagcgcattgggctcttccataccagctccgagagttgtttgtcacacttctgctgttttgcattgctacagatccattggctttatttgaagaacattgttctagaatgggtgaggactacatgcattggattgggcatagtatgacataccattctacaccttttacacaacat

SEQ ID NO: 37707 - DNA, 473 bp, Oryza sativa
  unsure (1)..(473): unsure at all n locations
  Clone ID: uC-osrocyp013g11b1
gctgggaaattatcctgtgatacatttattgccccactagtccagcttttgtatgactcgtctatgtcagttcaggttgctgcccttggtgctatttgcaatattgctgtgaatttaacacccaggaaatcgattcttcttcaatctggggctgtctcccagcttgttcatttgtccaagtctatggatccaacattgagattaaaagctgtgtgggctcttaggaatattatgttccttttgaatccaaaggataaagactttattctcaaggaactaactttatctactctttcaagcctcatatgtgattctgaacattttgtccaggaacaaacttggcaactggtgcacaatcttgttgatggatatgtgaactctttaattatgtcattggtgaagatggcatgattntaaatgctatttaagacaactgaataatgcacctgcctnagagtatgcatcagggtatg

SEQ ID NO: 37708 - DNA, 308 bp, Oryza sativa
  Clone ID: uC-osrocyp013g12b1
gtccacttcgtcggcggcgaccaccccggagcataccggcggcgagggggaggaggagaaagctccccgaggaggaagaaggccgaagctgcctcaggtcgccggaaccctaggattccccggcggaggtggaggcgcggagagggggcgtcctccagatgcggccgtccgggatttgaatggggggcagatctccggggcgaaggaggcttctagaagcgggctgagttgaaaacctagggttaggtttggtggggttggagctttcgtgcttggtaaccgggatgggtcggagctcgcgaggtgga

SEQ ID NO: 37709 - DNA, 441 bp, Oryza sativa
  Clone ID: uC-osrocyp013h01b1
ttatggatgcaaagtttttggccagaccgcaagcgcagatcaccacaacgaatgggcgaatattggcatcattccctccttgaagggatccacttttcctcagaaggttccatatgttattttctgtgctcccccatctcgttcggatgattaccctggggatgtgagagtagctgcctcaaattggactggtgaaggctctttcgtttttacatcaagtactgctctgtacgattgtagtgacaacgaattgtgcaatgaggattgcccatctgtgccaattggcagaagccctcgtactgacgtccttctaaaagcagagaatgttgttcttgaggcaggaggctgtgtcctcaggctagcaggactctataaaatagatagaggtgctcattttttttggttgaggaaaggaaacttggacacacgaccagatcattt

SEQ ID NO: 37710 - DNA, 300 bp, Oryza sativa
  Clone ID: uC-osrocyp013h02b1
tttgtgttggaggaggggatgcttgaggtggactgcccatgtgtgactcctgaagttgtcttgaagggctctggccatgttgacaaatggacagatctgatggttaaagatgaaaagactggtacttgctatcgtgctgatcatttgctcaaggacttctgcaaggataagcttgagaaggacaatacattgtcaccagagaagacagcagaatctaaccatgttcttgctgtcttggatgatctgattgcaaaacagttgggtgctaagatcaaggagtatggcattgttgctccagac

SEQ ID NO: 37711 - DNA, 461 bp, Oryza sativa
  unsure (1)..(461): unsure at all n locations
  Clone ID: uC-osrocyp013h06b1
ttcacgcgtccgcgcgtcttgcacacgcatgcatatccatcgatcgatcatatgcgctttttagtcgtcacttgtccaactagctagctctacttccatatatcgatcgatcgttcgtccaatggcggcggcggcggcctgcacgaagctgccgttgctgctcctgctcgtcgccgtcgcagcgtcgtcggcgtcgtcactaacgccgctgcacgcggccgtgccggcgaagggacctcgccccggcggcagcgttaccttacacctcgaccaccgccaggtgatggtggacaatggcatcgtgcaggtgacgctgtcaaaccctgggggccacatcaccggcgtcagatacaacggcgaacgcaacctgctccactacgacggagaagccaactccgccgggtctgngatgtggtatgggaacttcctggggtcaatagtccaagagcatgatcgatatg

SEQ ID NO: 37712 - DNA, 453 bp, Oryza sativa
  Clone ID: uC-osrocyp013h07b1
tcgttaacgcccatctccaagatatgcatcccggagtcagctgccaacatcatgctgccgtgcaaggcagggcaagatatcgtcaagggcctgaagggaaaaaaggaccatcgccggaggcttctctggtacaccggagaagaagagagccatcgccggtcactggccggcgccgccggcgaggattactgcgcgcaatcgggcaaggtggcgctgatgtcatcgggcggcatgcaccagctgcacatattcattttcgtgctcgcggtgttccacgtcacctactggcgtcatcaccatggctctagggcgtctcaaaatgaagaaatggaagaaatgggaattagagaccaactcgttggagtatcagttcgcaaacgatccttcacgattccggttcacgcatcagacatcgttcgtgaaacggcatctgggactgtcaagcacacctgg

SEQ ID NO: 37713 - DNA, 496 bp, Oryza sativa
  Clone ID: uC-osrocyp013h08b1
ctcacgttcacgtagctgttcagccgcctcttcgccaagaaggagatgaggatcctcatggtcggtctcgatgcggccggtaaaaccaccatcctctacaagctcaagctcggcgagatcgtcaccactatccccaccatcggttttaatgtcgaaactgttgagtacaagaacattagcttcaccgtttgggatgttggtggtcaggacaagatcaggcccctgtggaggcactatttccagaacacccagggcctcatttttgttgtggacagcaatgacagagagcgtgttgttgaggccagggatgagctccaccgtatgctgaatgaggatgagctacgtgatgctgtgctgctggtgtttgcaaacaaacaagatcttcctaatgccatgaacgctgctgagatcaccgacaagcttggtctgcactccttgcgccagcggcactggtacatccagagcacatgtgctacctctggtgaggggttgtatg

SEQ ID NO: 37714 - DNA, 436 bp, Oryza sativa
  Clone ID: uC-osrocyp013h09b1
gttggcttctcctccccctctttaccttgtcctcctcggttcggttccgtggttcgtctagggtttagtgggttgagatggcggcgccggatgtcgagtaccgctgcttcggctgcggactcgcctgggccaccgacgaccgttccctcgaggccgccttctccacctacggcgagatcctcgactccaagatcatcaacgacagggagaccgtgaggtcacgtgggtttggcttcgtcaccttctcctccgagcagtcgatgcgcgacgccatcgagggcatgaacggcaaggagctcgacggccgcaacatcaccgtcaatgaggcccagtcccgccgctccggcggcggaggcgggggctactgcggcggcggtggcggctacggcggcggtcgtggaggcggcggctactgaggaggtggcggcggcggcta

SEQ ID NO: 37715 - DNA, 436 bp, Oryza sativa
  Clone ID: uC-osrocyp013h10b1
ctgggcagtaacttctgtgagagatggagtactcttacagctacaggttcatgcttgtatgctcagttcttgtactgtgccttaatactcggggtgcgagatgccagttatccgacgatttctacgactacatatgtcctgatgtgtacaccgttgtccagcagcatgtttatgctgccatgaggactgagatgaggatgggtgcctccctcctaaggctccatttccatgactgctttgtcatgggtgtgacggttccatccttctggacggtgacgacggcgagaaatttgcacttcccacaagaactctgtagagggttcgaagtcattgacgcgataaggaagatctcgagaacatctgcctgaaagttgtttcctgcgccgacattgtagcccttgcagctggctatggagtactttttagtggaggccct

SEQ ID NO: 37716 - DNA, 458 bp, Oryza sativa
  Clone ID: uC-osrocyp013h11b1
ttcacgcgtccgcccacgcgtccgcccacgcgtccgcggacgcgtgggcggagcgccatcagccgtccgatcgagtgatccgatggctctcgctctctccacctctgctgctgctgccgctgccgccgcggcgcgggcgctcgcggcgagggtgacgacgacaaggggttacgccgcgtcggcggcgtcgtcggcgatgaggcgggcggcggcggcggtggaagggaagggcgctgcggggatgacgcatgcgaaggacgggtcgtcgtcgtcggcggccagggaggagtcgtgggtgcccgaccccgtgacgggccactaccggccctccaacttcgccggcggagccgacgccgccgacctacgggccgaccacctcgcccgtagctacgcccgcgcgtgatgcgcgcgacctcgccgttgtccgaccgacgacgacgccatgcatccatatatat

SEQ ID NO: 37717 - DNA, 461 bp, Oryza sativa
  Clone ID: uC-osrocyp013h12b1
cgtcaattccattcgatcgcgagagctctcggaaagcaccaccgccagcacagagccagcgcgagagagagagagagggagaccaaaccccatcccggatctctcgtcgtcggcggcgtctgcgatggcgctctccgaccgctcccgcgagtcgctcctcccgagcttcctctacacctcctccgccgcgaggtccttcgccaccggcgccacccgcttcccctccccggtgtccccagcttccccggctccgggtgccgtcgggggcggcgcgcccatctcgatccaggctcccagggagaagatcgagatgtactcgccggcgttctacgccgcctgcactgccgatgggatcgccagctgcgggctcacccacatggccgtcacgccgctcgacctcgtcaagtgcaacatgcagcttgatccagcaaaatacaagagcataacatctgggtttggcg

SEQ ID NO: 37718 - DNA, 326 bp, Oryza sativa
  Clone ID: uC-osrocyp014a02b1
ctgactctgtgagacaatcatttcgaggtcggtaaccaactcgcctgcaatggagttctgtgacgacttgctcgtggagattatctcgaggctcccgttcaagtcgcttgcaagattcaagtgcacctcccgctcatggcgcgcgctcatctccggcggcgacctccgccgccaactcacgatgctcgccgacagcttgatcgtcggcgacggcggcgacggcgagcacgggtacgccaccgcgagctacgacgatggtgttgagatctgcgacatgagcttcttcgcactcgccgagaccgcgtgcagggtcagcgacgcgtgcg

SEQ ID NO: 37719 - DNA, 442 bp, Oryza sativa
  Clone ID: uC-osrocyp014a04b1
cagatttgaggagttgttcattgatctgttccgcaagaccatgggacctgtcaagaaggctatggacgatgctggccttgagaagagccagattcatgagattgttcttgtcggtggtagcaccaggattcccaaggttcagcagctcctcagagactacttcgagggcaaggagcccaacaagggtgtcaaccctgatgaggctgttgcctatggtgctgcggttcagggaagcattctcagcggcgagggcggtgacgaaaccaaagatatccttctcctggatgtggcaccccttaccctcggtatcgagactgtcggtggagtcatgaccaagttgatccccaggaacaccgtcatccccaccaaagaagtccaggtgttcaccacctaccaggatcagcagacaaccgtcttcattcaggtctttgagggtgagcgc

SEQ ID NO: 37720 - DNA, 413 bp, Oryza sativa
  Clone ID: uC-osrocyp014a06b1
cccgtcctcctactccgcatttcccatccccttctccccggcggcggcggcggcgcggaggcggcggcacgggagcggctagtggtttcgtcggcggaggcggaggcggagccaagatgttcgggcgcgcgccgaagaagagcgacaacaccaagtactacgagatcctgggggtccccaagaccgcctcccaggacgacctcaagaaggcgtaccgcaaggccgccatcaagaaccaccccgacaagggcggcgaccccgagaagttcaaggagcttgcacaagcttatgaggtattgagtgacccggagaaacgtgaaatctatgaccaatattgtgaagatgcccttaaggaaagaatgggtggaggcggatcccatgttgatccatttgacatcttttcatcattcttt

SEQ ID NO: 37721 - DNA, 474 bp, Oryza sativa
  unsure (1)..(474): unsure at all n locations
  Clone ID: uC-osrocyp014a08b1
gccattgtgagtggaattggattccgcgagaagttggttccagaagttccagccgagggacaaatcgaagagtccagcggtggctgccagtcatggaaaggatccaggaaagccaccaattgatgacgcgccatctagtgcaacaaaacagagggttgccgcggcaaaacagtacattgagaatcattacaagacccagatgaagtccctgcaagataggaaagaaaggcgctggatgttggagaggaaactacaggatgcagaggttcctgtagaagagcaaaataatattctaaagcatttggagaaaaaggagaccgaatatatgcggttgcagagacataagatggnggttgaagattttgaacttttgacaattattggaagaggtgcatttggcgaggtgcgtctttgtagagagaaggcgtctaagaatgtatatgcaatgaaaaagcttaagaaatctgagatgct

SEQ ID NO: 37722 - DNA, 386 bp, Oryza sativa
  Clone ID: uC-osrocyp014a09b1
tctcgtgacggagcaggaggacgtgcagaaggtttggtttgtgcggatgctggacgaacggcagcgggatctcttagcaaaggtgtcagcgtactgcgcggcccgaggttgacgagcatatgcgtgcgcgcatctaatctatcaattaattgccgatgatgtcgatcagaaggatggatgcatgcatatgccggacatagtacattcgatgatagcaactgacataaatataatgtatgcttgcgatcaacgctggttgctggatcgaccgcattgtgtatgggtggcgtgcggcttatgcacgtttgcaacgcaccgccaagagctgccttctacactgggtgaactacctgcatccaaggcttaaacgagggaagatgatcccc

SEQ ID NO: 37723 - DNA, 282 bp, Oryza sativa
  Clone ID: uC-osrocyp014a10b1
tgcaacatgaacatcaccacacaaaccaggaagatgaccaggtggttcatctgcactctctctagtgtgagtctctatagagggtaacgcgctttaccgtctaaagcatggatgccgttgccgaggccgctccaaagacgatgagagctgagcagtacgataagtacgagggaggaccagaaggccttaagcatgaggaagtgcccatcccagcgcagaaagaaggggagttgctgatcaagatggacgcggcgagcgtgaaccccatctactggaagaatc

SEQ ID NO: 37724 - DNA, 176 bp, Oryza sativa
  Clone ID: uC-osrocyp014a11b1
tcgtccaagcgtacatgctgacccggcccgtgatgacgtgcttgaacttacctgtgaacggactactggtgatgcagcagactctaaggatgacccaatagaagctgcggcgacagtcattgaatacattacacgtagccattgtatacatttggctgtcgcataaaaatgaaccg

SEQ ID NO: 37725 - DNA, 347 bp, Oryza sativa
  Clone ID: uC-osrocyp014a12b1
tttcttcctacagaacatgctgcccccacacaagatgatggcaatggtctgcaatgtgaaggtactactgttgatgcgtctggttctaaggaagatattatggaagttgaggagaagctgattgatgatatttccggaagcccttctagtcatttgcctgttgctttaaaatcaactgagtcaaatcagcctacgcaacatgctgtccccgcagaagatgatagccatggtctgcaaagcgaaagtaccagtgttgatgtggttgattccaagaaagatgaaatggaagttggagaaaagcagattgatatctctagaggctcatctaactttctggctggcgcttt

SEQ ID NO: 37726 - DNA, 388 bp, Oryza sativa
  Clone ID: uC-osrocyp014b03b1
gttgtgtgctgtggtggagaggagaaagggaggaagaagaggagagcaagaaccaaaaaccaagagctgctgccaaccctgcacagcctgggcttgtgatcattgattgcccaactattactaccttcctgtttttttcttctcatatagaagaatcccatctatctatcccttatacatatctcttcttctctttggttcttggaaatctcccatctcttctagatttcctttgtggcttcaagggcctccacaccatatcttgattagtagttggttgctcttcttcttgttcttggtttcttggtctttccccccaatctttgcaagtcttgtagagagtatttgagttgttccttccgctttgtggggagccatggatgatagg

SEQ ID NO: 37727 - DNA, 254 bp, Oryza sativa
  Clone ID: uC-osrocyp014b05b1
cagctcgcccgccgcattcgcggcgagcgcgcgtaagccgccgccttcgacgcggttgcgttgcgtagcgccgaagcgatctggggggatcaacgacgacgacgtgacgtggtcaacttgttgattcccctctcgcttccgcgttttagatctcgttttcattagcagctttgtaatagggtttggtcggttaattagtgtaaaaacagggttcggttaaagactcgaaatcaaatgttattgccgttctttgg

SEQ ID NO: 37728 - DNA, 509 bp, Oryza sativa
  Clone ID: uC-osrocyp014b06b1
cgccgctactcccccctcgccgagagagctctagggtttccgctgccgaatttttttttaattcggggggagagatttgaagaggcggcaccatgttggtctaccaggatctgcttaccggtgacgagctcctgtcggattcgttcccctacagagagatcgagaacggcatcctctgggaagtcgatggcaagtgggtcgttcaaggagctattgatgtggacattggtgccaacccatctgctgagggtggtggtgatgtgagggtgttggatgaccaagctgtgaaggtggtcgacattgtggacaccttccgtcttcaggagcaacctccttttgacaagaagcagtttgtgaccttcatgaagcgctacatcaagaacctctccgccaagctggatgcggaaaagcaagaggaatttaagaagaacattgagggtgccaccaagtacttgcttggaaagctcaaggaccttcaggtctttgttggggagagcatgcatgatgat

SEQ ID NO: 37729 - DNA, 423 bp, Oryza sativa
  Clone ID: uC-osrocyp014b07b1
tcgtccccctcctcccgatccacccctcccgccgccgccaccgccaccgccgccgccgccggccggcgagagagacaggatgtacgggtgggagatgctctcgttcaacatccacgacggcttcctggaggccatcgtgcgggggaaccggtcgggcctcctcaccgccgccgactacaacaacctctgccagtgcgagaacctcgacgacgtcaagatgcacctcaccgccaccgagtacggcccctacctccagaacgaaccttcacccctgcacacaactacaattgtggagaagtgcactcttaaactggttgatgagtacaaacacatgatgtgccaggcgactgaaccactatccacattcttacagtatataacgtatggccacatgatcgacaatgttgtacttattggtaccgg

SEQ ID NO: 37730 - DNA, 412 bp, Oryza sativa
  Clone ID: uC-osrocyp014b08b1
tcggggggcatcgcatctggaggtggaggccaatccgctcgctcgctcgctcgccggcgacccgaatccggccaggagggggggcggctggccggagctagggtgggtgggtggttggccgcaccaccttcctccgcgccgccggagcgtgggcagcggcggcggccggtgggaggaggggaagcatggcgggctccatggtggaccgggcgaccagcgacatgctcatcgggcccgactgggccaagaacatggagatctgcgacatctgcaaccgcgaccccgggcaatcaaaagatgttgttaaggcactcaagaaaaggattgggcacaaaaatccaaaagtccaaattcttgcgctgactctcttggaaactgcaatcaagaactgcggggatatattccacatgca

SEQ ID NO: 37731 - DNA, 527 bp, Oryza sativa
  unsure (1)..(527): unsure at all n locations
  Clone ID: uC-osrocyp014b10b1
cgcactcccaactcctctcctctccttcccactactctcgcgaggaggaaagcgaagccaagcgagagaggcttccgccgtcgccttccccttcgccttccgatcggtcgcgaggtttcaagatggcgacgtgcacacttgcaacttcatgtgtgtccttgagcaatgctagaactcaggcctccaaggtggcggcggtcaagagcccggcatctctaagcttcttcagccaaggcatgcagtttccaagcctgaaggcctcctccaagaagcttgacgtctcggcaatggctacctacaaggttaagctcatcacaccagaagggcaagagcacgagttcgaggctccggatgacacctacatccttgatgccgccgagaccgctggagtagagcttccctactcatgccgtgctggagcatgctctacctgtgccggtaagatcgaggctggctccgtcgacccagtcgatggatcattccttgatgatgcgcagcangaaagaagctatgtgctgacatgtgtc

SEQ ID NO: 37732 - DNA, 228 bp, Oryza sativa
  Clone ID: uC-osrocyp014b12b1
tcgtttgtttgacaggtaggacatgtgtaaggaaagattttagctcagaccacagctgttatgaacatgaggccctggactatagtagcttgcaccggagctaatggttggaggacacactgcctccctgtgtttacctgtatcatttgaatcagaccacctccggtttgtgattcctttgtacatataagcccgatcattgtaaatatatcagccattcaacactcc

SEQ ID NO: 37733 - DNA, 473 bp, Oryza sativa
  unsure (1)..(473): unsure at all n locations
  Clone ID: uC-osrocyp014c02b1
tttggcttctcctccccctctttaccttttcctcctcggttcggttccgtggttcgtctagggtttagtgggttgagatggcggcgccggatgtcgagtaccgctgcttcgtcggcggcctcgcctgggccaccgacgaccgctccctcgaggccgccttctccacctacggcgagatcctcgactccaagatcatcaacgacagggagacggggaggtcacgtgggtttggcttcgtcaccttctcctccgagcagtcgatgcgcgacgccatcgagggcatgaacggcaaggagctcgacggccgcaacatcaccgtcaatgaggcccagtcccgccgctccggcggcggaggcggnggctacggcggcggcggtggcggctacggcggcggtcgtggaggcggcggctacggaggaggtggcggcggcggctaccggcgccgtgagggcggctaccgtggcggcggcggc

SEQ ID NO: 37734 - DNA, 443 bp, Oryza sativa
  Clone ID: uC-osrocyp014c03b1
atgaacttctccaaagtccttgttgtacttgtattaattgctgccttgtgcttctctgttgctgatgccagaaaagccaagagaagagtcggtggatgccgtatcttcagaaccagaaagggtcgcgttgttaagcaatgccgtctctcccgtacccgtgtctctcgccgtgtttgcactgtcatcagacgtgttggtcgccgtgccaccgtttgctgccgtggtgccaagcgtgtcgttcgtcgtgtcgtcagaagacgtagagtcatcagacgtagacgtgtgatcagaaaaagacgtgttattcgtcgcagaagaaacaacagacgtagacgtgttatccgccgtaaacgtgtcgtcagaagacgcagaaacatcagacgtagacgtgtcattagacgtagacgtgttatccgccgtagacgtgtcatcagacgtagacg

SEQ ID NO: 37735 - DNA, 417 bp, Oryza sativa
  Clone ID: uC-osrocyp014c04b1
ttttagcttagcttagctttgctgctgctccttctcattcataagccagcagctagctagcaagcagcacacacatatatcacaggccatctctctatccctaattaagctatatactccatatagctagctaaacacacgaggagtggaggaaggagaggctagctgatctagctatctgcagtgattagttaaaatgatggcttgtgataggtcggatgcagaaaggatcatagagtacttcaagggcaagagcatcctcatcactggagcaactggctttcttggcaagattctcgcggagaagatactgagggggcagcctgatgtcagaagatctacctgctcgttcgcgccatcgaccaagcatctgctaaccaacgcgtccaatctgatgtgacagagacggagcctgtc

SEQ ID NO: 37736 - DNA, 447 bp, Oryza sativa
  unsure (1)..(447): unsure at all n locations
  Clone ID: uC-osrocyp014c05b1
ttaagcactcctctcctctcctctcctcagatcggatcgcgagagccccaatcccaccaccgatcgatccattcctgctgctcgcggccaccggagaaggagagagagagagagctcgacctcgtcggcgggtgaaggatcgcagcagcagcagcggcggtagagcaggaggagaggcgaagatgtcgtcggtgttcagcggcgatgagaccgcccccttcttcggcttcctcggcgccgcctccgccctcgtcttctcatgcatgggggcggcgtacgggacggcgaagagcggcgtcggggtggcgtcgatgggggtgatgcgcccggagctcgtgatgaagtccatcgtgcccgtggtcatggctggtgtgctgggtatctacggnctcatcatcgcagtcatcatcagcacgggggatcaaccccaaggccaagccctactac

SEQ ID NO: 37737 - DNA, 446 bp, Oryza sativa
  Clone ID: uC-osrocyp014c06b1
tccacgcgtccgcccacgcgtccgcgcggcatgttttcctcttacactcttctcaaacacctttgaccaaggttgggcatcaggtatctcggcagctgcaatacaaggactcttagagttgttagtagagggtggtgccgataatgtgaaccagtgctttcttgaggctgctcgctatggaagcactgaactcgtgcgcatcttacttcagattgctcgaaggaatagcttggacatcgatgtggatctagcccttggctttgctgctcactatgggaaactggataccatggggtgcttagttgaggagggtaatgcggttgcctttcttggccctttaatgcgggcagctgaacggggatgcctttaagttgttgaatggttcgtcaaccttggttgtcgggatatggagctttgcttagcccttactgctgcaacctctagta

SEQ ID NO: 37738 - DNA, 510 bp, Oryza sativa
  Clone ID: uC-osrocyp014c07b1
tcgcggacgcgtgggcgaatgaagactagtagctgtgctcttcgtccacctcgactcgtcggctcgcctcggcttccttcgttggtccgcaccttctcccctcacccgccgccggggatccgctccgccgtctcgcctcccgccccgtggatccaccttgccgctccagatggaatcctgcccttcggtgaagaacatccttctgctggattccgaggggaagcgcgtcgccgtcaagtactacacggatgattggcctactctctcggcgaagctggccttcgagaagtcggtgttcgtcaagacccagaaagccactgccggagcagaagctgagattgtaatgtttgatggccacattgtggtgtataagttcatccaagacctccatttttttgttactggaggagaggaggagaatgagcttattttagcatcggcccttcaggattcactgatgcaagtgacattattctcagaaataccgtcgacaaagacagcactcgaaaa

SEQ ID NO: 37739 - DNA, 491 bp, Oryza sativa
  Clone ID: uC-osrocyp014c08b1
atagtgaaactacctttggattcaggaggggagttatcaatttacgataaaataaacaacgaacacagagaaacaaaccgtgttaggttcgcgttctctctctcggcacacacaaacgaaacaacaaacacaagcgaaaagaactcaaaaacgatgtctaccagttgttcagtatgatgataactcagcttcattctcggtaccagtgccttgtgggtccgtcgggacagtcagtagatcgtcttgggacgacccagcatcagccaacatgagccccagggcgtcgggcttcacaaacaggacggagccattgtcaagcgcgaacatgatggagccaccagactgcctaacgatgctaacgcacgcggacttggctttgagcgtcatcgaactgatcccggataccatatcccacacccggattgtgttgtcgacagacgctgacaccagcgagcgcgcgtcgagtacgatgaccgccgtgatctctttct

SEQ ID NO: 37740 - DNA, 482 bp, Oryza sativa
  Clone ID: uC-osrocyp014c09b1
tcgtctcgatccttcattcctgcccggcggcgagcgagagagaggcggaggagatccgagatggcggggagcgggtggaggaggatcccggcggcgaggaggccgcccatgtcgcgcccggcctcggtctgcctctggatcgtgctcgtcgccgccaccctggcgctcgcccaggcgaagaaatcgaaggcggatttgactgaggtcacccacaaggtctacttcgacgtctagattgatggcaagcccgcaggacgggttgtcatgggacttttcgggaagactgttcctaaaacggcagagaacttccgagcactttgcacaggagagaaaggaactggaaagagtggcaaagcactccacttaagggaagtgcattccacagaattatacccagctttatgatccaaggaggtgacttcacacttggtgatggaaggcgtggtgaatctatctatgggacgaagttcgccgatgaaaac

SEQ ID NO: 37741 - DNA, 436 bp, Oryza sativa
  unsure (1)..(436): unsure at all n locations
  Clone ID: uC-osrocyp014c10b1
cggcgacgttggcggcggcgagcatgggggtggtgacggaggtgctggggagcgacgtcgtcgacgaggtcgaccagcccatcatcgactacatcgccaacgtcctcgccgacgaggacttcgacttcggcgcccccgacggccacggcatcttcgacgcgctcggcgacctcctcatcgacgctcggtgcgtcgccgacgaggagcactgcctcgaggtctgcagtaagatttgtgaaaaatttggaaagcatggcctggtaaaacctaaacaagctatgcgaagccttgtcactcctttacgtatgaacgagggaatggacgataagggttgcccccaaaaagcaagctgatgtatttgatggacccttgctttcatcacgtgacaaagccaaaatttgacggnagaaagagaaggatgagagacaaagagagg

SEQ ID NO: 37742 - DNA, 393 bp, Oryza sativa
  Clone ID: uC-osrocyp014c11b1
ttgcgcattaagcaaaggaggaagttcgtcaggaagatgcagcccgagttgttctctctccacaacttgagaatttgagtgtggccagcatgtttgctcttatacatatatctgaacttttgcattgaacatgtctattctggtgcttgaatgcttactgaatgcgggcgaactgctatctagcttgtgatgtatatatgtgtttccacaaacctttggattcagtcgttcacttggtgccttcggtttattgtaatgaaatttggtattgttcccgccttttgcgtaagacgaactgcagtagtagtaatgtaagacaagttgctgtgaatcgtatgcgagtcccatatatgaatgtgtgatctgagatcaacgaatcctttttttctttgc

SEQ ID NO: 37743 - DNA, 457 bp, Oryza sativa
  Clone ID: uC-osrocyp014c12b1
tcgtcatcgtctcctcctcctccacttgttgttcaattcccccccccccccctctctctctctctctctctccgtcgcagatctcggcaagggggcaacaaggtaggaggcggcgatgggttcggcgagccgcgcggtgtcgtgcctgtgctgcccgtgcaagtgcctggcgtgcggcctcttcagctgcctctgcagcatcctcatctccctcctcgtcaccctcggcgtcctcgccctcatcttctacctcatcttccgcccccacatgatcgccgccaccgtcgactccgccgccctcacccagttcaccctctccaccaactccgccctcgcctacagcctcaccgtcgacctcaccgtccgcaaccccaacaagcgcgtcggcctctactacgacaacgtcgagtccctcgccctcttcgacggccagcgcttcggctacgcccccctcgac

SEQ ID NO: 37744 - DNA, 365 bp, Oryza sativa
  Clone ID: uC-osrocyp014d01b1
ttttcgcgtgggtcagtatcgaatcctctcttctgctcgtgcccaccaccaccaccgtagcaatggcgggcaacgggccgatcaacaaggaggacccgctcaactggggcgcggcggcggccgagatggccggcagccacctcgacgaggtgaagcgcatggtggcgcagttccgcgagccgctggtcaagatccagggcgccaccctccgcgtcggccaggtggccgccgtcgcccaggccaaggacgccgccggcgtcgccgtcgagctcgacgaggaggcccgcccccgcgtcaaggccagcagcgagtggatcctcaactgcatcgcccacggcggcgacatctacggcgtcaccaccggc

SEQ ID NO: 37745 - DNA, 399 bp, Oryza sativa
  Clone ID: uC-osrocyp014d03b1
cgtgtcgcgtgggcttgttttgacggtcgtggtatatggtaattggcagcacactatattggtcaaataagatgaccatgaacaccgctcagtgacgctctagttcttgatcttcttcttgggcctcagctggccgctgtgaccacacttcttcttgcggcaggtgacagccctagggcgcaggcgcgcatagcatttgcggcagatcatcttgtcctggctgtacttgcgggcaagcgcctgaagcgacggctcgatgataccgccacggagcctgaggacgaggtggagggtggactccttctggatgttgctgaaccgtgttgtactggggtggatgcttcagcttcttgttttgacggtcgtggtatatggtaattggcagcaaactatattggt

SEQ ID NO: 37746 - DNA, 447 bp, Oryza sativa
  Clone ID: uC-osrocyp014d04b1
caatacgccattgccgtgcttctcgacctgcatgcacctctgttcttggcgttgagatacatagaggcttggggtgggtgtttaagaactaagaccggagttaattagcacccctgtggctaccatcgatctgtctaaagagtgattagatcgagatgaccatcaccattgagcagcctcaccttgatgctatcgccgaccggaaggtcgccggcggcggcggcggcgacaacgcggcggagctcgtgctcgacggcggcttcgtcgtgccggactccaacgccttcggcaacgccttcaggaattatgaggccgagtctgagaggaaggagacggtggaggagttctaccgggtcaaccacatcaaccagacatatgatttcgtgaggcggatgcgggaggagtacggtagggtggacaagacggaaatggggatctgggagtgca

SEQ ID NO: 37747 - DNA, 420 bp, Oryza sativa
  Clone ID: uC-osrocyp014d05b1
cttctcctcgatctcttctcttgtccatctccaataattctccatgtacgccgccatgtacccggagaccttcggcttctctgcttacccccagcagcagcagccgccgcccgacgccgcctcctgcatctacaccaccgccttgccgctcatcgccgacccgcctgacatcctcggaaacatggcacaaccatcctttctatcagagtatgaccttggaggggaaggggacctgttcaaagctcctgaacccatcattgaagaaccagtgcttagccttgatccagttgcagcagccatttcgatgatgtctggcagtgagaacgtaatggatgaaactatagaggttgcagatatcagcgacattcagaatgactctcttttaagcgaagtattatacgagtgcgagaaggaactcat

SEQ ID NO: 37748 - DNA, 408 bp, Oryza sativa
  Clone ID: uC-osrocyp014d06b1
ttattaccaaaaccaaacccaagaactctcctcaaaagaaccacctcacttcatagctctcacaaggctcacgcacacatagagcttgtgagagcttcttctttctctctctcttgtccttgaggtagctggagcttaaaggaggaggaggtgaggaggaggcgcaatgtcggagcagccattgccgcagcctcggagcagcatgcgggaggcgctggagaaggaggacaaggagaaggcggcggcggccaaggagaaggccgccgtccccaagaacggcggcaacgggggaggaggcaagaacggcggcggttacggcggcggtaacagtggcgccggcgcccagccctgggaggaaacgaccagggagattcaggttgtgagggaggcgtaccggagggagccggc

SEQ ID NO: 37749 - DNA, 320 bp, Oryza sativa
  Clone ID: uC-osrocyp014d08b1
tccgccgcacgccgccgcatcgatcggaaccaaaccctaaccctaaaccctagcccccccacctcgccttccaccccccacgctcccatggcggggcgcggaggctacgcgtagccacatcgatcgaacaccctgtatggattgaggtgggtttcccgaggcatgggtacaaaccctagcctgcacgagctggcggcgggggcggcgccgcggggacgcgtggtgcgtatcctcgtgcgcgacgccgacgccaccgactcgtcctccagcgaggacgaggcggttgcggtggcgcagcctcggccgcggcggaggggtaa

SEQ ID NO: 37750 - DNA, 395 bp, Oryza sativa
  Clone ID: uC-osrocyp014d09b1
tcgtagcaacaagcattctcttctagccttagcctagctagctagctttgttgtctagctctgatcgaggttggtggtgatcatggcgtcgtcgagggtgatcctagcgctgctgctcgcggcggcggcggtgatggcgtcgtcggcgcagctggacgagaagttctacagcaattcgtgccccagcgtggaggccgtcgtccggaaggagatggtgcgcgcgctcggcgccgcgcccagcctcgccggcccgctcctcaggatgcacttccacgactgcttcgtcaggggttgcgacggctcggtgctgctcgactcggccgggaacagcacggcggagaaggacgcgacgccgaaccagacgctgcgcgggttcggcttcgtcgagagggtga

SEQ ID NO: 37751 - DNA, 379 bp, Oryza sativa
  Clone ID: uC-osrocyp014d10b1
cttcttcctgcttcctttcgcgcaagctatccgccgccgcatcgcgtcgtcgacgaggagatggtggggccaggcctgtacccggagatcggcaagaaggccagggatctgctgtacagggactaccagaccgaccacaagttcaccctcaccacctacaccagcaatggcgtcgcaatcactgctaccagtacaaagaaggctgatctgatttttggtgagatccaatcacagataaagaacaagaacatcactgtagatgtgaaagcaaactcagactcaaatgttgttactactgtaaccgttgatgagctaacaccaggattgaagtccatcttgagctttgctgttccggatcaaagatctggaaagtttgagc

SEQ ID NO: 37752 - DNA, 358 bp, Oryza sativa
  Clone ID: uC-osrocyp014e01b1
tcttcgcgtccgcccacgcgtccgcccacgcgtccgcgagaatcggcggcggcggcggcgagagcggagagagacaggagggggcggcggcggcggcgggggggcgcggagatgacggggaaggcgaagccgaagaagcacacggcgaaggagatcgcggcgaagatcgacgcggcgacgacgaacaggggcggcgggaaggccgggcagaaggaccggctggggcaggacaagggcggccacgccaagctcgagtgccccctctgcaagaccaccgcccccgacatcaagtccatgcagatccaccacgaggcgcgccaccccaagctccccttcgagcccgacatgctcaacaacc

SEQ ID NO: 37753 - DNA, 488 bp, Oryza sativa
  unsure (1)..(488): unsure at all n locations
  Clone ID: uC-osrocyp014e02b1
gcgtggccaatatgttgtgctgaggatttgactgcagcaagtgatccttatatgtatgttaaccagttacttttgcactgggttcgacacgcatttcaaggtcacagagggtccatacggtataagttgttggttgggcagtatgatgcgagttacaaccatatgactggggtagtgatgcgtagacggtttgatcaggataatagttggtctgatactaggttggatgtcgcattgaatacatctcaatcagttatggcacgtacatggatagctgaaggcccgttagattatcctgatggaccgaacggtgccgtctattttaattcgagagtaaatcctactgttgaatttgaagtgccttgggaaaatgacgctcgttgttattttgcccgtaacaccaactacaattttacaaatggaactgcccgttcgcaacccgggtacaaatttgcgttgcanggtaactcgagtgattatgatcattt

SEQ ID NO: 37754 - DNA, 498 bp, Oryza sativa
  unsure (1)..(498): unsure at all n locations
  Clone ID: uC-osrocyp014e04b1
tttttctgaccaccattggttcctgaaattgagtcatggctgccaagctagctcgcctccacagtctccgcgaacgcctcggtgccaccttctcgtctcatcccaatgagttgattgcactcttctctaggtatgttaaccagggaaagggaatgctccagcgtcaccagctgcttgcggagttcgatgccttgatcgaagctgacaaagagaaatatgctccctttgaagacattctccgggctgctcaggaagccattgtgctgccgccctgggttgcactggccatcaggccaaggcctggtgtctgggactacattcgggtgaatgtaagtgagttggcagtggaagagctgagtgtttctgagtacttggcattcaaggaacagcttgttgatggacacaccaacaagcactttgttcttgagcttgattttgagccctttaatgcctcctttccgcgcccgtccatgtncaagtncatcggaaatggggtgc

SEQ ID NO: 37755 - DNA, 438 bp, Oryza sativa
  Clone ID: uC-osrocyp014e05b1
ttcttcagcatccttcaactattctttgtagccattggatacatccctgaatcaccgcactcgctcatcacaaaaaataggaaggaagctgcaagggaagtcttgtgcttgttctatgagtaatccttcgtcgatcagatggtggaggacagagagagtgccataatcaatgctaaatcagatatggatgagaataaggtagtatggactgataaaggatatatgattggcatcattctttcagtactgcaagtactgacaggaattgcatcttttgtcacccaggccggccacgttatagcctttaccttcaaatcaacagcgattgggctctacactcccattctcatcactatctctcaactggttggtactttcttatcagttccaatgcttaagtacttctaatggaggaagatgaccatcattggtggtttt

SEQ ID NO: 37756 - DNA, 503 bp, Oryza sativa
  Clone ID: uC-osrocyp014e07b1
ttttggttccatcagtgaaatgttatttttcgatagcatgctacttacaccacaggtacaagtcaaaagggtcgagcagttacaaaaagaatggagaatcttgcagcatttcctatgggtctggatcaattgctggtttcttcagtgaggatagcgtgctagttggggatcttgctgtgaaaaatcagatgttcattgagacaaccagggaaccgagccttactttcatcatcgggaagtttgatggaattcttggacttggatttccggagatctctgtgggaggagcccctccaatttggcagggaatgaaagagcagcaactgatcgagaaggatgtattctccttctggctcaaccgcgatcctgatgcaccgacagggggtgagttaatctttggtggtgtagacccaaatcattacaaggggagccatacatatgttccttgtacccgcaaaggctactggcagtttgagatgggggatcttcttattgatgactac

SEQ ID NO: 37757 - DNA, 485 bp, Oryza sativa
  Clone ID: uC-osrocyp014e08b1
ggcgaggcgagcgtgttggcgtacaagcggacgcagtcgatgccgacgaccccgacgacgccggtgacgccgtcgtcttcgtccccgacgacggcgacgacgacgacgccgcggggcagcaacgtgtggaggagcgtgttccacccggggagcaacctcgccaccaagagcctcggcgccaacctcttcgaccgcccccagcccaactcccccaccgtctacgactggctgtacagcgacgagaccaggagcagccatcgctgaactgaataatcccattgatcggaggctggtcgatctctctgtcacgccatgtttgctggtccttgtggttatctaatacgtaattaattatctagtatgttgctatcttatcttggtactctgttcctagtagcttgctgtctctgttagtactaccagagaccggtacgtgtcagctagcctgctggctcctataagggctagcgacaacccaaagaagt

SEQ ID NO: 37758 - DNA, 432 bp, Oryza sativa
  Clone ID: uC-osrocyp014e09b1
ttgtcttttcaggcacataatgtttctctttgttgcaattgattaacatgtctcatatattaagtatatataaatcgaatctcagaaagcctatggataagatagctgagatttcttataaaatggtaacttcctttcctgttgcctcttcctgttaatgtacatactgtgaatgggaagcctatgttgccatgctgataccaactacaggtttggagcctcaatgtaaaacatgtctatagtttctttggtttagatagtagactgatttcgtgttgtacagaaacaataaacacggaataggcccatattatgtctgcaatcatcttaatctgctagatgatattatcagaaacgtagcattctggctggttgtcacttcttattccgggaactagaagatgcagtccagttatgaattcatcattttca

SEQ ID NO: 37759 - DNA, 481 bp, Oryza sativa
  Clone ID: uC-osrocyp014e10b1
ctttcttggttttttgttctgtagcttattagcggccatgtgcggcggagcaatcatctccgggttcatcccgccgtcggccgctgcggcggcggcggctgcggcggccaagaagcagcagggcaggagggtcacggccgacgtgctgtggccggggatgctgcggaaggggaaggcggcggcggcggaggaggactttgaggccgacttccgcgagttcgagcgtggcatgagcgacgacgaggcggaggggggcggcggcgaggaggaggaggacgacgacgacgtggtcgtggtggtccccccgccggcggcggcgaggttcgtcgtccgtgccgcggccaaggcggcgcccccaactgcagatgggatgttgactacaaagcttgtccaacatgatggacctactgctagatcagcaaagcacaagaggaagaatcagtacagggggatcccgcagcgtccctggggcaaatgggca

SEQ ID NO: 37760 - DNA, 442 bp, Oryza sativa
  Clone ID: uC-osrocyp014f02b1
ttctgttaactcgataaatcaagatgctcagtaagttgttggtcgtcacagcggtcgccctgtcgatcgccgtggccgtggacggccgtaatcacggtctgaaacgcgatttggcgttccgcgccgggccccgcgccaaattcctgtctgagcccgagccgtgggaatacctcaatccggaggacattccgtcagactgggactggcgcaacgtcaacggaaagaattattgcagcacttcacgcaatcagcacattcctcaatactgtggttcgtgttgggcgttcggcagcacttcggctttggctgaccgcatcaatatcaagcgcggaggtgcgtggccttcggcttacctgtcgactcagaacgtcatcgactgcggtaacgccggctcctgtgacggcggtgacgacattcctgtctatgcctatgctcacgacaa

SEQ ID NO: 37761 - DNA, 385 bp, Oryza sativa
  Clone ID: uC-osrocyp014f03b1
tcgagggccgccctttttttttttttttaacgcaaaaagcagctagcagcatgattaattcgacgaaggctgcacactgcgtacaagaaaaacgactgatgttattatatacacttcatcagtataacactccacacacacaacaaacatatatcgctaccattttctgtgaatcatcaaacatgaactactactggtagtataataatactggtagtataataattctggccggcgacgagcaaattaaagtcatacaatgtcgtggttcatcggtgaatgcgccaccgggacaacggcggcgccggtgagctcgtcgagggcgtcctcctccgtcgcggcgggtggcctcgcttggggtcgtacctcttgctcgccgggttcg

SEQ ID NO: 37762 - DNA, 437 bp, Oryza sativa
  unsure (1)..(437): unsure at all n locations
  Clone ID: uC-osrocyp014f04b1
cggttatgcgctggacggcgacttgccggacctctcgccgctactgtcactgtcctacctcaacctgtccgggaacaggctccggggctccgtcatcggagcgttccatgagcagatgaaggtgatagacctcagcaacaacagcttctcggggctaaactttagcagtggatatgcaggctcatctttggcatacctcgatttatcaggcaatgagcttaccggggaattcagtgttggcaacaggtttcagaacctgaagcatttgaatcttgcattcaaccaattgtccgtggcaaatttgctggtggtcatgggntgagatctctggattggagtttgtcaatttgtcgagcaccgggttgcatgggcaaattccagggagttggcttccaattgtctagatgaaggtgctcgatttgtcgcggaacatatca

SEQ ID NO: 37763 - DNA, 442 bp, Oryza sativa
  unsure (1)..(442): unsure at all n locations
  Clone ID: uC-osrocyp014f05b1
ctcgtaggtcttgagctccatctccggcgacggcggcgacgacgacgacgacggcgaggaggagctagtagctagctgagccagacagcatggggttcgcggtggtgaggacgaaccgggagttcgtgcggccgagcgcggcgacgccgccgtcgtccggcgagctgctggagctgtccatcatcgaccgcgtggtggggctccgccacctggtgcggtcgctgcacatcttctccgccgccgccccagcgggcggcgacgccaagccgtcgccggcgcgggtgatcaaggaggcgctggggaaggcgctggtggactactacccgttccggngaggttcgtggacagcggccgcgggccggggagcgcccgcgtggagtgcaccggcgagggcgcctggttcgtggaggccggcgncggctgcaagctcgacgacgtgaac

SEQ ID NO: 37764 - DNA, 279 bp, Oryza sativa
  Clone ID: uC-osrocyp014f06b1
cccgccgccgccgcgtttcttccatggccacgcaacggcctctcgccgtcctcctcctcctcctgctcgccgcctgcgcgctgccgctcgctcgatcccgcacggcgccaagaacggacgtgggtggaggaggtggcgcggcggcggacgacacgatacacgagctcctgcggacgcacgggctgacaggggggctgctgccgcgaggggtggagacgtacagcctccacaaggccaacgggctgctgaaggcgcggatgacggcaccgagctacacca

SEQ ID NO: 37765 - DNA, 372 bp, Oryza sativa
  Clone ID: uC-osrocyp014f07b1
tgcgagagattgacttgggatttgttgagttggcaactttgcttggctctgcacggaccaacgccgacgacgaccgccggagccgccgcatctagctcgccgccccgccatgcagccgctgctcaaggtgtacgccgaccgccggtcgcagcccagccgggccataatcatcttctgcagagtgaaccggatcgatttcgaggaggtcacggtggatctgttcaagcgcgagcacctgtcccctgaattcaagaagataaacccaatgggacaggtgccagcaatcgttgatgggcgattcagattgtttgagagccatgccattctgaggtatcttgcaacggtgttccctggagttgcagatcactggta

SEQ ID NO: 37766 - DNA, 452 bp, Oryza sativa
  Clone ID: uC-osrocyp014f08b1
tcgaaagcattcgcatccacgagaccactcgaacccgacccgcctcgccgccgccgccaccgaagtaatcccttaattggtcaaaatgtctcgggaggagaatgtctacatggccaagctggccgagcaggctgaaaggtatgaggagatggttgagtacatggagaaggttgcaaagactgtagatgtggaagagctcactgttgaggagcgcaacctcttgtctgttgcttacaagaatgtgattggtgcccgccgtgcctcctggcgtattgtctcatccattgaacagaaggaggagggtcgtggcaatgaggaacatgttactctgatcaaggagtaccgtggcaagattgaagctgagctgagcaagatttgcgatggtatcctgaagttgcttgactcacaccttgtgccctcatctactgctgcagaatctaaggtgttttacc

SEQ ID NO: 37767 - DNA, 359 bp, Oryza sativa
  Clone ID: uC-osrocyp014f09b1
tttcttgtctgcaatgcatcagggacttatgttggcgccaacacgatcccttcgccggagaactcgccgtcggagttcgccaagattgttcagtctaagcagacgaagcatgcgcgcgtgttcatcggcggcggggaccatcggtcgctgcgatcgctggcgaacaccggcgaggaggtgatcctcaccgtgcccaacgaccagctcgagcacatggccgagttcccggaggaggccgagctctgggtcgccgccaacgtcgcgcggttcctcccggcgacgaggatcacgcacgtggtggccggcgacgacgttgtggccaggtcaccggggaacgcgtactttcttcttccggcgat

SEQ ID NO: 37768 - DNA, 179 bp, Oryza sativa
  Clone ID: uC-osrocyp014f10b1
gttctagatcgcgagctgtcgcccttttttttttttttttttttacaggcaacatcagtcttcattttatcagcctgaaaaaaagaaacaatctgctgctggtatcgtcacaaaccaacgaaggaagccaattactaccagggggaataccgcggtgacaaccgcactactaaggacag

SEQ ID NO: 37769 - DNA, 417 bp, Oryza sativa
  Clone ID: uC-osrocyp014f11b1
tcgtctcacgcgtccgcccacgcgtccgcccacgcgtccggcgaaaattccattactcgataaccagagggcggatctgcaaaaagcctcctcctctccacccctcgtcggcggcatctcgtcgcccccgcctcgaagctaacagaagcttctcctcctctctcctcccctccccatggcgcggcggggccaccaccaccacctggcggaggtggccctcctcgcgtcggcctccgaggacctcgccgccgtgggcgccggcgagagggaggggtggctcgacgaccccgccgtgctccccttcctcgcgccgtgcgcgcgcgccctcgccgtcgccagcgcggcgaggtccgtgctcgcgggtggcccggtcgcccgagtatgcggcggggtcacggtgaggccccgtgctggggc

SEQ ID NO: 37770 - DNA, 342 bp, Oryza sativa
  Clone ID: uC-osrocyp014f12b1
tgcccaatggcagtccagccgccactcttgctcccggctgtcgcgaccgcgagacgcctccacggtggcggggccggcgtgcggcggacggcgacgacggtgacggtgacgcgtgcggcggacggcgacggcgggggctcggcggcgcgaggcgacgacgtgcggcggacggtgacgagcggaaccggcggcgcggaccttggtgcggacgggtcacggtgacggctggaactctgcggctcgaggcgacggcgtgcggtgatcggatacaccggcctaagggcggtcggatccgtggtcggaagccctggtgccgcgggatccgaggtagtgaggctaccg

SEQ ID NO: 37771 - DNA, 448 bp, Oryza sativa
  Clone ID: uC-osrocyp014g01b1
tttttgcgtccggtcataggttcccagctgcaatgcagagcactttgcgcactccgtctccagctgctgcttacaggagcaggaactctgtcgtgtcaactcgcttgccgcggcctaggtcaacggtcatgcgcaggttcaagggtgcagacagcccagcacaagcagtagaagcgcctgcagcagaagcacctgcaggggcacaggaagacgctgcacctgccaaggccaagttcaatcatgcttacctcatcttcaacccagcagctggtcaggagaacccggccagcatccttggtgacatcagcctcaagctgagtgagcagatgaagctgacaatcctgcagacacagagggatggcccatcacccaaagagatggcccagcaggccctcaaggagggggctgatctcatcatggtctcaggcggtgatggcacagtgggtgc

SEQ ID NO: 37772 - DNA, 357 bp, Oryza sativa
  Clone ID: uC-osrocyp014g02b1
ctgttttctcttgcgtttgtacctctctctctcgcctagtctctgcttcctcctcccgttcgtctcccctacctacctagggtttctcgccgcctcgcatcccctactcctcctcgggtgacacgcctactactctacgcttgctgctgcaggtacaagcgataagcagtagcttcttcatcaaaggttttgtgcaaaattatgcgatcttcatgggctgattcagttgcgaacgccgaggaatcggcgcccgcgactggtgctgctcccacccctgttgctaatcaccagaactcacgccccactcgcagcgcatacgtgcctcctcaccttcgtggccaggcaccaaccacaact

SEQ ID NO: 37773 - DNA, 502 bp, Oryza sativa
  Clone ID: uC-osrocyp014g03b1
cccttgcgtccgcccacgcgtccgcggacgcgtgggtgaggaggaagtactgagaaagatgcgggtcgctttacctgatgactattcagagaaactgctctcgcagaagaacggcactgaaaatttggaactaccagaggttaaggattatcaacctagaaaagtacctggggatgaagttcttgagcaagaagtgtatggaatagatccatatacacataatctcctacttgaaatgatgcctactgaacttgattggccatcctctgacaaacatacctttgttgaagagttgcttctgaacaccttgaataagcaagtgaggcagttcactggttctggaaatactcccatggtttacccccttaaacctgtaattgaagaaatccaaaagtctgcagaggagagtggtgacagacggacttcaagatgtgccttggaatgctaaggccatgaggaccacccagaatatactatgtcgctataggagggtcttggagtg

SEQ ID NO: 37774 - DNA, 473 bp, Oryza sativa
  Clone ID: uC-osrocyp014g04b1
tttcttcttcctctcggccagctgcggggagcatgggctggagcggcggcgggcgggggctggagtggtggcagccggcgggagctgaagcggtggccgccccgatcccatcgccgtgctccacctccagccgggaaggcgatgtcgtccgggagcgccaccccgaggaggatttccgactgcgccgccaccgctgttgacgccgacgacgccgttgccggaggttgcaaagcctccccaaaaccgatagcaacggcgtactggtcatggcgcttgaatgcgatagcaacagctcatgagatctctctccaccgattatcttctcctgtatgtgccgctcgtcgattagttcgtttcagagctttagactactcacgacgacgatcgccttgccgatctgcctcctgagttccgcgtgctgaaaacgactgccattgatgttaatccattttccttggatcattgtgtgtgct

SEQ ID NO: 37775 - DNA, 413 bp, Oryza sativa
  unsure (1)..(413): unsure at all n locations
  Clone ID: uC-osrocyp014g07b1
tcgtccacgcgtccgcactacactatccacctcgccgccgccgccgccgccggaaatggccgccgccgcgcgccccctggtgtccgtgaaggccctggagggcgacatggcgacggactcggccggcatccagatgccgcaggtgctccgcgcgccgatccgccccgacgtggtcaccttcacccacaagctcctctcctgcaaccgccgccagccgtacgccgtgtcgcgccgcgcggggcaccagacctccgcggagtcgtggggcacgggccgagccgtgtcccgcatcccgcgcgtctccggcggcggcacgcaccgcgcggggcagggcgcgttcggcaacatgtgccgcggcgggcgcatgttcgcgcccaccaagatctggcgccgctggcaccgncgcgtcaaca

SEQ ID NO: 37776 - DNA, 254 bp, Oryza sativa
  unsure (1)..(254): unsure at all n locations
  Clone ID: uC-osrocyp014g08b1
ttcttgcgtacccccacgcgnccccacacgcgggggggacgttttaagccctgagacagtaccggcccaccttaccagatgacaatccacactaacccccctcagcaaagaacggaactcaaaactcggaacctccacacgctgccgattatcaacctagaaaagacccttgccgatgaacaaacttgagcaagacgggtatggaatagatccacatatacatcctgcactcctcgaaatgatgcctactgaac

SEQ ID NO: 37777 - DNA, 342 bp, Oryza sativa
  Clone ID: uC-osrocyp014g09b1
tcgtctctctctctctctcctctctcctctctcctctctcctgtcgccttcccacgcgcgccgctcgatccgtgtagctgtcagcgatggctgaggaggcgaagcaagagacccccgccgccgccgaggtggtggtggtggagaaggccgacgaggtggtggcggtggagaaggccgtggaggtggaggcggaggagaagaagttggcggagcaggaggaggaggaggagaagaaggcggaggaggcggaggaggccgctgggggcgatgaggcggtggcgatcgaggggacggggtcgtgcaaagaggagatgaacctcgtctgcgagctccccgacccgg

SEQ ID NO: 37778 - DNA, 458 bp, Oryza sativa
  Clone ID: uC-osrocyp014g10b1
tcgttgaaatccaagttggatagccttgactttgatgctagcaatgggaactgcctggaagcacatgcgtttcttcaactcctggctacctttgctatattttctgaatttgcggaagacgagctgtgtaagcttctcccatcagtcagtcgtcgtcgccagacacctgagctttgtagaatacttgggttgtcacagaacatgccaggtgtcattggagttttgattgaaaatgggagaactattgatgcaattaatttggcttatgcatttgagctgactgatcagtttgaaccagtcgaattactgaaagcttatctgaaggaggtcaagagtatgtcacatgtcaagaccggaaagatgtctccgggagtacagaatgaaattaatgaacgcgagttgtctgccttgaaagctgttatcaaatgtattgaggagcacaaacttgatgagaaata

SEQ ID NO: 37779 - DNA, 296 bp, Oryza sativa
  Clone ID: uC-osrocyp014h01b1
ctcttgtctcgctgtgtctcgctggacacaacacacacccacacccactcccccactctctctccggttcatgtcctgctgctccccatgtcgcccccactcgagctcgactacataggcctctcgccgtcggtgcccgccgccgccgatgccgacgacgacaacgacctgaagggcaccgagctccgactcggcctgcccggctcccactcgccggaccggtccacgcccgccgccacgcttgaccttgtccccgctgacaagggcgccaagcgcggattctacgactaggcgcg

SEQ ID NO: 37780 - DNA, 484 bp, Oryza sativa
  Clone ID: uC-osrocyp014h02b1
tttctttggcgacgccgtcgcctcctcctccttctaggtgcatctccgccgccgtctcagccatggtgaagtactcgagggaggcgaacaaccccaccaagtgctccaaggccatgggccgggacttgcgtgtgcacttcaagaacacccgtgagacagcttttgctatcaggaagttgcctctgggcatggccaagaggtaccttgaggatgtgattgcccacaagcaagctatccccttccgtaggtactgcggtggtgttgggcgcactgctcaagctaagtcacgccattcaaacagtcagggacgctggcctgccaagtctgctagattcattctggatcttcttaagaatgcagagagcaatgctgaggtgaaaggtctggatgttgatactctatatgtgtcccacattcaagttaaccaggcccagaagcagaggcgccgtacctaccgtgctcatggacgcatcaacacttacat

SEQ ID NO: 37781 - DNA, 265 bp, Oryza sativa
  Clone ID: uC-osrocyp014h04b1
gggtttctgcgcgctaaggggccgagcgggcgcggggattcctgagcacaagagcccgacagaccgaacaggaaacgcaactgcaggtcacaggaggccaatgcagaccaagcggcagacgagctaaggcaggagctggcgacaaccgcacgagcagaggaccccctgcgcagaggagacaaccccgacaagacgccgctgaaacctaagagaatcgagtatccagacgcagaggtaccgaaaggagcactgagctgaaaaatga

SEQ ID NO: 37782 - DNA, 427 bp, Oryza sativa
  Clone ID: uC-osrocyp014h06b1
cccacgcgtccggccgggcaaccgaatatctggctccatacccgcgtcgatcaggctgctggtgaagctcaactcgctcaacctgagcagcaaccggatctccggcgtgataccgccggcgagcttcgggacgctcccggcgctgaccatcctcgatctgtccggcaacgagctcaccggcgacatacctgccgatttggggtacctcaacttcaactcgctcaacgtgtcgtcgaaccggctcaccggcgaggtgccgctcacgctccagggcgcggcgtacgatcgcagcttcctcggcaacagtctctgcgccaggccgggctccggcacgaacctcccgacctgccccggtggaggcggcggcggaggcggccacgacgagctctccagggcctgatcgtcctcttctcgatgctcgccggca

SEQ ID NO: 37783 - DNA, 503 bp, Oryza sativa
  unsure (1)..(503): unsure at all n locations
  Clone ID: uC-osrocyp014h07b1
ttgttttggcacacctttgcgtcctccgctttccatctccacctccaccgcactaccagtaccaccacgtacgtccaccaccacctacacctccgccgtgcggacgccgccggcttcccaatcccagccgcgacgcggaggaggaccaaattcctcccccacccctccgtcaaatctgcgcgcaccacctccgagatttgaggactggagatccaagcagtctgttatgtcactgcggaggcataatgctctaagttcacttaaggaaagaactgctggaatttttgcattcctaggaaaccttgtgcattctgaaaccttagagagatcggtgctgcatgaaatgaagttgacaactggaactcttcatcctcagggaccatttctgcaaagctggaacaagatatttgntttgtcatgtatctttgcagcttctgtggatccattgttcttctatatcccggttatcaatgaaaacaatacatgctggtatttggataaaa

SEQ ID NO: 37784 - DNA, 536 bp, Oryza sativa
  Clone ID: uC-osrocyp015a01b1
ctcctcctcactctgcttgacgccggcgcccagcaccagcagcctccgctctccatctccgtcgccgccgccctcctcccgccgccggatcaagaaatggaggccactggtgctgaagctacattgtcacaggttacagcagttgatggagaagataaccttttccaagataaggaaagtagggctactgccaaggagcgtggggaggcagctgtttttggtttggaaaacattgttactgcaaatggagccacaagtgctgctgatcttgcacccccaaaagatgttgtggatgagtggcctgaacctaagcaaactcacacgttcttctttgttagaatccgttcatatgaggatcctagcctgaaggcaaaacttgaacaagctgacaaggagtgccagaagaagattcaagctcggtcccatatttttgaggctttgaggaccaagaggagtgaacgatccaatattatatcagagctgaagccattggctgcagagaataaacaatatatgacagtgtgagtggaaaattg

SEQ ID NO: 37785 - DNA, 518 bp, Oryza sativa
  Clone ID: uC-osrocyp015a02b1
tttttagtttctttgattgcaaggcatggtggtgatcgatttttattggacaccattcaaacaatttatgctaccatccaagagcaagttgacgctctagcaaagtctaatgtctcgagtaaacaggcgatgagtgaagaagctgctgaagctgctaaagagaaaggtaacattgcatttaaggagaaacaatggctaaaggcaataaatttctatactgaagcaatcaaattaaataataaagtggctacatactacagcaacagagctgctgcttttctagagctagctagttaccgccaagctgaggcagattgcacaagtgccatcgatattgatccaaagattgtaaaagcttatttgaggagaggcactgcaagggagatgctgggttactacaaggaggctgttgatgatttcaaccacgcccttgttctagaacccatgaacaagacagctggtgtggccatcaataggttaaagaagctatttccgtaaatactgagctgttggatttt

SEQ ID NO: 37786 - DNA, 508 bp, Oryza sativa
  Clone ID: uC-osrocyp015a04b1
ttcatacgctcctcatacgacagagagagcgtgacagcgcgagggggttcggaggcgggagcgggcgacggcggcggcggcgggcgccagcgagcggcgaagggcgcgctggagatgaaggagaaggggtcgagggcggcggtggacgagcgctacgcgcagtggaagtcgctcatcccggtgctctacgactggttcgccaaccacaacctcgtatggccgtccctctgctgccggtggggaccccagtttgagaaggctacctacaagaatcgtcagcgtctttacctttcagagcagacggatgggactgtccctaatactctggctattgcaaattgtgaagttgtcaaaccaagggttgcagctgctgaacatatgtcttagttgaatgaggaagcacgatcaccttttgtaaagaagtgcaagactatcattcacacaagcgaggtgaacaggattagggagctttcgcagaacagtaagatcattgccactcataccgaca

SEQ ID NO: 37787 - DNA, 507 bp, Oryza sativa
  Clone ID: uC-osrocyp015a06b1
cgcgcgtactcgcgtccgtcttgcggcgcgtgggcggcggcacgcgctgcggcgggtggttggtccgggagagcgtcgtcgtcgccggtcgtcgggtgcggcgcctgcagggcgcagatcggggccgtcgcgcctgccgtcgagcgcgtccaccgcaggatggccgccaccgcagctgctgagcatcccttcaagaacattttgaccaccctccctaagcctgggggtggtgaatatgggaaattttacagccttcctgcactaaatgatcccaggattgataagctgccctactctatccgtattcttctagagtcagctatccgcaactgtgataacttccaagtcaaccagaatgatgttgagaaaattattgattgggagaatacatctcccaagctggctgaaatacctttcaagccagcacgagttcttcttcaggacttcactggagttccagctgccgtagatcttgcaactatgcgtgacgcgatggccatagtggca

SEQ ID NO: 37788 - DNA, 517 bp, Oryza sativa
  Clone ID: uC-osrocyp015a08b1
tgttcgtctccctctctctctctctctccgccgctgacgccgagggctccacgagagggaggtgggcggcgcggcccttcgccggagggagcgctctgcgccgccgtcgctcccgctcccgccggcgcgggagatccgggcgtcgcctctcgggcctttggctttggacggacaagagctgacatggaaccatcctcacagcctcagcctgtgatgggtgttgccactggtgggtcacaagcatatcctcctcctgctgctgcatatccacctcaagccatggttcctggagctcctgctgttgctcctcctggctcacagccatcagcaccattccccactaatccagctcaactcagtgctcagcaccagctagtctaccaacaagcccagcaatttcatcagcagctgcagcaacagcaacagcagcaactgcgtgagttttgggctaaccaaatggaagagattgagcaaacaaccgacttcaagaaccacagcttgccactcgcaaggataa

SEQ ID NO: 37789 - DNA, 477 bp, Oryza sativa
  Clone ID: uC-osrocyp015a09b1
ttgttagaatcaccagccttgcaaaccaatcaacctgtctagattaatttttgcatgctctctggaatggagaaacaacctgcaatgcttctcgttcttgtgacactctgcgccttcgcatgcaagcgatccgtcgcacagtctgcctttgccacgttctacggtggcaaggacgggtcgggcaccatgggtggcgcgtgtgggtacggtaacctgtacaacgccgggtacgggctgtacaacgcggcgctgagctcggcgctgttcaacgactgcgccatgtgcggcgcgtgctacaccatcacctgcgacaccagccagaccaagtggtgcaagcccggcggcaactccatcaccatcacggtcaccaacttatgcccgcctaactgggcgctgcccagcaacagcggcgggtggtgcaacccaccgcggcagcacttcgacatgtcacagccagcctgagagaacatcgccgtc

SEQ ID NO: 37790 - DNA, 524 bp, Oryza sativa
  Clone ID: uC-osrocyp015a10b1
ttcagggccatggttgctcttccgtggccagcttcctggtcatctctcagaagacaatggttttgatgtattcatcaatggacgccgtggtgttggcatgcgcagagcaaacattgcagactactttgttggacctggactggatgatctgattgagcaattaactcagaatgatcgacgagggccgccacctgccactcaatcatcgattgatgctatgcctactgtgaagattacacagaggcatctcagtggagactcacattgccctgtctgcaaggacaagtttgagctgggatcagaagcaagggagatgccatgcaagcatttataccactctgattgcatagttccttggctggaacagcacaattcctgccctgtttgccgatatgagttgccaccacagagctctactggtgctagctgctcgcacacaagatcaaccaaccaaagtcagagttcaagtagcaatgggagaaccaatggacgtcaaaggaagaggaatccgttctcgttcctat

SEQ ID NO: 37791 - DNA, 540 bp, Oryza sativa
  Clone ID: uC-osrocyp015a11b1
cgctctcctcctcgtcgccgtcgccggtcgtcgccggtcgcgggtggcgcgcaacccggagtctctctctccctctacctctgccggctgcttacctcgccgtgggcttcagcttcctcctcgatctccggcgcgcctccatctgcagatcggccggctccccccagtgtgttgaagcttgcccttgacacttagcaactgcagagtcctgctggagagagatggggttcatcggcgacacgatagagtcgatccgctcgatgcaggtccgccaggtgctggcgcaaatcatcagcttaggtatgattgttacctctgcattgatcatatggaagggtttaatagttgtaacaggtagtgaatctccagcggtggtggttctttctggtagcatggaacctggatttaaaagaggtgacatcctgtttttgcacatgagcaaagaccctatccgcactggagaaatagttgttcttaatgttgatggccgtgaaattccaattgttcaccgtgtgatcaaggctcatgaaccgccagaga

SEQ ID NO: 37792 - DNA, 405 bp, Oryza sativa
  Clone ID: uC-osrocyp015b03b1
tgcgtgctcgtgggcggtcgcgggggcttggtgaaaagaaaacacgacgaacaccctaaaacaaggacgtagtgaagagggagacccgaaccggaacaatgtgtggaggggccatccttgactagctcattccggtgccgtcgtgcgccgcgagagcgaccaagcgggtgaccgacagccacctgtggccggccggttccaagaacgccgtccgcagcaagagcaagagcaagatgcagtatcaagagctttgccaacataactagcttgaggccggcttgcagcagttcgaggatgactccaactgcaacgacccggaggaagaagacgaaggacacttgcggtttggggtcaaatctcgtgtctgaggcgggcgcgcccacgccgaggcatcacgagagccac

SEQ ID NO: 37793 - DNA, 500 bp, Oryza sativa
  Clone ID: uC-osrocyp015b04b1
cgcgccatagcgacctctctcggggagaaagaagagcgcgccgcgccatgtgcggcggtgcgatcctcgccgatttcaccccggcgagggtgccccggcgggtgaccgccggcgagctcctgtcggtgaccccgactgccccctgcagcgagaggagaaccacccggaagcgcaagtccgacgtcgacttcgaggcggagttcgagcttttcgaggacgacgacgacgacgatgagttcgagctttccgacgatggcgacgagagtttggccgtgtcatgtgtgtcgtcccccaagtcgaaggcagtaccttcgttttctttttcgtcggatgtctcctcgagctccaggccgcggcggcgcgtggcggcggcggcggccggtcgtcggaaggcgagcaagaagagcaagtacagtggcgtccggcgccggccgtcggtgaggttcgcggcggagatcagggaccccaagaaggggcggcgcgtgtggctcggcacgtac

SEQ ID NO: 37794 - DNA, 541 bp, Oryza sativa
  Clone ID: uC-osrocyp015b05b1
gaaggatcagtttggtttctatgttgtacagaaagtactggagacttgtgatgatcagcagcgtgagttgatcctgtcacgagtaaaggttcatttaagtgcactgaagaaatatacatatgggaagcacatagttgcccgggtagaaaaacttgttgctgccggtgagaggaggattgggcttcaggcacaatatccttcataatggcatgaaaatgacaatgtacagctaaccatggctagccagatctaccctgtgtctcctgctttgggctgctacaagccaactttaaaaataaacgtgttgtactaagaagattgtacattttgtagtttttgcttatagtcatgtcaggggtgaggctcagagtttatttacctgatgacgctgcagagaagataggcgttttgtataagtcggttaggtgtaaaaagaggaagaaagtctatatttgcgatgagactgtacaaattgcgaacctgagaagctaccagctgttcctgttaggataagatttatgatctccatgttatactgatg

SEQ ID NO: 37795 - DNA, 448 bp, Oryza sativa
  unsure (1)..(448): unsure at all n locations
  Clone ID: uC-osrocyp015b06b1
ctatcttgttggggtttcaggtcagaagggagaaggggagaggtcagccatggcattgcctgtttccctcctccgcatcgcggcggttctgctcgccatcttgccattctgcgccacgcatccaagccccgggttccatgctcctcgcgagtttcacaaggcactcgtcccagatagatatggatttgtggcaagaagatcaattgctgaagctcctgttgacgtaaatgtcactacaaacagttcctttgtcttggcgcaagagcgaacatatagaaaagaccccttgaatggattcaggaaatatactggcggttggaatattagcgaagtgcactatatggcttcagttggatacacagcttttccactgttcatcattgccttggtgtggcttgtgctgctttttctggttatgcttggaatttgctgcangcattgctgttgt

SEQ ID NO: 37796 - DNA, 515 bp, Oryza sativa
  Clone ID: uC-osrocyp015b07b1
tctttgacgcgtggggcttagaggtccctcaaaatggaacttactttgagtggctgaaaattgtttctagcttagcaactcctgcttacacatctctctctcaagttattggaccgattctacctaatactttccctgctctatcctttgcaaacaccgtcccaggttctacttttgtacaagctcctgttggtatgattcctacttccctatcaatcactggtttcactttcactttttggataaacagagccgttgatgtcagcaatcaaaatatcttctcttggcaagataccaacctccagaatcacatcatattacaagaatctggcacagacagatttactttccgcatcagtaactctacgttcctatcttccttcgatctactttcagtcggaaagaacaggtggacccactggactattatgaacaccaacgtggcttgcgtacaaaccaacacccggtcaggagtaacagttacttggcatgagtatgacttacaaacaaccacg

SEQ ID NO: 37797 - DNA, 503 bp, Oryza sativa
  Clone ID: uC-osrocyp015b08b1
tttgatttctcgccggagaattcctgctccgcctcccggctcctcccctccgccctcgcttccgcaggcgaactaaaccatggcgacaggtcaaattttctccaaaaccacccaagcgttattctataattataagcaacttccgatccaacggatgcttgattttgacttcctatgtgggagagaaacaccttctgttgctggaataatcaatcctggttctgatgggtttcagaaacttttctttggacaagaagaaattgccattccagttcatcctacaattgaagctgcctgcaatgcacacccaactgctgatgtatttatcaactttgcatcctttcggagtgctgccgcttcttcaatgtcagctttgaagcagccaacaatcagagttgtagccatcatagcagagggtgttcctgaatcagatacaaacaacttattagttatgcacgtgccaacatcaaggtaatcattggaccagcaacagttggaggaat

SEQ ID NO: 37798 - DNA, 444 bp, Oryza sativa
  Clone ID: uC-osrocyp015b09b1
tttttgacggccatggctgctctttcgcggcccggtcgctggtcattttttataagacagtgggtgtgaggtattcatgaatggacgccgtggtgttggcatgcgcagagcaaacatcgcacactactttgttgtacctggactgtatgatcggattgtacatttaacgcaaaatgatcgaccagggccgccacctgtcactcaatgatcgattgacgctatgcctactgtgatgatgacacagaggcatctgattgtggactcacattgacctgtgctgcaaggacaagatcaagctgggatcataatcaaggagagatgccatgcaagcatttataccactctgattgcatagctccttggctggaacagctcatattgtgccctgtttgccgatatgagttgccaccacagagccttactggtgctagctgctcgcacaca

SEQ ID NO: 37799 - DNA, 515 bp, Oryza sativa
  Clone ID: uC-osrocyp015b12b1
tcgtgtactgtattcattttatcatgaggttcctgagcatatgataacatgcccttcaacaccagaatggaaaaggtcatccgatcttgatttaaatggtgaagccaagcaagatgatgatgatgagaatggtgatcttgcaccagtacataatgaggtggaagataaagttatcactaatgatgatgtgctaggagatgctgtaccatatgatcagcaagatgctctgcgtgtcgtatgttatcgcttgctggaaatgccccctgtgagagggcatgcacagtttcctggatcacatcctgtctctcttaacagtgagaatttgcaactactcagacagcgatactattttgctacatggaaagctgatggaacccgatatatgatgcttataatgagggatggctgtttcttgattgatcggaatttttgcttcagaagagttcacatgcgctttccccataggaattttaatgaaagactacatgagatgactctgattgatggagaaatga

SEQ ID NO: 37800 - DNA, 512 bp, Oryza sativa
  Clone ID: uC-osrocyp015c01b1
ttggaatcctgtttgggttccctacaaggtttggcatgatggctgcgcagatgaaagcattctttgatgcaaccggtggcctgtggagtgagcagagccttgcaggcaagcccgccggcatcttcttcagcactggtacccagggcggtggtcaggagactacaccgttgacagcaataactcagttgactcaccacggcatggtgttcgtcccggtcgggtacaccttcggtgccaagatgtttaacatgggagaagttcaggggggcagcccgtacggcgccggcacctttgccgccgacggctcgaggtggccgacggaaatggagctggagcacgccttccaccaggggaagtacttcgcaggcatcgcgaagaagctcaaggggtccgcttgagatctccattgggcaaattcaattgggcgtgtgcgtgtccctacgcacaacatcgtgaggcatttcatacagctccaaaccataccgacatacagtcaatagcttggtctcttc

SEQ ID NO: 37801 - DNA, 487 bp, Oryza sativa
  Clone ID: uC-osrocyp015c02b1
tttgtcttctcctccccctcccggttcggttcggttcggttcgggtccggttcgatttcggtttttccttcggttcgggggttggtgggaaagcatggcggcgccggatgttgagtaccgctgcttcgtcggcggcctcgcctgggccaccgacgaccgctccctcgaagccgccttctccacctacggcgagatcctcgagtccaagatcatcaacgatcgggagacggggaggtcgcgcgggttcgggttcgtgacgttctcgagcgagcaggccatgcgcgacgccatcgaggggatgaacggcaaggagctcgacggccgcaacatcaccgtcaacgaggcccagtcgcgccgctccggaggcggaggcggcggtggctacggccagcgcggcggatgcggaggctacagtggcagcggctaccgtggtggtggcggcggcagtggctaccgtcagcgccgtgaaggcggctactgcggtggc

SEQ ID NO: 37802 - DNA, 497 bp, Oryza sativa
  Clone ID: uC-osrocyp015c04b1
atctctcacagcaaccagccagctgccacactagcttgaggcgagcgagcgaagcttagctagcggatataacaagtcgtcgatctgcttgctgcttttgtgaattgcggtggaagcatgtcgagcgcgtcgtccatggaagcgctccacgccgcggtgctcaaggaggagcagcagcagcacgaggtggaggaggcgacggtcgtgacgagcagcagcgccacgagcggggaggagggcggacacctgccgcaggggtgggcgaagcggaagcggtcgcgccgccagcgatcggaggaggagaacctcgcgctctgcctcctcatgctcgcccgcggcggccaccaccgcgttcaggcgccgcctccgctctcggcttcggcgcccccgccggcaggtgcggagttcaagtgctccgtctgcggcaagtccttcagctcctaccaggcgctcggcggccacatgacgagccaccgggtcaagctgtcgacttcgcc

SEQ ID NO: 37803 - DNA, 525 bp, Oryza sativa
  Clone ID: uC-osrocyp015c05b1
tggtcgcgtccgcccacgcgttcgcccacgcgtccgctccgtgacggaccacgccgcctccgcgctcgagtcaaccgtcatcgccgccctcggccgcacccgcgacgccctccgcttcgcccgcttcgccgtcaggcatgggaagaggtacggcgacgcggcggaggtgcagcggcggttccggatcttctccgagagcctcgagctcgtccgctccaccaaccggaggggcctcccctaccgcctcggcatcaaccgtttcgcggacatgagctgggaggagttccaggcgagccggctcggcgcggcgcagaactgctcggcgacgctcgccggcaaccaccggatgcgcgacgccgccgctctcccggagaccaaagactggagggaggatgggatcgtgagccccgtgaaagaccagggtcactgtggttcctgctggaccttcagcaccactggttctcttgggcagcatatactcaggccactgagaagcctgtctctcttctgagcagcactggttga

SEQ ID NO: 37804 - DNA, 388 bp, Oryza sativa
  Clone ID: uC-osrocyp015c06b1
ttctaggaagcggctgatgcgggacttcaagcggctgcagcaggacccgcccgccggaatcagcggcgcgccgcacgacaacaacatcatgctctggaacgccgtcatattcggaccggatgacacgccgtgggatggaggcacgttcaagctgacactacaatttacagaagattatcccaacaaaccaccagttgttcggtttgtctcaaggatgtttcacccaaatatttatgcagatggaagtatctgcttggatatcctacaaaatcaatggagccctatatatgatgttgctgcgatattgacctctatccagtccctgctctgtgatccaaacccaaactcccctgcaaacttcgaagcagccagactgttcagcgagaac

SEQ ID NO: 37805 - DNA, 520 bp, Oryza sativa
  Clone ID: uC-osrocyp015c08b1
tcgttaactatatatccttttggtttgcaaaggttttactaggttatttgcccccctcttctagaacgcatccagaattcgtggactctgcgacccaactcacacggcgaagcacacagaattttttttcccaaatccatttattttcctctcttctctctctcgaatcgaatcgaatcgcctcgcctcctttgttgaattgaatccaagctcgattcgccgccgccgcacgccgccatgggcaactgctgcggcacgccggcgacggcggaggagggcgggaagaggaggaggagggggaagcagaagaaggcgaaccccttcaccgtcgcgtacaaccgcgcgccgtcgtcggcgggggcggcggcggagaggcccgggctgatggtgctgcgggacccgacggggcgggacctcagcgcgcggtacgagctcggcggcgagctggggcgcggcgagttcgggatcacgtacctgtgcacggaggccgagacgggggacaggtacgcgtgcaagtcga

SEQ ID NO: 37806 - DNA, 515 bp, Oryza sativa
  unsure (1)..(515): unsure at all n locations
  Clone ID: uC-osrocyp015c09b1
tctcggagaaagaagagcgcgccgcgccatgtgcggcggtgcgatcctcgccgatttcaccccggcgagggtgccccggcggctgaccgccgccgtgctcctgccggtgaccccgactccccccgccgacgagaggagaaccacccggaagcgcaagtccgacgtcgacttcgaggcggagttcgagcttttcgaggacgacgacgacgacgatgagttcgagctttccgacgatggcgacgagagtttggccgtgtcatgtgtgtcgtcccccaagtcgaaggcagtaccttcgttttctttttcgtcggatgtctcctcgagctccaggccgnggcggcgcgtggcggcggcggcggccggtcgtcggaaggcgagcaagaagagcaagtacaggggcgtccggcgccggccgtcgatgaggttcgcggcggagatcagggaccccaagaaggggcggcgcgtgtggctcggcacgtacggcagcgccgaggaggccgccatggcctacgacc

SEQ ID NO: 37807 - DNA, 323 bp, Oryza sativa
  Clone ID: uC-osrocyp015c10b1
ctctcctgcaatcctcatcacacagcaaacccaaaccgtgagcggaatcctcagcctgctgagagagcctgagaccaagagggggattcttttttggttattgacgatggcgcagcgcgacaagaaggatcaggagccgacggagctcatggcgccggagatcacgctgtgcgccaacagctgcggattcccgggcaacccggccacgcagaacctctgccagaactgcttcttggcggccacggcgtccacctcgtcgccgtcttctttgtcgtcaccggtgctcgacaagcagccgtcgaaggcggcggcgccgcttgttg

SEQ ID NO: 37808 - DNA, 470 bp, Oryza sativa
  Clone ID: uC-osrocyp015c11b1
ttcctcctcgcctccctcccctcccctcccctccccgtccggccatggcggcgtcgctgcttctccgagccgcccgccggcgagacctcgcctcgcccctcggaacgttgaccgccaatgctcaatcggcatattctgcgaatatttgttcacaatggggtagttttgcaagagctttcagtgtaaaaccaactggaaacgaggttattggaattgatttgggaacaactaattcttgtgtttctgttatggagggaaagaaccccaaagtgatagagaattcagaaggcaccaggacaacaccatcagttgtggcctttaatcagaagggagagcgacttgttggaacttcagccaagcggtaagcagtgaccaacccacaaaacactttctttggcacaaaacgtctgattgggagacgctttgaggatcccacaacacagaagagatgaaatggttccatacaaaat

SEQ ID NO: 37809 - DNA, 423 bp, Oryza sativa
  Clone ID: uC-osrocyp015d02b1
ttctttcctccctgctgggcttcgggcggcggcggcggcggcggtgggggtggatggcctccgcggcatcagcgccggcgttcgagaggctggccgggatccgagcactggcggagtccggccgcttcaaggcgtggttcctcgatcagtttggtgttcttcacgatgggaagaagccttaccctggtgccgttctcgcgttggagaagctcgctgagaaaggggcgaagatggtaatcattagcaattcgtcgaggaggtcgtctgtaaccatggacaagctagagagccttggttttgacccatcctgtttcctcagggccattactagcggggaactcacacatcagtaccttcagaagagagatgatccttggtttgcagctcttggaagaaagtgcgtgcatgtgacatggggcaatc

SEQ ID NO: 37810 - DNA, 535 bp, Oryza sativa
  Clone ID: uC-osrocyp015d03b1
caggaagctgatgagcgtcaaaagatcatgaaggatccccagtcagctgttccagcagcctttgtttcatttcgttcacggtggggggctgctgtttgtgctcagacacagcaaaccagtaatccaacagtctggataactgaatgggctccagaacctcgtgatgtctactggaataatctatccattccatttgtgtccctcacagttaggaggctgatagttgctgtggcattcttcttcctcaactttttttatgtcattccaatagcattcgtgcaatctcttgcaagccttgaaggaatagaaaaggcgcttccatttctgaaacccttaatcaaaattgatgtcatcaaatcattcatccaaggttttcttccaggaattgctttgaaggtcttccttatattgcttccaactatactgatgtttatgtctaagtttgaaggattaatatcacagtcatcactggagcgaagatctgcatctaaatattatatcttcttggtcttcaatgtatttttgggaagcatcg

SEQ ID NO: 37811 - DNA, 519 bp, Oryza sativa
  Clone ID: uC-osrocyp015d04b1
ccccaccccaccccctctttcttcttctcacgctcctcgtcgccgccggcgccgcctccgccggcgccgatgacctggtcgccgagctgcaatccctgcggtcccgctccccgtcgggcgtgatccacctcaccgacacctccatcacccgcttcctatccgccccggcgccgcgcccctactccgtgctcgtcttcttcgacgccgcctcgctccactccaagaccgacctccacctcccccagctccgccgcgagttcgccctcctctccggctccttcctcgcccacaaccccgcctccgtcgacctcttcttcgccgacatcgagttctcggagtcgcagcactcgttcgcgcagttcggcgtcaactccctcccccacgtccgcctcgtccgccccgagcacacccggctcgctggctccgagcagatggaccagtcccacttcttccgcctcgccgactccatggtggagttcgtggagtcccgcaccggtccgaggtcggccccatcgtccg

SEQ ID NO: 37812 - DNA, 421 bp, Oryza sativa
  Clone ID: uC-osrocyp015d05b1
tttctctctcttcccatccgccgccaaaaccctagccccccctaaaccccgccgtccgatcgccgccgccgccgccgtcctcccgctttcgcggccttcggtttgggcgccctccccccgcccggcccaagaaccgtgtgcccccggcgtcgccgccgcgatggacatggactcgtgggagctcctcgccgcggacaccaggctgctgggtgcgtgcttcgatgcattgattgggatggaggaggcggacgggagcgaacgcgaggaggaggcggcggaggcggcgtgcccgttttgcgaccaggagttcgacggattcgggctttgctgccacattgaggccgatcaccaggcggagaacagggccggggtgtgtccaatttgctacgatgcgggtgagatggacttggttagtcacatc

SEQ ID NO: 37813 - DNA, 500 bp, Oryza sativa
  Clone ID: uC-osrocyp015d06b1
ttctttccgcgtgagcggcagcgagtgtcgacagacgtattcttctcgtatcaatgctcatgggttcttgatctgtagcttattagcggccatgtgcggcggtacaatgatctacgggtatcatcccgccgtcggccgctgcggcggcggcggctgcggcggccaagaagcagcagggcaggagggtcacggccgacgtgctgtggccggggatgctgcggaaggggaaggcggcggcggcggaggaggactttgaggccgacttccgcgagttcgagcgtggcatgagcgacgacgaggcggaggggggcggcggcgaggaggaggaggacgacgacgacgtggtcgtggtggtccccccgccggcggcggcgaggttcgtcgtccgtgccgctgacaaggcggcgcccccaactgcagatgggatgttgactacaaagcttgtccacatgacggacctactgcttgatcagcaaagctcaagaggaagaatcagttca

SEQ ID NO: 37814 - DNA, 494 bp, Oryza sativa
  Clone ID: uC-osrocyp015d07b1
ttttacacatcacactaccactgatgatagtgtgctcttggtgaggcctccaagaagttgcctgaccacacaagcacaaagcaagcactatcaccaaaaggatcagagaagaaactgatatcactatctgatcagtgtagcattgcagcctctcttcttggtaggagtgagctagcacagtgaagagctaattaagccatttgtgtgagcttgcgttgagtgagctctgagctaatatggatgttgagtcaaggcaaggccccaagggtggtgacaccatggctgactccgaggtctccgtggactggaggggcaggccttgcggctctcgcaagcatggcggcatgaaagcggccgtctttgtgctagggatccaggcgttcgatatgatggctatcgcggcagcggggaacaacctgatcacctacgtcttcaacgagatgcactacccgctgtcaaagtcggacaacatcgtgaccaacttcattggcacc

SEQ ID NO: 37815 - DNA, 222 bp, Oryza sativa
  Clone ID: uC-osrocyp015d09b1
tcttctacaatgagttaggaagttagcagatgaaaaataccaataattagattagcggttgcttggtaggaggtccatgacagtccaaaatgctgagttcaaatgttatgtccccggtttggtaatggctgttgtagctgcagctttttctgtatttctccgtgtaatttgctccaaagagagacaggaacaccgccaattttattagcaaggatgagtttc

SEQ ID NO: 37816 - DNA, 527 bp, Oryza sativa
  unsure (1)..(527): unsure at all n locations
  Clone ID: uC-osrocyp015d10b1
ctcctcttcttgttcttcttcttgttgttccactcttattgttcatcatcctcctcctcatagctgaccaaatctctgctgtgacagcaatctctgctgcttggttctgcctcccatgaggagcacaccatcagtgtgattacaaagcaaggaaccctcctaccgcgtcgctgagctgatgaaggagctctgacgactcggatgcatgcttctgccatcaatcaattgatccaacaaggcaactcgatcggaatttgagtttggtgaactctgtaattgattccctgcaagtatccatgcctttgcagcaatcttgctaattgagttgtcaaagctgcatacatggctacttactactcgagccctggcaatgaaagggactcgcaagctatgtacccagcggattcaggcaattcatcatatcctgtgccatcagcaataggaaacatgttatatcctggcaatgggtcttctgggccatacacngatattagtggctttattcagcatcagcagactttcatgga

SEQ ID NO: 37817 - DNA, 524 bp, Oryza sativa
  Clone ID: uC-osrocyp015d11b1
gtttcttgctccatccatctatccatccaaggagtgtggaacgccacacgtattttttttttatctatgctaatctgatcattagcagaggagagttttagcagtaggattggattaaattggagtagtttcatagtttgtgtgtagtgatcttaattagctttgattagacagacagtacagtagagtagaggatgttggctgtgttcagcggcgcggtggtggaggtgccggcggagctggtggccgccggcagccggacgccgtcgcccaagacgcgggcgtcggagctggtcggccgcttcctcgccgccgccgagccggccgtgtccctgcagctcggcgaccttggccacctcgcctactcccacgccaaccaatccctcctccgcccaagatcctttgcatcaaaagatgacattttctgcctgtttgagggagtcctggacaatctgggcaggctgagccagcagtatggcctgtcccagggcgccatgaggtgctcctgttatcgaggcgtacag

SEQ ID NO: 37818 - DNA, 530 bp, Oryza sativa
  Clone ID: uC-osrocyp015e01b1
ctaccttctcctccggctcttcttcagtatcgaatcctctcttctcctcgtgcccaccaccaccaccgtagcaatggcgggcaacgggccgatcaacaaggaggacccgctcaactggggcgcggcggcggccgagatggccggcagccacctcgacgaggtgaagcgcatggtggcgcagttccgcgagccgctggtcaagatccagggcgccaccctccgcgtcggccaggtggccgccgtcgcccaggccaaggacgccgccggcgtcgccgtcgagctcgacgaggaggcccgcccccgcgtcaaggccagcagcgagtggatcctcaactgcatcgcccacggcggcgacatctacggcgtcaccaccggcttcggtggtaccttccaccgtcgcaccaaggacggtcccgccctccaagtcgagctcctcaggcatctcaacgccggaatcttcggcactggctccgatggccacacgctgccgtcggagacggtgcgggcggtcatgcttgtgcgcataacac

SEQ ID NO: 37819 - DNA, 508 bp, Oryza sativa
  Clone ID: uC-osrocyp015e02b1
ttcttccccgtcgtctaagttaaaaggaagccatggagcacaaggagactggatgccagcagccagaaggcccgatcctttgcatcaataactgcggcttctttggcagtgcggctaccatgaacatgtgctcaaagtgccacaaggagatgataatgaagcaggagcaggccaagctggcagcctcctctatcgacagcattgtcaatggtggtgattccgggaaggaaccaattattgctggtcacgctgaagtagctgttgctcaagtcgaggtgaagacgcttgttgcgcagcctgctgagattgctggtcctagtgagggggtcacggtgaaccccaaggggagggaaggaccaaatcggtgctccacttgtcggaagagggttggtcttaccggattcaactgccgatgtggcaacttgtactgcgcaacgcaccgctattccgataagcatgactgccagtttgactatcggaccgctgctagggatgctattgccaaggc

SEQ ID NO: 37820 - DNA, 521 bp, Oryza sativa
  Clone ID: uC-osrocyp015e05b1
ttgtcgcgtgggcgcggccgttcccatgggggcttccgttagggccgtgccgctgcagtcgccgctgccgcccgccgaggaagttatggcattcataagatcatatgttgtgcctgaaggctttccggatagtgttactccgtcatacgtcccatacatgacctggagagccctgaagcatttctttggtggagctatgggtgtttttacaacaagaaccttgctgagctctgttggagtctctcaaagcaaagtaacaccaggagccattgctatcaactggatcctcaaggatggtgcaggtcgtgtcggaaaaatgctttttgcacgtcaaggaaagaagtttgactatgacctaaagcagctccgcttttctagtgatctattgctggagattggagctggaattgagttagcaactgcagcctttcctcaatttttcttgcccatggcttgcgtagcaaatgctgtaaagaatgtcgcggctgttacatcaacatcaactcgaacttcaatttata

SEQ ID NO: 37821 - DNA, 538 bp, Oryza sativa
  Clone ID: uC-osrocyp015e06b1
ttttctcggacacggttgatctcacctgacgacgcctactatttccgcgtcgcgtcgtcggcccgtctccgtctccgtctccctccccccgcatccccgggcggaggaggccaccccaccgccacccgctccctttcccccccttcttccctccctccctcccttcccccaccttttccgctcccccaattaacctcaagctcacccgcggaggcggaggcggagccggaggaggaggagggaagggccggtggcataaggcagcagcgattctcgccgccgccgccgcccgccgccgcactcccacgatggaccgcccgcccgcgccagcgccagcggtggcgctgctcctcgtcgtcgtcgtcgtcgcggcggcggtaatgctggcggcggtggagggagcgggggcggaagcaacaggggtgttccacgtgcgccgcagcctccccgccggtggtgcggtggcggcggcggatgcgtaccgagcgcacgacgggagccgcaggggagggctcctcggttgccgcgacatccccct

SEQ ID NO: 37822 - DNA, 518 bp, Oryza sativa
  Clone ID: uC-osrocyp015e07b1
accgacgcggcgttttttttttgttgttttgtgttgagcggaacacattgggccccacagaatcagtcaatttccaatctctacgtatatgatatctccatacatagagcagtaccgagtgccgactccatctcgcacgagaagcaaatgagcaatcgaccaatgagtttggtgcgggcatggcaatgtcggcaagaacgagcagttgaagcttttccttttttttcagagcttctccaccttggcgggtctcacgacggggttggcgcgggcgatggcgtcgcgcccggcgcccctgtaatcgtagccgcagtcgtgcctgtccgagtagcgatgcgcgccgcaaaacacggaaccgtagtggtactcgaaccccatcagccccacgctcctcccggacgcagagcacctgctctttgtcttcgccccgtgccgcggcggcggcggcggtattgacccctcggtcacgggtacgcccttcggcgccggcaacaccacctggtcgtgcttccgggact

SEQ ID NO: 37823 - DNA, 510 bp, Oryza sativa
  Clone ID: uC-osrocyp015e08b1
gccaacttaaccaaatttactgtacgttgaccaccagctagctagcttagctagcgacgatggcccgggcatacatggctgtcgccgtggccctcttcttggtggtcgtgtgcgccgccgtctccgaggccgcgaagccgccggcgtcgcataccaggctgccgcccaactaccacatgatcaacccggggagctcgggcttgggcaagagggaccaggagctgtcgtgcgccgacaccaagggcaagaagaaaggatgcatggccaagtgcgacaagcgctgccccaaccagtgcatggtcatgtgccccagctgcaagaccttctgcatgtgcgacttctaccccggcgtgtcgtgcggcgacccgcggttcaccggcggcgacggcaacaacttctacttccacggcaagaaggaccacgacttctgcatcgtctccgacgccgacctccacatcaacgcccacttcatcggcaagcgcaaccccaccatgagccgtgacttcacct

SEQ ID NO: 37824 - DNA, 513 bp, Oryza sativa
  Clone ID: uC-osrocyp015e09b1
tttttgacgcgtgggcggaggagtagaggaggagatcgagatggcgtcgtcggcgacggagacggagacggtgagggcgtcgcacatgctgatcaagcacgagggctcccgccgcaaggcctcctggaaggatcccgacggccgcgtcatctccgccaccacgcgcgccgacgccgccgcgcgcctcgccgacctccgcgaccagatcctctccggccgcgccaacttcgccgacctcgccgcccgccactccgactgctcctccgcgcgccgtggcggcgacctgggcacttttgggaggaggcagatgcagaaacccttcgaagatgcgacatttgctctcaaggttggtgagatgagtgacactgtggacactgacagtggtgttcacatcatcctgcgcactgcttaagatgctgatatcgatcgtcagctggttggctttcaaatgttattttctggtagcctaaaacttcaaatcaaaatgaaccctgtaacgaatatgatatgttc

SEQ ID NO: 37825 - DNA, 498 bp, Oryza sativa
  Clone ID: uC-osrocyp015e10b1
ctggttttacaagaatctaaaccggcaatggctggaggaggcgtcgatggcgatgggatggagatggtgaggaacaggaaggtggtgctaaggaggtacgtgacggctggataccctacagtagatgatatggaggtggtatcctccaccgtgatgccacgcgtgcctcttggaacgatggcaccagcggtgatagtgaagaacatctacctttcgtgcgacccgtggatgcgcggtcgcatgactaagcacgacgatgctactgcggagatagccgaagacttcgtgttaggagaggccatggttaatttcggtgtgagcaaggtgatcgactcgacgcacccggtgttcgctgctggcgacctcgtgtggggactgtgtggttgggaggagtacagcctcatcacccaaccggagacactgcacatgatcaaccatcctgatctaccgttatcctactacaccggtgttctcggtgtgactggtctaacagcatat

SEQ ID NO: 37826 - DNA, 390 bp, Oryza sativa
  Clone ID: uC-osrocyp015f01b1
attttgcttccgccgattttctccgtctgttctcgctcccttccctccctcccatctccctgcggtctgcgagccatccacctcgctgcctctgccggcttcgtgtcgtgcgtccctctcctcctcctccgggtgcagccacggcgtggcaggcagctaccacagcagccgctattagctcaaatcctcgctggttgacctcagctgcgacgactcttcaggatgagcgagtagagtttctgtggcctcgtttctttcttgcggattgggggtgggttcgtttgtttctttacttccttcccgcgtgtgaggcagcgagccagtgacacgcgggaatcgatcgaaaggccggatctttttctagcttgggaggaggacgaggaggaggag

SEQ ID NO: 37827 - DNA, 524 bp, Oryza sativa
  Clone ID: uC-osrocyp015f04b1
tcaaacatatccttggagtgaagccaacaccgcatagtgtgctaaatgatgtccctgtcaaaacttatccaagatcgctgatgcttccaaaggagtttgatgccaggtctgcatggtcacagtgtaacacaattgggaccatacttgatcagggtcactgtggctcgtgttgggcatttggtgctgtggagtgtctccaggatcgtttctgcattcatttcaacatgaacatttcgctatctgtcaatgacctagtggcatgctgcggtttcatgtgcggcgatggttgtgatggaggctatcctatcatggcatggcgctactttgctcggaatggtgttgttaccgatgagtgcgatccatactttgatcaggtcggttgtaagcatccaggatgcgaacctgcttatcctacgccagtgtgcgagaagaaatgcaaggtgcagaaccaagtttggctggaaaagaagcatttcagtgtcaatgcatacagagtaaattctgatccacatgacataatggca

SEQ ID NO: 37828 - DNA, 536 bp, Oryza sativa
  Clone ID: uC-osrocyp015f05b1
ctagccgcgagccctgtcgttgcgaggaaggggaagaggagagatcgagatcggagagatccatccatggcgctgcgagccctgatcagcgagatccgggggatgaaggtgcgggaggtgccggggtacctgaagccgcggctgagctgggagaacgtgaagaagagcagcgaccaggccgtcgaccgctacatcgacaagtacatcgagaccagctcgccggagccgctcttgcacgtgatctacggcctcatggccttctcctacctcatcaacctccccaaggagcgccgccacctcgcccacctcgaggagctcgagaggcatggcgccgtcggcgccgtccaccactagatccgaggtcaggacttggggtttgtctgtggttgattcgatctaacagaatttctgttcttgcaccgatgagctacctggagttgtgatgatgttcgttcgatggtttattttgtacgggaagtcagaaaaaaactttccagttattgttacattcctatgcatgttatcataagcaactt

SEQ ID NO: 37829 - DNA, 538 bp, Oryza sativa
  Clone ID: uC-osrocyp015f07b1
gcacgatgccatctagctaaagtacctagataccgaccagtctaatggaatgcccaggaaactatctggggagcagagtgcgcccgagagtcgtgtgccgtcgcacctctctactccgtcatctcgctccctgtctccaactaggcatcgcaaaggagagtatgatcctaagttcaatctacctggacagtgcttattgcctgcttcagaggcaaactctaccatcatgtggaaacaggatcttcttgctaaggttaaagaacatgaagaagagatcgcacagctcagaaggcatcttgctgactactctgtgaaggaagcacaaatactcaacgagaaacatgttttggaaaaacgcattgcatacatgcgaatggcattcgatcagcagcaacaagatttggttgatgctgcatcaaaagctttatcctacagacaagacattattgaagaaaatatccgtctgacatatgccttacaggcagcacatcaggagagatccacttttgtatcttctttattgcctcttttgacagaa

SEQ ID NO: 37830 - DNA, 526 bp, Oryza sativa
  Clone ID: uC-osrocyp015f08b1
tttttgtcgcgtgggcggacgcgtgggtggagaaaccaaaggatgatgactgttctttggaattgtcaaaacttcatacctatgatgatgttgttgagagagttgcccgtcagcttggtgtggatgatccagcgaaaattcggctaacatgccataactgctattcgcagcagcctaaaccgtaacctatcagatatcggcgagtggagcatcttttggacatgctcattcattataatcagacatcagacatattgtattatgaggtgttggatattccactgccagaattgcagggcctgaaaaccctgaaagttgcattccaccatgctacaaaggatgaggttgtgattcacagtatcaggcttccaaagaatagcaccattgcagacgtgattaatgatttgaaaacaaaggctgaactatccagtcccagtgctgaattgcgcttgttagaggtcttttaccacaagatatataagatttttccactccatgagatgatagagaaatattatgatcagtc

SEQ ID NO: 37831 - DNA, 533 bp, Oryza sativa
  Clone ID: uC-osrocyp015f09b1
ggctgaatctcaatttttttatcatcttctacaaggtataccacctgcactggctcctcgtcctatgatggatgcacattggtcataggaatcagcaaaccccgtttgacatgacacaagcgatacagcatgatcctcaccgttccttttcatcgaacatgaatcctatgcaacaatctcttcatgctcctcgggctcctcatgtagacccagctgctcatcatcttatgatgcagcacatctccacacctggaaattttccaccagaaggcctgcaaagaggtgttccgccatctcagcctgtgcatcacatgcctggttataggcctgagatgagcaatgtaaataacttccatatgcaccctcgccagcccaactatggagaatttggattgatgatggcaggtccatcaggtccagaactgagaggcaatcacccagatgcctttgaaaggtttctccagatggagcttacagccagatccaagcagatgcacccagcaatggctgttcatgtacctggcggcatgtac

SEQ ID NO: 37832 - DNA, 498 bp, Oryza sativa
  Clone ID: uC-osrocyp015f10b1
tcggtgaacccccgcgtcgcccacgcgcaggcgacacggggggcgaaacctagctccggcgcccccttgttccccctttccccacctcgccgtcgccggagctcaccgccggaaagttggccggcgagttaggagggcggcggcggggccttctcctgtggtggcgtcccctcttggcgcgggggaggcggcgaaaaccggcggcggggagtggcggcggcgagctctccgggcaagacgatgacggatctgcggttgctgtcaccggatctggcctggcccatgccggatccggcggaagcggccggcgttgtggcgcagcgcgaacgaaggaggtatggctggcagcggaggggcgcccctctctggcggcggagacggctcgcgaggccggcgcgcgcgccgacacacgcatgcggggcgcgaggcgtcgcccggtggagccgtcggcggcggtgcacatcggcggctctgcaccggtggttggggcgacactgt

SEQ ID NO: 37833 - DNA, 402 bp, Oryza sativa
  unsure (1)..(402): unsure at all n locations
  Clone ID: uC-osrocyp015f11b1
tcgtccccaccaactagctctctctctctctctctctctcgcgccgccgctacgctcgccgcgccgtcgttacgctcgccgcgccgccgcgggtggggagatttgaccggcgttgactccgggatggacgggcggttcccgctgccgccggcgagcggaggggggcgggggcaccaccggcgggcgcactcggagacgttcctgcggctgcccgacgcggacctcctcctcgacccggagggggacttctccttctccgacctcgacttcccctccctctccgacgactccccggtcatcttcgacccgaccccgccgccgccgtcgccgatggctgcgacccccgcgccggcgccgtggtcaccgggtggggcgcacatgaggagcctntccctcgacacc

SEQ ID NO: 37834 - DNA, 516 bp, Oryza sativa
  Clone ID: uC-osrocyp015f12b1
ctcctccggccgcggcggcggaggaggcggcggcggggaccccggcgactggaagccgaacgtcgtcgcggcgttcgccggcgcccaactcggccgcgccctccgccgtcgcctcgccggcctcctccgctcgccggaggcgcgacatcttggtgccttgccgagaataggtgacatttggtttgaaggatcagactcattcgccacacactcgattcttggagtgttggagaatgcgctctccgcaccatatgcttgcagctctgttttgttcaatggaaatggatcggacaggagttacatcggtagggggaagttgccatccagaaggccaagtggaatcaattcgaagaagaggctttggactaatattcttcttgctgttaatattctggcttatgtcgctcagataactacacaaggacgattacttatatggggggctaagatcaacagtatgattgatagaggagaactctggcgtctggctacatcatctctttttatgcaaatctt

SEQ ID NO: 37835 - DNA, 489 bp, Oryza sativa
  Clone ID: uC-osrocyp015g01b1
ttttcgcgttcggtcataggttcccagctgcaatgcagatcactttgcgcactccgtctccagctgctgcttacaggagcatgaactctgtcgtgtcaactcgcttgccgctgcctaagccaacggtcatgcgcaggttcaagggtgcagacagcccagcacaagcagtagaagcgcctgcagcagaagcacctgcaggggcacaggaagacgctgcacctgccagggccaaggtcaatcatgcttacctcatgttcaacccatcagctggtcaggagaacccggccagcatacttggtgacatcagcctcaagctgagtgagcagatgaagctgacaatcctgcttacacagagggatggcccatcacccagagagatggcccatcaggccctcatggagggggctgatctcatcatgggcttatgcggcgatggcacagtgggagcttgggctggagcttttgtggacacaggtgttccgatgggca

SEQ ID NO: 37836 - DNA, 515 bp, Oryza sativa
  unsure (1)..(515): unsure at all n locations
  Clone ID: uC-osrocyp015g02b1
caaagtctttagactcttttggtaatagtcctcttgtgtctgaggatgctgtgattgagtcgcagagaccacatgttttcttggatccaactaacagtcagggtggagacatgattttgcctttttattggcgccataattatatggatatagtaaatgccgattggggtagtatgggtcagatcgatatgagatctttacctattttacgaagtgtgaatggatcaaatgaaactatttccattattgcgtatgcgtggtgtgaagatattgagttctctggtattacacagtttgagcctgcaacaatcgtgcctcagtcaggttccgagattgacgaagctaatgctaaaggatntatttccataccagctacagctattgctagttttgcaagtaagcttgaaatgtaccagtgataggtaagtatgctaccgctactgctactatagcaggagcgacagctgatgttgctaggaatttggatattgtcgtcacctgtgacggagatgcag

SEQ ID NO: 37837 - DNA, 301 bp, Oryza sativa
  Clone ID: uC-osrocyp015g04b1
ctggcccagtcctccatttcttacaacggtagaggtggcggcgctaggtgccttggaatctcagctggctatggcggcctctgctccgggggtgaacgataccgagtgcgcctgctgctgctgagctcatcggctactttgaccagcacgtgcattagcgcgcggaacatccagaacatctgcatctaccacaagacggacgtgtactcgcgggtgtcgttgccggggaaggatgctcacggtagcatgcacacaagtcattaactgctgacctcgcatcttgttgtgtcaccagtacttc

SEQ ID NO: 37838 - DNA, 537 bp, Oryza sativa
  Clone ID: uC-osrocyp015g05b1
ccactggtgaagagcatcaatgtcagtgggcacaagtatggccttgtgtatccaggtgttggttgggtcattcggcgaagcaaagaggatttgcctgaagaactcattttccatataaactatctggggacagaccagccgacgttcactctgaacttctccaaaggttccagccagataatcgcacagtactatcaactaatacgcctgggattcgagggatacaagaacatcatgcagaattgcatggagaacacagcaatactaagggaaggcatagaggcgactggtcgattcgaaatcctctccaaggaggccggtgtgcccttggtggcgttctcgctcaaggacagcggcaggtacaccgtgttcgacatctccgagcacctgaggaggttcggctggatcgtgccggcgtacaccatgccggccaacgccgagcacgtcgccgtcctccgcgtcgttatcagggaggacttcagccggagcctcgccgagcggctcgtttcggacatcgtcaagatcctgcacgagctg

SEQ ID NO: 37839 - DNA, 479 bp, Oryza sativa
  Clone ID: uC-osrocyp015g06b1
gtgcgccgcgccatgtgcggcggtgcgatcctcgccgatttcaccccggcgagggtgccccggcggctgaccgccgccgagctcctgccggtgaccccgactccccccgccgccgagaggagaaccacccggaagcgcaagtccgacgtcgacttcgaggcggagttcgagcttttcgaggacgacgacgacgacgatgagttcgagctttccgacgatggcgacgagagtttggccgtgtcatgtgtgtcgtcccccaagtcgaaggcagtaccttcgttttctttttcgtcggatgtctcctcgagctccaggccgcggcggcgcgtggcggcggcggcagccggtcgtcggaaggcgagcaagaagagcaagtacagtggcgtccggcgccggccgtcgaggaggtttcgcgcggagatcagggaccccaagaggggcggctcgtgtggctcggcacgtacggcagcgccgaggag

SEQ ID NO: 37840 - DNA, 433 bp, Oryza sativa
  Clone ID: uC-osrocyp015g07b1
tcttctgatcggcccggttgggacctctggctgctagtgtcaggtccgtgctgccactatgcttgagcagccaagacgggacacggatgccgccgtcagctcatggtctccgacgctggcctgcttccacgacgtagcggtgcctgcaggctccatcttcgacgtacggaaagaggctcttacccaagatcctgaacgtacagcctgacaggcagaggatcttgtttcgtgttaaggagcatagtgtcaatgcagtcctggatacacgctgatgtcagggatgaaccaaaacttgttctacttgagaagcatgaccctgccagtggacaagaccgggccgtgccaatgattatggatgagctcatgatgaaggcttgtgaggctctgcgccgtgtaagaagtcaagttgacagactgtgtggcaaggtatgtg

SEQ ID NO: 37841 - DNA, 506 bp, Oryza sativa
  Clone ID: uC-osrocyp015g09b1
ttgcattgtagtgagagagagaggcggccatggcgctggcgtcgctgccgaaggtggtgatggggtcggtggcgttcggtgtgttctggatgctggcggtgttcccgtcggtgccgttcctgccgatcgggcggacggcgggggcgctgctgggcgcggtgctgatgatcgtgttccacgtgatcagcgccgacgacgcctactcctccatcgacctccccatcctgggcctcctcttcgccaccatggtcgtcggcggctacctcaagaacgccggcatgttcaggcacctgggccggctgctggcgtggcggagccagggcgggcgcgacctcatgtgccgcgtctgcgtcgtcaccgcgctcgccagcgcgctcttcaccaacgacacctgctgcgtcgtcctcaccgagttcgtgctcgagctcgccgccgagcgcaacctcccggcgaagccgttcctgctcgcgctcgccaccagcgcctacatcggctccagcgcgacg

SEQ ID NO: 37842 - DNA, 525 bp, Oryza sativa
  Clone ID: uC-osrocyp015g11b1
ggtatagagtactttgtccgtacggtgagcctcaagatccttgctgtgggtgtacatgttggtcgtcttgagtctgtgttgaggctgcctgccacaattagcaaggttcaagaaattgagcaaagatataagggtaagatggtgatgttgggtgtagatgatatggatatcttcaaagggatcagtctaaaattgcttggcttggaatttcttttggagagaactccaaagctaagagggaaggttgtccttgtgcagattataaatcctgcaagaagcactggaaaagatgtgggggaagcaataaatgaagccgtctctgtagctgaaaggataaacattaagtatggttctgctgagtacaagcctgtcatccttattgactaccccataccttcttatgagaagattgcatactatgctgcatctgattgctgtattgtaaatgctgtgagggatgggatgaacttgataccgtatgagtatactgtctgcaggcagggaaatgaggagattgataagctc

SEQ ID NO: 37843 - DNA, 513 bp, Oryza sativa
  Clone ID: uC-osrocyp015h01b1
ctcacgcgtccgcccacgcgtccgcggacgcgtgggcaaaccctaactcccagcctgtctccccaaacagccgccactcgccagctacacgggtcacaggagcagcacatcccaggattcccagcgtcgtcgccctacggcgccagcgccagcgccagccccgcttgcccgccgctgcccagcaccggcatctcgcgccccaagtccctagcgccaccgccactcggaagcatctcgcgcccgccggcgaccatgagcgcttcccggtggtgaagctgccgacgagctcgagctcctcccctggcgcatgtatgccatggcagtgacggcaccgtcgaccgtcccaggctcccagctccccctcgtgggcttacgctgctgctgcgctccctccctccctcgtctgtagcgtcgtccatctgctaatccgccatgttgatttgggtggtgattttgttcgcttgttctttcggctcgttgattctgaaaattaaccaggcttcagaagttcag

SEQ ID NO: 37844 - DNA, 395 bp, Oryza sativa
  Clone ID: uC-osrocyp015h03b1
ttgttgcgtgggctcttttttttttttttttatataagatatactttcacaacaaacagcaggtctcttttgccaattgacaacaaaattcacgtccgtacatcgtgttggagcattaccttctacaacattctataataaaaacaatagtatattatgtattcacctgtagtccatttctacacaatgtggacttcacttttgttctatacacctgggactaggctatattgctatgtaccgtactctggatatggagaaaagctaacagacagtcccatgtatatttcccctcatcacggactctttccgtgcaatcgtattgcaattatatggctctatgaccacacattcacaaaagatggaccattgggacgagtcttgtggcgaaactg

SEQ ID NO: 37845 - DNA, 343 bp, Oryza sativa
  Clone ID: uC-osrocyp015h04b1
ttcgtgccaagctaccattctcctcctcggcggcggcggcggcggcggcagcggcgatgcagatggcggtgaccaccaccaccaccgactccttccaggcggtcgtgccggctcaccaccctcaccctcacgcccacccgcacccgcacgcgcacccgcacccgcaccaccccatggcgcaggcgcggggggtcgtcctgccttacccgtctacgccgtcgcccatggtggccgctccgccgcccccgccggcgtaggacgccaagcacttcgcggcggggctcgtccccacgccgcggtggccgaccggcgcacgccgacccctcccagccccgtgggatcc

SEQ ID NO: 37846 - DNA, 497 bp, Oryza sativa
  Clone ID: uC-osrocyp015h05b1
gtatacactggttttcatttcgctaaaaaagaaataaaacaaaagaaaaaaaaaacaccacacgagcaaaatctgcttggcccgccgccgccgcctccgccgtcgtgcggtgatctccaccaccgagactcgagcggcggtgcccggcggcgtccagctgctcccgccgccgcgtaccctcggctatggctcctcctcgccgcgcccaagccaatctgtccccacccgccacctcggcctctcgactcgcgagcgagttcgtcgatctgcatccatcacccctggagccagcggcgccggccgacggcgtgcttccggtcctgccctgccaaagtgttggtgttgatttgaagcctcaaggattcgagcgaaatgacttcttacatgagcaaatgcgactagaagaaggtgctagattttgcggcatggagtttgaacatcaccacatccgttggaatcatgatggtcaacaaggctctgatggctacacatggatt

SEQ ID NO: 37847 - DNA, 484 bp, Oryza sativa
  Clone ID: uC-osrocyp015h07b1
tcttctcctccccctctttaccttttcctcctcggttcggttccgtggttcgtctagggtttagcgggttgagatggcggcgccggatgtcgagtaccgctgcttcgtcggcggcctcgcctgggccaccgacgaccgctccctcgaggccgccttctccacctacggcgagatcctcgactccaagatcatcaacgacagggagacggggaggtcacgtgggtttggcttcgtcaccttctcctccgagcagtcgatgcgcgacgccatcgagggcatgaacggcaaggagctcgacggccgcaacatcaccgtcaatgaggcccagtcccgccgctccggcggcggaggcgggggctactgcggcggcggtggcggctacggcggcggtcgtggaggcggcggctacggaggaggtggcggcggcggctacgggcgccgtgagggcggctaccgtggcggcggcggctacagcggctgccgt

SEQ ID NO: 37848 - DNA, 529 bp, Oryza sativa
  Clone ID: uC-osrocyp015h08b1
tcttccttctcaccgatcctggaatggtctcggagggttcttagctggcttttcgattggattagcagcagccgggtcagacggagcggaggccgtgccggagaagggagaaggaaaggtgaacatctaacatggatgatcacatgggaagacggacagttggtggccttctcttcaccaaggggggctcaattcttctcttcagagaagacagtgcgcgtcacaaggccaccaattgctgcacgcgacacggttgcagcagcaagcatttggccggcatagacaagcaaacacacagggcagcaacagcagccaaggaagcatcagaaacccctcggagatcacagattttcaggaaacccagcacgaggactcctcagggaagtactgctactgataacatcagcaggaatgcagcaagctcctatagcgaaaacgacaataggccaagagacactccgggcgtgatttaatcgctcgtctaaagagagggtcaatgcatcaagatacgatcattgacagagaaaca

SEQ ID NO: 37849 - DNA, 495 bp, Oryza sativa
  Clone ID: uC-osrocyp015h12b1
caaaagcaaagcgttcttaagctcgcttcgtctctctctcggattcgatcatggcgcagagggagaagaaggtggaggagccgacggagctgagggcgccggagatgacgctctgcgccaacagctgcgggttcccgggcaacccggcgaccaacaacctctgccagaactgcttcttggctgcctcggcgtcttcttcttcttcttccgccgctgcctcgccgtcgacgacgtcgttgccggtgtttccggtggtggagaagccgaggcaggccgtacagtcgtcggcggcggcggcggtggcgctggtggttgagcggccgacggcggagccggtggagtcgtcgtcgaaggcgttgaggtcgtcgtcggtcaaccgatgccacagctgccggaggcgggtgggcctgaccgggttccggtgccgctgcggcgagctttactgctgcgcgcaccggttctccgaccgccacgactgcagcttcgactacaaag

SEQ ID NO: 37850 - DNA, 322 bp, Oryza sativa
  Clone ID: uC-osrocyp016a03b1
tctcgcctgctacagtaaaattcccctttgtggaccctttttcctcctcgattccggcggccttgtcgccggtgacgggagggagaggggtcgtccccctcccctagtttagtatagtagccgggctagcctcgctaggtcgggcttttcccgtttctcgtttctatggcgatggaagttgaagacggtggcggcggcgcgattgaggccggtgaccgaggaggcgacaaggttggcgacggcggcggtgcggatccggctcgcggcggccgcggcggcgcggattccagtctgcggcgactgccggggcgcggaccagctc

SEQ ID NO: 37851 - DNA, 499 bp, Oryza sativa
  unsure (1)..(499): unsure at all n locations
  Clone ID: uC-osrocyp016a04b1
tantcggtgccatgtccaaataccatctctctcacccattcgctctatgcactctattcggaagccaaacaaagcattaatatctgcagcttcatgattttccacgaaatcaaatgtacattctgaggatactcaaccttcaatgcaagaagaagagtcattgtttctaagctatgctggccacgatccacataatcacccaagaagagataatcaatgtaagcaatgtctcctgctgttgaaggagcaccatactcatcaaacaatcgcatgaggtcaccaaattgaccatgtaaatcaccaaatatcttaacaggagctttaagttgcagaacacttggttcacttgaaaatattctctcagcactatcacatagatctgcaatctcattgcagtccaagaagaactgtcttcgcacagggggctttccaccacgaggtttaatagagatgcaaccacccttttagaacactattaatgacatctgtcgatctaaca

SEQ ID NO: 37852 - DNA, 482 bp, Oryza sativa
  Clone ID: uC-osrocyp016a07b1
ctctcgatctccatcttttcttcgtctactaacaaagttataatatcaaattaaggtatatatatatatatatagtagctagcttcaattaatggcgagttcgtcgagcaggttatcctgctgcttgctggtgctcgcggcggcggccatggcggcgacggcgcagaactcggcgcaggacttcgtggacccgcacaacgcggcgagggccgacgtcggggtggggccggtgagctgggacgacacggtggcggcgtacgcggagagctacgcggcgcagcggcagggcgactgcaagctggagcactcggactccggcgggaagtacggcgagaacatcttctggggctccgccggcggcgactggacggcggcgagcgccgtgtcggcgtgggtgtcggagaagcagtggtacgaccacggcagcaacagctgctcggcgccggaggggagctcgtgcgggcactacacgcaagtggtgt

SEQ ID NO: 37853 - DNA, 396 bp, Oryza sativa
  Clone ID: uC-osrocyp016a08b1
tggacccggcggcggcggggcagtcctccgccgtgccgttgttcgggtcggcctcgcaggagtcactcgacttcgaggcgcaccaccagctcagcctcgacgacacggacgccgaggcggcggtgcagccgttcccggcgtgcccgctcaacttcagcgagtacacgccgtgcgaagacaggaagcgcggccggcggttcgagcgcgcgatgctggtgtaccgggagcggcattgccccggcaaggacgaggagatccggtgcctcatcccggcaccgcccaagtacaggacgccgttcaagtggccgcagagcagggacttcgcctggttcaacaacatcccccacaaggagctcagcatcgagaaagccgtgcagaactggatccaggtggacg

SEQ ID NO: 37854 - DNA, 446 bp, Oryza sativa
  Clone ID: uC-osrocyp016a09b1
ctgctctcccttagtgttctcctttttggtgttggagttttaactgtgactgacctgcagctcaatgctgtgggatctgtcctgtctttgctcgcaatcattacaacctgcattgctcaaatcatgacaaacacaattcagaagaaattcaaggtatcttcaacacagctgctgtaccaatcatgcccataccaagcattgaccttgttcatcgtcggccctttccttgatgggtttttgactaaccaaaatgtctttgcttttgattacacatctcaagttgtgtttttcattgtgctgtcatgcttgatatcagtctcagtgaaacttcagcacttttcttgtgattgggaaaacctcttctgtaacttaccaagtgcttggccatctcaagacatgcttggttcttgcctttggctatgttttgcttcacgatccatttaact

SEQ ID NO: 37855 - DNA, 393 bp, Oryza sativa
  Clone ID: uC-osrocyp016a10b1
actcactccacgcaggctccgcagccaagatcaaggcttcgaccgggaagaacacattctcgcctgaagaaacgagaggaagcagcaaatcgccggccgattcgctcgtaggaatccccaccatccaatccaccggcggcggggggccctcaccctaggggagggggtgggtagcgcggctggtggccggaaccctatcctatccgatcggcgtgggcgagaccacctcctctttttgccgccacgcgcgcggggcggcggccgtctggttttgcggggcggatgccggtgggcgcgcgcgcccactggtctggcaggcatcggcggcgccttgcttcgcgtgccctcgcgctcccggctgaggcggcggccgttcagctactaatgaggccg

SEQ ID NO: 37856 - DNA, 364 bp, Oryza sativa
  Clone ID: uC-osrocyp016a12b1
tgctgagcaactgcgcgaggcgactccacagactgtgagagttctaatccaggcctaccagacttcatccatggtcgacatgctgcttgcgcttcgcagaccaatgaagccggttccttaaacccctccacagatgaggcatgtgaagtcgtttccagcgcgcccgcagcctatgtaactgcaatttctagtgtttggcaacgccaataaggatgggttttgctaaagcctagatgtgaattcggggaaagtagtagcgtcagatgaattcttggctttgtggcgggaggaccggacggtggtataggttgtggggcataaggtggattttaacggtgtaaattaatttgggtgtggtgggggt

SEQ ID NO: 37857 - DNA, 367 bp, Oryza sativa
  Clone ID: uC-osrocyp016b01b1
ttaacaatactacccgcactctgcttctctgttgctttctctagatgagcattctggatacgacgtactacagcggtagggtcagctctgcgctgagcagagacgaggtagaggtcgaccccgacggcatcagcggaggagaggaagccaatcggcccgaaacggaaggcgacggctacaagtgtcttgcacagcaacaagtcctgcatgatggtcgaagagccgacagcaacatagaacagtgactctgctcatgctgtggcatctgcaaatgctgaccacggcacgattgctgctaccaagctgaccatacatcatactttgaaaggcgccacatggacagaatgatctgcccgtggaactggaa

SEQ ID NO: 37858 - DNA, 520 bp, Oryza sativa
  Clone ID: uC-osrocyp016b02b1
tctgcggcgtaaaagaaagagaaatctcccgggggcgtctcgtcgtctcctccgctccgctccttgcgccaagacgagtcgcggctgccgatctccatctgcgcgagcagagcagagcagagcagggtatcctggacctgggcccactccttgtgattaagggattgtcccggggagcttggtgcacacagcgatggagccacgcatcggcaacaagttccgtgttggccgcaagctggggagtggctccttcggggagatctaccttggtaccaatgttcagaccaacgaggaggtcgctattaagctcgaaaatgtgaagaccaagcatccacaactgctgtatgagtcgaagctgtacagaatactccagggaggaactggaattccaaatgttaagtggctcggtgtccagggcgattacaatgttttgttaatggacttactaggaccaaaccttgaagatcttatcagtttttggaacaggaagctgtctctaaaaactgccttgatgcttgct

SEQ ID NO: 37859 - DNA, 149 bp, Oryza sativa
  Clone ID: uC-osrocyp016b03b1
actgagaagtcgctgttggccgaggccaggaggaggaggcggaagaaggagtttgcgagttggcgttatgaggcgttggattagatcacaggaatgccctcttgtgggagcgcacgacaggggcacgctgtgacacctgctgaacacca

SEQ ID NO: 37860 - DNA, 380 bp, Oryza sativa
  Clone ID: uC-osrocyp016b04b1
cagactgagagagattatccgggtgtgcgccaccggagccgccgggtacattgcgacatggctcgccaagaatctcctcggcagaggctgcgtcgtccatgcaaccctggcgagagctcggggatgagaagaagacggcgctgctgaagaggatgcccggcgcggcggagcggctggagctgttcgaggcggacatgtgcgacgccgccacctttgagcccgccatcaccggatgcgagctcgtcttactcatcgacaccccgctgcagcacgaccccagcagcaccaaggacacgaacaacgctgaagcggccgcggacgcgatgcgcgacatcctgcatcagagctagcgatccaagacagtgcgccatgtcatccac

SEQ ID NO: 37861 - DNA, 442 bp, Oryza sativa
  Clone ID: uC-osrocyp016b07b1
gagaaagcttgttgtaatagcatgaagctttgaaggaaaagcttgatcaggagtatcatcagctggcagaaagaaaaagggaattccagcaggaaattgatgcactcgagacacacaatgagcgtatcaaagggtacctgaattcaaagaagggcgagaagcttaatgaactacaggaaaaacatactcagttgcagtctgatctacagaaaagtaaggaaagaaaagaagaaaaatcggcggagttaagcaagaacaaagagctattgaagagccaagatcagttgaaaagaaacattgatgacaaccttaactacaggagaacaaaggatgaagtggaacgacttactcatgaaatagaattacttgaggacaaaatactttccattggcagcctgtctactatagaagcggatcttaagcaacactcacaagaaaaaga

SEQ ID NO: 37862 - DNA, 493 bp, Oryza sativa
  Clone ID: uC-osrocyp016b08b1
tctcgagggctgcctccatcgtcatcgatccatctccgtatctctcaccgaccccaaatcgcacagctccagctcctcctcgatccccgtcgcgatcggcgagatggccacggcgatcccgcagcggcagctcttcgtcgccggcgagtggcgcgcccccgcgctcggccgccgcctccccgtcgtcaaccccgccaccgagtcccccatcggcgagatcccggcgggcacggcggaggacgtggacgcggcggtggcggcggcgcgggaggcgctgaagaggaaccggggccgcgactgggcgcgcgcgccgggcgccgtccgggccaagtacctccgcgcaatcgcggccaagataatcgagaggaaatctgagctggctagactagagacgcttgattgtgggaagcctcttgatgaagcagcatgggacatggacgatgttgctggatgctttgagtactttgcagatcttgcagaatccttggacaaa

SEQ ID NO: 37863 - DNA, 183 bp, Oryza sativa
  Clone ID: uC-osrocyp016b10b1
gcgtcactccccacctcaccttgcctttttagagagagaaagataagagaacgagctcgacgaggagagagagagagaggagtcacctcacctgcaccctgagctaaagagagagagagagagagagagaagaggaggagggttgtggaggaggaggccgggagggggagatggagaggacat

SEQ ID NO: 37864 - DNA, 364 bp, Oryza sativa
  Clone ID: uC-osrocyp016b12b1
ccactctggtggctggtccaaagactccatgtccatttagttgaccatccttctagttagcgtcctcttgtgttcttggagttggagctggactgcccatgtgagccatgttgcagattgggctagctttgggagcaagagagtggtagatcttcttcttgccagatttattgtagatacaatacaatcccatttcttgttcagatttcttggtgaaaattcctagctagatccatactttctccaggtagtgtgtaaagaagaagaggccttgcgaatcttatcttgggaaaaagaggtatatgcatccacccatctgtgtgctgcacttgattggcggcaatggccatggagccgacggtga

SEQ ID NO: 37865 - DNA, 392 bp, Oryza sativa
  Clone ID: uC-osrocyp016c01b1
tcctgataaggagctcaagggctgaggggtcgtttttcttggacactgaaagcacaagcagagagggagagggagagagagggaagaagaaggtgagggagctgggcaatggcgacttcctttcaggggacgacgaccaagtgcatggcgtgcgacaagacggtgtacctggtcgacaagctcaccgtcgacaacagggtctaccacaaggcctgcttccggtgccaccattgcaagggcaccctcaagctcgcgaactacaactcgtttgaaggagtgctctactgcaggcctcactctgatcagctgttcaagaagactggaagtttagacaagagctttgaaggaactccaaaagttgtcaagccagaaaaaacagctgagaatgagaa

SEQ ID NO: 37866 - DNA, 542 bp, Oryza sativa
  unsure (1)..(542): unsure at all n locations
  Clone ID: uC-osrocyp016c02b1
attccttttcctttctatcttctcccctcccttctttttccacccactcgaattctcccttcacattctagttctagctccgcacctttgctgcgcgcgcggatttggttcagggtttggaaatggcaatagacgatgaatcgccgctcagaatcaataccaccagaggcggcgccatgggaggaggaggggagtgcgactgggcggagaaccagcggcggccgccatggctgaagccgctgctggcgactagcttcttcggccaatgcaagctgcacgcggactcgcacaagagcgagtgcaacatgtactgcctcgactgcatgaacggcgcgctctgctcgcagtgcctctcctaccaccgngaccaccacgccatccagatacggaggtcctcctaccacgacgtgatccgggtgtcggagatacaaaaagtgctggacatcaccggcgtgcagacgtacatcataaacagcgcgcgcgtcgtgtttctcacgagcgcccccagccgaggcccggcagggcgtcaccacacctgcgag

SEQ ID NO: 37867 - DNA, 534 bp, Oryza sativa
  Clone ID: uC-osrocyp016c03b1
taggtgatgttatgaaggttctcaggttgagttaccaacacttgcccatccacttgcaactatgcttcagcttctgcagcttattcccgaagaactggcgttttgatcccaggaggcttacagacatgtggatttcacagggttttgttcagaaggaggatgagtctgacaatgacatgaatgttgaagatgttgcgaagggctactttaatgatcttgtacaaagatcattcttcgagagatctttgttagaccttccaatagagtatgtcatgcatgacttgatcaatgaccttgccaggaatgtttcaaaggacgagtataccagaattgagagtgagaagcaaaaggagatcccaccaaacattcgccatttatctatatctgcacatttgtgggccggtatgaagaaaacagagatgaaaaacctgcgcacgttacttgtttggagcaaatcatggccttgctggaaattgtccccttcaaatgatgtgttcaagaaatcccaatacattcgagtgctagatttgactg

SEQ ID NO: 37868 - DNA, 467 bp, Oryza sativa
  unsure (1)..(467): unsure at all n locations
  Clone ID: uC-osrocyp016c04b1
gttctgccgaatttttcgctggtcatcaatcttccctttgttgacataccctgcataagtatatacaacaaacatataactttttgcaaggtaagaaggagtttttatctgttcttgatgatagactcctagagaagttgtcctagttgtgtagatgttgttgctcatcatccctgagcacctcctctctagatttatgactggcccagccataacccagcttgttcagtccttctctgttgtcttcctctactggttctatgtcttctcagtaagctccctgtagttgtagccttttgaaattacaagacttatttatacaacataattatcaaggcatccacatataaactacaaggnatatatatatatatatatatatncacaaaaagaaaaggaataagagggagtaaaaattgtgccggtgcgaaaaaaaaaattgtgagaggtgaccatgtcgagtggga

SEQ ID NO: 37869 - DNA, 357 bp, Oryza sativa
  Clone ID: uC-osrocyp016c05b1
cctgctttgaggcgggttgtcttctcctccccctgtttaccttttcctcctcggctcggttccgcggttcgtctagggtttagtgggttgagatggcggcgccggatgtcgagtaccgctgcttcgacggcggcctcgcctgggccaccgacgaccgctccctcgaggccgccttctccacctacggcgagatcctcgactccaagatcatcaacgacagggagacggggaggtcacgtgggtttggcttcgtcaccttctcctccgagcagtcgatgcgcgacgccatcgagggcatgaacggcaaggagctcgacggccgcaacatcaccgtcaatgaggcccagtcccgccgct

SEQ ID NO: 37870 - DNA, 322 bp, Oryza sativa
  Clone ID: uC-osrocyp016c11b1
ctacatatctggccgggatcgctgcccaagggccttcattagctcgatctgtcgcggaacaagatcgccaacatcgaggggctccgggagctgaccaagctgcgcgttctcaacctcagctacaaccggatctcgcgcatcggccacgggctgtcggtgcgcacggcgctgagggagctgtacctggcggggaacaagatcagcgacgtggaggggctgcaccggctgctgaagctggcggtgctggacctggggttcaacaaggtcaccacggcgagggcgctgggccagctggtggccaactaccactccctccgggccc

SEQ ID NO: 37871 - DNA, 417 bp, Oryza sativa
  Clone ID: uC-osrocyp016c12b1
gttgatatcccaggagttttatatcccacattcaatttcgttggccgcatccttggtcctagaggaaattctttgaagcgagtggaagcaaccaccgactgccgagtgcttataagaggtcggggaagcattaaagatccagctcgggaggacatgatgcgagggaaaccaggttatgaacatctgaatgaacccctgcacatattggttgaggcagaactgcctgttgaaattattgatacccgtctgatccaagcccgtgatatccttgaagatctgctgaagcctgtggacgagtctcaggacttcttcaagaagcagcagctccgggaactcgccatgctcaatggcaccctccgtgaagaagggatgcaaagatctggctcagctttccctttccacaacagccttggaatg

SEQ ID NO: 37872 - DNA, 506 bp, Oryza sativa
  Clone ID: uC-osrocyp016d01b1
tactggctttgtgtggagcctgcagctgttgagaagcctattactctgaagccaggtgaagagtggaaaggaagacttgcactctcagctgttccttccagttactgtagtgggcagttagatccattgaaggtccttcaaggttgagaattctcatttctgcgtcttgtacaggagcacctcattgcccttaatatttgatgctgggctggcgcgcgaccttttgtttctttgccattttaaatcccccgtgcttcgttctttttttgtacctagaagcgagtagtagggcacctccgaaataacagactgtgccacctgcttcgaccctagagcggatcatctccttggtgaatgaattcgaccagtggacacaagccattcgtgccctggtgatatgattcatcgtccatattccaggaaatattcgccatgctgcataaggtacgtagcattctcagttaatctgtagctatgatcattgcgagcaattgaattacactgct

SEQ ID NO: 37873 - DNA, 383 bp, Oryza sativa
  Clone ID: uC-osrocyp016d04b1
actgctcctccgcaaaccctagccgccggcgccggcgttctctagagaaacatcagcatccatggcgggcaagggcgagggtccgggcatgggcatcgaccttggcacgacctactcgtgcgtgggcgttcggcagcacgaccgcgtggagatcatcgccaacgaccagggcaaccgcaccaccccctcctacgtcggcttgaccgactccgagaggctcatcggagatgctgccaagaaccaggtcgccatgaaccccatcaacaccgtcttcgatgccaagcgtgtcattggcaggaggtttagcgatgcttctgttcagagtgacactaagctctggcccttcaaggcgattgctggacctggtgacaagcctatgattg

SEQ ID NO: 37874 - DNA, 274 bp, Oryza sativa
  Clone ID: uC-osrocyp016d05b1
tactgatagcagccgcccaggagcgtggaaggttacacttattaccacgttaaaacccatccccaaccatgatgctgctgcgccaccaccaccaccgacacagtggagccggcaccaccagcatcagctgcaggggcggcggctgatggtctagaggagggcacacaccaccaccgacaccgacacgctcgccatgccaccaagcgaggcggcggcgtgaggcgacgcacatctgaacggacgaggaataggaagaagggacgaggaggcgagg

SEQ ID NO: 37875 - DNA, 413 bp, Oryza sativa
  Clone ID: uC-osrocyp016d06b1
gctctcgcttcttctcctcccccgtcttcccttcgcgcgcgccacccccacacacgcgaccatggcggcagcggcaggaggcgcagcgcgggcgctgtcgcaggcggagcaggacgtgcagatgatgctcgccgccgacgtccacctcggcaccaagaactgcgacttccagatggagcgctacgtctacaagcgccgctccgatggtatctacatcatcaacctcggcaagacatgggagaagctgcagctcgcggcgagggtgattgttgccattgagaacccccaggacatcattgtccagtcggcccgcccctacggccagcgcgccgtcctcaagttcgcgcagtacactggcgcgcacgccattgctggaaggcatacgcctggtacatttaccaatcagctccaga

SEQ ID NO: 37876 - DNA, 492 bp, Oryza sativa
  Clone ID: uC-osrocyp016d07b1
tcttgaggcgaggcgaggcgaggagaggagaggaggaggaggagggaggagaagatgagagagatcatcagcatccacatcggccaggccgggatccaggtcggcaacgcgtgctgggagctctactgcctcgagcacggcatcgagcccgatggcaccatgcccagtgatacaacggttggcgtcgcacatgatgcgttcaacactttcttcagcgagacaggcgctggcaagcatgtgcccagggccatctttgtcgacctggagcccactgtcatcgacgaggtgcgcactgggtcgtaccgacagctcttccaccctgagcagctcatctctgggaaggaggatgccgctaacaactttgcccgtggccattacactgttggaaaggagatcgtagatctatgcctggaccgtgtgcgccagttggcagacaactgcactgggctgcagggattcttggtgtccatgctgctggtgtggaactggatc

SEQ ID NO: 37877 - DNA, 418 bp, Oryza sativa
  Clone ID: uC-osrocyp016d10b1
tgtcgtcggggagcccgcggcggctagggttttgattgatttgtcgccggcgacgcgccgcccgccatggagagggagctgctggagacgttcgaggccgccaagaaggcggccgacgcggcggccggggcggacgactccccggaggccgaccgctgcctcgacgcgatgcggcggctgcgcggtctccgcgtcaccaccgacgtcctcgtctccacgcaggttggaaaacgtcttcgttaccttactaagcaccctcactcagacatacaatccatggctacagatcttctggggtactggaaaaaggttgttatcgaagaaggaaagaaaaatggtaccacagaaaatgttggatcaaccaactcaaccgccagagctgaaaaggctcagcccatgaaggttgataagagttctg

SEQ ID NO: 37878 - DNA, 430 bp, Oryza sativa
  Clone ID: uC-osrocyp016d12b1
gaattcacaggtattccatgttgccatgtactgaaagttcttgaggtaagaaatattaaagaacttccaccacactacattttgaaaagatggagaaaggatgctcagagtgaatctccgagggagaactatggttttgaagctgtagatgaagatcccaggttcttgttgtctaaacgatacagcatgttgtatcgaacgttctacaaaattgcagcaaaagctgccgaaaatattgaagcttatacatacatggagagccaatgtgatcagtttatagagcaagttgaacttctattgcaagcaaagttacatgataaatcttcattgagcactatactgaaagttcaacagccaaatttgttttcgaatgaagccagcaacagtgaaactcgcagagtaagtagtaagaaaattaacaatgtagata

SEQ ID NO: 37879 - DNA, 442 bp, Oryza sativa
  Clone ID: uC-osrocyp016e01b1
cactaagtacagtctttagatcgacaaacataatctaattaatcaaaatggcttcttccaagcctctccttcttgggcttctcctgtccatcacttgcctcttgcaggtcctactggcggcggcgaaccctcagccgccgccgccgccgtcgtgcgacaagtccgacaaggagctgaggttcatgttctcgcagtggatggccaagtacgcgaagcactactcgtgcccggaggagcaggagaagcggtaccaggtgtggaagggcaacaccaacttcatcggcgcgttccgcagccagacccagctctccttcggcgttggcgccttcgcgccgcagaccatcaccgactccgtcgtcggcatgaacaggttcggagacctcacctccaccgagttcgtccagcagttcaccgtgttcaacgccttcggattccactcccc

SEQ ID NO: 37880 - DNA, 498 bp, Oryza sativa
  Clone ID: uC-osrocyp016e02b1
ggtattgctgtactgaaccgcggattcaacatctcctgtgttggtatcattgtctatcgtgggctgtactttggaatgtatgattctctcaagccagtcgttcttgttggcaaccttcaggataacttccttgccagcttcttacttggttggggcattaccattggtgctggccttgcttcatacccaatcgacactgttcgtcgtcggatgatgatgacatctggtgaggctgtcaagtacaacagctccttggatgcgttcaagcagattgttgcgaatgagggtgcgaagtcactctttaagggcgctggtgctaacattctgcgtgctgtcgctggtgctggtgtgcttgctggatatgacaagctgcaggtggccgtttttgttaagaagtacggttctggaggtggctaacactagatgatgatgataagccttggggaactattgacatattaggtgcttttcgacgctggtgcgtttaaataaaattaa

SEQ ID NO: 37881 - DNA, 537 bp, Oryza sativa
  Clone ID: uC-osrocyp016e03b1
tgatacaacatcaagctctacgtccgccgagtcttcatcatggacaactgtgaggagctgatccctgagtggctgagctttgtcaagggcattgttgactccgaggatcttcccctcaacatctcccgtgagatgctgcagcagaacaagattctcaaggtcatcaggaagaaccttgtcaagaagtgcgttgagctcttcttcgagattgctgagaacaaggaagactacaacaagttctatgaagccttctccaagaacctcaagctcggtatccacgaggactccaccaacagaaacaagattgccgagctcctgaggtaccactccaccaagagcggcgatgagctgaccagcctcaaggattacctgacgaggatgaaggaaggccagaacgacatatactacatcaccggcgagagcaagaaggccgtggagaactccccctttttgagaagctgaagaagaagggttacgaggtcctctacatggttgatgccatcgacgagtatgctgatggccagctcagggagttga

SEQ ID NO: 37882 - DNA, 368 bp, Oryza sativa
  Clone ID: uC-osrocyp016e04b1
cccagggcgtccgtcgtgctcaacgaccccgccgccgccgagggcgacatgtcggcgctcgtcgacgccatcgcgctcggcctcttgtgcgtcgttgccacgctcggcgccgtgcccgtcatcaggtgcgctggcggcgggccggcggagatggtcgccgccgcgcttgacgcccggctccgcgatcaccttatcgccaagcccaatctcttcactgaggccgcgtccacagcagtagcatccttccagcgggcactcctgtgcctgattgataggaaattccagctttcggtggggatccagcatgattggagctaccggccggtggtccacgacgtgctcggcctgaagtcgaacaaactgaagtt

SEQ ID NO: 37883 - DNA, 357 bp, Oryza sativa
  Clone ID: uC-osrocyp016e05b1
actggcaagctctcccctgtacccacccaccggcaccgtggatactaccccgccgccgctatcgccgccgacatcacgagctactagtagctaccgggctatcgccgccgcttgccctgatgccgcatcaggaggtcgccgaccagatcgccggcgcggcggcggagcggggcctgcagaggagcggctcggccagccgcctcaacgcgggggcgccggagttcgtgccgcgggacgccgcccccgtggtgccgccgccgacgccgacggtgatccgtgtgttcgccgaggcgcctcccccgccgcgggcggcctttttcgcgccgccgccgacggatcaacgggcgaacgagtact

SEQ ID NO: 37884 - DNA, 491 bp, Oryza sativa
  Clone ID: uC-osrocyp016e07b1
tttttcttgtctctgaggcctgagctcagttctgactgccgagctgagacctcaggtcttcttcttcctccaatctctcacacgaaagaagaaagtttttaggaagctaggagcagcacacagtccttctctccctctcttcttgctatacagtgtgtattcaagagtgcttctgttcctgaaaattaaacaaattgataataattttcaaggaagtatgaaactaatagctcttgggttgttattattggggtatatacaatattttgctacacctgattccgaagtcatagcattgtatgaaataaggacaatgctcaatgacagtcgcggcgtactgaatggctggaataataatcaagttagtccctgctattttccttccatcagttgtaatcaagatcaaaaagtcatttcaataactctgagctcatcaggattatctggattcttgtcacccagctttggaaagctactatttttacaacagc

SEQ ID NO: 37885 - DNA, 506 bp, Oryza sativa
  Clone ID: uC-osrocyp016e08b1
tctctcgctgcggcgccaccccctcctcgccgtggacctcggggtgggagcgtggcggcctgcacagccggagctcagctcgcccgccgcgtcggatggacgccgcctcctgctgccgcgtcttctcgacgcagagatgccgcttcccgctgcggaggctggcgccgccgatttcgcggcggccgttcggcacggagtcgacgagtgagctgttcgccgcgtcgacctcgaagcggcgctcccgggggcccgtcatggcggcgaagaaggccgccgagggtgctaaacaagaagaggggaaatacaaacacacggtggatctaccaaagacaacttttggcttgagagctaattctgttgtgcgggagccggagctccagaagttgtgggaggagaaccaggtgctcaagagggtatcagaaaggaacactggggctacatttgttctccatgaaggtcctccttatgctaatggtgatctttatatgggccatgcactgaataaa

SEQ ID NO: 37886 - DNA, 434 bp, Oryza sativa
  Clone ID: uC-osrocyp016e10b1
tcgagacgttcgccttccaggccgagatcaaccagctgttgtccctcatcatcaacaccttctactccaacaaggagatcttcctccgcgagctcatctacaactcctccgatgcattggataagactaggttcgagagcctcacggacaagagcaagctcgatgcgcagccggagctgttcatccacattgtccccgacaaggctagcaacaccctgtcgatcatcgacagtggtgtcggcatgaccaagtcggacctcgtcaacaacctcggtaccatcgccaggtcggggaccaaggagttcatggaggcgcttgctgctggtgctgatgtgtccatgattgggcagtttggtgtcgggttctactccgcctaccttgttgctgagagggctggtgtgaccaccaagcacaacgacgacgagcagtatgtg

SEQ ID NO: 37887 - DNA, 401 bp, Oryza sativa
  Clone ID: uC-osrocyp016e12b1
atcgccttcctccaagtactccatctccagcctctaattgattagatcttgatttctttttcatcctcctactagtttctttcttgtttctttggaatttttttgatctcttgaagagatccggttcttggattaagttttggacaagaaccgtactgtgaccatgtcgtcgccttcgcgccggagctccagcccggagagcaacaccagcggcggcggcggtggcgccgactagcggaagaggaagaggatgctgtcgaacagggagtcggcgaggcggtccatggcgaggaagcagcagaggctggaggagctgatcgccgaggcggcgcgccttcaggccgagaacgcgcgcgtcgaggcgcacatcggggcctacgccggggagctgaacaaggtcc

SEQ ID NO: 37888 - DNA, 151 bp, Oryza sativa
  Clone ID: uC-osrocyp016f01b1
tagctttggagctcccatgggcgcacgccccgggcgctagctgaagcagccaggctggggccccacccacgcagccgccggcgccggcgccgccgtttcccatgaggcagccggacctgctctcgacgcagcagctctccccgtacccgga

SEQ ID NO: 37889 - DNA, 316 bp, Oryza sativa
  Clone ID: uC-osrocyp016f02b1
tttttggaagaactttactctcttgatgtggactctattagtgaactgcggccagtttatgggctaatttttctcttcaagtggatggctggggaaaaggatgaacggcctgtcgtcaaagatccaaacccaaaccttttctttgctagccaggtcatccctaatgcatgtgctactcaagctattctgtcaatcctcatgaatcgcccagaaattgacataggtccagaactatccaacttgaaggaattcacaggagcttttgcacctgacatgaagggccttgctattaacaacagtgattctattcgcacag

SEQ ID NO: 37890 - DNA, 207 bp, Oryza sativa
  Clone ID: uC-osrocyp016f07b1
ctacgcgtggggcctggcccctcaggtgaaggtcagtctgcttggaagaacaaagaatatcaaccaaaggttttaacattggatgttgaagctgctttgccttcatcaaaacgtcttcatcgtgccttagaagctatgtccgctaatgttgctgaaactaataatctgcctgaagtgacagggtcaaagcaattgattccaaatggt

SEQ ID NO: 37891 - DNA, 227 bp, Oryza sativa
  Clone ID: uC-osrocyp016f10b1
ttatgaagaagaagaagaagaagacgcgaagctcggggcgcggccattctccgatcccgagctcgccttccaagccgccgcattcccccgccgttgatgcgggtggaggccgggggcctcccggagcttgggtcgggggcgagggaccccgccggcgcgcggcggcagcggcggcggcgtcagcagcggaggccggcgatgccgttggacggggcggcgacataaac

SEQ ID NO: 37892 - DNA, 510 bp, Oryza sativa
  Clone ID: uC-osrocyp016f11b1
ttcttaatttgcaccacgtagctctaagatgtccacgagagtttggtttatccaacttcttttgctggtgatccaactgctcaccgtcctcttactcgttgccgcctccggtagaggctacagctgctatgtatgccaacattgcgatccccataattgtccccacaagaaatgaatctttacatctggtctggtaatctacttgaactcttccgtctttgctttgtcttcagtaatcaaccggagaaaatttttggttgcaaatgttatgagttttgtttcgtttaatgtttcttttaaaagaactttaatatatcagaacttagtcaattggtataacttgtgtgcttcaattttgtatatttgtttgaccaaaggaaatggcatctttattaaatgcagttttgatcaaactggccaaacctagctttaatcaataatgggtatattgaaaagtataagattacctgaaaaattaagatacctcttaagattaagattttatgtgct

SEQ ID NO: 37893 - DNA, 539 bp, Oryza sativa
  Clone ID: uC-osrocyp016g01b1
tgataacactggtaaaaaaaaaaggagagagagaggtgagacaggtcgcttcctgcttccattggagaagaggagaggagaggagaggagaccgagccggcggcagcggcgacgaggagagggagctgatcgggcggtccccccctttgccgaggggacgccggcggcctccgggttgggtccacttggcagcggtgagcggcggcgggggatggcggaggcgcggctgctgcggcggcggcggctgtgcttggcggtggcggtcgtgtgggtggtggcggtggccgtgagccgggtcggcgccaacacggagggtgatgccctatatagtctgcgccaaagtctgaaagatgctaacaatgtgctgcagagttgggaacccactctggtcaatccatgcacatggttccatgtaacttgtaaccctgacaacagcgtgatcagagttgatcttggaaatgcacaactgtcaggtgcattggttccccaagttgggcagttgaataaattgaatatttggagctttacaagaacaacat

SEQ ID NO: 37894 - DNA, 427 bp, Oryza sativa
  Clone ID: uC-osrocyp016g03b1
tctgtgaagatcacttttcctgtttccctcaagcagcctggtccccggaatggagccatccagtgcttcattaaaagggataaatctacccaaacttacaacctatatctatgtcttagctcagctgtgctcgttgaaagtggcaagttccttttatcggcgaaaagatactcccgtgcaacctgtacagaatatacaatatttatgagtgctgacaatacatctaggtcaagcaacatgtacattggaaaattgaggtcaaatcttctcggaacaaagtttgtaatatatgatacccaacctccatgcaacacagccaatgtttcacagtcagggaaaacaagccgtaggttctactccaggaaggtgtcgccaaagaaccctttcagcacctacagcatagcttaagtttcatatgaactgaatg

SEQ ID NO: 37895 - DNA, 518 bp, Oryza sativa
  Clone ID: uC-osrocyp016g04b1
tctctcgacattccggaggagaggtataccaatgcttttctcgggtacgggcctgaggactcgcattttgttgtggagctcacttacaattatggtgtggaaagttatgatatcgggactgctttcggtcacttcgggattgctgtcgaggacgttgcaaaaacagtagatctcattaaagccaagggaggaacggtaacaagagaaccaggacctgtaaaaggtggaaagtctgtaattgcttttattgaagatcctgatggttacaaatttgagcttatagaaagaggtcctacacctgagcctttatgccaggtaatgcttcgagtgggagatcttgatcatgctatcaatttctatgagaaggcatttggcatggaacttttccggaaacgagacaatccccaatacaagtatactattgcaatgatgggatatggtcctgaagacaaaaatggctgtctggagttgacctacaactattgtgtcaaggcatatgataaaagaaatgcttatgc

SEQ ID NO: 37896 - DNA, 439 bp, Oryza sativa
  Clone ID: uC-osrocyp016g05b1
ttttagttcttgtggtggaatcattggtaaaggagggtcaacaatcaagtcattcattgaagactcacatgctggaatcaagatttcaccacaggataacaattttgttggtttgcatgatagactcgttactgtcacaggacccttggaccatcagatgcgtgcaatatatttgatattaagcaagttatcggaggacgttcactacccacctaatctgagttccccatttccatatgcaggccttggtttccctagttaccctggtgttcctgttgggtatatgatcccacaggtgccgtataataatgctgtgaactatggacctaatgggtatggaggaaggtaccaaaacaacaagcccagtacacctatgagatcacctgctaacaatgatgcccaagattctctcactattgttattgcttgtgaacatatt

SEQ ID NO: 37897 - DNA, 421 bp, Oryza sativa
  Clone ID: uC-osrocyp016g07b1
gatcaaatgaaactacttcctttattgcgtatgcgtggtgtgaagatattgagttctctggtattacacagcttgagcctgcaacaatcgcgcctcagtcaggtttcgagattgacgaagcttatgctaaaggatttatttccaaaccagctacagctattgctagttttgcaggttagcttgaaaatgtaccagtgataggtaagtatgctaccgctactgctactatagcaagagcgacagctgatgctgctaggaattttggatattgtcgtccacctgtgactgagaatgcagctccccgtagaccgacggttgtttctaacatggcattaaccaacacgccagataatgttgaaaaattaaccactgatgataagcaagagcttattatagatccaagttttatgaattcaccagg

SEQ ID NO: 37898 - DNA, 72 bp, Oryza sativa
  Clone ID: uC-osrocyp016g08b1
gtcattctctctctcacgcgacagcggctgggggggggttgtgcatagcttgctacatacgcccagaggcgc

SEQ ID NO: 37899 - DNA, 525 bp, Oryza sativa
  Clone ID: uC-osrocyp016g11b1
atctcaccatcccatttcactcttctcgactcccagacgacgcttgctgctgcctttcgtcaaccccccacttctccttccccgccgccgctcgccgccatggatgaggagtacgacgtgatcgtgctggggacgggcctcaaggagtgcatcctcagcggcctcctctccgtcgacggcctcaaggtcttgcacatggataggaatgactactatggaggagattccacctcgctcaaccttaaccagctgtggaagaggtttagaggggaagacaaacccccggctcatctgggctcaagcaaagattacaatgtagatatggtcccaaagtttatgatggcaaatgggacactggttaggaccctcattcacactgatgtgacaaagtatttgtcattcaaagctgtcgatggaagctatgtcttcagcaaagggaagattcacaaggtacctgctactgacatggaggctctgaagtcccctttgatgggtccttttgagaagcgcagaacaaggaacttc

SEQ ID NO: 37900 - DNA, 484 bp, Oryza sativa
  Clone ID: uC-osrocyp016g12b1
ttcttcttctagcgagaaagcaacagcggaggagccaaacgcgagatctttggaggctccgccggagcggggaaccgacagattagcggaggagagatggccgcggcggcggcggcgaaggggaggacggagatggaggtcggagcggacggcgtctccgtcatcaccatctgcaacccgcccgtacaactcgctctccatcgatgtattgctaagcttaaaggaaaactatgctgaagctcttcggaggaatgatgtgaaagctattgttgttacagggaaaggaggaaaattttctggaggatttgatattagctcctttggtagtgttcagggtggcaaagttgaacagccaaaggctggttacatatcaatagatattattactgataccctaaaagctgcaacaaagccatcagtggctgcaattgatggtcttgctcttggttgaggattggaaagtgctatggcatgccatgcacgc

SEQ ID NO: 37901 - DNA, 242 bp, Oryza sativa
  Clone ID: uC-osrocyp016h01b1
tttttactctccctcctctagtcctcttcttcttctactttgtacgcgccactcactctccgagcttgacggcggcggcggcggcggaggtcgtcgagtggtggtcggggagatgggtcaagatgaggtggaggtaggtgcggagaagaaggatcaagaactaccggaggtggaggtggtccacgaggaggaagaggagggatccaagaaggcggcggggggctgcgactactgcggcgacg

SEQ ID NO: 37902 - DNA, 507 bp, Oryza sativa
  Clone ID: uC-osrocyp016h02b1
tcgtacaccaaaaccttatttcttccccatgtccaggctggtctccgatcacggcgcgatcggaatgtaaagctgctctgaatggaagtgagtaatactactactgcctaatcctagaatactagcagcatagaaaaagagaatagtggaatataggaaaagagtggagaagttgcagcatagtgttagtttcagtcacccccctttttttttactttccttttctttttgatttttcaagaagatagctttattaaaccataaagagaagaaagaggatgccctggcctccagaagagaatcagcagcagcagcatcaatgaagccaccaacaaccacaccaccaatgttttaaaatgcagtgccattcagatgaaaatttagagccccttctattactaccatatcatatcaccttaattaatcttaagtactattaccacccaccgacccaccaccattgatgaattacccctcaaagctcttgataagctaccaccaaaatag

SEQ ID NO: 37903 - DNA, 475 bp, Oryza sativa
  Clone ID: uC-osrocyp016h05b1
tcgccgaaacccactcttggaagtgtcagaatgtccgatttctcttctcagacacatcccggcgagagacgagagacggcgccaccgccgccgccgccgccgccgtgctggactccggctggccaccgcgctccgctcgaggcgtccgcgatggcgtccccagagccgtgcgccgccgccgccgcaccgggaagcgggttcggagccgtggacggcgtcctgcccccggagctgctgctcgaggtcctgctgcgcctccccgccaagccgatctgccgcctccgcgccgtctgccgctcgtggctgtccttcaccacggaccggctcttcctcgccgcctacgccgacgtccaccctcacccgctcctagccgtcttggttgacagcttccccagtcgatgctgcgttgatctcgtggacctgttcggcaacgtcgtcgaggagattctcggcgtgggcggccagtgcaaggtgc

SEQ ID NO: 37904 - DNA, 349 bp, Oryza sativa
  Clone ID: uC-osrocyp016h08b1
ttgctgcagcagcagcagccgcgcccccacacctggcctccttctcggcttggatctcgccgcatcatctgccgccgacgacgacgaagaggaagacgaccgccatggggacggcgagcggtgaccagccggcggaggcgtcgtcggacaagctgcggcacgtggagtccatgtcggagctgccctccggcgccggcaggatctccgggatcaacgccgtcgtcctcggcgagtcactccccggcgaggagcacgacctcgactaccccttcagcgagttctccgccgaccccctcgtgccctcccccaagaagtaccaaaagatgtatgagaggtcaatcaacgaccc

SEQ ID NO: 37905 - DNA, 437 bp, Oryza sativa
  Clone ID: uC-osrocyp016h09b1
caaagacaaagcacgtcttttcagtagccatggcgaagcatctcgcgctgtccgtggccgccgcggtggccgtgtcgtggctggcggcgtcgtcggcggcggcggcagtgttctacgagaagttcgacgtggtgggcgccggccaccacgtgagggtggtgagcgacgacgggaagacgcagcaggtggcgctgactctggaccggagctccgggtccgggttcacctccaaggacacctacctgttcggcgagttcagcgtccagatgaagctcgtcggcggcaactccgccggcaccgtcaccttcttctacctcttctacggcgagggcgacggccacgacgagatcgacatcgagttcatgggcaacctcagcggcaacccctacgtcatgaacaccaacgtctgggctaatggcgacggcaagaaggagcac

SEQ ID NO: 37906 - DNA, 386 bp, Oryza sativa
  Clone ID: uC-osrocyp016h10b1
cgagtctctctcgtcttctacaatggcgagcggcggcggcggcggaggggagggggagacggtgctggtcaccggcgcgagcggcttcatcggctcgtgtctcgttcgccgcctcctcgcccgcggctactccgtccacgccgccgtcctcaaccccgatgacaaggccgagacggaccacctccacgcgctcgccgccgccggcggcggcgagggccgccgactccgcgtgttcccgggcgacctccttgacggagccgccctcctcgacgccgcgcggggctgctccggcgtcttccacctcgcctccccctgcatcgtggaccgcgtcctcgacccccaggcgcagctgatggtgcctgcggaggaggggacgctgaacgtgc

SEQ ID NO: 37907 - DNA, 495 bp, Oryza sativa
  Clone ID: uC-osrocyp016h12b1
tcttatctcctccaggtcctgctccagatcctgcggggcaccccatcctgcgcccagctcctctccttcgtcgggttccgctacccgctcctctccgggccggccgactccgagcagtcgccgtcggtggccttcatgccgctccgctccgagatcccggccgacacggcccctgcgccgacgcccccgccggaatccctgcagcgcctcacggttgtgcttgatttggatgaaactttagtttctgcatatgaatcatccagtcttccagctattgtacgcacccaagctgttgaagctggattacattgctttgacatggagtgcatatccactgagaaggatgttgaagggagaaacaaagtgaatcatgtcaccgtttttgaacgtcctggtttgcacgagttcttgcagacaactagtgaatttgcagatcttattttctttacaggaggtttggaaggttatgcaagacctttaggtgacagaatagat

SEQ ID NO: 37908 - DNA, 231 bp, Oryza sativa
  Clone ID: uC-osrocyp017a01b1
ttccttcgggtggcagcggtgcaggccccaagatcgaggaggtcgattaagctggtggtggtcctacgtgattccggctggaagggagtctgaaccgtgtgatgtggctggcgtcgtgtgatcccctgtgttttttagccgtcgagagtttcgtgcgatgaagcttttgtgagtgtgtatcgccgtatggatttacctgaacttgctctgaaatagtttaagctttgacct

SEQ ID NO: 37909 - DNA, 465 bp, Oryza sativa
  Clone ID: uC-osrocyp017a02b1
ttgttacactgttccaatatacgaaggatttacactcccgcatgctattcttcgactcgatcttgctgggcgtgaccttaccgacaaccttatgaagattctcacagagaggggttactccttcaccacaactgctgagcgggaaattgtcagagacataaaggagaagctcgcctatgttgctcttgattatgaacaggagcttgatactgccaggagtagctcctctattgagaagagctatgagctgcctgacggccaggtcatcaccatcggagcagaaaggttcaggtgcccggaggtgctcttccagccatcttttattggtatggaagctcctggcatccatgaagccacatacaactccatcatgaagtgcgatgttgatattagaaaggatttggaccgtaatgtggtccttagtgggggatctacaatgttccctggtattggtgatcgtatgag

SEQ ID NO: 37910 - DNA, 345 bp, Oryza sativa
  Clone ID: uC-osrocyp017a04b1
tctcctcctcctacttagtttattgttgttggtagctagcgagctcactcctcactcactctctgcccttcctttcctaccatacctctcaattattcctttcctaccatacccctcaattattagtaagatcgattattagtcccagctagttgctagctacaaggaattgaagcaacaagttgtagcacattgcacgagagtcggcaagaactacacaagaaacttaaggaaatagtactagctagctagcaagaatatagatatataatgtcgatcaagcactgcgagcaacacaaggattgcgagcggcagggcctgtaccggcgttgctgcgcggacatc

SEQ ID NO: 37911 - DNA, 468 bp, Oryza sativa
  Clone ID: uC-osrocyp017a05b1
ttccttgcgtccgcggacgcgtgggattgggagctagccgccccttggactgggacactagaatgaggatagcactagatgctgccaggggattggcataccttcatgaggattcttagccttgcgtaatccacagggatttcaaggcttctaatatattgctcgaggatgactctcatgctaaagtgtctgattatggcttggccaaacaggcaccggaaggttgcacaaattatctctcaacacgtgttatgggaacattcgggtatgtagcacccgagtatgcaatgacaggacacttgcttgtaaaaagcgatgtatatagctatggagttgttctacttgaactacttactgagaggaggcctgtggatatgtcacaaccttctgggcaggaggatttagtgacatgggcacgaccaattttacgagataaagatacgctagaagaactagctgatccccagc

SEQ ID NO: 37912 - DNA, 403 bp, Oryza sativa
  Clone ID: uC-osrocyp017a06b1
ctttcccctctctctttctttccgccgccgccgacgccgacgatggcctccagccgctgggtccgaccggaggtgtacccgctgttcgcggcgatgggcgtggccgacggcatctgcggcttccagctcttccgcaacatcaccggcaaccccgaagtcagggttaacaaggtagggagggcagctggagtgctcgagaaccatgaggagggaaggcgctacgcagagcatgggctaagaaactatgtgcgcgacaagacccctgagatcatgccagctatcaacaagttcttgactggacccacaaaatgaagaaggaatttcagtggatgctgatagctctggtattagtactaatgcggattgatttaatggattttacccatttgaagcatacatatgt

SEQ ID NO: 37913 - DNA, 528 bp, Oryza sativa
  Clone ID: uC-osrocyp017a07b1
ttttggcaccaccatcaagaatgccgttgtcactgttcctgcctacttcaatgactcccagaggcaggccaccaaggatgctggagtgattgctggtctcaatgtcatgcgcatcatcaacgagccaactgctgccgctattgcctatggtcttgacaagaaggccaccagcgttggtgagaagaatgtcctcatctttgaccttggaggtggtacctttgatgtttccctccttaccattgaggagggtatctttgaggtcaaggccacagctggtgacacccatcttggtggtgaagattttgacaaccgcatggtcaaccactttgtgcaagaattcaagaggaagaacaagaaggatatcactggcaaccccagggctcttaagaggttgaggacagcttgtgagagggcgaagaggaccctgtcctccactgcccagaccaccattgagatcgattccttgtatgagggcatcgatttctactcaaccatcacccgtgccagtttgaggagctcaacatgatc

SEQ ID NO: 37914 - DNA, 496 bp, Oryza sativa
  Clone ID: uC-osrocyp017a08b1
tttcagattcctcatcagtacgcctttctctcggaggagaggggaaaggaaggcggaggcggggaggatggcgcggagcgtgtcgtacgtgtcggcggcgaagctcctggccatggcgcgcagcaacccccgcgtcgccatcatcgacgtcagggacgaggagaggagctaccaggcgcacatcggggggtcgcaccacttctccagccgcagcttcgcggcgcggctgccggagctcgcgcgtgccaccggcgacaaggacaccgtcgtcttccactgcgccctcagcaaggtgcgaggtccatcgtgtgccaagatgttctccgactatctatctgagaccaaggaagaatcaggaacaaagaacatcatggtgctggaacgtgggttcaatggatgggagctttcgggacaacccgttgccggtgcactgatgccccttgcaaaggcacatgcctacctgaagacctgagttgaactctactcgcttctgatg

SEQ ID NO: 37915 - DNA, 451 bp, Oryza sativa
  unsure (1)..(451): unsure at all n locations
  Clone ID: uC-osrocyp017a09b1
ttcgtttagggtttccctccgccgccgccgcctcccgcatccacgcgcctcctcctcctccgccgccgccgccgccaccgcagcatcagccatggccgaagtggagctcccgcagcaggaggtcaagctcttcagccgctggtccttcgaggacgtccaggtgaacgacatctcgctggcggactacctggcggtgaacccgacgaagcacgcgacgtacctgccgcacacggcggggaggtactcggcgaagaggttccggaaggcgcagtgccccatcgtggagcgcctgaccaactcgctcatgatgcacggccgcaacaacgggaagaagatcatggccgtgcgcatcgtcaagcacgccatggagatcatncacctnctcaccgacgccaaccccattcaggtcatcgtcgacgccatcatcaacagtggcccttgtgaggatgcg

SEQ ID NO: 37916 - DNA, 327 bp, Oryza sativa
  Clone ID: uC-osrocyp017a12b1
tgcttctttgttcacctcggaaaagaaaaaagaacagaaagaaagacgatctagagggagccaaagattgcaagatcgatcgcaaggtaacgtacacgtacaggtgagaggaatcgatgccggccgaatcacgagctgctccgaagtcaggcccgattaggtacgatacggtcgcttgagtgctccgtggccatgtcgaacgcctacgattggctcaggctgctcctcctaattgtcgtcgacggcctactcaacggcatctagccgttccaccggtttgtctgcgccggcatgatgaccgatctcagataccccatgaagcgcaac

SEQ ID NO: 37917 - DNA, 482 bp, Oryza sativa
  Clone ID: uC-osrocyp017b01b1
tatttcccctcgctcgccgtcgactcctccgctcgccgccgccgccgccctcgccgtcgccgtggcctccgccgatccgatcccaatccatcccggcgaccgcgagcagggcgcggggcttcgtcgttcgtcctgctgattccgccgcatcgcgtcgcggttttcatgactgccctatagatcagctcctgattggaaggactgtagttccatgagatagaagggcatattgaagtagaatttggcctttggtgaatctaaatggacagtggcttgggaagaagttcagagacatccttgaaagccttgccatcaatggcaagtaatgcaacaaggaatactgatcctgaccaacagggtgttcgattcagttccatggaccagcctccatgttttgcaagacctggtcaatcgttccctgcttttcctccactctttggggttcagtcttccagcttgtatttacctgatgacattgaagc

SEQ ID NO: 37918 - DNA, 464 bp, Oryza sativa
  Clone ID: uC-osrocyp017b03b1
atgtcaacaacattgttgattagatgcgcaggaaagcccaagctgctcaggaggcgtatgatgaggacgatgagatgcctggaggtgcccagagagttcagtgcgcgcaacagtaagcagagtatgtcatctaggaaactcgtcattggttcacaaatcaacgtcgtcgcaaaggtttgccgtaaatttttggacccaaagatgattgtgctctgtttcccgttgcggcgaacatgaagatagtgaagctgattttacaccccttaagccgggactgtatcccttttgtttgcgacttaaaaaatgctactcgtatctagtaatagctggctacgttttactatgctgtgagactcgtagagttttacctcctaaaaagaaactcggtatgttgtgaatgctacaactgacactgcaccgtgtgcagtggctcaacattttttgtggtcagatggctatgcttg

SEQ ID NO: 37919 - DNA, 396 bp, Oryza sativa
  Clone ID: uC-osrocyp017b04b1
gcgttgtctcgtgggctagtagctaccgggctatcgccgtcgcttgccctgatgccgcagcaggaggtcgtcgaccagatcgccgtcgctgtggcggaggcgcgcctgcagaggagcggctcggccagccgcctcaacgcgggggcgccggagttcgtgccgcgggtcgccgcccccgtggtgccgccggcgccgccgccggtgatccgcgtgctcgccgcggcgcctcccccgccgcgggcggtcttcttcgcgccgccgccgccgcatcaccggccgtacgagtactacgcgcctgtgaggggcggtcggttcgccgacgccgacgacgtcgaggagcatgatgcggaagttgacccggatgcgacggatgcggcggagccactggtcgacggg

SEQ ID NO: 37920 - DNA, 427 bp, Oryza sativa
  Clone ID: uC-osrocyp017b05b1
tttcttctcttctcttctctggtggtgtgggtgtgggcctgtctcccctctccttcctcctctcctttcccctcctctcttcccccctctcacaagagagagagcgccagactctccccaggtgaggattcagccatgaagggggccaaatccaagggcgccgccaagcccgacgccaagttggctgtgaagagtaagggcgcggagaagcccgccgccaagggcaggaaggggaaggccggcaaggaccccaacaagcccaagagggctccctccgctttcttcgtttttatggaggagttccctaaggagttcaaggagaagaaccccaagaataaatctgtcgctgctgtaggaaaagcacccggtgataggtggaaaatccctgaccgaagcggacaaagctccctatgtagccaaggccaac

SEQ ID NO: 37921 - DNA, 500 bp, Oryza sativa
  Clone ID: uC-osrocyp017b08b1
tcgtgagccgccacctcctccgccgccgccgccgccgacgacgacgacgacgccgcatccccaaccctagctgccgctcggcggtgctgcgacgtaggagcgggtctcctctctgcatgatccgttagggctaccgagccgatcgaccggcgggcctaaaaccctagccgagagaggctgcgggttgggtgggggtgggggcgtgctcgactctccggcggcgccatgaagctgacggtgaagaccctcaagggcacccagttcgagatccgggtgcagcccaacgacaccattatggctgtcaagaagatcattgaagagatacaaggaaaggatagctacccatggggccaacagttgctgattcacaatggcaaggttttgaaagatgaaagtacattggaagagaacaaagtccgtgaagttgggtttttagttgtcatgcttagtaagagtaaagcttctggttccagtggggctttaagttcactgacttcaag

SEQ ID NO: 37922 - DNA, 316 bp, Oryza sativa
  Clone ID: uC-osrocyp017b10b1
tatgcacagcagcagcagaagcagctcggatccctcctgcaatggcgaccgcgtgcccgccactctcgctgcagccggcctacctctcggggaggtccgcgcgcgcgcgccgcccgccgcccgccgtccgctgcagcgccgtcggagaggttatggcggagacggcggcggtcgggacggcggaggagccgctgctggtgagcgcgatcaaggggaggaaggtcgagagaccgccggtctggctcatgaggcaggccgggaggtacatgaagagctatcaattgctctgcgagcgacatccttcattccgtgaaag

SEQ ID NO: 37923 - DNA, 427 bp, Oryza sativa
  Clone ID: uC-osrocyp017b11b1
gctttcaatccttgttttctcgtcttctctcatacaccatgggtgtggcttgtgctttcgagtttccaccattgatttgcactgagaaagaaccgatggatgaggccagctctgcatgcacgatagaggcagcggaggtggcggagatcgaacgacagctggttaaaaggaggagccagagtccccgccgtcgctaggcatgccaccaccatctgtcatcgcctccgcctctgatctccggcgacgagcgggctgacgatgaggtgagccacggtgaggtagcggtggttgcgaaagtggacgaggaggcggtgcgagcggccgaagcggtgaggcggttgtggcggaagcggcaaggaggctatcgaggagacgatccgagctgttgatttggcgcaaaggtggtgaagaagccccatgacagtat

SEQ ID NO: 37924 - DNA, 501 bp, Oryza sativa
  Clone ID: uC-osrocyp017b12b1
ctcccgattcgtcgctatttcgttccaggtgtgtgttgattagtagaagagaagcggcggctgcgacgaggcggaatcgaccatggcgacccgtattcagtttgagaacaattgtgaagttggtgttttctccaagttgacaaacgcctattgtcttgttgcaattggaggatcagagaacttctacagtgcctttgagtctgagctcgcagatgttattcctgttgtcaagacctccataggtggtactagaataattggtcgtctctgtgtcggaaacaagaatggacttctcttgcctcacactaccaccgatcaagagcttcagcatctgaggaactgcttgcctgatcaagtggttgctcagcgtattgatgaaaggctatctgcgcttgcaattgtgtagcttgcaatgaccatgtcgcgcttacacaccctgacctcgacaggccactgaggaacttattgcagatgtgcttggggtgaagtgttccgcagaca

SEQ ID NO: 37925 - DNA, 571 bp, Oryza sativa
  Clone ID: uC-osrocyp017c01b1
gtggttgaatcagatgatgttgcatacggattggtggacgtcatctctgagcataatgtttccatgcttgtaatgggggccgcagatgataagcactatacaaagaaaatgaaggttctgaaatccaggaaagcacgagttgtagaacagcatgcagatcatttctgcaaaatatggttcatttgcaaaggcacactggtatactgtaggaaggctgctccctttggccatgatgtgatgcaggactgtaggcaaagtgctacttctgcacaatgttcagtggagagatcgagtagcttgtcagagatttggtgtgtttcaaacacatggctacacaaactaaacctcgaaccacatatcgagacaactagttcagacagatactctgataaggaaaaggaagatactaaagagcgtggtgagtctgacaatgagctccagcatatacccatgcagttagagagagtaagacacgaagcttatgaggagaaatgtaggcgtgagaaagcagagcaggagttatttgaggctctccagaaagtgcaggtatcagagaatttgtactttggag

SEQ ID NO: 37926 - DNA, 496 bp, Oryza sativa
  Clone ID: uC-osrocyp017c02b1
tttctctttaggcttagccattccattccatgtacagcaaacaccattagcccggtcccaactcccaagtgttttcggttagcaacctaccatgcttgtcctcttgctcctcctcgccgccgccgtctcctcgccggcgccggcggccggagacggcgggggcgccttgccggtgctcaacccgatctcctccttctgtaacacgacggcggccaggcggacgtacctgccgaacagcacgttcgaggccaacctcaacggcctcttcgccgtgctgtccaggaacgcctcggcgtcgggctacgcggcgggggcgttcggcgcggcgccggacacggcgtacggcctcttgctctgccgcggcgacttcaccgggaacgactgctccgccgcgcggctggcgtcgtcgttccagcaggcggcgagcagctgcttgtacagcaaggacgtcgccgtctattacgaccagtaccagcttcggtactcggaccaggac

SEQ ID NO: 37927 - DNA, 493 bp, Oryza sativa
  unsure (1)..(493): unsure at all n locations
  Clone ID: uC-osrocyp017c04b1
ctcgtctcctcctccttcgcctccgccttgtagggtttcgccgccgccgctgccgccggcgatggagccaccggcgggaggctcctccgatcatcgccggggtgccgggaccggcgcgggcgccggtggggccgcctcgccgtcgggcctccgccgctacggcttcagattctccgcctccagcctcctgcaggccccgctcgctgcgctgctcgagtactccggcgtcgtcccctccggccccggcgccccgcaggcggggccgccctcggcgctgtcgtcctcgccgtcttcttcgtcgtcgtcgtcggaggccgatgggctgctctccgcggccgcggctggggaccgggaggtctcgatccggatccagggcggccccggggaggccgacgcggcgggcgtcgcgggggcgggctcgtcggggaggactcgatcgaggcgaccgncgccggngacgttgacccggcctcgctgccgcgggaggggtggc

SEQ ID NO: 37928 - DNA, 295 bp, Oryza sativa
  Clone ID: uC-osrocyp017c05b1
ttacatactgagcagcagcagcagcagcatcagacagcgaggcacaacgagagatcacttgcgtttcaagccatcaaacgttttgacatggtgaagacggcggcgagcaatggcgcggcggcggcgaggcgcgtcggcggcggcggtgatgggaagagggcggcgtacaagggggtgaggatgaggagctgggggtcgtgggtgtcggagatcatggcgccgagccagaagacgcggatatggctgggatcctactccaccgccgaggctgcggcgcgcgcctactacgccgcgc

SEQ ID NO: 37929 - DNA, 401 bp, Oryza sativa
  Clone ID: uC-osrocyp017c08b1
tcttttgcattggagagcccttaggcttgcgcaaccaccaccgcgtccgtcatcccatccaccttcatagccgccgccgtgtatgcgccggcggtgaccgggatccatggcggagccggacctactcgcgcccttagtcgacctcttcttccacctcggcgacgatttccgcgactatccgaccctctgggatgacgccttcgcgctggaggatttcgatctggacgatctggacttcgacttggatgtggatctctttccggcggatgcgccgccggcggtgacgacgtcggcgacgacctcggccgccggatcggcggaagaggggacgtaagaggccggcgacgggggctccaagaacgaggagaacaaggattcgtcgtcgccgtcgaggagcggga

SEQ ID NO: 37930 - DNA, 510 bp, Oryza sativa
  unsure (1)..(510): unsure at all n locations
  Clone ID: uC-osrocyp017c09b1
ttcagtatcgaatcctctcttctcctcgtgcccaccaccaccaccgtagcaatggcgggcaacgggccgatcaacaaggaggacccgctcaactggggcgcggcggcggccgagatggccggcagccacctcgacgaggtgaagcgcatggtggcgcagttccgcgagccgctggtcaagatccagggcgccaccctccgcgtcggccaggtggccgccgtcgcccaggccaaggacgccgccggcgtcgccgtcgagctcgacgaggaggcccgcccccgcgtcaaggccagcagcgagtggatcctcaactgcatcgcccacggcggcgacatctacggcgtcaccaccggcttcggcggcacctcccaccgccgcaccaaggacggccccgccctccaagtcgagctcctcaggcatctcaacgccggaatcttcggcactggctccgatggccacacgctgccgtcggagacggtgcgggcggncatgctcgtgcgcattaacacc

SEQ ID NO: 37931 - DNA, 437 bp, Oryza sativa
  Clone ID: uC-osrocyp017c11b1
tcggacgcgtggggcctcacatcataccaagtgtcctccttcctcctcatcctccccaaccactgcatccgggtcggcgtcctcctcctcctcctcctcctcgcagaatgcaacgggcaattcaagctatcgggtcacatggcagtctcctcaagtctgctgttctgcgacacatcagtgctccaaaaccatctattttacctgctgtatattcacgctccatgtcagtttcatctgctcaaatagaggagagtggatttgagactgccactgtggcagatattttgaagtctaaggggaagagtgctgatggatcttggctctggtgcactactgatgactctgtctatgatgctgtcaaatctatgacgcaacacaatgttggagctctggtgggttgtaaaacctggacaggataaatcaattgctgtattggt

SEQ ID NO: 37932 - DNA, 501 bp, Oryza sativa
  Clone ID: uC-osrocyp017d01b1
ttcttatccaggatttgagagtaacagttttatgggcatgccaccggcttctactggattcaatgaggcctttgatgcaactaatccttttggggatcctacgcctttcaaggctgttcatgaagaaactcctgcagtttctcagacaaatgctgcacctgctggttctttccatgctactgaacctgctgcagatgcaaatcctttccagcctgcttcagcagcaagctttggttttggagacactcttggcgacctctcttttggatcgaatgctgcacccgggcagcaagatatttttgtgcccacctcatcacattcagaggtaccacctgcaaacccatctgtgcaccctgaacaggcagtcccatcttatgtctcctcccaggcacctcagcctgcagctgctggtccacaaactcatgctgctcccgcttcatttgcttctcaagcacctcccacttcatttgcttctcaagcacctcaagcaggggcacccta

SEQ ID NO: 37933 - DNA, 531 bp, Oryza sativa
  unsure (1)..(531): unsure at all n locations
  Clone ID: uC-osrocyp017d04b1
ttgctgatggcatgaggcccttcgaccaaatttgccgaaacccgtggcgaaggctatgaaccaaggatgatgcgaggcgaagggtcgcgtgagtacctgccgaagaaggacgacttcgccatagccagtttgccctggcatccagcgaagaaggacggcttcgccatgtccagttcgccctggcatccagctcgaagaaggacggcttcaccatgtccagttcgcccccgcaaaggccgaagaagccttttcggcccatcaagcttaggggctatagggccgacggtcgcctgacggcccatcaagggcccataagtcctcttgacattatgtaaccctataaacgtccctttcataagggcaaccatgtaaattcccccgtataacctaaatcctagtagtaagaacctgtaatggggctataaatagtcccctagggccatgtaatgngggatcccaagaaaattcaaaatttaatacacttcgtttcttttccaaccattgttgagtaacgacgtctttcgacgtatg

SEQ ID NO: 37934 - DNA, 328 bp, Oryza sativa
  Clone ID: uC-osrocyp017d05b1
ccccaccccgccgcacgccgccgcatcgatcggaaccaaaccctaaccctaaaccctagcccccccacctcgccttccaccccccacgctcccatggcggggcgcggaggctacgcgtagccacatcgatcgaacaccctgtatggattgaggtgggtttcccgaggcatgggtacaaaccctagcctgcacgagctggcggcgggggcggcgccgcggggacgcgtggtgcgtatcctcgtgcgcgacgccgacgccaccgactcgtcctccagcgaggacgaggcggctgcggtggcgcagcctcggccgcggcggaggggtaagg

SEQ ID NO: 37935 - DNA, 518 bp, Oryza sativa
  Clone ID: uC-osrocyp017d06b1
ttgattcccccccacttcccctctcctccatccatggcgagcgccgaggcggaatgcgccgcggcggcggtgggcggcggcgggagggcggagatcgacacgtcggcgccgttcgagtcggtgcgggaggccgtcgaccgcttcggcggcagcgccgcctggagctcccacctcatcaggcgcatgttcgcccctcccaaccccaaggagcaatctgaagaaagtaaacagcctgtcgatatcaaagagcaggctgcacaactagaacatgatcttatcatcaaagaaaaggagacacttgatgtgttaaaggaattggaatctaccaagaaaatcatagcagacttaaaacagagaatacagaaggaatcaaatgaaacatctccttcagctgtgaagtctgatgaccaaagtgaaattcctattacagaatctgaagagcagaaacctgaaaatgttaacattgatatggatatggaaggcctagatgaacatccacaaccgctttcagttcagta

SEQ ID NO: 37936 - DNA, 564 bp, Oryza sativa
  unsure (1)..(564): unsure at all n locations
  Clone ID: uC-osrocyp017d08b1
ggttgctcaccatcacttagtggagcaattcgggtaaacccttggaacattgatacaacagcagaggcaatgaacgagtcgattgctttatcagagaacgagaagcaactgcggcatgagaagcattacagatatgtcagctcacatgatgttgcctattggtccaagagctatattcatgatttggagagaagctgcagggaccattttaggaggaggtgctggggtattggactaggatttggatttagagtagttgctcttgaccgcaacttcaaaaagcttactgtggattctatcgttactgattacaagaattctaagagcagggttatactgctagactacgatggaacgctagtaccacaaactacaatcaacaggactccaaatgaaagtgttgttaaaatcatgaatgctctntgtgacgataagaagaatgttgtttttattgctagtggacgaggaagggatagccttgagaaatggttctccccttgccaggatcatggcattgctgccgaacatggctactttatgaggtggaccagagatgagcaatgg

SEQ ID NO: 37937 - DNA, 488 bp, Oryza sativa
  Clone ID: uC-osrocyp017d10b1
ttgattcaaaaaattcgaagccatccaccaacgaagaaaaaaaaaagggagaaaaaaaaatccacgcacactttgcgtgcgaggcgaggcggttcgattcgagaggagagagagagagagagagagagagagagatggacgccttctactcgacctcgtcggcgtacggagcggcggcgagcggctggggctacgactcgctgaagaacttccgccagatctcccccgccgtccagtcccacctcaagctcgtttacctgacactatgcgtcgccctggctgcgtcggcggtgggcgcatacctgcacgtcgccttgaacatcggcgggatgttgactatgctcgggtgcgtggggagcatcgcctggttgttctcggtgcctgtctttgaggagaggaagaggtttgggattctcttggccgctgccctgctggaaggggcttcagttgggcctctgatcagcttgctgtagactttgactcaagca

SEQ ID NO: 37938 - DNA, 442 bp, Oryza sativa
  Clone ID: uC-osrocyp017d11b1
tgcggccggcaatccgcgacctccacctcctcctcctcctcctctcgtcaccaccaccacggcgaccccgtcctcctcgcccctctaaaagcctctcccttcctttctctctccccttctcgtgggatcttgtattcttgcgtcgtcttgggactcttgtggtggtcaagaacgaggacgagagaggtcggagagcgaggcggcggctgtgccgttgcgcgtgcggtgcgggtgaggtagctagcgagcgagaggggagatggaggcggtggcggttgcgggcggcggcgcggggctgacaaggtggcaggcggcggcgctgtcggcggtggcggtgtgggtgtgggcggtctcctccttcgacctcacgcggcggtcgcgcgcgctggtgcagccgtgggtcacccgccgcgtgctcgccgagacgccgtccatcgtcaga

SEQ ID NO: 37939 - DNA, 479 bp, Oryza sativa
  Clone ID: uC-osrocyp017d12b1
tctctctgtcaccgaacggcacgccgtggcggcgacgctgctggcgaggctgccgtaccagaacatcacgctcaacctggcgctgctggagcagggagcagtgccgacgttgctggccaagatagaggagatgcagcgcggcgaaatgcgagtgagccgccatgccaagacgtacatggagggcctcgtcggcgcgctcgtccggatgacgacgacgctgtacgaccccgacgtgctcctggcggccatggatcacaacttcacggcggtgctcaccgatctgctcgtgcggtcggcgggcagcgacgaggtgcagcggctcgcggcggtcggcctcgagaaccttagccaccagtcggtgaacctctcgcaaccgccatcagaagagcagcggcgccccaagaagaagaacatccttcggcgcctgcgcgacgcgcacaccgggcgggtgcacgacaacaaccggaaaaccgccgccg

SEQ ID NO: 37940 - DNA, 550 bp, Oryza sativa
  unsure (1)..(550): unsure at all n locations
  Clone ID: uC-osrocyp017e01b1
cccgcccaacccaaattttttgtcacccagcgccgcggcgcccccggttgctgacttgccgcgggaaggaggatgagcaggcggtggagccggacgatctacgtggggaatctccctggtgacatcagggagagggaggtggaggatctcttctacaagtatggccgaattgttgatattgacttgaagatccctccgaggccaccaggctatgcttttgtagagtttgaagatcctcgtgatgctgaagaagcatgtgctggcagggatggttataactttgatggacatcgtctaagggttgaacctgctcacggtgggagaggtaatggtggttcctcctttgaccgccccagcaactttggtggtggaggacgccgtggtgtgtccaggcactcagaataccgtgttctggttactggtttgccttcttctgcatcatggcaagatttaaaggaccatatgncgcaggctggtgatgtttgtttctcagaagtgtatcgcgagggcgggggtactgtagggattgtggctacacaaactatgatga

SEQ ID NO: 37941 - DNA, 510 bp, Oryza sativa
  unsure (1)..(510): unsure at all n locations
  Clone ID: uC-osrocyp017e04b1
ctccggccaactccatgactctcgtcgacttgtcccgcttccacaccgtgtgcacggcatggcgtgacatggtccggttgccggcggcggagccccaatgccccgcgctgctgccgtggctcgtcgcccgtggctggcccggctgcttctcccgctcgcacctccgctccatcttctccaacgcgacgcccgcctggcactccccgaggacgaccacccgcgacatgtggctggcgtccacggacggcgccggggtatgggtcctcaccgccgacggcgacaggctcgtcgaccccctcaccggagccaccgtccgccggctccctcgcctccctcgcaccagcaacaatgaccacgtctgctacatcgacggcgtcgtctgcggcgacggcaccatcgtggcgtacgccacttcagaagggttcaagcacacctnccagatcgaggcagccatcctccgccccggcgacacggcatggacgacggtagagtcgaaggggatgaattact

SEQ ID NO: 37942 - DNA, 548 bp, Oryza sativa
  unsure (1)..(548): unsure at all n locations
  Clone ID: uC-osrocyp017e07b1
tggagatcaagatgggattgtaaccacgctggttatctcgcgatcgcagagggtttcctccatcctctaaggaaggaaaggaacccttgccctttcttctccatggcttctaattcgtagtgtgaaggatctgatttttaggttagtgtaaatagtagcagtagttgaggaagcttcggcatcctaaggacctcctgtgaagatgtcgtctgctgccattgccattagcccgatggtggaagagtttgctctcctgcccatctgcttcgacggcagccggtcgccccactgtttgtccgggtcacagctgcaggattcgattatcatctttcttgctgtgcctggtgccccaccgatgccgatgagtgtgctcggctcggagtccatcgcctcggtcaagctgcgcattcagcggttcaaggngttcgtggttaacaagcagaggcttgtgcttgatgggcacgagctggcaaggaacaactgccatgtgaaggattatgggcttgccgatggaaatgttctgcacctttgtatccgcttggctgata

SEQ ID NO: 37943 - DNA, 503 bp, Oryza sativa
  Clone ID: uC-osrocyp017e08b1
ttccacgcgtccgccgtggttcgtctagggtttagtgggttgagatggcggcgccggatgtcgagtaccgctgcttcgtcggcggcctcgcctgggccaccgacgaccgctccctcgaggccgccttctccacctacggcgagatcctcgactccaagatcatcaacgacagggagacggggaggtcacgtgggtttggcttcgtcaccttctcctccgagcagtcgatgcgcgacgccatcgagggcatgaacggcaaggagctcgacggccgcaacatcaccgtcaatgaggcccagtcccgccgctccggcggcggaggcgggggctacggcggcggcggtggcggctacggcggcggtcgtggaggcggcggctaccgaggaggtggcggcggcggctactggcgccgtgagggcggctacggtggcggcggcggctacggcggcggccgtggcggcggcggcggcggctaccgtggcagccgtgcggcggctaccgcg

SEQ ID NO: 37944 - DNA, 475 bp, Oryza sativa
  Clone ID: uC-osrocyp017e10b1
cggaaagaagctttttttaggcaccaaatgcagcatgcacatgcttagcagcatcagctgctgccggccaggggagacaagaaaacagaggagaagaagaagaagaagaggaaagccatcgtcatcatcgtgtcgtgattagaatccggccatgtcgacagcagaagcagccgtgtggaggggccatggcagcagcaacatcacgcggcaaatcctcaagtgcacgaggtggcagctggaggagaccacggacttcatcacatgcccctaccactactactgcgacagcgcctaccccggcgactactcccccgccgtcggcgcgctcgtcgccgccttcgccgcgtactgcctcgtttccgccgccgcattcgccgtactggacatcggcagggccggcggcggcggcgggaggaataggcggaagtacatggtgccgtcgggcccattcttgctgccggtggtgctcctggcg

SEQ ID NO: 37945 - DNA, 449 bp, Oryza sativa
  Clone ID: uC-osrocyp017f02b1
tgtttcctctcgcgtcctcaagatgcagatctttgtgaagacattgaccggcaagactatcaccctcgaggtggagtcctctgacaccatcgataatgtcaaggctaagatccaagataaggagggcatccccccggaccagcagcgtctcatcttcgctggcaagcagctggaggatggcaggacccttgctgactacaacatccagaaggagtcgaccctttaccttgtgctccgcctccgtggtggcatgcagatctttgtcaagactctgaccggcaagactatcacccttgaggtggagttttgtgacaccatcgacaacgtcaaggccaagatccaagacaaagagggcattcccccagaccagcagcgtttcattttctccggcaagcagatggaggatggcaggacccttgctgactacaacattcagaaggagtccaccc

SEQ ID NO: 37946 - DNA, 450 bp, Oryza sativa
  unsure (1)..(450): unsure at all n locations
  Clone ID: uC-osrocyp017f03b1
tccttcccggccggtaggcagcaacaagctgtaagcacaagtatcgaaatggttagcggtgatgtaggagtagtagtgtactacctgctgctagtattagtggtggtgcaggggtgcaaaggcagcagcgcggtgcagggtgaaggtcggtggtacaacgagagcgaggccatcggtggtgcggcggcgtgggggaacgcgaaggcgacgtggtacgggcagccgaacggcgccggggcggcggacaacggcggggcgtgcgggttcaagaaggtgaaccagtacccgttcatggggatgacgtcgtgcgggaaccagccgctgtacaagggcggcaagggctgcggctcctgctaccgcgtcaggtgcaatcgaaaccccgcctgcttcggcaacgcccagaccgtcgccatcaccgacatgaactacttncccctcttccagtaccac

SEQ ID NO: 37947 - DNA, 458 bp, Oryza sativa
  Clone ID: uC-osrocyp017f04b1
ttttgatttgatttgattagctgcggcgcgaattcgatcttgccagctcgagctaagctagctaagctgcccatggcgccggcaatgttcgtcggaatcgccgccgccggagggaagaagggaggggcgaaggatgaggcggaggagctgcggcggcggaacgcggagctggagagggaggtggcggcgctgcgggcggaggtggcggcggcgcggcggcgcgcggagactgcggaggaggccgaggagcggctgtgcgtgcagctgggccaggcggaggtggaggcggtggagctcgcgcgggagtaccagtgccgcgtccacgacctcgcccgcgagctcgccgacgccagactgctcgtctcatccccatcgccatgagaagagaacaagctagctagattggtgcttgattcttggtgtaatgaatttctcttgcggagacaatgaaatgtcgc

SEQ ID NO: 37948 - DNA, 430 bp, Oryza sativa
  Clone ID: uC-osrocyp017f05b1
ttcttcttcccccaatatactggcatatccaagggaacggtgagacggtgaaacaaaaagaggatgattcactctctgctgacttcatcaccgtggtgcgacaagattactttgtctaaagaatagagaccgtcctgaatgctcggtaatctcctcaatatcgtctttcagcagtgacaagaccaaatcaactgcaaattgtaggattgtaggattagctcgtgcatgatcatgctgcatccaagccaacaccctccaaaggagcatcgaagcagcctggcttttttttgcccatttgcacgaaacaaggtcttctgcttgtttatcaaggtggtgtgacatgatctgctatgtgtatctgttcctttgattcgaggagcaagtttatgaggctgctctcgctagtttgacggatgttttttttgctttt

SEQ ID NO: 37949 - DNA, 554 bp, Oryza sativa
  unsure (1)..(554): unsure at all n locations
  Clone ID: uC-osrocyp017f06b1
tattcctgctacctttgttttttgattagtcctggactcctgatgctggtgtagaatgaaataaatttacgactgaagttttagttcattaatttgctgacgctgatagcctagtcctgataaatcttcagagcttcaagtactaagttatccacatagtccgatacaccgtcttaagtaccagagcctccagttccaggaataaatttctctctctatctctctcccctttttttttatttgcgatgagaaatagtaaaattttcttgaaaacattacaggaaaaacgctacattaggcagatgtggtccatactctgagtagtgttggtctgcggctgcttccatgacaagcctggtgatgccatgaagggtaataagttcctcgagtccttttgcgacatcgtccatgtcaattagtactttctgacaatcagtctgaaatagtaggattaatgttcatgctcatatngaatatattttgactgataaacaacatttcgtcccacgtttctgatgcaagtatttttttcacaagcctaacaaaaaaagtat

SEQ ID NO: 37950 - DNA, 384 bp, Oryza sativa
  Clone ID: uC-osrocyp017f08b1
ttagagaagcaaccagacactgcacacatcatcatcttctcccccgagaccgggtgatcttgggttagcttagctagctaaattaagctgcgtgcagcatggggctcctcgaccagctctgggacgacacggtggccgggccgcggccggactccggcctcggcaagctccgcaagtacgcctccttctccccttcctcctcctcctcgacgatggcggcgtcgccgtcgcccatctcggcggcggcggcggcggccgacgcgccggccgtgacgcgcagcatcaccatcctccgcccgccggcgctgtccgtgacgtcgccgcgcggcagcgagatgggccccttcacgccgtcgtcggcggccagcgttccggactccccct

SEQ ID NO: 37951 - DNA, 443 bp, Oryza sativa
  Clone ID: uC-osrocyp017f09b1
ttaagctttcgctttcataaaagccattactccctctcctccattgctggcctcccgcctccgcctcctctcgcctcgcctcgcctccgccacccatggcttctcgaaaccctagccccgcctccctctccacgccgctcctctccgactccatctcgcccacgcccaccaccaacggccacgcggggcaccataaccacgacgacgacgacgaggagtcgccaacggtgtgcggcggcgatggcggaggagggggggacccgttcgcgttcctatcggaggatcggccggcgtggtggtcgccgcggggggtgtccccggccgacccgttccgcaacgggacgccggggtggtgcggggcgtacgagctcgtgagggcgctcgtgtgcgcgcccgtggcggcggcgaggctggtgctgttcgggctctccatcgcggtgggg

SEQ ID NO: 37952 - DNA, 432 bp, Oryza sativa
  Clone ID: uC-osrocyp017g05b1
tggtacattaaccgagctgttggtactatgctcagccatgaagtcacaaaacggtatcacattcatggattgccatcagataccatccatattaagctgaatggaagtgctggccaaagttttggtgcttttctctgtcctgggatcactcttgagcttgagggagacagcaacgattatgttggtaagggactatctggtggaaagattgttgtgtatccaccaagaaatagtcgatttaatccacaagacaatattgtgattggtaatgtggctttatatggtgctacaaagggagaggcatatttcaatggtatggcggcagaaaggttttgtgtccgcaattcaggagctcaagcagtagttgaagggattggcgatcatggatgtgagtacatgacaggaggtacagctgttattcttggaaaaact

SEQ ID NO: 37953 - DNA, 404 bp, Oryza sativa
  Clone ID: uC-osrocyp017g08b1
ttttcgctgctattctccgctttgcgagcaccatagcctagcccaccatgtgcggtggcgccatcctctgcgacctaatcccgccgccgcggcgggtcaccgccggcgacctctgtctggagaagaccaagaagcatcagcagcagaagaagaataacaagggcgcgaggaggctgccactgcgccaagaggaggaggatgatttcgaggccgacttcgaggagttcgaggtggattccggcgagtgggaggtggagtccgacgccgacaaggccaagccgctcgccgcgccccggagcggcttccactaaaagtggattgaaaaacactactgttgctggtgctgaagggcctgcagcaaggtctgctaaaaggaagagaaagaaccaattcaagggtatccg

SEQ ID NO: 37954 - DNA, 404 bp, Oryza sativa
  Clone ID: uC-osrocyp017g09b1
tctctgacgcgtgggcggacgcgtgggcgtcgacgctcgtcacgctcggcgcgtgcccggcgtcgcagcgcgcgtccgtggcgccggtcgtgacgttccccaatggcacggtggcgctcatgccgggcggcaccgtctccggcgggatactctgcctgtccggccggatgacctccccgaccttctggctcgccgtcgtcggcttcctcatcatcgccttctgcctcatcaagaacgtcaagggcgccatgatctacggcatcctcttcgtcaccttcatctcctggccgcgcaacaccgccgtcacggtgttcccggacacgcccggcggcgacgagagctttggctacttcaagaaagtgttcgacgtgcaccgcatccagtccaccgccggcgcgctcgac

SEQ ID NO: 37955 - DNA, 511 bp, Oryza sativa
  Clone ID: uC-osrocyp017g10b1
ctggaacattgtcaagataccgccgattgtgcaggagctcgccgccggcgtccatgagccgccgagccagtacatggtcggcgagaaagaccgccctgccatcgccggctccgacatgcctgagcccatccccgtcgtcgacctcagccggctgtctgcctccaatggtgaagacagcgccggcgagcttgccaagctacgctccgccttagaggactggggcctcttcctggtgcagggttatttggtactataatggaggggagcattctcagtgagatgatcaatgtgacaagaggattctacaagctcccactggaagagaagcagaagtactccaacctggtgaacggcaaggatttcaggatcgaagggtacggcaacgacatggtcgtgtcagagaaacagatcctgaactggtgcgaccggttctaccacatcgttgagcctgagtcccggatagcccatagcctctggccacacagccctctttttcagagatgttctgcat

SEQ ID NO: 37956 - DNA, 506 bp, Oryza sativa
  Clone ID: uC-osrocyp017g11b1
cccttcgctagtttatccaattaagctaatcagcccctcgaaacctcacaaaattaacaaccagtcccttctccgatccgttagccttcgtttttctctttagtgtgtgtgtgttgcgtttttgcaaatacacccctgagtattattattattgggtaaaattgatggatctcgcgacgacgccggcgcggcggcccatggaggccgggatggcgcggcggctgtggcacgtcgtcctcgccgtgtgccacatgctccggcgaggcctctgccggaagcgcctcatggtggacctccacgtcctcctcggccgcggcaagctcgccggcagggcgctccgcggtctcctcgcccaccacgccgccgtggggcacggccaccacctcgcggcgtcgtcgtcgtcgtccgccgcgctggcgtcgttctacggccgccgcccgcgggaggtggagttcagctgcaccaccacgccgtcggtgtacccgcactacgggctgttccccttc

SEQ ID NO: 37957 - DNA, 130 bp, Oryza sativa
  Clone ID: uC-osrocyp017g12b1
ttagcgcggagccgtcgccactccccgcgaggtttactctgcagaccattcggaaatcctacatccgagcctagccgcttgctatccaccggcggaggcgggcatggcgacaccgtcggggcctgacctt

SEQ ID NO: 37958 - DNA, 351 bp, Oryza sativa
  Clone ID: uC-osrocyp017h03b1
cgccgcagccgcagcctgattcgcgcgtcgtctactccgaccgcgagcttgtgttcttttcggcgagagatcatgatcacgcacggctcgcatgacaaagcttcacgagaccgagacagttcaactcttcaggccattgatcaaccagcgtgctagccctcatgatgaacaccgtgtactctaacaaggagatcttactgcgggagatcatttccaactcctccgatgcattggataagattaggctcgagagcctcacggacaagagcaagctcgatgcgcagccggagctgctcatccacattgtacccgacaaggctagcaacaccctgacgatcatcgacagtggtg

SEQ ID NO: 37959 - DNA, 448 bp, Oryza sativa
  Clone ID: uC-osrocyp017h05b1
tcggtcgcgtgggccgcgccgctactcccccctcgccgagagagctctagggtttccgctgccgaatttttttttaattcggggggagagatttgaagaggcggcaccatgttggtctaccaggatctgcttaccggtgacgagctcctgtcggattcgttcccctacagagagatcgagaacggcatcctctgggaagtcgatggcaagtgggtcgttcaaggagctattgatgtggacattggtgccaacccatctgctgagggtggtggtgatgatgagggttgttgatgaccaagctgtgaaggtggtcgacattgtggacaccttccgtcttcaggagcaacctccttttgacaagaagcagtttgtgaccttcatgaagcgctacatcaagaacctcttcggcaagctggatgcggaaaagccagaggaattcaggaagaac

SEQ ID NO: 37960 - DNA, 436 bp, Oryza sativa
  Clone ID: uC-osrocyp017h06b1
tggacgcgtgggcggacgcgtgggcggacgcgtgggcggacgcgtgggcaagccaagaagagggagagcaccaaggacacgcgactagcagaagccgagcgaccgcctcctcgatccatatcttccggtcgagttcttggtcgatctcttccctcctccacctcctcctcacaggttcttggtgtagcttgccactttcaccagcaaagtttcatgtctgatctcgacattcagatcccaactgccttcgatccctttgctgaggccaatgctggagactctggtgcggctgcaggatcaaaggactacgttcatgtacgcatccagcagcgtaatggccgtaagagcctgaccactgtccagggattgaagaaggaattcagctacaacaagatcctcaaagatctcaagaaagagttttgctgcaatggtactg

SEQ ID NO: 37961 - DNA, 482 bp, Oryza sativa
  Clone ID: uC-osrocyp017h10b1
tcttgtaaatctagcttgctgtaaacacagttagttcgtaattatcgcatagggccatggggaagtacagtgtgggtctcgtggttttagggttgctggcccttgcgttttcgaccactgtgctggctgaaacacatgttgttggtgactccaacggttgggacttctctgtgtcgtttgatagctgggctgatggaaaggtcttcgctgctggtgacactcttgttttcaactacaaaccgggcgcacacaacgtgctggccgtggacgcggcgacgtacaggagctgcaaggtgggcagctcggcggactcggtggcggcggcgacggggaccgcgtcgttcctcctcaagaagggcgttaactactacatctgcggcgtccccggccactgcgccgccgggatgaaactccgggtcgtcgccaactgatgaaactccggcgacagatcaatccctttaataattaaaactatgtgggtg

SEQ ID NO: 37962 - DNA, 484 bp, Oryza sativa
  Clone ID: uC-osrocyp017h12b1
tcgcacagtagtttgtcagtcgccgcctccaacaatggcgaagccgacggtggtggtgctgcccgtgtggggcgccggccacttcatgcccatgatcgaggccggcaagcggctgctccgcggcagcggcggcgcgctgtcggtcaccgtgctcctcatgccggcgccgacgccggatgcggcggtcgacatcgcggcccaggtgaagcgcgaggaggcctccggcgccgacgacatcagcttccggcacctccccgccgtcgacatgccgaccggccacaccggcgtcgaggagtggatctcccgcatactgcggagccacgcgcccaacgtgagggccgccatcgccgggctcgactgccccgtggccgcgctcgtcaccgacatcttctgcacgccggcgctcgaggtgtcccgggagcttcgcgtgccgggctacgtgtacttcccctgcagcgcgttgatgctggcgctgctgctgcgc

SEQ ID NO: 37963 - DNA, 295 bp, Oryza sativa
  Clone ID: uC-osrocyp024a01b1
attgagggaaaaaaaatgagaaaaagaaaagaaaaaaaagaagaagaagagagaactcgaactctcgcctaccatttcgcccccctccgcaagcaatccaccactgcatcggcggcgagggctcaccggcggcgagccatgtgcggcggcgccatcatccaccacctgaaggggcacccggaggggtcgcgccgggcgacggaggggctcctgtggcccgagaagaagaagcccaggtggggcggcggcgggaggcgccacttcggggggttcgtggaggaggacgacgaggact

SEQ ID NO: 37964 - DNA, 264 bp, Oryza sativa
  Clone ID: uC-osrocyp024a06b1
gtctgtcttcgccgtcgaagccgatctcctgcgcgcggagcggatcgcctctgtcagtcaccagctatacagtatgagttcactggagagtgcaagagcagatcttgctctgcttattttatacctaaacaaggctgaagcaagagataagatctgtagagctatacaatatggctcgaaatttgtgagttatggacaaccagggcctgcacagaatgtagacaagtcgactagtctagctcgtaaagtctttccactttttaa

SEQ ID NO: 37965 - DNA, 366 bp, Oryza sativa
  Clone ID: uC-osrocyp024a07b1
tcagaccccattaagctcggcatggccgttgttgagcggctgaatgctctccagcagcagtcagggcggctcgcctacctccacgtcacgcagccacggtacaccgcctacgggcagaccgagtctgggcagcatggcagtgccgaggaggagagccgcctgatgcgcaccctccggggcacgtaccagggcacattcatgtgcagtggcggctacacgcgggagcttgggttggaagcagtggagagcggcgatgccgacctggtgtcgtacgggcggatctttatatcaaacccggacctggtcgagcggttcaggctgaacgcccgtctgaacatgtccgtgcgtaaggaatttttcaccccc

SEQ ID NO: 37966 - DNA, 95 bp, Oryza sativa
  Clone ID: uC-osrocyp024a09b1
ctttagattatactcgctgtagagaaaaaaaaaaaacaacaaaatgggggttttaatataaaaaataggggattataaataaataatattaataa

SEQ ID NO: 37967 - DNA, 54 bp, Oryza sativa
  Clone ID: uC-osrocyp024a10b1
tttctatactaataagagaggaggaagagaggcaacggtttttttaagaagagg

SEQ ID NO: 37968 - DNA, 329 bp, Oryza sativa
  Clone ID: uC-osrocyp024a11b1
cttgccctctacatattctgcagaagctcagggaatagcattgtccaggcatatgcaaaggaccattacttcgatgtcgtaaccaatgttgttggtttagtggctgctgtgcttggagataagttcttctggtggattgacccagtaggggctgtgctacttgctgtgtataccattgtgaattggtctggaactgtatacgaaaatgcagttacactggtgggtcagtgtgcccctttagatatgctgcagaaactgacataccttgccatgaagcacgatccacgtgtgaggcggtttgacacggttcgagcttacagctttggagc

SEQ ID NO: 37969 - DNA, 229 bp, Oryza sativa
  Clone ID: uC-osrocyp024b08b1
ggatggttgaaatctatttggatttgaagtctatgcaaccactttccagtaagaaagaaaatgatgaagttttcatcaaactgggatctgacaaggatgctttgaagaagaaagaaaatgctgaacgtgatgagcgtgctaagaagtctgtgagcatcaacgagttcctaaaaccagctgaaggagagaggctctatggcggtcgtggtcgtggcaggggccgcgggga

SEQ ID NO: 37970 - DNA, 209 bp, Oryza sativa
  Clone ID: uC-osrocyp024c01b1
gtcatctcgatctttttacccaattcttgatcactcttcttggtcgttcttgccattcttgtaccgcgaagcgagcttagctgcaacctgcaagatcgagctagctagctagcaatttatctaggttggtgagagcaggaagagatcgatcaagggttgaggggtgatggagagcatggagggcaatggaggagggcggctggtggtga

SEQ ID NO: 37971 - DNA, 362 bp, Oryza sativa
  Clone ID: uC-osrocyp024d03b1
ctcctcccctgcttcgttgcctcgtgctcctccgccgccgccggagaagctccaagcctcctcctcctccgggccgccgggaatggcggggaagcaaggagatgggcgcgaggaggatggcgctaaggtcggcctcccggcgctggatatctcgctcgcgtttccgcaggccacgtccggcatccatcttcccgtcattagcattggactattatcagattgatgatttactcaccactgaagagcagtctatcaggaagaatgtcagggctataatggagaaagaaattgcacccatcatggcaacgcactgggagaaagcagagtttccattttatgccattcccaaacttttcaagcct

SEQ ID NO: 37972 - DNA, 465 bp, Oryza sativa
  unsure (1)..(465): unsure at all n locations
  Clone ID: uC-osrocyp024d05b1
aaaaaaaaagaaaaaaaagaaaaaaaaaagaaaagaaaaaacaaaaaaaaaaaaaaagaaaaaaaagaaaacaaaaaaaaaaaaaaaaaaagaaaaaaagagaactcgtagcaancaaaaaaaaaaaaaaaaaaagaaaaaaaaaaaaaaaaaaaaaaaataaaaaaaaaaatttattaaaaaaaaaaaaaaaaaaaaaaaaaagaggaaaaaaaaaaaaaaaaggaaaaaaaaaaaaaaacaaaaaaaaaaaaaaaaaaaaaaaaaagaaaagaaaaagaaataaaaagaaaaaaaaaagaaaagaaaaaaaaaaaaaaagaaaaaaagaaaaaagaaaaaaaaataaaaaaaaaaaaaaaaagaaaaaaaaaaaaagaaaaaaagaaaaaggaaaaaaaaaaaaaaaaacagaaaaaaaaaaaaaaaagagaaaaaaaaaaagaaaaaaaaaaagagaataag

SEQ ID NO: 37973 - DNA, 64 bp, Oryza sativa
  Clone ID: uC-osrocyp024d10b1
ctctttctcccatccgcgtagatcccgtcccaggggcggtacggacggatcctcatccattatc

SEQ ID NO: 37974 - DNA, 175 bp, Oryza sativa
  Clone ID: uC-osrocyp024e02b1
ttcactcgtccgctaccttctcctccggctcttcttcagtatcgaatcctctcttctcctcgtgcccaccaccaccaccgtagcaatggcgggcaacgggccgatcaacaaggaggacccgctcaactggggcgcggcggcggccgagatggccggcagccacctcgacgaggtg

SEQ ID NO: 37975 - DNA, 237 bp, Oryza sativa
  Clone ID: uC-osrocyp024f01b1
gggagccggcccggaacggaacgggcaggacacgaaccaaaccttcgtttacacccccaatacaagaaaaggggggggaggctcaaaaaaaacgaccggcgggcaacaccaggccaaggggaagcacaagcggaaggggaaggcgacagaagaggcagaacaaaacaaaaaaaaaaaaaaacagaaaaacgacgcacacaaacaaagacagaccaaaaaacaaaacaagcaacaaca

SEQ ID NO: 37976 - DNA, 169 bp, Oryza sativa
  Clone ID: uC-osrocyp024f03b1
ctgggtagtaacttctgtgagagatggagtactcttacagctacaggttcatgcttgtatgctcagttcttgtactgtgccttaatactcggggtgcgagatgccagttattcgacgatttctacgactacatatgtactgatgtgtacaccttttttcatgcttttgt

SEQ ID NO: 37977 - DNA, 69 bp, Oryza sativa
  Clone ID: uC-osrocyp024f11b1
agcgttcgttcctacgcagcagcagagcctctcgaaattgtggtccttaacgcggagcgcgaagagaga

SEQ ID NO: 37978 - DNA, 62 bp, Oryza sativa
  Clone ID: uC-osrocyp024g07b1
tcttgctccatctatcttcccatccaaggagtgtggaacgccacacggatttattttaaata

SEQ ID NO: 37979 - DNA, 502 bp, Oryza sativa
  Clone ID: uC-osrocyp024h05b1
atctcaacacgccagataatgttgaaaaattaaccactgatgataagcaagagcttagtatagatccaagtattatgaatttaccaggagtagattgtttcaatataaaggaaattgcaaagaaggagagttatttaactacattccaatggtccgatggaggatttggatttttatggaattcacgtgtttccccgatgttgtggcgagctgtggcaggacctcctgcccaagcatggtttcctgcttgtgcgtatgccgtcatgccgtttgagaattggtcgggatcaatgaagtttagatttcaagttgtgtgttctagttttcataaagggcgtttgcgtattgtgtttgatccaacaggtgcttaaacatatcctgagttgaatgttgcgtattctcacgttattgatattttagatactcaagattttacctagaggtttcctatttgccaacatgaactttgttaacttgggctgaaccgcatttacactggtta

SEQ ID NO: 37980 - DNA, 470 bp, Oryza sativa
  Clone ID: uC-osrocyp024h09b1
gtgcaatgctagaaagacttgtattatgaaacggaggaagtactgtatatgtacataaactgcaaaaatgagctatagcacaatgaaaccacatcttggatgtgtttccaggatgtggtttggtgtgatgtgctaattcttaaggattgttcctagtggtggtgtctggatttcctacccaagttgctgacaaccaagatgaggatatggcgatatgctgattgtcatcaccgatagagacaggttgtgcttctgcttctgcggactttaaattttggcatctttccttttaaatgctcgtccatcattattccgtatatattttttgcattctggtgccagtttttggttccttaatacccctttattgtcttcaatgcttagttctcaatgacctatttggtcttcactttacttacatgtcattcttctgtgtctttcgattcttctacttctcttatctctcttta

SEQ ID NO: 37981 - DNA, 518 bp, Oryza sativa
  Clone ID: uC-osrocyp027a02b1
ggactattagttctttttgttttatcagaggatcgtgctatttcggttagaggctatggtgatttgcacatgaagaatcaaatcacaggtgcacagagggatgctggtgaagatgaagacaataatatcagcgcagaagaagagagagaaatttgctccctttgttgggcatcgcaaggaggttcaactgttgctgttggttatataactggagacattcttctgtgggatatgactgcaagatcctctaaacaagacaatagaagtgatgaaccatctaatgttgttaaacttcagctggcttctggtagtcgtaggcttcctgttattgtattacactggtcttctcgttctgctgattctaacaaaggagggcatctctttgtatatggtggtgatgatatgggttccgaggaaagtctgacggttctaagcctggaatcaactactggattagagtcaacaagatgtatgtcacgaatggatctcaaacttgatgggtccttttgctgatatga

SEQ ID NO: 37982 - DNA, 385 bp, Oryza sativa
  Clone ID: uC-osrocyp027a03b1
ttcgttcgacatcttcttcactcctcacttcccccactttctctactcctagcatagcagcctcactttccctcctcgatcgaagcagcaggcggaggcggaggggatcggcgatggagcagcaggaggaagtgccaccgccgccggcggggctggggctgacggcggaggagtacgcgcaggtgcgggcgacggtggaggcgcaccaccgctacgccgtggggccgggccaatgctcctccctcctcgcgcagcgcatccacgcgccgcccgccgccgtctgggcccgacgtccgccgcttcgactgcccccaggtgtacaagcacttcatccgcagctgcgttctccggcccgacccccaccacgacgacaacgggaacgacc

SEQ ID NO: 37983 - DNA, 441 bp, Oryza sativa
  Clone ID: uC-osrocyp027a04b1
tttgtttttggttacagcattgagcacattctcatggttgacatcattcgtgatgctgctgtacgcagagcagggaatgaaataaatgcagcacaaaggctttagcttgcaagtgtctacaaaggagaggcggagaagattcttctggtgaagaaagcacaatcagaagcagaggcaaaacacctttccggagtcggtattgctagacagcggcaggctactactgatggcctgagagagaacatgctgaacttctcgcactcggtttcaggcacctcagcaaaagaagccatggatctcatcatcgtcacacaatacttcgacaccatcaaagaacttggggatggctaggaaaacaccacggggttcatacctcatggcccaggccatgtcagggatatcagcgagcaaatccggaatggtatgaccgaagcgtcctgc

SEQ ID NO: 37984 - DNA, 431 bp, Oryza sativa
  unsure (1)..(431): unsure at all n locations
  Clone ID: uC-osrocyp027a07b1
tcttctngcttggttgctcacattgagctcaacaatggaggccaagggagtggtggtgatcacccttgtggtcacacttgcggcgtttgcgagggcggcccgcccagaagaaaccaggccgggcttggcccgccgcgggtcagcatcctcaccgacgactcacctgcacttctacttccacgacaaggtgagcaagccatcaccgacggcagtgcgggtggtggacccggtggacccgtcatcgcggtccttctttgggatgatcaacgtcatggacgatccgctgacggaggggcccgagcccgagtccaagcccatgggccgggcccaggggctgtacatgggctcagaccaggccaagctgggcttcctccaggcaatgaacctggtgttcaccgacggcacctacaacggcagcgtggtcaccgtgc

SEQ ID NO: 37985 - DNA, 446 bp, Oryza sativa
  Clone ID: uC-osrocyp027a10b1
cctgcccattttttcatattgaggcccctctgaaaatattatatttacaactaggtccctggccgggccggccggccaccggaaggagcacctcgccggagaaggctttgtctcttctttttcttctcctcctcctcctccatcggcggcggcatggggttctcgctgtaccccatgaagacgtcgacgcgcatgctgtggagcaccagcttcttccgccataaggtcgcctcctccttctaagcccacgccctctcgggcggcggcggcgagccggcggcggagcgcgcggttggtaggtgcgcgtgcgtgcgtgaacgggagagcagcttcgagatcgggttttcttgggttcttggagaagggaggagaaaaaggggaggagagcatggatcccggccgcgtcgtgtttcgacttcggcgtggcgcggcgggcgtgcccccgc

SEQ ID NO: 37986 - DNA, 500 bp, Oryza sativa
  unsure (1)..(500): unsure at all n locations
  Clone ID: uC-osrocyp027b01b1
ttcttttctcttgtctcgctgtggctcgctggacacaacacacacccacacccactcccccactctctctccggttcatgtcctgctgctccccatgtcgcccccactcgagctcgactacataggcctctcgccgccggtgcccgccgccgccgatgccgccgccgacaacgacctgaagggcaccgagctccgcctcggcctgcccggctcccactcgccggaccgctccccgcccgccgccacgctcgaccttctccccgctgccaagggcgccaagcgcgggttctccgacgaggcgcgtccgctgccggcgtncgccgccgncgacgccgncgncgggaagggcaagaaggcggcggccggcgaggaggatgaggatgcggaagaggaggacaagaaagtcgccgtcgcgccgcaggcgcctgctgccaaggctcangtggttggatgccaccaattcgcagctaccgcaagacacgatggctactaaccagctg

SEQ ID NO: 37987 - DNA, 242 bp, Oryza sativa
  Clone ID: uC-osrocyp027b02b1
gacccaggcgcagaggcaccaggccagcaagtccgcctcctccttaccgtgcatgtcacgcttccttcacctgcctggtactctttacactgctcctggatacctacctgtagactcgacagatcaagggtctctctagcagatgcgtctcatcccttctcgcctctcattatacagactcttcttatctatatactgtggaaggcgatcttgggtggggagagagcaagaaccgaagctga

SEQ ID NO: 37988 - DNA, 457 bp, Oryza sativa
  Clone ID: uC-osrocyp027b03b1
gtggagaaagatctactgctgcaacaaagaacagccatggagcttctctggctgctgctgttgctgctcatggcttcctcaacatcgtcgcggtccgaaatgaaggcgggagaggtgatcaggagaagccaattccctgaggacttcttcttcggcacagcttcttcggcataccagtatgaaggtgctgtgagggaaggtggcagagggcccagcatctgggacaccttcacccacaatcatccagagaagatagcaaatggaagcaatggtgatatagcaatagattcctaccaccggtacaaggaggatgttggaatcatgaagggtttgggcttgaacgcgtatagattttcagtttcctggccgagaattcttcctaatggaaaactgagtggaggggctaacctagaaggaatcaaatactacaataatctcatcgacgagctaatttcaa

SEQ ID NO: 37989 - DNA, 161 bp, Oryza sativa
  Clone ID: uC-osrocyp027b04b1
tgtttttctggcaccaaataattaccctatcttcctctttgtatatctagcacgctagttgcgagcaagaccaagatgggagggcaggaacagatagcaaccctagactgaataggacagactctctgttatgtccatcctgacagataccaaggatgctc

SEQ ID NO: 37990 - DNA, 91 bp, Oryza sativa
  Clone ID: uC-osrocyp027b05b1
tgtttgtctagttccaaataattaccctatcttcctctttatatatatagaaagcctgttgcgagcaagatcacgataggagggaggggac

SEQ ID NO: 37991 - DNA, 149 bp, Oryza sativa
  Clone ID: uC-osrocyp027b06b1
tgtgtgtgtggctccacctaatcacccttgcttacgactgccatcaacagcataccaggattgagcaggacacaggttggtgggatagaacggaaagcctccctcgaattcgggcattgctggcctgaaatgtccagtcgcttggaaac

SEQ ID NO: 37992 - DNA, 427 bp, Oryza sativa
  Clone ID: uC-osrocyp027b09b1
ctcgcttccccctaaatctcgccggattccgccgccgctgccgcgcccgcttcctcccgaggtgcagctctggccggggcacgcgcgcgcctccccggcggggggccgccgcagtcggtggactacggcggcggccaggcatccgacagcagcggaactgctgatgatcttcctccaccatatccaagcaataggggtattagaggcagtggacgtgtcagtggtaatggaagagctattgttcctgctggttcatacactagagcccatactgatatggcaacacaaatccatcatcttgaacaagaagcatattgctcggatcttcgtgcatttaaagcccagactgacgccattacatgtgagaaagaaggtctcataacaaaacttcggaaagagcttagggtatctgatgtagaccacaagg

SEQ ID NO: 37993 - DNA, 425 bp, Oryza sativa
  unsure (1)..(425): unsure at all n locations
  Clone ID: uC-osrocyp027b11b1
tctcacatcttattgtcacttccatctcattctcctaattgtcatcactagcttctagctagcttaattaattaattagccatggcggaggagaagcaccaccaccacctgttccaccacaagaaggacgacgagccggccaccggagtagactcctacggcgagggcgtctacacgtcggagacggtgaccaccgaggtggtcgccggcggccaggacgagtacgagaggtacaagaaggaggagaagcagcacaagcacaagcagcacctcggcgaggccggcgccctcgccgccggcgccttcgccctgtatgagaagcacgaggcgaagaaagacccggagaacgcgcacaggcacaagatcacggaaggagatcgcggccacngcggccggtcggcgcccgccgctacgccttccacgag

SEQ ID NO: 37994 - DNA, 517 bp, Oryza sativa
  Clone ID: uC-osrocyp027c01b1
ctcgtactacgtcgattttttgcatgtccagcaggccttcacgtgggactgcggcctcgcttgcgtgctcatggtgctcaggacactcgggatggattgctgcgacggcattgccgatctcgagaagctctgccgcaccacgagcatatggacagttgacttggcatatctgttaaacaggttttcagtttgtttttccttcttcactgtgactctaggagcaaatccgcaatattctgctgaaaccttttatagggagcaattgcaagaagacattgatcgagtggatgagctctttggcagagcccttgaagctggaattagtattcaatgcagatccatcagtgcgtatgatatagcttttctactgttatctgggcactgcattgctatcgcactagtggacaaaacaaaattgaattcctcatggagcaatgatctacaagatatgcaacagttcagtgaggattcagattacatggggcattattgtgtaatatgtgggtatgatgctgat

SEQ ID NO: 37995 - DNA, 501 bp, Oryza sativa
  Clone ID: uC-osrocyp027c02b1
tttattttctttttttttttcaaaaaaaattcctcctctgtggcctcccctcaccgccgtccccgtcccgaccaccggaggccggcccgctccggtgagctgccgatacgcatggccgtcctcctccgtaccaccacctccgctacgaccgccacgagcggcggcttctcctcggcgacggcgctcctcgccaccacgttccgacgcggcggcaggcgcctcctcctcctccccgcgacacgcggatcggcgccgcgccccgcggtcttactcacggttcgcgcctcggcggagccgctggaggtctgcgccaaggcctcccttaccgtccccgaccggctcggcgactgtcctttcacacagagagtgttgttgacaatagaggagaagcatcttccgtatgatataaaactagttgatctggctaacaaacctgattggtttctgaaaattagcccagaaggtaaggtgcctattgtcaagctttgggaacaatgggtt

SEQ ID NO: 37996 - DNA, 96 bp, Oryza sativa
  Clone ID: uC-osrocyp027c03b1
ttttgtgtctgcttcctcatcaataccctatcttgctctttgtatatgcagcactccagtggcgatcacgaccacgataggagggtgaggtcatat

SEQ ID NO: 37997 - DNA, 268 bp, Oryza sativa
  Clone ID: uC-osrocyp027c04b1
tccttttctgcttgcaaatgatcaccctttcctccgctttctatcaattatacaccagtccacagcgcgaccaataaccgacggcgtcgatcacagcgtttccctacgtcgatgagtgggaattctaccttatgacgaccacaatcgaaacaaggcggtatctctgctctaggaagaattttcctcatgcctccatagtggtaaacctaaggtacgaggaagagaaggaaaaaaaaagaaaatggataagtctgcccaaccccattaa

SEQ ID NO: 37998 - DNA, 244 bp, Oryza sativa
  Clone ID: uC-osrocyp027c06b1
tatgtgtttaattccaaacaaataccctgtgtatcttttttattcaatctgttttttttttctctcctgagttggatgtgtcggcttcgatgggcatatgtcttctgatcctttcttgtgcggctgttatatttctctaattttttgcctttttgacttacttttttatggttgctttttctgcatgtttatgtgttttaccttattgtggacagtgttacttgtccttaaaaggtgagagatg

SEQ ID NO: 37999 - DNA, 326 bp, Oryza sativa
  Clone ID: uC-osrocyp027c07b1
tttcgttcgagcggccatcccacgtaggctcagtcatactctgattccactgctgatgctggcaaactcacaccttgacgaatcatgggacataggccgaggaggtaggagaagagaaatagatgacgagatcatatgaacttgaagtcctaagacaattcttctttccatgagcacaagcatatatatgctgaaagtacgtgatctttccagatgtatctctagtctacgtacagtgaatagcgaagattttgacatccgtcaaatggtgtgaaggcggtagcatagatggctacaatttgctctgaaagactgaaactggacac

SEQ ID NO: 38000 - DNA, 503 bp, Oryza sativa
  Clone ID: uC-osrocyp027c09b1
tctttttctctctctctctctcccttgtttcagtggctcagaaattttcctcttttcttattattgctttcctttatttaaggaaggagttgggctctctctctttctctgagtctgaatccccacgagacgagaaacctagcaaaaatctcgtctttcgccgcgctctccctcctctgattcctgctgttcttgatcttggatctcaattcccaaccaagaacacacagacagagaaaggaaggagaagaagatgtcgaacgacaacaagaaggtgtataccctggaggaggtcgccaagcacaactccaaggacgactgctggctcatcatcggcggaaaggtatacaatgtgtcgaaattccttgaggaccatccaggaggtgatgatgtcttgctatcttcaactggcaaggacgcgactgacgattttgaggatgtcgggcacagcacgactgctcgtgcgatgatggatgagtattacgttggcgacatcgacacat

SEQ ID NO: 38001 - DNA, 440 bp, Oryza sativa
  Clone ID: uC-osrocyp027c10b1
caacccatggatgagggtggagtccgggagagctctccgggagaaggtgttcgagcgtctcagcaaagaagccaccgtgtccaccgacgccgccgccgccgccgccggcgtcgcgcccgacgtcggctgggtatccgacctcatcaactgagcaaacccaacaaggcggcagccatggctgagtaagaattttcctcatgcctccatagtggaagcagaaggtagcaggaagagaaggaaaaaaaaagaaaatggaaaagtttttccaaccaaaaaaatttattatttttttattttagtttcttgcttgttagattctcctaatccttgtacatatgttcatcatcatcatctaccatcctatgtgaatattcttggatgggatgtggggggggccagggaggcaggcaaagggcaaggcaggatttgtttggggtttt

SEQ ID NO: 38002 - DNA, 370 bp, Oryza sativa
  unsure (1)..(370): unsure at all n locations
  Clone ID: uC-osrocyp027c11b1
taccattgaggtgggtatctttgaggtcaaggccacagctggtgacacccatcttggtggtgaagattttgacaaccgcatggtcaaccactttgtgcaagaattcaagaggaagaacaagaaggatatcactggcaaccccagggctctcaggaggttgaggacagcttgtgagagggcgaagaggaccctgtcctccactgcccagaccaccattgagatcgattccttgtatgagggcatcgatttctactcaaccatcacccgtgccaggtttgaggagctcaacatggatctcttcaggaagtgtatggagcctgtggagaagtgcctcagggatgctaagatggacaagagctctgntcatgat

SEQ ID NO: 38003 - DNA, 486 bp, Oryza sativa
  Clone ID: uC-osrocyp027c12b1
tccacgcgtccgcctcctcctccttgactgtcctaacaaaaaaatcgattttttgttctcctcttgatggttgctgcgaccttcgatgtccctatgcggaatgaaatctcctgctggggcggctaaaaatcggagattttctgtctttttgatccgtctttagtggagctttttgagcctgatttatgcgatgggcttcttggcgtgcttgttcccatgtcctcaagaggtgagagatgaggatgaggaaccaagaagcggccagagagtcagctcagtggaatattcaaagtcgtcagagagttgcccactgaagactgaagggtcgatagatatggttggaattcggcgaaataaggggcatggtgaagcaacgatcttcactttgcgcgagcttgctgatgctaccaacaaacttcagcacggagtgccttttgggccgaggaggattcggcagtgtgtataagcatttcttcatgatagaca

SEQ ID NO: 38004 - DNA, 397 bp, Oryza sativa
  Clone ID: uC-osrocyp027d01b1
tgtgtcggtttttcttttgtgacacatatagtgtaggtttacttccagcttcgtcgattaccagacggcaccggcgtcgcgcgagcgagcttgatcttgcgccttgtgcctgctagctgcttcggcggcggcggttatcttcttccgatctgtaacagccccgatcaagaaaggatccaacccacctaggaggactaacctgaacgtgctaatgagttcaaagctagtaacatcacctctgaaatccatggagcagggccatctagagcaacctctgcgcgatccgcaggcgccggcggagcagcatgacatggggttatcttccctgacgctcctcggcttcggcttcctgaccttcaactcgggaatggcagtgtacagatcagatagagacttg

SEQ ID NO: 38005 - DNA, 422 bp, Oryza sativa
  Clone ID: uC-osrocyp027d02b1
tctccccgtaaattctcccccgaaaccgcccgagatggcggctgcggcggcgcggctgttggagagggcgacgagaaccgcggcatcctgctcctccgctcttctccgcagtcctctggattctttctccggacgcttcccaagcttccggtcgcccctcctacggccggctccggcgccgtcgaccgtcttcccccggggcctctccgacacggccttcgacgcgcaggcgctggacacccgcgtacccgccaccgtcatcaccggcttcctcggctccggcaagacaaccctcctgaatcacattttaacttcacagcatgggaagagaatcgctgtaattgagaacgagttttgtgaggtggacattgatagctcactcgttgcaagtcattcatcagttgccgaggacattgaaatgg

SEQ ID NO: 38006 - DNA, 138 bp, Oryza sativa
  Clone ID: uC-osrocyp027d03b1
tgcttttctacttcctcctcatgagctagtcgtccgccttatatgtgcctatctccagtgggcatcaccaccatcgtcggctgcttgcgacatatactcttccgatatcaatagcactgatggtgtatttggacgatc

SEQ ID NO: 38007 - DNA, 347 bp, Oryza sativa
  Clone ID: uC-osrocyp027d04b1
gtcgccgagacggtgctctttttcttcttaggccaggccgcgtgcgggctcaccttcggcatcgtgccgtacgtgtcgcggaggtcgctggggctcatctccgggatgaccgggggcgggggcaacgagggcgccgtgctgacgcagcacatctttttacacggcacagagtacaagacggagaccaggatcaagtacatggggctcatgatcatggcgtgcacgctgtccgccatgctcatctacttaccgcagagaagcggcatgctcgtatgcccgaagaagggggccacggcggaggagtactacaggcgagagtggtcggatcacgagcgcgagaagggttt

SEQ ID NO: 38008 - DNA, 178 bp, Oryza sativa
  Clone ID: uC-osrocyp027d08b1
ttgcgcgcgtggttccacatcattaccggggccatctctttaaatgtacaggctacgagtgaggagcatgataaatgtgggagggcggagatagtgagtttcacattatcactaacatatgttatctgaattgatgaatcctattgatacacgtccttttcgaaactattggctagaa

SEQ ID NO: 38009 - DNA, 438 bp, Oryza sativa
  Clone ID: uC-osrocyp027d10b1
ttctgagggaactccttatgtagaagatacattaaactgcgaaattactttgccagaaaaccagcatctgggtgaaaccttaacgtcagatacaatgctaggttcaggtgatgcttcgcttatccaggaaatctctgacactgcagcttcatctgatgcaaaggacaaagatactgagcagaatcctgaacttcatagaaaaaatgggatttcaccatcaagaatgcctgattatacagaatatggacatgctgatcagttgctttcatttggttcaaatgatgtgtccacagaagcaaataagccaggaaatggggtggagactttagcatccaatcaaaatgaaggagcagacgaattagaaaaccaaaacagtttatacgagtctacaacacccgacaaatcttttgcctcttctggaattcctgcttccacact

SEQ ID NO: 38010 - DNA, 443 bp, Oryza sativa
  unsure (1)..(443): unsure at all n locations
  Clone ID: uC-osrocyp027d11b1
ttatcagcaaggagaaggaagaagaagaaggcttccgtttctatcgccgaaaggttgctccctttctcctcacgattcgagctgacgaggtgaaggccatggagaagagcaccacgagctgacccgaatccccctctctccagcttactgttcctcggagatgggctgcttcggccgcgtgagggatatgatcaagaagcggaaggggaagaagaggccgccgccgcacgaggggccagcgccgccgccgccgccgncgtcggcgctcgccggctcgtcccactccacctccacggtgtcgtcgtcggccgtcgcgacgagccagtcgaccgaagactccagcgcggcggccgccaagcccgccgccgggtggagcaangtcgtccgggtcggtctcgtcggcgcggagcattccggagctgtaccaggagaggggcgcgagc

SEQ ID NO: 38011 - DNA, 327 bp, Oryza sativa
  Clone ID: uC-osrocyp027e03b1
tgcgtgtctccttcctcctcgcgagctcgccggccgcctcgcctgcgtcgatctccagtgggcagcggcgccggtgtctgctgcttgcgccgtatactcgcccgctgccaagagcacccctggtgaatttgcaagatcagttgggagtaaggacattctggatgctgtaaaattggtttttataagcagagcaggagatgaggctaactgctgggcaagtgcatcgacatgagcttgcattggcatctttgatatcatgcttggaccttggcgacaacctcccattgagaatgctttgaataccacgagcggtttgatttcaccaga

SEQ ID NO: 38012 - DNA, 382 bp, Oryza sativa
  Clone ID: uC-osrocyp027e05b1
tgttttcgtgggcggacgcgtgggttggatatcaatctattgtatgccaccacggccatgcttcaagggttctgtgccaatcaatctgtctgatcgtcttaaccaagtgctacgttgggctcttgggtctgttgagattctgcttagcagacattgtcctatctggtatggttacaatgggcgtttgaaacttctggagaggctggcttacattaacaccattgtttatccaattacatccattccacttatcgcctattgtgtgcttcctgctatctgtctcctcaccaacaaatttatcattcctgagattagcaattatgctgggatgttctttattctggttttcgcctccattttcgcaactggtaattctggagct

SEQ ID NO: 38013 - DNA, 418 bp, Oryza sativa
  Clone ID: uC-osrocyp027e06b1
tcctttccgtcatgctcctagtttctcactctacctgtgccctcctcccctagctaacccctctctctttctctctctaaagctgcaatctctctacctttctctctctaaaagctggagcagcttaatttctatctctctttctctttctcagctgggatcgcacagtgaagctagggagaggctatagctatggggagcgtgtacctgagcagcgaggctagtgacaatctatctgtcacacacacacacacaaaaacactcgtggattttaggcagatgatggcctgcaaaggaagctgcccttgccagcccaaatgttggacgtgcacgctagccctacctattaaacccgtccttctacgatgctccctttccttcttctccactggcgacgccgacggcaccttttccggca

SEQ ID NO: 38014 - DNA, 520 bp, Oryza sativa
  Clone ID: uC-osrocyp027e07b1
ggccgggcccaggcaactttttttgaaccgccatttacactggttaccacacagtacggtactactttgttgccaccgttgtccactggtaatggaactattgctgtttatggtgagactattctcgccactcctaatagcacagtggatgcaccagttgatattaatgtttttatatcgatgggagatgattttgaagtatataatccaggtaatggatttcaatattatggttttgttccccaatctggaacggagttacacccagtttcaaacacgaccgaggagctaaatgctccattaaaggatgagtctttaatgattgggggcaaacatgtcgtgaatgataagattccattagtgtatatgggcgagtctataaaatcctttagaacattgttgaagaggtataatatgcatagacgtgatatgttttcaaatactgttggagttaaggcctatcacggcatacgaccgcagtttcctcctttgcgaggcaaaatgggggtgctgaggattt

SEQ ID NO: 38015 - DNA, 482 bp, Oryza sativa
  Clone ID: uC-osrocyp027e10b1
ttagtcgctagcctccagattcccgcgtcccctcccctcccctccccatccatggcgcctcctctaaaccctaaccccgcgtagtccccgcccccctcccctacacctcctcggtcccccggctgtccccgtgcccgcgcccctcgctcccgcctcgccggcggaggcaggccatggagcaccaccaccacaagcccgggctgcgggtgcgcctccgcatcaccgccgcgcggcgacgcgcgtggctgtccgcgggcctgcagcccgcctgccgcaagccgccgcgccgcgacccgtccgactccgtccacaaggtcgcgcgccgcgagatcggcggggggcaccgccggccgccgcggcccgcggcgccctccttctccgccttctcctgccccgagaaattccggaatttccagctgcaggaagagtatgacacctatgatgatgaagtccattttcttgttcagctgccatttttgtgg

SEQ ID NO: 38016 - DNA, 458 bp, Oryza sativa
  Clone ID: uC-osrocyp027e11b1
tacaagcctactcctagaaggttcaaggagagaggctgaggataagatagttcctagagaaatcgatgcagatgattctgatgtggaacccagaagtgatgatgaaagtgatgaggatgatgacgacgatgatgacactgaagctctaatggcagagcttgaaagaatcaagaaagaaagagctgaagaaaaccttagaaaggaacgccaacaagcagaagaggaggctaagatgaaggaagctgaactgatgcggggaaaccccctgatcaatattaacaacgccggatccttcaatgttaagagaaggtgggatgatgaatgttgtattcaagaaccaggctcgtggagagaccaagacaccgaaacgtttcatcaacgacactatcagaagtgatttccaccgtaagtttttgcagaggtacatgaagtgatgctgccgttgtacgctgttccct

SEQ ID NO: 38017 - DNA, 503 bp, Oryza sativa
  unsure (1)..(503): unsure at all n locations
  Clone ID: uC-osrocyp027f01b1
tttattgtcatgcatgatggccattttttgaagacaagctgtgggagtccaaactatgctgctccagaggtgatctctggtaaattatatgctggacctgaggttgatgtatggagctgtggagtgatcctttatgctctcctttgtggtactcttccatttgatgatgagaatatccccaacctattcaaaaagataaagggtggtatatatactctcccaagtcatttatctgctctggccagagatttgatcccaaggatgcttgttgttgatccaatgaagagaatcacaattcgtgaaattcgagagcatcagtggtttcagattcgccttcctcgttacttagcagtgcctccaccagacacagcacagcaagccaaaatgattgatgaagatacccttcaagatgtcgtaaacttgggttatggaaaggaccatgtgtgtgaatctctgcgcaatagactgcagaatgaggcaactngtgcatattatttactctt

SEQ ID NO: 38018 - DNA, 391 bp, Oryza sativa
  Clone ID: uC-osrocyp027f03b1
tgtttgtctgctacctcctcacgagcttgtcgggcgcctattatgcgtctatctccagtgggcagcagcgccactgtctgctgcttgcgacatatactcgcccgctgccaagagcacccatggtgtatttgcgagatcagttgggagtaaggacattctggctgctgtaaaattggttcttatacgcagagcagcagatgaggctgactgatgggcaagcgcatcgacatgtgcttgcattggcatctacgctatcatgctttgtcatcggagacaacctcccatagagaatagttttattaccatgagccggttagatttcaccataccgcttggattggttctgaaacagtacaagataggaggggttcactaactctacctagtcttg

SEQ ID NO: 38019 - DNA, 330 bp, Oryza sativa
  Clone ID: uC-osrocyp027f04b1
tgtggtcctgcttcctcctcacgagctagtcggccgccttggctgcgtcgagctccagtgggcagcagcgccatggtctgctgcttgcgacgtatactcgcccgctgtcaagagcacccccggtgaatttgccagaacagtcgggagtaaggacattttggctgctgtaaaattggatgtcatacgcagagcacgagatgaggctaactgatgttcatgggcgtgatgaggctccgggcccagccttgtatggggatatgctttatcctgggcgacaaccacccatagagaatgcttttattaccacgagccgtttgaatttaccacacc

SEQ ID NO: 38020 - DNA, 350 bp, Oryza sativa
  Clone ID: uC-osrocyp027f10b1
tttgtattgtattataggagtagaagcaaagctccatcgctctgcagctaagccacgagcaacacaaaccacacctgttctgcggcgagaccatggcgccgccaccggccgctcacgccgctggcctccgcgtcctccgcacgacgcgcgtcgcgccggcgccgcccgccggcgagcccgcgctgcccaagcgagccctgcctctcatcttcatggacgtgatgtggctccgcgcccagcccgtcgagcgcgtcttcttctaccgcctcggccccgacgacgatgtcgacgccgtgctgtcccggatggaggagtcgctgccacgggcgatccacgccttctacccgctc

SEQ ID NO: 38021 - DNA, 438 bp, Oryza sativa
  Clone ID: uC-osrocyp027f11b1
ttggcgacatctacggcgtcaccaccggcttcggcggcacctcccaccgccgcaccaaggacggccccgccctccaagtcgagctcctcaggcatctcaacgccggaatcttcggcactggctccgatggccacacgctgccgtcggagacggtgcgggcggccatgctcgtgcgcatcaacaccctcctccagggctactccggcatccggttcgagatcctcgaggccatcaccaagctgctcaacaccggcgtcacgccgtgcctgccgctccgtggcaccatcaccgcgttcggtgacctggttcccctgtcctacattgccggcctcatcaccggccgccccaactcgcaggccatctcgcccgacggcaggaaggtgggacgccgccgaggcgttcaagctcgccggcatcgagggtggcttcttcacgctg

SEQ ID NO: 38022 - DNA, 441 bp, Oryza sativa
  Clone ID: uC-osrocyp027g01b1
tcagttgcagccatggcgaagcccactcctgctcctcgcgccacaccattcctcctcgccgccgtgctctccatcgtcgtcgtcgcggcctccggcgcggaggcgcggtggtacggcggcggcggcggcggcgggtacagccccagccccagcccggtgtcgtcgatcgtcagcgagcagctgtacgcctccctgttcctgcacaaggacgacgcggcctgcccggcgagggggttctacacctacgcgtccttcgtcagggccgcgacgaggttcccccggttcgccgccacgggctgcgccgacgcccgcaagcgcgaggtcgccgccttcctcgcgcagatctcccacgagaccaccggcggctgggccaccgggcccgacggcccctacgcctggggcctttgctacaggaggagatcaacccgcagagcaactact

SEQ ID NO: 38023 - DNA, 463 bp, Oryza sativa
  Clone ID: uC-osrocyp027g04b1
ttccttgccagtttggtcgctctcgatttcgatttcccccaaatccaccgcaagagaaagccaagtcgccgccgagaagcgaagaggagatggcccgtacgaagcagaccgcccgcaagtccaccggcggcaaggccccgaggaagcagctcgccaccaaggcggcgaggaagtctgctccgaccaccggcggcgtgaagaagccccaccgctacaggccggggacggtggcgctccgcgagatccgcaagtaccagaagagtacggagctcctgatccgcaagctccccttccagcgcctcgtccgcgagatcgcgcaggacttcaagaccgacctccgctttcagagccatgcggtgctcgccctcaagaggccgccgaggcctacctcgtcgggctctttgaggacaccaacctttgcgccattcacgccagcgcgtcaccattatgcccaggacattca

SEQ ID NO: 38024 - DNA, 340 bp, Oryza sativa
  Clone ID: uC-osrocyp027g05b1
tgcgtttctccttcctcctcacaagctatccgtccgccttacatgtgcagatctccagtgggcagcagctccattgtatgctgcttgcatctgatactggcccgatgtcaagagcaccgctggtgtgtttgcgagatcacttgggagtaaggacatttctggttgctgtaaaatcggttttgatacgcagagcaggtcatgatgctaacttgcgggcaagcgcatcgacatgagcttgcattgggttcttcgatatcatgctttgtggtcggcggcaaccttccattgagaatgctgtgattaccacgagcaggtagattttcaccagaccgctttgctt

SEQ ID NO: 38025 - DNA, 386 bp, Oryza sativa
  Clone ID: uC-osrocyp027g06b1
ttttctcttgcttcctcatcataaccattccatccgcggttgatgagaagagctccagggagcatctactcaaatggcgggcgttggcaatatatagactcccattgatcacagcctatgcgatcatgcattctagaccaattgttagaaacgcctttcgaactgcaagatgcccgacctcaagattgctaggatgacacaatctgaaattcagagcgatctgtgttaccagagccaggctgtgcttgacctataaaaagtttgagaaacgtaccttgttggtctattagaggacaccaacctgtgcgctattaatgacaatcgtgtgcccattttttttcaagtaatacaattggctaggaggatttgtggagagaggtcttaaa

SEQ ID NO: 38026 - DNA, 250 bp, Oryza sativa
  Clone ID: uC-osrocyp027g07b1
tcgttgacgcctgggaccactcctggaccggtgcaagagtcattgaaggcgctgggctacaaggggcaccagggcaaatgtctgccacagtaaacgcttcgacgagcttcgatccgagcgccacctagccgcacggcggggaattggaccgcatcgtccgacggattacacggccgctgacccggagattgccagactgtggccgtctggggcgcatggaggcggtgcccgacaagcatagccatgccgt

SEQ ID NO: 38027 - DNA, 380 bp, Oryza sativa
  unsure (1)..(380): unsure at all n locations
  Clone ID: uC-osrocyp027g10b1
tccacgcgtccgatttcaaaataaccccgccgcctccgccgccgccgccgacgaggaggggtcaccgatgttgtccgaccaggagctggcccggtacgtggagtcgttcgtgcgccaggcggcggccgtcccgggcgccgtggcggcggcggggggcatatcggcggagtccgtggcgcgccagctcggcccccagctcggcctcgacctcacccccaaggcccccctcatccgcgacatcctcctcgccctcttctcccccccgccgcagggggcccccttcacctcctccgctccctccccctccgnctccgacttcgnctccgccttcgncgncggtgatggccactttttcttccagcagcagcagcagcagcagc

SEQ ID NO: 38028 - DNA, 510 bp, Oryza sativa
  Clone ID: uC-osrocyp027g11b1
cagaccgctcgttagttcacaggaggaaaggctcccaggaagcagcttgcaaccaaggctgctcgtaagtctgctcccaccactggaggagttaagaagccccaccgttaccgccctggaactgttgccctccgtgagattcgcaagtaccagaagagtactgagcttttgatcaggaagctgcccttccagaggcttgttagggaaattgcacaggacttcaagaccgatctgcgtttccagagccatgctgtccttgccctccaggaggctgcggaggcataccttgttggtctcttcgaggacaccaacctgtgcgctattcatgccaagcgtgtgaccatcatgcctaaggacattcagctggctaggaggattcgtggtgagagggcttaaattcccctcggcgactcctttgacaaatgaagcatgcgtcgtagtgttagtagtgggtttaatcttttgcttataagaacaatctgagtagggtgtattttgtggaacaatatg

SEQ ID NO: 38029 - DNA, 353 bp, Oryza sativa
  Clone ID: uC-osrocyp027h01b1
gcctgcgcccaccgtgggtggtcgcctttaacacccccctcgctccgttaccgtctctccccttccccctccccctcccccacacccgctcgctgctcattcatccacgcgcggttcgatttgatctttgattgattgaaacgctgccgtcgaatcgaaaaaaataattcaaggattgtgtttttgttggttcgtcctgtaataacgttttttttgattgttcgttcgttcgttcgtctgtggatgtgaggaggaggaaagaggtcctctgattcgggagttgcggagttcttggatttggcctaaggaggagagattttcgtttttcgtatcaacccgaccgctgtgtgatg

SEQ ID NO: 38030 - DNA, 452 bp, Oryza sativa
  unsure (1)..(452): unsure at all n locations
  Clone ID: uC-osrocyp027h03b1
tgtgtctggtcataatattcacctaaaccaaatcggctctggaataggtgctccgacaaatgtgtctggattgagtttccatcaattgggcacgcaaagtcgtgaaatggcacatgataaaccgcctgctggtggtggttggacgccacatagaaacagtggaccaaccagaaaagctccttcaaggggtgagcagaatgattactcacagaactttgtggacactggcatgcgacctcaaaatttcattagagaactggatcttacaagtgtagcagaggactatccaaaattgagagaactcatccagaggaaagatgaaattgttgccaattctgcttcaccaccaatgtattataagntgtgatctgaggcaacatgttctttcttcaagatttttttggtacaaaagtttgatgttattcttgtggatccttcatgggaggagtatg

SEQ ID NO: 38031 - DNA, 473 bp, Oryza sativa
  Clone ID: uC-osrocyp027h04b1
ttcttttcgccaacaactatacaaagaaattgaggtagcaagtgttgattccttccagggaagagaaaaagattacataatcctgtcttgtgttagaagcaatgagcaccagggtattgggtttcttaatgatccacgcaggttaaatgtcgcattaactcgtgctcggtacggtatagttattcttgggaaccctaaagttctaagcaagcagccactctggaatagtttattgacacattataaggagcatgagtgtttggtagaaggacctttgaacaacttaaagcagagtatggtgcaatttcaaaagccaaaaaagatctacaatgatcgacgactcttcctgggtggcggtcaaggtgttatgcaaggagctagttttggtgctgcaggcacaaacccagtggcagataagaaaagtggtagggggaaagggcattcctttgttccatttggcccaccaaatgggg

SEQ ID NO: 38032 - DNA, 446 bp, Oryza sativa
  Clone ID: uC-osrocyp027h06b1
tttgtttcgtgggtcgatttcgatttcccccagatccaccgcatgagaaagccatgtcgtcgccgagaagcgaagaggagatggcccgtacgaagcagaccgcccgcaagtccaccggcggcatggccccgaggaagcagctcgccaccaaggcggcgaggaagtctgctccgaccaccggcggcgtgaagaagccccaccgctacaggccggggacggtggcgctccgcgagatccgcaagtaccagaagagtacggagctcctgatccgcaagctccccttccagcgccttgtccgcgagatcgcgcaggactttaaggccgacctccgctttcagagccatgcggtgctcgccctccaagaggccgtcgaggcctaccttgtcgggctctttgaggacaccaacctctgcgccattcacgccaagcgcgttaccatcatgccc

SEQ ID NO: 38033 - DNA, 315 bp, Oryza sativa
  Clone ID: uC-osrocyp027h07b1
gttcttgttaacttcgtttgagaccatggcaatatcagaaatgtcagctcttttctttctatttagtgctttgctaagaagttctttggtccacagtcaaggattgcagatagggttttatgataataattgccctgatgctgaggacatagtcaggtctaccgtcgaaaagtattacaacaatgatgcaaccatagccccaggcttgctcaggctacatttccatgactgttttgttcaaggatgtgatgcgtcagttttgatttcaggtgcatcctctgagaggactgcaccacaaaattttggtatcagggg

SEQ ID NO: 38034 - DNA, 372 bp, Oryza sativa
  unsure (1)..(372): unsure at all n locations
  Clone ID: uC-osrocyp027h08b1
tcgtattttttcgcctgcacctctttacttcatcccgccttcgttcgctcggtcgtcttccggtaccgcgtgcgcccttgccggccgcgcccatctttgtcgcccttatctatccccccccccccagcatccatccaatggcaattaccgaccccccagcccccggcagcgccagtcggtcgtccatgggcggcggcgggggccttggagagatgcgagaggtaccgttctgccccgaggcccccgcggatgggggcgaggggggcgccggggagaacacctgcgagctcttcgacggggagggcgnaagttttnaaggccctgcacgccgcggacaacacctgtcgcgccgtgccctgggccgtcctgcga

SEQ ID NO: 38035 - DNA, 280 bp, Oryza sativa
  Clone ID: uC-osrocyp027h09b1
tcgtatactcgtggcagcacctgtggacttgatgccgcctttggtcgttaggacgccttacggaacacgtaccgcccttgccggccgagcccatgtttgtcgcccttatggatggacaccctaccagcatgcatgcaacggcaattacacaacatagcagacactgatagtgcagaagagcattgcatgggcggaggtgtgggccttgaacagatacatggggcaccgaactgccacatggtcccagcataaggggacaaggggtgtacacgggagaaca

SEQ ID NO: 38036 - DNA, 495 bp, Oryza sativa
  Clone ID: uC-osrocyp027h10b1
ttttacttcttccactagggttcgtcttgctgctccctccactgctcgcctcgcctccgccaccatctgaaatcgagtgagtgggagctaaggcggcggccccgtcgagatggcgctcgtattgcatactttcgatggaaacaagaatgcattcaaggcactcattgctgccgagtactctggtgtcaaggttgagttggcaaagaactttcagatgggtgtctccaacaagactcctgagtatctcaagatgaatcctattgggaaggtccctattctagagactcctgatggtcctgtttttgaaagcaatgcgattgcacgatatgttactcgctcgaagtctgacaacccactctatgggtcttcactgattgaatatgcccacattgagcagtggattgacttttcagccacagaggttgatgctaatactggaaaatggctcttcccacgtcttgggatttgctcttatgttgctgtcagtgaggaagc

SEQ ID NO: 38037 - DNA, 425 bp, Oryza sativa
  unsure (1)..(425): unsure at all n locations
  Clone ID: uC-osrocyp027h11b1
tcgtgtacctgtatgagctggattcgcactgggatcggctgctgctatctgcatccaaagcaaagatcagctccccattctcccgcgaaacacttcgcgccattttggtgcagatgacggctgcgtccaagtgcaggaatggctcgatcaagtactggctcagcgccggccccggcgacttcctcctctcgccaaagggctgcactgcgccggcgttctacgccgtcgtcatcgcgtccgccgccgccgacgccgccggcgggcacccgcggctcaaggagggcgtgagggcgatcacgtcgacggtgccgatgaaggacccgttcttcgcggcgatgaagagcgtcaactacctggcgaacgcgctggccattgccgangcagaagaacgcggcgcgtacgcgtcggtgtgggtggacggcgac

SEQ ID NO: 38038 - DNA, 281 bp, Oryza sativa
  Clone ID: uC-osrocyp028a02b1
tctaggcacacataggctagctccccatactgtgagaccccttggcttctggaggaggaggaggaggctatcgccatggcccctaccaccagcacgggcaccttggccgcggcgaaggcgctgattacgtgcacagcagcaaggtcttggagagcttcttcgtgagccaacccgggggcgttggtatcctcggtggaggaggtggcgtcaagcgacccagcggggccctccagatcctgccgtactccagattcacagactaccctgaggggtaattggac

SEQ ID NO: 38039 - DNA, 427 bp, Oryza sativa
  Clone ID: uC-osrocyp028a03b1
tttcgagcaacatacttcttgacaaggacctgtgcctattataagtctgattgcggattggcaaggctcctcccacccaacgcaactcatgtgagcacccgaggtgcaggcacattaggatacctggcacctgaatacgctatccgaggccaggtgacaaagaaatccgacatctattgctctggtgttcttctactggaaatcgttagcggcagatgcaacaccaacacaagattggcttatgaagatcaattccttctcgaaaggacatgggtacgctacgagcaagaacgcctggctgagaacatcgatgctgacctggggaatgacctggacggcgacgaggcatggccggttctgatagattgggccgtttgcacacagacgcaaaggcgccgccgcccaacatgagcaccgtggtcaggat

SEQ ID NO: 38040 - DNA, 106 bp, Oryza sativa
  Clone ID: uC-osrocyp028a04b1
tggatgggccctccttgctttatttgattgacaccaaacatttttgtctgtgaacttgtaacatgcaacagtaaaaatggctttcctataccaaactttggtttct

SEQ ID NO: 38041 - DNA, 350 bp, Oryza sativa
  Clone ID: uC-osrocyp028a07b1
cggcggcacgcgagacttcggcgccttggagcaccacgccgccgacggtgcgtttgtagcgcgggcggcgatggtggccggcagccacacactacgcgcgggtactggagctctgacagacggaggccaacccgggcgctggccgtgccatccacgcgcgcgccagcaaggatggaactctcaacagagcctacctacggaacaacctgctcttctactacggcaagaccgccggcggcgccggagggatgcggaacgcgcgacgcctgtgcgacgagcatcccctaggcgcgatacaacgagcacacctggaactcgctcctgcaaatccacggcaagaccggacgcta

SEQ ID NO: 38042 - DNA, 333 bp, Oryza sativa
  unsure (1)..(333): unsure at all n locations
  Clone ID: uC-osrocyp028a10b1
atacgcncgcgagtacggctacggcgagctgtgtttatttaggagcataacattttgatcccgaacgtcaagaacgagaaggtggaggcgctgctctccgagccgctgcttcagaagttctccccgcagccgtcgctgctgctcaagggcctcgtcgtgtgcaccggcaaccagttctgcggccaggccatcatcgagacgaagcagcgggcgctgctggtgacgtcgcaggtggagaagctcgtgtcggtgccccgggcggtgcggatgcactggaccgggtgctcaaacagctgggccaggtgcaggtcgtcgacatcggctttatgggct

SEQ ID NO: 38043 - DNA, 300 bp, Oryza sativa
  Clone ID: uC-osrocyp028a11b1
cctgggcgcatcctcctccgtgtggggcgcggcgccaatgacggcgaccacgggtgtcggtatccccgctgccggggaggaccgctgcggcgaggacagaaccggcccagcggcggcgcggatgtgcacggcgacaacggcgactggtgactgcgacgacggcgacctcgacagaagcggcgacgacggtgaccacgaaggaagtggcgggaccgcgccctcccatccccttctcttccctcttccagatcggtccgaggggaggaggctgccgccgggaagaacgggcgctgggaggac

SEQ ID NO: 38044 - DNA, 72 bp, Oryza sativa
  Clone ID: uC-osrocyp028a12b1
ggaccggaccggaatacccgggcctcgcgagccaagctattatgcccctccccggcggcggcggcagcgggg

SEQ ID NO: 38045 - DNA, 490 bp, Oryza sativa
  Clone ID: uC-osrocyp028b03b1
cctacgcgtgcgggaggatggcaggacccttgctgactacaacatccagaaggagtcgaccctttaccttgggctacgtctacgtggtggcatgcagatctgtgtcaagactctgaccggcacgactatcacccttgaggtggagtcttctgacaccatcgacaacgtgaaggccaagatccaggacaaagagggcatgctcccagaccagcagcgactcatgttcgccggcaagcagctggaggatggcaggacccttgctgactacaacatccagaaggagtccaccctccaccttgggctacggctccgtggtggcatgcagatctttgtcaagacactgaccggtaagaccatcaccctcgagggggaatcttctgacaccatcgacaacgtcgaggccaagatccaggacaaggagggcattctcccggaccagctgcgtcttatacttgccggcaagcagcttgaggacggcaggacccttgct

SEQ ID NO: 38046 - DNA, 377 bp, Oryza sativa
  Clone ID: uC-osrocyp028b04b1
atgacgcgtgggcagaaaatggcaccttccaaggtcagcctcgccgccgtgctcgccgtggccatctcgctggccatggcggccaccaccaccacctcggcgcagaacacgccgcaggactacgtcaacctgcacaacagcgcgcggcgcgcggacggcgtcggcccggtgagctgggaccccaaggtcgccagcttcgcgcagagctacgcggccaagcgcgccggcgactgccggctgcagcactccggcgggccgtacggcgagaacatcttctggggctcggcggggcgcgcctggagcgccgccgacgcggtggcgtcgcgggtgggcgagaagaagaactaccactacgacaccaacacgtgcgacccggg

SEQ ID NO: 38047 - DNA, 516 bp, Oryza sativa
  unsure (1)..(516): unsure at all n locations
  Clone ID: uC-osrocyp028b07b1
ctccgcccctaggcattttacggctaggattgccgcccgccggaatatctcccccaccgccgccgccctcccgccggcccacgggattggattcgcctctttacaaggcctatcctgccctctctactaccacccttatcgatctctatctggtttcctttacctttcgatttgattcaaccacatcgaaatcgattctatctctacccgcgacgcgatgaccacctcctaccgctactatattcacaactcgtgtgatggatgtgcttacgtgctttccagtgccatgggatcgtattgtggccttcatcttggtttctccaccaatgtccgtggggaggaaccatggccaacaatggaattatgttcttcttgttgctggagcaccgntatcttcttctcctattattttctggtgccgccttcttctgtgccaaccagccacaccagcagaagttgtgcttcgactgatggtggcgggaagcacaattaattgtgccctttatttcagagcat

SEQ ID NO: 38048 - DNA, 478 bp, Oryza sativa
  Clone ID: uC-osrocyp028b09b1
tcttacactttgtttctcttccccgtctcgtggtctattgaaaccgagaggagagagagggagaggagcgctgcctattttccggagggggagatctttttcttctccctgaaggttcgagatcgatctgcgacgaggaggagcggggaatcgtaactttatttccgaggaaatttcaacaaattgatgcactaatggagtccaagggtggcaaaaagaagtctagcagtagtcgttcctccctgatgtacgaagctcccctcggctacagcattgaggacctccgacctgccggcggcatcaagaagttccgctctgctgcttactccaactgcgcgaggaagccctcttgatagcccccttggctaccttgatctagtagtttagttactcctctgaattcctgttttgggcttttttacatctctctggctagctgcttcccagtgaccgggaaggacattagtcctgcttcctt

SEQ ID NO: 38049 - DNA, 455 bp, Oryza sativa
  Clone ID: uC-osrocyp028b10b1
cttctcggctccctgcttatccctccactccccgtccggccatggcggggtcgttttttctccgagccgcccgccggcgagacctcgcctcgcccctcggaacgttgaccgtcaatgctcaatcggcatattctgcgaatatttgttcacaatggggtagttttgcaagagctttcagtgtaaaaccaactggaaacgaggttattggaattgatttgggaacaactaattcttgtgtttctgttatggagggaaagaaccccaaagtgatagagaattcagaaggcaccaggacaacaccatcagttgtggcctttaatcagaagggagagcgacttgttggaactcccagcaagcgtcaagcagtgaccaacccacaaaacactttctttggcacaaaacgtctgattgggagacgcttttgaggatccacaaacacagaaagagatgaaaat

SEQ ID NO: 38050 - DNA, 341 bp, Oryza sativa
  Clone ID: uC-osrocyp028b12b1
ttggctttcccaaacgcaaagtatggataggagtgccgatcagcccccactgggggcctttggactgcacctcggattgcggcatggctggacagatgctaccgacgattgcgcttgttgctgtggccatctgtatcaccgcggcggcggcggcgaaggtgccggcgatatacgtgctcggcgactccacggccgatgtcggcaacaacaactacctgaccggcgccgccctgccgcgggcaaacttccccgacaacggcattgactttcccacggcgcgggccaccggccggttcagcaacgggtacaacggcgtcgacttcttggctcttaacatggga

SEQ ID NO: 38051 - DNA, 390 bp, Oryza sativa
  Clone ID: uC-osrocyp028c01b1
attatggggagaacgagctctttcctgggcagatacttttgcagcttgtactacttatgcttgctttggtttgtgagccttggatgctgaatcctaagccattttttttgaagaagcaacatgagcagaggcaccatggccagcagtacaccatgcttcaggtcactgatgaatcagtgacagagctagaagaacaccaggatgaccctcaccaccatgaggagttcgaatttagcgaagcctctgttcaccagctgctccacacaattgagtatgcgctctgagcagtcataaagacagtcttttaccttcgtctttaggatcttagttttgcacactaggagctggccactgtattttacgagaaagttcttgttttataatgggggt

SEQ ID NO: 38052 - DNA, 278 bp, Oryza sativa
  Clone ID: uC-osrocyp028c02b1
gcgttttcgagcccgacccgcctgggcttcgccggcaacaaagtgactcataactaggcaaaaatgcatcggcaggagaatgtttacatgggcaagctggtccagcaggttgaagggcatgaggtgatggccgtgaacatggagatggttgcatagactgtacattaagaagagctcactgcagtggaatgcaacctctcctctgttgcttagaagaatgtgattggggcccaccacgcctccagagatgtcgatttattcagtgcacactatgagga

SEQ ID NO: 38053 - DNA, 489 bp, Oryza sativa
  Clone ID: uC-osrocyp028c03b1
tcgcatacacgagacttatacgaacccgacccgcctcgccgccgccgcggccgatgttatcccttaattggtcaaaatgtctcgggaggagaatgtctacatggccaagctggccgagcaggctgaaaggtatgaggagatggttgagtacatggagaaggttgcaaagactgtagatgtggaagagctcactgttgaggagcgcaacctcttgtctgttgcttacaagaatgtgattggtgcccgccgtgcctcctggcgtattgtctcatccattgaacagaaggaggagggtcgtggcaatgaggaacatgttactctgatcaaggagtaccgtggcaagattgaagctgagctgagccagatttgcgatggtatcctgcaagtgcttgactcacaccttgtgcccttatctactgttgcagaatttaggtgttttacctcacgatgaaaggtgattaccacaggtcccttgcggaatttaagact

SEQ ID NO: 38054 - DNA, 425 bp, Oryza sativa
  Clone ID: uC-osrocyp028c05b1
tcttgccttctcccgattcatggcagtggcagggttgtaaattggtagcttcggttgcgagcggccacttccgtcgcaatggcggcagctgcgcgggcggcggcggtggcggtggtggtggtggtggtggtgctcggcgtggaggtggcggctgcgctgaacacggacgggctggcgcttcttgcgctcaagttcgcggtgtctgaggatcccaatggcgcgctctcgacgtggagggacgccgacaacgacccctgcggctggtcgggcgtcacctgcgtcgacggtggtggcggcagggtcgccggcgtggagctcgccaacttctcgctcgcgggctacctcccattcgagctgtcgctgctgtccgagctggtgacgctgtccctgccctacaaccaggttgccggccagatcccggtcgt

SEQ ID NO: 38055 - DNA, 493 bp, Oryza sativa
  Clone ID: uC-osrocyp028c07b1
ctcactcctactcctctgctgcccccattcttctctggatatttttctttttcatcttctttgagttggagggcttgattttaggggggactgctcgatcggcagggttaattccgatctctttatccttcccggacagagccgggatcagtattaggctttttgctagaagcacaaaacaaaaggaatgccggaagatgtgcttctatgatagagagctaccttgtgtgggaattggcaaggtagctcaaaatatttatgctttgtgtgctcttgatgatagtgaagtacgggtttatgcacagcaagtgctccttgtgcatttgcacgatggggctagatgtggcagttcaaccatcatgttagattaccatcttgttggggacggttgaaattatttttcatttattgcctctctcatctgatactccctcatcaatcatcatcactaagttacatgaatagtgctttctgaatacataaggcatttgat

SEQ ID NO: 38056 - DNA, 426 bp, Oryza sativa
  Clone ID: uC-osrocyp028c10b1
gcgttctgcgcaggcgagattgctggcagagggtgtaccatatccggatataaggactaaaagagttctgattcagacctggcttataaaatacactgttagctgacgcttgttgaaatgacaaacatacctactgccttttcacaatttggtttatggaaaggctgtctagggctggatgtcatgcatgactagcacatgcatgcagcactgcttcaagaatgtgctcgatctctagagggccattttggtgtaccgaaatgtgaaatactgaaataccatagtgccccactcgtcagattgtcataaatctggtccataggatccatctcatcatataccattctatgtgaatattcttggatggatgctggggggggccagggaggcaagcaaaggcaaaggcaggaatctgtttggggtttt

SEQ ID NO: 38057 - DNA, 293 bp, Oryza sativa
  Clone ID: uC-osrocyp028d01b1
atcgtgggagaaccagctctttcctgggcagagactattgcaggttgttctactgacgctcgctctggaccgtgtgccttggaagctgattcctaaaccatttttcctgaagaagcaacatgagcagaggcaccaatgacagcagtacaccatgcttcagggcactgatgaatcattgacagagctagaagaacaccaggatgaccctcactaccatgaggagtttgaattcagcgaagtctttgcacaccagctgatccacacaattgagctagtgctcagtgcaaactcaa

SEQ ID NO: 38058 - DNA, 73 bp, Oryza sativa
  Clone ID: uC-osrocyp028d03b1
ctgtgcgtgttccaacacggggtaggcattagatctttgctggctcctctgcaggggatatcttccgccaagg

SEQ ID NO: 38059 - DNA, 439 bp, Oryza sativa
  Clone ID: uC-osrocyp028d04b1
acgacattctcttagctaagctaagctaagctaagcttgagctaatacaagagcaaatgcatggcggacgttagaggagttgcactggccgtcagtgctcgccgcggctgtggcgatcctcgcggagagccccgtcgcggcgcatggcgacagcagcggtggcagcagcggcagctgcatgacggagataatcagcctggcgtcgtgcctgggctacatgtccgggaactcgtccgcgccgaagccgtagtgctgcacggcttctgtcagcgtggggaccaccaaaccggcgtgcctctgcgccgtgctcggcggcggcgcctactcactcggtgtcaccattaacaacacccgcgcccttgagctccccgtacgactgcaacgtcaagacctctccggagagccagtgcagcactgactgtgtaccgatgccatctac

SEQ ID NO: 38060 - DNA, 502 bp, Oryza sativa
  Clone ID: uC-osrocyp028d05b1
ctgtcgcgtccgcccacgcgtccgcttcctcctgcgcacgcgttctcccgatgcgccgccgcctcctgctcctcacgccaccgttctgtgccgacggccccgcaagggaccaccgcgccgccccgcctcggaaaccgcctgggcgccgccacctcctgccgccgtcacctgcgccgacttcgcgaggagccgccgcgtcgcctgccttgggaagccgccgcctgccacctgggagcacccgccgtcgaagtccggcgccggttcctcgccgggaaccgccgccgccgtcgcaagctcctgcccgagctacgacgaacgccgcgccgagcaccacgccgctgcacgccgcctgcaatgacgcctccagccgcccgtgaactcgccgccccaaaccacgctggccacgaaatcagagagaacgcagaacaaatctttgaaaaggcaagcaagacgtaggtgtacgtgaactatcagggtattaggaaaacacatatggggagca

SEQ ID NO: 38061 - DNA, 471 bp, Oryza sativa
  Clone ID: uC-osrocyp028d06b1
acgcctggttggcccccatactactctggatatttttgtttttcatcttctctgagttggagggcttgatattaggggggactgctatatcggcagggttaattccgatctgtatatgcttcccggacagagccgggatcagcattaggctctctgctagaagcacaaaacaaaaggaatgccggaagatgtgcttctatgatagagagcttccttgtgtgggaattgtcacggtagctcaaaatatttatgctttgggtgctcttgatgatagtgaagttcgggcttatgcacaggacgtgctccttgtgcatgtgcacgacggggctagatgtggcagttgaaccaacatgctagaccaccatcttgttggggacggaggaaattatttttcattattgcctctgtcatctgatactacgtcacaatcatattactaagttacatgattagtgttttcgaatacataag

SEQ ID NO: 38062 - DNA, 301 bp, Oryza sativa
  Clone ID: uC-osrocyp028d08b1
gaagcgggagagggagtcggtggagcagtatgcggcggtggcgtcgtgcgcggtgctgctgccgatccccgggatgatgaaggtggcggcgccggttagccggttggtggagtcggggatgacgtcgacgagtgggaggtcagcggcggcggtgggggatgcgctggtgtcggagctgtgcgcgcagagcgcggtgatcgacgcggtggtgcggatggagtgcgagcggatgcgcgccgggctggagcaggcgcggaagcggctgtgccaggcggtggttcgtgcggcgtttgccgccgcg

SEQ ID NO: 38063 - DNA, 444 bp, Oryza sativa
  Clone ID: uC-osrocyp028d09b1
tctactcctcctcctcctctctctctctctctctctctctacctctttcttgtctccaactagaagtagctatagctacctagctccacgacaagtgagctcccggagagcaggaggaggcttttggtagcctccctcgccgccgcttcgccggatttcggttgacgttgtggcgacaatatgacgagtgggttggtgaccgccggcggtggcggcggcggcaaggtgatgagcctgcggatgcagtactacgcggtgctgggcagcgtgaccgcggtggtgctcctcgcctgcctcaggtacacgcctactgccgccgacgtggacgacgtccgctacggtttttggggcaacggcgacggcgcttgccttgccgcagctggggcggcggcgaccaccgacggtggcactggtactagcgctggtgctacgacaggcggtggc

SEQ ID NO: 38064 - DNA, 524 bp, Oryza sativa
  Clone ID: uC-osrocyp028d12b1
caataatttattaaatttatcgaaagaacaacattaaagctatattaagtaaaaataaaattttgtacctcgtgtataatggtttttctactaagaagaaaacttcttttacccgaaattaactaagctatgagcagtttgtttagaacttactaacatttgtttcattaaatgttttaaaactgttcataaaagctacatacttttgcagttaattgtacctggctcttacaaaaaaatttatagaagtaaagttaactacctagttaataaaattttcgtggataagcatgaaaattctctctaaaactcttataaacttattctttttctatgctttaaagcagctatgcgttttagcacattttaggagtattattagtagttttgaaattatttggagcatattaaaaaacaaacttaataaagattatgaaaaaataagtatttttatctatataaagaaaaataactcggcaaacttttcctcgactgtttaacaaaaacattgctttatgaatttt

SEQ ID NO: 38065 - DNA, 243 bp, Oryza sativa
  Clone ID: uC-osrocyp028e03b1
atcgtgcgtctgtcaaaatcgcgggaatcaatggatctttgatcgcgttgtgccacgagatatcttcccccaagaaacgttggagtgagggatgagagctatggcgatggaatcgcaggacccgaacgcggcgccagccattccagcagggttcaggagggtggaggacttctcgacggagtggtgggagcctgccaagaccactgcgtggttacgtgaccactggatcagggagcaccagat

SEQ ID NO: 38066 - DNA, 534 bp, Oryza sativa
  Clone ID: uC-osrocyp028e05b1
ttggattttccacgcctccggtactacccttgaccatctccaataattctgggggtactttgacatgtacccggagaccttccgcttctctgcttacccccagcagcagcagcccgccgcccgacgtcgcctactgcatctacaccaccgtcttgccgctcatcgacgacccgcctgacatccttggaaacatggcacaaccatcctttctatcagagtatgaccttggaggggaaggggacctgttcaaagctcctgaacccatcattgaagaaccagtgcttagccttgatccagttgcagcagtcatttcgatgatgtttggcagtgagaacgtaatggatgaaactatagaggctgcagatatcagcgacattcataatgactctcttttaagcgaagtattatacgagtgcgagaaggaactcatggagaaagccccaatcgaagagactatttctgacctgctggacgtcaagaattcctatgctgcaaggggaagaggccccctagggaaacccaagttctactacc

SEQ ID NO: 38067 - DNA, 426 bp, Oryza sativa
  Clone ID: uC-osrocyp028e06b1
gggtcccgcctaaagaaaaaacagcgcacacatcttattctgctttccctccccttgctttccgctccactttcccttgcaagcagagaaaacccgaggcttcagcttagtctaggtaccgaccgatctcgatgatgcggcggtgcaatcatctacgactacatcccggcgcgccgccggttgtgcgcctccgacttctggcccgacgccgacgactccgacccccacacccccgctcccgagaaaccgccgcgcgcgaagagggagcggaagaaccagtaccgcgggatcaggcagcggtcgtgggggaagtgggcggtggagatccgcgacccggtgaagggggtgcgcgtctggctcggcacctacccgaccgacgaggccgccgcgcgggcctacgaccgcgccgcgcgccgcattaggggc

SEQ ID NO: 38068 - DNA, 489 bp, Oryza sativa
  Clone ID: uC-osrocyp028e08b1
tgtgtgtctgattcgtgttcgcttctccgactcgactcgatcgactcctccctcctcgccgtggtgcggcggcggcggcggcgaagcgcattggtggtccactccggcggcggggggagtgagaagtcaccagtaaggaggagtagaggatggcggcgagcggaggcagctgcccggcggcgatgaaggcgacgtcgcagggggcgttccagaaggagaacccgctggacttcgcgctgccgctcatcatcctccagatctgcctcgtcgtcgtcgtcacccgcggcctcgcctacctcctccgccccctccgccagccccgcgtcatcgccgagatcatcggtggtatccttcttgggccgtcagcgctgggccggagcagcaagttcttgcacaacgtgttcccgccaaagagcatgaccgtcctggacacgctggccaacctcgggctcctcttctttctcttcctcgtcgggctcgagctcgaca

SEQ ID NO: 38069 - DNA, 410 bp, Oryza sativa
  Clone ID: uC-osrocyp028e09b1
caaaaactactacgaattgcttcaaactctacatcctcaagtcgcacggattcgtttttcgttaatttggcaaataggtatggttttgccgatgtctcgcgcgacgagggtggccgggaggctgatgccagagatatcgttgctgagacgggggaggaagtcggcggctagaggcggcgactatgcggaggtggaggtgtcggtgccggcgaacttcgtgtgcccgatctcgcttgagatgatgagggacccggtgacggcgccgacggggatcacgtacgatcgggagagcgtggaagggtggctggcgagggggcacgacacgtgttcggtgaccggccggccggtgaggctcgccgacctggtgcccaaccacgcgacgcggcggatgatccaagactggtgcgtgg

SEQ ID NO: 38070 - DNA, 371 bp, Oryza sativa
  Clone ID: uC-osrocyp028e10b1
agctaagctaccattctcctcctcggcggcggcggtggcttttgctgctgagatgcagatggtgctgaccaccatcaccaccgactgctcccaggcggttgtgccgacttaccacccttacccgtacgcccacctgtacccgcacgcgcacccggactccgaccaccccatggcgcatgcgcggtgggtacttctggcttagcctgctgctgcgcctgccatggtggtcggtccggcgaccccggcggcgtatcacggccagtacttcgcggtgggggcagcccccgtcccggcggccggtcggctcacgccacccgggcccgcccccgtcgaatctcggggggaccgttgcgacgtaaacaagaacattg

SEQ ID NO: 38071 - DNA, 499 bp, Oryza sativa
  Clone ID: uC-osrocyp028f02b1
ggttgtaccaatatttgtgaagcttcttggttcttctagtgatgatgttcgtgagcaggctgtatgggcattgggcaatgttgctggtgattcctctaagtgccgtgaccttgatcttgccaatggtgcattgctgcctctgctagcacagttgaatgagcacactaaactttctatgctaaggaatgcaacttggactttatcgaacttctgcagaggaaaaccacagccatcatttgaacagactaggcctgctcttccagcactggcacggcttattcactgcaatgatgaggaagctctcactgatgcgtgctgggctctttcatatttatctgatggcactaatgacaagatccaagccgtgattgaagctggtgtttgcccccgtcttggggagcttctcctgcatgcatcaccttcagtgcttatacccgcactacgaactgttggaaatattgtcactggagatgacgcgcaaactcagtgcatcattgat

SEQ ID NO: 38072 - DNA, 502 bp, Oryza sativa
  Clone ID: uC-osrocyp028f03b1
tgtgaatcccccctcggacggcggcggaagcggatgcagcataggagagcatctggttcccctgcgctgcccgatttttggtggtggcggctgcggtcggcgggagatcgatgcctcgacgtgccggtaagcattctcatgatgtaccatgcaaagaagttctgtgtaccctttggaccgtagagttcacagagtaacgagcatatgagcaatatcggagcttttggcgggtcaaacatgggcagccctgctcattctgcagggagtgggaaacaacggctacgttggacctcagatcttcataaccgttttgtggatgctcttgctcagcttggtggacctgatagagcaacacctaaaggggttctcactgtaatgggtgttcctgggatcacaatttataatgtgaagagccatgtgcagaaatataggcctgcaaagtacataccacaatcttccggctgaggctcaaaagaccaaaagacggattctagcgattccc

SEQ ID NO: 38073 - DNA, 404 bp, Oryza sativa
  Clone ID: uC-osrocyp028f04b1
cggtgccacacctccggtgatcgaggtattctgctcggggctgtacatggtcttgtggaggctcttttcaggagatacacatagcatgggatggatgaggactcagcatacaagaacactgttgagtgcatcactggaatcatctctaaaactatttcgaaaaaggggatgctagaagtgtacaattcattgacagaagatggaaagaagcaatttatcgaggcttacagtgcagcatattatccatgcatggatatactatatgaatgctatgaagatgttctttctggaagtgaaatttgaagcgttgttttggctggaaggagattttatgaaaaggaaggactttctgttgtcccgatgggcaacattgatcaaacacgtatgtggaaggtgggtgaaag

SEQ ID NO: 38074 - DNA, 463 bp, Oryza sativa
  Clone ID: uC-osrocyp028f05b1
tttgttcgaaggtgattgggataatccaaattgttactaattgctagctctattgggagataatccataccgcctgttctatttacttgcattaatcgagtgtcaactgtattttccattggttcaaacaggtgtcgtcacatttcaaatggcctgaaacacttgagactgattttttctacagcgctttatccattgggacttcaattaatccacaattcattgcaagctttgctgcagcagttggtaaacgatgtaatcaggatttggactccgaagagtctgatccagagtggggttgctggacagcaaaccatgagctaaagaagccatctatgaatttgttgtttacaacaattgacagagtgaaaaatggggcttgtggaatgcagttatccaggcattcgctttctcttcctgagagaacatggcaaagactgagatctactggcatatttcgtga

SEQ ID NO: 38075 - DNA, 474 bp, Oryza sativa
  Clone ID: uC-osrocyp028f08b1
gagcccaacgcgggcgatcaagcagagcctcgtactcctcctcgacctgattggctccaccgcggccgccgcctccggcggcaccgacggcgagtactgcaataagggcatgaagcactcggcgaaggtgagcggcgaggaagatcgtgcccgagccggtcgaccgcggcgagcccgcaaccttaaagatctgcggttgcactgagaaaactatcgggaaagggaagctggggatagatgtgaaatacttgttctgctatgtacactcggaaacatgtgagctgtgggatgtgacttcctgcccggcaagtggtgacttcttggtagctgatgagcaaaccctggcatcatacacttcaccaggctcttacaccatcaccatgaagatgctgggtgataacgatgaggagctgagctgcatctcgttcgggttcagaatcggtttcctggataaaagccaccatctgaatgcat

SEQ ID NO: 38076 - DNA, 504 bp, Oryza sativa
  Clone ID: uC-osrocyp028f09b1
tgctgagaggcttgttcaagcttacacagctgcgtttggagggctgtccagtgactgctgcctgtttggaagctatatcaggattggcttctatggtggtgttgaatctgagtcggtgtgtcttatacggggaaggctgtgaaaactttcaaggtcttaaaaaattgaaggttttaaacttggggttcaatgatatcacagatgattgcttagcacatctgagagagttgatcaatttggaatctttaaacttggactcatgcaaggttggagatgaaggcttattacatgtgagaggccttatgcttttgaaaagtttggagctatctgacaccgaagttggaagcactggactccagcatctatctggccttcagaatttggaaagcatcaatctcttgtttacgttagttactgataccggtttgcagaagatatttgcactgaattgactggaatcagcttaatttgacagtcggcagattactgatgttgggttagcag

SEQ ID NO: 38077 - DNA, 475 bp, Oryza sativa
  Clone ID: uC-osrocyp028f10b1
aggtatgcactcactctcgttgttgttggtaagaggacgaagacgacgacgtcgaacacgaagacatcatgatggcatggaggagcttgtcgctggtggcgttcatggcggcggtggcggcggcggccgcggcggcgggcgatgaccggaggccgtacgtggtgcggatggacgtgtcggcgatgccggcgccgttcgcgacgcacgacgggtggtaccggtcggtgctctcgtcggcgtcggcgagggacgcggcggcggcgccggcggcggagcacctgtacacgtactcgcacgccatgaacgggttcagcgcggtgctgacggcgaggcaggtggagggagatccgccgggcggacgggcacgtcgccgtgttcccggagacgtacgcgcgggtgcacaccacgcgcacgccggggttcctcgggctcagcgccggcgccggcgcgtggcccgcgttcaggtacggcgccg

SEQ ID NO: 38078 - DNA, 507 bp, Oryza sativa
  Clone ID: uC-osrocyp028g01b1
cttttggcgactcgccgccgctccttcccgctcgtcccgctcctcctcttcctcctggccgccgccgcgtacggacgcctcatctccgacggctcgccggcctcggcgtccgccacctccctcctctccaaccccgtgtcagccgtgatacgcctcaccacctccaactccgcctccgcctcctcgccgccggccgccgccccggaggagaagtgcgagcagtcgtacgggttcctcccctgcaccaccaccgtgctcgggaacctgttcctggtgctcgcgtatgggttcctcatgtacaaggcggccaccttcctgtcggccggcagtgagctgctgctcgagatcatggggcccggcctcgtcggcggcctcctcctccccatccctggggcccttcccgacgcgcttcttgttctcgtgtctggtctgtccgggagtagagagaccgcacaaagtcaggtcctgactggcatggggttgcttgctggttcgaccgtttttttt

SEQ ID NO: 38079 - DNA, 417 bp, Oryza sativa
  Clone ID: uC-osrocyp028g03b1
tcttcgcgtccgcatttgtgcaggtctttcacaatggctgttcagatggcacgtgcccctgtcaacacccgcacggtcggtggccagcaggctgccgtcgttcgctcagcacgccccagcgtggtggtgcgcgctgcagccaccagcacactgacgcgccagagcgtccctctggagctggaagagggacccatgcccctcaacaccttcaacaacaaggctcccttcaaggctaagatcaagtctgtcgagcgcattgttggccccaaggccaccggtgagacctgcaacatcgtcatcgagacagagggcaagatccccttctgggagggtcagagctacggtgtgatccccccaggcaccaaggtgaacagcaagggcaaggaggtgccccacggtgtgcgcctggactccatt

SEQ ID NO: 38080 - DNA, 508 bp, Oryza sativa
  Clone ID: uC-osrocyp028g04b1
ctgctggcaccttcgatttttcgtcgaggaccggcgggcccttcggcactatgaataaccccggcgagcagtcccacgccgtcaacgccggcctcgacatcgtcgtcaggcttctcgaccccatcaaggaccaacttcccatcctctcctacgccgacttctaccagcttgctggcgttgtggccgtcgaggtcaccggcggacctgaggtccccttccatccgggcaggcaggacaagcctgagcctcctcctgaaggccgtctttctgatgccacacaaggttctgaccacctaaggcaggtcttttctgcgcagatgggttttgagtgacaaggacatagttgctctttctggtggtcacaccctgggaagatgccacatggagagatctggctttgagggagcctggacgtccaaccctttgatctttgacaactcttacttcacccagcttgggagtggcgagaaggtaggtctttttatgctgccaagggtcaaaagccctt

SEQ ID NO: 38081 - DNA, 77 bp, Oryza sativa
  Clone ID: uC-osrocyp028g05b1
agtatatagccttgattattcatccacaggcgggtgcattttgcacaaacacaccatacggtgaacagccacacgta

SEQ ID NO: 38082 - DNA, 415 bp, Oryza sativa
  unsure (1)..(415): unsure at all n locations
  Clone ID: uC-osrocyp028g06b1
ctccgcccctaggcaggtttatgggctaggattgccgcccgccggaatatcttccccaccgccgccgccctcccgccggcccacgggattggattcgcctctttacaaggcctatcctgccctctctactaccacccttatcgatctctatctggtttcctttacctttcgatttgattcaaccacatcgaaatcgattctatctctacccgcgacgcgatgaccacctcctaccgctactatattcacaactcgtgtgatggatgtgcttacgtgctttccagtgccatgggatcgtattgtggccttcatcttggtttctccaccaatgtccgtggggaggaaccatggccaacaatggaattatgttcttcttgttgctggagcaccgntatcttcttctcctattattttc

SEQ ID NO: 38083 - DNA, 141 bp, Oryza sativa
  Clone ID: uC-osrocyp028g07b1
ttccattttttccacctacacagcggcggcgagggtttccgatggagaacggagacgagacgttcgcttcccccaccgccggcggcggcggcggcgagttcgagcagccgctgaccaacggcgggggaggaggagggggcg

SEQ ID NO: 38084 - DNA, 405 bp, Oryza sativa
  Clone ID: uC-osrocyp028g08b1
atgacgcgtgggcggacgcgtgggcgcgtacgcttccattgacctcccaatcctgggcctcctcttcgccaccatggtggtgggcagctaccttcggaacgccgggatgttcaagcacctggggcgtctgctggcgtggaagagccagggcgggcgcgacctcatgtgccgcgtctgcgtcgtcaccgccctcgccagcgccctcttcaccaacgacacctgctgcgtcgtcctcaccgagttcgtcctcgagctcgccgccgagcgcaacctcctcgccaagcccttcctcctcgccctcgcctccagcgccaacatcggctccgacgccacccccattggcaacccccagaacctggtcatcggctttaatagcaagatcaccttccccaagttcctcatggg

SEQ ID NO: 38085 - DNA, 385 bp, Oryza sativa
  Clone ID: uC-osrocyp028g11b1
ttgcaccggccgacgcatctccgattcgatttcgccttcccacgaatctatctccccccgagtccccagcgagatggccacgtcgttcgaccgctgggagaaggaccccttcttcccggccgccgaggaggtgcaggagtccgccgaccggatggagtcggtgtacaggaggtggttgcaggagaggaaagaagtaggtggcggcgctgtggagacggcggcggaacgtgatggtggtggatgggggcgagccgctggggatctccgccgcgagctgcacacggcgctcggcaccgccaagtggcagcttgatgagttgcagcgggctattaaatcaaattatagtgttgtgttagctggcaaagatactagagctccgcatgat

SEQ ID NO: 38086 - DNA, 406 bp, Oryza sativa
  Clone ID: uC-osrocyp028g12b1
ttagaatccccatagctcaagcaaagggagagtgcagtatcagcaagaggagcacgcggggagctagctagctccgccgccgccgacgagctccggcggctcgccgttatccgctcgctgatcgagccgtgtgcgggtgagaaagaaaaagaaaaaaaaaagatcgcgcctttttggcggcttcttggggtgtgaatccacggtttccccggggtaggatcttgatggggctcgaggaaggcggcgcgatgagggcgctgatgcggcggaagcaggtggactccgaccgggtccgcgccgtcggcggccaccagctcgtcaaggagctctccgttacgcagctcgtcgcgaatggtgttggttcaacaattggagctggagtatatgttctttggggaacaagtgc

SEQ ID NO: 38087 - DNA, 265 bp, Oryza sativa
  Clone ID: uC-osrocyp028h01b1
tgcgacgaccacgcgttttttgaggggaggctcgttcttgatccatggcgggcttcttcttcgagctgatctaccgccgcggccacgacgcgcagccggccgtgggtgacgttgacggctgcggcgtgatggccgccgccgggtacttatcatcggccaagccgccgcacaagccaccactcggcccgctgcggtatctgctcgccgagcagcggctggtgttcgggctcgtcggcatggccatcgcgttgctgggcttcctcct

SEQ ID NO: 38088 - DNA, 231 bp, Oryza sativa
  Clone ID: uC-osrocyp028h03b1
ttatctcggcgttggctagccgctgctgaccgtgttgccctacgagcgcgcgcggggcaggatctgggatctctacatggacaggcagctggcgccgtgcgccgggagggtgtggcaggtcgccggcgggcgccgcggtcgctggtgctggagaggatggtaggggccagctggtggctgcgatgcggacgctggaagccgagctcggcggcaggaggtactttggcggcg

SEQ ID NO: 38089 - DNA, 433 bp, Oryza sativa
  Clone ID: uC-osrocyp028h05b1
tgtgattagaatggtgttagtcacggatctggttttgttgcatttaagtctgctgtacatgctccacgagctcttgtggctatgaatggtaagatgattggcagtaaacctctctatgtagcactcgcacaacgcatggaagaaagaagggcaaggcttcaggcacagctctgacacatgcgtcctatggtgatgcctacttcaggtgctcctccgatgcccgtgcatgcccctggagtccctggagtaggccaaacagctgttggatggccagccacctccagattttgttaaccctcagcctggatttggttccaagaaacatctcattcctggtatgaggcctagtgttggaccaattccaaattttgtcatgcctatggtcccagcaggtcaacaaccacaacgttcaactggaaggcgtgcaggcact

SEQ ID NO: 38090 - DNA, 405 bp, Oryza sativa
  unsure (1)..(405): unsure at all n locations
  Clone ID: uC-osrocyp028h06b1
caacaaactaaacctatttcaccaaatcttgaaggtgtttgtggttggtgtccatggccatggctgccatggacgcgaggaagaagaagagcggcggcggcggcggcggcgagccgcttctcggcaagtatgagcttgggcggatgcttgggcgagggacgttcgccaaggtgtacctggcgcgcgcggtggccggcggcgaggcggtggcggtgaaggtgatcgacaaggcggaggtgatgggcacggcgggcatggcgccgcgcgtgctcgggtagggtggcggcgaagccngcggctgcgccacccgcacgtgctggcgcctcacgaggtgctcgccacgcgcgccaggatctacctcgtcatggagctcgccaccggcggcgaccttctgtcgaggctggc

SEQ ID NO: 38091 - DNA, 347 bp, Oryza sativa
  Clone ID: uC-osrocyp028h07b1
ttgtcctgctgctgccgtattgttaaagacaggagtgcacgtttgaccggaaaaactatccagtttgaacgccatggctcggcagcccgcgctcgtcggcgtcgtcgtcgcagctgtcgcgctcgccggcggcggctcgctcggcttcgagttccatgaggccaccgtcgacgccatccagctcggcttcagcaacggcagtctcacctccacggcgctcgtccgcttgtacctcgaccgcatagcccgcctcaacacgcttcttcacgccgtcatcgaggtcaaccccgacgcgctcgcccaggcggcgcgcgccgacgccgagcgcgccaccggacaccgttgcg

SEQ ID NO: 38092 - DNA, 380 bp, Oryza sativa
  Clone ID: uC-osrocyp028h08b1
tgttcagtttgccagccatggtggagtgcactggcacatacacatatgaaggcagtggtttcaaggccactgctgcccagcagtatgatagctctcctttcctcagtgggttgaagtcgatttcttcaaagcctttccatcaagtttgctctcatttcatcagaacagtagctgggttccagttatgctacgctgcgaagacttggtttggtggatttgtgggcatgatgatctttggtgcaagcgaggtcagccggaacgttgatctgggcgacgaaacaaccacaatgatctgcaaattcgtagtgcgtgcatccgatgaatcgatcacaagagagatcgaatcataccttcagggctggatggacgatatcaccgat

SEQ ID NO: 38093 - DNA, 318 bp, Oryza sativa
  Clone ID: uC-osrocyp028h11b1
ttgggagctcctcatgaagttcatggagagcggtagcgttggcgccggcgccggcgccgccgcgagggaccaccaccacgaacaccatggcggcgtcggctactcgctgttcgcgccggcgccgtacgggcagttcgccacggagcagttcgcgttcgccggccacggcggcggtggcggcggctgcggcgtgtcgctcacgctcggcctcccgcacggcgccgagcagacggggtcgttccttatgaccagcagcaacgggagcgaccgcgccggccacgtcgtcggcggcggcgggtacgacatgaacatgcagag

SEQ ID NO: 38094 - DNA, 396 bp, Oryza sativa
  Clone ID: uC-osrocyp028h12b1
attttgcgcgtgggctcaaattctactcgcgtttttatgattgccctatagatcagctcctgattggaaggactgtagttccatgagatagaagggcatattgaagtagaactcggcctttggtgaatctaaatggacagtggcttgggaagaagttcagagacatccttgaaagccttgccatcaatggcaagtaatgcaacaaggaatactgatcctgaccaacagggtgttcgattcagttccatggaccagcctccatgttttgcaagacctggtcaaattgtccctggtttttcttccctttttggggtttagtcttccagcttgttttacctgatgacattgaagcttaaaattggaaccagttccaaataaaattcttctccgaataat

SEQ ID NO: 38095 - DNA, 287 bp, Oryza sativa
  Clone ID: uC-osrocyp029a05b1
cttatccggcaggtggtcggcggcggcgacgacaacgagctggagctgaacgcggagcgccacttcgccagcttcgttcagaggttcgggaagtcctaccgtgacgccgacgagcacgcgtaccggctctccgtgttcaaggccaacctccgtcgtgcgcgccgacaccagctgctcgacccctccgcggagcacggcgtcaccaagttctccgacctcaccccggtcgagtttcgccgggcctacctcggtcttcgcacgtcgcgccgcgcctttctgggggggct

SEQ ID NO: 38096 - DNA, 293 bp, Oryza sativa
  Clone ID: uC-osrocyp029a06b1
gtttttgcctctcctactcccccgtcttccctttgtgcgcgccacccccacacacgcgaccatggcggcagcggcaggaggcgcagcgcgggcgctgtcgcaggcggagcaggacgtgcagatgatgctcgccgccgacgtccacctcggcaccaagaactgcgacttccagatggagcgctacgtctacaagcgccgctccgatggtatctacatcatcaacctcggcaagacatgggaaaagctgcagctcgcggcgagggtgattgttgccattgagaaccccccagaca

SEQ ID NO: 38097 - DNA, 449 bp, Oryza sativa
  Clone ID: uC-osrocyp029a07b1
tgttctaaattgtgctgaattaccacaagagaggcttctcagtttggatgagacatcggtgtacaaactaaaagatcaggatcaatgtgttcatgaacgaaagcaaatgtcccatccagttgaaaggttgttttttacaaaggagaaggatgccatgcacggtaaaaaacatcatgaagaaacctcaaccatgcatagctcgtactcaaatttatttgatccagccccatcatcgtcgtggattactgggaatttcaaggaaccaagtgtcatgccatcagaactgaagttcagaatattggataaggctcctgaattcaatttagatctcaaattggatagtttcccagacagtagtgtattagcccttaggcacgataagttatttcgtggaggcaccttcagtggatcccattttctgacagaaaggcttgggacatactcctaca

SEQ ID NO: 38098 - DNA, 429 bp, Oryza sativa
  Clone ID: uC-osrocyp029a08b1
ttttcaactgtccaaggatagacccatggctgatgctccctacaaatgcgcttaatgattctaaatttttgtgtgtacctgaaaggaagaaccaaaccattcgtctcccgagcactgttacaatctttggctccacctggattcctgttggttcttcccatggttggctcatcttttacagcccatctcatggaaccatgcagctggttaatcccattagtggcatgcagttcaatcttcccccaatcggacgaagggccttctccaaggccatgttgcttgacatgaatgacacaaacttcactgttgctgtcatcttacgtgaccagaaaggatataaggtaacgcgtaaaggaagcaacagctggtcatcagtggaatcaaagcatgatctagtggatatcttcaagcacaggagacagctttaca

SEQ ID NO: 38099 - DNA, 332 bp, Oryza sativa
  Clone ID: uC-osrocyp029a09b1
ggcagacgcgtgtttgtcgcgaccccgtcgccggcgccggtgatccgctccagccgaaccccgccgcaccgccgcggtagctgccgtcggtgaggtgcgtctgggtaccggacttcaggaatcgtgctgctgatggaacgccgcgcccgctcagccggtggccgggcgtcccgcgtggctcgctggcatcgatcggggatccctgctacgggctcgacgtcgcggaggtttcaggggaccggcgcttggacacgctctttcctcatcaatctgctgacgttgtgaaatattggaatgactctgtcgtccaatttgggtatctacagcatctg

SEQ ID NO: 38100 - DNA, 347 bp, Oryza sativa
  Clone ID: uC-osrocyp029a10b1
tgtaatttttttgcacagtaactgaagcaagcctagcatttgcatatatacattagagagtgcaataatgctgttacttgttactacaaggaaaacatgtactactacacatacacaaactctgcaccaaggccactatatacatacacccatattatcacaacattccacagattgcatcctggaccgcggtgttggcgcatcaagaggccttggcgttggtgccgggcctcttgacgacgacgacggggcacttgcagtgctggacgcagtggttgctgacgctccccagcagtgttctttgcaggaaaaccgaaccatggctgcccatcaccaccatgttcggg

SEQ ID NO: 38101 - DNA, 296 bp, Oryza sativa
  Clone ID: uC-osrocyp029a11b1
tgtccacctcactctccctctctctatctgtttcttcacattaccattccaactcaatttcctcctctcttctcctctcctcttctcacacgaagccaagaaagccaagaaatccatccatccatagcaagggagctagctcgccggcggcgatgggctaggactgcggcaaccacggcgacgacgacatccggcaggcgtgccggcggctgctgacgatcctcttcggtctcgccctgatcgtggccatcatcgcgctcattgtctacctcgtgctccgccccacccacccttgc

SEQ ID NO: 38102 - DNA, 185 bp, Oryza sativa
  Clone ID: uC-osrocyp029b01b1
tcttatgaccaggtctacaacgaggatctgctatagcttgattcgcttgaggtccgggaagtgctgtcctcccactagtaccaccgaaagcaagagcccatgatcactaggtgagggctcaaggtgctcgggaacctaatggacatccctgacatgcagtgaagggattataagtcaatggacga

SEQ ID NO: 38103 - DNA, 59 bp, Oryza sativa
  Clone ID: uC-osrocyp029b02b1
cctactcatgcgctgtgagacgacgagaagcgagtagtttttgcggaagtggtcctaga

SEQ ID NO: 38104 - DNA, 81 bp, Oryza sativa
  Clone ID: uC-osrocyp029b03b1
tgtaacaagcggtgaggaattcagagaatcgaggggtcattgataaaggggggcgcgaagctcaaaataaggcattctgta

SEQ ID NO: 38105 - DNA, 119 bp, Oryza sativa
  Clone ID: uC-osrocyp029b04b1
cttatacactcgatgtgacactcaaatgttcgcttctacatgggcacactgtgcggcatagccacaacttccgtgtatgtcccaagactcacatagcttagtttccaccgactacatac

SEQ ID NO: 38106 - DNA, 66 bp, Oryza sativa
  Clone ID: uC-osrocyp029b05b1
cgcgatgataggcaccgaaacccccgcagatgatggttacgccttccgcaagcggcccagcgacgg

SEQ ID NO: 38107 - DNA, 379 bp, Oryza sativa
  Clone ID: uC-osrocyp029b07b1
tttacaacacgtcaagatttgtgcgctgtcacccactatcgctttctgtgtcatcaacaactactcgctctgacaccaacctgatcgtgcaacgtgacgtcatcatgcagccctgtcacgtgatgttgggcctgctgctcgtgcttgtagtgcatctgtcagctgtctccacatcacctagcacttcactgagtgtcaccagtgatgccagcaagatactgacaagacttgatcagctggcaccagtggtcagtgagcgcgtctccttatcaggtgatgctggtaaccttgacattggcggtgagagtgatgacgtaagcagcgaatatgtgattgaagaggaagagaacagcaatgacgtcacttcatcacctggtga

SEQ ID NO: 38108 - DNA, 138 bp, Oryza sativa
  Clone ID: uC-osrocyp029b08b1
ttttagccgagtcagtggctcgctatgctacctcacgagcttgaactgtgcttgcgatcagagcgagctggttactcaatgggtgctcgccgtggatgccgtaatggccgcgctcttcgtcggtggcggctccggggg

SEQ ID NO: 38109 - DNA, 335 bp, Oryza sativa
  Clone ID: uC-osrocyp029b09b1
ttgacgcctgggcggacgcgtggtaaaatcccaaacacacaaaatcttaaataaaaaagaaagagagagacatttcgcatgtgctgccctgcctgctctcccatcacctgcccattttttcacattgaggcccctctgaaaatattatatttacaactaggtccctggccgggccggccggccaccggaaggagcacctcgccggagaaggctttgtctcttctttttcttctcctcctcctcctccatcggcggcggcatggggttctcgctgtaccccatgaagacgtcgacgcgcatgctgtggagcaccagcttcttccgccataaggtcg

SEQ ID NO: 38110 - DNA, 211 bp, Oryza sativa
  Clone ID: uC-osrocyp029b10b1
tgtacgcgtgggcggacgcgtgggtgggaacttcggctagggccccccgtgaggcggccggacaccttccctgcatcctccaggacgcggttagcagagtcttcaccgcccagatcctccacttgtccggctacaccgcggcggagccagccgccctccgcgccctcttcgacatcgccgggcgctaccttgcctccctgggccgcgctga

SEQ ID NO: 38111 - DNA, 314 bp, Oryza sativa
  Clone ID: uC-osrocyp029c01b1
gccctctatctagggtttctcgactcgccctcgacgattcgttctgtcatgtctaagcatggagggaaggccatgcccctcatggggcccaatgccgagaagaatgagtacgacgagagtgatctcgggtatctgccgaagaagaaagatgaggaaaaggcactgaccgagcttaaggccacggcaggacagaaaggtgcactgtgaggctttggtctgaagtagagccggaagacatgatgctgatacccaatcagaatgccctgacaatgataaaccagctacctgcctgaggtactttactatgtgcggat

SEQ ID NO: 38112 - DNA, 78 bp, Oryza sativa
  Clone ID: uC-osrocyp029c05b1
tgtatagactgtgtgtggacttaaaagcttcggttgttctttgcaaaattgggcctcaaagctcatacgcaagtgttc

SEQ ID NO: 38113 - DNA, 298 bp, Oryza sativa
  Clone ID: uC-osrocyp029c08b1
tgttcttgccgtgtcactggcttgctctgctcgatcacgagcttgaactgtgcttgtgatcagcgagcaatggctactcaatgggtgctcgtggtggttgctgtaatggccgtgctcttcgccggaggcgccgccggcgggcagctgtcgacgaggtactacgacggcaagtgcccgaacgtgcagagcatcgtgagggccgggatggcgcaggccgtggcggcggagccccggatgggcgcctccatccttcgcatgttcttccacgactgcttcgtcaacgggtgcgacgcgttca

SEQ ID NO: 38114 - DNA, 376 bp, Oryza sativa
  Clone ID: uC-osrocyp029d01b1
atatcctggcgtctacttggtgaaactcgacggaaccttacatcggtgcttatgactagccggacaaactctacggagtaggaacctctgagggaactacttatgtagaagatacattaaactgcgaaactactttgccagaaaaccagcatttgggggaaaccttaacagcagagacaatgataggttcaggcgatgcttcgatgatgcaggaaagctctgacactgcagcttcatctgatgcaaaggacagagatactgagcagaattctgaacttcatagaaaaaacgggatttcaccatcaagaatgcctgattatacagaatatggacatgctgatcagatgctttcatttgggtcaaaggatgtgtgcac

SEQ ID NO: 38115 - DNA, 197 bp, Oryza sativa
  Clone ID: uC-osrocyp029d03b1
tgtatgcacagggtgtacaataccaagtcgcgctggtatttcgaaaaacggttcgctgaagccgctatggacgtcttcattgaggcctttgacttaaattttcaggtgccggtgaccaattgtttacgtagccatttgttactgcgtggttgcttgaggttgccagggtagtcaggggtgtattgacgcgaaggtcc

SEQ ID NO: 38116 - DNA, 51 bp, Oryza sativa
  Clone ID: uC-osrocyp029d04b1
acgcttaaacaacgggtgtaccctaaaaagccagggtgctaattaacgaaa

SEQ ID NO: 38117 - DNA, 73 bp, Oryza sativa
  Clone ID: uC-osrocyp029d07b1
tctaataaagaaagtgtccgcactgcagacctgggttcctactttgcgaaagtggtccgcaacgcttataccc

SEQ ID NO: 38118 - DNA, 448 bp, Oryza sativa
  Clone ID: uC-osrocyp029d08b1
cttcctcttgttttctgcggccgaaccccccctcgacacgccgtcgccgtcgtggggagagagagagaggccgccggccgtcgctaccactgacccccccccctcgccggagcgccccgtcgccggtcgggtttgatcgatggcgtccaagaggatcctgaaggagttgaaggacctgcagaaggaccctcccacctcatgcagcgcaggtcctgtgggtgaggacatgttccattggcaagctactattatgggaccctcagacagcccatttgctggtggggtattcttggtgaacattcattttccaccggattatcctcttaaaccaccgaaggtctctttccgcaccaaggttttccacccgaacattaatagcaatggcagcatttgcctcgacatcctcaaggaacagtggagtcctgcacttaccatatcaaagggtcct

SEQ ID NO: 38119 - DNA, 480 bp, Oryza sativa
  Clone ID: uC-osrocyp029d09b1
cagccgcaaccatgttttctaacagagtgcagaaaacccgatcgtgccgttcttaccaaaaacgttctgctgaatccgctttgtccgtctacattgcggtttttggttcaaattcccccatgccttgttccaattgtttccgtaaccatcgttcctgcgtggttgtttcaggttccaagcgttgtaaggagtgtattgaccgcaaggtctcttgcgacgggaatgactttgcttccgccctcttccgaagtctggaggactacaaaaccctcgagcgcgaggaggacgagcttcaggagaggctcctttcggtgatgcgccgcaagcgtctggccaagagccgggccgacgagcttttcaagcggggttcagcgacgacggaggctatcctcgactcttcttctactccggtactggagtcccaagcctcaacgggcggtcagccccagtcgtcctctgcggtcgttggtagccctgact

SEQ ID NO: 38120 - DNA, 465 bp, Oryza sativa
  Clone ID: uC-osrocyp029d10b1
ttaggaagatggcttacgagacctagtccggctcacaatgtttgagaagggacagagcaaaagaatttggggtgaactctataaagttattgactcttcagatgttgtcgtgcaggtgttggatgccagggatccaatgggtactagatgctaccatctggagaaacatctgaaggagaatgccaagcacaaacacttggtattcttactaaataagtgtgatctagtacctgcttgggccacaaaaggatggttgcgcactttatcaaaggactaccccaccctagcattccatgcaagcatcaacagttcatttggcaaaggatcacttctttcagtgttacggcagtttgcacgcctgaagagtgacaaacaagctatatctgttgtttttgttggataccccaatgttgggaagtcatcagttatcaacacgttacgctccaagagtgtttgcaaagtggc

SEQ ID NO: 38121 - DNA, 217 bp, Oryza sativa
  Clone ID: uC-osrocyp029d12b1
tcgtgctcctcgctgccgacacctgtccggttgtttgtccttgcctcgccgtggcgcccgggtcctcctcaccaacgccagagctccacatgccacctctcctcaggttcccgtctctgatccctcgttgcgttacggggaagcaggcgtggcggtcgctccccgtgcggagtttttgattggttcggatgggtgagtctggtgctggggtgttggg

SEQ ID NO: 38122 - DNA, 357 bp, Oryza sativa
  Clone ID: uC-osrocyp029e01b1
gcgcttgtcacgcccccaccccctttgctttgatgcacgcctagctaatcaattaacttaacctgcctcgcctctgcctattcgaaacagcagcggctccagctcgccgtggtcgactttcccggcggcgatcaccggcagcggaggaggagcagtacgtgtgtatatataaaggatggggaggcagccgtgctgcgacaagctgggggtgaagagggggccgtggacggccgaggaggacaagaagctgatgagcttcatcctgaccaacggccattgctgctggcgcgccgtgcccgagcttgcccgggctgttccgctgcggccagagctgccgcctccgggtgacaaactacc

SEQ ID NO: 38123 - DNA, 72 bp, Oryza sativa
  Clone ID: uC-osrocyp029e06b1
gtgatggaaagtgtctgcacttcaaatctacggtcgtactttgcataggtggcccccaacgctgatacccat

SEQ ID NO: 38124 - DNA, 125 bp, Oryza sativa
  Clone ID: uC-osrocyp029e08b1
tctgagactctacttgccggagcagcatcaccgtggtcgttttgcgcaatggcgatcctcaaggcggacctgcgtgggctcgagccagcgactccggggtgggaggcggcccgggccgaagtgac

SEQ ID NO: 38125 - DNA, 434 bp, Oryza sativa
  Clone ID: uC-osrocyp029e09b1
tcaagaagcacttcttgagctcaatcagcatgttcatctatctccttattgcttagttgagtccttcgccctcccaagaagaagaagatgtcttgctgcggcggcaactgcggctgctgcagcggctgccagtgcggcggcggctgcagcggatgcaagatgttccctgatgtggaggccacagccaccaccaagacccttgctcttgctgctccatccaacaaggcgagctctggaggaatggacatggccgtggagagcgctcagaacggcggctgcggctgcaacacctgcaagtgtggcaccagctgcaccggctgctcctgctgctcctgcaactgaatctattgtcgtcgggccccggttgtatgaggatttatcctatggatgctgctactgtccatcagagctttgatcgaagccttaattcgctt

SEQ ID NO: 38126 - DNA, 435 bp, Oryza sativa
  Clone ID: uC-osrocyp029e10b1
ttctatttaagtgaaaaagggtccttttccatcatcctagggactgtaatttgtccattgctagacccaattggagcgttacttcccccactaacagtttgatccatagataacccattcaatgctacagacacttccttgcttgaatcactcaacctctgaacatacaaattgcaacagaaagtgatcactttaagtactggctggatgtagacagctctcacggacatcggcaggaggctgatccttggctgcagaagtgcctcaacaagctcaacaggatccttcgtgaagttcacatactcacctgagacccatgcagcaacagatagaacaggacaaaggaggtggttcccaagcaaagcatgatcaatgagaagagttctagatgaatgtacaagctctggccgagcattctgcacccttagttccaca

SEQ ID NO: 38127 - DNA, 112 bp, Oryza sativa
  Clone ID: uC-osrocyp029e12b1
accatcttataaaatcggaggcgaggccaaggagacgggtgcattataataaggacgccgatagagcgctaacactccaaatactgcagagcgaagacgaatgagagggcag

SEQ ID NO: 38128 - DNA, 363 bp, Oryza sativa
  Clone ID: uC-osrocyp029f02b1
tttataaaaaaaaaaaggaacgctcccttttgtgcgccagaccgacgccggatcctcccgccggagccgctcagatcctcctagcgcgcgccagcccgctgtcgccgcctcccgacggagctggtcgccttcttcacagtgctcgcccgacggagacggctgaccctacccaccgctggctgatagcctgctcgcgccacgccgtgatggagaggaaagagaggcggggtctgctcgccctaccccgccgtctgctcgcgtgcgcaggccggacattcgggcgtggacgcccgaaaggggatatgaggcggcggaaattctcgctaggaggaggagagggggccaacggaggagggctagagg

SEQ ID NO: 38129 - DNA, 419 bp, Oryza sativa
  Clone ID: uC-osrocyp029f03b1
tctccggccaagctcgaccaggccaagacgcgatggtaccattacatggcgatcgtcatcgccgggatggggctcttcacagacgcctacgacctattttgcatagcgctggtcaccaagctgttgggtcggctttactacaccgacatcaccaagcccaacccagggacactcccgcccaacgtgtcgcccgccgtcaccggcgctgcgctctgcggcacgctcgccggccagctctttttcggatggcttggcgacaagctcggccgcacgagcgtctatggattcacgctcatgctcatggtcgcgcgcttcatcgcctccggtctctcgtttggccccacgcccaagagcgtgattgccacgctatgctttttccgcttgtggcttggcttcggcatcggcgggcacttcccgct

SEQ ID NO: 38130 - DNA, 74 bp, Oryza sativa
  Clone ID: uC-osrocyp029f08b1
gctcataaggaaaagagcggaatttcaaaactgggggcgttgtgacacgaggaggctgaggaggaggaaaccca

SEQ ID NO: 38131 - DNA, 69 bp, Oryza sativa
  Clone ID: uC-osrocyp029f09b1
ttgtataaccatagcggcctgaccacacaaatcttgtcctggggaaaggtagaacctcacaccactgat

SEQ ID NO: 38132 - DNA, 437 bp, Oryza sativa
  Clone ID: uC-osrocyp029f10b1
tttctctcgccttctcccgtcttctccttcgagttagctacctccttattcaaccatgggtaaggagaagacgcacatcaacatcgtggtcattggccacgtcgactccggcaagtcgaccaccacgggccatctgatttacaagcttggaggtatcgacaagcgtgtgatcgagaggttcgagaaggaagccgctgagatgaacaagaggtccttcaagtacgcgtgggtgctcgacaagctcaaggccgagcgtgagagaggtatcatcatcgatattgccctgtggaagtttgagaccaccaagttctactgcactgtcatcgatgcccctggtcaccgtgacttcatcaagaacatgatcaccggtaccttccaagctgactgtgccgtgcttatcattgacttcaccactggtgggtttgaggctggtatct

SEQ ID NO: 38133 - DNA, 324 bp, Oryza sativa
  Clone ID: uC-osrocyp029f11b1
tgaggagaaggccggaagagcttacgacctgggggacctaaagtactgggggccaaccaccacgacgaactttcctgttgacaactacgagacggagctggaggagatgaagtcgatgacgccgcaggagtttctcttgtccctgcgcaggaagagcaacggcttctgaagaggggcttccatctacagaggagtaacaagacatcatcagcacggccggtggcaagagatgatcggtcgagtggacggaaacaaggacctgtacttgggcacttatagcacgcaagatgaggctgtcgaggtggacgacattggccctttcaa

SEQ ID NO: 38134 - DNA, 361 bp, Oryza sativa
  Clone ID: uC-osrocyp029f12b1
tcgtacaaagagaccaccacccagggccacgatgatcttggcaagcgttgcgccaagtactacgaggccggtgcccgcttcgccaagtggcgtgccgtcctcaagattggccccaacgagccatcgcagctttccattgacctgaatgctcagggtcttgctcgctatgccatcatctgccaggagaacgggctggtgccgattgtcgagcctgagatccttgtcgatggctctcatgacattgagcgctgtgcctatatcaccgagaaggtcctcgctgcctgctacaaggccctcaacgaacaccatgttctcctggagggttcccttctgaagcccaacatggtcaccccaagatctg

SEQ ID NO: 38135 - DNA, 198 bp, Oryza sativa
  Clone ID: uC-osrocyp029g04b1
tgttatcacagtgtgcggatttcaaatctacggttgtaagcttaagaatgagctcccatgggtcccacgaaagcggcctgtccgagcctaaaatgagctggagcacgccacggtgaccagcttatatgcagtcgtgtaccccggggccgactcgtccggctgctgaagctactggtcgacacaacagaccggatcacc

SEQ ID NO: 38136 - DNA, 79 bp, Oryza sativa
  Clone ID: uC-osrocyp029g06b1
gctatggatagggtgggcaccccaaagattgggggtttcttcgacgacgcagccccgatggcccacgcgaccgggtgcg

SEQ ID NO: 38137 - DNA, 225 bp, Oryza sativa
  Clone ID: uC-osrocyp029g08b1
tctgtaactcctggcggctagcccgcacagcagcggggcccataagcaaaagaagctcagatcactcaagaacctgtgaggcgacggcccggcggatgacatccaccaggaaaagcggcaacaggagcagcgcgccactacgctggctgagacagctcgcggctcgccggaggaggaggagacgaccgcgacggaccagccggcagcggcaagtgccggtcgccg

SEQ ID NO: 38138 - DNA, 398 bp, Oryza sativa
  Clone ID: uC-osrocyp029g10b1
ggacaggttctacgtctccaaccgggcgcacacctacctcggcaatccggtggcgaacggcggcggcgaggtgtacccggacttcgtggcgatcgccggaggcttcggcatcccggcggcccgcgtgacgaggaagggcgaggtccgcgccgccgtcgaggagatgatggcggcgccggggccgtacttgctggacgtcgtcgtgcctcaccaggagcacgtgcagccgatgatccccagcaatggcgctttcaaggacattatcgtcgacggtggtggtcgccggacatgatcctgatttgggacaaacacctagcttacgatttgtctttattatgttcaaagatgtgagcccttaagagactttgattttagtacttttgccctgatatgggctc

SEQ ID NO: 38139 - DNA, 408 bp, Oryza sativa
  unsure (1)..(408): unsure at all n locations
  Clone ID: uC-osrocyp029g11b1
ctgatcctccccaacctcngtatccgggtcggcgtcctcctcctgctggttcttttcgcagaatgcaacgggcaattcaagctatcgggtcacatggcagtctcctcaagtctgctgttctgcgacacattagtgctccaaaaccatgtattttacctgctgtatattcacgctccatgtcagcttcatctgctcaaatagaggagagtggatttgagactgtcactgtggcagatattttgaagtctaaggggaagagtgctgatggatcttggctctggtgcactactgatgactctgcctatgatgctgccaaatctatgacgcaacacaatggtggagctctggtggattgtaaacctggacaggataaatcaattgccggctttgctcctgagagagattacc

SEQ ID NO: 38140 - DNA, 459 bp, Oryza sativa
  Clone ID: uC-osrocyp029g12b1
ttcgattctctatccggcgagcagggggacgccgtcgtcctgctgtttccgccgcatcctggtttgggaggttcaactgagcccccatgtcgcaggagaggagccagtcgcagagcccccggtcgccggcgtcggcggctggggtgccgttcctgtcgatctccgtcacagatcctgtgaagatgggtaccggagtccaggcctacatctcctatcgcgtcatcaccaagaccaacctgcctgactttgaggggcaagagaaaattgttatccggcgctatagtgactctgagtggttgcatgatcgtcttgctgagaagtacaaaggcatttttataccctcccttccagagaagaatgcttgtgaaaaattccgggttagcaaagagttcattgaattaccggcgtaagccctggatctatttggcaatagaatagcttcacattctgaactcaagc

SEQ ID NO: 38141 - DNA, 325 bp, Oryza sativa
  Clone ID: uC-osrocyp029h04b1
ggtgatgctggtgacctgaagcccctaacgggggtcgactcatgctacaatggcgtcacggaagagagccacagcacgaaggatcacctgttcagagctgctctcccgagatcaagtggctcggttgcgcccccggacagtgagaagatggccatgaacagcctctggtacagctactactactacccggcatatccacatccgtgtcatcagtattatcaatatgcgcaggagcacagatacgccggttggtattatactgcaatgcatggctactatccacataatgtgccacaggacttcagggacgctaccccaaatgtat

SEQ ID NO: 38142 - DNA, 53 bp, Oryza sativa
  Clone ID: uC-osrocyp029h05b1
tgtcatgctcccggggtgggtcacaacccccgggtggttatatccaaatgagc

SEQ ID NO: 38143 - DNA, 281 bp, Oryza sativa
  Clone ID: uC-osrocyp029h06b1
tgtcaacaagaacaggaggagtaaagcctcggggtttacgttcccatgctacgcgacctccgacgaagagactaggcggtgaactcgcgcacgccaacccggtccacccaggcccagggccacctcggcggggatcgccagagaagggggtcgacgggcggagcgggcgctaccaccacatggacgggggagggggcgagtagggcgacggctggggagaggacaacgagccgctgacagatctgccgcgcgggctgccggagggggcgggggcccccatg

SEQ ID NO: 38144 - DNA, 268 bp, Oryza sativa
  Clone ID: uC-osrocyp029h07b1
gtcggggtacatggtggggctacaacatgccgtgtacgtgtatcaccacggcgctggcgctggtggtgctccacatctgagacgacccctcgagaggcagctccaaaggctcccaaggcagagaataagccagcagataagaagaccgcagccggagaggagaagtatgcagaaaaggcgcccgttgcgaagaaggccaaggcggaaaatcagatgccggagacaaaagcggtctccaaagagggcggggccgacgacaagaagggga

SEQ ID NO: 38145 - DNA, 239 bp, Oryza sativa
  Clone ID: uC-osrocyp029h08b1
ttgtaaaggtctccctcctcctcacgaatcccggggctctctctatctctgtcgctctctggctctgtctctctccatttgagccgagccctcgagaggcagcaccgatggcacccagggcagagaataagccggcagggaagaagcccgcacccggccaggagaagcacgtagtgaaggcgccggtggcgaagaaaggcaaagcggacaaaccgaatcgggagatcaaagccgcccaa

SEQ ID NO: 38146 - DNA, 367 bp, Oryza sativa
  Clone ID: uC-osrocyp029h09b1
tcttcgtcgtaatatctgacaaagactggctaggtggagatatctgcacaggttgataaacagttagcgtatactcttctccttgctgaaaacatttgccagaaacatgacattaaggttgagcatcttgtatcagaaattgttgacacgggactgggaaagcaaatgtctagaataaaaccatccctctcatttattggagcagaggaagttatgagccttgtaacagcacaagttgcgggaagtagtgagttgaatgaagtatggaaggatattctgaacgctgaaagagaatagatctacatcaaggaaataggattctacatgaaagaaggggagaagatatcattttcagagcttactgaaa

SEQ ID NO: 38147 - DNA, 383 bp, Oryza sativa
  Clone ID: uC-osrocyp029h10b1
tctagcacggcaacagcggtaacaacgccgactcggggagcatcttctccgggaacatgatgggcggcggcggcggcttctcgtccttgtacagctcgtccgaccagaccgtcccgccgccgcagatgtcggcgacggcgcttctccagaaggccgcacagatgggcgcgacgacgagcagcggcggcgccggcagcgtgaactcgctactcagaggtctcggaagcggcggcggcggcggcgctctgaacggtaagcccgccggagcagccgggttcatcatgtccggggagagctcgtctaggagcactgcttctcagacggcggagaacgagagccagctccgggagctgatgatgaacacgctctcggcgacccggggc

SEQ ID NO: 38148 - DNA, 425 bp, Oryza sativa
  Clone ID: uC-osrocyp029h11b1
ctcgccttcttttatatgtggtttctatgggatatggtgttgttagacccacattaggtggggttacatctaaagtaggtgctcttggtgtcgtctattttattgcttcggaaggtcttgaacttgttgaaaatcttggaaacatcaatgacttctctgggaaaacaaggttatttctggtgttacctgttgccatacttgatgctaccttcattatctggatattttcatcactctcgagaactttggagaagctccagctgcggagaagtatggcaaaacttgaattgtatcggaagtttacaaattctctagctttgtcagttcttatctctattgcttggattggctatgaactatactttaatgcaactgatccattgagtgagctatggcgaaaggcttggatcatccctgcgttttgg

SEQ ID NO: 38149 - DNA, 471 bp, Oryza sativa
  Clone ID: uC-osrocyp030a01b1
gtgggaatgaggcatattttgtatcaattaaggagtaccgtagcaggattgaaactgagctcagcaagatctgtgatggtatccttaagcttctggattcccaccttgtcccatctgccactgctgcagagtccaaggtgttctacctgaaaatgaagggtgactaccacaggtaccttgctgagtttaagtcaggagctgagaggaaggaagcagctgagaacactcttgtggcatacaagtctgcccaggatattgcactcgctgacctgcctacaactcacccgataaggcttggacttgcactgaacttctcagtgttctactatgagatactgaactcaccagaccgtgcttgcaaccttgcaaagcaggcgttcgacgatgctattgctgaactggacactcttggcgaggagtcttacaaggacagcaccttgatcatgcaacttcttcgtgacaatctgactc

SEQ ID NO: 38150 - DNA, 451 bp, Oryza sativa
  Clone ID: uC-osrocyp030a03b1
ttcgtgtttcgggctttcgtctccaccgccttgatgccttcccgggagcaggagtagcggctcatcgccaactacccttctccgtcggagcgtgcgtcgtcgtcaccggcgatccccacccacctgctcactgcgccgtctcgccgtccgccccttctccaccttgccctcaacccgccacagatccctctccctcccttcctcgtccccggccttcctcgccgcaaacactgccccctcttctccgctttccttcctcctctccacctcagccgacggccacgatctcagccgtgatctggaagaggctcttcttttaatttcagagccttaaccttaatacaagcaacagtttggggggtcaactgaacccccatgtcccaagttggatccgcccctgctcccatggtgacatcccatgaagatgctaagaaggcgtatgctgatttcg

SEQ ID NO: 38151 - DNA, 308 bp, Oryza sativa
  Clone ID: uC-osrocyp030a04b1
tttgatgtgatgcccagggaagcaaatccagatgctgcgattactgcctacaggtatcactccctttgtgcatatatgggcgatgatgacactgttcagactcagactcttgagcgaatgatcaggatgaggcagagacctgaggattatgcaacatcacagtgccaggatattttctcaatgggggatgaatatgtcccggaatacgttgataaggaggcacttgtggacagactatgtcaacgcattgggcaacgcggagaaagttgaaatagaatggggaaaccatgctctctccaatagggtgc

SEQ ID NO: 38152 - DNA, 395 bp, Oryza sativa
  Clone ID: uC-osrocyp030a05b1
tgttcttttccttcttttcgttgcagggatgaagctggtgtggtgcccggagatggcgtccaaggcgtacatcgacggcgtcagggcgctggccggccacgacctggccggcgccgcggcggacgtggcggagctcgtgtccgccatggccggcaggtggaacgcgcggttcatcgccgaggcgccggactccgcggactacggcggcagccgccacgagcctcgtgctggccgcagccgcgcggggcacgggcggtcgctacgccctcgtgctgacggaccgggatgctgcggcggcctctgcggcggaaacggccgcagacgctgccggggaggcggaccaggcgatggcggggctacacggcgtgggcctgctggtggtcgacgcgcggagg

SEQ ID NO: 38153 - DNA, 418 bp, Oryza sativa
  Clone ID: uC-osrocyp030a06b1
ctcctcctccctaccattaactaccaccatcctcttcttggcacttggcatcaagagacacatccagacgcctcgagttgtagctagcaccagtggctcagcttgcccagtgctgctgcatcgatcagaggcagtagctagctcagctctagccttttggcaccgaccgctccgatcgaatcctgtgctaggctagccagcctcctcgctctttataaccccagccgccattggagagggagggagggagctagagctttgttcttgatcttgcatgctgttcttgttgatcgagtgagagagggggaaggaagaaaggagggaggcacatgcttatacggttcgtgctggaggatctgagcgccagaatcttacaacagtgagaggcttcgctgggagtctatgatcaacttcacac

SEQ ID NO: 38154 - DNA, 460 bp, Oryza sativa
  Clone ID: uC-osrocyp030a07b1
caaaaaattcgatttctttcaccaacgaagaaaaaaaaaagggagaaaaaaaaatccacgcacactttgcgtgcgaggcgaggcggttcgattcgagaggagagagagagagagagagagagagagagatggacgccttctactcgacctcgtcggcgtacggagcggcggcgagcggctggggctacgactcgctgaagaacttccgccagatctcccccgccgtccagtcccacctcaagctcgtttacctgacactatgcgtcgccctggctgcgtcggcggtgggcgcatacctgcacgtcgccttgaacatcggcgggatgttgactatgctcgggtgcgtggggagcatcgcctggttgatctcggtgcctgtctttgaggagaggaagaggtttgggaatcttttggccgctgccctgctggaaggggctttagttgggcctctgatcaagct

SEQ ID NO: 38155 - DNA, 464 bp, Oryza sativa
  Clone ID: uC-osrocyp030a08b1
ttggtgactcgccggaaccctagccctagatcccgcgcggcttgccgccgcgctagccatggcgtccctcaaggagctcctcccgacgcccaaggcggcggcgtcgacgttctacgaccacagcagcgacccgtggttcaaggagcggtatggcggggagtcggcgcaatccgacgcggcggcggcggcggcgaagccttcgggccccgccaagcccgtgccgccgtacgggaagcgtggcgggttcgtgccgcggcggccggaggacttcggggacggcggcgccttcccggagatccacgtcgcgcagtacccgctcggcatgggccggcgcgacgagaagggcggctcgaagatcctcgcgctcaccgtcgacgccaagggcagcgtcgccttcgacgccgtcgtgaagcaaggtgagaacgcctctaagatcgtttactcaaagcacaacgaccttgtgc

SEQ ID NO: 38156 - DNA, 473 bp, Oryza sativa
  Clone ID: uC-osrocyp030a09b1
tacagaagaaatttgtttcctgctccactatctgacgaacctatgtgctatagtgggaggggttttcaccgtctccggcatcattgactcgttcatatatcacgggcagaaggcactcaagaaaaaaatggagctaggcaagtacagatgatttacctgaaacatggactggccctcatgttccccaagttcccaagttccgtggcttgtaaaggatccattgcttaagacctgaagacgttgctttgctggaaggttttgctaaggccatcagaattgacgatattgcacattagttgatcaaaaactcgtttacatgtaaaaaaagacaatatcatagcgttgggcctgggggagtgctttgatgtctcagtgagactctttttgagtggccaaaactggcgaaatgagatggatagattaaatcaattttaccactgcgtgtgccatttacactgtttgacgttttctgt

SEQ ID NO: 38157 - DNA, 424 bp, Oryza sativa
  Clone ID: uC-osrocyp030a10b1
ctcaagagtgcaattgttgtcacttgcaagagtccagtgagatgccattagtcagaggcagcacagcaaagccaaagatggaaatggagagaccagttgttgccctagaggaggacgccatgatcaatgcgaggatggctttggagacacaggactatgcaccctcaggcccaaacaaccaccacaagccaccgggttggagctgagcagctagctagctagctaggattcatatatatcacctatatcaaagtgtgtgcttatatcttactcatgcagtctcatgtgcatgtgcccttcccttcatgacgattttgcaaaacctcttgattggtagtctgagtcttgtgacatagcttatgtatgagatgtggctgtgagtcagcacaggtggcaacgatcacgtgtaacaaaaggtgaatta

SEQ ID NO: 38158 - DNA, 483 bp, Oryza sativa
  Clone ID: uC-osrocyp030a11b1
atcggttccgcgccatgtgcggcggtgcgatcctcgccgatttcaccccggcgagggtgccccggcggctgaccgccgccgagctcctgccggtgaccccgactccccccgccgccgagaggagaaccacccggaagcgcaagtccgacgtcgacttcgaggcggagttcgagcttttcgaggacgacgacgacgacgatgagttcgagctttccgacgatggcgacgagagtttggccgtgtcatgtgtgtcgtcccccaagtcgaaggcagtaccttcgttttctttttcgtcggatgtctcctcgagctccaggccgcggcggcgcgtggcggcggcggcggccggtcgtcggaaggcgagcaagaagagcaagtacaggggcgtccggcgccggccgtcggggaggttcgcggcggagatcagggaccccaagaaggggcggcgcgtgtggcttggcacgtacggcagcgccgaggagg

SEQ ID NO: 38159 - DNA, 486 bp, Oryza sativa
  Clone ID: uC-osrocyp030a12b1
aagtcattcaggttccagagctagatttatcaataatcattatggaggtgaaaagcaccagcatgactcaagttcagctcgctttgactgtttaagtcaagagttaaaaaggatacccaagagttcttacctgaatagagaaaatgtaaaaaccatgagtctaagtgaagaggctcaaatccatctcgctaaattcaggtggggaagctctccgctccagtgatttctcaaataaaaatctcgttgagctgcttcagattcagagttatatgagcagtagggctctagttctgctcaattttctgcttcatattcagagttaaatattacaagatagttgaaccagaatcctaccaaatttctgggttttgccgggatacaactgataatctcatggaatcattgtcaacattttttgagctattttttgagtgagttcagagataatagcagtgatgttctatgcattttctgatcatatattgc

SEQ ID NO: 38160 - DNA, 307 bp, Oryza sativa
  Clone ID: uC-osrocyp030b01b1
ttcgttcttcgctcgctcgcgggtcgcggcaccactccgcctcgccctttctcttattaagtcgcctccaactccgcggttcaaaacctcctcggcttcttcctccaccaccaccaccaccaccaccaccaccactccgcgccgccgacgccgccgccgtcgccgtagacgcggtataccggtgattccttgcctgcatttctgatttgctgcttttgggttgggggaggagggctttgtttgtccgcacgcctgcttgctagtttgtcttgctgagcggcgcggggggatcggtggcagggggctg

SEQ ID NO: 38161 - DNA, 457 bp, Oryza sativa
  Clone ID: uC-osrocyp030b02b1
atccttttctccttcctccattcctccgccgctagaaccttctagaagctctcctcctcctcccatggcggcgacgatcgtgtccgtcaaggcgcgccagatcttcgacagcaggggcaaccccaccgtcgaggtcgatgtgtgctgctcagatggaacctttgcaagggctgcagttcccagtggtgcatcaactggtgtctatgaagctctcgaattgagggacggtggatctgattacttgggaaagggtgtttccaaggctgtcgacaatgtgaactcggttattgccccagctctgattggcaaggaccctacgtcacaggctgagcttgataacttcatggttcagcagcttgatggaaccaaaaatgagtgggggtggtgcaagcagaagcttggtgctaatgcaatcctggctgtgtcactggccatttgcaaagctggagctatcatc

SEQ ID NO: 38162 - DNA, 466 bp, Oryza sativa
  Clone ID: uC-osrocyp030b03b1
cttctcctccggctctttttttgtatcgaatcctctcttctcctcgtgcccaccaccaccaccgtagcaatggcgggcaacgggccgatcaacaaggaggacccgctcaactggggcgcggcggcggccgagatggccggcagccacctcgacgaggtgaagcgcatggtggcgcagttccgcgagccgctggtcaagatccagggcgccaccctccgcgtcggccaggtggccgccgtcgcccaggccaaggacgccgccggcgtcgccgtcgagctcgacgaggaggcccgcccccgcgtcaaggccagcagcgagtggatcctcaactgcatcgcccacggcggggacatctacggggtcaccaccgggttcggcggcaccttccaccggcgtaccaaggacggccccgccctccaagtcgagctcctcaggcatcttaacgccggaatcttcggcactggct

SEQ ID NO: 38163 - DNA, 102 bp, Oryza sativa
  Clone ID: uC-osrocyp030b04b1
gttgggggttcctcgtgtgcctgcaggctaggtgtctgtggaattgcctccctggaagcagctgtcgggaaaggctgcagaggagaggaaattgagggagaa

SEQ ID NO: 38164 - DNA, 424 bp, Oryza sativa
  Clone ID: uC-osrocyp030b05b1
tttactcgtgggcttctctgaaactttcaatcttgtggctagacagcaactactctatcatgcgcctctcaatcacaagcctcgtcgccgtcctcccggcagttattcttgctgtccccgctccaggggtttccaaccagcacgccgcacctctcattcgagcacgctcgccggggaaagccattcccggaaagtacattgccaaattcaaggaaagcgccacggatgctgctctcaacaaagctctaggtagccacaaagcaggtcatgtctaccgagcgaaggggctcaagggattttcgggtgctttggatgccgactctctcgaagcgatacgccaactcccagaggttgaatttgtagaagaagacgccctattcacagcctacccgatcgttacccagactggcgccccgtggcacct

SEQ ID NO: 38165 - DNA, 454 bp, Oryza sativa
  Clone ID: uC-osrocyp030b07b1
tcggtttcatcctcctcctcctcctccgccgccgcctccctcctcccccacctccactctccactccaatggcgactcacacgcagatcagcaagaagcgcaagttcgtggcggatggggtgttcttcgcggagctgaacgagatgctgacgcgcgagctcgcggaggacggctactccggcgtcgaggtccgcgtcacccccatgcgcaccgagatcatcatccgcgccacccgcacccagaacgtcctcggcgagaaggggaggaggatccgcgagctgacgtccgtggtgcagaagcggttcaacttcccggagaatggcgtcgagctctacgccgagaaggtgaacaaccgcggcctctgcgccatcgcccaggccgagtcgctccgctacaagctcctcggtggcctcgccgccagaagggcgtgctatggtgtgctcaggtttgctat

SEQ ID NO: 38166 - DNA, 458 bp, Oryza sativa
  Clone ID: uC-osrocyp030b10b1
caaaaaggatcaatccgtaggtcccagagatgagcttagcaatgaagtagaattgcttgctaagattgaccaccggaatttggtgaggttgctgggatttactgataagggacatgaacgtatcattatcactgactatgttccaaatggcactctgagggagcatcttgatggccaatatggaaaaaccctggattttaatcagcgtctcgaaatcgcaattgatgttgcacatgcactgacttatcttcatctatatgctgagaagacaataattcatcgggatgtgaagtcatcaaacatcctgctgacagagagctaccgggccaaggagtttgactttggatttgcaagaagtggccccagtgacacagaaaagacacacatttcaacaaaagtaaaaggaaccgatggctaccttgatcctgagaatctgagaacataccatttgacttctt

SEQ ID NO: 38167 - DNA, 495 bp, Oryza sativa
  Clone ID: uC-osrocyp030b11b1
ctgggcctggctctggttcctccgctggtattgtcatcggatactacttcttcatctacttccagccaactgatgtcaaggacgtcaaagttcgcccacttgtcgaatatgactcaatatcgttggacggtatccttcctgaaattcctttgtgggtcaagaatcctgactatgatagaattgattggctgaatagatttttggagatgatgtggccttacctcaacaaggcgatctgcagaactgcactggatattgcaaagccaatcattgaagagaacaggaagacgtataaactagaatctattgagtttgaatcacttacattgggtagcttaccacccacctttcaaggaatgaaagtgtatgtcacagaagaacaagaattgataatggaaccatctcttaagtgggctgcaaatcccaatgtcactgttgttgtaaaggcttatgggtcgaaagcaactgtccagattgtggatctgcaagtctttg

SEQ ID NO: 38168 - DNA, 456 bp, Oryza sativa
  Clone ID: uC-osrocyp030b12b1
tcgtaggttttgatacggccgtagaagaggcccagcgtgccattgattcagctcatgtggaagcttgcagtgctgagaatggaataggcttagtaaaactgatgggccgttatagtgggttcattgcaatgtatgctactcttgcaagtcgagatgtggactgctgcttaattccagagtccccattttatatggatggtgaaggtgggttgcttcaatatgtagagagaaggctgaaagagaacaagcacatggttattgttgctgctgagggagcagggcaggatcttatagccaaaagtttatctacttctgagcagcaagatgcatcaggaaataagctactgcttgatattggtctttggctgactcacaagataaaggaccacttcaagagcaaaaagatggagatgactattaaatttttgatcctacctacatgatccgagctatttc

SEQ ID NO: 38169 - DNA, 475 bp, Oryza sativa
  Clone ID: uC-osrocyp030c01b1
cgaaccccgccgccgctgccttatcggaggcgagagctccgatcccaaaacccccccgcccctcggcgatggcgccgccgcgccatctcctcctcctcctcctcctcggcttcctcgccgccgcctccctcgcgttcacgctcaccgccgccgtgtacgaggaccaggtcggcctcgcggactggcatcagaagtacatcggcaaagtaaagcaggcagtctaccacagtcagaaaagtggaaggagacgtgttgtggtgttgacagaggaaaatgttattgcttctcttgatcttcgttcaggagatatattttggaggcacgtcattgagaagaatgatcctgtggatgagcttagtttatcacttggaaaatatgttgtaactctttcttcgggaggcagtatattgagggcatggaatcttcctgatggccagatgatctgggaaactaatcttcaagtttccaaatcatc

SEQ ID NO: 38170 - DNA, 326 bp, Oryza sativa
  Clone ID: uC-osrocyp030c04b1
ttgatgcgtgggcgacaagccactgctgaatagggtgcatcatatgaagcggcatcaacactcgacagtgatttactaacaagaatcgacgacttcatgcactgaaacaatgcatcagacaaggggcgatcacggagctgtctacagttaattaggaaatagatagtctgcaacctaatttatgacctgatagtgttccgtttgtacagtctttgcctgatggatctatctaatgttctgagtaaattattgctatttaggaacactttacatatgtaattcgaggggaaataatataatgttctgagtcaaaaaaataaaaacaa

SEQ ID NO: 38171 - DNA, 427 bp, Oryza sativa
  Clone ID: uC-osrocyp030c06b1
tttcttctaaatggatttattgtgaggaagggtgctcctggcttgaaagctacaaagattgagaacaaaattggtctcagaatggttcagaacggtgatatagtttttaataaagtatttgtccctgaggaagatcgactgccaggtgtcaattcatttcaggatataagcaaggtccttgctatttcacgtgtcatggtggcatggcaaccgattggtatatcaatgggggtgtttgatgtctgccatcggtatctgaaagaaaggaaacagtttggagttcctctagtagcttttcagctgaaccaagaaaaacttgtgcgaatgcttggtaacatccaagcgatgctttttgttggctggcgactatgcaagctttatgagttagggaaaatgacaccagggcatgctagtttagggaagggtt

SEQ ID NO: 38172 - DNA, 463 bp, Oryza sativa
  Clone ID: uC-osrocyp030c10b1
tcgtccaggtcaaaacaatggtggttcaaattcttggagtaatggaccagcaccaccacctccaccgtattcagatccacctccaccaaaccgttcaaacagccgaggtcaaaacaatggtggttcaagttctggtggaagctctgggataggtggaggaggtgtagcaggcattatcatatcattgctggtagttggagcagtcgttgcattctttgcgataagaagaagaaaacgcagagcggcattggaagaacattttgaacagcaccagccattcacttggttcccttcaaacgaagttaaagacatgaagcctattgaagagtctactacaatagatgtagagtctttgccatcccctgcttcatttagtctgaagccaccccccaagattgaacgccacaagtctttcgatgatgatgatttatcaaacaagcctgtcttgaagaaaaccaatgtg

SEQ ID NO: 38173 - DNA, 405 bp, Oryza sativa
  Clone ID: uC-osrocyp030c11b1
tcgttccccgctccataacaacgccggcaggatatgtcttaggtgacacacatggtgtgatcttctcttaaactacatcgccggcgaaaaaaactatttacaaaaatgtcttccctcagttaagcaagagggtctaggcataagaggtacacggaatttttctactactaaaaattaaaaagaaataaatgaactagcggtcatcatgtaaaaactccggctgctagacctccatcggcggcggacagttcagatcaagatcaaaagcgatggctttcttcgccaacgcggcgggcggcgatggtgccagaaccacgatcgacgaggagtcggagccgctctgcgccatggcggccacggtgaccggctctggcgctattttgagcatgcggtatccagaggcgg

SEQ ID NO: 38174 - DNA, 477 bp, Oryza sativa
  Clone ID: uC-osrocyp030c12b1
gtgcgggcacgactggctatagatagatccatggggtgggcggtcgcgctgcacggcggcgccggggacatcccgcgctcgctgccgcccgaccgcagggagccccgcctcgccacgctccgccgctgcctcgacctcgccaccgccgcgctccgttccggccgcgctgccctcgacgtcgtcgagctcgtcgtgagggagctggagaactgcccgcactacaacgccggcgtgggctccgtgctcaccgccgacggcaccgtcgagatggaggccgccgtcatggacggcaacaccttgcgctgcggcgccgtctccggactctccaccgtcgtcaacgccgtctccctcgccaggctcgtcatggagaagacgccgcacatctacctcgccttcgatggcgccgaggccctcgccagggagcagggagtggagacttaagatccaagccactttattacggaggcaaacaagaga

SEQ ID NO: 38175 - DNA, 471 bp, Oryza sativa
  Clone ID: uC-osrocyp030d01b1
caacgtggagcttgctttggtttacggcttaaccgaatcgtctggcgcggtggctgccacagtcgggccagaggaatcgaaggcatacggatcggtcgggaagctggggtcgcatttgcaggctaagattgcagatccctgcaccggtgaggccctcggaccagggcagcgcggcgagctttgggttagaggcccaatcgtgatgaaaggctacgtgggcgatgatgaggcgaccgcagcaacggttgactcagaaggctggttgaaaacaggtgacctctgctacttcaatgaagatggtcttctatacattgatgagcgactgaaggagttgagttggtacacgagttacgaggttcctgcaggagaactggagcattttctgtagttccaatgtgaatttgctgatgcgggagtttttccatatccagatgaagaagctggggaactaccaatggctttcattgcaag

SEQ ID NO: 38176 - DNA, 456 bp, Oryza sativa
  Clone ID: uC-osrocyp030d02b1
ctcgcgattcctctcccttctttctcctcgtcctccccctcccaggggatcgccggagaggaatcgcgcggaggaaaaaaaaagaaaagggcttccccgtcgtctaagttaaaaggaagccatggagcacaaggagactggatgccagcagccagaaggcccgatcctttgcatcaataactgcggcttctttggcagtgcggctaccatgaacatgtgctcaaagtgccacaaggagatgataatgaagcaggagcaggccaagctggcagcctcctctatcgacagcattgtcaatggtggtgattccgggaaggaaccaattattgctggtcacgctgaagtagctgttgctcaagtcgaggtgaagacgcttgttgcgcagcctgctgagattgctggtcctagtgagggggtcacggcgaaccccaaggggagggaaggaccaaatcggtg

SEQ ID NO: 38177 - DNA, 333 bp, Oryza sativa
  Clone ID: uC-osrocyp030d03b1
tgtcgtgcgcaccactcgcccggtcgccccatccccactctggcactccagcgcccaaaaaccttcgcctccgcctccgccatgggagaccaccgcgccacggccaaggtccgcgtgaacggcgcgccggcagaagcgacgctcttctgcaccgacccgccgggtgcagctaatggcggcggcggagatggaggggagctccggtggcggtgcgctggtggcgccgcggcggagcgcgtgctgccgctggacgcggacgtgcttggggacgaggccagggggccaggcggaagggttgatggccctcgccgtgtagggggacacaccctgtag

SEQ ID NO: 38178 - DNA, 402 bp, Oryza sativa
  Clone ID: uC-osrocyp030d04b1
ctcggaccacctgatgtgcctcgtggggatcctttgctgagtccggtgacgcacacaccaaaatctacggctcagcatcaaacctcggtcttgtgccgtttccgtggaggcagccgatggggattaacggtttgtcaagcggactgcacatcttttgaggcccagggtagcagtcgtcgcggcttcgccgcagatccctgtcgacttgctcctttttctgttctgatgttaggttatttcaggaaggttgctttcgtagttcagttaactctcctttcttaaggatggctcttttgcttggatatgtaatggggtttattccctagatctgttcctgcttaataaagttgatgtgttttcaaaaaaaaaaaaattaaaaaaaaaaaaaactcaaccataatg

SEQ ID NO: 38179 - DNA, 387 bp, Oryza sativa
  Clone ID: uC-osrocyp030d05b1
ttcatgcgtccgcccacgcgtccgcaggaggaggaggaggacgcggcgcccgcgatggggtgctggatccgcatcccgcgccggctcggcggcggctgcatgtcgtcgcgctccaaggtcgactcctccaccaccaccagcggcggcggcggcggcggcagcgctcgcgtcggcggcgaaagcaaatcagcgaatgatggttgtcgagaccattcagttcaaccaatggcctctggttccacaacatccagtaacactggaagcatctcaccttcgtccatagtcggagaggaacttaaactagctttccaactccgtaggtttacatttaatgaacttaagtgtgccacaagaaacttccggcctgagagtctccttggtgaaaga

SEQ ID NO: 38180 - DNA, 466 bp, Oryza sativa
  Clone ID: uC-osrocyp030d07b1
ttcctgttcactcatgcacaccgctgtggatcttgtaaatgagaccaagctcgatagcgagattaagtcatggcttgcttttgctgcccaaaaagtggttgaggtgaatgcccttgctaaggcattggctggacagaaggatgaggcttactttgcagcaaacactgctgctcaggcctccaggaggtcatcacctcgtgtgacaaacgaggaagtccaaaaggctgctgctgctctgagggggtctgaccaccgccgtgctaccaatgttagcgctaggttggacgcacagcagaagaagctcaaccttccagtccttcctacaaccacaattggttcattcccacagactgtggagctcaggagagtccgccgtgagtacaaggctaaaaagatctctgaggatgagtacgtcagtgccatcaaggaggaaatcagcacggttgttaagatccaggaagagctt

SEQ ID NO: 38181 - DNA, 377 bp, Oryza sativa
  Clone ID: uC-osrocyp030d11b1
cgttctcacacctttcttctcctcctcctcgcgcggcggcggcggcggcgtgagtcagcagcagccatggtgctgttctcggtgacgaagaaggccaccacgcccttcgacggccagaagcccggcacctccggcctccgcaagaaggttactgtattccagcagcctcattacctccagaactttgtgcaatccacatttaatgcccttcctgccgacaaagtaaaaggtgcaaccattgttgtgtctggtgatggccgctatttctcgaaggatgctgttcagatcattacaaaaatggctgcccctaatggagtaagacgtgtttgggttggacaaaacagcctcatgtctactccagctgtatctgccgttat

SEQ ID NO: 38182 - DNA, 415 bp, Oryza sativa
  Clone ID: uC-osrocyp030e04b1
ccgtgttgctgggctccgggcgcgctcctagcgggggttgtccacgccgcggtgcggcggtgccaacttcctccggactaccggagcgggaccaacgtgtgctgtgggaggacctactcgacgcacgtggctgctcgtcctccgcctcgccgcgctgatccgtctctgggccctcggtgcccgcctacccggaccgaccggcttccccgccgaccctggcctcgccgccggtgacatcaccggctacctatagaagtaacatggcagttatggcccaggtgcacgactgtggctcggaccctctcaactgcttgactcaggaaaagattctagggagattaaagagatgctaacaaaggctgaagataagtaaccgttgactgggaagacatataatcaggcttgcggaaaaact

SEQ ID NO: 38183 - DNA, 466 bp, Oryza sativa
  Clone ID: uC-osrocyp030e05b1
ttctctcaccaccaccaccaccaccaccaccaccaccgtctccagccatggcctcctccgcctccctgcagcgcttcctccccccgtacccccacgcggcagcatcccgctgccgccctcccggcgtccgcgcccgccccgtgcagtcgtcgacggtgtccgcaccgtcctcctcgactccggcggcggacgaggccgcgtcggcggagcggctggagccgcgggtggagcagcgggagggccggcactgggtgctcaaggagaagtaccggacggggctgaacccgcaggagaaggcgaagctggggaaggagcccatgtcattgttcatggagggcggcatcaaggagctcgccaagatgcccatggaggagatcgaggccgacaagctctccaaggaggacatcgacgtgcggctcaagtggctcggcctcttccaccgccgcaagcatcagtatgggcggct

SEQ ID NO: 38184 - DNA, 472 bp, Oryza sativa
  Clone ID: uC-osrocyp030e06b1
tttgtctcccctctccttcctcctctcctttcccctcctctcttcccccctctcacaagagagagagcgccagactctccccaggattcagccatgaagggggccaaatccaagggcgccgccaagcccgacgccaagttggctgtgaagagtaagggcgcggagaagcccgccgccaagggcaggaaggggaaggccggcaaggaccccaacaagcccaagagggctccctccgctttcttcgtttttatggaggagttccgtaaggagttcaaggagaagaaccccaagaataaatctgtcgctgctgtaggaaaagcagccggtgataggtggaaatccctgaccgaagcggacaaggctccctatgtagccaaggccaacaagctcaaggccgagtacaacaaggccattgctgcctacaacaagggcgagagcactgccaagaaggcacccgccaaggaggaagagg

SEQ ID NO: 38185 - DNA, 293 bp, Oryza sativa
  Clone ID: uC-osrocyp030e07b1
tcgtgtcgacatccactcccacactccgtcggccacctgccctactcctccctcctcttcctctccttctccctaccctatgattgctctcctcctccccgagctctccccctagccgcccaggcagccgcactccgggagccagcaagcccagccccgtggtccggcgcgggggggagatggcggcggccgagttcttgtcgccggaggcggcggcggcggcgggggtggggccggtgcggcagcagcagcatccggtggaggcggcgtggcgggcggcggtggggtgactc

SEQ ID NO: 38186 - DNA, 460 bp, Oryza sativa
  Clone ID: uC-osrocyp030e09b1
tcgttcacgcgtccgcccacgcgtccggagaggagggaggggggacaaggaggaggagcgcaccaccctctcggagaggtcgcctccgttcttgcatcgttttctttggatagggcagcgctttgacagctttggggagttagtcgagaagtgtgcacatggagtccaacagtggtgaaatcgaggagttgccacctcccccacctttgccaccaaatgctgagccaattaaaactgatgatacaaaaaagttatcaaaacctaagagggccttgatggctcgctctggttgtggcaaaaaagggcagccgatacagctgctgacgaaccacttcaaggtttcactgaaggcagcagacgaatttttccatcactactatgttaatctgaagtatgaggatgatagaccagtggatggaaagggcataggtagaaaggtgctggacaaactccagcagac

SEQ ID NO: 38187 - DNA, 468 bp, Oryza sativa
  Clone ID: uC-osrocyp030e10b1
tcgtttcccgctccataacaacgccggcaggatatgtcttaggtgacacacatggtgtgatcttctcttaaactacatcgccggcgaaaaaaactatttacaaaaatgtcttccctcagttaagcaagagggtctaggcataagaggtacacggaatttttctactactaaaaattaaaaagaaataaatgaactagcggtcatcatgtaaaaactccggctgctagacctccatcggcggcggacagttcagatcaagatcaaaagcgatggctttcttcgccaacgcggcgggcggtgatggtgccagatccacgatcgacgaggagtcggagtcgctctgtgccaaggcggccacggtgaccggcgccggcgcaatcttgagcatgcggcaaccagaggcggcggcggcggcggccgcttgtccaaagaagtagtaagggtgcgatacggggtagccctcgaaag

SEQ ID NO: 38188 - DNA, 472 bp, Oryza sativa
  Clone ID: uC-osrocyp030e12b1
tttttctcattagtcaaaccaaattaccaacaaagtacacctctcccttgctagggtttgttccctctcccaatctccaaagtgtcatttcacattgacttcattcttcttcccagatcccccaatttctccctttcaccatgaagcttctccctcttctcatcctcgcaatggtcatggccaacgccttcggcgccgtcacttctcgcacggcgccgggggaggaggcgctgctggcgcacggcgtggtgaagacgacgacggcggaggggacgtccatcgacaaccaccacgcgataccgcggccggagtacgacagctggagcagcccggggaacatgccggggagtggccatgacattgggagcgaacaagctcagccatgatcgagctagatgcagcttacccagctctacccatgtcctgtacgtatatacatagcaagcttgcaagccatgggttatacacttat

SEQ ID NO: 38189 - DNA, 458 bp, Oryza sativa
  Clone ID: uC-osrocyp030f01b1
ttcgtttccgccggcgccgaggccgtcgacgcccggcggtggtgccgggtcgtgcccgcgcgacgcgctgaagctgcacgtgtgcgccaacgtgctcggcctcgtgaaggccaagatcggcgcggtggcgccgtacgagccctgctgctcgctgctcgacggcctcgtcgacctcgacgccgccgtctgcctctgcaccgtcatcaaggccaacgtgctcggcctcaacctcaacatccccatcgacctcagccttatcctgaacaactgcggcaagatctgcccatccgactaccagtgtgcttaatcacattgggacactgcagccgatcgatcgatcgatcgattgacagtgtgctacacgtcgtttacatgtttttgttggttggcttactgtgagcagtctgaactctcttaactttggaaactgtctgcttttggcctggttatgcttggaa

SEQ ID NO: 38190 - DNA, 479 bp, Oryza sativa
  Clone ID: uC-osrocyp030f02b1
agttgtcctacttgctgtacttgatctcacctgctttttgcagccacccgcacagacagcaaaatggcactctgcgtcaaggccaacaaggcagtctcctgcactgctgcccgcaagcaggtggcccgcgctggtgtggcccgcccagtcttggcacgccgtatggccgtgcaggctagcgcccagaaggagagcagcccagtggccgcacagctcactgcaggcctgaccgctgctgccgccaccaacatgctgatgcccctggcagctgctgctgaggtcaccccatccctgaggaacttcatctacagcctggttgctggtggtgccgtgctgggtgccattgccctggccatcacagccgtgttcaactttgacccagtgaagcgcggttaagccactcaacccagcagatgatggcagcagtgacaaggacagtcctgcagcgccgctgctgcctgccaggtggctctcacagg

SEQ ID NO: 38191 - DNA, 445 bp, Oryza sativa
  Clone ID: uC-osrocyp030f03b1
ctagcttgctgtaaacacagttagttcgtaattatcgcatagggccatggggaagtacagtgtgggtctcgtggttttagggttgctggcccttgcgttttcgaccactgtgctggctgaaacacatgttgttggtgactccaacggttgggacttctctgtgtcgtttgatagctgggctgatggaaaggtcttcgctgctggtgacactcttgttttcaactacaaaccgggcgcacacaacgtgctggccgtggacgcggcgacgtacaggagctgcaaggtgggcagctcggcggactcggtggcggcggcgacggggaccgcgtcgttcctcctcaagaagggcgtcaactactacatctgcggcgtccccggccactgcgccgccgggatgaaactccgggtcgtcgccaactgatgaaactccggcgacagatcaatc

SEQ ID NO: 38192 - DNA, 448 bp, Oryza sativa
  Clone ID: uC-osrocyp030f04b1
tttgtttcgagaacgcgcgcgtcgaggcgcagatcggggcctacgcgggggagctgagcaaggtcgacggcgagaacgcggtgctccgcgcccgccacggcgagctcgccgggcgcctccaggcgctcggcagcgtcctggagatcctccaggtggccggcgcgcccgtcgacatcccggagatccccgacgacccgctgctccgcccatggcagccgccgttcgcggcccagcccatcgtcgccaccggcatggccgacgccttccagttctgagccaccatggagagctcgcacgccatggccattggcatcaatggcatggttgcagctgcattacatctagttagtactagcctctgtggttgcgtctgatgatgcttattatgtttaattatggtttgcttcatgctgttttcattaatctagaccattaataagcaatgtgt

SEQ ID NO: 38193 - DNA, 463 bp, Oryza sativa
  Clone ID: uC-osrocyp030f07b1
tcgtgtgcttccgtttagcatctaggctctagcaaacctgtaaagatggaatcctacacaactggagccaagtttgattgtttgttgtttgacatggatgatactctgtacccactgagcttaggaatcaacttagcttgccgcaagaacatacaagactatatgctgaacaagcttcagattgaagagagccttgttcccaagatgtgtcttgatctgtacagggaatatggaactacaatggctggactgaaggtcttgggttatgatttcgactatgacgatttccacgcttgtgttcatggcacattgccatacgagaagctgaagcctgaccctgtcttgaggcacctactgctttcactgccacaaaggaagattatattcacaaactctgacaaggcgcacgccgcgacggttctgaagaagctcgggctggaggattgcttgaagggatcatctg

SEQ ID NO: 38194 - DNA, 294 bp, Oryza sativa
  Clone ID: uC-osrocyp030f08b1
tcgatacattcctggtatgaggcctagtgttggaccaattccaaattttgtcatgcctatggtccagcaaggtcaacaaccacaacgtccagctggaaggcgtgcaggcactggtggaattcagcaaccaatgccaatgggccaccagcaaatgcttccaaggggtagtcgtggtggttaccgttatgcttctggtcgtggcatgccagacaatgcattccgtggtgttggaggtttagtgccatccccatatgagatgggaagaatgcctctcagtgatgctggttgcaccac

SEQ ID NO: 38195 - DNA, 311 bp, Oryza sativa
  Clone ID: uC-osrocyp030f11b1
atcgtcacgcgtccgcccacgcgtccgaccacacgtcacgcttccacctccacctccacctcactgtcgatctcctcccgcttcgatccatccatccatcgccatggcggcggagcgcgtggtggtcgacgagtgccgcggtgtgctgttcgtgtacagcgacggcgccgtggagcgcagggccgcgcccgggttcgcgacgccggtgcgggacgacgggagcgtggagcggaaggacgcggtgttcgacgcggcgcgcgggctcggcgtccgcctgtaccggccgcgggagcgcggcggcgggcggctgc

SEQ ID NO: 38196 - DNA, 451 bp, Oryza sativa
  Clone ID: uC-osrocyp030f12b1
ttgtggggggcccggcaatggccgacgccggtgagctggagggcttccggcgcctgtccggcctcgccttcgacgagctctcccggcgggacctctcctccgcctccggcccgccacccgccgacctccccacgctcctccgcctctgcctcctgtcgctgcctctctccgccgacgcggagctggcgttacgccgctgcacccgcctgctcgcctccctccgcggcatcctctgccgcgacctcgacccctcactgctccccgccctcgaggtgttcctggacaatcttgtatctagcaaccaactgatgacttgctttactgcggccaatgctgctatgccgagacgctcaagaatcacctctctgggttcggtgtgcagtggtggcaaccttttcgtcatggagctcatgtcgcatcacttcatttcatctgtgcaagacgaggaggg

SEQ ID NO: 38197 - DNA, 453 bp, Oryza sativa
  Clone ID: uC-osrocyp030g02b1
tttcttcctactagtttctttcttgtttctttggaatttttttgatctcttgaagagatccggttcttggattaagttttggacaagaaccgtactgtgaccatgtcgtcgccttcgcgccggagctccagcccggagagcaacaccagcggcggcggcggtggcgccgacgagcggaagaggaagaggatgctgtcgaacagggagtcggcgaggcggtccagggcgaggaagcagcagaggctggaggagctgatcgccgaggcggcgcgcctccaggccgagaacgcgcgcgtcgaggcgcagatcggggcctacgcgggggagctgagcaaggtcgacggcgagaacgcggtgctccgcgcccggcacggcgagctcgccgggcgcctccaggcgctcggcagcggtctggagatcctccaagtgggcggcgcgcccgtcgacattccg

SEQ ID NO: 38198 - DNA, 461 bp, Oryza sativa
  Clone ID: uC-osrocyp030g05b1
tttatccgccgccgccggcgtactcgagagaaacatcagcatccatggcgggcaagggcgagggtccggccatcggcatcgaccttggcacgacctactcgtgcgtgggcgtttggcagcacgaccgcgtggagatcatcgccaacgaccagggcaaccgcaccaccccctcctacgtcggcttcaccgactccgagaggctcatcggagatgctgccaagaaccaggtcgccatgaaccccatcaacaccgtcttcgatgccaagcgtctcattggcaggaggtttagcgatgcttctgttcagagtgacattaagctctggcccttcaaggtgattgctggacctggtgacaagcctatgattgttgtccagtacaagggtgaggagaagcagtttgctgccgaagagatctcctccatggtcctcatcaagatgcgtgagattgctgaggcctacctt

SEQ ID NO: 38199 - DNA, 420 bp, Oryza sativa
  Clone ID: uC-osrocyp030g06b1
gtgcttagtgaggtgaggcaaggtccccttcgtcttcaaggcaagctcagctcagagctcagatcgatcgatctgccactggagatggtgtgccaccggatgctgccgctgctggtggtggcggtggcgctgctgccggcggcggcggtggcgaccaactacacggtgggcgacgagaaggggtggaaccccgacgtggactacaccgcctgggtcaagaagcaccgccccttctacaagggcgactggctcctgttcgagtaccagaacgggaggtcggacgtggtgcaggtggacgaggtcgggtacgaacaactgcgactaggcgaacgcctttagcagctaccgcaaggggcaccagtttcgcgttccagttcaaggaggccaaggactactactttatttgcagctattgcttct

SEQ ID NO: 38200 - DNA, 453 bp, Oryza sativa
  Clone ID: uC-osrocyp030g08b1
ttgttcggacgtctgttgctttggttttccacagtcaatcaaccacctttggagaccaagctctcgcagcagcgcccagttgcagcaccaagactccttccctaaaaggtccccactccctttttcaaaacaatcagcaaagatgtcttgcacagcaggaggacagatgtacaacgagaccctgatggaggtggagcacacccctcccgtccacaagcgcatcctggacatcatgcctggtgtgtctggtggtgttgcccgcatcatggtgggccagccctttgacaccatcaagacacgcctgcaggtgctgggcaagggcacaatcggtgctgccggcatgcccccagagatggtctacacaagcggcatggactgcgtcaggaagatgttcaaggctgagggccccttctccctgtacaagggcactgtcgcccccctgctgggcaacat

SEQ ID NO: 38201 - DNA, 465 bp, Oryza sativa
  Clone ID: uC-osrocyp030g10b1
ttcttcctctggatttatcggttcgtcgatctcgcgggaggaataggaagaatatctccagcaagactttcatctgcttatcatcagtatgtccatcgaagagagaacattaagtttgataaacaagaccactgcgttaaatccaaatgcacaagaatttgtaccttcatccctcagatctatcaatgatgtttcaaatagatcagacacatccaggatttctgtatcaggatcctccaaagacactattgcagatcaacaagatcctgttataccaagtaaccctgatgaagaagcacatcggtactggcaagaacagcttccagatgatattacccctgatttcaaagttctgggacaagatgagatgcctggacctgataatatttcactcactggcttgtcaataaatgatagcattggtgctttactattttctccaaaccagacatcgaatttgcaaca

SEQ ID NO: 38202 - DNA, 436 bp, Oryza sativa
  Clone ID: uC-osrocyp030h02b1
gttactatcctgttatctggaaaccccatctgcacatctccaaatcaactgaacattactcagtactgtcaatcagtgccagttattgtgcctgacggttctgcaagtaatgccacagtttgtccgccatgctctactgaccttccgtttgaaaacatactgatgtcaccaatacgatgtatatgtgctattccactttatgttgattaccggctaaagagtcctggattttgggattttgttccatatgaaggacagtttcaacagtacttgtcatctggactttcattgtcttcttaccaattagaagtttctcaatttatgtgggaagaaggcccacgggtgaagatgaatctgaaactgtttccaaataacactgcttattttaataagagcgaggtgttcagactgagaggaatgttcacaggctggctga

SEQ ID NO: 38203 - DNA, 343 bp, Oryza sativa
  Clone ID: uC-osrocyp030h03b1
atcatggaggcagacatttaatatgagaataggctagaagaaattccccaagtggttcttgaggaagggagaaatgttgatcaggaggcaagcaagccgacagacacggccctcagaagacttgcacaaaacagataggctgcacggaaaagccgcctgcggaaaaaggcttatatccaacagctggagacaagccggttgaaactagcgcagttagagctagagcttcaactggccatgcagcaagctgtgcatgcaaatgggagccttatagaaccaaatcttggatttacaggatcgtacgactcatactccttaagttttgagtcattctctaaatgtt

SEQ ID NO: 38204 - DNA, 428 bp, Oryza sativa
  Clone ID: uC-osrocyp030h05b1
ccacaccactctccaatttctttcatcgatcgagaattcctcttctccctcttcttgttcttcttctcctctctgaatttaacaagaaatcaagaactaggtgtttgttttgactaacaagaactcggtcgaacactctgcgtgcgtgtttgtttgcgtgtgtcatgtgctctgggccgcgcaagccgtccacaccgccgctgccgcagcagcagaaggaggcgacggtgatggcggcgtccttgcttcttgagctggcggcagcggacgacgtggcggcggtgaggagggtcgtggaggaggagaaggtgtctcttggcgtggctgggttgtggtatgggccttcggcgagcggcgtggcgaggctcgggatggagcggaagacggcggcgatggtggcggggcttgacgggagcacgggggtgctt

SEQ ID NO: 38205 - DNA, 289 bp, Oryza sativa
  Clone ID: uC-osrocyp030h06b1
gtgatcggccgaccttaatcttttgaggttatgggtgttttatttagtggttgtgtcgcgagacaataaccatttgcgatatcggacaaacccaagtgcctatcaacctatgggccattgggatcttcgggacaaaaaatatgacgggccgcatttgcgttaagggggggatttgttcaaccaaacagggtgggagaatactgggccagaatagaaggcagaaaggctcggcgtttttataaaggtcagggactgatttgggggagttggaactgctagcctctttggg

SEQ ID NO: 38206 - DNA, 479 bp, Oryza sativa
  Clone ID: uC-osrocyp030h07b1
ttgataaaaatttctccccaatctcgcgaggctctggttgtttaatcgaatcctctcgcgtcctcaagatgcagatctttgtgaagacattgaccggcaagactatcaccctcgaggtggagtcctctgacaccatcgataatgtcaaggctaagatccaagataaggagggcatccccccggaccagcagcgtctcatcttcgctggccagcatctggaggatggcaggaccctagctgactacaacatccagaaggagtcgacccttcaccttgtcctccgcctccgtggcggcatgcagatctttgtcaagactctgaccggcaagactatcacccttgaggtggagtcttctgacaccatcgacaacgtcaaggccaagatccaggacaaagagggcatccccccaaaccagcagcgtcttatgttctgcggcatgcaactggaggatggcaggacccttgctgactacaacatc

SEQ ID NO: 38207 - DNA, 274 bp, Oryza sativa
  Clone ID: uC-osrocyp030h08b1
gtcgtcgtactttttgatcactcaaccgtttagtaggacttacaagatcggtaaacccaagggcggcggggacgggcagggagctgagggaaaacaaggatccgacggtgcaggccggccgcgcgtgcggataatcacacacaacaacgaccacgaaccacgagtcgtgcagcacgaacaagctccagcttcatctccggctccggcccccgtctcctactgaatcaactagcaatcaaccaacgcatccatcgtatagatccgtccatcccgt

SEQ ID NO: 38208 - DNA, 178 bp, Oryza sativa
  Clone ID: uC-osrocyp030h10b1
tcgtagaatacccctcatccccaaaagccccaaacccgaggaggcgagaggaggaggaggaggagctcgtcggcggcgagcgatggcggcggcggcggcggagctgtgggagacgctgaagcaggcgatcgtggcgtacacggggctgtcgccggcggcgttcttcaccgccgtggcg

SEQ ID NO: 38209 - DNA, 461 bp, Oryza sativa
  Clone ID: uC-osrocyp030h12b1
tctttatgcagttgcagcctatcttctgcctctagtcccaatgcatgttcttgcacccctcagcgtccaaattctcaaggctgctggtgagaggagcaccggttccctgcatggagtggacttccttctccgctcaaacttcctcaatgacccagctgccacatatgctgtagcagacaacattgcaaaatctgccgatgaggcagtggatgcaaagcttagatctttcatgctcgagcattggtcagaggcagctttttctgagggattcgcgtctgcgcaagagcactttcggtaacttcatgaggataatggaaaagggtgagtcgccgatctgcctgagggacctcccacttgagctggtgattgccatggcctacctaccactgtacagggaatgcgtggagacaggtgggcggcttttgccgcagaaactgacagggcagctcgttgaggcggct

SEQ ID NO: 38210 - DNA, 531 bp, Oryza sativa
  Clone ID: uC-osrocyp031a01b1
tcgctttattagcttattgatcaaggccgtgacaccatttcatgcggttgaatcatgtgctttattgttaaaagaggctgggtttcaagaacttcgtgaaaatgatccgtgggatattgctccattaggaaaatattacgttacaaaaaaccgttctgcgatatttgcctttgctattggtggtcaagttcaagagaaaagtggattttcgatagttgttgcccatacggatagcccatgtcttagagtcaagcctatttcaaaattgacatctgagaaattcttgcaggtcggtgtctcaacttatggaggtggcatttggcgtacttggtttgaccgtgatttgagtgttgctggacaagttgttattcggaaaaattcttctctggtgcataaattgatcgatgtgagaaaaccgattttaacgattccttattttggctattcatctggaaacggatcgaacacagtttgaattggattaatgaacacaattgccgtccgattttggctatgcaagcttatgagaag

SEQ ID NO: 38211 - DNA, 419 bp, Oryza sativa
  Clone ID: uC-osrocyp031a04b1
gtctcgtgaccgatcgatcgatccatcttgttgttgcgttgctctgtttggtttccgtagtagatcgtttcttggttagccggcctgttgaattgttaatcacgagaatttgggtattttctgatcgatgacgcagtgggcggatctggacgcgctccggccggcggtggccgccgacgtgcaggtcgtcacgtcggacgggaagagcatcgccgcccattcgttcgttcttgtaagatggacttctggttcttctctgttcagggcacggcgtcgccggtgctggagcggatgatcgagcgggcacggcgggggtggaacgccgagtgcaccattcgcgttctcggcgtcttcttcgacgccgtcttcgcctttctccagttgctctacgcttacaaggtgacccccgatgacgagga

SEQ ID NO: 38212 - DNA, 208 bp, Oryza sativa
  Clone ID: uC-osrocyp031a07b1
ctaatttactttcgtttgttagttggaaatcttagtgatgttggtggtgtccaccttgtgttcgtgagaatgcccgagtaggaactggcatgtaaacgtctgtgttatcttggatacttttcattgctaagctattatatgtgatgctggtactgttgttaaactgttacaacttactactactatatgtgacattctgattgtggtc

SEQ ID NO: 38213 - DNA, 175 bp, Oryza sativa
  Clone ID: uC-osrocyp031a12b1
tcttcggtccttacatagaatcgaattctctctggttctggtgcccaccactaccaccgtagcaatggctggcaactgatctgtcaacagggtggactcgttcaactggggtgcgggggcagcaccgattaccggctagcagggccaggaggagaacagcatggttgggaatttc

SEQ ID NO: 38214 - DNA, 521 bp, Oryza sativa
  Clone ID: uC-osrocyp031b01b1
cttctctggtggtgtgtttgttttcctgtctcccctctccttcctgctgtcctttcccctgctctgttcccccctcttacaagagagagagcgccagactctccgcaggtgaggagtcaaccatgaagggggcctaatacaagggcgcggccaaggccaacaccaagttggctgagaagagtaagggcgcggagaagcccggcggcaaaggcaggaaggggaaggccggcaaggaccccaacaagcccaagagggctgcctccgctttcttcgctgttatggaggagttccgtaaggagttcaaggagaagaaccccaagaataaatctgtcgctgctgtaggaaaagcagccggtgataggcggaaatccctgaccgaagcggacaaggcttcctaatgagcccagggccacaagctcaaggccgagtacaacaaggccattgctgcctacaacaagggcgagagcactgccaaaaaggcacccgccaggaggaagaggaggacgaccaggaggaatctg

SEQ ID NO: 38215 - DNA, 281 bp, Oryza sativa
  Clone ID: uC-osrocyp031b02b1
gcgtgtgtgtgtacatgggtagcttagctctagttctactagctcttgccaacagcccagctaagctgagctgatctattcacgtctgtggcgtgagctagatcagcttattaactatctctctaccaaatcaagctaagttaattagctggatagctcgctcgcagtgatggtggttgtagtcgctgtcctcatgtccggcgtgggtgagacggctggcgcctcagcagggggtgcagatatatggggaatttcgtcggctgcatggggcttgcggagag

SEQ ID NO: 38216 - DNA, 445 bp, Oryza sativa
  Clone ID: uC-osrocyp031b03b1
cggcccggaccggaactgccgggccggcccatcccacccgtgcgtgtaggctcaagtccaccggcgaggagtgcaacacgagagatcctagggatcatcctgggcaagctcatcgaccccatgctcgactgacccaaggagcgaaaccgtgagccccttcggatcacctctgtcaagatcccatcgccattgtcactgccatacacgcattatcgaggaggagaggcgactaataataaaagaaaacgaaccgtttcgcgtatcttgagacaaaaaagaccctgtattttgttggttcgctgccgcttggattatagcgatctcgagttcttagtgatagctgctctgcccagcttggcagccatggtggcaaagcaaagcggctctctaagatattgtcgctaaactgcattttggggcgacagtattgctactcaattccatc

SEQ ID NO: 38217 - DNA, 502 bp, Oryza sativa
  Clone ID: uC-osrocyp031b05b1
gtcggatctaattaatttacctcctccacctcgtcctgctccccccgatcggatcggcccggctcctcctcctccgccgccgccaccgtcgtcgcagataggagaagatggccgcacttgataccttcctctttacctcggagtgtgtgaacgagggccaccctgacaagctctgcgaccaagtctgagatgctgtgcttgatgcctgcctcgccgaggaccctgacagcaaggtcgcttgtgagacctgcaccaagacaaacatggtgatggtctgtggcgagatcaccaccaaggctaacagccgactatgagaagattgtcagggagacatgccgtaacatcggttttgtgtcagctgatgactgacgcgacgctgaccactgcaaggtgcttgtgaacatcgagcaacagtcccctgacattgtacatggagtgcacagacactttacaagcgccctgaggagattggtgctggtgaccagggacacatgtttggata

SEQ ID NO: 38218 - DNA, 501 bp, Oryza sativa
  unsure (1)..(501): unsure at all n locations
  Clone ID: uC-osrocyp031b06b1
gggctggatcacatcatggtgtctacgtcggtgagaagggacgtgctgggtttgtcctatcctccctctgctggtgctttctcctcagcgatggaacagtacatggcacctattgtgcagttcttggccaagattggggctccacttctggccagtgtgttcccttactttacttacgtgcacaatcaggaaggcattgatatcgattacgcccttttcacctccccgggaactgtggtgcaggacggtgaacatagctatcagaacctcttcgatgccattgtggatgctctgtattcggcgatggagaaggtgggtggctcaaccgtcagaatagttgtctcagatagcggctggccatcggctggggctcctgcagcgaccaaagataatgctagggcctacgtccagaacctgattaccatgtgagcaaagggacacccaagagggcccgacctatagagacatacattttngccatgttcaatgagaacgagaaaa

SEQ ID NO: 38219 - DNA, 466 bp, Oryza sativa
  Clone ID: uC-osrocyp031b09b1
ttgtctttttgccactgatgagagagagttgcaagaatttgcaagaagcaccaagaaagtgtacccaaagaagcatcttcagctgctctcaccagtcaccactcccatccaagagatcccagcctctactacaacagcttccaacttccaagaacccatttttttcctttcctcctcctcctcctgctctggctggctctgggctggccgtgccctcctgtcagtcctagctccagctagaatccctccttgttcatccaccaccaccatccacatgattgcatttgtgcagattcctggagaattaagctgtcctctcatgccgatctgacacaccttgttgttgttgttgctgctggttgccgcacaaccgaaaggggggattatttggccctctttctctttcctttcgcaggaagatttggtgattcttcttttgagggctcctctaaggattttggaggat

SEQ ID NO: 38220 - DNA, 466 bp, Oryza sativa
  Clone ID: uC-osrocyp031b10b1
tcctaatctcaaggccgcggctgtgagcgctcctcccgtctctcccccaacccgccgccagccaccgagctcgccaccgtctccgttgcctcgccgtgctctaggttctcggatggaggccgaggcggcggcgaagagggcgcgggagagcggtgacgcggcggcggccggtgccggcgagcaggcgggtatctctgccgtcatccctggatggttctccgagattagccccatgtggcctggtgaggcacactcattgaaggtcgaaaaggtactattccaaggaaagtcggactaccaaaatgtgatggtgtttcagtcctccacgtacggcaaggtgcttgtgctggatggagtgattcaggtcactgagagggatgagtgtgcttaccaagagatgattacccacctccccctttgctctatcaaagatcccaagaaggtgttagttattggaggtggagat

SEQ ID NO: 38221 - DNA, 171 bp, Oryza sativa
  Clone ID: uC-osrocyp031b12b1
tccccactcttccttccctcccacctcatcagcgctggcggcggcggcgtcccctggatccctcggcggcggcagcggcagcggcggcggcggcggtagatcaatcgcatttgtctcgctaaatccggcccgcgccgcccgtcgcgtcgcggtaggtgggtagggggaggt

SEQ ID NO: 38222 - DNA, 543 bp, Oryza sativa
  Clone ID: uC-osrocyp031c02b1
tcgttcgcggaagcggcggaggcccgtggcgacggcgaacagcgcgcggaagctgcagcggcgggagatctccgcgctgccgtgccgcgcgttctccgcgagcaccacgcgggagcggttccgcaacatccagctccaggaagagtttgatactcatgatcccaaggagatgggttcactactaccttacttgatgaaaaggtctgagattattgagatagttggagccagtgatatcatctttgctttatcacagtcaggagtatgtgctgcattcagcagagtctcaaaccagcggatttgctttctgaatggaagaccagatgaagtcattcgcagtttgttttacaacaagaacaatgactcactcattactgtatcagtttatggttctgaaaacttcagtgccttaagatgcaggacaactcgaatagagtatatacgacggtggaagccagatgctggtttccctcttttcgagacagagtccttgaaaagggccaggttttgtggaacttgatgatgttaacgggaaggtgctga

SEQ ID NO: 38223 - DNA, 197 bp, Oryza sativa
  Clone ID: uC-osrocyp031c03b1
ggcccggaatttccgggcggggctacccacgctttttttttagatctcaacccttcagaacggcgggggacgttcctaaagttcagcctgcttccatacaacttaaacgtgttgctggtcaagacaccctcgtgaaaccaggactggcacctaaaattagcatggacagtaaatgcaccagttgtgggaacaatggg

SEQ ID NO: 38224 - DNA, 378 bp, Oryza sativa
  Clone ID: uC-osrocyp031c06b1
ttggcgttatgaccgtctcgatccccaagaacaccagggttactaccaagtaggatcatgccttgtgcacatactgtgacaaccagactgaactgctcattcaggtgtatgaggtctagaggaccaggacacgcgacaacaacctggtgagcaagtcttagctatctgtaatggctcgtgcttccatgggtgacgcacattatcaccgttaggtgaaacattgatgccgatggtattctgaacgtgtcagctgtggacaagaccaccgggcaatataacaagatcaccattagcaactacaggggcggggtcagcacggaggagattgtgaagatggtgcaggacgccgacaagttcacgtgagatgacgaagaacac

SEQ ID NO: 38225 - DNA, 449 bp, Oryza sativa
  Clone ID: uC-osrocyp031c11b1
ttgacgcgtgggcggacgcgtgggctcgagcggagagcatatggggaaggactccaagccgaaggacaaggggaagggcaagcaggctgccggctcgtccggcggcgatgacgccggcggcggcggcaagggaggcaagggcaagggcggcaagtccgtcgacggcctcggcacctgcacctacgtcaaagctaggcacgtactgtgcgagaagcaagggaagatcaatgaagcttacaagaagttgcaggatggctggttggacaacggggacaaggtccctcctgccgagtttgcaaagatagcccaagaatactctgaatgtccatctggaaagaaaggtggagatcttggatggttcccgcgtggaaaaatggctggcccttttcaggatgttgcaattagcacacctgtgggagctactagcgcaccatttaagtcaacgcatg

SEQ ID NO: 38226 - DNA, 243 bp, Oryza sativa
  Clone ID: uC-osrocyp031c12b1
tttcccacttttcactttttgtagcactctggtattctcccgtggtgactgccatccgaggaggttgccgctgcgtctgctgccgccggcgaggcgcctccgcctccttctcctgctgtggtagaggaggcgaaggatgcctcggaggcaccgaagccggaggaggctccgaacgctgaggatggggaggagaagaaggcggagggtgagaaggagaatgtgatggcgaactattgagaggaa

SEQ ID NO: 38227 - DNA, 470 bp, Oryza sativa
  Clone ID: uC-osrocyp031d04b1
ctcatcttcttcatcgctagctagtaagagtgaatcgaagatgatgaagaagctggtgaggttgctgatcatggtggaggtggtggccatggcggcggcgccgcggcgagcggcggcgctgagcatggactactacgggatgagctgcccgttcgcggagatggtggtgaggagcgtggtgagccaggcgctgatgggcgacccgtcgctcgccgccagcctcctccgtctccacttccatgactgcttcgtccagggctgcgacgcctccgtccttctcgactccaccccggacaacaccgtcgagaaggacgcgctcgccaacaagagcctccgcggcttcgaggtcatcgaccgcatcaaggacgccctcgagtcgcggtgccccggcgtcgtctcctgcgccgacgttcttgccctcgtcgtgcgcgacgccgtcatcatggcggggggcccgtactacggcgtgg

SEQ ID NO: 38228 - DNA, 63 bp, Oryza sativa
  Clone ID: uC-osrocyp031d07b1
ctccctcttccttcgctttcgtctcaccgcccccaccgtctctcctgggggaggggaggggag

SEQ ID NO: 38229 - DNA, 526 bp, Oryza sativa
  Clone ID: uC-osrocyp031d10b1
ttactttatacactgaaccttcgccttcctctctcgtccgatcgacctttgcatggcagcagtagctagctccaaggggcgggtgatcgctggaagcttcgtcgcccgcgtcctggccggcaaggccgcctccccgaggagatttgtgagcgcttcagcctacgacaagaacgtggaagagcaggtgcgcccggcggtggtgccggacgatgtgatcggcagcgtcgggagccctgacaagtactggggccctcacccgaccaccggcgtgttcgggccagcggcggtggacgccaaggcggcggcggccgttggcgcggcgaaggccggcgcgaatggtggcgcctccgtgctcgaccagaaggtttggttccgccccctcgaggacgttgagaagccttccgtcgcctgatcgacaggcctaatacgagccttggctctgtgccacctaccattctcttcagctggggctccttgattattattactgtactagtagtgtggttctgctaatatagtatcagca

SEQ ID NO: 38230 - DNA, 335 bp, Oryza sativa
  Clone ID: uC-osrocyp031e01b1
cggacgcgaggttttcttagaggagaagcgaggagaaggcgcggcggcgctccgacgtcaacggcgacggcgaccgcttcccatccgacgtccacgctctccgccgccttctcgccgcggataatcagttgatattcccaaatgtcgatggattgctaccagagggaccggaggaaggcgaagctagattgattagtgatgaagtcctgaaaagaatgtgcttaatcctgaaatatattactgttcatgcttaactagatagaaatatgcatgatgttctgaattctgatgaatgatgacagcaactgaatatggtgaagaattgtcatgatgct

SEQ ID NO: 38231 - DNA, 338 bp, Oryza sativa
  Clone ID: uC-osrocyp031e02b1
tcgttgttcgtctagggcttagtgggttgagatggcggcgccggatgtcgagtaccgctggtctcgcggaggactcacctgggccaccgacgaccgcaaagggtagccatcttttacacctacggcaagatcctcgactccaagatcatcaacaacgggaagacggtgaggtcacgtgggtttggctttgtcaccttctcctccgagcagtcgatgcgcgacgccatccaaggcatgaacggcaaggagctcgacggtcgcaacattaccgtcaatgaggcccagtcccgccgctccggcggcggaagcggtggctacggcggcggcggtggcggcta

SEQ ID NO: 38232 - DNA, 440 bp, Oryza sativa
  Clone ID: uC-osrocyp031e08b1
ttgatttctgattctattgccttgatggtcatgcaatccatgcttggctcatggaacaagagtgctggaggagggaaacacatgggttcagagcttgtacaaagggtagcgatcaatgacattgctgagagtataatggcatttaatacaaattacaaggacactggcctctttggtgtctacgctgttgctaagcctgactgcttggatgatttggcttttgcaatcatgcaagagattagcaaactgtcataccgggttactgaggaagatgttatccgtgcacgtaatcagctgaaatcttccatccaactgcacctcgatggttccactgctgttgttgaggatattggccgtcagttactcatctatggtcgaagaattcctattcctgagctttttgcaagaatagatgcagttgacgcaagcacagtcaagcg

SEQ ID NO: 38233 - DNA, 304 bp, Oryza sativa
  Clone ID: uC-osrocyp031e10b1
gttgggtgtccgactgacctatccatcttgtcgttgcgctcgtttgttagatctccttctcctatcgatcgttggctaggcgaactgtgagatcggtaatcaacagaatggggaccttctgtgatctacgacacagcttgcggttctggacgcgcatcctgccttaccagatcgacgacgcgcaagtcgagagaggcaacggtaatagcatatgggacgattcgacagatatcaaaagacggacttttgattgttgtatggtgaaggcacggggtgatcattactatagctacagagcaaacat

SEQ ID NO: 38234 - DNA, 462 bp, Oryza sativa
  Clone ID: uC-osrocyp031f01b1
tcttttgacgctagctgcattgtagtgagagagagaggcggccatggcgctggcgtcgctgccgaaggtggtgatggggtcggtggcgttcggtgtgttctggatgctggcggtgttcccgtcggtgccgttcctgccgatcgggcggacggcgggggcgctgctgggcgcggtgctgatgatcgtgttccacgtgatcagcgccgacgacgcctacgcctccatcgacctccccatcctgggcctcctcttcgccaccatggtcgtcggcggctacctcaagaacgccggcatgttcaggcacctgggccggctgctggcgtggcggagccagggcgggcgcgacctcatgtgccgcgtctgcgtcgtcaccgcgctcgccagcgcgctctttaccaacgacacctgctgcgtcgtcctcaccgagttcgtgctcgagctcgccgccgagcgcaacctccc

SEQ ID NO: 38235 - DNA, 535 bp, Oryza sativa
  Clone ID: uC-osrocyp031f04b1
gttccctcaaatccctctcaaattagccccaaatcaaagggttttctgtggacttcacatggagatcgtgttggaagctctccgctcatctaccttccaatcagtaatagcgggcctggtaggccaagcctcccaagcgattcactgttgctgcctttgctccattgcgtcttctgctgccaacaagtcgattcgtgcgtcatactccctgactccctgacgactagtcacaagacttgattacagggatgtctggctggaactgagaactgatgcttgcatcgaagtggcaagattgttgaagatttgtgggtgccttgtcagtggcagtatctttttagctgttggcctgttgcgatattcagttactcatttctttcttctcaatagatttcttgaactctgacagatagctgtttgatgtttttttctcaacgacttcaggatgtatgtttgatttttttaaaaaaaattattattgctcttcaattactttcctctcaggttacttagccgatatcaaatgagcaatggt

SEQ ID NO: 38236 - DNA, 447 bp, Oryza sativa
  unsure (1)..(447): unsure at all n locations
  Clone ID: uC-osrocyp031f05b1
ttgggtcagatcgatatgagatctttacctattttacgaagtgtgaatggatcaaatgaaactatttccattattgcgtatgcgtggtgtgaagatattgagttctctggtattacacagtttgagcctgcaacaatcgtgcctcagtcaggttccgagattgacgaagctaatgctaaaggatttatttccaaaccagctacagctattgctagttttgcaggtaagcttgaaaatgtaccagtgataggtaagtatgctaccgctactgctactatagcaggagcgacagctgatgttgctaggaattttggatattgtcgtccacctgtgacggagaatgcagctccccgtagaccgacggttgtttctaacatggcattaaccaacacgccagataatgttgaaaaattaaccactgatgatangcangagcttagtatagat

SEQ ID NO: 38237 - DNA, 376 bp, Oryza sativa
  Clone ID: uC-osrocyp031f06b1
cttcggcaactgttcctatggcaactcgctgccgtcggaggtgtcgcgtgcggcgatgcttgtgcgcatcaacaccctgctccagggctactcgggcatccgcttcgagatcctcgaggcgatcaccaagctgatcaacaccggggtcagcccatgcctgccgctccgaggcaccatcacggcgtccggcgacctcgtgccgatgtcctacattgccggcctcatcaccgggcgccccaacgcgcaggcggagaccgtcgatggcaagaaggtggacgccgccgaggcgttcaagatcgccggcatccagggcggtttcttcaggctggagcccaaggaaggtctcgccatcgtgaacggcacctcccttgggctc

SEQ ID NO: 38238 - DNA, 306 bp, Oryza sativa
  Clone ID: uC-osrocyp031f07b1
gcgtttcgtttgtctttagtgcatgacgcactcgggcaagagggagtcttcctgctcctgctgctagaagtcgtggtgcttgtgtgacaagctccagagaggttttgacagacggccggtgatccagactttgcgacgactcggtgtgcgccacaggcaggaccactactgtggtggcaggacaccttgaaggacaccagaaaagcagtctgcgaccactacgactcacggatcaagcccaccgaagccgatgctgccacccgcagaaggccaagctccgagaacggacatgcttgcgaccggggt

SEQ ID NO: 38239 - DNA, 379 bp, Oryza sativa
  Clone ID: uC-osrocyp031f11b1
ttgaagctaagcgttccttgcttaactatttctatacccaagtgggcaggaaagatgctaagcagcttgcgcaactccttgatgaggatcctgctcttatggagcgaaggcagcagtgctttaagaggcttgagttatacaagtctgccagggatgagatcgatgctgtgtcatggtcacgttaaaggtaacattctgtttgctttgcaatttgacatgcagaattaatagccagttgatctgcacttctcgtgtcaaacatttgagattgattactaattgttgtgctatatatgagtcttgattgcaatgtgttttcataatatgtatgcagacttttaagcacaagcatgaatgaagtctgtctgtatatttgatt

SEQ ID NO: 38240 - DNA, 431 bp, Oryza sativa
  Clone ID: uC-osrocyp031g01b1
ctcgctcacgcgaacgaggacgcgggggccagggggcaattttcacagaggcgcgccgccgccaccagccagggcaccacaccggcctagtctaccccgcgaagaccgaccacccgaagctctgggaaccctcgcatagccgccatgagcgacagcaaggactgcgtgcacctatccggcctaagcgccgccagccccaacggcaaagagcccaccgcggaggacaaggccaacctcgaggagtcgattaagaacacgccacagggaagggcggagcggcacacggacgtgctcgagagcctcgagcccaaagtcaaggaagcgcgcggaggcgctaagggagatccagagccaacacgaagatctagaggcgaagtcctttgaggagagagccgcaccttgaagctacatatcaaacgaaggttgaacca

SEQ ID NO: 38241 - DNA, 273 bp, Oryza sativa
  Clone ID: uC-osrocyp031g02b1
tcgtttataagttactctattacaggacgtgacatatcttataactacgaatctggacatgtctttgtccaaaatcgtagtactaggatatgccacatctcgtactaaattaacttattatgagacggagggagtgtctacttgttcccttactgtgatcaatatacatggcgggccttatctgctctgccatatattgataagctttctgagcgcaatcagaggtttaaactttggtgtacaaaataattaggtacaaacatcgtcacatgt

SEQ ID NO: 38242 - DNA, 500 bp, Oryza sativa
  Clone ID: uC-osrocyp031g03b1
ctcgtcttcctctactttccgccgccgccgccgtcgctctcctcttcgctccgccgcgcaggtaagaaggagaggaggagaaaatggtgaagcacaacaacgttatccccaatggccacttcaagaagcactggcagaactatgtcaagacatggttcaaccagcccgcccgcaagcagaggcgccgcattgctcgccagaagaaggctgtgaagatcttcccccgcccaacatctggccctcttcgacccattgttcagtgccaaactttgaagtacaacatgaagtcgagggctgggagaggctttacccttgaggagctgaaggctgcgggcatccccaagaagtatgctccaaccattggaattttcgtggatcaccgccgcaagaaccgctcacttgagggactccaggctaatgtccagaggctcaagacatacaaggccaagctggtttatctttccaaggcgtgctcgcaaggtcaaggctggtgattccac

SEQ ID NO: 38243 - DNA, 442 bp, Oryza sativa
  Clone ID: uC-osrocyp031g06b1
gtcgtcactctcactctcctctctctcctctctctctctctctcactctctctctctctctcctctggagactgcagttttacagctagattctactagaagcccaccaaaagcacaagcctctgcggcggcggcggcggcggcgtgctccgggaagcgagccccgtggtggcggcggtggtgcggagcacggcacggcatctctctctcgcgagcgcgcgagcgagcgaacgctagatctgcgaacgcggggtttggttccttcttcttccgcgatcgcttcgggttgatctggctgatgctgcttcggcggaggccgcgctgattaattgctggaggggagagagagagagagagtttgcgtcgatgcggatggcagcgggagggaggtgctgcttccggagaggggctcccgcggcggtgctcgtgctgccgctgctgc

SEQ ID NO: 38244 - DNA, 457 bp, Oryza sativa
  Clone ID: uC-osrocyp031g07b1
ttcttttatcggaactacctctatgctaacattgtctaggtctcattagctagattaacttaactgttttcacttagtggtgttagtctgtaaagaaaatgaatacccagtcttagttgagtcttttgtaaaaaaaaaaaatggaaccaaagaatgcaattgcactggatgaacatgtgctggattctactatccgcaagaggaagcgtgtgggtgctactcaatgtgctgaggccaatgacgcccccaacctctctcagaatggtccaaaacagaatctcgctttatttcctgattcgactggacataagaagtccaagatgatgtgctctgccgatgacattctggagaggtacaataacttcaagataagcgggatgcctgttcgtgtgatgtctcaccaacatggtggctggagagactttccagaggatgttgtcaattcggacagcagagc

SEQ ID NO: 38245 - DNA, 539 bp, Oryza sativa
  Clone ID: uC-osrocyp031g11b1
tgttaatttaatttgttgaaggttctttgttggaacataaatcagaagtgtatggagcatgcaaaaagaaacagcatttagagggagttgctttccatgagtctgcactgcatagagaatatcaaatcaagtcagttaaaactactgccattaccaacgagggtgatatggacactaatggccatcatgtggactttggtaatttgttacaaagtgatcagcagtatctgaataaacacacagaagattctgcagtgaatttgacagaatcctgcaagacacctgatgcaattgatagtgcaatgatactgaagagcaaggacgaatccctggcccaagaaaagagaacaaacaacaaattgatagataacaaacggaagggtccctgcttatttgaaatgtttacacagcctacgaaatcaaatgtcaaatgttccatagatcgaacatcttcagggaaatcttgtggaacatgaccagtggttattgggagcacagaaacagttttcaactaaaactgataccttttacagtgaagc

SEQ ID NO: 38246 - DNA, 539 bp, Oryza sativa
  Clone ID: uC-osrocyp031g12b1
tctttgtattcgcacttagtagcttgagaccgggagcaggacgtgcggcggaatgggttccggatccggatctttcctcaaggtggtggtaaagaacttggatgttcttgcggggcctatagtttcacttgcttatccactatatgcatctgttcgagcgatagaaacaaaatctgctgtagatgatcagcaatggctcacatactgggtgttgtactcgtttatcactctatttgagctcactttttctccggtacttgaatggcttcctttatggtcttatgctaaattgtttttcaattgctggttggtcttgccctacttcaatggtgctgtacatgtttatgaacactttgtgaggccaatggttgtcaaccagcaaaaagttaatatttggtacatcccaagaaaggatgagtcagattgaccctatgatgtgatatcagctgtgccaagataccatgaacaaaatggatcaagagcgtttgaaagtctgggtaacaagtttaaggcttaaacacaaggcgctccattctgga

SEQ ID NO: 38247 - DNA, 391 bp, Oryza sativa
  Clone ID: uC-osrocyp031h02b1
ttcattttttgggatatggaaatattgcatacaggttatgggaagctagcaaaggaagtaaaaagattagcaagatctggtgtgcttgggtaggacaggatggctcccatggcttcgatgagtgtgacacctatgagcaatctgactttgccattgtcaacttctcttatacaattgagttgggcaggaagtggtcttctgatgatcaggaccttcctatctctgctggatctttcttcgtgattgatgatgctggacaccgtggaaagagaagaaagaagtcattttcagatcaagaagcatcttcagaggagtcgaatgagcaaagcagcttcgcccatgacaatagccaagctatcataacaggtttcccgacaggtacttcacacaa

SEQ ID NO: 38248 - DNA, 469 bp, Oryza sativa
  Clone ID: uC-osrocyp031h05b1
cggaccggtcttgccgggcaagagatcgacccacgctttcgtcctactccggctcttcatcagtatcgaatgctctcttctcctcgtgcccaccaccaccaccgtagcaatggcgggcaacgggccgatcaacaaggaggacccgctcaactggggcgcggcggcggccgagatggccggcagccacctcgacgaggtgaagcgcatggtggcgcagttccgagagccgctggtcaagatccagggcgccaccctccgcgtcggccaggaggccgccgtcgcccaggccaaggacgccgccggcgtcgccgtcgagctcgacgaggaggcccgtccccgcgtcaaggccagcagcgagtggatcctcaactgcatcgcccacggtggcgacatctactgtgtcaccaccggcttctgtggcaccttccaccgccgcaccaaggacggtcccgccctccaagtcgagctt

SEQ ID NO: 38249 - DNA, 412 bp, Oryza sativa
  Clone ID: uC-osrocyp031h08b1
ttggtttgcttctcctccccctcccggttcggttcggttcggttcgggtccggttcgatttcggtttttccttcggttcgggggttggtgggaaagcatggcggcgccagatgttgagtaccgctgcttcgtcggcggcctcgcctgggccaccgacgaccgctcccttgaagccgtcttcttcacctacggtgagatcctcgagtccaagatcatcaacgatcgggagacggggaggtcgcgcgggttcgggttcgtgacgttctcgagcgagcaggccatgcgcgacgccatcgaggggatgaacggcaaggagctcgacggtcgcaacatcaccgtcaacgaggcccagtcgcgccgcttcggaagcggaggcggcggtggctacggccagctcggcggaggcggatgc

SEQ ID NO: 38250 - DNA, 498 bp, Oryza sativa
  Clone ID: uC-osrocyp031h11b1
caaatatcttcccataatgtaatctcctaggtgctcattccaccgccatcgcctccggcgaactctccaccgccccctttcctacatcccaccactattttataagccagcccttcatctcatctggagatctggttctactcatccaggaaagccccaatctttatcatagcaaggaggtcatgtcggaatcggccctcgacaaacatatagtggtgaaaattcccgatcattttctgccagatgctttcataggagaaagtgttggtaaaggtaaagaagatggagcaaccgtagataacatggacccgtcccgcccttttctagttatcaagaagtctgatttggataaggctggtgagtgggttaaaataaaatatgcttggatggccaagtccttaacaaatgatataatcatcccagaccctacccctcaggtggtgcgggatgccttctttgatatatctccccgcttggactccgtcttgagaaaggaca

SEQ ID NO: 38251 - DNA, 473 bp, Oryza sativa
  Clone ID: uC-osrocyp031h12b1
ttggtatatagacactggcttgctcgttgcaatagagatcagcaactccgccgtcgaaaatggctgaattttcttggctcacggcgctcggcttcatgttcctcaccttcaactccggcatggcgatctaccgctccaacggcgacaccggctccatgctcttcgtcggcgtctcctacctggaccttgtcgcgctattcgcctgcctccggatctatgagggcctggaccagcactcgcctcgtcgcggcggggtcaaggctgccgtctgggccctcacgacgctcctcaccgtcatgttcagctataaagtcgccgaaatcatgccgcttgtcgtcaagatcgtcgtgtgggcgatggcaacggccacgacatgcggcggcttttatgccttctttatccacgaagagaagcagccgcagttcatggccgtgccggcctcggcgggcaagacgcccgccgatcgccacgat

SEQ ID NO: 38252 - DNA, 230 bp, Oryza sativa
  Clone ID: uC-osrocyp032a01b1
cgacgtttccgagagcaaggatcacagggacttgggggaaatgtggaaccggacgacgagggtcacgcagacagacgccatgatggcgcatcacaccaggccaacggcggaggcaagccaccgcactgggaggaccaacagcggacaactgtcaagaacccaatcaactccaccattccctctattgaagagaacaacgcacgggacgtcgccgctgccctcagggacaa

SEQ ID NO: 38253 - DNA, 197 bp, Oryza sativa
  Clone ID: uC-osrocyp032a02b1
tctagtacaagcgaacttggtgaagaagagcaagacgccggtgggtgcgcgtgtgttttagtggctgagcactcgcggccgcgaactggcatgttaacgtctgtgcaaactaggatacttctcatttgcaaaactattatatgtgatgctgctactgatgataaactgttacaaaatactactactataagtgacat

SEQ ID NO: 38254 - DNA, 228 bp, Oryza sativa
  Clone ID: uC-osrocyp032a03b1
ccctgtttgtgagagagagagagagagagagggggctgagccttgctcaggctagaggtgtatacccaaaccccagctagggctcgcgcgcggtcgctgtggtgatgagaaacccagcgaggtagcggttgatgcgggacttcaagcttgaatgtagtatgtacaccccgtggcgaatcagtggctcgcctataactacatcaacatttcgctatggaacgccgttat

SEQ ID NO: 38255 - DNA, 278 bp, Oryza sativa
  Clone ID: uC-osrocyp032a04b1
tcctatcaccaactccttgccgccatcgccgaggtggatgatgagggagcgagctcgacgccgaccccatgtcgggcaggggacgtggggaactgctcatcacggggaggctgctagtcggtgagctgttactgacgctgggggtgtgcacgcactgcctgcagagcacgcaccaccacgggctgtagcggcggcggacgaagcacgagatccactcccacgaccaagactgttggaagaggtggtgatggagaatcggtgcttagggcacatcctcg

SEQ ID NO: 38256 - DNA, 386 bp, Oryza sativa
  Clone ID: uC-osrocyp032a05b1
ctgatcgacgaaaccttcatctcgccggcgcctacgctctgagccacaagagcgttttgtcgcagtcggtgttccggtcttttgagcgcggagattgcggaggagaccccagtcgagactccagctgccctggttcttggggagcccatggatctgatgactgctctgcagcttgtgatgaagaagtcaagtgctcatgatgggcttgcgaaggggcttcgagaggctgccaaggccatcgagaagcatgctgctcagctccgcgagcttgcttgaagaccgccaccaacctgaatatgccaagttggctaaagctctgggagctgagcacaacgttcaccttggtgccgtgcctaaagctaaaactcttggctagcgggcagggc

SEQ ID NO: 38257 - DNA, 431 bp, Oryza sativa
  Clone ID: uC-osrocyp032a07b1
tcgttcttcttcatcgcaagctagtaagagtgaatcgaagattatgaagaagctggtgaggttgctgatcatggtggaggtggtggccatggcggctgcgccgcggcgagcggcggcgctgagcatggactactacgggatgagctgcccgttcgcggagatggtggtgaggagcgtggtgagccaggcgctgatgggcgacccgtcgctcgccgccagcctcctccgcctccacttccatgactgcttcgtccagggctgcgacgcctccgtcctcctcgacttcaccccggacaacaccgtcgagaaggacgcgctcgccaacaagagcctccgcggctttgaggtcattgaccgcatcaaggacgccctcgagtcgcggtgccccggcgtcgtcttctgcgccgacgtactcgcccttgccgcgcgcg

SEQ ID NO: 38258 - DNA, 472 bp, Oryza sativa
  Clone ID: uC-osrocyp032a09b1
ttcacgcgtccgggcgttcttttaacgtaccctgtccggcctgacacgctttttggctacagtacaccgcgggtttttcctgatgggtttaataagcttaagggtgcatacggggtcaggtttaccttggtcgccacattgcaaagcgcacacacaccctttcagcagggtatatatactcttgcgtttcagcctagtgggttcattggctttaacaggtcaatcgtcccttacacaacgacaaaccttccccatgtgcgactggatatggcttccgacacgatggtacaattgcgcgtaccttatgttaacactatagactttcttgagtacactaagtctactaagtatggggatttatttgtttctttcatctgtcccacttgagccataactggctcagcattaccgaccatgaagatgttaatccaacttgaggatgtcgaactcattggtgtcggtccgcatgcag

SEQ ID NO: 38259 - DNA, 280 bp, Oryza sativa
  Clone ID: uC-osrocyp032a11b1
tcgtggtcgcgtgggctcgctcgctcgctgcgtgggcgcactttatccacagatttttctgctgctgttgcttcgttgcttagcccgaggattccgtactactaccggagggcttggttggttgatttggtttggattagccatggcacgggagagggaaggcgatcggataggacgccggcaagaaggccatgtctcgaagctccaaaggcagcctacaacatcccgtgggcaggatcgcccggttcttgaaggccggcaagtaccccgagagggtagg

SEQ ID NO: 38260 - DNA, 488 bp, Oryza sativa
  Clone ID: uC-osrocyp032b01b1
gtttctggagcagcatccaaatacatccctagtggtggatatggacgattcttaaggatggatggattgaaaggcaagaggattggcatccccaatggctttttcactgaaggagcctatgggaagacacaactgagggtgtaccaaaaacatctttccactatgaggaaacacggagccctggtgatagagaatatcaacatcacaacaaatttgtctgccgcgcaggatgttctttattccaacgagaatatcgcattgcaagcagagttcaagttaagcctaaacgcttatttgtcagacttgctgtattccccagttcattccctcgccgatgtggtagcattcaataatgcacatcctgtggaggagagacttcaagattttggccagcccgacctgattgcagctcacaaaaccaatggcattggtccagtggaaaaagcggcaatccagcgtctcaacgagctgtcagctgatggattgga

SEQ ID NO: 38261 - DNA, 244 bp, Oryza sativa
  Clone ID: uC-osrocyp032b02b1
cggacaaacacgccatagtactggcagctcttcagactatctcaaggtctgaccatctaggcgatcgacgcagatgcagagctacagtataggcgagcgtactccggcgactggatcaggtgatctagcggcgtacgactagaatccacgggtaaaatggggtggatggtgatctcggagaaggagacggtggcgtcttcgtggtcgtatcacgaggtggtgaaactgttgtggaggcaccacg

SEQ ID NO: 38262 - DNA, 239 bp, Oryza sativa
  Clone ID: uC-osrocyp032b05b1
ggtggtcgtaggtaaaatagttgctacaaagggggggttttttgcagatctgatcgggcacgctcctcctcatccgaagacgacaccgacgtcggagagaggagaagacggacgcacttgatagctggcattttaccaagcaggctgtaaacgagggtcaccatgacaaagctctgggactacttctaagatgcagcgcttgatgacagccaggacgaggacccagacagaaaggtaaa

SEQ ID NO: 38263 - DNA, 485 bp, Oryza sativa
  Clone ID: uC-osrocyp032b08b1
ttgttcatctgccttccaccctgaaattgaggagcttctctacagtgaagtcgagaacgatgaacacaagtttgtattgaaggacaagaacaagccaatcatcttctccatggctcgtcttgaccgagtgaagaacatgacaggtctggttgagatgtatggtaagaatgcacatctcagggatttggcaaaccttgtgattgtttgtggtgaccacggcaatcagtccaaggacagggaggagcaggctgagttcaagaagatgtacggtctcattgaccagtacaagttgaaggggcatatccgctggatctcagctcagatgaaccgtgttcgtaacggggagttgtaccgatacatttgtgacaccaagggagtctttgtccagcctgcattctatgaagcgtttggtctgactgtcatcgaagccatgacatgtggtttgccaacaatcgcaacatgccatggtggccctgctgagatta

SEQ ID NO: 38264 - DNA, 399 bp, Oryza sativa
  Clone ID: uC-osrocyp032b10b1
tacgtcggtctttaccttatggcccccacctctggcgcggctgcggtcggtgagatggccaagcggctgccgccgaggtgggagacgcgtctgctgactctgcgggctctagatcgctcagatccgttgtacgacgagaaggaggcgagcgaactggacaggcaggacgccgcgctcgaggcgcccgggctgccggtccgcgtgtctgcggcgacgcccaaggattcctgcgggtccagcgccatctgcagcttggagtcggacatggacgttgagaaggcggatgtatgacatggcaagtccaagtacttattggagacggttggtaacatctgcacgaacaaggtgcagcttgacttgaagagcagggaagatgaaacaaaagcttggaaaaagggg

SEQ ID NO: 38265 - DNA, 427 bp, Oryza sativa
  Clone ID: uC-osrocyp032b11b1
tcgtattgctctgctctgatctggttgatcgatgctcgtgttggcgatggagaagtcgctttcctcctccggcgccgccgccgccgtggcgtcgcagggccagctcccggactgcttcgtgttcccgggcgaccggcgcccaccggcctccaccgcggccgtgtcgctccccgtcatcgacctctccggcccccgcgacgccgtccgccgcgccgtcctcgacgccggcaaggagctcggcttcttccaggtggtgaaccacggcgtgccgtcggagacgatgcgggagatggcggcggtgtgcgaggagttcttccggctgccggcggaggacaaggcggcgttctactccgacgcggaggagaaccccaaccgtcttttatacagcaccatctacgaggtcggagaccagcgctactggcgcgac

SEQ ID NO: 38266 - DNA, 62 bp, Oryza sativa
  Clone ID: uC-osrocyp032c03b1
ctgagacactcgccttgtttcactctacaccggcagaggaggcggcgggggtggttgcgcat

SEQ ID NO: 38267 - DNA, 155 bp, Oryza sativa
  Clone ID: uC-osrocyp032c04b1
gcgcgtcttgacgcggaacacgccggagaccgggggcgatcgctagtgtcggccgtcccaccggccctactgtcgccaacgaagcggaggcggagcgcgccagtggaaactgcgcggatcgacaggatggcggaggtggggctaaaacccggcgg

SEQ ID NO: 38268 - DNA, 276 bp, Oryza sativa
  Clone ID: uC-osrocyp032c05b1
tctctcgtcgccgcggcgcgtacgccacgcgtgcggagtaaatctcccgtcgcctccttccctgcgccaagaaagacgagccgcgggtcaacagcggagtggaggggcgctgatttccatcgccgaggagagcagagcaggggaggggaggggatccttgttagcgctttcggcgcgggactgatttctaaacgaattttgggtcgtgaagggaaggtcaaacatggcaggggctcttgccctcccagcattcttttgaggaccaggctcattttc

SEQ ID NO: 38269 - DNA, 148 bp, Oryza sativa
  Clone ID: uC-osrocyp032c06b1
ggtgcgcgacgaccgaaacgagcgcagagaggagggccaataataccaagtacgcgcaggccctccacaacgagagtgacccccacactgaacagcgaaaccagctggaagagagagacaggaccaggaaaagagacaaaaatctgcg

SEQ ID NO: 38270 - DNA, 227 bp, Oryza sativa
  Clone ID: uC-osrocyp032c07b1
ttctcacgtaggcacaaacgttgcaagctaggggttgtttaaaccacgaaacctcgggaaccaaacggatataggatagatcaagagaagcaacaggtggcccaaagcgttaaagcagcgcgccgaggaagacctacaacacaaattcctacagccgctaggtgggccgctacaccaccgtgctacagtgacctaagaaggctcaacagacggtcaccaggatgaaa

SEQ ID NO: 38271 - DNA, 429 bp, Oryza sativa
  Clone ID: uC-osrocyp032c10b1
ttttacgcgtgggcttctgataggttggatgcacaaaggatcatagagtactccaagggcaagagcatcctcatcactggagcaactggctttcttggcaagattcttgtggagaagatactgagggtgcagcctgatgtcaagaagatctacctgctcgatcgcgccatcgaccaagcatctgcaaaccaacacgtccaatctgaggtgacggatactgagctgttcagcgtggtgaatgagaagcacggcaagggattctcgcgattcatcgaggagaaggtggtcgccctcgccggcgacatcatctacgacgacctgtgcctcgatccctcgttgcttcaacaccttgccgacaacctcgaagttatcgtgaatggcgctgccaccaccaacttctacggcaggtatgatgcgtcgctggatgtg

SEQ ID NO: 38272 - DNA, 470 bp, Oryza sativa
  Clone ID: uC-osrocyp032c11b1
cttttctacccgttcgtcctcccgatctccccggactcccacagtcgcagcgaactaatcccgcgcgggttgggaagagcgagctcgtgaggagagcagagggaaagcgcgagggggaaggaggaggaaaggtgcacaaggtcagactaagtttgcgttgaagaacaaaggagaggaaaaatgtcgtctgctgaggcatcgcgtgaggagaatgtgtacatggcaaagcttgccgagcaggctgagcgttacgaggaaatggtcgaattcatggagaaggtggcaaagaccactgatgttggtgagctcaccgttgaggagcggaacctgctttctgaggtttacaagaacgtgattggtgctcggagggcatcgtggaggaacaatttttctattgagcataaggaggagagccgtgggaatgaggcatatgttgcatcaattaaggagttccgttacatgattgaaac

SEQ ID NO: 38273 - DNA, 467 bp, Oryza sativa
  Clone ID: uC-osrocyp032d02b1
ttcactcgtccgcccacgcgtccgcccacgcgtgcgcccttgcgttcgcccacgcgtccgcgctactccaaacttaattttgatttctcgccggagaattcctcctccgcctcccggctcctcccctccgccctcgcttccgcaggctaactaaaccatggcgactggttaaattttctccaaaaccacccaagcgttattctataattataagcaacttccgatccaacggatgcttgattttgacttcctatgtgggagagaaacaccttctgttgctggaataatcaatcctggttctgttgggtttcagaaaccttttctttggacaagaaaaaattgccattccagttcatcctacatttgaagctgcctgcaatgcacaccccactgctgatgtatttatcaacttttgcattctttcggagtgctgccgcttttttaatgtcagctttgaagcgccaaca

SEQ ID NO: 38274 - DNA, 446 bp, Oryza sativa
  Clone ID: uC-osrocyp032d03b1
tgtactcgtgggctcaaacatcaactactccgtggcctttttgtagccacagcccgacaaagcatgagccagaatgcgagcttgagccagctgtatggcagcatgcaggaagcttaccagcagatgcagacaccactgatttaccagcaaccgtcagtcaagggattgaatgagctcaaggactcaacagaccaaatggctttaagcatgggcaacatagatgcgccagtagatgagacagtctttgacatcgagaaagaaatctgacgacctgctgcctattgaggttaaggagcaaaggttgagcaatttggtccaggccacaatggttgggggttgtgttgttgctatgccattgctcaagaagatcccgacttgtgaactttgggggtacttcgacttcattgacattgaaagctttgctggtaaccagttttgggagagga

SEQ ID NO: 38275 - DNA, 56 bp, Oryza sativa
  Clone ID: uC-osrocyp032d05b1
gttctcgcgggaaaagcgaagcagcaagggggggtattataggcgaatccacggga

SEQ ID NO: 38276 - DNA, 241 bp, Oryza sativa
  Clone ID: uC-osrocyp032d07b1
tcctcacacacccaaaagcgccgcaaaaaaggggccccaagagcggagaagggaacccaacggcggggaagggcgaaggcacaagcgaagaaacggaaggccagggagcgagaacagcccgcgcaagcaggaaaggggcaccaagtacagaaaggcgaaggggcaggactacaggaggagaccaacagaagacaagaagaaggaaacggaaagagggccgcacagaccaagccagaaccgc

SEQ ID NO: 38277 - DNA, 221 bp, Oryza sativa
  Clone ID: uC-osrocyp032d09b1
tcttcgcatgcagctccaatagccgatcgcagggggaatttcaacgcctgtcaccgctcgaacgatcccgacgaatcgtatagcgtacgaaacgccggtatccgactcgcgaccgtatatttcatgcagcctaagccctagtgcggatcgatccgttactatgtagcccatgtaaggaatggtgctccaaggctcccattttgttgatcagcactaagaca

SEQ ID NO: 38278 - DNA, 475 bp, Oryza sativa
  Clone ID: uC-osrocyp032d10b1
tcacgaccgatcaatcaatcagttcggcttagttagttgccaccttagctaagctagctagtatagctctagcttcttcttgctcgctcgcatgggtctcgaggtgctcatggcgagagaccagctgctgcagcgcccgaggtggcggtacgagcggctgcgcggcgacggcgacggcgacggcgaggaggcggcggcgggggtttgcagggtgaggcggcagctgcggctgaggaggagagtggtggccgccggcgccgccgggaggatggcgcgcggcggcggcggcgggaggaagaaggtgaggctgatgcggctggtgttcctgctcccggcgcggcgggtggccgcgcttgtcgccgagctcgtgcgccggctggccgtcgcagctgcggcgagcgtcgttctacacgcggaggccgagtgcccaaccattgtcttcttctccccagtggggccctcccgttctttccac

SEQ ID NO: 38279 - DNA, 469 bp, Oryza sativa
  Clone ID: uC-osrocyp032d11b1
tcttgttcccatcctctccttcgagttagcttgctccttattcaaccatgggtaaggagaagacgcacatcaacattgtggtcattggccacgtcgacttcggcaagtcgaccaccacgggccatctgatctacaagcttggaggtatcgacaagcgtgtgattgagaggttcgagaaggaagccgctgagatgaacaagaggtccttcaagtacgcgtgggtgcttgataagctcaaggccgagcgtgagagaggtatcaccatcgatatctgccctgtggaagttcgagaccaccaagtactactggacgggcattgatgcccctggttaacgtgacttcattaagaacatgatcacggggtcctcccaggctgactgtgcccggctcatcattgactccaccactggtggttatgaggctggtattttcaaggttggccagaccccggagcacgctcttttggttt

SEQ ID NO: 38280 - DNA, 500 bp, Oryza sativa
  Clone ID: uC-osrocyp032e01b1
tgcaagagccgcgtatagatccatgtattatgaatttaccaggagtagattgttttaatataaaggaaattgcaaagaacgagagttatctaactacattccaatggtccgatggaggatttggatttttatggaattcacgtgtttccccgatgttgtggcgagctgtggcaggacctcctgcccaagcatggtttcctgcttgtgcgtatgccgtcatgccgtttgagaattggtcgggatcaatgaagtttagatttcaagttgcgtgttctagttttcataaagggcgtgtgcgtattgtgtttgatccaacagtgtgctcaaacaaaacctgagttgaatgtcgcgtattctcacgctacttatacttcagatacttaagatttcaccataaaggttccttatatgcaaacacgaactttgttaactagggctgaacccccttttcactggttccacacaatccgactacttttttgcccccctttccactgtta

SEQ ID NO: 38281 - DNA, 293 bp, Oryza sativa
  Clone ID: uC-osrocyp032e03b1
ccttttatctaactcgcggcagaaacactgggcctttttagtccgatccacaggaatcacggggaggtatactccggggggcagagctcttaaacttggtacatctgtctaggatggctgaaggactatttcctagacctgcgctttacatggtcgactaaagtatctgatgtatccgatgtcattttttcttcctaacatatgaatcgggccactggaactgatacaatacaaaaggtatgtgacagaacagatcactcatgatgactggccaccggaaattattcgagtga

SEQ ID NO: 38282 - DNA, 343 bp, Oryza sativa
  Clone ID: uC-osrocyp032e04b1
acggtagtctggatcctggcgtccagctgtgacggagaatgctgctgctcgttgaccgacggttgcatgtaacatggcattaaccaacacgccagatgaatgttgaaaaattaacctctgatgataagcaagagcctagtatagatccaagttttatgaatttaccaggagtagattgtttcaatataaaggaaattgcatagaaggagagttatttaactacattccaatggttgcggtggaggatttggatctatggaacttacgtgttttcccgatgtagtggctagctgtggcaggacctactgaccaagcatgggttcctgcttgagcgtatgccgtc

SEQ ID NO: 38283 - DNA, 51 bp, Oryza sativa
  Clone ID: uC-osrocyp032e06b1
gctacacgcccgcccacgcgtacgcacaagggggggcgtattgacaggaaa

SEQ ID NO: 38284 - DNA, 234 bp, Oryza sativa
  Clone ID: uC-osrocyp032e09b1
tcgttcacgcgcgcgcccaagggtccaaagaggggggcgggtgaacacggcggaccagcgcaccacccgcgcggagaggaggcaaaagaccgggcaccggattccaacgacaggacagcgaaaacacaggcgagacgagacagaaaagacgtgcggaccaggagaccaacgacagctgacgcaacgacgaggaagcaagcccacacaggacaccaaaagcggggcgaaagaaaa

SEQ ID NO: 38285 - DNA, 451 bp, Oryza sativa
  Clone ID: uC-osrocyp032e10b1
tcgtctccttcctccattcctccgccgctagaaccttctagaagctctcctcctcctcccatggcggcgacgatcgtgtccgtcaaggcgcgccagatcttcgacagcaggggcaaccccaccgtcgaggtcgatgtgtgctgctcagatggaacctttgcaagggctgcagttcccagtggtgcatcaactggtgtctatgaagctctcgaattgagggacggtggatctgattacttgggaaagggtgtttccaaggctgtcgacaatgtgaactcggttattgccccagctctgattggcaaggaccctacgtaacaggctgagcttgataacttcatggttcagcagcttgatggaaccaaaaatgagtgggggtggtgcaagcagaagcttggtgctaatgcaatcctggctgtgtcactggccatttgcaaagctggagctatca

SEQ ID NO: 38286 - DNA, 342 bp, Oryza sativa
  Clone ID: uC-osrocyp032e12b1
tcgttctcgctacctttcccttcccacctcctcctcctccttttcaccaccaccacgcgcctccgctcgcaagaagcaccttcgaccgccatggcgcgcgcgggagctggcggcagtctctccctggaggcatgacgcggcggcgcccgtggccgtggctcctgttgctactactgcgaccaactactgcgctcggtcggcggtggtggtggccctggtcgtcgtcgtagcgcgttcgcggaggcgggagaagaaggagaagggtctacggggatggcggtggcgatggtggcggcggtgcctggagtggggaggctagacaagtcgtcgcctggcggctga

SEQ ID NO: 38287 - DNA, 388 bp, Oryza sativa
  Clone ID: uC-osrocyp032f01b1
cctccgccggcgtactcgagagaaacatcagcatccatggcgggcaagggcgagggtccggccatcggcatcgaccttggcacgacctactcgtgcgtgggcgtttggcagcacgaccgcgtggagatcatcgccaacgaccagggcaaccgcaccaccccctcctacgtcggcttcaccgactccgagaggctcatcggagatgctgccaagaaccaggtcgccatgaaccccatcaacaccgtcttcgatgccaagcgtctcattggcaggaggtttagcgatgcttctgttcagagtgacattaagctctggcccttcaaggtgattgctggacctggtgacaagcctatgaattgttgccagtacaagggtgaggagaaagcag

SEQ ID NO: 38288 - DNA, 382 bp, Oryza sativa
  unsure (1)..(382): unsure at all n locations
  Clone ID: uC-osrocyp032f02b1
ctctctcacccctcttnctcattcgcccctcgcgccaccgcgccaggagctcgtgccgagcctcgcctccccgacgaagacgacgaggaggtctgtggtagtggtggtatggatcggtgtccatccatggcggggcagcagccgccgaccggaggagcctaggacgacttcttcaaccacttcttcagcatcccctccgccgccgcagacggcgccggcggcgttggaggatttggctcgggtgaccaccaccccttcccgctcgtgcttagcctagacgccgagggcgcctgtgccgtcaggcgccttctcgacgggggccacgacggcggtaggacggaccgggaccccgtgcagctcgcccgcctctttggcccagtgt

SEQ ID NO: 38289 - DNA, 220 bp, Oryza sativa
  Clone ID: uC-osrocyp032f06b1
gtaatgcccaggttcctcgtcaactaagggtgggcctttaagggccagaccgctgctaacccgctagaccaacttctagaaaaggaccctgctcttatggagcgaaggcagaaatgcctcaacaggcgtgagtcctacaaggctgccagggccgagaagaatgcctgcgcacggcagcgctaaagggaacatcctgccttcatcgcaacttgacctgcat

SEQ ID NO: 38290 - DNA, 84 bp, Oryza sativa
  Clone ID: uC-osrocyp032f07b1
tcgtcaagacgctggctgcatcgtagcgagagagagagtttttaatggcgtttctctcgtttacaaaagaggtgtttgggtcag

SEQ ID NO: 38291 - DNA, 454 bp, Oryza sativa
  Clone ID: uC-osrocyp032f11b1
tcgttgggtcagatcgatatgagatctgcacctatttttctatagtgggaatggctcaaatgaaactatttccattattgcgtatgcgtggtgtgaagatatcgagttctctggtattacacgagtttgagcctgcaacaatcgtgcctcactcaggatccgagattgacgaacctaatgctaaaggatttatttccaaaccagctacagctattgctagctttgcaggtaagcttgaaaatgtaccagtgataggtaagcatgctaccggtactgctactatagcaggagcgacagctgatgttgctaggaattttggatattgtcgtccacctgtgaccgagaatgcagctctccgtagaccgacggttgtttctaacatggcattaaccaacacgccagataatgttgaaaaatttaccactggtgataagcaagagcttagtatagaccc

SEQ ID NO: 38292 - DNA, 302 bp, Oryza sativa
  Clone ID: uC-osrocyp032f12b1
caggaccggaccggaaatcccgggcttcgccacccgcgcctccggccacacgcagccgccggaggagacgggtgcagttcaagaccgaacgcaccaacacccagaaacaaggcaacacgaacaaacgcaacgagaaaacaaaggcgaacacccagcagaacaacacaaagagtcagccaaagaacaaccgctacgaggcaacaccacagagaccggcgacacagagccaacgacccacacagccggccacaacaccaggcgccccaacgcacaggcagagacacaagacggcaagaaggagg

SEQ ID NO: 38293 - DNA, 440 bp, Oryza sativa
  Clone ID: uC-osrocyp032g01b1
tctcctccccaaaccctagtcgccgccgccggcgtactcgagagaaacatcagcatccatggcgggcaagggcgagggtccggccatcggcatcgaccttggcacgacctactcgtgcgtgggcgtttggcagcacgaccgcgtggagatcatcgccaacgaccagggcaaccgcaccaccccctcctacgtcggcttcaccgactccgagaggctcatcggagatgctgccaagaaccaggtcgccatgaaccccatcaacaccgtcttcgatgccaagcgtctcattggcaggaggtttagcgatgcttctgttcagagtgacattaagctctggcccttcaaggtgattgctggacctggtgacaagcctatgaatgttgtccagtacaagggtgaggagaagcagtttgctgccgaagagatcttctccatggtcc

SEQ ID NO: 38294 - DNA, 367 bp, Oryza sativa
  Clone ID: uC-osrocyp032g02b1
ggtaaatctcccgactaccgatttcttcgccgtgtatacgtgtcacgggttaacaggggagggccgccgcaacctacatgtggcaagcagagcaggagaggggaggccagtcttagttgagtcttttgtaaaaaaaaataatggaaccaatgaatgcaatcgcactggatgaacatgtgctggattctactatccgccagaggaagcttgtgggtgctactaaatgtgctgaggtcaatgacacccccaacctttttcagaatggtcccaaacagaaactcgcttttattccttgattcgactggacataataaagtcccacgatgattccgcttctgcctattgaccatttcttgtagaggtacaa

SEQ ID NO: 38295 - DNA, 470 bp, Oryza sativa
  Clone ID: uC-osrocyp032g03b1
tcatgtacggcacaaaactaaatctccattatatctgaagcaggatcaggtggcgttttgctgcatgctgatagaagggcaaaaaaccagagaagaagagtacacataacacttgagctcccttggagtgcagatcgtgcaatacaacagtttgggagaactcatcgttctaatcaaacttttgcaccacaatataggcttctctttacaaatcttggaggtgaaaagcgatttgcatcaatcgtaacaaaaagactggagtctctaggagctttaacgcaaggagatcgtaaggctggaccttttctgagtgcttttaactacgacagcaattatgggaaaaaagccctaaccatcatgtatagaggaataatggagcaggattcttttccagttggtcctgcggggtgttctgacaataaatttagcatccaagaagtcattgctgaagcaaaagctgctctaaattc

SEQ ID NO: 38296 - DNA, 339 bp, Oryza sativa
  Clone ID: uC-osrocyp032g05b1
agaaagatgtgctagccgtcatagagctaccttgagagggaataggcggggtttcatgccatatttctccttccacaactcttcatgacattggaacacaagagtatatacagcgcttgctccatgtgctctcgcactatggggtacgacgtggcaactcaaccatcttcttagatcaccatcttggtggagacggttgaagccacctatcatttctaggctcctggttaccacactttgagctttgggaattactgctttctttggcgtgatggcggtacagagaggaaatatgttgatgaaaaagatttgagatggggaaattactccggcaaggaa

SEQ ID NO: 38297 - DNA, 435 bp, Oryza sativa
  unsure (1)..(435): unsure at all n locations
  Clone ID: uC-osrocyp032g07b1
tgataaccaaaaaaaactcaccttcaccctcgccgtcgcggcgccccccaaaaaaattcacccctttttccccacgctccggtggctccacgccgccccgcccgccgccgcgaccacccgttccaccggcgaatccgcggatttaatctcccacagctccccgtgagatcacaaagaccgggcgggcgtgggctgtgggctgggatggtgggcgacctctcctccctcctcgccgccgcctcctccgcctcccccgtcgtcctcgcgccatcaaaggagctccatggcgtgcacttgccgatgccgctccaggggaagaggccgccgctgcagccgcaggacgctgccgtccacatcgaggccgtcgtcgtcgtcgtcgtcgtcgnctttcaggggcaggtgatggtgcccggccacgcgcatgccggcgcttcc

SEQ ID NO: 38298 - DNA, 413 bp, Oryza sativa
  Clone ID: uC-osrocyp032g08b1
ttcatctgcaaaggatgttgctaaacagatgtaggtacatcaaacggtgatgcccggccatcgcgagacaaacttgcagaaggaattgaacagatacatccccactgcagctgaatttggtggagagtgcattggtgcattgactgttctagctgataacatgggtgcgattggttcaggaactggtattctgtttgctggtaccatgatttaccagaactttgagacattcgagaaagagagggcaaccgagcttggattctttggtgttagataccgttgcttgaggacatagttataccaatacgtggatcttctttcaaatgaaagtacttattggccggctgcttatggatgacattggcgagctttaagtcagtttaggttgcaccacttatttgaaaatgagggac

SEQ ID NO: 38299 - DNA, 416 bp, Oryza sativa
  Clone ID: uC-osrocyp032g09b1
gaggaagcagagctcttttctgtatgccaatggctgctggcacctgggtgaagctagagcagaagggagatgggccgggagcaagaagctcccacgccatcaccctcgtcggcggcacggcgtacgcgttcggcggcgagttcacgccgcgcgtgccggtggacaacgccatgtacgccttcgacctcaagtcgcagtgctggtcggcgctggacgcctccggcgacgtgccgtcgccgtgcgtcggcgacaccatggcgtccgtcggcgccaccgactacatgttcggcggtcgcgaccaggagcacaaggagctgaacgagctctactcgtttgacacggagaccaacagatgggcgctgctgtccttcggcgccggtgacggtccgccgcaccggagctaccactccatggtg

SEQ ID NO: 38300 - DNA, 484 bp, Oryza sativa
  Clone ID: uC-osrocyp032g11b1
gattttagccgcctcctccgccgctcacccgcgccttcgacgagctccagcccgtagacctcgccggatctccccgatggccgtgaccttcaccgacctccacaccgccgacgggctcaaagccctcgagcagcacctctccggcaagacctacgtctccggaaacgcgatcagcaaggacgacatcaaggtgttcgccgccgtgccatcaaagcctggagctgagttcccgaacgctgctcgctggtatgataccgtcgctgcggccctcgcttcaaggttccctggcaaggcagttggagtgaatctgcctggaggaggtgcggcatcgtctgctgcagcggctgcgccagctgctaagggtgctgatgaagatgatgatgacctggatctttttggtgatgagacccgggaagacaagaaagcagcagatgagcgtgcagcttccaaggcctctttaaagaagaaagaaagccggaaatta

SEQ ID NO: 38301 - DNA, 477 bp, Oryza sativa
  Clone ID: uC-osrocyp032g12b1
tctctttataagcttatacttggacaagagctggtcttatttgacataatctcatttgatgctgaatacggaaagacattgcaagaactgcaaattcttgttgaacggaagaggttccttgaatccacttatggcatgaatcagctagaagtcacggacttgcgtttccgtggcactcctatcgaagatttgtgtttagattttactcttccaggttatcctgattatattcttaaagaaggcgaggaaaacacaattgtaaatatttacaacttggaagagtatgttactttggtagtggatgctacagttaaatcagggataatgaggcaagtctaagcatttagatcaagatttaaccaggtttttgacatcttatccctgaaaatatttttacctgaaagagcttgactatctaatatgtggtcgccgagaaatttgggagcctgattcattggtgggaaatataaacatttg

SEQ ID NO: 38302 - DNA, 485 bp, Oryza sativa
  Clone ID: uC-osrocyp032h04b1
tttattacactactccattaaatcaagcgagggaacatctttaaagctatattcagttaacctaaaacactgtacctcgtgtgtaatggtttatctactaagaagaaaacttctttcacccgaaattaactaagctatgagcagtttgtttagaacttactaacatttgtttcattaaatgtttcaaaactggatataaaagctacatacattttgcagttaattgtacctggctcttacaaaaaaacttatcgaaggtaaagttactacctagtcaataaaaatttcggggactagcttgaaaaatcctttctaaaacttttataaactaagttcttattctatgctgtaaagcagatatgcatttaagcacattttagggagtttattcgtagctttgaaacctattggagcatattaaaaaacatacctaataaagattacgaaaatataagtttttttattttttcaagaaaaataactcg

SEQ ID NO: 38303 - DNA, 348 bp, Oryza sativa
  Clone ID: uC-osrocyp032h06b1
acgttcaacacacgcagcgaattccacgaagagagaatcagtcttacatggcgcccaaggctgacaaaaagccgacggctgattaatcccgcggaggaggagcccgtgggggagaatgccccgtctgcatgcgaagaagcccaaggcggtgaaacggctcggcggggagaagggcaagaagggcggagccagataggggaagaaggacgggaggaagaaggggaagaagagcgtggatacctacaagagctacataaggaaggagatgaaggaggatccccccatcatatggatctgctccaaggccatgtacataatgaaatccttgattaacgacatgttggagaa

SEQ ID NO: 38304 - DNA, 366 bp, Oryza sativa
  Clone ID: uC-osrocyp032h07b1
cctgcacggccctatcgttattctcccgaaccccaagaatgcgccggggggggccatggagagcccatcgcagcttgacgacgagcagaggctggccgactgggacctggacgccgtgatcaccctggtggagatgcttgccgaggccctcatctactggataccgatctggtacgagctgaagctgctggacatcgcgaggctggcgctgcccaacttcaggggagccgcgttcaactacaacagggtcggcagggagcacctcacgaagcatggactcgccggcgccggcgcccgcgccagggtaggcaagaaggacaaagcggcgccggcgtcgtcacccaaggacaaggagaagaccaagag

SEQ ID NO: 38305 - DNA, 335 bp, Oryza sativa
  Clone ID: uC-osrocyp032h09b1
tccataatcgaccaagaaggaaccggctacccacaagagatacaacctcaagaagctaacctacgagcagaggaaggccagtctcgtcgaaagattgaatgctctcaactcctcagctggtgctgatgatgatgacgaggaagaggatgacgagtgagagagtagccttatcacagtagtttcatcttatgctgccaaacaaactccttatggcatttaagtttacctgtagtcttgcaatttgcaacaggcatttttgtttatgttctgcactctgctcaaagaacctatttctttcggtttttgattctcaaccttgagctatcggttatctt

SEQ ID NO: 38306 - DNA, 429 bp, Oryza sativa
  Clone ID: uC-osrocyp033a04b1
ggctaatccgggatctcaggtctgagaacgccatcctgtttttcaggcatcaaagctgcatctaccaaggtcataattgttcaagagaatgcactcatcaacttactgaaagactgtctgcaaaacatagcaacatagttgaaacaaattgaatctcgaccgattccttcgatcaatcccagccaattgcttatcactcaccatggcggaaggagaatttgatgctgaggagggcctatcatcagatcataatctattggtcgaacggcccatcgttggtggctacgcttttggtcccaagaagatgagcacgatgaatgtcctcatggcagaagcatccaagacaagaattgcagcatgcatgaggcgttataaaacagagtagcccttcctgaaagaaacaacactttattcaacattggaacgtgt

SEQ ID NO: 38307 - DNA, 392 bp, Oryza sativa
  Clone ID: uC-osrocyp033a05b1
aaataatcagagagcaattctcttctcctacctagcaacctagtgcagtgcagtgcagtgcagcgaaggtttacttggcgacttccatgggttgcctgttgatgctctgcttggtttctcccctcctcctcgccacctctgtccacggcaacccgtggtatgggtatgggtatggcttgttcccgcagttctacgaccactcgtgccccaaggcgaaggagatcgtgcagtccatcgtagcacaggcggtggccagggagaccaggatggcggcatccttggtcaggctgcattttcatgactgctttgtcaagggtgtgacgcgtctgtgctcctggacaacagcaccaccatcattagtgagaagggggtaaaccctaacatgaactccc

SEQ ID NO: 38308 - DNA, 234 bp, Oryza sativa
  unsure (1)..(234): unsure at all n locations
  Clone ID: uC-osrocyp033a06b1
atcgatggcttcctttcncttcntgcgcgggttatttcttccttcccctttccccctccgtcgcgggtgggctgggctggtaagtcggtaggtaagggatccatcggtttcgatctcacctggttcgctgcccttttgttgatttgatcatcaggtggtgctttgatcggttcggtccggtttctagtttcggtgactgcttgatcccgtcggttttgggggtctagtttcggc

SEQ ID NO: 38309 - DNA, 396 bp, Oryza sativa
  Clone ID: uC-osrocyp033a07b1
ttctgagggccctgaagcttaccaggagtattacattaggcatattgatggctcacctgtcaactctgaggcggagcgacagcgagtcatccagtgtcttgaagctgctatagaaaggagagtatccgaggggctgaagctagagttgtcgacaggtgatagagtgggactgctatccgatgtcacacgcatcttccgtgagaatggcttgacggttacgagagctgaagtttctactaggggtgacaaggctgtcaacactttctatgtccgcgatgcagcagggagctccgccgtcgatctgaagactcttgaagctatacgccaagagataggccagacagtgctttaagtaaaagggcaccctgatcaccgcaaatcaccttcgcaagagtc

SEQ ID NO: 38310 - DNA, 393 bp, Oryza sativa
  unsure (1)..(393): unsure at all n locations
  Clone ID: uC-osrocyp033a08b1
tcggtanggtgctatggatttctgatccggggtttcttggatcttggggagtaggaggtggggggcggcgatctggccgggagatggccggcgggaaggagccgatcgaggtcaagttccggctttttgatggtacggacatcggcccgagcaagtacgacccctccaccaccgtctccgcgctcaaggagttcatcctcgctcggtggccgcaagataaggaaataactccaaaaactgtcaatgacctgaagctcattaatgccggacggatattggagaataaccggacacttgctgagtcccgtgtttcagtaggagaggttccaggaggtggtattacaatgcatgtggtagtacgcccttcacaacccgacaaaaacagggagaagc

SEQ ID NO: 38311 - DNA, 469 bp, Oryza sativa
  Clone ID: uC-osrocyp033a09b1
ttcagttgccgctttcttgtactggatgaagttgaccagcttttgtctttcaattatcgtgaagatatgcatagaatacttgaacatgtaggaaggaaatcgggtacttcatctagagatattcttggccctcttgcaaggcggtctgagcgccagactatcttggtttccgcaacgataccattttcagttatacgagcagccaggagttggggtcacgatccagtccttgttagagctatgagtgttgttccacttgagtcaattactgttccaagacctgtgctgtcccagccagatgccaactccaactctccatcaaattcagtgaatcaagctgcagttgacagcttaccaccatctttggaacattactattgtacatccaaggctcaacacaaagtggacactttagggagatgtatccatgctctggaggctcaaacagtaattgcatttatgaacaaca

SEQ ID NO: 38312 - DNA, 268 bp, Oryza sativa
  unsure (1)..(268): unsure at all n locations
  Clone ID: uC-osrocyp033a10b1
atcgcgagcggccgcctaantttttttttttttctaaaaattaacatgttgcttaatgagaatccatggatgcaatgtacagacagatatacagatcacatacggctagtcttcagttcttccttccacagttccctccctcctgtcctgacctcaagaagacaagaaacatcaccatctcatactccttcccccacctttttccacctatctctcatagaacaagctcactttggttttaagtaaacacataccaaattgaaccccc

SEQ ID NO: 38313 - DNA, 244 bp, Oryza sativa
  unsure (1)..(244): unsure at all n locations
  Clone ID: uC-osrocyp033a11b1
cggccggaatttccgggctcttcacccacccaatacctaccccagcgccngcgaaccgcgaagcggagcttattaacggangccggggagcgcgccgcnggcgcagggccaggacacggcgggggcgcaagggcccagggacaaccggagccccaaccaccaggagcngaagcgcgacccggagacggcggccaccggccagacctacgaccgcgccagcaacgagacgaggggggccccaagg

SEQ ID NO: 38314 - DNA, 200 bp, Oryza sativa
  Clone ID: uC-osrocyp033a12b1
atcgatggcttcctttcactacatgcgcgggttatttcttccttcccctttccccctccgtcgcgggtgggctgggctggtaagtcggtaggtaagggatccatcggtttcgatctcacctggttcgctgcccttttgttgatttgatcatcaggtggtgctttgatcggatcggaccgacttttatttttggaaaaccc

SEQ ID NO: 38315 - DNA, 228 bp, Oryza sativa
  Clone ID: uC-osrocyp033b01b1
ggtacgcgaccgcccacgcgccccgactccagcggctctttaccacaacctccccggatcgatcccacggaaagaacagggaacagagggatgagagggctgcgcccgaagcatagtaccgcagatgcgaaggcggccttcacagggccaccgacgaccgctcccacgaggccgactgatccacctacgcgagagaacctcgactacaagaaacaccaaacgacaagg

SEQ ID NO: 38316 - DNA, 483 bp, Oryza sativa
  Clone ID: uC-osrocyp033b02b1
cgaattccattcctcgcttttcctctcccctcgcctcctcgtcctccccctcccaggggatcgccggagaggaatcgcgcggaggaaaaaaaaagaaaagggcttccccgtcgtctaagttaaaaggaagccatggagcacaaggagactggatgccagcagccagaaggcccgatcctttgcatcaataactgcggcttctttggcagtgcggctaccatgaacatgtgctcaaagtgccacaaggagatgataatgaagcaggagcaggccaagctggcagcctcctctatcgacagcattgtcaatggtggtgattccgggaaggaaccaattattgctggtcacgctgaagtagctgttgctcaagtcgaggtgaagacgcttgttgcgcagcctgctgagattgctggtcctagtgagggggtcacggtgaaccccaggggagggaaggaccaaatcggtgcctcacttgtcggagag

SEQ ID NO: 38317 - DNA, 317 bp, Oryza sativa
  Clone ID: uC-osrocyp033b04b1
ccctcgtgtccgcccacgcgtccgatttcttgctcgcccaactaaaaccgaaccgaagcttgcccatctcgcgtgaacttcggagcaaggaagaacaaggcgccgcgccggatttagccccgcccccctctccggggtatcccccctcctctcctctgggtttgattggagtgaggtgaatcggtgaggttgtggctcgggtggcgtccggatcggagggggtttgggcccttcctgattaatccctcttcttgattccgtgtgggggattcaaatactggggggcaaaggcgagatatttttgtcactttttcccc

SEQ ID NO: 38318 - DNA, 339 bp, Oryza sativa
  Clone ID: uC-osrocyp033b05b1
cggtcgcgtgggccggcgtctgaccaggccgcctgctgccgctacggcgcttcctggggcttcgcccggcggcggagccgaggcccaggcggtgttggcggagttcgtgacgtccgagagggtgaaggtggcggcgatgctggggctggctctcgcgctctgcaacgccgaccgcgtcgtcatgtccgtcgccatcgtgccgctgtcgcaggcgtacggatggaccccgtccttcgccggcgtcgtgcagtcatccttcctttggggttatctggtgtcaccaaaaaattggtggagcactggtcgactactattgcggaaagcgagttatgggttatg

SEQ ID NO: 38319 - DNA, 493 bp, Oryza sativa
  unsure (1)..(493): unsure at all n locations
  Clone ID: uC-osrocyp033b07b1
ctcgtctttgagctgnatanggggtgtcatcctccccttccgaccgttgccgccgccgccgccgccgggatgccacctcgccgccgccgccgagtccggccgccgctcccaccctcccctcccctcctctcttccaccaccgcaacaccaccgccaaccccgcccgtgggcacccccaaatccgaggccgccgaccgccgccctcctcccgcccgccgccgactccccctcgtctccgccgccgccgtcgaggaggaggacggagagtggcaccccctgccgctctccgccgccgacctgtccctcccgctcaccctccccacggggcagaccttcctgtggcgccgcacgtctctctccccgctccgcttcaccggcgccgtggggccttacctcgtcttcctctcccacctcccgtcctccgacggccgcctcgcctttcttctccacaacaacggcgggtacttcttcttcttcgtccccgcggcggtcc

SEQ ID NO: 38320 - DNA, 484 bp, Oryza sativa
  Clone ID: uC-osrocyp033b08b1
ctgtcttctccattttaaatccttcttccctaatccccctcgccggcgaagcgcggcggcggcggcggcgccttcttccctaatcccctcgccagcggggagccgcagggcggcggaggcgtgcgtcggctgctgctgctgcgcgggcgggggaggtggggagagatgcacagatccgcgggcgccacgatggcgtggaacgtgttcaggttctgcactgcgctgagggggctgggctccatcatgatcctgctcgtcctctccatcgtcggggtcacctactacgcggtcgtggtgtacaactacggccccgcgctcttcgccggcggcgccagcaccctcctcgcgctcgtcgtcctgctcctcttccacttcctgcttgttatgcttttatggagctacttttctgttgtattcaccgaccctggttctgttccaccaaattggaatctcgactttgatgaggagaggggagaaactgccc

SEQ ID NO: 38321 - DNA, 442 bp, Oryza sativa
  Clone ID: uC-osrocyp033b10b1
gctggaacatgtccattgtgggttcctgtattgcagccactagcaaagtgttctggaggagttcttttacttcatgacgattttggagaggcctttggggtcaacctgcaaagagcgtcaactagagcagctggttcccatggcttatttgagattagatgttctgatgacatgcttgttactcaagtcattggccctggtgaagaagcatctcctgattcccatgaaacattcaagcacgatacctcattttgaatccagatgcatagtgtcgaggaaacacagagttttttcgtgtctatggagtcaaagggtgatatcaagaatgattttgtttacttccagtttgatgaccattactctaatatgtatcaaacagaaataaccagagtaatcactatgaggcttcaaactgttgatggtttatctgcatatctggcaa

SEQ ID NO: 38322 - DNA, 419 bp, Oryza sativa
  Clone ID: uC-osrocyp033b11b1
gtgtgagctagcttactaggctcagccaactgatcgcgagctgtgacgaggtgatcaccatggcgtcctcgtcgtcgcttcttgttcgtgggagagcgttcgcgctggttgtggctgtagctctggtggctgctcctcgccggattaatggcggcgccgccgggccggcggcgaggacgaacgaccccaactggcacgtcttcagcgtcagctcgctgctgccgagctcggcctgcactgcatcgaaagcggcgtccaactcgtcggctctcggcgtcgtgcaccggcaccggccgtgctcgccggtgcaggctcgtcctcgcggcggcggcggcgctgtcacccacgccgagatcctggaacgcgaccaggccagggtcgacttcattcaccgcaaggtcgcccgcgccgggggcgcg

SEQ ID NO: 38323 - DNA, 299 bp, Oryza sativa
  Clone ID: uC-osrocyp033c02b1
aatagaaaccctgattgcatacttgttttcatcatcataaatacaccaagttgaaaacattacattacacagtaactctacacacatggtactcagctagcattctcttgttcaaatttacacatgatgatataaacgaaccgatcatgcatacacataaatttttttccttttttttcctttttcacacaagaagactcgtggcctcatcggttttggttcgtcacgtcacatgacgctgcagccggccggctcctcgtcgtagtacggcggctggtacgggctccggccgccgtacc

SEQ ID NO: 38324 - DNA, 454 bp, Oryza sativa
  Clone ID: uC-osrocyp033c07b1
cgattgctccatggtgtgcggcgacagcgcggcggtgtcggcggtggaggggaggctgtcggagctctccaccaacagcgacgagaaggggctccccaggaggggcaagtctttatcaggaaggacattaaacaccgcacagattcaactcgttgcaagccatccagaggtgtatgaaccatgtgatgattcctttgcacttgtcgatgcgcttctttctgacaaagcacaacttttgacgctaaagccaagattatgcatggagataggatgtggcagtggctatgttatcacatctctagcaatcatgctcaggcagttaggctcaggaacccagtacctcgctactgatatcaatcaacatgctgtggagacaactcaagcaacccttgaagcccatggcgttcatgcagacgtgattgctactgatattgtgtcacggtttgagaaacgc

SEQ ID NO: 38325 - DNA, 474 bp, Oryza sativa
  unsure (1)..(474): unsure at all n locations
  Clone ID: uC-osrocyp033c09b1
cttccaagtctacggttgaactcccaccctccgccaccgccgccgccgtgctcctgccgagctccgccgcgcgctgtctcaccgacgccccgccgttcccgatcgccgaggctatggcgtcggccatctgtccggcgtcgggcacggcgtcggcgccctccgccacggccacggccacgccggcctccgcgagcagccacgcgttggtgaactggtcggcgctcatcggccacgcgagcatcgccacgccggcggcgaccgcctcgagcaccgagttccagccgcagtgcgtcaggaaccacccacgtcgcggtggcgcaggatctccacctgcggcgcccacccgcggatgaccataccgcgcgccgncgtcgccgnctcgaacccgcccggacccggcgtgccgtccctcgctcgccagacgaacggcgccgcgctccgctcagcgcgccggcaggctcgccgnctgcgccg

SEQ ID NO: 38326 - DNA, 451 bp, Oryza sativa
  Clone ID: uC-osrocyp033c10b1
agtcgttggtggtattgataacattccttacaatcctttccatcctctcccgaactggtgtgccttggtttcttaagctgatgataagtctttcatctcagacaaatgaactgtaccagttggcagctgttgcattctgcttgttgtttgcttggtgcagtgataagttgggcttgagtcttgagttgggttcgttcgcagctggagtaatgatatcaacaactgatcttgcacaacacacacttgaacaaattgaacctattcgaaacttcttcgctgctcttttccttgccagcattgggatgctaattaatgtccatttcctttggaaccatgtcgatatactccttgcagctgtgattttggtgataactgtaaagacgtttattggtgctgttgtcgttaaagggtttggctatagcaacaaaacatcttttcttggtggcatgtc

SEQ ID NO: 38327 - DNA, 380 bp, Oryza sativa
  unsure (1)..(380): unsure at all n locations
  Clone ID: uC-osrocyp033c11b1
caagaagaagaagnngttgntggtcgaggcgaggaggaggaggaggaagaaggagtttgtgtgttggtgttatgaggtgctggattagacgagaggaatgcccttcggtgggagcgcgcgagaggggcacgcggtgacactgctgcaacaccacctcatacacggcgttggcctcgccgcggccggcaagctcgtctcctccttctccgccgccgccgccgcccccggagcaggtgggctctgggagccaaggtcggtgctcgaccaccgccacatcccgagccccaacccccctacctcggctctcacgctgtccgtccctctcgccgacttggcggccctcgcccgccccaaccccaagaacctctccctcttccccc

SEQ ID NO: 38328 - DNA, 491 bp, Oryza sativa
  Clone ID: uC-osrocyp033c12b1
cttggatctcattttttttttcgtcagagagcaaaccaaccattgtcagtccaactttccatgatagtaattctggctggaagatgccatttgcaaatgcccgtcctgatgaagcaaagatgactgctgttccacagttctttaggcaacccgttcagatggttagagaaagtccagggcaaaacaagggtttggtaatattcccccagttggtccagacagacttctcaagatcacagggccaaccacaatggcaaggcctggttcccccgatgcaacagaaaccaaacaaggatatgcttcgcccagacttgaacatcgggttcccttctcctggttcaccaccagctcgacagtcttcgggcatcaatttggaagcacaacagccagaccttgctttgcagttgtaagcttgaacggatgtgacccagattgaatggcagacttgaacttgaacaattaaagacaatggaagttaggcgcaagcgcaa

SEQ ID NO: 38329 - DNA, 213 bp, Oryza sativa
  Clone ID: uC-osrocyp033d03b1
tgttctttcaagtcgaccaacgccgaggaaaaatggctaaagagacccatgtgcggtctcttccacttccatgattaaagacacaggacaaaactcggcatggtgaccggcctgacagccgtaattacacatcgaggcgtctggcaagtcttgcctactacacattagagcacgtactcggaaaaggatgcggggcataaccactaacgtact

SEQ ID NO: 38330 - DNA, 246 bp, Oryza sativa
  Clone ID: uC-osrocyp033d05b1
catactctcaggtcgacaaacgcccaggaaacatggctatttagagccatgtgctgtcccttccacattcatgaataataacacctggaccaaatttatacatggtagccctccttgaaaactagaatatacacacttaggtcgcctgccactgtcttccctaccagacataagagcacgtacctggaaaaggatgcctggcactactgataacgtactagtcttacaagaaaaagaagccgtttg

SEQ ID NO: 38331 - DNA, 432 bp, Oryza sativa
  Clone ID: uC-osrocyp033d09b1
ttcgtctactcgctcatgatgtctggggattggctgcaggggccgtacgtgtactacctctacagccagtacggcttcgacaagggtgacattggccgcctcttcatcgccggcttcggctcctcgatgctcttcggcaccatcgtcggatccctcgccgataagcaggggaggaagagggcgtgcattacctactgcatcagctacatcctgagctgcatcacgaagcactcgcctgagtacaagatcctgatgattgggcgcgtgctcggaggcatcgccacatcgctgctcttctcggcgttcgagtcgtggctcgtcgcggagcacaacaagagaggatttgacccacagtggttgtcgataacattctccaggctatattttttggaaaaggcctagttgcgatcatcgctgggctatttgcaaatc

SEQ ID NO: 38332 - DNA, 486 bp, Oryza sativa
  Clone ID: uC-osrocyp033d11b1
tggttcttgtgggtttagtattgctcagcaagctgcacttttccacagtattaagtccttgttcatgaacaagcctctagtcattgtgtgcaacaagacggacttgcagcctcttgaaaatctgtctgaggaggacatgaagctggtaatggagatgaaagcggaggctatgaagactctaggtcatggtggagaagctaatgaagagggtgttttgttgactatgagtactttgactgaagagggtgtgatggctgtgaaaaatgctgcatgtgagaggcttcttgatcaaagggtggagatcaagatgaaatcaaagaagatcaatgactgcctaaataggtttcatgttgctatgccaaagcctcgtgataacaaggagaggcctgcttgcatccctcaggctgttctggatgctcgagcaagtgctgctgctgcaaaggaaaagaagaagctggaaaggaaactggagaagacctcgagatg

SEQ ID NO: 38333 - DNA, 331 bp, Oryza sativa
  Clone ID: uC-osrocyp033e01b1
agtctgcgaagcccaccaccaccaccacccagatgcccacctcgccgccaccaccaccatgcggggctccgcggcggcggcggcggcggcggcggcggcgactgtgacgcgggtggcgcagcgggtggtggccccgtcggcggcgacgcctgggggcgcgctcccgctgtcctggctcgaccgctacccgacgcagtgcgcgctcatcgagtccctccatgtcttcaagggcctgtgccgacgccgccgtggtgcccgtcgcggagatcgagcgcgcgctcgcggcggcgctcgtgagctactaccccatcgccggccggctggcggagcg

SEQ ID NO: 38334 - DNA, 392 bp, Oryza sativa
  Clone ID: uC-osrocyp033e03b1
ttattaggtcgccgcagacctctccgtcggcggcgagagggtttcgatccacccgcagcgccatggccgagctcgcggcgggaggcgaccagcgcgccgcgctgctcgcggcggccaccctcttcccgccgccgcccgacggcgcgaggttctcgtacgggacggcggggttccgcgcggagggggccgccatgggccccgcggtgtgccgcgccggggtggtggcggcgctgcggtcggccaagctgggcggcgccgccgtggggggtggtcatcacagcctcgcacaacccggttcgcgacaacggccgtaagatcgtcgacgcggacggcgggatgctgtcgcaagactgggagccgttcgccgacgcactcgccaatgcccccaaccc

SEQ ID NO: 38335 - DNA, 456 bp, Oryza sativa
  Clone ID: uC-osrocyp033e04b1
cttcgccgccggcttcgttttcctcctcgtcgccgccgactccggatcgggcctcgccgcgctgctcgccttcctcctcgccctcgcctacatcgcgggcctcgtctacctcagcgtcgtctggcacctcgccagcgtcgtctccgtcctcgaggactacaagggattcgaggccatgcgcaagagcaaggcgctcatacagggcaagctctggaccgcctccgccatcttcttcgtcctcaacgtcgtcttcatcgtcgtcgaggtcgccttccgggcgtgggtggtgcgcggggccacccacggcctcggcgccggctcaaggctcctcctgggcctcgccatgctcgccgcgctctgcgctgacgagatgctggcgctcgtggtgcaaaccgtggtgtacctggtgtgcaagagctaccaccacgagagcatcgacaagagcaaccttttcga

SEQ ID NO: 38336 - DNA, 65 bp, Oryza sativa
  Clone ID: uC-osrocyp033e05b1
gatagtcacaggatggcagacgaccacgagacatgagaatagtgagccatgtccggacaacttcc

SEQ ID NO: 38337 - DNA, 224 bp, Oryza sativa
  Clone ID: uC-osrocyp033e06b1
ctctttctcaagtcgacgaacgctcaggacacatgggttattagacacatgtccggcttcttctacttccactgagttatgacactgcacccatttcgtcattgtaaacggcctgaaagtcgtacattacacaccgaggcgcctgcccagtcttccctaccagacagaagagcacgtccatggatcaggatgcgtggcattacagctgttgtactacatgtaca

SEQ ID NO: 38338 - DNA, 386 bp, Oryza sativa
  Clone ID: uC-osrocyp033f01b1
aatatttgagaatgtatgttaaggttgaacttaagagattccgcattgtgaaggaggtgggaacaatagtaatgaatgttaggatctttgcttattaccagttgatgcaagtgtgccaggctgagtacttccgtcaattgcttaagcctgtcacgtagtccaaatacaggagtcgagattagtcactttatctgctatttatctttcgtctggcataaagttgcaacaacaaaagcagtgcattcatgattggctaccttgtggtaggggtggttaggttcttgttggtgcaagtcgcaaacattattgtaaatttctggtggttttgggtagtggagcttctacattagattaaggtgagggcttgactttagtgcgtttctgtt

SEQ ID NO: 38339 - DNA, 418 bp, Oryza sativa
  Clone ID: uC-osrocyp033f02b1
ctcattcataagccagttgtatgctagcaagcagcacacacatatatcacaggccatctctctatccctaattaagctatatactccatatagctagctaaacacaggaggagtggaggaaggagaggctagctgatctagctatctgcagtgattagttaaaatgatggcttctgataggttggatgcagaaaggatcatagagtacttcaagggcaagagcatcctcatcactggagcaactggctttcttggcaagattcttgtggagaagatactgagggtgcagcctgatgtcaagaagatctacctgctcgttcgcgccatcgaccaagcatctgcaaaccaacgcgttcaatttgaggtgacggagacggagcctgtcagcgtggtgaaggaaaagcaccgcaagggattc

SEQ ID NO: 38340 - DNA, 469 bp, Oryza sativa
  Clone ID: uC-osrocyp033f03b1
tttttctcgccgcgcgccggcgagacctcgccgccatgaacaatctcctcaccgattcgtttgagctccctcggggaggctcttcaagagatggggacattgaaatgggaatgcaagctgatccttcagacaatctaaaaggtttcttgaaaaaggttgacgcaattgaaagcctaattgctaagctgacgaatctcttgcataagcttcagactgcaaatgaggaatctaaagcggttacaaaagcaagggacatgaaagcaattaaacagaggatggagaaagatattgatgaagtggggaaaatcgctcgcatggcaaagacaaaagttgatgaattggaaaaagataacttatcaaacagacaaaagcctggatgtgggaaaggatctgcggtagatcgatcaagagaacagactactggagcagtgaaaaagaaattgaggaacgcatggatgattttaagttt

SEQ ID NO: 38341 - DNA, 468 bp, Oryza sativa
  Clone ID: uC-osrocyp033f04b1
cctcttctcctcctcggctgcggccacggcgacgacgacgacgacgaattcgagcgaggcgatcggcgatggaggcggtggcgatctgatccgctcttcccgtctcggcctcgcgctcctctccctccctcgcggtgtctcgggtaggaaatggcgatcatggtggatcctccaaatgggatgggtaaccaagggaagtattactactcgatgtggcaaactttgtttgagatagacactaagtatgtgccaatcaagcccatcgggcgaggagcttatgggattgtttgttcatccataaatcgtgagaccaacgagaaaggagcaataaagaagatacacaatgtttttgacaaccgtgttgatgcactaaggactttgcgggagctgaaacttctccggcatcttcggcatgagaatggtattgctttgaaggatataatgatgccagtacacaggaggagtttt

SEQ ID NO: 38342 - DNA, 472 bp, Oryza sativa
  Clone ID: uC-osrocyp033f06b1
gttttattgccccctcctgcccgccgccgccgccgcacagccggcgatcgagcggaattcccattcctttccgcccggtttccggcgctgccgcccccctcttaccatcccgggggggcccagaggccaggagctgtcgccggaggatttcaatttttcggagccatttgatgctaatgccacaccaccactcctgctaaagctgccctcattatgaactcgctggacaatgagtagcaattgcacattgctgatttccatctcctgcggttacattcgtacacgacagcatgggaaaacttgcagctgttgttcgcagtgtacttagattaacaaatgaaagcatgaggattgttatggtaacaattattggagggctcttgggcttcttattggaatttcattcccatcagtcagcataacaaagcttcactttccttttaactttgtatcatacatagaagacagaaac

SEQ ID NO: 38343 - DNA, 283 bp, Oryza sativa
  Clone ID: uC-osrocyp033f08b1
ttccctcgaggaggagggagccggacgccgccgtgggtagagcaggggagagaaggagaggaggagatcgccgtcttcttcgcctgccctcttgccgatcttgagcggtagtggagatggtgctcacgttcactaagcttttcagtcttcttttctccaataaggagatgaggatcctcatgtgcggtttctatgcggtcggttaaaccaccattctttacaagcttaagctctgttagatcgtcaccactattcccaccatttgttttaatgtctcaactgt

SEQ ID NO: 38344 - DNA, 399 bp, Oryza sativa
  Clone ID: uC-osrocyp033f11b1
ctacaatggacatcgtctgcgccgccgccagcgccgccgcgggcggtgggagacattcggagaaggagctcttcagcgcggcggagtccggggacgccgcggccttctcctccctctcccccgccgacctcgccgccgcgctcgccctccgcgatgaggacggccggtccctcctccacgtcgccgtcgcctccggccacgcccaggtggtgagagtgcttgccgcgatgggcggcgacgcggcggccagcgttgtgaacgggaaggacgaggaggggttgggcgctcgatccacacggcggcgagcagcggaaaagctgagatcatctccatcctgctcgatcaaggtgctaatgttgatttgacaaccgatgctggccggactgctcttcattatgc

SEQ ID NO: 38345 - DNA, 464 bp, Oryza sativa
  Clone ID: uC-osrocyp033f12b1
ctgatctactagctacctagtactctcatcttcttcactagcttttgcttgatcaattgcagcaatggcggcgaaggcagcgctcgttctagcggtgagcctcctggtggtggccgtggcgagcgcctgcacctactgcccggagccgccgacgccgaagccgaagccgccggcgccgaggccgccgacgcccggcggcggcgccgggtcgtgcccgcgcgacgcgctgaagctgcacgtgtgcgccaacgtgctcggcctcgtgaaggccaagatcggcgcggtggcgccgtacgagccctgctgctcgctgctcgacggcctcgtcgacctcgacgccggcgtctgcctctgcaccgccatcaaggccaacgtgcttggccttaacctcaacattcccatcgaccttagcctcattctaacaactgcggcaagatctgcccatccgactaccagtgtgctta

SEQ ID NO: 38346 - DNA, 280 bp, Oryza sativa
  Clone ID: uC-osrocyp033g02b1
tcctgtcggagctgcggtcggagggcggtggcggcggcagctaccggcgatggcagaggcggctcaaggcggtggatgcgcggagggtggaaccagcggcggctcccctcctcccagatccggtgtagacggctgcggaggatggaggcggcgtggagggtggacacggcggcggctccgccgggagggcagtggcggcggccgtctccttcagatctggcgccatcggacccaaaccctatcctgcccaacgcttggccggcggcttacccacacgggg

SEQ ID NO: 38347 - DNA, 266 bp, Oryza sativa
  Clone ID: uC-osrocyp033g08b1
ctgtcccacacaccatttatatcacaatggccgccgccaagtccgacgagcggatcgggcagtggcgggaggtgccagccgagccgacgccggacggccccatccgcctgtagtgcctcgaccgggaccctacccagatggcgctgatcgaggcgctcaacgtgttcaagccgactctcgatagggtgattggcagcgattacgtggcggatgggccggaccgtacgatcgagcgcgccttggcgagggccaaggtgcattactac

SEQ ID NO: 38348 - DNA, 163 bp, Oryza sativa
  Clone ID: uC-osrocyp033g10b1
ttttgaccttagcccactccaccagcccctgccggccgattgtgcagtggacatatgagacggcaccgacgaatgggcagaactaactcatcatctagcacactcactgggccgatcgagagagtttgatgcaggacgcattcaacacctgcggctagattct

SEQ ID NO: 38349 - DNA, 335 bp, Oryza sativa
  Clone ID: uC-osrocyp033g11b1
tatggaacttagcgcactccaccagcccctgccggccgatcgtgcactggacatatgaatggggaccgacgaatgggcagaaccaattcatcagcaagcacctactatgggccgataacgagagatggatgcaggacgcattcaacagcagcggctagattctcgagtgaatcatcacaagactttgatacgtgtgatggctcctaacatcggaactacaataccgtcgcaagcaccaagattgacagataccccttcaggcagcgatcactgggagaccctacatggtcaacttagatcgaattgaagaatgcaattaactacaacaggaagaa

SEQ ID NO: 38350 - DNA, 253 bp, Oryza sativa
  Clone ID: uC-osrocyp033h01b1
tgtcatcaacgcgcgcttctccccctccccttctccccattccatccaatccatccatggcggaatgctccattgatcacgaccagtagcttcctacaaccccagatcgggaggaggaagaagaagaagcaagaagcaagaagaaggagacgccgtcaatggggagctacgcgtacaagtactgcatgtgcttcacccgcaagttccgctcgccggcggccgacccgcccgcggacgtccgcgcccacttcct

SEQ ID NO: 38351 - DNA, 433 bp, Oryza sativa
  unsure (1)..(433): unsure at all n locations
  Clone ID: uC-osrocyp033h04b1
ctgatacagaccacttgnctgcttgtcacaagcctcatgccaaaagctcctctcacacactcactctctcgcgccatgaaattctcctcgacctcaacccctttattcatcctcctcctccctttcctgcctctcctatactttctctacctgtaccaggataccaagaagcagcctgcaggttccaatggactcaagtcctaccctgtagtcggcacgctgccgcacttcgccaagaacaggcacaggtttctcgagtggtcgaccgacgtaatgaagcgcagccccacgcacaccatgacgttcaaggcgcttggcctcacaggcggcgtcatcacagccaacgtggccaacgtctagcacatactaaagactaactttagtaactacccgaaaggcgagctcttcgtgtccttgctcgaggacttgcttg

SEQ ID NO: 38352 - DNA, 422 bp, Oryza sativa
  Clone ID: uC-osrocyp033h06b1
ctttgaaatacgttttgagtagcagttgtcaatgctggattcagttgacttaaaagttatactttccaaggcaaccgaacttgttgacaggcacctgcagtcaattcttgtagctgagaaaataactcaaaaggttgagggtcagctatcaaagtctcagaaagagtttttgcttcgccagcagatgcgggctatcaaagaggaacttggcgataatgatgatgatgaggatgatgtaacggcattggaaaggaagatgcagaatgctggaatgcctgctaatatttggaagcatgctcaaagggagttaaggcgtctaagaaagatgcaacctcagcaacctggatatagcagctctcgaacctacttggaacttcttgctgaaacttccttggcaaaaagtcagtgaggagagggagctt

SEQ ID NO: 38353 - DNA, 203 bp, Oryza sativa
  Clone ID: uC-osrocyp033h08b1
tcggtagtagaatttccaaccccggatgggtcagatgtaccttcaacaaaaaacgcattggcccgggtcgcatagtaacaacactatcccaagggccgtccccgcattactcctgagaccaaagcatttgaaacggacgagctggagccttcattgaaactgcttggcttgatgctgcttactatacccctatggtctatgct

SEQ ID NO: 38354 - DNA, 365 bp, Oryza sativa
  Clone ID: uC-osrocyp033h12b1
tcgtaataatcagtaggtcgtcccagggcagggccttgctccgatccccaatccgtccctcgagcgagcagaggcgccgccgtcgctcgtcctgctgcttccgccgccaccgccgccgccgcctgcgccgatccccatccatcccgcgagcgagcatcctggattaggatgagttcgaagaaggttccattccaccgacataaggagaacgaagaggcgaggaagaagagagagcaagatgaagcggcacgtgtgtacgaggaatttgtggagtcattcaagggtgatagcacatctgggtcgaagtttgtccgaggaggtgtgattgatcccaatgcccaagctgagattgatttccaaggtat

SEQ ID NO: 38355 - DNA, 542 bp, Oryza sativa
  Clone ID: uC-osroM202001a01b1
ctttttctcgttctcttccttcctcccgttttcccctttatctttctcgctctcttctctccctggcgcacgagcgctgcgctcccagggcgcatcgccgccgcttcctcctctcccccccttccttccttcctctctttccctgttcaaaccctaactatccctcgcctctccaatagccgctgctgccgtggagatggccggtgccaagcactgcgcaactccggcggccctgttctatccccatgagtgtgctctcgggtctctacttcttcctctccccctctaatttctagtgtttatattggatctactctcctcccctattttaatttttggttacctctgatgattctacagtgattgaaaaatctgtggttcagcccctccttcagaaacccaagtcttctcttctactgctgctcttctggatcaatggtaactctgctagaacaccacttgctccttcttcaggttggtctctctgctgtctcacttcagcatcttcttgctgctttggtttacatgcctctcctggctgc

SEQ ID NO: 38356 - DNA, 451 bp, Oryza sativa
  Clone ID: uC-osroM202001a02a1
gtcagggcaacaaatgcattcattcatttggactatgcaaaaaacatgcaaatccaatgcgatcaatcgagctttacgcctcgtgagagaagacatagtggatcagatcaacgacacggttggagtagccccattcgttgtcgtaccacgaaatcaacttgacgaacgagtcattgagggcaatgccagccgaggcatcaaagatggaagagcgcgagtcgccaataaagtccgacgacaccacctcatcctcggtgtagcccatgatgcccttcagcggtccttccgaagcagccttaatcacgttcttgatttcgtcatacgtagccggacgagccaagcgcaccgtcaagtccaccacagacacgttcacggtgggaacacggaaagccataccagtcaacttgcccttcaacgaaggaatgacagcaccggcagccttagcggcgcc

SEQ ID NO: 38357 - DNA, 430 bp, Oryza sativa
  Clone ID: uC-osroM202001a03a1
cagagttcaaaacgcttcaaaacaaacactccaaaatgttttcagaacaaggatgcaggcatgcacaacgatccatcgatcgatcgccgcaacagaaaaaaaaaaagaactctttcttggcgtcgccgcggcagcggccttcactgcagctgctcgcggaacaccgtgagcacgtcggcgaacgtgacgatcccggcgaggcggcagtcgtcgtcctcgtcgagcacccacaggtagctggcgcggtgggcgagcgcctgcatcatcacggccaccagcgagctcgccgggctgcacaccaccggctcctccgtcgagcggcgcccgtagcttcccgacgacggccgactcaaccgcgcggagcggtcgtgggcctcgtcgtcggaggacgaccaggtggctgaggaggagaacgcgaacgaggacaccg

SEQ ID NO: 38358 - DNA, 203 bp, Oryza sativa
  Clone ID: uC-osroM202001a04a1
tttgtttttttaaaccaaagggtttactcacatttaattatcattcaactaattcccacccaaccttggtttaaaccaacactttttattgtcacttactctactaaactaaaacctcccttgacttggcttaaaaaccaccaaattccttcacttgtataagagtcctttaaaaacattatgccctttagagtggtaccatc

SEQ ID NO: 38359 - DNA, 338 bp, Oryza sativa
  Clone ID: uC-osroM202001a05a1
ttggtttttttaaggttaggggtataatctcgtttaattatcatgcaactaattggcccccaaccggggattaaacggttttgttccgggtctccgggcactagaaatctttatggttacttaaagggggagactatcggcatggaaattttttaatagactcctataaaaattgatggctttggagggggccatcagggctctaatatcttggtgctatttaccatctccataagggggagaacactggattccatgacacattaagaggccgggcgttatttaaatagagtcttggaggtgaggaaaccttttccatcataccttgaagatgagga

SEQ ID NO: 38360 - DNA, 316 bp, Oryza sativa
  Clone ID: uC-osroM202001a06a1
tttttggtcagcaggaaactggaaatagatacaacagcagaaaaggatatacctctgcttccccggttaccatatggaaagatttttacgttacagacatacaagttacagcacaagcagttttcatatgcttgaacatctaatgtcagcggtagcacattaaccaaaagtaaagtaaaaatcacatcttgggagcaagccccgtatcatgcttgggaacatcagctaatatcagtcttaaatcacatttcaggaaactgaccggcaagtcatcctttcctactcgctgatccctaacagcagcttgctttgcagt

SEQ ID NO: 38361 - DNA, 456 bp, Oryza sativa
  Clone ID: uC-osroM202001a07a1
tgtgttttttttttttttttgttttaatataaaggaacagtacccatataggaatcgcatgaaaaatccactacaggcctaatatgaccaccagtccaccacaatataaatctgagaccaaacaaatctttacctaaactcttgttcttaaattatcataggtaagcaggggtgctgaggaacgggagcgcggcgagagacatgagcatttccgtggcaccatcaggatgcttcccgtgctttgcctttgcaagctgaagctgcacgtccacgaaagcctgcatccgcttcagctccagatccttgaggaacttgatcctttgcctttccatctcctccgggtgcctctgcttagcgaattccatgcgctcgtacattttggcaaatgtttcgactgccctcgctagctccccgaacccttcgccggcggcggctcccctttccttttgctgctgc

SEQ ID NO: 38362 - DNA, 447 bp, Oryza sativa
  Clone ID: uC-osroM202001a08a1
ccagcaatagtacctcacactgctagtagtttattacgattgatcagaatggtactaatttacagggtaaaactggtgaaaatctgctaagccacaatgctgacaataaacaagatcaagccatgaaaggagggagtaaacagagctgactccacacaagccctgtctcacgaccattattaaacttaaatggaaaacctcaaacttctcatccattttttgctttcatttttggtttcttgtatgcactgaaactgcaagagagagagagagagagatagatcatcatcatctctactcatccatcctcatgacgcagcggagactctcccccttgagcatgagatcgaacgccgtgttgatctccgagaacggcacgctgtgcgtgatgaacttttccagcttcagctcctttttcatgtacagcttgacgactttgggcaggtc

SEQ ID NO: 38363 - DNA, 461 bp, Oryza sativa
  unsure (1)..(461): unsure at all n locations
  Clone ID: uC-osroM202001a09a1
tttgttttttatttggaagggaaattcccagaactcaaaaactccgccgcccaaaactccacaaataggaagcaaaggtgcccatctaacaaaaagatacaccccagatcctacaatcttgtggaacaaatttcaaactcgtcgcgaaacgttccttaaaatttcggacctaactactctcctgctcattggctgtctgtaaaatcagcatcgatgacatcaccttcctcgcctcctggcttctcggatgggccagcagagccagcggcagcatcagctcctggggtaggntcctgctcctggggcaccctgctggctgtagagggcctgccccagctgcatcacttcctggttcagagcagcgagagcatccttcatcgtctgtgtcgagccacctgcaacagcgtccttgagctccgtcagctttgcctcaaccttacccttcaattgcctgggacctt

SEQ ID NO: 38364 - DNA, 475 bp, Oryza sativa
  Clone ID: uC-osroM202001a10a1
tttggtttttttaggataagggtataatctcgttttattatcatgcaactaatttgcacccaaccgtggcatagactgctttgctccgtgtctccgtgcactagtaatctttattgttacttaaaggtggagactatcgacatggagattctttcatagactcctctaaaaattgatggcttttgagtggtacatcagtgctctaatatctttgggctatttaccatctccataagggggagaacactcgattccatgacacattagaaggccggtagctatcttcatagtgacttggaggtgaggaaccttctccatcataccttgaagatgaggaatctcctttatgatgtctccaaggggaggggcctctttcaatatatatcgaaggtgtgaaacctccttcattataacttgaaggcgggtagtatccctgataggaccctgaagttcggggatattgattggaggattt

SEQ ID NO: 38365 - DNA, 275 bp, Oryza sativa
  Clone ID: uC-osroM202001a11a1
tttgggtgttttaaacttggggggttatacaagttacctatcaaaatacctgttgacaaaataattgcgtttttgcgaaatttactctcctacaattgaaactgaaatagtttagactatgttcatagccatactcctattgacaatcaaatgtttcactcttactcatattaataatggtattttgcacaaatatatacaatgtgcaatttgtcaatgcagagagtggcttttaatctactaaaccaaacttggctaatggatttgcaataaaa

SEQ ID NO: 38366 - DNA, 316 bp, Oryza sativa
  Clone ID: uC-osroM202001b01a1
ccaattggcaacgaaccaagctcattcatattcacaagttgataaactcagcacaatcacgaggaatcaatagaatacctcgtcttcttctgccaataagtttacctagcggctatcaacagttcaatgagataaaaaacgaccgaccaacctagttaaacacttaaagctcttgccagattgaggcagagaaaacaatcggttaactctacttatacccattaggtagggtaaacctactaacatcatgtccaaactccccacatattcacggcgcaggataaagaacaattggtacgtttccttacttacataa

SEQ ID NO: 38367 - DNA, 499 bp, Oryza sativa
  unsure (1)..(499): unsure at all n locations
  Clone ID: uC-osroM202001b01b1
atacaagcttttttacgacctaataagaattgaatgcgatacaaggatgagctaacaattttctatgagaatatcagataacgcttgccaaaacgccttattgttttgtcgccaaatgaacacgaatgccagaaaacgataaaaagaaaaaggaaaaggaaaagtgtagaagacattcaaaaagtttatacatgttacacgtatatgaatctgcgcgatccgtatgagattgtcgggtaaagatagataggtgatcaagactcggacttatcaggtggggttcccaccagccagccccacatgccactggaactttgcctttgctttgcctccaacgctgcttgctcagaggcagccttctgtcttcgaagcagctcaacctccctttccaatgcatccatactctggagcttctgccgtagctccgcaacatccacctcaagtttgaaacatcttngactgtcagcagcaagttggccacggacaggttgaagtttct

SEQ ID NO: 38368 - DNA, 450 bp, Oryza sativa
  Clone ID: uC-osroM202001b02a1
ggcgccgccgccattggtggtgtgcggcgaggcggcggactcggggtcgtcgtagatgtggttgaggacgtccttgacgatgctgatgagaggggtggcgccgatgccgaggccgatgaggaggaggacgtcgtacttccagtagtcctgcgccggcgcgccgtacggcccgtcgatcaggagcttggggaaccttgaatggtgctccatggacatgcagtcagcccggaggaggccgctctggccgttcatcggaggcctgcatatctgagagaagatggccctgaagctcgaggtccagtcaccgcggcaccggatatgcatgctgagatagctgtcgtcgggagccgaggtgatggtgaacgggtgccactcgaatggcgagaccttgccgcagttaacatagatgtactggccactcttgtacttgaacccatggggcttggcatg

SEQ ID NO: 38369 - DNA, 389 bp, Oryza sativa
  Clone ID: uC-osroM202001b03a1
gttgatgggagaaaaatatatgatgttcaagtagatggtcatcgtgcttattcaactatcaacatgtgcacaggtatcttacaatataaataattgtacaccaaaaagaatgccttcatcgagcaccggaggtcaaacaggaagctacaaaaagcagcagcagtgtcgatgcagaaggaaaatatgatgattctgaaacgtaattcacatttacaacctcacgcgaagcaaaataaattgccccaactcgcttcgaatattctggtgatattttattggtttacacgaatgtgatcctcaatttacagcactttacctagcttcatcttctaggttgcggaatccggttgtgaggtcatcatacaatttctggaattttgcgacttgga

SEQ ID NO: 38370 - DNA, 476 bp, Oryza sativa
  Clone ID: uC-osroM202001b04a1
gacgccgtcaccaacttccgcccgctcgccgaggccgacccggacgccgccgccgagcttcgcttcctcgccacgcgctccaaggccgaggtggacgacatgctccgcaagcacacctacttcgacgagctcgcgcagagcaagcgcaccttcgccgcctccacgccgtcggccgcgaccaccaccgcctccctctccaacggccacctctcgtcgccccgctcccccttcgcgcccgccgcggcgcgcgaccacctgttcgacaagacggtcaccccgagcgacgtgggcaagctgaacaggctcgtcataccgaagcagcacgccgagaagcacttcccgctacagctcccgtccgccggcggcgagagcaagggtgtcctcctcaacttcgaggacgccgccggcaaggtgtggcggttccgggactcgtactggaacagcagccagagctacgtgctaaccaagggctggag

SEQ ID NO: 38371 - DNA, 417 bp, Oryza sativa
  Clone ID: uC-osroM202001b04b1
cttcttcttcttgtgtgtcagttggtctagccttctagggctatgcttcattagtgtacacttgggatgaaaagatttacagcaaagcaagcaagaacatgggcgaataaattaacaaaaaaaaccaagtgagattagtagataggatcaacaagggactaagctagctaccacctgaattatgatgcatgggagcaaaaaagacactagctagagaagatcgagctaatagtgctaactctatactagtgccagctctatgcattgcttcttgaacgccgccgcttggtggaggcgtcgtcgccgccaagtccctggctctcttgcacccggccatctgttcgaccggcgccggcgccgtgagcaggtccacgccgaagagcctgacggccttcaccggcgacggcgctggctgat

SEQ ID NO: 38372 - DNA, 566 bp, Oryza sativa
  unsure (1)..(566): unsure at all n locations
  Clone ID: uC-osroM202001b05b1
atcggaagcaggcgcggtggctttagcggaagcggcagtcgccgtaggagcggatcgcgatgggagcggagtgcaagtacgaggtggcgcaggtggcgtacgtcaagctcgcgctgcacgccctcaagcaccccgccgccgccgtcaacggcctcctcgtcggccgcctcctcgacggggccgcctcccccgccgccgtcgtctccatcgccgacgccgtgccgctctcccaccacccgcaccacctcccgctgctccccaccctcgagctcgcgctcacgctcgtcgaggaccacttcgccgcgcagggctttcgcggtcgtcggctactaccacgccaacgcgcgccgtgacgacgccgacctcccgcccgtcgccaagcgcgtcggggaccacgtcttccgcaacttcccccgcgccgccgtactcctgcttgataacangaagctggaggaggcagtcaaggggaagagtcgcgagccagtcgttcagctatacactagggattcatcaaaaagcggccgtcaggctgcatcagatggaagtagtcagctgactttaaaaga

SEQ ID NO: 38373 - DNA, 430 bp, Oryza sativa
  Clone ID: uC-osroM202001b06a1
tttgtttttggagaacttagggtcaactctccttgaaaaaattgcagggggaagccaatccactaacatggctatgaaacactgttgctttccactacccccgcttatacaaatacatcatatatctgaagacattaccaacagatatattccaacataaattccggccctactatgaacatacaaacagcatgagatagccgctcctcacacagtgtttgcactggaccgagatagacggcatggggagctcatttggcacttttgctcatgttagtcattgggaacctggctgcaactggcaacccttgacgtcgcgctatttagactgggtggcggataagcttggcaggccaaaaccattgttggtgagggcaggcttcacctcggtgtactttgcgggtattgagacccgaatcagggttttacc

SEQ ID NO: 38374 - DNA, 380 bp, Oryza sativa
  Clone ID: uC-osroM202001b07a1
tttgttttaaatcataatatgggcaatccaatcatcagtctgtgggtgttgaacaatccctccatatacctctcgtgctgtaaagtgtacagcaaagctatctgccaacatccccgtaggagtaggtatgtatcaatctatctgtacagactataaagaattcaacaagctagtagtcaccctgatattcccgtagctctatcgttcgtgtacagtttcaggaagagagagcgtgtcggagccttcgtacttgctctgggcgggagtgttccggcgagattgacgcttgggtcggcacgattcacctcctccatcccgacatcctcggatattgacatattgtcctcctcctccctgcctttgaacaccgggtgcaggta

SEQ ID NO: 38375 - DNA, 569 bp, Oryza sativa
  Clone ID: uC-osroM202001b07b1
cttcgatctccttcctctcaattccatccatcgtctagtcttcttcccaaacccaacaactccatcttcttctttgcttcgcccttgatttgtgtgctgcgtgaacaaggcctgtctagagggcagccatggccactgtttctgacatcggcctctccgcggctatcaacgtctcgatggccgttgcattcttgctggtctttgcttttctacgattacagcccatcaacgatagggtttactttccaaaatggtacctcagaggaatgagagacagccctgtttcctctggtgctgcagtgcaaaaggttgtcaatttaaacatgagatcatacttgaaatttttaagttggatgccggctgctctcaagatgccagaggatgagttgatcaatcatgcaggccttgattccgctgtctatctacggatatacctaacagggatcaagatattcgttccaatatccaatttagcttcgcttgttctgttcctgtgaactggacaaatgacaccctagacagcatgaaggtagtccacagtaaaatggacaaactttaatatcaaacat

SEQ ID NO: 38376 - DNA, 463 bp, Oryza sativa
  unsure (1)..(463): unsure at all n locations
  Clone ID: uC-osroM202001b08a1
catctgctcacacttgatgagaagaatccacgccgcatctttgagggtgaggcactgcttcgccgcatgaaccgttatgggctccttgctgatgggcagaacaagcttgattatgtccttgccctcactgttgagaacttcctcgcaaggcgtcttcagactcttgtcttcaaggctggcatggccaagtccatccaccatgctcgtgtcctgatcaggcaacgccacatcagggtcggcaggcaaattgtcaacatcccgtcgttcatggtgagggtnntgagtctgagaagcacatttgacttctcactgacaagcccattcggtggaggcccccctggtagggtgaagaggaagaaccagaagaaggcaagtggcggtggcggtgacggtgaggaggaagatgaggaatgagaacagaagtttgcaactagttgtttccgtaatgatcataaaactctgg

SEQ ID NO: 38377 - DNA, 456 bp, Oryza sativa
  Clone ID: uC-osroM202001b08b1
ggtgcaacttcgaatccataaaaacattaaaaacagcattggtacgagtgagtatcactagttcaagcgcactggtacgatgaggattaccatgaaacgaatccataaaacagcattaaccacaagtctatacctaacataatgccaaaaagggttaacataaaccaacacctgaagcacaacctgcttgaattctgaatcccagataggcaagctacagaatttgggcctagttactcagcacagagttttatgatcattacggaaacaactagttgcaaacttctgttctcattcctcatcttcctcctcaccgtcaccgccaccgccacttgccttcttctggttcttcctcttcaccctaccaggggggcctccaccgaatgggcttgtcagtgagaagtcaatgtgcttctcagactcaaccctcaccatgaacgacgggatgttgacaat

SEQ ID NO: 38378 - DNA, 461 bp, Oryza sativa
  Clone ID: uC-osroM202001b09a1
tgttttttgagtgaaaccatgggatgctgtagtaacacagacgctaaagatcgcagcattacaaatttacaacacaatgatgaatccatgaataccaaacctaactcgaataggctgccagatacattatccatacaggctacttggaatccatggtaataacgacgcacagtttgcccaaatgtgagaataacctgtttgagaacaatgcaactcgtcttcgccacagaagttatcgagatgcttaattcctaatgcccggtgtattaaatgatacattaagataaataacaggctggcagccttagtttcaggttagtctgtgaaaacgcaactggcatggcaatgaacgcatgttccatacttcaccctactccttactgctgaaatctttgtcaatctccatctgcatgaatttactagtcccacaagaacatcatcatcatcaccgccctcatacc

SEQ ID NO: 38379 - DNA, 558 bp, Oryza sativa
  Clone ID: uC-osroM202001b09b1
ttccgatgttctattgtggacagattgtgccgattgttttctaggaaattattcagacggagtgaaactgggttgagtgtgatctgctatcagtttgaaaagtttgggggatattcatattttgagaagattcatggtgtcctaccatggccccaagaaagagcattctttttaaaataggagtatacatcgtttcatctgtttatgttggatttcgtttataaatcctgagaggatgggctgcatatgtggggaatatgacagacagtgcgggatgctggttgtacagcgaagtgaaagagatatcaattccatctgcgctgtgtgctttctgcagaaacttttggaaatgttgtggaactgagctagtagtaagagaaaatgattagaagaataccaaccatggtaacatctgacaggagctgccctgtaagataaacactgatgacctggtttctatctctggctacttgttggaagaaatatactctacaagcctgcacctggcatgtgatatcagcactagagtcatttatatacaaaactagagcgtaataa

SEQ ID NO: 38380 - DNA, 466 bp, Oryza sativa
  Clone ID: uC-osroM202001b10a1
tttgtttttgaatttagacacaatatttattgtttttaataaggaagatgaattacatccccggcctctgcatctagcatgcacagagccaaagttcttgtaactaaataataatgatccagtaaatagtacaagaatatgagcacattacaaattaaatagaagcaatcactaataccaagctggcatattaagaaaatgagactcaaaacagtacttgacctaaatatgcatcaaaatgaatgttcattgttcttagggaaatcagtcttcagacagcttttgtagcgcctcgtggcattcactctctttgaagctgttgtgcgttgagtacatgggggcatcagcgagtacagctaaaaaagatggatcaaattgtgcggtaaccacctgttgctcttggtggaattcagcaactgaagcatcattttcacaagctggatgatctattctgaaagatgcttgc

SEQ ID NO: 38381 - DNA, 412 bp, Oryza sativa
  Clone ID: uC-osroM202001b11a1
ttttgttttttgccgctaatggtcgattttaaatttggcaatttcaggggtcaggcaatacagaaacggtgcttgcgattcttcgtacaggtgcataccccgtttctacgaataaatcatatatgtcaagacgtttccaaaagagatattacaacatttttccgtccctactatgaacatacaaacagcatgagattggtgcttctgtcagctcctttgatcttggatgttctagacggcatggcgagctcatttggcacttctgtacatgttgtcaattgttccctggtagtacttgagcaattgagggcgcttctttttatatgttggagtaatcaaatcacggtccatgtcaaatggcactggttcaagatgtacagcctttatgaattcaaaacctttgagctttttc

SEQ ID NO: 38382 - DNA, 450 bp, Oryza sativa
  Clone ID: uC-osroM202001b11b1
tcgctgacgcgtgggcgacgcgacccgaacacgagagaggagggaagcaagcaaagcaaagcgaagcagcgagagggagaagcatacgaagaagaagaagaagaggaagaggagggcatggagatgcagcacgtggtggaggtcgagcagggccgcgcggccgccgacggccggccctccgtgggccccgcctaccggagcgccttcgcccgcggcggcttcccgccgcccgtcgccggcctggactgctgctacgacatcttccgaatggccgtggagaagttcccagacaacagaatgcttggtcaccgtgagattgttgacgggaaggctggtgcatacgtttggaagacatacaaggaggcgtttgacctttcgactaagattggtaactctattaggagccgtggacttgcaaagggaagccgctgcggtatctatggtgctaat

SEQ ID NO: 38383 - DNA, 457 bp, Oryza sativa
  Clone ID: uC-osroM202001b12a1
ggcagaacataacagcaactctccttgaaaattttgtaatttgatccgcaacaactcagatgtagatgaaacactgctgatttccactcagtttacaatacaaatacaccgacagactgcctcaaaaaccaccaaattcattcaaagtaaaatgggtatgagtgatcttggccccaagagactgactaaacctaaccacagacagtggatccactggacccagattattcaaaaacaagatggctatgatggcattcctcctcaaaatcgaagggaacttgctgcaaaggcgatcctcacttcgcgctagcgagctgggtgcggatgagcttggcggccaaaaccatgttggtgagggcaggcttcacctcggtgtacttgcgggtcttgagaccgcaatcaggggtcacccagagaatgttagtgtcgagccccgcaagcctcttgttgatgcggt

SEQ ID NO: 38384 - DNA, 351 bp, Oryza sativa
  Clone ID: uC-osroM202001c01a1
aaaaccaaacactccactgaccttgaccgaaaaaaatgggggctcagttcgcaccacaaatttttttttctagacaaaaaaggtgggcccaaaaaaaccgggacgacccttcttataaccccaaatgggtgggggcatttcatttcatttcagaaaaccaacttaaacgaccccaatttttttaaggtcagcatccgggggctcattcttaacttgggggggtgggttggccttcgggggggaatggaaacccatttcactggtgaacgtttgggtgcatgactggcaagaaaatgccccccccccgggtttgggggacttcccccgtgacttggcattcacgggggtttt

SEQ ID NO: 38385 - DNA, 478 bp, Oryza sativa
  Clone ID: uC-osroM202001c02a1
tctcgcctgttacgcccgttggcaagcggcggatgttctggacggcgatcaaaccgaataacaccagggcttcgctagtcatgacgacaataatcctcctctccgtcgtgatcctgctcctggcggcggcggccgtggcggcgctcgtggtgcgaagccggcggtacgccgaggaagaggaggaatgggagatcgagtacgggccacacaggatcagctacaaggacctccacggcgcgaccaaggggttccgcgacgtcatcggcgccggcggcttcggcagcgtgtaccacggctgtgctgccgaggtccggcgtggaggtcgccgtgaagaaggtgtcgcacgactcgcggcaggggctgcgggagttcgtgtcggagatcgccagcatgagccggttgcgccaccgcaacctggtgcagctgctcggctactgccggcgccgcggcgagctggtgctcgtctacgactacatgg

SEQ ID NO: 38386 - DNA, 404 bp, Oryza sativa
  Clone ID: uC-osroM202001c02b1
acaaaaaaaaaaaggggatccatatttttttttcttcccttgcaaaatttcttacacggttcttgccttcttgcaggtgtacatttttctgaaactgcaacaaggtaacttctaagctgaatgctgtactaatctttgatcaaaacctctatttgatcatatctgaaaatgattgacagtatccctatgttactaactccagaagatccaaagcccaaacaatcacctaatgctgcaagtatttgctcactgacatttttacattttaagttgtcttcagaaaatcggcagtgctcaactgaacacagccaaccagccgctgctgttcgtcggtggactgcgtcgtcgacgtggtgatctcccacgtggacgggaagccggtgacgaactcgtcgaatgactcg

SEQ ID NO: 38387 - DNA, 441 bp, Oryza sativa
  Clone ID: uC-osroM202001c03a1
cagccaaagcccagtttatatatcaccaaacaacatccatcatccaaccgttttattgataggcaatcagcaaacaatcatgtggacgtgccatcaagtatacacaagcacggtccgtgcaaactactcagcttttgttcactacaacaaagtacacagacgtccaaacactttacaaacattttaggagaaaattatgccgcaagttactgtcaaatgagtttgctcatatgaacacagcgattgaatgccctcctctgcgagcagccacaccaagaaagccgatagcgaagatcacgcatgcaccaaggaactcaatattctcattggatgaacagaaggatgactgcccaggagcatcagattggttgactagttgaggcattggcatttcttctttagcgaaaacagatggaagggccggcgactgaagttgcatgg

SEQ ID NO: 38388 - DNA, 538 bp, Oryza sativa
  Clone ID: uC-osroM202001c03b1
ccctcctcctgccgcgatccactcctgctctccagctcagggaatccacctccacccgcagagaccaaccagcagctgtccgtcctctgcggcggcggcggcggcggcgagatggggcaagctctgcggcggctcttcgacgccttcttctccaccagggagatgcgggttgtgatgcttggtttggatgcagctggcaagacaacaattttgtataggctgcacatgggagaagttctttcaacggttcctacagtaggttttaacgtagagaaggttcagtacaagaatgtggtatttactgtgtgggatgttggcggacaagaaaagctcaggccattatggaagatgtacctcagcaattctgatgcactgatctaacgttgttgattcattggacagagaaaggattatagacgccagacaagaatttcagaccattattcaggacccactgatggcaaacagcataatcttagtatttgcaaacatacaggacctgagaggtgcgatgagcccagatgaggtgagcgagggg

SEQ ID NO: 38389 - DNA, 359 bp, Oryza sativa
  Clone ID: uC-osroM202001c04a1
aaagctcagtaaaaaccggtaccctcccaagaatagactttgtagcaaacattcaactgtatcatatacatcttttctttttcgttagtaacttgcaactaaaactggggttacctggagtatgcatgattgaacaaggcagtccacctgctaactcaagaggatttttttcatcacatcgcatcaaagagcgaaaaggccttattaggattagggctgaaagcagcactagggagggcaagttggggtcaaatgtatgaattgttcagcgccttagcgtcgttttttttttggaagagggagtttcccacaagagcagacagtaatttagtccataaaaccattttaattggattcca

SEQ ID NO: 38390 - DNA, 568 bp, Oryza sativa
  Clone ID: uC-osroM202001c04b1
ttccgtctccgcctccgccgccgccgcctcctccatcctccagtccctccccctccacgtgtccttcgaccgcggcttctacctcctcgtcaaggcgatccaggagctgcgtgagcgcaaggacggcctcgtcgtcaccgtcggcatcggcgggccaaccggctccggcaagaccagcctggcggagaaggtggcgtcggtgctggggtgcgtcgtgatcgtctccatggaggactaccgcacggtggccggggccgacgacggcagcgacgttgacgccatcgacttcgacgccctcgctcgtaacctccaggatcttgtaaagggtaaagatacattgatgccattggttgattttcaagagaagaaacgtacaggatggaggcaactgaagatttcgccatctggagtggtgattgttgatggtgcttatgctcttcattcaacactgaggtcactgcttgatattcgtgttgctgtggtatggtgtgttcattttagccttctgtctaaagtccagcatgatatggagattcttgctcgtggactattgatggaagcatatttc

SEQ ID NO: 38391 - DNA, 366 bp, Oryza sativa
  Clone ID: uC-osroM202001c05a1
gactacagaaatgataaatttactacaaaaaatgtgcaatcctttctgcactgttttttaaggatgtatgggatacaatcttaactccaaaatataacaaatgacaaacagatacatgtaagaatcccgtattgctatccagcctcaccgtaaattaaaagtaaaagaatagtcatcctctattcaaaaatcttttcgccagtggagaaaatcaaaaaaatgatggaactgaaaatacagaggtaccctggaacaaagaagactgttttccaggttttctgagtttgtcagatccatgttagaagcctttgccccctccagaatactttccgttaggccaacaccaactattccagccaatgtccc

SEQ ID NO: 38392 - DNA, 467 bp, Oryza sativa
  Clone ID: uC-osroM202001c06a1
gcccggtgccgtcgccgagccgcgtcggcgcgtctcgcggcagcgacagcgcgcggcggaggaaccgcgtgaagtccggcgtcgccagcccgtccaggctgcgctcccgctcgatgatgagctcccggtgcgcgcggaggctgacgacggcgctcgggaagcagtgcacctcgccggcggcgccggccttggcgaggtcgatcggcgcgtggcgcgacagctcgcggaggagcttgtcgtacttgacgagccaccacgacgccacgttcaccatcaccagctgcaccccgccgcggtagcgctgcacggtgtttgtacagcggcacgatcacgtcggagaagtcgtggaagatgttgcccgtgtacccgccgatggagaacgccacggcgggcacgtcgtgcgccccgctgcaccgcggcgcgcccgccgggtttcccgtggcgcgcccgtgatctccgtgacgcgc

SEQ ID NO: 38393 - DNA, 442 bp, Oryza sativa
  Clone ID: uC-osroM202001c07a1
caatataaattgggcataactgcatttcatatacacatggtccccttttattaatgggactcaaattataaatctaatctcctcacgtacatgcgaaccacacgtactacctaacaagaaaatccagtgcacaatgataaaaaagagacaagaggagttgacacaccgtacagccatcaaggaggtgcatatatatggccaagtgtattttgtcaagatgccacctacttctcccctcctgtccacttgtccaccacctcatcgagcgctgacgtggcggcgccaccgttctcggaggccatccgtcgccatcttctgtagctcagctaccttagcacgcaccgtcgcgcccctcccttcccctaccattaatctccctttcgaccgccgcgatcttttccttccccttggactcgggcacccgtatggcggccccggcgcc

SEQ ID NO: 38394 - DNA, 452 bp, Oryza sativa
  Clone ID: uC-osroM202001c08a1
aataacaagacaaacagctcatgtattattgtctaatgtctacaccaagcggtccataacacccgaaataacaccttgcaacattattatccaagatcagcaaattgcaacatacaacatcagttgctagagaagaaacatgcaacaatggacagcttcctgcacagaaaccccccctacttctgtctcttgtagatcttgtgcaagaaggacttcagaacattctgaacagctatgcttggctgggcttctatatccgcaatcaacttcttgtaactctcgttctcatagtccagaaagaccgcctctaggtttagttctctgtagaggctcttcacttttgccacacaggctggatctttctttccataatttttaaatagaacgctcttttgactctcatcagcacgcttaagggcttgcacaactagccaagagcatttgtaatcttc

SEQ ID NO: 38395 - DNA, 419 bp, Oryza sativa
  Clone ID: uC-osroM202001c09a1
ggctcgcaatggtgacatgatattattctcagaagtcgcaagtatgacctcaagcaggtgatattgtgtgttacatcatacctcctatacattgctggatggaacccagtaaaatgaactcattgcaatagcgggagaaggctaggggggaaacatgatatgaagtgaaggcaccaaacagctagcggaatagagtgcaacttggcctccatataactgcctacagagcctatctatgggctagccaggtgtttcaggaagtagtggattagaacactcccccgatttgtctactctttcttcaggattaaaaaagaacccagatctaggtttttacctttggacctttgcggtaaggatacatgatattatccatggtggctttaatgtaggccccaacttttatttaagttccttgc

SEQ ID NO: 38396 - DNA, 432 bp, Oryza sativa
  Clone ID: uC-osroM202001c10a1
gcgtggtccgcgcccgtgtcgccgcgcccggagccgcccgtgctcgtcatcccggcgcgcgcgcgcagcaaacggtctaggccgtccgcgttcccggctgtccgcggcgcgccggcggcgacggagaccaccatcctggtgccgacgccaatgtactcgtccacctcgtcgcactcggatcccgagagcattgccgagtccaacccgcacccgccgccgatgaagaagaagaagaaggccaagaagccggccgctccggccgccgcctctgacgccgaggccgacgccgacgcggcggacgccgactacgaggaaggcggcgcgctcgcgctcccgccgggcaccgtgcggcggtgcacgcattgccagatcgagaagacgccgcaatggcgcgcgggcccgctcggccccaagacgctctggaacgcgtgc

SEQ ID NO: 38397 - DNA, 471 bp, Oryza sativa
  Clone ID: uC-osroM202001c10b1
cagagcataaaggaatatatctcctcaaattggatgatcacaacttgtacagagggaggcaccaccaaccaacaaggcaggagaaacagaaaaaaggcatatagagatatataattaattgctacaaagtaattgctagtatagaaaccaaataacacttatcaatccctagacatagatgaactgcaaaaagaatttttcggagttcagtacatcaagctccaatataaactatgatggatgtcccccctgagtagctactagcaagaagaaacttctaattagcaaaccaacaaactccacttcctcatcaccccccttaaaaaaaacacatctcattttcctcctcctaattgactgactgactagctgcaaagttttcctctctaaatctgtctccctctgctgctggtttagctctccttctcacctacctaattttgcaagcaactgcaaatctgcaatgcaaca

SEQ ID NO: 38398 - DNA, 387 bp, Oryza sativa
  Clone ID: uC-osroM202001c11a1
aaacaattaatctttgtagcaccagggacaattattccttacatagttacacgtgcactcgtggcaaacaaagaacatggataagaatcggaatgaacttccgatggtctggcactcggggcattaagaaaaatgccgtacaactttgctcaagtaatcaacatatctgtcaaatctacacaaaactccttttgctgaggatatggcttccccccaaagaattaacctattggacatatttatcacgccagaataacacgctaattacaaggctcaaacttacaacacaacacatggatatggactactcgttacgaaataagttattatgcagcagctgtagtacacaatacacagcgcatttgagactcgcctgatggggtacct

SEQ ID NO: 38399 - DNA, 402 bp, Oryza sativa
  Clone ID: uC-osroM202001c12a1
aaccacggaaactctctgaagaatatattttcaggagtgaaaacacaaagcattctgtagtaaagatccttttattctcagccagccgtatacagtacagggctatttttctggacaaggatacaccccccatattcttacactcaaaagtatgtgatatatctatactttgctgcacacagagatccagatcacaattcttgttacaagcaaaaaaccacaactctgaacatcatttagagtttcaaaaagatcaggctgcagcaacatgagtgttcttctttttcattgttcttgcactccctgctcccttccactgtctcagcgggcttctcctcaatgggcttgttgtgctcgatgcccttttccaatgtctgtgcaggcttttcttcaatggcattc

SEQ ID NO: 38400 - DNA, 461 bp, Oryza sativa
  Clone ID: uC-osroM202001d01a1
gttcaacaatgaaaggaccagttccataaattccgcaaagttgtgaagaaataaaaatacaatagaaaatatgacacaggaattccctgatggctaggatagccaatatttcaggacttatttccaataatgaggttgcaatgtagtggtgccgctagctcatctgtcataaactgatcatttgttggagtgtggctgaacacagactcaccagacagatattacggcaaatcaagtaagtttctagtccttgacgcgcaactctggaacatggtgcatcttttgttgcattccatttttttcccactgagatctgaaattcttatgcagacccaaaagccacagcttcttcaggtacctaagggactcaatgccttcaggaatagtgtccagctttgggagtgacactacatataaacctttaatatgctggagggcaccgcctatgatctccaaatggt

SEQ ID NO: 38401 - DNA, 443 bp, Oryza sativa
  Clone ID: uC-osroM202001d02a1
aaagaagccccaacatggcttggaatatgtactatgatgcttcaccgaaccgaattccacataaacacccaagctgaaacgtttttcctccttgggtagtttgggtttgcgttcttggtgttcttttttcacctgcctgcatatttgtctcgggagtctaattaccacgcaaacacaggacgacatacaaccggggtcttcaccctactttcttacagccaaacaggggttttttccaggttcttatttttaactttgttggttcaggcgacggtcggggggctaagctacatccgagggatgtgcatctgtcggtacgacgagttgtccgctggtggcggtggaggcggcggtggcgacctcccggctccgttccattgaccaaatagcctcctacccggggcagctgaatgatccgtcacgcatgggattgcggcgtgctg

SEQ ID NO: 38402 - DNA, 442 bp, Oryza sativa
  Clone ID: uC-osroM202001d03a1
aagaaaatacagattctggattaattaactagcatatttaaatttaaaacgtaactgtttgagcaaataccacgaaatgttcaggcgctaagatacggcaataccgatacatccagcatagcaaaaatggcgaagagcacagagtcagataaagctatagagaactagggctccaggagatgggggccgaatgacaaccatggcgcttagtcgacctcctccatcttgctctcgccggcgtcgtcctccagcggcggcatgtcggcgtcagcctcagcagacctcgtcctcgtcgatgctcaggccgagcttgagcatccggtggatcctggtgccgaaggtgttggggtcctcaaggctgaagccggaggtcaggagtgcagtctcgaagagcagcatcaccaggtccttaacagacttggcgttcttgtcagcatcggca

SEQ ID NO: 38403 - DNA, 183 bp, Oryza sativa
  Clone ID: uC-osroM202001d04a1
actattatagagctatgacggtgcatgcaccgcgtatcgtaatgctatggatacctttttttgtcaggccgcaatgactaccgtttcgccatggcaagtggctggatcagcatcgtgcatgtgatctgtgactggttgagtaccacatcaaagcctacatcgtacgattgttgtttggacttg

SEQ ID NO: 38404 - DNA, 131 bp, Oryza sativa
  Clone ID: uC-osroM202001d05a1
ttttttgttttttaattattttaatttttttatttttttttttttatttatttttttattttaataaatttgataaaaaaaaaaaaaaaactataaaaaaaagtatacaaaataaaaaaatttttggggag

SEQ ID NO: 38405 - DNA, 505 bp, Oryza sativa
  Clone ID: uC-osroM202001d05b1
ctctctctctctccatccgcgagaactcgtcgggatatttatgagcgctggtggagtggcgtggcgaggtgaggaggtggctgatctctctcatcaatctcctccgtcgcggtcgcagctgcgggagtgaagccgccccgcggagctagctaaaccctagccactgcccgggcggagagttggggtttgggttggtggcggtgggccggtggcggctcggtggcggagctccggtgtggggtggtgtgggtgagaattccgtgcgcagctgttttgggatttttttttctgttgcgtgtgcgggtgatgcgggattagtttgggcactgttgcttcttcactcgattttggagattttttcggggggttaactttatccgctagctttctgggggagtaatttggccttgcggtgaggttgtacgacgccgttctgatcggcgctcgggtccagttgcgtttcgattgagtgaggtttttctgttaattcggttggatttaagga

SEQ ID NO: 38406 - DNA, 455 bp, Oryza sativa
  Clone ID: uC-osroM202001d06a1
ggattccaaaccaatatccttaaaattaattcccagttccaggtggacagcattcacggtaaaatcttacatgaaaaatactcccaaggtacatagcacatttaatcagagcttagtggtctagttcatcgagaagtccgaagatataaactgtcatcaggctaagacagacaatgtgcaaccgcatccaacagaaatagctgaagcagcatagctatccagcaacaaaacagaagtatcggaaaaccaaaaatcggcatgcagcgtgtgatgattcctggcatgaagtatttaacctatagcgatcacggtcacgctcggctcctcgctcccagctcctttcatagctggggtctctgcccctgtcccttcctcttttcttctcacggtctttacttttacttcggctttggggccgcttttttccatgactgcctctatctttggtcctgcta

SEQ ID NO: 38407 - DNA, 127 bp, Oryza sativa
  Clone ID: uC-osroM202001d07a1
tttgtttgtttagattttattttttttttttattttatatttattttttaattttttattttaataaataaaaaatttcaatattttctaaaaaggttcaaatacaaactaatatacttatacaatc

SEQ ID NO: 38408 - DNA, 427 bp, Oryza sativa
  Clone ID: uC-osroM202001d08a1
catcgcagattattgttccatctttattcattcacaaaagtagatacagccagtgccttggagagttggaggttcgagcatcttggcctacaatgctcttgctaacaattctggcgaatgaaaaccaaaaagagctcaagtgtgaaagtttaaagatacatggcacaatattacagaagttgccgtgacaaagtgatctacgaacgaattatgctcacccgacagaaagaataggaccggactatatataactacagcaaaaaggccacaagtttcaaaacatttcaatttattcaagctgcacttgagagaaaacatttgatttttctgaacatagatcagtgggtagcatctctgctgtagtactgatccaatgtcttcgcagggatacgatggagaagctcaccagggaatatgccaagcaatg

SEQ ID NO: 38409 - DNA, 557 bp, Oryza sativa
  unsure (1)..(557): unsure at all n locations
  Clone ID: uC-osroM202001d08b1
ttcgtcgccgatccgatccgcctccgcctccgcctcgcggcccggcctgcctgcctcgccgccggtggtcccgatccgaggttgctcttgctgggcatcaaacatgggtctggtgaaggatggcgccgccgatttggaggaggggaccctggagatcggcatggagtacaggactgtttctggtgtggcaggacctctggttatcttggataaagtaaagggcccaaagtaccaggaaattgtaaacatccgattgggagatggcaccactcgccgtggccaagttctggaagttgacggtgaaaaggctgttgtgcaggtctttgaaggcacttcaggaatagacaacaaatataccactgtgcagttcacaggagaggtcctgaaaactcctgtctcacttgatatgcttgggcgcatttttaatggatctggaaaacccattgataatggcccacctattttgccagaggcctacttggatatctctggaagttcaaataatcccagtgaaagaacctatccagaagagatgatccanacagggatatcaacca

SEQ ID NO: 38410 - DNA, 330 bp, Oryza sativa
  Clone ID: uC-osroM202001d09a1
atagcacccactgtatcagtctttattatctctttcccaagacacagcaaggcatattttcaggattccagatacagtttcacaacttgcgtcaccagtatacatatcaccgtatcacattttattcacgactacggctggtcgacacattacagttcatgtttgactgtccaacatagcaccaccactggattcctcctggccgatctacatgtttggtttcaggttgagacgtgaagccagcttctgcccaagggacgcattacactgcgaccagtaggaggatccagatgccccggagttcatgttgtaatacggaggatctgagag

SEQ ID NO: 38411 - DNA, 585 bp, Oryza sativa
  Clone ID: uC-osroM202001d09b1
tcgatctggagaatagttgatttcttttcacaccacccagagagcctgcacatgttctccttcctctttgacgatgtaggcatcccactcaactacaggcacatggagggttttggtgtcaacacctacaccctaatcaataaggatggaaagcctcaccttgtcaaattccactggaagcctacctgtggtgtcaaatgcctgttggatgatgaagctgtgactgttggcggcacctgccacagccatgccacgaaggacttgactgattctattgcagcagggaattacccagagtggaagctttacatccagactattgatcctgatcatgaggacagatttgacttcgatcctcttgatgtcaccaagacatggccagaggatatcatccccctgcagccagttggacggatggtcctgaacaaaaacattgataacttctttgcagaaaatgaacagcttgctttctgcccagcgataattgtccctggaatccattactctgatgataagctgctccagacaagaattttctcctatgctgatacccaaaggcaccgtcttggcccaactatttgatgc

SEQ ID NO: 38412 - DNA, 356 bp, Oryza sativa
  Clone ID: uC-osroM202001d10a1
agcaatggaaaaacccgcattccaaaacagccggtggacaaaaatcggacccagagcatcagttttaacccaacagaaaaaaacggggtttaaacgaccggcatagggcccattgggagccgatattaacgggccatgaaacgagagccctggccgggggcaaaacttaacaaataccagaactggatatttcaaccggagacaggcaaaccccccctttgaacgagggctcacttttttttggggggagccctgggcaccctggccccggggggggcccttttctccacgttcttgatgaccccaacagcccccggttgccccaaggcacgcaccggaaaacgcccaaggggggg

SEQ ID NO: 38413 - DNA, 410 bp, Oryza sativa
  Clone ID: uC-osroM202001d11a1
gccaaaattgtcctcatattatacatataaatcatactataatacacagtcgaaaaaacctcttatggaactcaagaaagataaaagaaagggaaaaaaaaaagaaaagagagaagaaaaaaaaatgctgagctactaaaagcatttcatcttggtcatgtgtcaatattcttccagcaatattgctccttgaaggaacttctgtactactatatatgaacgaatgttgtgcctcatgaatacaggcgtttttggtgtgctgaaaatcaccttcttaccacacatctctcagatacctaccctccgtttggaggctcttcacaaagctctcagccttagagctgtcaagtgatccctgttcctgtacaatggtgtggagaactttatgtacatctttggccatgcctttg

SEQ ID NO: 38414 - DNA, 526 bp, Oryza sativa
  unsure (1)..(526): unsure at all n locations
  Clone ID: uC-osroM202001d11b1
tcggtcaaggttgttgatgagctcctagttgagcaaggtggaaaacgtcttgttccggttggtcttggagatgatgatcaatgcattgaggatgacttcaacgcatggaaagaaactctctggccagaattggatcagttacttcgggatgaaaatgatgtttcaacaggcactacctacacagctgccattcctgaataccgggttgaatttgttaagcctgatgaggcagcccatttggagagaaatttcagtcttgcaaacggttatgcggttcatgatgctcagcatccttgccgggccaacgtggctgtgcgacgggaactccacactcctgcttctgatcgttcatgcactcacttggagtttgacattgctggcactggtcttacgtatgaaaccggtgaccatgttggtgtatacacagagaactgcctcgaggttgtagaggaggcagagaggttgttaggctactccccagagacttntttcaccatccatgcagacaaagaggacggtacaccac

SEQ ID NO: 38415 - DNA, 428 bp, Oryza sativa
  Clone ID: uC-osroM202001d12a1
atatacaaagattactaaattcttagtgtacaagataatgtaacaaaccgactagcatgagctggacaccggaatgcatacagccaaaaagatttcaagttatacactacacattacacatactcgtacagaaactggagcaaagaaacaaccgaaacaagctggttttaacttctgatggcgcagctaagcagatggtatttcttcttccagaagaagaaaaatgcctttcttcttggggtggctacttacgtgttgccatgatcggcatcttgagtcccttgaacttccagaaaccggcgctctgccatgacgacggcttcaccctgctcgccatcagcgctgaggcagcaccagcttttatatttcgcctcttcagtgcaagatccagcttggtctttgaagttgagcttgatgacttcgggaag

SEQ ID NO: 38416 - DNA, 436 bp, Oryza sativa
  Clone ID: uC-osroM202001e01a1
acttcagattatcataaacaataactcaaacgcaagtattgtgtcaacataattgatctttttaggttgattaattatactgaattactcggtgatcaatcgatcaacttaaatctttgcaaattcaagcgtcttcttgccctggagccggctggtgacgtagtgccggctgtactcgccgtggttgtacgtccggtacctgcgcggctccccgtcggcgacgagctccggcagcgggccgagctcgacgtcgtacgccggcgcgtagaaggtgacgacggacatgcggtcgtgctcgccgctggccaccgcccggtgctccacgcttttgtacctgccattggtgagcaccttgagcgtgtcgccgacgttgacgacgagggcgccggggacgggatggacggccacccaaccgtcgtcggcccggagcacctgc

SEQ ID NO: 38417 - DNA, 497 bp, Oryza sativa
  Clone ID: uC-osroM202001e01b1
atagattcttggagaactgggcaaattttggcatggattctggtgctgctgccgtctgcgcggagaaggcgagtgagatcatcaagatcggtcaggttgatgacgtgcaggagctgcagcgacgactgtgctccgccaccaccgtgccggagcggtacatcagggacggcgacgaccggccggatcacgccgtcgtcgacgacgagcgcgcgcaggagcggattccggtgatcgacgtcggcgagctgcagcgcggcagcgaggacgagctcgacaacctcaggctcgcctgcgagcagtggggcttcttccaggttgtgaaccatggagtggaggaggagacgatgaggagatgtagtaggcggcgagggagttcttcatgctgccgctggaggagaaggagaagtaccccatggagcccggcggcatccagggctacggccacgccttcgtcttctccacgaccagaaactcgactggtgcaacatgcttgccct

SEQ ID NO: 38418 - DNA, 443 bp, Oryza sativa
  unsure (1)..(443): unsure at all n locations
  Clone ID: uC-osroM202001e02a1
atgctgtgacaaagacagttgtgatgatgtagcactaactgatgatgatgatacatttgacatgcagttactctgtcccgaccgaggaatcgagtagtaactttactttttatgaagcaaaaccattctaactaagcagagaatgcatggaaaccaaacaccacgcgcagatggcatcctcttaattattattactagcacaaaacataaacataaaacgatcactaattactccataagttaattaggcgtcggcggcgaagccttggtcgntcgtcggcagcgttgaggagggtcggaggagcggcggttgggagcggcgcagttgttgcggatctcgccggcgttgccggtgaggacgttcatctggctcatcttgaccatggagcgtgcgaactggtcgaagaaggcggcctggttgagggcgaaacggacggcggtgc

SEQ ID NO: 38419 - DNA, 444 bp, Oryza sativa
  unsure (1)..(444): unsure at all n locations
  Clone ID: uC-osroM202001e03a1
gaaaatgtgggtcaattatccctctaaatgtgggtgttgcaatgttgtagtatagcacttcttaaaaactaaaagaacagttataaagaaaaaaggagtcctttttgctcctctatctctcagatcttctgatcgagcagcagaattgcagctcaggtgctcgtcggcgtcatcaccgccttctcctccttggattccaccttctcatcttctccggcgccggtgccattgccagcgccaccgccaccggcagccgcctcctccctgaagncgcgcgtagatgtccccggcagtagaacttcctggtccgccacgcgagcgccgtcatcaccaccgccgcggccaccgtcaccccggcgacgatcaagaaggaatccttgtagcacttcaccccaatgcacgttagctcctttttccccgccgacacggacaccgccccctgcc

SEQ ID NO: 38420 - DNA, 404 bp, Oryza sativa
  Clone ID: uC-osroM202001e04a1
cagagataagcgatgttactttgtttttaccaacatttacatacaagcggtacaacacatattgccagaaaccacttggttttccagccataatttttgacaattcatgacgcgcgcgcgcacacacaatgctggattcacagggtcacacagccatgagccatcagactggaagggctctgtttgttcatcacatagccacagatcgccttggcctttagcagttgcaggggttgcacttgcagctggaaccacagctgcagccatgggccaccctcaccagattcagcttgcttttgccaacttccttaaatttgcccctttttcaggttgcaacaccgaggacagtggtttgtagtagttagtggtgatggtgaatcttctcagccaggtcagggtacatt

SEQ ID NO: 38421 - DNA, 512 bp, Oryza sativa
  Clone ID: uC-osroM202001e04b1
ttcatttcatccaactatacaagttcctgaagagtttacaagtgacccagaagatcaagatgtcgtgcggtggaagttgcaactgtggttcctgcggatgcagcggtggctgcggaaagatgtaccctgacctggctgagaagatcaccatcaccactactactacaaccactgtcctcggtgttgcacctgagaaggggcaatttgagggagttggcaaagcagctgaatctggtgagggtgcccatggctgcagctgtggttccagctgcaagtgcaacccctgcaactgctaaaggccaaggcgatctgtgactatgtgatgaacaaacagagcccttccagtctgatggctcatggctgtgtgaccctgtgaatccagcattgtgtgtgcgcgcgcgcgtcatgaattgtcaaaaattatggctggaaaacaagtggtttctggcaatatgtgctgtaccgcttgtatgtaaatgttggtaaaaacaaagtaacatcgcttatctctg

SEQ ID NO: 38422 - DNA, 350 bp, Oryza sativa
  Clone ID: uC-osroM202001e05a1
agcacaagcacacagtgtattattattgattaagatatggtgattcttctccgatacaagcattacttagtctagtagttgacatatattaaagattaattctttgagcaagcatgcatattcccatacaagctagtatcagcatacttaggtagattgctggcatttgtaacagggaggagcagagccagagtacaatacttaagtcttcttcatccagctgttatacatgatgatataatccatcatcatccatgtgtgttttacttgaggaatgtactttgagcacacccgggtattatggatcctgtagaagtagtccctcccaatcgatgggtctttgggtcgaa

SEQ ID NO: 38423 - DNA, 454 bp, Oryza sativa
  Clone ID: uC-osroM202001e06a1
gctgtctgaatattttaaataaaagattaggcactcaggcaaactgatatccttattatttccaaatggtgcaaaaagctgaagtttcaatggataatttattatcaactttccaactgttaaagcaaaatcatacatattctatgcatgctatgtcgcagcaaaacctgatcgcataaccatcctaattcttctttgggtattctcttgcaccaaatatagttcgatccaactctaacatttgtgcttcccatttcaatcgcttgctcaaaattcagcagacatgcccatagacagttcacactgctcctctggaattccaagctccttgcacaccttttttcggcaattagccagtgccttgaaattctctggagttgaggagtaatcaagcatccctattgtcattaaacccggaaacacgagattcgggccgcctaaattgacatgcttt

SEQ ID NO: 38424 - DNA, 502 bp, Oryza sativa
  Clone ID: uC-osroM202001e06b1
gttggttgccgcggcggagggcgcggtggtggcgctccggtcggtgctgtcccgcgcgcagcaggcggcggcgcggtcggggcgggcgccggagtccgtgcgcgtggtggcggtgagcatgacgaagccggtgggcgtcatccgcggcgtgtacgacgccggccaccgctgcttcggggagaactacgtccaggagctcatcgacaaggcctcccagcttccagaggatattgagtggcatttcatcgggaaccttcaaagcaacaaggccagagccctcctagctggtgtaccaaatcttgacatggtcgagagtgttgatgatcagaagattgccaatcgccttgatcgtgtggtagctgacttgggaagaaaaccccttaaagtcttagtccaggtcaacaccagtggagaagaatcgaaatttggagttgatccatcaggatgtgtagagcttgcaaagcatgtcaattaggctgcccgaatctcgtgttttctggtt

SEQ ID NO: 38425 - DNA, 402 bp, Oryza sativa
  Clone ID: uC-osroM202001e07a1
gaagtgggacagctcccttctcttccttttatcatgtgcatatggttcataacgtaataatcatacaatcataaaccgggttccagggggtaaaactaggaaccatcatcttcccttttacactccacacatgacaccaagaactcaaccaaaactcatcgccaaaataggcggtctttttccctaggcggttctcctgagttttcagttttctagacagaagacagacataacaacatgaatctcaaaacgacaacgacaacaacaacagcaaggtaccgcaaacaaccaccgacaaactttgacgcgacaaaaccatggacattaaaaacattaccacaacaaaccaatgaatagacagaccagcatgggactccacccaaaaccccgttgctatttgat

SEQ ID NO: 38426 - DNA, 434 bp, Oryza sativa
  Clone ID: uC-osroM202001e08a1
ttttttttttttttttttttttttttttttttttttttttttttttttttttttttttttttttttttggggaacaaactttgggggaattttaattcggggaaaacggggcaaaaacattttggggcatgccattacccccaaagattttattcctaggtcttaaaaaggtctccgggcaaatgggccccattataccggaaccccgggtaacccagccctaaccggatttaggaggcatcggcttaaacgggctattgggtcgggcctttgggggacaaagtaaaatttgtgaccaagccttttaataggaccccagggcttaatcttaaagggatttgggggtcttccttaggagcaaaaaaccctcaaaaaccggggtcagggggagaaatttttaaattgccaactttggttgttcccctgcagcaagg

SEQ ID NO: 38427 - DNA, 452 bp, Oryza sativa
  Clone ID: uC-osroM202001e09a1
cagacataacatagttccttctttcaaaactcacaacaacatacaagagggtaaaaaaactgatggaaatgcaaaagaaaaatatggcacgacatacccacaaccgtgcacaagaaaaatacgaaacacaccaccaaccaagatctaagatacagtattcttttcttggaaaaaaattatgtacatagaagtagcatgcacagctggaggacagcaaataagaaatgacttaccgaagtcagagggaaaggggaatgtgcaatcaggcctgcaactcaacttgcttcctggattggttagaagcatttgcccgtggttttggatcagacttggcactggtggatctggaaatcgagttgctgttggtcgcgccctttgctgttcccccaccaacatagttggcagagataaccacttcttgactggagtatcgtttgacaagcttggttttt

SEQ ID NO: 38428 - DNA, 411 bp, Oryza sativa
  Clone ID: uC-osroM202001e09b1
ggaaaacaaaaaaaaaaactagaacaaacctttatttcataacttttttttcagatctttttcctaacttctaaggatgaaaactaccagtaatcctctttttgtttcttttttactactattacatagggttgggacaacaacagatatcagtaataatcataggatctaaataaataagaacaagcaatggagttgggaatcactcatcttcgtcgggcctgctcgcgaggcacagctcatggagctcattgagaatccactcctccccaggggggccacccaggacaagaaccctggtgccgccaaccacgcatgtgctatgaccccaggcgaacttgggtggctggccagggacgttcaaaatcctccatgtcggcttctcctccgctgggtcgaggaggaacagct

SEQ ID NO: 38429 - DNA, 329 bp, Oryza sativa
  Clone ID: uC-osroM202001e10a1
aaatatatcatatattcgattatatatatatatataatagcagacaggttacatccattagaactcagaatcaccggaattgaacatcaaaagtacaacacaagcagcagcagcatcagccagcagcaaacgacatgattacccacgcttttggatgaagaacaagaagtacgagaagaagaagacgatggtcgaacaccttgatcgagctcaacaatggcgatcgatcaccaatcacctacttggtgaactcgatggcccaggcgttggcgtagatgtaggtggccttgaagccggtgaatccggcggcgcgggcgagctccctgaac

SEQ ID NO: 38430 - DNA, 345 bp, Oryza sativa
  Clone ID: uC-osroM202001e11a1
ccccctgaaaatttgggaattggacccgcaacacctcaaatggagaggaaaccctgggggttttcccctcagtttacaaaacaaatcccccggcgggggggctcaaaaccccccaaattcattaaaaggaaaaggggtatgggggacctgggccccaagggactggctaaacctaaccccagacgggggacccccgggccccaggtttttcaaaaacaagaggggtttgagggcgattcctcccaaaaatcgaggggacactggtggcaaaggggaccctaattttggcctaacaagctgggggcggatgaacttgggggccaaaaccattttgggggggggagg

SEQ ID NO: 38431 - DNA, 475 bp, Oryza sativa
  Clone ID: uC-osroM202001e11b1
tcgttcggcgttgacaccgtgccagtacttgttggaccagtttcatacttgttgctctccaagcctgccaagggtgtagagaagtcgttcgctcttctttcccttctcagcagcatccttcctgtctacaaggaggttattgctgagttgaaggcagctggtgctacatggattcagtttgatgagcccacacttgttcttgaccttgactctcaccaattggctgcattctctgcagcgtacacagaactcgagtcggcactttctggattgaatgtgcttattgagacatacttcgctgacattcctgctgaatcatacaagaccctcacatccctgaacagcgtgactgcttatggttttgaccttatccgtggttccaagactcttgaccttgtcaagagtgctggtttcccctctggcaagtacctctttgctggtgttgtggatggacgcaacatctgggctgatgatc

SEQ ID NO: 38432 - DNA, 359 bp, Oryza sativa
  Clone ID: uC-osroM202001e12a1
tttggttccgggtttttatggttcctttcacgcgattgttccgttgatcttgtaaccaaacatcccaccggctacaatttataccaatttactatactacgattaatttattcatagcccagctttattattagcatcgtgaactgaactatcatgcatgatggagctcgttcaattcaccggcacatgcggatgcggccgtgcaaatgtttccattctatttattatttttctcgtcgtaagtcgtgactgcttcgccaacccaaccgacgagccgttgttgaacgggcctttggttgatagcagtccgaggtttgccgccggctgccttatgcctaacgcggccacaagtagcgctg

SEQ ID NO: 38433 - DNA, 515 bp, Oryza sativa
  Clone ID: uC-osroM202001e12b1
tcggtttgaattaagcatgtcgacgccgagagcggcggcgagcctcgccaagaaggcggcgctggtggcgctggccgtcctggccgcggcgctcgcgacggcggcgcgcgccgagcagtgcggcgcgcaggccggcggcgccaggtgcccgaactgcctctgctgcagccgctggggctggtgcggcaccacctccgacttctgcggcgacggctgccagagccagtgcagcggctgcggcccgacgccgacgccgacgccgccgagcccctccgacggcgtgggctccatcgtgcccagggacctgttcgagcggctcctcctccaccgcaacgacggggcgtgccccgcgcgcgggttctacacctacgaggccttgctcgccgccgccgccgagttcccggcgttcggcggcaccggcaacaccgagacgcggaagcgggaggtcgccgcgttcctgggccagacctcccacgagaccaccggcgggtggccgaccgcgcctgacggcccct

SEQ ID NO: 38434 - DNA, 459 bp, Oryza sativa
  Clone ID: uC-osroM202001f01a1
aaagaaaaaaaataactgagtataataccattgatgattcatttgattctggaagagaaacaattatcaaattacaacagtaaccaacatttattctacagatgccatcgctttctttgcttttttggcaacgcaagtaaaccatttcaccgtcacaccacccaccatatatgccacccaaataaaaatcaagaacccaaacaattcccctttaattaattcccgcttaattaataaacaccagccttaataataaagtaataaattaactaatggctcgttctttccagtcattttgccttagctgtggaggatggccgggctacagtacgggccgttgagccagccgtcagtgatctgcttgtaagctgcctcggtgaggtggatgccgtcccagctaagatgcgacgccgggttggagcacgctgatgcgcctgacattccacacctcgcgttgtt

SEQ ID NO: 38435 - DNA, 438 bp, Oryza sativa
  Clone ID: uC-osroM202001f02a1
cctgcttctctctctcctcctcttcttcacctcctcttgtctgtccatagatcgagccgctcagaccaaatcttggatgcgttctctcttctttctcgctgcgagggaggcgggttgttcgatctgcgggtgaaatcgagcgagagatccctagacctccccctacttctctgtagctgtacatatttcaagagaggaaattttgggctggtttctgatacggttcgagaagatttttggcaatttcttcggattttcctccccttgtgggttccttggttcatttgagaaggaatcaaatgggtggatgtgtcagtcaatcgaccgatcaaggcggagccagctgcaggcgggattgcttagggcaatcgaatcctggacatgatgttcgtcagggtggacagatgagcggcacatgcattatataagctcaatgga

SEQ ID NO: 38436 - DNA, 462 bp, Oryza sativa
  Clone ID: uC-osroM202001f02b1
gcaaaattggtgatctttcattctcaatatcatgatgggagtacatgtatgtacaatggaattatggcaaaaggaatgatgggctttgcatcattctcatcttgtggcaaacataaacatattactcacattgcaaacaaacagttgccagaacacagcaacacacacaaaaaaaaccattacaacaatatgatcaaacaataaatctaccatgttgtgagtgatcgatcctattattcttctaccaagacagactctacagagttcagaactatactactaaatcgccaatactaactcatccagttctcattgactgcatattcaaccagatccactcttgcatgccttactctggagcatctttccttccatcagcttttgtggaagcaaacagtttgtcagatggaacaacttggtaattccgtgtaagagcacttcttaacttccttctcttgcatg

SEQ ID NO: 38437 - DNA, 466 bp, Oryza sativa
  Clone ID: uC-osroM202001f03a1
caacataaataacaaaaaccttaactgacgcttcaatgtcaaggtacattctatttcagtgatgagatttctgcctctcacacaggttagatcacttggaacagaaacacagcatgcatacgatctgtttctctatcaggtctccatatgcacacaagtcctcgaaaaatggataacggaatacaatcacaagtgcgggttgtcaaggtaatcgcctagattgttatcttggatttggcaactgcagatcatgcaaaaagatgtgccttgatggaaaccttccagcttcccatctcatgggaattgtctcacctccattgctacctatgtaatctgggctcaaatggcttgatgatgcttgctgattagttccggtgctgtcattcgatgggcattcccaattctttagctccaagtttaagctgatcaaatctggttcttgagatcaacacatgcagcttgaata

SEQ ID NO: 38438 - DNA, 432 bp, Oryza sativa
  Clone ID: uC-osroM202001f03b1
ctcttctctctctcctccaccacctcccctgcgaccagcggcgcgcggcagcggcaggcggccaccgggatggcgtcgtcgtcggggacgagggaggtgctcatgctggaggccccgccggcgccctccggggcgccgtggcgcgcgccgtcggacgcggaggccgtggacgcgctgccctacatcgacggtgactacggcgacccggcggtgaagcgggaggtggaccggatggtggtggaggtagatgctgtaccctgtccctatgtaacttgcatttgttgaatacaatgtctgctactaacatgacgggagcagtttgctgcactagcagcattggtttaaaatccaggcctatttcgtgatgacacccttttggcttttttaactaatgtcatcattgtttttttgtgatcgcataagttttttttt

SEQ ID NO: 38439 - DNA, 305 bp, Oryza sativa
  Clone ID: uC-osroM202001f04a1
ggaggaggcgaaggaggactgcgacgcgccggcgaactccccggcgtacggggtggcggtgtacaacgtgacgacgggggagtggaggcgggagaaggcggcgccgccggtgcccatgttcgcgcagtgcgccgcggtggggacgcgcctggcggtgctcggcgggtgggaccccgagacgttcgagcccgtggcggacgtccacgtgctcgacgccttcaccggcgtgtggtggagcgcgccgccgatgcggtcggcgaggtccttcttcgcgtgcgcggatgccggtgggaggatctacgtgg

SEQ ID NO: 38440 - DNA, 297 bp, Oryza sativa
  Clone ID: uC-osroM202001f04b1
ccattgggagacaaaagagggactctgcaatctgcacctaaaacggggggtcataatatgtccaagggatgggattatggttactaataaccataaccatggttgaacaagggaggatgagggggggacccaagaccatcccctggattcctccagggttttttgggacaaaaaccccacactcatcatcatcatcatcctcacaacaacaacaaattggggagagatagagagaggagaggagcttaacaaactcaccactagcttcctctccttcttttttcctggggattcttt

SEQ ID NO: 38441 - DNA, 320 bp, Oryza sativa
  Clone ID: uC-osroM202001f05a1
agccagaatatcttacattaattttattgtagagtcaaagaggtacaagggtgtttacctggtagcacggtcacgattcgtggtttcgcactcaaaaatgaagataaaagaatcatgagcgtgagaattctgatcataaccaggtggaacatagagagggatatcatatggagaaggtccctctctggacaaacgacgaatgttatcggcaagcggcggtggatgcacggtgaggtgtcgtcttcaccagaataggtggcagtcaggcggtcggggggaaggtagaacttggtggtggccgggaaatggatgggggcggg

SEQ ID NO: 38442 - DNA, 373 bp, Oryza sativa
  Clone ID: uC-osroM202001f07a1
tttgttttttttttttaggtggcaatacttaacagtaagcattcatgccgagagcataattatggtgccacatgcaaggcgaactccagtccaacaaaacaaaaacaccaccacctaataagtgctagcgcagggccgcatgcatacagaatttcaccttctatcataaattatacatggactacgacttcttgacacactcgattaaacaggggctagagtagcagcagggcacattataatcgcgcgatttcatactagctacttcatgtattttttttttcaagtcaggcttttggctgttgacgatcgtcctgttgacctgaagaagacgatgattccaacctttttgaaaactttaccaccgaagaga

SEQ ID NO: 38443 - DNA, 430 bp, Oryza sativa
  Clone ID: uC-osroM202001f08a1
gcgcaactttccctgaagccccggatccactcaacccccctccccctccgcgccagatcgttgtgtttatgagctcgaaggagaagcccactcttggaggccagcggattaagacccgcaaacggaatattgctgctcctttggaccctgcatcattctctgatgcaattgtccagatttatctggataatgctggagacctggaacttgttgccaaaagtatcgagtcctcggatctcaacttctcacgttacggtgacaccttttttgaggttgtattcattggagggcgcactcagcctggcacaataaaacctgaggaagaaggagagcgtcacccctattctgtacttgattgtgcagcgcagcgtgaagcaattttgccttctgttctctacattcagaaaacattgcgcaggaggcctttctt

SEQ ID NO: 38444 - DNA, 477 bp, Oryza sativa
  Clone ID: uC-osroM202001f08b1
aagttgtaacaaccaataatttagcaaatcctggaataacttcttgcatgggattttaacattcagtagactattaggatcagcatgtgatcataaaatggtcggcccagtaacaagggagcaaaagatacataactttagctggaaacttgggatataaggaaatattcaaacaatacattcgcacagcctccagtagcaccatttattcctcctcctcggcctcctccagccatttaacaaaaggttccagtgctttgacgaaagattgcctgccctttgggtttgaacccttgcggaaccaaaggaggatggtatcttcagctaggacatcttggtcatacagcgttctgattatttcaggaaatagcttcatcagcttagcatcctcatagcactgtgtctgaactttgtatatgagttcgagttcaagcctgccacttgtgcagaatgcattcaaaaggccagcccatgctt

SEQ ID NO: 38445 - DNA, 457 bp, Oryza sativa
  Clone ID: uC-osroM202001f09a1
aagaaagaattgcattacttttggggtctgcgatactataagcaacagagttttgtaccagtctaaaagcagccttcttttactcttgccacataaacatattcagtttaactacacttttagcaccctgtgtggatgtcatgtgatgagaggcaggaccgactgacttgttcactcacgggattattcaagctgccaggctctttgaagctatctcgtacacattctctgatagcccattggctgacacgatcatctccagctgagccttagcaagagcttgtctgctctcatcatatcgcctccaccgagagaaagctgacaccatgcgggaggccacctgaggatttatcttgtctagctgtaaaacaacttcacccaagaacttgtaaccagagccatcttttgcatggaaattcacaggggacccacaaatcctccaattagcgaatacacc

SEQ ID NO: 38446 - DNA, 506 bp, Oryza sativa
  Clone ID: uC-osroM202001f09b1
gtattcattgcgaaagcgataactttgccgggtcaaggggagattatggatatgatgccagttgcagatcctgatgcagttcatgctgtccgtacctttattaagaaggagcttgcccttcaactcaaagatgaccttctttcaacagtgacaaataacagaagttctgaagcttatacatttaaccatgatagcatggcccgccgtgcattgaaaaacacatgccttgcttatcttgcatctctgaatgaaccggacaccactgaacttgcatttgttgaatacaagtctgctactaacatgacggagcagtttgctgcactagcagcattgtctcaaaatccaggccaagttcgtgatgacacccttctggacttctataacaaatggcagcatgattatttggttgtaagcaagtggtttgctcttcaagctacatcagacatccctggaaatgttgctaacgttcaaaagttacttggtcaccctgcttttgacatgaggaa

SEQ ID NO: 38447 - DNA, 450 bp, Oryza sativa
  Clone ID: uC-osroM202001f10a1
aaaaatcaacgtgcatataatatccattcaacagaatcgcatctattacaagccttccattataggacgccgatagtgcagtgctgcataagacaatttacactgtccacatgcgttgacattactacagacagtaagactcaaaacgacaacacgcatacattacggtacagagcacaaatataaaaaggttacgtttattcgccttaatttatcttaagatggtaggattatataatatatggcaaacacaaacggtgactgggcaaaccattgcacctataccctgacgagaattcaacagggagaaaccacaccacgttctgatatccatggccctgaaaagtaaaaattcaacagaacatgccctatcaagagggaatatacataagttttgacagagacatttggcaactgcctcagattacaaaacttgtgtgtatgtttttc

SEQ ID NO: 38448 - DNA, 436 bp, Oryza sativa
  unsure (1)..(436): unsure at all n locations
  Clone ID: uC-osroM202001f11a1
agtgctggaattaactttccactcgtttgattggaaataattgtaccatcttcttggttggaagttgaaaaagggcacgggatgacaagatcattatttgtctgtaattaaaacagaaaatctataatctaaagtacagggttgcggcagtcatgccatttgcaaccgaataaaaaactaattgctcattggaacaatgcatggcccagccataggcgtcgttccttttattccaaagcccacccaattttacacactnatccaagaccggaaatttctaagccagcaagcatatcctcatctacattgcattctccaaggtaaaccttgatgcttcgaggagaaccgcagctgccttctgctatgagcgctctatcatttgctgccatgtgctggattattttgtatataatctaatatcttcagggcaatgaca

SEQ ID NO: 38449 - DNA, 448 bp, Oryza sativa
  Clone ID: uC-osroM202001f12b1
tttttggatcgtgccaaacaccaccagcgtgggaggggctgttattggggcgatcaacagggaggacccgtgcaactggcgggcggcggtggtcggaatgttctgcagctcatttcaacgaggtgaagctcatggtggcgctcgttcgccagactgtgatctggatcacagggtgccacccgttggtgtaggacatgtggccatctgtgcccaggctaaggacgccttcggtgtggccgttgagcttgacaaggaggcccgcccacgcgtaaaggccatgggagagtggcttctcaactgcatggaccagggcggcgtcatctactgcgccaccaccgtctcttgttgactcttcaggggcgtaccataggacggagctcgactccaagtcgagctctttaggcatcttaacggcgaatcttcggcactggctcccatggccagacgc

SEQ ID NO: 38450 - DNA, 367 bp, Oryza sativa
  Clone ID: uC-osroM202001g01a1
ggggcaatgcacaaatgccgcgtcatctttaaatgcaacgaaggcatcaattacaatatgacgatacgactgtagtgccctgcgttgcaataactcgaagcacaccaagcagaggccagataaggtgtgcggcggtgcgtttttcgaaggggaaatcacttatttttgttatagagcaacactgaatcaacctatttacatgatcgctgaaccttggacatcttagaagtcactttggtagtacaatctgcatgctgcggacaaggtgcagataaaacaaaattactacattgtcaggcagacactttcacactcctatctttacacactacactggccggggtaaagacggatccaactgagattt

SEQ ID NO: 38451 - DNA, 468 bp, Oryza sativa
  Clone ID: uC-osroM202001g02a1
aaacacaatttcacatctatatatcactggatagcaattaagctccccaaattattattgaatcaatcagaagtacccaaaaaaaaacagagaatcccaaaacatgactactgtacagaaatcagtcaggagggccactgcaaacaaggcgtttgcttcatgctcagtttcagtcagcacagcaagaccgacgcttcttcagtcttcacaccaaatccgggtcattcttgggtccagcagccacctcctcgacgtgcaatggcttcttgtagagctggagcagcagcgacgagcagacgacgctcaccgacgaggccgccatgcaagctccggcgagccatggcggcagccggatgccggtgaacgggaacaggacgcccgcggcgaccggcatgcccaggacgttgtagcccagagcccagacgtagttgagccggattcttgagaggtcttcctggagagatcgat

SEQ ID NO: 38452 - DNA, 147 bp, Oryza sativa
  Clone ID: uC-osroM202001g03a1
aatcaaaagatatatttaattttaaaatattatttctgaacagaaacgaatgaaggaaggccaatgaaaacaaggaaaatgaaaaaagaaaagatgcagaaaaaaaaaaaagaacgacgcattataaaaaaattaacaccaaatccg

SEQ ID NO: 38453 - DNA, 284 bp, Oryza sativa
  Clone ID: uC-osroM202001g03b1
tttttgggaacaaggacaacaggggcagtgcttcatacatctcaagagaattgcacacgaccaacaacaaaggcagctatacgggacacagagtccctgggccggacgagctacaagaagagctgcatctcccacacggaggcgcactgcgactaggattgcaccgaccacgaggccgatggtggcggaggccgaaggagccctaccggggacgccggggaggggacatgacgaggacgcggatgatgctcaacgagcttccatgggcacggacacggacacga

SEQ ID NO: 38454 - DNA, 423 bp, Oryza sativa
  Clone ID: uC-osroM202001g04a1
ggcatgaattgatattattaacaacagcacaccgaagtactcctcgaccttgtttttgattcaacaccaaacaacacccaattcagcataagctggctggcctggtaccatatagccatttacgtttggttcagcaaacccatcaacaaaataatctcatgggcaccacaaaagctactagcaacgagtaacggattatgtacaaaatgacgcttttactatgccaaaaccaagaaaatatttccacatgacggcaaaaaagggaagaatgaagcaaatgctaaacgggttatatattctcgaggctgcttccaccacaagtttatataaacttgaaggacaaccgcatggatgcatctttgatatatatatccttttgcccaaaacaaaacctggggcttgaaacgtttgggtacacaccca

SEQ ID NO: 38455 - DNA, 400 bp, Oryza sativa
  Clone ID: uC-osroM202001g05a1
atcaagtaatgtaaaatcacttttcattttatgatcattttgcagtgtcaaagtacacttgtctgaaacatactttattacctccaagaaaacgaaatggacggtaactattataagagtagctatgagaagatgtaaggaaaggggaaaaaaggtgtgcttcataacgaagcagttacagtaatttgcgcagccgaccacagcaaatggtctgttcagttactgattactccaatctactacatgtcccagttgacaaatcgtgttcttcatgtatttgttgttcaatcaactgggtgcttggctctccgattgaaacagatgctaacgatttggaagcccaagcagtagcatgccttgctccatcatgcaaatttccttgcttagacggggttaccct

SEQ ID NO: 38456 - DNA, 444 bp, Oryza sativa
  Clone ID: uC-osroM202001g06a1
agccgcagccgcagccgcgggagtggcggttcgcgcaggtcttcggggaacgcgcggcgggggaggacgtgcaggaagttgacatcatctctgcaattgagtttgacaaatccggtgaccatcttgccactggagatagaggtggtcgtgtagttttatttgaaaggactgactccagggatagcgccagtcggagtgaacttgagagacaagattacccgattgccaggcatcctgaattccgttacaagactgaatttcagagtcatgaacctgagttcgactacctaaaaagtttggaaatagaggagaagattaacaagatcaagtggtgccaaacagccaacaacgccctctttctcttatctacaaatgataaaacaatcaagtattggaaggtgcaagagaggaaagtaaaacgaatttcagtgatgaatttgaata

SEQ ID NO: 38457 - DNA, 393 bp, Oryza sativa
  Clone ID: uC-osroM202001g06b1
agctacaataactgtagtaaaattttatgttcaaagatttggatgtccatgacaagagatggttgttagccctggctaggtggcattacatgtgaagaaatgaaaaagaaaagaaaaaaaaattttacagccctgttaagcagatattttctgtgaccttcggtgaaattagcatcagcatcgcctatcttctgctttatctttcaactgctgattctggctacaaggcagctacaatcatatcttgggaccaaaaatgttgatatgattagatatatttaacatttactaaagaatcggaacggagcagcctgctactgtcgcaagtagcatcgggagtggtctcgtggaaaccgactgcctcttttggccccagtcatgaaattgacaaca

SEQ ID NO: 38458 - DNA, 462 bp, Oryza sativa
  Clone ID: uC-osroM202001g07a1
aatgcaaagcacttgaatatattattcaacaaatgatatatcatcatacaatgaatataataataatcgaaatttaaaatacatgaagaaataaatgacatgtcacacagtatatatcaatggcattataaacaataatcaaactgctcaattaatccacgcagaaattaaactaattaatcaagcatacaacattgcaaacgcagccgacacgatcaccatcgcaacggacgccgccttgccgacgctctcgccggcggagctcgcgccggtggtcggccgtcgtcttcgacccggtccctgcagccggcggcgcattcggcgccgccgcgccccccggcgccggagacggaatcggagcaccgactttgctgcactcgctgggaggcggggtcttgacgccgcaagcggcggggagctcgagggccgcgggtggtgttgacggtgaccccaaccgaggag

SEQ ID NO: 38459 - DNA, 407 bp, Oryza sativa
  Clone ID: uC-osroM202001g08a1
acagaagcaaagcaacgggttcccaaaggtccacacttacagtacgttcaacgtacaactgatccaagcaaatgaaacaggtttgatgatgcactgatgcgagaaactaaacggttggatcggagtcggagacgaggcgatcatggacaagcggcggcggcggcgatgagcttagtagtcggtggtggggagctgctcgtgggtgtgggagatgaagaggacctcgtagatgacgccggcgaggccaccgccgatgagtgggccaacccagtacacccactgggactcccaggacccagctgacgagggccgggccgaaggagacggccgggttcatggaggcgccgtcgaacgcgccgccgacgaggatgtttgtgccgacgatgaaccccgtggcgatgggggcg

SEQ ID NO: 38460 - DNA, 537 bp, Oryza sativa
  Clone ID: uC-osroM202001g08b1
tcgctcaccactccatttctgagctcttctagtttgagtgagagagcagcagaagggagtagtgcaagatgccgatccgcaacatcgccgtggggagccaccaggaggtgtaccacccgggtgcactcaaggcggcgttggccgagttcatctccaccctcatcttcgtcttcgccggccagggctccggcatggccttcagcaagctgaccggcggcggagcgacgacccccgccgggctgatcgcggcggcggtggcccacgccttcgccctgttcgtggcggtgtccgtcggcgccaacatctccggcggccacgtgaacccggccgtgaccttcggcgccttcgtcggcggcaacatcaccctgttccgcggcctcctctactggatcgcccagctcctgggctccaccgtggcgtgctttctccttcgcttctccaccggcgggctcgccaccggcacctttggcctgaccggggtctccgtgtgggaggccctggtgctggagatcggcatgacctttggcctcgtttaca

SEQ ID NO: 38461 - DNA, 399 bp, Oryza sativa
  Clone ID: uC-osroM202001g09a1
aacataataatctttcacattgataagtattatcttcacctaaagtagttaccctgtatttatttgtacatctatatttgtttatgacatgtaaaactaggtcctagagccacactcgtaacttcctggcacatgtatatgcatttacatgtgatgaatgaatttgcagttaagaagttgtcacttctgtgcctgagcagagataggaggcggcggcagcagcagaagaagcagcattgctcttttacctagcttgagtcggccagctgcagtttggggtcctcagctgcagccgccggcggcgaagccgatcctggactgcgcgacgtcgtacaccacgctgaacgtctgctgctgcgtgttcccgatgatcgccgtgccgccggtcggcgcgaacgc

SEQ ID NO: 38462 - DNA, 519 bp, Oryza sativa
  unsure (1)..(519): unsure at all n locations
  Clone ID: uC-osroM202001g09b1
tcgattgaagaagcttccagctgagctgggggatcaaaatggaggtgcttcttccccttctccttgcctgctctctcctcttcaccattgcaacccctatcagagacatcaccgacgtttgtgcctcacagatcagtgatttccagcacctgaacagctccggactgcacctgacgctgcaccacccgcagagcccctgctcgccggcgccgctcccctccgacctccccttctccgccgtcgtcacccacgacgacgcccgcatcgcccacctcgcctcgcgcctcgccaacaaccacccgacatcgccgtcgtcatcgtctctcctccacggccaccgcaagaagaaggccggcggcgtcggcggctcgcaggcgtcgtcgtcgtccgtgccgctgacgccgggcgcgtcggtggccgtcggcaactacgtgacccgcctgggcctcggcacgccggcgacctcctacgtgatggtggtcgacacggngtcgacgctcacctggctgcagtgctccc

SEQ ID NO: 38463 - DNA, 444 bp, Oryza sativa
  Clone ID: uC-osroM202001g10a1
ctccaaataaagtcagattaatcagagagccatcttcttgccggcgaaggttccgatggagcccttctttgcgttcttatcgtcctggctcagcaccacagtggagtttccgggattcctggatcctcccctgtttccaccgaagcctcctccgaagcctccctggccaccgaagttgccctggggtctatccctctgggaggcactatcgagacggatgcttctaccgtcgagctcgccaccgttcagctccttataggccttcttggcagtgtccacatcgtgggaactcaacgtatccgaaaccacggggcttgccggtctccttgtcagtgaccacacgggcagagctgacctctccgatctggctgaagtagtccctgatggagtcagcattggagttgtaggaccgaccaccgagaagagagtaggagtctcgttgtt

SEQ ID NO: 38464 - DNA, 422 bp, Oryza sativa
  Clone ID: uC-osroM202001g11a1
tttgtttttttttttttaatgggtcgaacgattagttaattagaattaatcaaacggggaagaaattaacaaacaacaattatggatcatcgaagaggtgatcgatcgatcgatcgatcatggtgagaggtggtgcaggttgatcccggcggtgacgttgaagtagctgaacgccgccgcccaccggcggttgtccttgagcatgtgcacggcgacggtgtccggccggaagttgtccatgtcccagctgaggtcgtacatccgcggcttgaggtcgtagcgattccggccgcgtccggcgaggttgagccacttcccgaccatgaggtcctcgggcccctccgtgtcgttgcgcgcgaggatctcctccgccgtggacacccacgttgcgacgtcccacgacacgacgtaccccatgccgt

SEQ ID NO: 38465 - DNA, 485 bp, Oryza sativa
  Clone ID: uC-osroM202001g11b1
tcggttgcatttgcatgcggccatggcgatgaaggcgccggcgtcgtccaactcctacctcctcctcgccccgctcgcgctgctcctcctcgccgccgtcgtcttcctgctcccttctctcaacggcgcccgcgtcggctccgatggcggcctcggcgtcctctgcgcccgccgcagcgctggcgccgaggactacaccgtcgcggcgccggcggcgccgaaggaggaggagaagcccgagctgagcctgctcgtcggcgtcctgacgatgccgaagcggtacgagcgccgcgacatcgtgcggctggcgtacgcgctgcagccggcggcggcgcgggcgcgggtggacgtccgcttcgtgttctgtcgcgtggccgacccggtggacgcgcagctggtggcgctggaggccgcgcgccacggcgacgtcgtggtgctcggcggctgcgaggagaacatgaaccacggcaggacgcacgcgtacc

SEQ ID NO: 38466 - DNA, 459 bp, Oryza sativa
  unsure (1)..(459): unsure at all n locations
  Clone ID: uC-osroM202001g12a1
tttggtttaggatcaaaacatttctattaccacaactttttaaggatggaatcgagtagcaatactttcaccccaaaatacagtttagcgacaatatcttagaaaagccgcttgctttgccgccatggctggcaagctgagcagagcagctaacacaaagaacacgagatcactataaaccaaacggcaacgaacgaagaaaatacagggtcttttttgtctgaagatacacgaagcggttcgttttcttttatttttagtctcctctcctcctcgatgatngggtgtatggcaatggcaatggcgatgggatcttggcttagttgatgggaaggggctcgccgttccactccttgaggcagtcgagcatggggtcgatgagcttgccctggctgatgccgaggaacaccttgttgcactccttgccgggggacttgagcttttcgccggtgaggaata

SEQ ID NO: 38467 - DNA, 539 bp, Oryza sativa
  Clone ID: uC-osroM202001g12b1
atcgaatcctcttttttcctcgtgcccaccaccaccaccgtagcaatggcgggcaacgggccgatcaacaaggaggacccgctcaactggggcgcggcggcggccgagatggccggcagccacctcgacgaggtgaagcgcatggtggcgcagttccgcgagccgctggtcaagatccagggcgccaccctccgcgtcggccaggtggccgccgtcgcccaggccaaggacgccgccggcgtcgccgtcgagctcgacgaggaggcccgcccccgcgtcaaggccagcagcgagtggatcctcaactgcatcgcccacggcggcgacatctacggcgtcaccaccggcttcggcggcacctcccaccgccgcaccaaggacggccccgccctccaagtcgagctcctcaggcatctcaacgccggaatcttcggcactggctccgatggccacacgctgccgtcggagacggtgcgggcggccatgctcgtgcgcatcaacaccctcctccagggctactccggcatccggttcgagat

SEQ ID NO: 38468 - DNA, 419 bp, Oryza sativa
  unsure (1)..(419): unsure at all n locations
  Clone ID: uC-osroM202001h01a1
aaaggcaagaatattattcataaatgacgcatgatttttatcaaaacgcttgcaaatgatatcagataagtagagtcaacaagacaaaactgtatctgccaaagcacacctccccaactccacccaattacgccattatttctgggcaaaagcaaacggcttcccattcctccccttcaccagtctcaaaccataaaccccacaacaaatcctcctaagtgacggcatataagatgatgaaaacaaagcaggatactccagagtcgtcatggcgaacttcaagttgacacttctcatgccacagnccgctagtcgtgctgggcagcctagtaccggtagtgcgcgggcttgtagggaccctcaactggaacgctgatgtagacagcctgcgacttggaaaagctggtcagcctggcacc

SEQ ID NO: 38469 - DNA, 437 bp, Oryza sativa
  Clone ID: uC-osroM202001h02a1
ggagtataacagactgatgctattattttaaatgtcgccacaaaccaattagccgtcccatttgtacagcagcaattcgcttacacagttacactttaaaacaagccgcttttggcatagcagtggctgggtgttcagacccttggcctcaccctgcgcccgctggtatcgccgccatccgagagctgcccccacacgctctggctcttccctccgctgctgcattcctcctcacacccggcgaccgtcctcagtatctccgattgcagcgcggggcagttgtctttgaggtaatcaaacccgtcggtccggattacagctgaaagattttcagcagcaaattttaggcaaacagatttaagctccatagcatgatgtcggtcagccaatgctagggtagttgccacagagtttacagaaatatgcttgcccaagta

SEQ ID NO: 38470 - DNA, 473 bp, Oryza sativa
  Clone ID: uC-osroM202001h03a1
ggccaagaaaaaattgcatcattaatctttagcgacacaagaatacatttgaagaataaatcggctataagaattcatgtcatcatacaagattgagggtggcactcaaacggtagaggcctgaagatttcagatctacaatggtgcaacacaagaaaaacttgaacaaagatactaacagaaatcaactttctgtttgacaaaatggtagcctctcctgtatgtaaagatgaacaacgagctataaaaaatgatggtcaaccaaattcctcttcgacgcagactcctcttcagcaccagcaggagtgtagagagctatgaggttcaagtgtggaatatggaaaattattatgcaaccgcgggcatgtccttgagccaggcatcaagcggcttggccgatggagtagacgatgaacccaatctccctgagcttctcggcatcgaccacattgcgcccataaagacgaatgcag

SEQ ID NO: 38471 - DNA, 463 bp, Oryza sativa
  Clone ID: uC-osroM202001h05a1
tttgtttgaacgaataaccaggggctattggcaatagccaagtgaagtattttcctcaaactggccctgggatttacaatcctccctgacgccaacatggtatacaaatagcatgatcacaattttgaacttgcttctcttctaattatacatggcagatgaagaggctttgaaaagccgtgagacgaaacaagtcgcaaatcgcagtgttccttccgtctagcatggctatggttggggattctactttcatggcatgcatatgcaggtcagcacacaagttgggatttgtgctgtctttcctcaacgtttcgagtacggcaaatctggcagtttttgcgcttatggagaacttcagccaccgtctcttctccacgtacaccaaagccggctggagcacgaaccccaccagaattgccatgatgctgaccaccatcaccttgaaggacgcgagcattatcac

SEQ ID NO: 38472 - DNA, 461 bp, Oryza sativa
  Clone ID: uC-osroM202001h06a1
tttggttagaatttatgtggggttataaatcatgtaggtttgtcaaccttcatgccacaaatcacaaaggatacttaaaaaaatcaactttaagccacagcaagaaccaaaaataaaagggttctgaacatgatggttaggttccttattgcaagcaaattcaacccagaagcctcttaatcgcaataagtttctttagagaagtcactctcaaggcaaggacgaaagctgttagcaacatatgttacttcattccatgtaaagccattacaatggctccatttcagctgcaggggtggaatcactggcgtagacagggtggagcacatgcccagcaacaggatcaacatgaacccattttctgccagtcagcttgttgcgctcgaatcgcacatgtccttctttcaaacagaagagagtatgggccttccccatgccaacgtagttcccaggatggaagc

SEQ ID NO: 38473 - DNA, 397 bp, Oryza sativa
  Clone ID: uC-osroM202001h07a1
tgtgttttttttttttttggggttttttttttttttgttttttttttttttttaggggcacaaaaaaggacacggacacaacaaagggggggacaacccaaggggggggaaaaaaaactctatcgagaatgggaacaattgggcttgggctaaagatctggtcaaactaaggactccaggaacaacctaaaccatacttagaccttggtgccattggtatgggcgccatcaccaccaccatttttaaaaggaacggcgatgttcctgacggggcccttgaaccacctcctgggggggagcccccaccaaagcccgatgaggccgaggcaggccccaagggcgacgggggggtaattgaagttgccggcgctgaacgggtcccgccctcggaggggga

SEQ ID NO: 38474 - DNA, 459 bp, Oryza sativa
  unsure (1)..(459): unsure at all n locations
  Clone ID: uC-osroM202001h08a1
ttttgttataaagcataaacagttgaacaaaacatttattcatttgttactctagtcggctgatacgatcatacaacacagtttgacatgcctaataagccgaaagaaagatagacatgatgattaggatgaaggtggaccaccttcctatccgaaaatgtagaacatgacagccgccaatgcaaccattactgccgtatcatcagcagtatcagctcaaccccaaaccaggaagcatcagcacactgaaatcatgaataccactggacaaaccaccgatgctatggaatatttcttactctcacaccccaaaaaatttcaccttggtttatagacaaccgaagctcccacttcctctcctgcatggctgcatccagcagccagcatgagatttttccggtaccggagagattgagtaggaacgagatcgctagatgttcattnangcaacanaccatc

SEQ ID NO: 38475 - DNA, 488 bp, Oryza sativa
  Clone ID: uC-osroM202001h08b1
tcgcctcaggagaggagagcatctcctgcatctgcggcctcccccatcccactgctgctgctgctggtttgaaaccaaggcgacctcctcctgtagtagcgaggaggagaggagaggagggagaggcgggttcttggctcctggggggccgaatcgcgggggttcttgcctgcccggatcgatccggcaatggatgcggctgccggaggcgcgccgccgcggcccgcggccggaatccgcgtccgggtgccactggtagagtctgtgtcttgttactgcagggtagatggaggtcttaaaactgttgtgagtgctaggaagtttgtccctggtgcaaagctgtgcatgcaacctgacattaaaccaaacaagcgcaagtcaaggagctcacacaaagagaggtgccgaactcaggcaccacttctacctggccttcctgacgacctagctattacctgcctcatgcgggtccctcgacttgagcacac

SEQ ID NO: 38476 - DNA, 117 bp, Oryza sativa
  Clone ID: uC-osroM202001h09a1
gttgtttatttattattgggggtttaacatttcttttatttattttttactttagtggggaggaacaacctgacgacattttacaactggcctaacttgcaaatggacaaagctagg

SEQ ID NO: 38477 - DNA, 453 bp, Oryza sativa
  Clone ID: uC-osroM202001h10a1
actaggattgaagattcatttatctttgaattttaaccacttacaagaaaccaacccttttgtttctttccttctctttcctcacccacttaatcctatagattttataattcaagacaccacagatacaaaaatacaagagagaaatgatgaggcagaaaaaaaaaacccagctaaaagcactccaccaattaattatctgccattgacataattaattaaccacccaaacgaacaaacttcacttcacttgcatctcagttggcggctgcccccttgaacctgtaccacttggcgcagatcatgaagtagatgatgttgaagatgccgatgccggcgatcatccagtagaagaggtcgagcctccccttgttgaggtcctgcgccagccagttgctcccggcgccggtggtccggtgcacgatggtgacgaggaacccactgaggtagttc

SEQ ID NO: 38478 - DNA, 452 bp, Oryza sativa
  Clone ID: uC-osroM202001h11a1
tgtttttttttttttttatgagaaaaaaggattgacattttgatgttacagcacagtaagcttccacaaataatgatgaatgatctactgtttgcataaaagaacatacaacatggtgttggcaccaactattctgaaataaatgtggctttctaaattgggttgtagtttttttatattatctttggatcaacctttatctgattcatggctgtatggatatgtatgcttcccattattggatgtcggattcacaagcatttacaatttagaaccagcaagccagcggctatagaaagccaatgatttttggggtttgaattcaggaacagtgtgcccagcacccttaatggtagcaaaggtgaggccatgttcatatccttgggtgtacccagaaacttggccatttaggtgccacgggctccatgaattaataacttcgaaccccaaaa

SEQ ID NO: 38479 - DNA, 532 bp, Oryza sativa
  unsure (1)..(532): unsure at all n locations
  Clone ID: uC-osroM202001h11b1
ttttacctcaagaccgccgcggattcgcatacttttcttctgaagtggtttcagctgtaccctgagttcctgagcaatccattttacatagctggggagtcgtatgctggggtttatgttcctactctttcgcatgaagttgtcaaaggattacatgatggagtgaagcctacaataaacttcaagggctacatggtcggaaatggtgtttgcgacactgtttttgatggtaatgctcttgtgccatttgctcatggaatggctctaatttcagacgatatataccaggaagctcagactgcatgccacggaaactactggaatactaccactgataaatgtgaaaatgcactctacaaagtcgatacgtcaattaatgacctaaatatttatgacattcttgagccatgctaccacagcaaaactatcaagaaagtgaccccagcatataccaaattgcccaaaagtttccaacatcttggtacaactaccaagcccttngctgtaagaacaagaatgcatgggcgtgctt

SEQ ID NO: 38480 - DNA, 225 bp, Oryza sativa
  Clone ID: uC-osroM202001h12a1
tgtgtttttttttttttgggggtttatttgtttgtctttttgatgtttcatcccagtaagctccctcaaataatgaagaacggtctaccgtccgcatctaagaacagacaacaggggggaggccccaactgtggggcagtacctgatggcacgcaaaaggagcccaagaccccctaaatccccacaggatcccccccaaaaagaaccggggctgtaaggacaaaa

SEQ ID NO: 38481 - DNA, 431 bp, Oryza sativa
  Clone ID: uC-osroM202003a01a2
ggagatgagcaccatgattcacttgatgctcttgcacaccgtctggatcaccgtcggcccgggctccgggatcgtcaggttcaggttgtcgccgaacccctccgcgtacggcggctcgccgaccaccacgatcgcgtagtcgtacttgtcgccggtgaccacgctgctgtccgggctctccgagtacaccaccgtcgtgctgggatcaacggtggccttgatcgccgacaggatcgtcgtgccagcagtgatgttgttgccgggctgtccttgccaggtgatggtccatgctccacactgtctgcccaaatcatcagcatggcttcccgcgacgagaattttaccggctttcttcgggaggggaagcaccgtagagtagagagattttttcggtctttagcagcaccaaggacttcctgaccggtttgcgc

SEQ ID NO: 38482 - DNA, 370 bp, Oryza sativa
  Clone ID: uC-osroM202003a02a2
ggtggtttttttttttttatgccaaagaagcgatatatatttgatagggaacataaatgtgatgatacaatatactcgatgagtaacatgagcaccaaccacaaggactatgagagacagtgccaggccaatgctaggacaggctaattcaaagtgttcatgctcgtgctgatgttattcttcatcaggatcatgataatacttatcgccataatttatgggcatttttcgatatcgtccataagatgatacctattgcttccccaggtctgaaatgtgcaaacatctatgtgtttacaaccacgcggggatcttgatcggcgagacgacggtcttgacctgcagggagttcttcaggctgtcgatgccc

SEQ ID NO: 38483 - DNA, 274 bp, Oryza sativa
  Clone ID: uC-osroM202003a03a2
gttttaattttattatagaaacaaccgcggccaacatcaggggggccacgtcagggaaaatcgcctattaagatgggacaaggacgcgcgggccgggacaacgagagcaaggaaaagggagcacaaatgagattgcctgaggcgtgtctacacacaatgtgcatgcgccagagcatattatgctggtgcatacagaggacggtgtttcgcctcaccggaaggagaacatacgccatggggagctgaggctactaacggcccatgttggtgcggc

SEQ ID NO: 38484 - DNA, 437 bp, Oryza sativa
  Clone ID: uC-osroM202003a04a2
gccaagaaataactgacatggaaatcaataggcatccgacatatgttttgagtgaaaataatccagatagtagcattcggcgaactaccaaaaacccaagggaacaaggaccagccacagaaggccacatgaagtgcatagtttgatgttttcattactacaaattcatagtatcaaatttaatggagcttcattgcaccacagctaagattcggatgtaatcggacatcaaggacagcaaatagccgtacatgagaagtccgtgtcactgctcacatcagcatatcacttctattcagatttcgcatcaggagaccgtgaacgagatgggctcctgcttgggctccgtttcttggggcttgatgcttcaccatttgcaggagacgcatttggagatttggatctgctggtgatcttgatggagagcgccctttgat

SEQ ID NO: 38485 - DNA, 169 bp, Oryza sativa
  Clone ID: uC-osroM202003a06a2
gctccagcgaacgcgacatctatatgtggggattgttgtagaaatatttggggggctcagcgacaacggggcgtgtggagaacactaactatccgcatacgattcctggagatggtactagggcccagtctagggacaagctacaggggggccttatgcgcatgccaaa

SEQ ID NO: 38486 - DNA, 305 bp, Oryza sativa
  Clone ID: uC-osroM202003a07a2
gccatctcaagctcttgaattgattgatgggttacaaagctgaccgtctcagattatgctcccggaggccggaattacatttataacatacacaataagggtagcaggtatataaagcattgcagtaggtagagtgaggacagaaataaatatctccacttgacgtcgaataagcgtagagcaatcaagtgttgaggttctggaacagctcaggcagatgggcgttcgagagcttggtccggcgtgtgatctcacgctggttttttttaggtttagccttgggctgcaccccattgatctgtgct

SEQ ID NO: 38487 - DNA, 395 bp, Oryza sativa
  Clone ID: uC-osroM202003a08a2
gccagcggccggttaacaattttgttgaggcactaaacaggggggataccatatgacctgtaaagcaccgaggtacatggcatgaaactacgttacaacaagatgaggcttcttcttattcggtcacacgacaatataagcaggggacaggcaaactagcgacgatgacaacacaggacagcagaagccagatcgatcgacaacggacacgatgaacttgggcaatatatcaggccattactcgaatgcacccggatgctccctctgcatcttgaccacctgcttccatgtctcgcgctttgagatttggtcgaaccaccttgccacattcttcctgccagggaagagctttcttcctcttttagaactcacaatgtaatgcgagtttggaaagt

SEQ ID NO: 38488 - DNA, 478 bp, Oryza sativa
  Clone ID: uC-osroM202003a09a2
atggcgccgtttttgtgctgggcggacctgccgccggacctgctgtgccgcgtcggcgacaggctggacctcaagtgctacgccagcgcgcgcggggcgtgcacggcgtggcggacggcgctgtcgccggcgtcgccggcgctcctcgtgctgtccgacgccaggatgtgcccctcggcggcgtccctcccgacgcggcggagcttcgacctcgcggcgatactgacggggggcagatgcgcacgggtccagcaacgggtggctagtcctgtccatcgcgctctacggtgggcagagcgcgttcgtgctcttcaaccccatcaccaccacggagatcgttctcccgcctctgatctacgagagcagggtgggcctcccaggtcgtgtccgcgcccagccctcccaaggacgaataccccgccgtcggcatgtgtgacatcgacaggatcccttacttaccccgggcgccaggaggggg

SEQ ID NO: 38489 - DNA, 207 bp, Oryza sativa
  Clone ID: uC-osroM202003a10a2
gtgtcgtcgaagaacttctttatcggctcgtactcggcgtcggtggcatggagcagccgtggtaaatcgcaggtcaggtgagagatgacgtgcagtccggcccccacggtgatccccactggcgttcacccttgtggaagttgcgggtggcttccaacggctccactcgggcgacccattcacggatgtggctccaattgacggtgt

SEQ ID NO: 38490 - DNA, 196 bp, Oryza sativa
  Clone ID: uC-osroM202003a11a2
caaataaaaacaggagtatgacgattttgtggcgaaagcattcagataaattacacatttacaagaaccaaatgaaaaaggaaattttgtgaaaatttacacattaatgagaaggcatacgcaagaagatcccaccacctacacttctgatatacatttaaacaaaggggggaaatagccaaaaataataataact

SEQ ID NO: 38491 - DNA, 227 bp, Oryza sativa
  Clone ID: uC-osroM202003a12a2
gcttcagagtagtatagtatagggtagggtaagccatcattaacatgcccatcaccaaatgacaaatgtattgtacgggagaaaatacatgctgttagggcttaaaacgatgaaatcgcctcagtaaccaactaaccatcagagctgtccggacattatttcattatatcatgtatcgaccggcgaccgcccggatgcaatcttacgacgtgccggagcttcgggga

SEQ ID NO: 38492 - DNA, 490 bp, Oryza sativa
  Clone ID: uC-osroM202003b01a2
ttattttttttgaaggggggagttgctattctgctagcactcctttcacactaacatgcgatcctccactaagtttcagcttgatttgatcacaagttcaatttacatacacctgtgaccactaatgattgtgaccagaaaaactgaagatcacactagctgcttcccaaatgacagtaaagtataatataatacaagattgtataaatacataaagcagatataatttaaatcgttgcccctccagcacccctaagaaacgccagcttagttgctttaacagcatgaatctgcctctccttcttctcacgtttacattcaccacaccagcccgaaaagtccttctgatatttcttcatctccctgaacacagagcttctgcaccacaaaagaagattgattctgagcccagatgatgtccggcggacaccatgcctatgacgaccacgatggagcacagctcgtccaggaacatgagagtaatcgaaca

SEQ ID NO: 38493 - DNA, 513 bp, Oryza sativa
  Clone ID: uC-osroM202003b02a2
gcaatgtatactcgcattccacaacagtcgaagggcaataataagtcttaacatccaagtttaaaccgaacagaaaatagagttttaaatgactgacatagtgcacaaagcgagcagatattaacggtcaatgcaacaactgaaatgaccgtcgacaaaacttaacgagtactaaaagagctagatatctcaaatgcagatatggaaagcaccacttgaacgaggctcatttcttcttggcggcagccttggtcaccttggcaccggttgggtccttcttctccacgttcttgatgacgccaacagccaccgtttgcctcatgtcccgcacggcaaaacgaccaagaggagggtactcagagaaggtctccacaaccatgggcttggtgggaatcatcttaaccataccagcatcaccgtttcttgaggaacttgggctccttctccagctccttaccggatcgtctgtcgatcttggtcaccagctcagcaaacttgacggcaatgtgggag

SEQ ID NO: 38494 - DNA, 444 bp, Oryza sativa
  Clone ID: uC-osroM202003b04a2
acaatacaattaattaacacataacaccttgcagtaataattatttgtttgatggatacaccatgaagataattaaacaaccttttcatggacaaaatacattgaggtcccctttgagcagggtgcctttacattttgtgccattaaggtaaaaaaaaaacagagagaaagggaagaacagggagagcaaaaaagacataattatgggacaggtactactggtacatgttcttggcttctttcttatgtataagacaagatgacacacttaggaacttaatgactgcaacagaacagaaactgaccacaacaccaaaatgactttcactgatcaggaaaggtacagacttggagatgaggacagcaagcgagtatgatacagggatgaggcaaagctgtaattaagaaaagctatagatagattgttgcatttgatgatgatcc

SEQ ID NO: 38495 - DNA, 392 bp, Oryza sativa
  Clone ID: uC-osroM202003b05a2
gggggaggcggtgctgtcgacgaagcgctcgccggcggcgtccacgcagaagtagagctggtacagctggctgttgccggactcgtcgcggttgcactccacgaacggctcggcgccgacgccgcgctggatggcgcccttgatctgggacagcgtgtagtagccgccgtcgggcgacacgccgccgtcgcgcagcgcggcgagcacgggcagccgcgaccggaggcggagcgccgcctcgaagtagccgtgctcgtcgccgagcgccgccgcggcgcatgtgccgtgcttctaccactcgtgcgcccagaaccggatgccgtcgttgctcgggcacgccagcgtcggccactcccggcgcatgctcccagcaagtcgctcacttggagggg

SEQ ID NO: 38496 - DNA, 361 bp, Oryza sativa
  Clone ID: uC-osroM202003b06a2
gatcaataacgagatccaaattaggggaactatcttggtctatctattggggcctgcgacaactgatcgtatgataaaagctaagtagttaaaaactagcctctagatttcatcacggtctctggtaggtacatttttcacatgagcaatttgcaactgaaaaaaattatcaagcaaacaaggctctggtatccgacgatgtactaaacgtgcacaaagcccataacatgttgcatcctgctgcatttttacaccactccagacggaagtcgaaggacaagttgcccaccaaaaacactcttcacatagtagtagcagaaatcagcaaggatgaaacgtctgaacgatttcagagagaagc

SEQ ID NO: 38497 - DNA, 347 bp, Oryza sativa
  Clone ID: uC-osroM202003b07a2
atagagccccgcatggataatcgccggggaggatgatgcaaattcgtttttctagtttggccacctaataatggaacaaaattctcttctgttgcttttgaggagattaattgaaccattatatcatggacacggaactgccgagctgtaccattaaaaccaatgtccacaggttgaaccagacttttgttgatgagctcataaaagtagctctccgcaacagaggccaatttctgcccacaggcttgacagataaagccttcaactatccatcgtcatactaccatgcttctttcaataatacaattcctcggcaagaccatgaaccccaccgaataagttttgag

SEQ ID NO: 38498 - DNA, 425 bp, Oryza sativa
  Clone ID: uC-osroM202003b08a2
aaatccgggaaaaaaacacatcacaattattaccgagcacctctatgtacattgtacaggatgggttccgttccatatggacataactctccattgaaggaaaacctcaatctacagttgccctaagaaaggtcgaaagaaagggaaacatctcaaagaccgccagatccgcataaataaacagcttcaaagactgacaaactctgcaccctaacgcataaaaccggttacagtagggcggctaagccaagcgaacaacacagcagcaaacataaacatttgtgcctctgatatgtgcaagctaacggctggaaatctggaatccccttgctgccctttgggtcctgtccagatttcttaatctgcgtacctgctctggggcataattttattctgcacttgggtattccacctgctgatgagat

SEQ ID NO: 38499 - DNA, 169 bp, Oryza sativa
  Clone ID: uC-osroM202003b09a2
ggtgggtcttctcggactcagacagccattaaaccggtaagcctgcatgcccgaaaaacacaacaacacccagacggaactccccttggcaccaactctactaggacggcaaaatgaagcggaagccataggcggccgggacaacccaccgactgtcacacccaaagaa

SEQ ID NO: 38500 - DNA, 413 bp, Oryza sativa
  unsure (1)..(413): unsure at all n locations
  Clone ID: uC-osroM202003b10a2
gcaatcaacaaattttattaaaatgtgaatataaataccaaaatttacaatacttgttaaataagactacataaaaaacgtgtgaaaaaattttataaaaatttgttcccctccttgagacacttctccatctgtcggactttttgacactggtgtgggtgctatcaacggttctcgttgggcttcttcactttgttctggtattgccttcttttgtggggattcaccctttttcgtcccatttccattcatataagaataagttgtgtgctgggtggtgngataaacagctatatatttggtacatgggccgaagaaggggcgtaacatggttaagaaagcgtgtcgaaaactgtcattgattaggccatacattattgggttgacgcaagcagatgtcatgccgatcaaat

SEQ ID NO: 38501 - DNA, 412 bp, Oryza sativa
  Clone ID: uC-osroM202003b11a2
cgtagaatgattggtccatattttattttggatcgggctgcaaaagccaaataagtccccccttgacatttacatcaagtacacaaccaaaagaaaacgtgcgagcaaaaaaaaagtctccagaattcactagcatcggcgaacgtactagttaaacatattcaccatctcatcatggaaggagttattgatgattgattgattgcacctgctggaagcattcttgtggacaatctagcctgtgttctgcatgccggcagcaatgcccttcatacgtaggatgaggggtgtcctccaggccaggtgcgtactcgctcgcagcgttcagttggaccagctcggcagactggttgctgtcgacgaactccttcgacaaggccggctgggacatcacctcgaagctagggtccct

SEQ ID NO: 38502 - DNA, 388 bp, Oryza sativa
  Clone ID: uC-osroM202003b12a2
atatacatgcattctgctgttcatttgcctgatggccatgcaccaatataatgcatcctcctctctagcttatgataagtactaattaactaattatcccagaggatggcaaccaatataattgatccacttgagaccaagcatagtggacacttgcacacatgcatgcattggcatgcacatagtacggcttgatcacaaacttaatcatcatactagcttccttggattaatatgatcatatcacatcccttgtaattagcatgaattcttgcatgctagatcattctgcctttttctgatcgttgtagaaagtagctcgccggattatattaatcaattaagtcaatgaatactagatgtttgaacttgcccaagagaggggatg

SEQ ID NO: 38503 - DNA, 523 bp, Oryza sativa
  Clone ID: uC-osroM202003c01a2
gtcgagcggttcatgaacatccccccgctccccgccggcaccgaccccgccaccggcgtcacgtccaaggacgtcgtcgtcgacccggccgtcggcctctgggcgcgcctcttcctcccgcctggcggcggtgctccccagggtaagctccccgtcgtcgtgtactaccacggcggggcctacgtcgtcggctcggccgccgacccgttcacgcactcctacctcaacggcctcgtcgccgaggctggaattctcgccgtcgcgctggagtaccgcctcgcgccggagcaccacctccccgcggcgtacgacgactcgtgggaggggctcaggctgggtggccttccacgcgaacggcggcggcggctgttgagccgtggctgctcgagcacggcgacttctcccgcgtgttctggcgggcgccagcgccggtgggaacattgagcactacgttgccgcgcgcgccggcgagcacggcggccttgggctcagcatcagggggctgttcgtcgtgcacccctac

SEQ ID NO: 38504 - DNA, 484 bp, Oryza sativa
  Clone ID: uC-osroM202003c02a2
acatgtaatacgatgttgaattaagcaagcaaatttaagcatgcagagtgcactgcttagcacacactgcatgtgttgctagctagctagctccatctagttccctctcttctcatcatgattgacacttgataaaattaagcaagatttagctagctagctgagctgatctgatcaccatgcatgcatgcaagcaaggccaattcaatttcaagctcgccggccatacaccacacagcacatatacggtgggtaaaacaaaaacaaaaaggaaatcatacacaacattgattcattcatccattctcttaattaattgacttgaggttgaggagcatatatatatcgtgcgtggcatgcatgcatatatatggtacggtggtcgacgacgacgacgacgagcctagcaagcttggatgtttgtcgatctcataattaattaatttggatgggtcgatgagatgagatcagatcttgccgatga

SEQ ID NO: 38505 - DNA, 404 bp, Oryza sativa
  Clone ID: uC-osroM202003c03a2
aagtaaatatatcatatattcgattatatatatatatataatagcagacaggttacatccattagaactcagaatcaccggaattgaacatcaaaagtacaacacaagcagcagcagcatcagccagcagcaaacgacatgattacccacgcttttggatgaagaacaagaagtacgagaagaagaagacgatggtcgaacaccttgatcgagctcaacaatggcgatcgatcaccaatcacctacttggtgaactcgatggcccaggcgttggcgtagatgtaggtggccttgaagccggtgaatccggcggtgcgggcgagctccctgaactcccttttgtacctctccttgccgcacgggcttgtgggcgagcatgatcaagtcgacggggaacaacccct

SEQ ID NO: 38506 - DNA, 226 bp, Oryza sativa
  Clone ID: uC-osroM202003c04a2
gaacaaaaaaagacagcggttttccatatatataaatcacgatataggaaaatcaagaacatccgtccctacggaaaaagcaaatccgttttacaaagcattattatttagagtacacaaaatgacactcggtgaacaggacagactagtaataaaattcaaagggccttgtcgacgccaaggatagaccgagaccgaaatccaacgttgacacatcacggctgat

SEQ ID NO: 38507 - DNA, 339 bp, Oryza sativa
  Clone ID: uC-osroM202003c05a2
accacaactttttaaggatggaatcgagtagcaatactttcaccccaaaatacagtttagcgacaatatcttagaaaagccgcttgctttgccgccatgggctggcaagcctgggcagagcagctaacacaaagaacacgagatcactataaaccaaacggcaacgaacgaagaaaatacagggtcttttttgtctgaagatacacgaagcggttcgttttctttttatttttagtctccctctcctcctcgatgatgggtgtatggcaatggcaatggcgatgggatcctggcttagctgatgggaaaggggctcgccgtcccacttccttgaggccc

SEQ ID NO: 38508 - DNA, 459 bp, Oryza sativa
  Clone ID: uC-osroM202003c06a2
ggagaaggctatggcgtggatctggatgctcatggcggcgggggccgtgctcctgtgggcggtttctctggggcgggtgctctcctcctcctcgccggcgtgtctgcctgccaactccaccttcctctcccctcctcgcggcgacaggatgagccggaatgtcctcctcgttctcgcccaccccgacgacgaatccatgttttttgctccgactattcttttcctcaagtcaaaaggtcacagcattcatatcttgtgcttgtctcaaggcaatgctgatggccttggaaatatccgcaaagaggaactctaccttgcctgtgtcactcttaagattccagctgagcaagttaaagtcttggaccactcagaactgcaggatggatttcataaaaacttgggatcatggactaatagcagaacttaccctggcacaatcccagttatggaatatcgaca

SEQ ID NO: 38509 - DNA, 95 bp, Oryza sativa
  Clone ID: uC-osroM202003c07a2
actcttctcctttttatcacacccgcccatgctgaatcaagcgggcggatttaaacatgcaaatgtcgaccttttctccaccacagtcgacagtg

SEQ ID NO: 38510 - DNA, 457 bp, Oryza sativa
  Clone ID: uC-osroM202003c08a2
gcttaaatactgttagccttttacacaaatcatttaaccagttttgtcggctccatcacacgccagacaatgtctctaacctacaactagtgcattgcaacaatcatgaccttgtctaatgtggtcttacaacttacaagttttcaagactcgttataagtgaactagtttcagcagagctttgcatgaggttttgactcgctatacagaactacagacttactgttagagcaaggagaatttactgtttcagactacctagcctctattgtagttgtcgtcacaccattgctggtaagtccatgagatgattctgtgtctaatgtgatcttcccaatgttcactccaggctcatttggctgtggcaacgtggcattctcactggctagcatcataacaactgaagacatcaatggtctgttcttgggttccactttaacgcacaacagagcgacgt

SEQ ID NO: 38511 - DNA, 75 bp, Oryza sativa
  Clone ID: uC-osroM202003c09a2
ggggaaggggaaagagttgactttatccattctccatgatctgcctaaggtcttcaccatttcccattcaataac

SEQ ID NO: 38512 - DNA, 434 bp, Oryza sativa
  Clone ID: uC-osroM202003c10a2
aaagcatcaaaagggttcttgacgtacattaccaaattaatgaactttcgtacaacacaaagctacaaagtctatcccagtctatttatatttatttttcacagacggacggtatgtttcaccttgatttatatttttatagacggtcatttggctctaatttggctctaagggtatatccgcctccaaatatatactggactatgtagcactacactgcaccgtacaatacaaaaaaaataccaatgtaaaacagcaacgtgccaaaagttttaaataaagaaaaaaaacaactgacgtcttggctcgcggcagcgcaagaaaaaaagcgcgcgaaaacgccgtgttgggttgcaccttttcaaagcttacagctttgcacgcgatgcactgccgcggcggacatggcggcggcggtggcgatcaaacttagc

SEQ ID NO: 38513 - DNA, 90 bp, Oryza sativa
  Clone ID: uC-osroM202003c11a2
tttcttttttttcacaccaacacatcatgcatcccgggggggctcttataggagtggattctctcttatccactctctgcctctccactc

SEQ ID NO: 38514 - DNA, 407 bp, Oryza sativa
  unsure (1)..(407): unsure at all n locations
  Clone ID: uC-osroM202003c12a2
ggaagcaaacacatctcttgggtctcgataacagtaatatcctcatgaggttggtacaaaactttgaaggggttacaattagcacagctcactacagcattttgtttcaaaaggctactacagcagtattcttggccagcaagttgaacagtgaaacattccccattttttatgtccgtgccgatcagattcttggtgctcctccgattgtagcttcagggagtcgttctatcgagtacctgtgccgagtgatatacatgattggaacaccaggaacctttcttatcctccttttcaaatctctatcacatgttgcgacgatgtagcacttgtgctgagtaaccctctctacgatacagtcatcagcataagttcccttgngtgtgcatgcttaattttggaaccta

SEQ ID NO: 38515 - DNA, 466 bp, Oryza sativa
  unsure (1)..(466): unsure at all n locations
  Clone ID: uC-osroM202003d01a2
agnataacagactgatgctattattttaaatgtcgccacaaaccaattagccgtcccatttgtacagcagcaattcgcttacacagttacactttaaaacaagccgcttttggcatagcagtggctgggtgttcagacccttggcctcaccctgcgcccgctggtatcgccgccatccgagagctgcccccacacgctctggctcttccctccgctgctgcattcctcctcacacccggcgaccgtcctcagtatctccgattgcagcgcggggcagttgtctttgaggtaatcaaacccgtcggtccggattacagctgaaagattttcagcagcaaattttaggcaaacagatttaagctccatagcatgatgtcggtcagccaatgctagggtagttgccacagagtttacagaaatatgcttgcacaagtaagattcacacaataaccgtagtcttggcaac

SEQ ID NO: 38516 - DNA, 417 bp, Oryza sativa
  Clone ID: uC-osroM202003d02a2
aaacaaaaaaaagatgggggggaattaaagccggtgctccaatttaccatacccagctttgggttccggggatcccaaaaaactcctcccgggggcggggtttattttttaaaaagccccggttcaaatttttgggacaaaagtttttgaccccccaaagatggggcccttggttgccaacccccccttaaaaccctaaatttgcatccgggggggggccaatggggtcttcagcccccccccgggggggatcagtccttgggggccttggcggggggggttttagggggccccttggcggggccagaaaacccctggtttggcccaaggggagccccaaaggtggccctgcccccgggggagaagggcttttgggccttaccacattttcggtttgccccccaggccttggggggg

SEQ ID NO: 38517 - DNA, 133 bp, Oryza sativa
  Clone ID: uC-osroM202003d03a2
tttttttttttttttttttttttttttttttttttttttttgttgggggactaaatttagaagaacgcttaacaaggcggcagccactgggatattttaatacagctctagtttttggggttccagcctgggc

SEQ ID NO: 38518 - DNA, 386 bp, Oryza sativa
  Clone ID: uC-osroM202003d04a2
agcgctctcaaagtagcatatattagtcaatcttgatgaaagagggacacaagccatcatctatagtgatggtgcctcttacaaacttcaacacacggataacaagcatacactcaagagtcaagaggtggctaggttttgtgtgtacaatggaacacgcaggcatgtacacaaccaagtatactccaccccaaactatagtctttgcaatggttttggcagttgctcagaaaccatgaatcttgatgtgttccttcttcacaatgccggcctgaacaagaaaatttgatacgttcttcctctgatcaccctgaagttgaatgacctggccaagctctgggtcctggacaacagtaccattgcagcaaaactttttcttgagatct

SEQ ID NO: 38519 - DNA, 409 bp, Oryza sativa
  Clone ID: uC-osroM202003d05a2
aatagaaatgtttggagacttggtattaatttggtacatgatacaatagtttccctagatattatctaatcagagtgcacagctgcggacagcatgtcaaaaatgcaatattgcctgacaaaatgcagcatgtccaaagaagtcttggaaaaggtacgtaatatttggcactagaaaattatgagggccccttattcaagaattgaatgcttttgggccaaatgagtacggtgataatgtagtgcaaaggaggcgaccgcatgtcagctataagaagacgggaaaaatatcaaacagtctactgtgcctgaaggaaaatttcatgacacggtgtcaggttgatttcactgctgatgcaagtgacttcagaagggctggtgacggtcttttaaagggtgggtggaaggat

SEQ ID NO: 38520 - DNA, 116 bp, Oryza sativa
  Clone ID: uC-osroM202003d06a2
atgcggcaagatccgataatttcatatgtatgtacatcaacccaaatagtcaaatacaacacggtaaaaacaaaggcatgacgaccatgtatggaaaagttaatgggtgggggtgg

SEQ ID NO: 38521 - DNA, 333 bp, Oryza sativa
  Clone ID: uC-osroM202003d07a2
ttttatatttcacccacaggaaccaggcgtgatgggggagataattgaaactgcatggtcagtacgattccaccactgtaagaactgaaaattccttaccctctttattttaacctcctcccaccgaataaacaagcgacaacacattgcaccgattgggccgacgcccagaccttagtaagggactccaagaacagtagagtactcaaacacatagcctcatcactgcgttgtggaaatgctcctaacacccggcgaccgaattagctatgtctgcatgcaagcctggatcataattctttgggggaaacaaacccggcgggcccgaattac

SEQ ID NO: 38522 - DNA, 412 bp, Oryza sativa
  Clone ID: uC-osroM202003d08a2
ttttataacgaaaacattcctgatacttttttccactgctaaattatggcagcttatacaaagtcaagtaaggctacaaagagagaatccccaggcaaagaaagatatcagaacatatgcttgctaagggcggaaggtggaggggacgataaattacatatcggatgtcatctgacatggaaaaaaaagggaggtaaaacttctcttccgggtaagaagtaacaccgtaccatcaaaggatagcaacaggtgcaggcaaggctctaaacctttcaactctatgtttcggtcagacaactgaagccaagccgcaaaatgccatagtttgacaacacacaagcagctaatcggaaccattacaacctacaggtgacaggctcagatgcttgttgtcccaatgacctttttcatg

SEQ ID NO: 38523 - DNA, 493 bp, Oryza sativa
  Clone ID: uC-osroM202003d09a2
aacaataaaaagatagcatggaattaaagccgctgttccaatttaccatacgcagcatttgattacaggaataccaaaaaactactaccgatgacaggtattaattattaaaaagcacaggttcagattattgcgacaaaagtttttgatacccgtaagattggacgcttgatagccaaaccacactcagaaccctaaatatgcatacggaggatgtccaatcggatcttcagccaccaccagaggcagatcagtacttgtagtccttgacgtgaaggctctcagaggcaccctcgccgagcacagcatcaccctggtatgtaccaagggtagcctcagagttggccttgcacctggtgatgaaggccttctgcgccttcaccacgttctccgtcttgccgtcccaggccttgagcgtgctctgctggagagcacggccgaaggagaaggacagagcccacggcttcttggtgctgagcttgttcatggcgtt

SEQ ID NO: 38524 - DNA, 301 bp, Oryza sativa
  Clone ID: uC-osroM202003d10a2
gatccaattcagattttttttttcacgggggcagtttatacacaaatgggggctttcttggacagttacacgtacctttgcagcagcagaagtgcagcttgagaaggacagggaaaagaagaaaaaaacttacagggagaacagtagagtagatgaatgtagtagtaaaagacatactagtggtagctagtggtcgatcttaagaagcgttttaaccacagcttaattaaagactttaataaggggatcgggatgagtaacttcaccgagtctgggtaggtagacattcgggtccgggacg

SEQ ID NO: 38525 - DNA, 324 bp, Oryza sativa
  Clone ID: uC-osroM202003d11a2
ggggcccagaaaaaagcctcctcagccataactagacgggcatatatatttttggaccatggagaacccacccgggacaaaaattttcggcaatggtgaggagatttttcccacatgggaccaagggaacttttgcttgcgctatgaggtgcactttaaagcttaacggaaaaaaaatatgtagttggatgggaccgcaccaaaggagggttgtagatccccccataggcaattcaacactttttattgtctttggggttggggtttcttggacccctcaagattctgcaaaccaccctgtgttcatcccaaaaaggattgggg

SEQ ID NO: 38526 - DNA, 77 bp, Oryza sativa
  Clone ID: uC-osroM202003e01a2
gaactaattaatattaattgatcttaataatagtgaacaatagtggtagtaatacatcgagcctctcgggggggggg

SEQ ID NO: 38527 - DNA, 459 bp, Oryza sativa
  Clone ID: uC-osroM202003e02a2
aacagtacagagctatattctgcatgcgctgaataacatgttcaagatgacagacccacatgaaaaatgtcagctcagtacgggctggaacacaacggaccaatttacaccagatgcccaccatgctaatgactagtggtccttggcttgtcagccacaatgtatcaccaccatcaccacaacttttatcggtttacttcgcttttcaaaattttatctgtacagggattgcaagaatgttgcccaaacttacagcagctactgagagagagagcacgctactgaagatggttatcacttgtaggtcagcagcaccgagttgattacgtgcatgatcaaacggatgttggtcgcttccgaggaactgcttgctggcagtgaccgttggtggttcaaaacgccatagacctgctcgaatatcggcctcacatgcacagggatcataggatctgtggactg

SEQ ID NO: 38528 - DNA, 443 bp, Oryza sativa
  Clone ID: uC-osroM202003e03a2
ataagcaatcgactatttctgcacctcttatggctctattttcattcggtagggaaaatgtttaggactaacaaatagagacatacgtttgcacgtgcagctgtagcacggatgccataaccactaataatccagtgacacgctgcactcacataatccaattgagaatgaagattagccccaaactgtgtaaatcttaagtccacaaagactgagcatggaaaaaaagtaaggagcaatgaacatagacacgaacagcgcttcttgctttggccgactatctcatttgaactattccagcgcttacaagcttctgaatcttctgcattactccagggttcttaagatgctcctgagaagccctagggttcttctgcaaatcgaccagtacctgtcgcatgatgggatctcgtagaatattctggatctctggatcctgcata

SEQ ID NO: 38529 - DNA, 436 bp, Oryza sativa
  Clone ID: uC-osroM202003e04a2
caataaaaaactattggaataattcattaagaaaaaggttagatggttacaatgccacaaatattctgccagttcaactacacgttgtttctaaatatttccaaaagttatcgaagctatcacctactaagttaaaaaaaagagctgatcatttattctacatatcacttgggaatagttaacaattatcctaaccctcattgaggggcttccaatttaaaagaatctcaattcttgttttggatgcaaatttgtgagcaatgatgacttcatgtgaggcatcagtagatgatgattgtactattgatgtagcaacatgctcaaaacagtttcttaaaggcactcattataggctttaccatactcctccatacgaaatgatgaaacagaaagagatgtgttggttgtatactcatcaagatgattgaaagggatc

SEQ ID NO: 38530 - DNA, 447 bp, Oryza sativa
  unsure (1)..(447): unsure at all n locations
  Clone ID: uC-osroM202003e05a2
atcccaaacaagcgatatatatttcataatgaacataaatctgcttctacaatatactccatcagtaacatgagcaccaaccacaaggtttattagagacaatgccagccccatgctaggacaagcttatttcagctgttcttcctcctcctcttcttcttcttcatcatcatcatcataatcttatcgccataatttatcgccattttcgcatccgtccataagattatacctatttcttccccagttctgaaatgtccaaacatctatgtgtttacaaccacgcggcgttcttgatcggcgtgacgacggccttgacctgangtagttcttaggctgtcgatgcccttctccctcccgatgccgctctgcttgtatccgccgaacgggatcgcggcgtcaaagacgtcgaagcagttcaccccacggtcccgaccctgacgcgcg

SEQ ID NO: 38531 - DNA, 473 bp, Oryza sativa
  Clone ID: uC-osroM202003e06a2
gccattgctccttgctgtaaacaaaaccgatcctcaaaaccattattggtgctcttttacttaatgtacatgtcgaaactacaaacctactagccatcacctctattatatttatagccgttgatcatttacaatttcagcaagggaaggtgattcagagtcattgtatttactcggaactggggtgttccgtctggactggcgctttgtcgccacgagaacctgctccgcctctggttcgtcggagatggagaacttctcgtcgtcctcgtcgcctttgaacaccgggtggatgtaggcattcatcaggtatcctttgaggtcgaaccctggctctcttgcgcgttctagggtatccttccgcattgcatcctgtaatggatattccacacaagcaggctcatagcgattcttgcagcatttatagaaataaaaggttacaacagggagaacaaggagcaccggtgttgact

SEQ ID NO: 38532 - DNA, 139 bp, Oryza sativa
  Clone ID: uC-osroM202003e07a2
tctcggatctgttttatacggcggcggcggcggctgtgggcgcggaataactttaacaattagacaattcactcatccaaaatgttagctctaatacaaccttcatctatctttattaatttacaccaaatgcccacca

SEQ ID NO: 38533 - DNA, 396 bp, Oryza sativa
  Clone ID: uC-osroM202003e08a2
ccaaacaaagtgtgaaatttattttattcataatccaaaagaaataatcaacagatcatacaaggacccacacatgaaacgaataaaaacacggaaaatcgagtagctccatggtacgtgtgcatgcttaatttgcaggtgcacgcatgcatatttgtcgatcgatccatgcatgcgcgcaaatgttgcaagctaagctagcacgtagtagcaatcaaacagtccagataaaatagccagcggaacaaatgcgcagtagcgccgccgcctatcgatgcttagcatttgaagccggtgggcacgcgcttgccgcagtagttgaggatgaggctgaggtcgacgggaggtgagggttgatgccgaggatgttgcctctgatggccgtgcagaggcata

SEQ ID NO: 38534 - DNA, 427 bp, Oryza sativa
  unsure (1)..(427): unsure at all n locations
  Clone ID: uC-osroM202003e09a2
gatgaagccagatacgaaaagttggacaaaattgctctgaaacgacttggatctatcgtatacacttctgtcctaactgacagtacagttacagtaaattttgaaccccattttcatgtttggacaaaactcctataagtttccacattgaacctctctttgggaaaaaaaaattctatcaaaacatttcaggcattccatgatgctgaccgtcgcatggtcggcttcaccggccggtcttcctccatggagatcatcatcagcgtcgacgggtcctccagcatcatacgggctacgaggtagccagcgatggaccatgtctggaacttcctggcctgcttgccgatgaaccgtcccagcttgccatcgtagtactctggcccagccgtctttagtagcctggactcngcgagcttaatggcgcgct

SEQ ID NO: 38535 - DNA, 490 bp, Oryza sativa
  Clone ID: uC-osroM202003e11a2
attggatcaaaacatttctattaccacagctgtgtaaggatggaatcgagtagcaatactttcaccccaaaatacagtttagcgacgatatcttagaaaagccgcttgctttgccgtcatggctggcaaggtgagcagagcagttaacacaaagaacacgagatcactataaaccaaacggcatcgaacgaagaaaatacagggtcttttttgtctgaagatacacgaagcggttcgttttcttttatttttagtctcctctcctcctcgatgatgggtgtatggcaatggcaatggcgatgggatcttggcttagttgatgagaaggggcttgccgttccactccttgaggctagcgagcatgggggcgacgagcttgccctggctgatgcccgggaacaccctgatgcactcctcgccgggggacttgaggttttcgtcggtgaggaaaacccaacccgggctctttgggggcacagcggttgagcgg

SEQ ID NO: 38536 - DNA, 459 bp, Oryza sativa
  Clone ID: uC-osroM202003e12a2
gtatgcttgactttgcaactgtacatgatcaacatcacatccatacatcccgactgcagcccaaacagggctcaaaccgcacgacccaccccaacagcaccaccaactgcgtacaaccaatgcaacaccctgctgcaacccccaacatacagcacaccttttactgtacccggcccgccatactgcctgcgccgcctgctcctacgcccgcgctgctgctgccactgctgatgttctcatacatgttgtctatcaacgcctgataggccaccttggcttgcggccgcttcaacttgaaggtgggtgtcaggagctcattctctacagtgaagggctccgggaccaaggtgattgctgacacgtgttcaaagccacgcagctgcgcggccctgccctcctgcgccatgctgtgcatgacggtttggatcacggcctttctcctggcacagggcaggcatg

SEQ ID NO: 38537 - DNA, 353 bp, Oryza sativa
  Clone ID: uC-osroM202003f01a2
gctctggttggcataaatttgaacaggtacatcaacaactgatacataaccaatgtctccccaaaggggaaaaaatagtactacatacatagcaaaaaagaattcacgacttgttaactcttaaccgctgatcgatctacactgcctaccgaatttagacgtcagtaaaagggatgatcttaaattccccttaatgattaggtagccatcatgatccagcctctcaactcaattgcatcagagccttatatacatatcttcagattgacggcaatcaactggtgccacccttgctctcagacttactacaggtgtcgtattttttgtgcagaatgtcctcaggagtcagcggc

SEQ ID NO: 38538 - DNA, 417 bp, Oryza sativa
  Clone ID: uC-osroM202003f02a2
gcaaccaaacaagcttatttgatgttcatttctcaattctcacgttacatatgtataatcaattacttgactgctttaaacctatacatgagaattctggactatgcacatttcgagccctcgaaaccctatgtcagctgattaccttcaaaactttgcgccctatgttggagatcagtaatacctccactcccatttggggtataatggcacgaaaaggaaacaactgtatacatcaaatatacaagctatttagggatctcatgaaaaccactgatttcatcaaggagcaagtacaagaactttaatggtgccctgactgttagcagttaacatggtagggctatcgctcttccagcagactgcgctaataaaataagagccaggatcatcatctgcatcatcgagatcagatga

SEQ ID NO: 38539 - DNA, 463 bp, Oryza sativa
  Clone ID: uC-osroM202003f03a2
atagatcaatttacaaaaacaggtgattgattacatgtggcaaggttctataaaaccatgactgattacataattggagggtttttaaggcaacttggtaatgggtatacaccaagagtataagcaaaaggcaattaggtacatcaaaagcttcaggatttctgtacccacaacatacaaattagccatctgctcgacagttcgttcagtcatagcttacaataaaacaaactataagagtttatctgacagaggttgcattgcatataaactgacagcagactattatcaggtagatacttcataagccaaggatgaattgccacgggcacatcggagtgcgccagtgagggtaaaccagaaccgcccgtgttccgcgacctcgaggttttcacctcatgacggggaccggtggttctggttcattgtggggtggcgaatagcggatgcgaagctgatgtgc

SEQ ID NO: 38540 - DNA, 410 bp, Oryza sativa
  Clone ID: uC-osroM202003f04a2
gagcctcacattttgccagttgatgaataaaggactggtatgtacaaaatatggtgcctaaacccacaaaacagagaattagcaccgaaggcaattcgaacaaggttttacaagattgggcaacctcccgccgataccactgtcgtctaaagatagaaacgcaaccactgttgcaggcgacttccttctgttttcttgagtttaagggcagaatattcatggaaccgaattgtcacctttatgtgatcccagacttgcaaactggacatagtttcttacttcttagccattcgtctatgcattctttatggaacatgtgaaagcatggcaagcggaggatcgtatcaccaatagaggggtttttaaggcaaaactggacacggcttttcaatatttgactggattactga

SEQ ID NO: 38541 - DNA, 457 bp, Oryza sativa
  Clone ID: uC-osroM202003f05a2
caaaaaccacgatttataaagtgccggagatgaagtacacaaattaacattacatcgagttttaataaaacatcatgcgaaaagccagcaaaaacaaaaggcagcatacagctaatgaagctctactggagtagctcgcaaaaggtccgacttattttcagtagcactctactccatttcttccgaaagagtgaccatcttctactgggtgttgtacatgtgacggatcaggtcaacaacgcgagagctgtatccccattcgttgtcataccaagacacaagcttaacaaagttgtcattgagagcaataccggcctttgcatcaaagatgcttgacctgttgtcaccttggaagctctgtggaaacaaggtcctcctcaacgtaacccagaatacccttggagtttccccttagactcctccttgatagctgccttaatctgatcataggatgctg

SEQ ID NO: 38542 - DNA, 341 bp, Oryza sativa
  Clone ID: uC-osroM202003f06a2
gagcgcactctccggtcatatttgtctgcacattattattcgacaaagtaatataatactgtaacaagtgaagctatgaaaaggacgtccggaagttaaaacgggcaaaataaaccccaaagcctgctttgggggatgcaagcctagcacgagtgtatggctcgactcaccaggaacacaaaacgattttcccagatgagatggtaagcatggaacgcttatagtatgtacacggtgcacaaacaccacacaggtgagcgctttcagtactgctgatccaggtaggcatctttcttcgtcttggtctcgccactgaggcaccccacaaggctttcggaaac

SEQ ID NO: 38543 - DNA, 450 bp, Oryza sativa
  Clone ID: uC-osroM202003f08a2
aattagaaacgcttcttgcatatatataccaagattgggctatctcaatctataaggaaagataaaaagtacttgatcattactgatgatcataaaataaagtacacttcaggaagaaggaatgacctaaaatggctccttcaacagaggaagaatagggctagacaaggtacacaaaggtaggcaaggccattgccgtcatcgttaacgttggcctcgatcagctgtctccgttctgctgcccgaagctgcatgatcctgagggcaagaaggagaagggattctcagagatgtcaaatccaggtcgagtgaagtcatcaagcccaccgaagcaaggatcaaagctcaatggcgagaaatagcgcggatcatcggccatcttcatgtcaagatttgggatgtcgtccgatgagctaccggggaaagttatacccagcgcttcccaccatg

SEQ ID NO: 38544 - DNA, 341 bp, Oryza sativa
  Clone ID: uC-osroM202003f09a2
agttgtaaattgaactgtatatatcttgaatttgaaaacaaacagctgcccaaattatgttttacactccatcgcattgcactgctgacccaaaaaaaagaactagcaaaatctttctattctagcggggctaaaagaatcgctactttgtcgggggattttgtaccaagaagcggcggtggtgtgatcgatcgatcgatggtcagaagaaggtggttccggcgaagccgcggtggaggaggttgtgggcgatgttgtccctggcgcgcttggcggcctcggagcggacgggggtctccggcgaagtctcgtcgtcgacgagctcgaaccggagctccggc

SEQ ID NO: 38545 - DNA, 480 bp, Oryza sativa
  Clone ID: uC-osroM202003f10a2
aggggagctacacatctttggatttcaacaaacaagactgctaggaacagtatatctcagctctctagtggatcggacgtccgacgcgtagtcacgtcccattttccatatacgagtactacttacaacacacacttatgtgaaaaatcacagcgtggtcttggctgccctcctgaccagcacagcccagcacatgaccctgtacaagacgaagaaccctagcatgaccccgacattgacccacctcatcccctcgtcgatccctctccccctcagcacatcaccccccttcctcaagcacacgcctcccgcccacgccacgcacctgccgctgctgctgccgccgtactcgttgatcagcagcaggtccagcgggtacctgtacatggacacgtagtacatgaacgcccagtacctcgggatgctcttcctcgggatgaagtagccggagaagaggaagaacacgcccagcgacatgca

SEQ ID NO: 38546 - DNA, 307 bp, Oryza sativa
  Clone ID: uC-osroM202003f11a2
aataaagaataagtatcatgaatatcattatatgagtcagattaattagtattgtcataacagaagctgactcagagcacagagcagcaatgccaattacaaaaagacttgtagcttggaatctatggagtgctaaaagaccacgaccacaacaactcaacataatttacagctggatgacaccaaatggccaaggcagcgatggcagatacggcgctcattctgtaacccccctagcttcaccatggatctccaatctcgctgttattcccgggttgattggagctgaagaagaacttccagggct

SEQ ID NO: 38547 - DNA, 414 bp, Oryza sativa
  Clone ID: uC-osroM202003f12a2
ccatattatttttttttttaagcaaacccccaaaaacataaaggagggaaacgtttaaaactgtaaggggaaggtggtaccactttcttttaacaccaaatcaaacgggaacaaaaaattaaactcccgacaatttatttgaaaagagggggatgatatctccaaaggaagtaaaaagagagagagacctagtaaactcccaactttcaactgcaaggcacttttttgaccctaaccggggaagagaagcgcttgcacaaaaaaaaaaaaagtaaatgcgccatgccaaaccaaaaactttcgcagctaaccaatctttttaacttatatacactttgggaaggaaaaactttttttaggcagtcaaaaaacatgggctaaaacaaagcaaagggaagaactaccctactgctg

SEQ ID NO: 38548 - DNA, 190 bp, Oryza sativa
  Clone ID: uC-osroM202003g01a2
cacggcggacgagtacgtgcgcatccgctcgggctcggacattcccttcctgggcggggtgatgcaccacatcttcaagaacggctgggaagacaagaaatacctggaggaccgtgtctggggcatggacaaggtccgtgaggaggtgctgaccaagtggacgccggacaaggtgcaggaggcctgcggc

SEQ ID NO: 38549 - DNA, 292 bp, Oryza sativa
  Clone ID: uC-osroM202003g02a2
ggtgcaatcaaaaccagtacaagaatccaatacactccccaaacatatgcgatagcatacgaatccaaacatggtctggtaggtgaaacggattaaagtggcagtagcatcagcggcgctacggaccacacagcattgtactactactacattacccaaaagcacataaccaattaagcatcatcataccgaaacaataataaagatggcccaaacggtaggacacagcaggcgacactcaagatgggatcccaggagaaactccggcgagattactcgtcttcggggacct

SEQ ID NO: 38550 - DNA, 289 bp, Oryza sativa
  Clone ID: uC-osroM202003g03a2
aactcctaaaccaggaacgaaagagtgacgtcacgacttggaaaagtttgatacaaacagccgtacaatgttttaaaaccaaatcaggaggttcgagttcactttttttcatgatcaattctctgtgtactaaatatatgacgtcacattattacattgtcacacattctgcaaaactgtaataattttaatgtctaaagcatatactttcttccgtttgaaatggtcaaagacttgaagaggctaagagaaattctactaagttcgttctactcctggagtcttgatg

SEQ ID NO: 38551 - DNA, 294 bp, Oryza sativa
  Clone ID: uC-osroM202003g04a2
aaatcagggtcgcaatgttgaccagaaaaaaaattacagtctagatggacacatgaaatcaacttgcccaacattttatgagaaaatgcatagcagttcgcaacctcagttacacaaatagcagccaagagcgcctagaatacaaaagctgacccagaaattcgagagcagcacattacaagagagtttgagagagggagagagccagcaaggttgagcatttatttagtaatcgttcacttgccattgccagcgttcaaaacatttcagctatctttgcacctacaggctcac

SEQ ID NO: 38552 - DNA, 490 bp, Oryza sativa
  Clone ID: uC-osroM202003g05a2
agtattaattactaggttcataccagagcagcaatagtgttacataacatggggattatacaagtatacaacaatgggagaaacaaagataaaaacctgacgccttcttttctgttaggtttcccccagcatttccagaacaagggagaaaaacactaatctaaataagccgtatacaaaatgaatcagaatcagatagtggcagccaatcatggtttccatggtgccggaggcggtgggggcgaagggaacatcggcggcacggcagaaaacatagtgttcttatccacgccatggccttcacctgacaatgctactaatgctgcaactagaccggcattgccagctagagttgcttccgtgtagttgtaattcttgcgaacattcttgaagccgtcgtggcgatcagggtcagctaccctcgcttcgacaatgatgttgggtattgggttttttgggtttctttccaacttccaaccttctttggaac

SEQ ID NO: 38553 - DNA, 537 bp, Oryza sativa
  Clone ID: uC-osroM202003g07a2
acataaaaagagcacctatgtacattctgtatatttcccattcttagttcatgcactgggacagcagtttcacacttccataagattgaacagtgttattaccctcaaatacaagtaaataagaagcagataagccctatggatataatggcagggtttccatgtatgaagttggtgctgtaaaccttcataagccataaaaagctcaaggcgtatcaactaacgcaccgcgaaagcacgagaggttcctgtaaaatgcctgaccgaaccaaacattggtttggaggcaccaaaatgcctcaatctgtaaacaccagcagcagcgtcttcaggaactgtccactctagagttgcaaaacttcttgaactcaatcttgcgggccttgaccacttgaaacgcaatgaccaatcatcatcatcgtagacaggaacccaattattgttaccatctagcttctcgacgagtgcaaaggtaccatccgtaagaaggtcattccttgggcatgctgaataaaatgtagcattcacagtactacc

SEQ ID NO: 38554 - DNA, 312 bp, Oryza sativa
  Clone ID: uC-osroM202003g08a2
gatacaatgacatagtttataacatgggaggacacaaacaacataattaacccttacaaaacaccacatggacacagacaaaagaccatcacttattcagacacaaaatcatcatcagaagagcagtcgaagatgaccatagagcacctgcagattaaagccttgaaatttttaaagcagccaacagaagaaaaaagatgaagacttcttgatgccaaccacagcttagctcaaagctcactgtgccatggcgcggagttcgctcagtactggagcatgtgcgcggtggcggagcaggggattctgccatgg

SEQ ID NO: 38555 - DNA, 436 bp, Oryza sativa
  Clone ID: uC-osroM202003g09a2
gcaatcaaatcaactacaggtgattaaattaacgaactgcttattttgttacgacgtcgatcaatcgcctccaaacggtagccagttactgttgtaaaacacacaattaaatgagcttagagttcgtcgtggtggcggtgctcctcgtcatcatcatcttcgtcgtcgtcggtgaccttcttgatcttcttgggcgccgggttcggcgaggtcttgatggggtaggatgcttccatggcgatgccgcagagccccttcttggcggacacgttgcgcttcatccggatgtaccccttctcaccccagtctgcgccccacgagttcctgacgaaccagtacttggtgccgaccaccgtagtgccgtagcccaccgccggcacgccatggacgagctccgttccgcattttccggtgaccaccccctcccagtagaact

SEQ ID NO: 38556 - DNA, 336 bp, Oryza sativa
  Clone ID: uC-osroM202003g10a2
agataaaaaaaagcatcgaatttagcataattgagttcatcaaatgtgataatatcacgaaacaggcagaggctattagcatattacactccatatctacactggcagataataataataataatcgaaaagcaagggtgctactagctccccaagattttcgaaaaaaaaaggcaggcaaacgcacgccacacttacagttacggattgctgtgttcagattaacttgcaccatatttgtttatgtacagaagaatgatgcaacttgcgaaatgatcatcgaattgaagtgaacttaatagtgaaagctgttctgcgaggcgcctctgcatctta

SEQ ID NO: 38557 - DNA, 299 bp, Oryza sativa
  Clone ID: uC-osroM202003g11a2
ggtagataatttttcacggccaatgattaatggtaccagtactgtaccacgcatgtcacaaagcacggtaaaaactgaggtggattacatacatttctctctcactcgctcactcactcttaaaccagagatcgatattaggtagctcctatagctacctattctcgtactactattttcctatgaaaaaaaaatacatatataccacaatagatatacacgaacaaattaatattccgtgactaataatgttattggggcggccatggtatattagacgagatcctccctcattctgg

SEQ ID NO: 38558 - DNA, 389 bp, Oryza sativa
  Clone ID: uC-osroM202003h01a2
gcagttcttaaaattattattgttggtcttgaggccttttaaatttgtacatgatggttgggatcttagctggttcatcatctggtgtagagaaaacaccatctaataatatatactctcgacctgcaggtagtttaccataagtggcttcatatgcgtcttgaagtaatttgttcttgttgccctctactaaggctttgatggtttcgtttggtgcaaagtcgagataaagtactttaaagttatcggtattagcaccggtagaagataaagcttcacatttaacaccgtgatgaaatttagggaagctttgtacgaattgttccactgtgagatcacccacatcgacaactactttgtcccaaatagtataacccagtgggatagga

SEQ ID NO: 38559 - DNA, 435 bp, Oryza sativa
  Clone ID: uC-osroM202003h02a2
gaatctgaatgcaacatgcatatcgtgtatgcgtgttgcgtgatacaagtttacagcaacggataggtttgcatatgcatacaccgcaggaaaatacctcaactggtagagacaatcacacaatagctttataagaaagaaaaatgaaatggtggaggtacaacaggagatgaacactagcaggctagaacagggagattattgtgggtcaagaaaccttaaagagtgatgccttattcttcagtgatggtttcagtgtcagatacaggttcaccattcaaaatccactgttcaagctcatcaagatcatcatcatcatgtggataccaatcggaggatctattccaattgaaagtccccaattcttcaccacggcaagccatatgtaagaatggacggcttcgaacaagggcatccaccataaccctgttcaag

SEQ ID NO: 38560 - DNA, 136 bp, Oryza sativa
  Clone ID: uC-osroM202003h03a2
gacccaaagctgattgcattaccacgggggggaatattaaagagaaccactcggtcaaatatttaactgcagcgtgatcaaggcgaatgagctgcgtcagatacaagagctgataccacgaatcctgtcagagaca

SEQ ID NO: 38561 - DNA, 487 bp, Oryza sativa
  Clone ID: uC-osroM202003h04a2
gcgattcaaagttgattgcaatattaccagatacattatgaatgagaaccactttggcaaatgtttaactcgagcgtgaacaaggtgaatgtgctgagcatgttacaggagttgatagatagaatcatagaaaacttcgatgacaagtgatagcaacatccaagtattctacgggactcctcggtaaaggattctacagtacacgtaggagggcgatataaaccatagaggacatcacaatttgcttgatggcacaccaacaccagaggccctaaccttcttctcgacaacctttgagagctccttcacttcctccttcggaatatggcgagggcgacttagccaaagaccttcatcaacaaccactgtagtcccatttacatatttttctggatcagaagcaaggtaaagcgcagccatagttatgtcccatttttcacccaacttaaataaagggatttattttccgacttcccttgggccattt

SEQ ID NO: 38562 - DNA, 402 bp, Oryza sativa
  Clone ID: uC-osroM202003h05a2
cagtatatggtttacaccgttccaaatgaattattgataccaaacagagggcacaaataaaaccatggaaaatacaggatcccaaatgtcatgatggggtagcggtaatcagataatgccacacccagcaatcactgcacttgttactgcggtttcaagctgggtggatgtcttttgtagcattccttctcaatacatgtctttgttttttagtttaggtttgatacataaggatccctctgttctgccttccacttgagggatccatgtgttctgcctttcactcgagggattcctctgtcctgccttacactcgagggatccctctgtgttgccttccacttgagggagttccttggggccaatgttcttcagtgtacagatcttgttgcttccccatgg

SEQ ID NO: 38563 - DNA, 98 bp, Oryza sativa
  Clone ID: uC-osroM202003h06a2
acgcctcgcggcggaggttttttcggcggcttccgatggcggacgcggcgggggctttttttaatccggagagggtgaaccagtacttggactgcacc

SEQ ID NO: 38564 - DNA, 338 bp, Oryza sativa
  Clone ID: uC-osroM202003h07a2
aaaaggagggggcccgcgccatatatgatctttctgtaatccctccttattacatgaaaatggggaaaggtttgggtggatgaatacaaatccaatcctaaccataccaaaaaaaaaaaccccagctaattaactttttttttttttgacaccaatcgacaggggatgcaacaacacaaaagctcctatcccccatgaatttttgctggcctggggttgtcacatacacatgcgcgttgaatttaacacaaaattaaacccattcaacacgagaccggcgggcgccaacaaatcaaaaaaaagaacaggattcccaaaatttaacgaccttgatgaac

SEQ ID NO: 38565 - DNA, 78 bp, Oryza sativa
  Clone ID: uC-osroM202003h08a2
ccgaatgcaacatgcatatccctgggtgggggttgtgtgatacaagtatgcggtcatcgataggtttgcatatgcata

SEQ ID NO: 38566 - DNA, 419 bp, Oryza sativa
  Clone ID: uC-osroM202003h10a2
gtcaaggccagcttttactgggtcatgaacagcatgatgaacgggaggggacagctacggcgtcaccaccggcttcggcgccacctcccaccgccgcaccaaggagggcggcgcgctccagagggagctcatcagattcctcaatgccggcgccttcggcaccggcaccgacggccacgttctgccggcggaggcgacgcgcgcggcgatgctcgtccgcatcaacaccctcctccagggttactccggcatccgtttcgagatcctcgaggccatcaccaagctgctcaatgccaacgtcacgccgtgcctgccgctccggggcaccatcaccgtctacggtgacttggtcccactgtcctacattgccggacttaacaccggtcgccagaactccgtggccgtcgccccggatggcc

SEQ ID NO: 38567 - DNA, 257 bp, Oryza sativa
  Clone ID: uC-osroM202003h11a2
ggaagaagggaaaccattttttggcaatcaccaaatttacaatggtttacatgcctaatccttctcttataattgccaagaacgccaggcgaaatgatgagaatgggtaataatcgatatgtccaaacaaaaacattacccgagcgaacatccagcctctgggggccgctcacgagcaggagcaccgccagtctttcttcatggcgctggcctccatgaaggagcccccttccaacgtggtccctttaagtgacagt

SEQ ID NO: 38568 - DNA, 435 bp, Oryza sativa
  Clone ID: uC-osroM202004a01b1
aatttatctaaatccatccatcgatctctcaattagttaacctcaagagagaagtggggaattgagctagctagctagatagtgagataaatagtgatcaatagctaagctagctagcttcgatcgattgatcatgatgaggtcgccgtggatggtgtttgcatgggcggcggacgatcgtggccgtggcggcggcgtcgccggtgccgacgaagctgaaggtggggttctacgagcacagttgcccgcaggcggaggagatcgttcgcaacgccgtccgccgcgccgtcacccgtgaccccggcctcgccgccggcctcatccgcatgcatttgcacgactgcttcgtcagagggtgtgacgggtcgatactgataaactcgacgccgggacacgtggcggagaaggattcggtggtgaacaaccctagcatgc

SEQ ID NO: 38569 - DNA, 412 bp, Oryza sativa
  Clone ID: uC-osroM202004a02a2
actatgccacaaccccttttgattctgtaatcctagccaccaacttcacaatatatccatttctgtttcagttctcaccaaaaaatttactatgccacaaccacactagataagaagagtacctaatatctaccacagccaaagaaaaggctgcatcacaatatccttacagatctcaccaaaaaatttacgaagtcacggacctaccagagtactagatatggtcaatcaaaaggacattagctgacatttcaaattccttaccacagccaaaaaaacaagcacaggcatagtagcagttggtcacatcgcttgacagactcttttattcataatacctcacggaggaagaacccgctcagaagcatcagaaaactcccatggatagggaatagatctagtagcatgtcta

SEQ ID NO: 38570 - DNA, 440 bp, Oryza sativa
  Clone ID: uC-osroM202004a02b1
gactttagttcagtcgtattgctcgtccagtgctgggatgtttttaaaagcttttgagctaataaaagtttcccatcaagaggagatagaacttgatcacaatattaatgatggcttcatcgtagctgtggtttatgatgattctactgctgtgaggctaggcatttctcagggagacataattctttcctacaatggattgcacgatttcactctacacaagcttgaagagtttcttctctctcttggctgggaattacttgcaagtggcgatcccagttggaatgtaagtttagagcttgtggtatatgatgcagttagacatgctactagatctattacctatccattggagttttctgatgcttctgagcgggttcttactccgtgaggtattatggataaaagagtctgtcaagcgatgtgacccactgctacta

SEQ ID NO: 38571 - DNA, 332 bp, Oryza sativa
  Clone ID: uC-osroM202004a03a2
cgcgagcggtctttgtgtgaaggatacaggctttttattcacccgaataggatagaatatttcgagacggctacatattattgttttacaaagtgtcaggccagggacacacacatcatctgcaatggaaacagtctgcccaaagaagcgtaattcaacaagcgcataatcaatgctataggttctggagacattaccgactgcacaacacctaaacattactcccagcagggtgctacaaaaattcggatgtgggcaaaaccaatggtcatgtgcttacatctgagaacgctttccacaatcaagatgacacgcgcacggtatccgcctta

SEQ ID NO: 38572 - DNA, 277 bp, Oryza sativa
  Clone ID: uC-osroM202004a04a2
gtccaggaaaaaatagctcatgttgaggcagaaaaaaattttcttaggtcaactacatctggacccaattgagatacagcagaattcaacttattctttttgctgctcaccattgtaaaagaaagggaaataacagcaaacacatgcttttatccacgcgacttttttaacacgtatgggcaccacttattgaggaacagctggctctatttttggatgatgccgagcgagcgcatgttggaaaagggagtatttttcagacaggcacagcctcaat

SEQ ID NO: 38573 - DNA, 289 bp, Oryza sativa
  Clone ID: uC-osroM202004a05a2
ggcaagccccaggtgtacatggaaaagttgaaaacaaaccaccaaatagctgaagtccatggtacgtagatggcttacaaccatacaaaggccacacatttttctacatcaacagttcaacataagaacaagggcagccatgtccgtacaccgccagtcagtcccatccgatccggccatcccatgcacaaatcgagcatgccacgttattcaagcatttctcacagagccacactagcagattccggtctgcttcttcttcacctggtccctccagtacgcgaagatc

SEQ ID NO: 38574 - DNA, 545 bp, Oryza sativa
  Clone ID: uC-osroM202004a05b1
atttgaacccgcggctgaacctggcgtccttcggaccactttgatggagcccgagggcgacaagctcatcatggactccgttaacaagaactacgtcgacatggacgagtaccctgtcaccacggagctccagaaccgttgtgtgaatatgatagctcacctgttcaatgcaccaatcaaggaggatgaaacagctattggagttgggacggtgggatcctcagaagcaattatgcttgcaggactggcattcaagaggaagtggcaaaacaaacggaaggaacaggggaagccatgtgacaaacccaacattgttactggtgctaatgttcaggtttgctgggagaaatttgccagatattttgaagtaaacttgacggaggttagctcaatgaaggatactatgtcatggatccctgaaaggctgttgaaatggtggatgagaacactatatgcgttgcggccatcttgcgctttactcttacttgagagtttgaggatgttaagttattgaataatctcctaacagaaaagaataaggaaac

SEQ ID NO: 38575 - DNA, 331 bp, Oryza sativa
  Clone ID: uC-osroM202004a06a2
gtggcgatgcactgccattttagacaagttaccaagttgctaaagcaacaaaaatgctatcatttgctggtgactcttacagacttacactttcacagtttcgcagtggtatccacaacagcgaaaggtttcttcacaagggaaaaagcaacacggagcagctcaacagaaggctttacagacaaaaatgcacactccctgctggctctcccaagatttgcaactggctggctggccatgaggtgcttcaacatcaactgccaccttaaggttagcggtgtcggcacgaagtgatatgtacagatggagacctcatctctagctttataca

SEQ ID NO: 38576 - DNA, 70 bp, Oryza sativa
  Clone ID: uC-osroM202004a07a2
ggaaggggcaaaccaaagctttattagaaggggggcccggaacaaaagctagaaccggcccttacaacaa

SEQ ID NO: 38577 - DNA, 481 bp, Oryza sativa
  Clone ID: uC-osroM202004a08a2
aaaaacaaataaaccgtgagatcactgtgcatcatgtatacacatatagtaattcgacaggttacaaatcagtacatcatcgcaattcgcaaacatccaaaaaccaaaacaaacatcaaaaccatcacggcaacagtcacacgccttacaagttacaagcgacacatccaacaaaatctgctatagccgccaagttcacaaaagagcatttctattgaagctagtacaccgtattagagagtaacagcgagttccaccatcgaccgtgttgtctcacttccttctttgccgagatatcgattctttagctacagcatgggcagcagcgctcgccagagacgacttcttcagattgccctttgggtcgagagctttccgaattttgaagacagcccatgcgactccaagagcgtttccagaggcgtgaaggtaatcctgtgtgacctgtccagcttgatctccgtatctatgtgttacaaca

SEQ ID NO: 38578 - DNA, 427 bp, Oryza sativa
  Clone ID: uC-osroM202004a09a2
tttttttttgtttttttttttttttttttttttttttttttttttttttttttttttttttttttttatagggaacacgggggttaaaccaaggggcctgatggggtgggccgcccaatgccccattggaaggccgggtgaaacaacccgctactggggggggaaaccacaaacaataggaggggtttacccttataaaccacggggggggggtggcaacaggggggggcaaaatggaaaacctggtggattgggaaaggggcatgccccagggtggtttgtttttaaaaaggaacagccaccgattttggccaaaaacaccaacctggggggggaaccaaaaaccccctctgaaaaatggaacaaaaacccagggggggtttggaaacccccaccttttttaagggggggagggggcccccccttg

SEQ ID NO: 38579 - DNA, 429 bp, Oryza sativa
  Clone ID: uC-osroM202004a10a2
acagcggcaaatccatctaattaaacatcaagactcgtctcaacaacaacctgccacaattcacaaacagcaggctgctgcacaagacggtgtacacggttcattttatttgggtgttcgtttccaccatcagattgatataatacacgcgaacaagcagaaacattcggcaacaatttctccaggaaaatcgcggcctatttcgtcatcatcccgagcgagcgttatttggaagagggagtctttttcagacaggcacagcctcaatggcaggagcgagtgaccaacgtcgacgtcggcgtcctagtagccaccctggatgtaggcgttgagccggttcagctcttcccggggctcgctgaccacggcgcggacaatgtctgcaatggagaccatcccaaccatgcccgtgccgtcgatcaccgggat

SEQ ID NO: 38580 - DNA, 189 bp, Oryza sativa
  Clone ID: uC-osroM202004a11a2
gtggcagagcaatcttacgggtgttaaaaggtatgaaataaaattgggattagactaaacaactacctgggtcaggggagaagcaacaggcttctttacaagacctgacgcacccgcacgtttactggggcttgcttgctgaccagaagggatttttagacccacgcttgctagccgaaacataccgtt

SEQ ID NO: 38581 - DNA, 288 bp, Oryza sativa
  Clone ID: uC-osroM202004a12a2
atgcacaattgtaattttattcttattttttattccccacaattagagtttgtcttcatatctatcaaggggagggatttcttcagcgagacccttacgttttctgatttgcaagcacaatacgttaggcttagatccagtttcaagaggatttccagccaatggttgccagtggtcaaatacgcattgagggaaggcttgaccagaagtgttagaacgtaagtactgagtgaaacccaatgactccatgacaggccaactggcctttaccatgtaaataggagtacc

SEQ ID NO: 38582 - DNA, 526 bp, Oryza sativa
  unsure (1)..(526): unsure at all n locations
  Clone ID: uC-osroM202004b01a2
gggaaggcggcgatggagcggcaccagtcgatcgacgcgcagctgcggctgctcgcgccggggaaggtatccgaggacgacaagctcgtcgagtacgacgccctcctcgtcgaccgcttcctcgacatcctccaggacctgcacggccctcacctccgcgaattcgtgcaggagtgctacgagctgtcggcggagtacgagaacgacagggacgaggcgcggctcgacgagctggggaggaagctcaccagcctgccgccgggggactccatcgtcgtctccagctccttctcgcacatgctcaacctcgccaacctcgccgaggaggtgcagatcgcgcaccgccgccggatcaagctcaagcgcggggacttcgccgacgaggcctccgcgcccaccgagtccgacatcgaggagacgctcaagcgcctcgtcacccagctcggcaagtcgagggaggaggtgttcgatgcgctcagaaccagaccgttgacctcgtgttcacgngcattcacgcagtccgtca

SEQ ID NO: 38583 - DNA, 342 bp, Oryza sativa
  Clone ID: uC-osroM202004b01b1
ttttggggtttttttaaatttttattcgggtttttacaacctatatctttcttatttttttctcacacatgaacttgcaaactttctacaccgaacaatggccgaacagcttctcattaagaactgggcccaaaacaacaaaaaagaccccttcctaaattaacacagcccacacacccaaaaaaagaccgtccaaaaaaaaaaattcacacaaaccacactattcggctactcgtcgcattaaaaaccttccccctttccaccatgcacaggagtaacccgccaccaaacatgcaccccaaataaaagttgaagtacaagccacctaacaatgctctcctg

SEQ ID NO: 38584 - DNA, 382 bp, Oryza sativa
  Clone ID: uC-osroM202004b02a2
aaccaaaacataggaggtttcatttcttcttctcaaagtagtgtagcatctttccttctttcaccattacataagcttaagcaataacagataacaaatcctcctcctcctctaggtaaaatattcaaacacaatacccttataagtacttattattaggaaagtagcgtgcatgggcataaatggcagcggggggcaggttaagaatcacaatgctgagcagcgaggaaacaaaacaccataatgggacagagcaaaagcctccgaaagggagcttttaggcagaaggcttctcccacttgaggggcttcaccacctcccaggtgaagtctgggtcgtcccttccgaagtgaccgtaagccgccgtcttgaggtagcgtcc

SEQ ID NO: 38585 - DNA, 500 bp, Oryza sativa
  Clone ID: uC-osroM202004b04a2
aagcaaacaaacgacggaatgactctgttcaactttcttaccagtaccacaataatatacctaagtcaagtacagtgtcaaaatgaacaaaagacaaatcccaagttcaaatctataaataggcgtacagtatcatccagtaatctgaaagagcactgaacgtatgaaatagtactttggaagcgattcagaagtagtcgagggcgacagatgtcaaaacgtttcaggaccatgattcctcgacactccgtccccagaagcacatcagcatcattcggacttggcatcaggagatcgggaacgtgatgggctcctgcttgggctacgtttcttgggggggctcctgcttgggctgcgtttcttggggctcgctgcatcaccattggcaggagaggtatttggagactgagatcttgctggtgatcttgatggagagcgcccctttgactctgatcttgaacgggaagaagctgatctcgatcgagatctagatgctgaac

SEQ ID NO: 38586 - DNA, 408 bp, Oryza sativa
  Clone ID: uC-osroM202004b05a2
gggaagcaacacttcgatttagattaagcgcaagaaaattagacacaaaatatgagccatgaccaggcccaaccaaccaccatgatacaaccaagtatagttttaggtttcgacggacataaaaccatacagaatttaaaatttattctcggaagagggttcatctactcttctctggggcaaaacacaactcccctgtatctgcaggcctccatgaggagggctcgtctagttggggctgtgcatgtgacggatcaggtcgatcacacgggtgctgtatccccattcgttggcgtaccaggacacaagcttcacgaacgtgtcgctcaaagcaatgccagccttggcatcaaagatgctggacctgctgtcaccctggaagtcagtggaaacaagggcctcctcaac

SEQ ID NO: 38587 - DNA, 533 bp, Oryza sativa
  Clone ID: uC-osroM202004b05b1
cttttctctcgatctccattcgtttttgagttccgcgtttgttacgcctctctttggcgtcatgggcaagattaagatcggaatcaatgggttcggccgcatcggcaggctggtggccagggtggcgctgcagagcgaggatgtcgagctcgttgccgtcaacgatcccttcatcaccaccgagtacatgacatacatgttcaagtatgacaccgtccacggccagtggaagcatcatgaggtcaaggtcaaggactccaagaccctcatctttggcacgaaagaggttgcggtgttcggctgcaggaaccctgaggagatcccatgggctgcggctggtgctgaatacgttgttgagtctactggtgttttcaccgacaaggacaaggcagcagctcacttgaagggtggtgccaagaaggtcgtcatttctgctcccagcaaagacgcccccatgtatcgtggtggtgtcaacgagaaggagtacaagtctgacgttaacattgtcttcaacgctagttgcaccaccaact

SEQ ID NO: 38588 - DNA, 498 bp, Oryza sativa
  Clone ID: uC-osroM202004b06a2
acaactgtacaaggcaacaatatattctgggcagaaatcattaataccaaggcagaatgcccagcccaaaaccaatacaagagtgccaataataattaaacaaactcaacatctagtacttgactatagcaaactgaagcccgtaccccacacgaaacacaaacttcgatcactgatcgggcttcgctgaccaggccttgaccaatcttgacacgaacttaacaaagctgcagtgcagaaaaagcaccaaactaacacacgccaaacacttccaaattccaaccatggcctggtctcacacacgccccaattaagcgctgctcttgtgctcgccggtggcggcggcggcggtcttgtcttcctcgccggagcccttgtggtaaccgggcagtttctccatgatcttgcccagtataccctttttctccttcccatccgggctgctcacttcctctgtagccggcggttggtgtgctggcgccggagtagtggcaggag

SEQ ID NO: 38589 - DNA, 357 bp, Oryza sativa
  Clone ID: uC-osroM202004b07a2
ctccacatgtactatatatgattagagaaatggaagtttttatttctgatatatacaaaaatggaacgaggaacatgtttcaaagtaacaaaccacccccaacacacacatgaagaccaattcgattcaatcagaagcagttcgaccatcacacataaccgagattttaatttaaagagattttacggcctagcagaacagtaaaatcactttaattttttttatcactccttaattcaatttaatttgagggctcgttttggcgccggcgccgctcgtcggagagctgctttgcgaacttggcaagctgatctctgttcgtgccttcgccggccacattcacgtaatggccggtct

SEQ ID NO: 38590 - DNA, 517 bp, Oryza sativa
  Clone ID: uC-osroM202004b07b1
actacttcgacgtcgtcgccggcacgagcaccggtggcctcctgacggcgatgctcactgctccaaacgagaacaaccggccactgttcgccgccgacgaattggccaaattctacatcgaacactcgcccagcatcttcccacagaagaactgggtcttgtccaagatcgccggcacgctgaggatggtgagtggcccaaagtacgacggcaagtacctccattcgctgctccgagagaagctcggcgacacgaggctggacaaggcgctgacgaacgtggttattcccaccttcgacatcgctaacctgcaaccaaccatcttctccaaattcgagttgaagtacaagccactgaagaatgctctcctgtcggacatttcgatcagcacctccgccgcaccgaccttcttcccggcgcactatttcgagaccaaagacgacaatggccagacgagggagttcaacctcgtcgacggtggggtcgccgccacaacccgacattgtgtgcaatgagc

SEQ ID NO: 38591 - DNA, 456 bp, Oryza sativa
  Clone ID: uC-osroM202004b08a2
tcgcgatggccgcccttttgttttttttttatttttttgatgttgagtaatacagacaagtcgatcaagctttgatctggcccaagagagcacctagctgcccgattagaggctcctccaggttgtacttcttaggctgcgagaggtcgttctccagaagggcgataatggcttggcgatgagcagccagcacttgagggttgttgcttgccaggaagagaagggctttcagagcagagggctcttcttcctcatcacccttgaagggtaggtaggggataagtgtgtccacgaagacctgaagaggcatgggtgggttgatggtgtagataatcctgcagatggcagccagtgcgttatccttgcagggctcggaagaactgggattatcgaagatctgcttgagaagcaacaatccattgggcagatggttggcgaagtacttgggtgaatttt

SEQ ID NO: 38592 - DNA, 515 bp, Oryza sativa
  unsure (1)..(515): unsure at all n locations
  Clone ID: uC-osroM202004b09a2
gaatcaacaaattttctgctttcattaattcgacaaaaatgaaaacattgaaggccatactttacattcatctgcatccgacatttatcagctagagctggtcaagaggcaggaagctcaacaagggttctttttcctagagaatcctactagatgtccgaatttttacatgcttgaaataatgaaatactagaagatgatctctataccatttacaggatagctaatagctattcagtagtacaatagaacgaatgcaaaaaagaatgatcactttctcatctcctctggaagttgaacttcatgatcgcaaaactgaagaggaaggcgaaggtcacggcgaagacgacgtgcaccacggncaccacccacaggaagttatgatggaagccaaagtaatcagtgacaaactgtgcaacagttctggtgtcgccttcgagcacatgttggatatcaccaaactgggaagcaactaatccatacaaagtccatgcaaccgggcaaatccaacagta

SEQ ID NO: 38593 - DNA, 528 bp, Oryza sativa
  Clone ID: uC-osroM202004b09b1
gtttcctatcacatttctcgaagttggtgtttggggtttcataacatactatgtcatgggatttgatcccagtgtaagcaggttcttcaagcagtatctgctgctacttgcactcaaccagatgtcatctgcactattccgcttcattgctggaatcggaagagacatggttgtgtctcacacatttggacccttatcactgttggcctttgcagcattgggtggctttatccttgcaagacctgacgtgaagaaatggtggatttggggttactggatatccccgctatcgtatgcacaaaatgctatttcgacaaatgaatttttgggtcacagttggagccaaatacttcctggagaaaatgtgaccttgggagttagtgtactaaaatctcgtggtatctttactgaagctaagtggtactggattggacttggtgctttgcttggatacactctcctctttaacctgctctacactgtagctctttcagttttgagtccattcactgactctcatgcattaat

SEQ ID NO: 38594 - DNA, 522 bp, Oryza sativa
  unsure (1)..(522): unsure at all n locations
  Clone ID: uC-osroM202004b10a2
agactgacaaaagatccaatattgcatatttaaaaacaaacggcggtttacacgtcaaacgaaacacaatgtaaatagaatccagaatcctgcatttaaaagggttactcagccaagcatgagtaccaaacgacacacactaaatatccacttagaacatagcagcacaccacgactccagcggatagtgattgccatgaaggcatgaaccggccatccatagagatatcactgctttcgttcaaggcttttcctcccgttcacggttccactgttcaatcttcgccctgcgttcctcgctgctttccctgactgggctccttgcacgccttggggggctgccatgcctgcgccttcctccatcatcatacctgtcatacctgctgcccccacccctgngttcaccaccaccaccaccacggtaactatcaccgccgcggtaaccgttaccaccaccgncaccgncgtcgtcacggtaaccatcaccaccaccacgataaccatcacgttcacgggggaaat

SEQ ID NO: 38595 - DNA, 497 bp, Oryza sativa
  Clone ID: uC-osroM202004b10b1
ttttgcgtcgcgccgcctcaaccgaagcaagggggaaagtttagattcagaacgggaaggagaaggtccggttcgtccgctctcgagctcaagtgtcagttgaagtgttttgaaagtcatggcggagcatttggcttcaatatttgggactgagaaggatagggttaactgccccttttacttcaagattggggcttgccgtcatggggatcgttgctcccgtctgcacaacaggccaactgtgtcgccgacaattgtgcttgctaacatgtatcagcgccctgatatgatcacaccaggagtcgatgctcaaggccaacctattgatcctgaaaagatgcaggagcactttgaggatttctatgaggatatctatgaggagctgagcaagtttggtgaggttgagaccctcaatgtctgtgataaccttgctgaccacatgataggcaatgtgtatgtccagttcaaggaggaagaacaagcagtcgctgcgcata

SEQ ID NO: 38596 - DNA, 315 bp, Oryza sativa
  Clone ID: uC-osroM202004b11a2
ggtggaaggataacaattcccttctattttgtgcaagcaatgcatcaagaccggtccaaactcccagcccacaaccaatacaacgtaccatggttcgaggagtacaaaacggtatataaatgttgacatctttcagctgctacgagacatgtacacgaaacacaaactttgatcactgatcgggctgccattccgggcacatcttttaccgtgcgtctaactgaacatagctgtagggcagaaaaagcaccggaccgaacacctccacacacttgcggattccaaccatgggctggtcttacacacgccccaatt

SEQ ID NO: 38597 - DNA, 389 bp, Oryza sativa
  Clone ID: uC-osroM202004b12a2
ggacagcaactcaataatctttcgatatttcaccgagggtaatgtatggtaggaaaatcgccagacataacagagccggccagactcaactcaaactcaaccctatgatggtaaactgtttgcgattaacgccttcccctatgacaatgtttggagataaacgcttccaccaaaaaacgaatgtcggggagtgttctcccctacaagaattattattgttttcaatgttaaaaaggcaaaattcaccatatcccgttagtgcaggaccaggaataaacactgggtcgccatcattttctgccaagttaagcaccgaccgagccgtacttttttccaaagaagaggacctgcagctgggcatagcctgagagcacaccagcaccagcaat

SEQ ID NO: 38598 - DNA, 391 bp, Oryza sativa
  Clone ID: uC-osroM202004b12b1
tatatctcgctctatcctatctctccctcttcgagcgcctttctaggggaaggggggataaagcaagccatcgacccccgcctccggctccgaagggacattgttgctcgttggtgatggctgagcaggctaatcaaccgactgtcctttagaagttcggtggccagttacaccttggctccagcttttatgaaggcgtacgggctcgcaccatatgcccatctgtctaatcctatgacaggcgctttaccacaaggagctacatgacccagcgccttgccaatggtggcataaacgtcccaatgatggcgtcctctgcaatatttgctaatgctccagctcagaaaggtggcaaaaacttcatgattgattttctcatgggtggagtgtc

SEQ ID NO: 38599 - DNA, 474 bp, Oryza sativa
  Clone ID: uC-osroM202004c01a2
ttctgtccgcccggagaccaccaccaccacgcacctcacgccgccgccgcagacgttctggatcacgctcggccccggcgccgggatggtcaggttcaggttgtcgccgagcgtctcggcgtacggcggctcgccgacgacgaccacggcggcgtcgaacctccccgcgttccgccgcatgaagccggcgtcgggcgcctcggcgaagacgacctccgtggcggcatccacggcgcggcggatgccgtcgaggatggtggtgccgccggcggtgaggtcgttcccggcgaggccctgccaggtgatggtccagccgccgcactggctgccgaggtcgtcggcgtgggcgccggcgacgaggatggagcgcgcccgcttcggcagcggcagcagcggcgcgtcgccgggcttgccgttcttgaggaggacgagcgacttgcgcacggcatcgcgagcaaggtcgcggtgctcctg

SEQ ID NO: 38600 - DNA, 474 bp, Oryza sativa
  Clone ID: uC-osroM202004c01b1
gtttcttacttagcctgagctgtgcaatggggctgctccggctaggtagtatcggcggcggacccgagctcgtggcggtggtgtgtgtaggctgcattgggcggacggctatggctgttcaggaagctgaagtccgacgactagtacagtgtactacgtacagggactcccggcagacgattaactagaggtgcgtcgacctacttcgcaggactagctatggtgataatgtttggcatggaactgagaaattacttagcagccaatactagcacatctgtgattgctgctaggatttcagatggctagttgttacggatagattgtaacttaagcttgcctgcactttcatgcgaatgtgcatcagtagatgagatgcaatgttgtggcaacaaacagatcgtacataaccaaaactgctaccgcatattcaattgatcggaatctagtgactactggatccgagttatattc

SEQ ID NO: 38601 - DNA, 515 bp, Oryza sativa
  unsure (1)..(515): unsure at all n locations
  Clone ID: uC-osroM202004c02a2
cgaaagcaacagagccctttatttgtagctaccaagtagacataacaagtacgataaaaatacacggattcaacactattagttgggctccaactttgaactgattgaataaaggtaattatggagaggcattaccatacccagacccacctcctgcaccactaccattcccgccattttcaccattgccattgcctccaccattaccactagcacccgctcccgcacttgacccataccaattattattagcattgctataaccagagccagatccactaccagatccactaccagttgaaccatatcctccagcctgtccttgtcctcctccaccgccaccaccaccggcatcggactcaccaccataacctccttccccattgctagtctgactagagcttgagcctgagccatttccagaaccatatgccgatccaccatattggctagaaccaccgncgncgncgttccctccagcagttgcattggcaccattactaccaccctgactg

SEQ ID NO: 38602 - DNA, 405 bp, Oryza sativa
  Clone ID: uC-osroM202004c02b1
gaccaagccgtccgttttttccacttacgtgattcacaatggctgggcgtaattagcagcttttggctgcgtacgtctctcttgagcatgggagtggtctacgccgcaggggtgattagatactagcgctcctacggaaatgatatccgatgacgaggacggacaacggatcacaaaggtgctgccgcaagactagatagcgctgatggaaccagacggacgacacctactggcgccgatacatctgcggcatgaacattttccgcacgccgtgctaggaacttggcaagatcatcctatggttgggaggaagcctgacgctcaagatgtagtgacactaactaacgggcacgtggattttgactgcgaattcgaatcccatggtggtagcgatgctgttggaac

SEQ ID NO: 38603 - DNA, 494 bp, Oryza sativa
  Clone ID: uC-osroM202004c03a2
gaatgatagacacccagccgtgccggacaccacacttggataaaccaaagaattgtgcaaccaaaatgtcggatcgatgcgatatcaactgtcaacaaaacgccagcgcacgacggtacagagagtggattaatagttgatggcgcggcacgtcttcctgatctggcggacgctgcccgccggcatggccagcttgctgagcttgacgagcgcctgcgcgaagtcgatgttccagagcgtgccgttctcggcgtactcgttgacgtgctggagcgtggcgttgctgccgacgagcgcccagtcggagttgaacagcaccaggttgttcttgttgttcttgtagtagctgttgtccaggtagtcgccgccgacggccggcacgacgtagctcgccaggtcccccagcgtcgccgcgtcgatgtcgcggatgttgttcgccagcgtcgggtttcgggcggatttgcaggtcttgctcaggacgttgtcgcggtagt

SEQ ID NO: 38604 - DNA, 505 bp, Oryza sativa
  Clone ID: uC-osroM202004c03b1
gtgtataagagacgccacatactcgatccaagtctgttgtgctagatcgatcgatcgagtatacgtcaaaatgaaggttttcatggcagtgtgcatgttggcggtggccgtccggctagccgccgccatcgtggtgccgtcggcggcgccgtgcgcgttgacggagggtttctacaatggcaagtgcggcaacgtcagcgttgagtccgtcgtgtacgatactgtgaaggccttcctcgatgctgacaaatccaagggcgccgccctcgtgcgcctgttgttccatgactgcttcgtcaatgggtgtgacggatcgatccttcttgataattcgaccacaaatccttcaccggagaagttcgccggtgcgaacctcggcatcgccgggctcgacgtgatcgacgcggtcaaggccaagctcgagaccgcatgccccggcgtcgtctcctgcgccgacatcgtcgtgttcgctggccgcgacgcgtcgaggtacatgagcaacggc

SEQ ID NO: 38605 - DNA, 361 bp, Oryza sativa
  Clone ID: uC-osroM202004c04a2
ggaaaccggaagggggaaagccccccccccgggccaaaaaaaaaaaaaaactggccaaaaagggggggtaaaaaagggaaaaaatttaacccaaaaaggaaaaattgggggaggggggaaaaaaagggcaaaaaaaagggcccgcccctaggggggggaaaaaggggaccctaaaaaacaaagggcccccatggggggaagcccaaagggcgggaaaaggcccaaaaaagggcccgggggccccgggaaaattgcccaaaaaaatttttttttcaaagccgggggtttttttaattttggaaaaaccctgggaaaggaaaacaagggggacgccccccgggtaaaaaccggggctaaaggg

SEQ ID NO: 38606 - DNA, 541 bp, Oryza sativa
  Clone ID: uC-osroM202004c04b1
cctgtttcttcagacatttttcactgccttaggagcaaatttcttcactgggtcccctacagtcaggaatatcttgtcttcaccgatgagatccgtgaatttcgctgatcggagcttcaggatcacagctggccccggattggctagaatcagctgaggaatgccaggaaggatgctccgatcaatatcgtctgccagttccactgcagcagcaaccaagctagcatcagttgtacccaatactggtttccatcaaagaatgatgaagaagcaataagttcttaaaggaatgatattattttgtcctaccccatggtgaacatttccccagactgatttcatgaccgagatgatgtcagtcttcttggtgaagtttgcaattccaaggaagcctttaagctgctgaagggcaatggtgatggccgctcccgccatgaatccaacgatggcagcatgggacaagaactctatgataaaccctagcctgcagcagaggacaatctcactctatggtagccactcacctgaggaatccgagcgc

SEQ ID NO: 38607 - DNA, 329 bp, Oryza sativa
  Clone ID: uC-osroM202004c05a2
ggaggcccaagaaaagggggaccgggcttattcaactatcaacaggggcccagggatcttacaataaaaaaaatgggcccccaaaaagaaggccttcatcgagccccggggggcaacccggaagctccaaaaagcccccgcagggcccatgcaaaaggaaaaaatgaggattctgaaacggaattcacatttacaacctcacgcgaagcaaaaaaaatggccccaacccgcttggaaaatcgggggaaatttaatgggttcccccaaggggaccccaaattaacaggacttaacctagcttaatcttttaggggggggaatccgggggg

SEQ ID NO: 38608 - DNA, 509 bp, Oryza sativa
  Clone ID: uC-osroM202004c06a2
agcagtcaagaaagagtggagttgtagtgaaaagcaataacaagcatcattccaagggaaagtttttaagtaaaaggtcatgacaagcatcattcttgatcaaaagtctacaggatgaaccactaaacaccggggtcctactaacctgccttaccgggatcttgttcagttccttgcactaattgactgacctccctccatctccagccaaaaaaaattctgccttccaatgttgattctattagtacttctgcaatgcaagagattcttccacatctccaatcaagaatgcatgcgcctcgattaacttgtaatcttgcaagatgtatagccttcaacaacaaaaaaaaatgaatgcattgtcacaaatgatgagatgaaatgaaatccatcactctcactcagcttcgtcttcttggagtgaatcttgtgaggatttagacatgcatggcgttgttgggggagagcttgatttgggtgtttggatcagaatggcggcggcctgatgc

SEQ ID NO: 38609 - DNA, 489 bp, Oryza sativa
  Clone ID: uC-osroM202004c07a2
aacacaacacaagtctggacgaattaacgtagggtatagttaacaaggatccactgtcttattgttcttacgaagtcgtttagcaaaacagtgaggtccctacctactattactatatatcatgaccccaacttctcctcctctgccaacccactaccctctttcacatcttgatatattaagaattcctaccctggtataacaaaataatgactaaaactagtgcaaccactaagcttgaggctgcttctgaagaataatcttgttgttcaaatgttcttcccaagctcgaccttcttaaccagccgcaaggtgttgtggaagatggaatccagtattccagcaaccgtgaaaactcctccaatgatagcacaaacatttgtgatgaaatgggagaaggattttggaagttcagttaccaagacctgcatgggagaaggttcaaaatggaatttcacaacaggaacatagaagctgtgcaccaagctg

SEQ ID NO: 38610 - DNA, 400 bp, Oryza sativa
  Clone ID: uC-osroM202004c08a2
gcacactgaacattgtggaatactccactatatttcatcaggacaaaggtgtgtataatactgttttgttatcacaaaacaaagaaaatttaatacctaattaaaaagtcctatcttgttaatttacatgatcttttgattcccataaacacgtacggatcataacccccaaaattatccaaattatcccaagaacaaaagctgcacaaacaagatcaaatatatcacatcacaaatccataaataattaaaaacgagctgacaaattcccagaagcaatttttccttgccaaaaaaaatcactccgaccatcatcagctcagagtgcaagcaacgctcccatcagcagcagcgccgccatcgtcgccgcggcggccgggacgacggcggcggcggcgcc

SEQ ID NO: 38611 - DNA, 344 bp, Oryza sativa
  Clone ID: uC-osroM202004c08b1
tttcttctccttccctgaatccaccatggcgccgggggcgttgtccaccggggcgggactactcttcgccatcgccgccgtgcttctcctcgccgtccgggatggccattgcgcgcaattgtgcatggattcaacgttcccgaggacggtgaacggatcgctcaccttctgcggctacaatggcacggcctgctgcaactcgacggacgacgccgccgtgcagaggcagttcgccgccatgaacatctccggcacgccgtgcggcgaactcgtcaagtccatcctctgcgcgagatgcaacccgtacgccggcgagctgttcaccgtcacgaccagcccccgga

SEQ ID NO: 38612 - DNA, 504 bp, Oryza sativa
  Clone ID: uC-osroM202004c09a2
ggcggcggtggacgtgagcaaggcgctgtacgcgttcaccaacgccgtgatctgccgggcggtgtccgggaggctctcccgggaggacgaagggaggagcgagctgttccgggagctcatcgaggagaacgcgacgctgctcggcgggttctgcgtcggcgactacttcccggcgctggcgtgggccgacgcgttcctctccgggttcgccgcgagggcgtgcaggaacctccggcggtgggacgagctgctcgaggaggtgatcgcggagcacgaggcgaggctacgcggcggagacgatggcggcggcgaagagcacagggaggaggacttcgtcgacgtgctgctcgcgctgcaggaggagagccaacgccatgatgggagcttcaagctcacgagggacatcatcaagtcgctcttgcaggacatgttcgcggcggggacggacacgtcgttcatcacgcttgagtgggccatgtcggagctcgtcaagaacccggcggc

SEQ ID NO: 38613 - DNA, 424 bp, Oryza sativa
  Clone ID: uC-osroM202004c09b1
tgtgttttttttatttaaagggaactctgatgaacttattcctgccaaaattactgcacacacatgaacttgcaaactagaaccaagatgggctggacaaaaagctcccagcgattaacacgcgcgattcggcccattatttatttattcctaaattaacacagtccacgcggtctcccgtctcccagacaaaaaaaaaaaaaacacacagatcacactattcggctacttgtcgtcttctgacccgaccggcttggcgacgagccggagagggatccgccgccgcacggtgaatcccgggtcgtcggacatgtcgagctccccgggcggcgggatctcccagtcgaagaggcggaccaggctggccagcgcgagctcgacggtggcgagcgcgaactgcatcccggggcacacgcgccgcccg

SEQ ID NO: 38614 - DNA, 533 bp, Oryza sativa
  Clone ID: uC-osroM202004c10a2
gcgcaactttccctgaagccccggatccactcaacccccctccccctccgcgccagatcgttgtgtttatgagctcgaaggagaagcccactcttggaggccagcggattaagacccgcaaacggaatattgctgctcctttggaccctgcatcattctctgatgcaattgtccagatttatctggataatgctggagacctggaacttgttgccaaaagtatcgagtcctcggatctcaacttctcacgttacggtgacaccttttttgaggttgtattcattggagggcgcactcagcctggcacaataaaacctgaggaagaaggagagcgtcacccctattctgtacttgattgtgcagcgcagcgtgaagcaattttgccttctgttctctacattcagaaaacattgcgcaggaggcctttcttgataaagaatcttgaaaatgttatgcgcaaattccttcagtcactggagttcttcgaagaaaatgagaggaagaaacttgccattttcacagcacttgccttt

SEQ ID NO: 38615 - DNA, 116 bp, Oryza sativa
  Clone ID: uC-osroM202004c12a2
gtttttgtggggggcattatatttaaccagtatcaatctatccctttcatttttctgctctctgtttctaggaccaaactacagggttgtccaggcacggatcctttcaaacaccc

SEQ ID NO: 38616 - DNA, 402 bp, Oryza sativa
  Clone ID: uC-osroM202004d01a2
ataatcactgtatattttctgtatttggtaaattattgcgcaaacacaaaaggtactggtcctgtatttcactaattaagcaccaagtcctatgactatgagaaaaacctcaaacatgcaaacttcaaagactccaaaatttacaggaagttcacaagctccaaaacgaaaacacacatcattcagctcagagctgcagctgtaactggagccaccttactttcttgaagcgagatcactgtctcgaaggcgccgacgagggccttcaccttgctcttcctcgtctcacaagcttgctcgctgtctcctcgatcacattgttcaacaatccctgctcgttcttcttcttgtccctgacatcctgatgcctcaggatgacaacttcaggtttcgaagagcctg

SEQ ID NO: 38617 - DNA, 363 bp, Oryza sativa
  Clone ID: uC-osroM202004d02a2
gcaggtattctgtcatcaatcagttttttattcctgaaaaacaagtattacttctgtaacaaaattgggagaattgccatggtttcagttcattgatagacaatgctgcatcaatggcagctgaacaaacattttgtttcctatgcatcaatggcagttttcacttgctctgctcctttgccttcagcgcctcgattacagcagagaagtcctggtctgcaagcccaagcgatttcgcgaccttgtacagctcgtttgcagctgcgactgtaggaatagactgggacaccgattctgccagggccaatgcgagcctcaaatccttctgctgatgcttcagaggaaaaggcagtagggtttgca

SEQ ID NO: 38618 - DNA, 382 bp, Oryza sativa
  Clone ID: uC-osroM202004d03a2
gcagggtaacggggaagtgaaacagattacaaatcggagcaccaaacatagcaacgattcaacgaatgtaccaccaccacaccaaaaccaaagctaaaagagtcgatgatgatttgggtatgcagtaaaaatctgaactgtaaagcgacgagccggtgatgatgagcgtgagatttggcattggtttttttataggaaagcgtccatttcgagcaccttgaggacctcatcctggttgttcagcttggccacctcgatgggggttttcccgtccagattctggggcgtgacagcagcgccatgcttcagcagaagatccacacattttttccgaccatatccagcagcgtaatgcagtggggtgttcttgttcttatccagt

SEQ ID NO: 38619 - DNA, 509 bp, Oryza sativa
  Clone ID: uC-osroM202004d04a2
caacgcctcgtgttactgaactattgttccacaaattcatagctgaagcagtttgcaggggcagcaacccaacacaccactaattccacaaaattgagaccacgcacaagcatagccaaaatcctatcaacccaaacacaccattaattcccccaaaacatcctcagattgccaaaatttacgcacagtaaattcatttccctgtctatgcattgtagttgtccacgcccagatccctcaaggcagatgtggcagcatctttgcagctcccgtgcatcatcttggttttcctaataagcttctccacaccatcattaagcaagatcgtccggttttcagggtttctgacgacaagattacggatcataaggcaggcttgcttctgagtttgagcagaagaagggaacttttgcattgcctgtatagccaaagtgccataccctgctcccattgcacgagctgcattttctggtgaccgcagtgtaaggatagtcaccatagacattacc

SEQ ID NO: 38620 - DNA, 484 bp, Oryza sativa
  Clone ID: uC-osroM202004d05a2
gagaaaatggtaccctcaaacctctcgtgtagtcatgtttacatacttacaagttattacagtatgaactttgatttacatggacgtgtataaacctgagcaggtaactttacaacatgatcatgttttgttgtattttacaagtaacacaatctctaaagtaattttgttctacaagcacaacaaagcaaacctacaactaccagcaacaacagcagcggctgatcttgtaatcattgtgaagtctgagcactagtttgcgtttcagctgcttctcctgaagcaccatctccatggccattttcagttgtcggatgaccatcaataggtttaccctcaactggaacaggcccttctttcaccaactcagatgcttgagcttcagtctgctctgggatatcagacagcttgtcctctggtttcttcctggaaatctttctactcagtatgcttgtcagtgatctacctggctcacctgcgtttt

SEQ ID NO: 38621 - DNA, 572 bp, Oryza sativa
  Clone ID: uC-osroM202004d05b1
gttatcttcattgtcaagaaaggagatacatattcttctcatttttaagaaagtaaaatagtaaagggagatcattatctaaaaatgtaagagaggcactgaactgtttgtttaacaaaatattattgtaaaaaaccctccccaggaaatcaggataaaaagttatagagtttctgcatatattcgttcattaagcagtttcttcccttacattgtactcagaacatgcatatgttcatcatgcagattctagtcggtgtgaagtttgtccggagttggccatttcttggccgtgtaagactatgttttgtggagcctccttattttcagatgactgtaaagccactcattggtcatgggcttgatgtcactgagtttccaggaatttcaggatggctggataagttgatggatactgcatttgggcagacattagttgagcccaatatgcttgttatcgatgtggaaaaatttgtatcgactccctcagacaatgactggttcagcattgaggagagaccttctgttgcatatgtgaaacttgagattttagaggatccgacatgaaacca

SEQ ID NO: 38622 - DNA, 453 bp, Oryza sativa
  Clone ID: uC-osroM202004d06a2
agagaactcatttcaaatagagtgaataaaaatcgaatcctcatgtcattacatcttaggaatcaacaagatacctatcaagcacaagttcacaactaaagaaaactactacattcccctgagaaaccttattttgctgagaggccaagacctgaaacaaattattgagacagcctctaaatggaatctgggactgaaattattgaggcaaaataaacggatcaactgcaaaaaatgggaatccttagtttccaactcttttcagactcccagcacgcccagatatatacatacaggcatagcagaaatgtatgtacagatattctgaagccacaacgttagaacagctcaaaaccacactatgttagttggtgcccagaatcattctgttccagccctacctagacttctcattgtgcacctcgattgtacctaaatcaacctatttctaaa

SEQ ID NO: 38623 - DNA, 345 bp, Oryza sativa
  Clone ID: uC-osroM202004d07a2
ggtcgccgccggcgctggccttgctgtagaagagcctgtgcgcggtggccatgtccatctcggtgaccacgcccttcttcgccgccggcttcgtcttcacggcgctctgcttcttctgctgtggttgttgagggggaggaggagtcttcagtttggatgatggcggcgcggcggcgtggtggtgcaggaaggcgaacttgtccttgccgtcgctgcgggagcggccgccggcgccgacgaggtcgcgcaggcgccagcgccgcgatgacgacgacgactctccgccggtggacgcgctcttggggaacctgtcgcggccgggcgagcccggcgccgagcgcggcg

SEQ ID NO: 38624 - DNA, 498 bp, Oryza sativa
  Clone ID: uC-osroM202004d08a2
agcatcgaaaccaaaacagttactatctttcttatcattcaggtgaactccaaatttccctatgctatctgcaaacgggtctttcagaattcagagaaagggataacattacatttatataatctgacacaaacttaaaatcacaaatccacaaactatcttagtttgttccttttttccccttatgtacagctccatccaaatggaaatttcatgaatggagtttcattccatgttggcatgatctgcttcctggagacctggactgaagtccccccctgcattgctgcctgaacttctttgttttctgacagcaagagtggtttgcgcttgcaaacaccaaattaaggcaagagatgaaaggatttgaatcaatcacttggtgctcctgtgacctgatgaagccatgagcaccgcgaccgcgacgatgaacatgaacagcatgaacccgagcaggatatacgtctttcgcgacgatttccggtactccccaacagg

SEQ ID NO: 38625 - DNA, 548 bp, Oryza sativa
  Clone ID: uC-osroM202004d08b1
tttgagagttcagttcttgagttctctggagggggagcatttcatccctttctctgcttctgactttaggtttttgaaggcccccttgtgaattccctgttgtccatcagacaaggaggcctcaagatgtacatcatagaggacaaagggggtgccattgccctcatgctggcctccctcttcttcctggggacatggcctgcggtcctcaccctcctcgagcgccgaggccggctcccgcagcacacctacctcgactactcgatcacgaacctcctcgctgcggtcctcatcgcgctcaccttcggtcagctcggcgatagcaagcccaacatgcccaatttcttcacccagctcagtcaggataattggccttcagtgctgtttgcaatggcagggggtgttgtgctcagtatagggaacctctctacttagtatgcatgggcatatgtaggtctcttagtgactgaggtcatcagctcaagtatgggtgttgtaataggcacaacactgaattatttcctggacacccggatcaaccgagcaga

SEQ ID NO: 38626 - DNA, 453 bp, Oryza sativa
  Clone ID: uC-osroM202004d09a2
cacaaaaagaaacgagtatattatatctgatcacgatcatccttacaacctttctttgaaaatgtcaagacaacagaagtatatattgattacaattaccaaccaaaaatagggcgcctttacaacactggatgcactacattactaacactaaatgatccatttggttctagataagtaaaaaagagaaacaaggaatgaacaagcccttcaatgggcacccacacacgtttcactacataaatactgtgcatcacctttctactccatagcagatccattcctgcctgccttattgagacacaagtttgtacatgaacagcaatgccaacaccttctgttcagctcacccaattaaatttaccaccaaagcagtaataaagaatgctggacaatcaaacgcagtttggctgtacttggtggccgaagttcacaaggttgccgcagcctccg

SEQ ID NO: 38627 - DNA, 496 bp, Oryza sativa
  Clone ID: uC-osroM202004d09b1
atttcaggacgccaacaattgttattgtctggtcgattcttctggcttcaatcttctcactcctctgggtccggattgatcctttcttagcaaagaatgatggtccacttctggaagagtgtggtttggattgcaactagggagttgggaactcccccatcggtgtgtgctgaaggaatacacacttggttctgtgtagatagaaacacgaaaggtcatgcgttgcttttgtcccatggtggtagctcagcctcatatctgcaatatttgggcaaaccggaggctgcggcaaccttgtgaacttcggccaccaagtacagccaaactgcgtttgattgtccagcattctttattactgctttggtggtaaatttaattgggtgagctgaacagaaggtgttggcattgctgttcatgtacaaacttgtgtctcaataaggcaggcaggaatggatctgctatggagtagaaaggtgatgcacagtatttatgtagt

SEQ ID NO: 38628 - DNA, 456 bp, Oryza sativa
  Clone ID: uC-osroM202004d10a2
cagggtataacatgatacatatgaatttgccagaaatgaagaaacgtatgcacgtgcacgtggcgcgctgatcaaaatatatcagccagcagccgtctgttgcacttgcacgtatatgtgcatatactacaagaggcagtccaagcatgaacacacacacattcatatggatgtgtccgcagctagctatagctagcagctgttacatatatatatttatatagtactgatcagagattgggatgcaactgcaagttgcgctatagaacgagttactaacatgtatatattaattcctccgtcgatccctatatgcaagctagtaattacagtaattagcagttgtagcaaggatgtaacaattgagatgagctgagtcctcccacatgattaggaggcatcgatcgatcgagttgatgtagtcgccatcgtcttggcggctgatggatgatatat

SEQ ID NO: 38629 - DNA, 519 bp, Oryza sativa
  Clone ID: uC-osroM202004d11a2
gctgcaaacattatagcataggttcaatgtcaaaatattacaatcatcagttcatcacatcacaaaccagcacacatgtgctctccaagaattacatcaaatcggattgttctcttccacccttattagcaaggagcactggagatgaacacatctcacataagactagacaagattacaacacacattgcttattaatggtctagattaatgaaaacaacatgaagcaaaccataattaaacataataagcatcatcagacacaaccacagaggctagtactactagttgtaatgcagctgcaaccatgccattgatgccaatggccatggcgtgcgagctctccatggtggctcacaactggaaggcgtcggccatggcggtggcgacgatgggctgggccgcgaacggcggctgccatgggcggagcagcgggtcgtcggggatcttccggatgtcgacaggcgcgcccgccacctgaggatctccaggacgctgcccagcgcctggaggcgcccg

SEQ ID NO: 38630 - DNA, 544 bp, Oryza sativa
  unsure (1)..(544): unsure at all n locations
  Clone ID: uC-osroM202004d11b1
ttctccccggagtcccctctgtttcgcagataaggcctttggttcccatctttttattacattcaggtcctcctagtttcttttcctttcgagtctactccttgcattcttgcgaggaagcccctcgggttggtcgaattttagtttccactccctctcctcgcggagtcgttgctgttcttgttcttggtcgaggttgaggttggtggcgtagatccgatctgaggaatgtttacctatcctttcctctaacgttcgccgtactccgatgaagttgaacgtgctccgccgccgccgttcccactccttctccgtcgccttcctctactggttctacgtcttctcatgaactcatcgccttcctcccaagaacaccatctccagcctctaattgattatatcttgatttctttttcatcctcctactagnttctttcttgtgttctttgngaattttttgatctcttgaagagatccggttcttggattaagttttggacaagaaccgtactgtgaccatgttcgtcgcttcgcgccggagctt

SEQ ID NO: 38631 - DNA, 521 bp, Oryza sativa
  Clone ID: uC-osroM202004d12a2
gaaagcaaaagaatcaaccagtaattatccatccctttcatctttctgcacacagtttccatgtccagcctacagtataatagtagattgaaatataaaaacacagtatgattaacccagcgacaatgcacaaacacaacctctttgtttttaattaagtcacataattaacgactgatgcatgcatgacacgtctcaaaagatcatcgtcgtagtgacaatgtatgaacttggtgttgaactttcttcttcctttgttggctaaaaaaaaaacttttgcagtaactggtttcatcatgtgtgcctatgagtagaacttgaacttgcagccacatgagattactatgatgaacatgtaatctatgagtagaacttgtatgtcttggcatctatgatgatctgccggagtcctccgattggtgacaggatcatgagcatcactccaagaatgatgcagatccagttggtgaaccatgagagactgaaccttcttggcttgtagattgctagccacatgatgc

SEQ ID NO: 38632 - DNA, 513 bp, Oryza sativa
  Clone ID: uC-osroM202004d12b1
tacccttcttcatcttcttctttttcgtcttctggttcttcttcttcttcttcctctgatattgctgcaaaagaagaagaggtagacgaaggaggaggagatcaggtgatcatggggactcaggtggcagataactacccaccggccaaggatggccggagcgcgcaggagaaggcgatcgacgactggcttcccatcacgtcgtccaggaacgccaagtggtggtactccgccttccacaatgtcaccgccatggtcggcgccggcgtcctcagcctcccctacgccatgtccgagctcggctggggacctggcatcgcggtgctgatcctgtcatggatcatcacgctctacacgctgtggcagatggtggagatgcacgagatggtgcccgggaagcggttcgacaggtaccacgagctcgggcagcacgcgttcggcgagaagctgggcctctggatcgtggtgccgcagcagctcgtcgtcgaggtccgcgtcaacatcgtgtacatg

SEQ ID NO: 38633 - DNA, 485 bp, Oryza sativa
  Clone ID: uC-osroM202004e01a2
ggttcaacttgaactgattgtattgggtaggattcaaaaacgcgaagtagcatatttacaaagtttatgcatatggtatacagttacaggggcagtagttgcaacatgccacgaatgcctgcctcattattgggaaggcaaataattctatccatataatgtaaagcttccttaccagggcacaagtttcgcgatgcatgatgcagatctgtggttctccgggagcgtcttccaccaaatcacaaaagaagaacggctcaggaatatatccttccctaaacttccagacatggaccatccgggagcattacttttaagcttaactactttatcttttacattcttgaatgttttgccgttaggaatttcaacctggagttccttagccattgcccagaagcaagacttaaggcttgaacccaaggagattgcctgcgactgtttgtgccactcctgggggtacttggaacgtcttgggctttcct

SEQ ID NO: 38634 - DNA, 491 bp, Oryza sativa
  Clone ID: uC-osroM202004e02a2
gatcatgcaaatgtaattatgatttgacttcaatattcaaatccaaagcataacatccaacaagggagtcctcgagtatatcagtatatggggttttgcttcttacaccacgagaaacgcaagtttcagttggccagtgaacttaaacccctacaaaattacaaaaaaaaatgttgatctgcatcaatttacaccaattcagcagatgtgcttggttaaattttccagtttgtaccatcacctgttaaccaaagcacaaatcaatcatgtgactattcagactctggctcgcatggtctccatactgtaccagtaggttcatccatgagggctatgcctttgctgcctagctgtttcctgatttggtcagacacatcaaactgcttgtttttccttgcagcagttctctgctcaatttgctcctgcaacagttcttcagtcaaccctgctctcttaaagctttatcccaaagttgcttcagtgcctctgcc

SEQ ID NO: 38635 - DNA, 502 bp, Oryza sativa
  Clone ID: uC-osroM202004e02b1
cgcgggtcttaggcactgaagcaacttaaggataaagctgggaagatagcaaggttgactgaggaactgttgcaggagcaaattgagcagagaactgctgcaaggaaaaacaagcagtttgatgtgtctgaccaaatcatgaaacagctaggcagcaaaggcatagccctcatggatgaacctactggtacagtatggagaccatgcgagccagagtctgaatagtcacatgattgatttgtgctttggttaacaggtgatggtacaaactggaaaatttaaccaagcacatctgctgaattggtgtaaattgatgcagatcaacatttttttttgtaattttgtaggggtttaagttcactggccaactgaaacttgcgtttttagtggtgtaagaagcaaaaccccatatactgatatactggaggactgccttgttggatgatatgctttggagttggatatttgagtgaaatcataattacctttgcctgatcaaaaa

SEQ ID NO: 38636 - DNA, 398 bp, Oryza sativa
  Clone ID: uC-osroM202004e03a2
ggaaaaccaaaaactggtttactggccagaaaaaatttccagaggaatttaagctaaagcatgcaagaacccatcatccaaggaggggtttttttttatttctacaggattgggaccaaaaaataagacacctgggggaaagggaaaactttggccatcagcgggttaaagacccgttgggttccagccaaggtgggttttttactgaaggacagcaccccacaattcagggggaggaccccccgttttttggcccaaaggggggggctaaaatcctgggctgcccttggggggcgacacacacatggggccaactgggaaagagttcctgaaggatgctataaccgggtaaaccataagcttaaaggatctttattaaacacttggggtcagaagac

SEQ ID NO: 38637 - DNA, 502 bp, Oryza sativa
  Clone ID: uC-osroM202004e04a2
aggtaaaaggtttaattaacataggagtacagcagaaaataacaataaaaagatagcatggaattaaagccgctgctccaatttaccatacgcagcatttgattacaggaataccaaaaaactactaccgatgacaggtattaattattaaaaagcacaggttcagattattgcgacaaaagtttttgatacccgtaagattggacgcttgatagccaaaccacactcagaaccctaaatatgcatacggaggatgtccaatcggatcttcagccaccaccagaggcagatcagtacttgtagtccttgacgtgaaggctctcagaggcaccctcgccgagcacagcatcaccctggtatgtaccaagggtagcctcagagttggccttgcacctggtgatgaaggccttctgcgccttcaccacgttctccgtcttgccgccccaggccttgagcgtgctctgctggagagcacggccgaaggagaaggacagagcccacg

SEQ ID NO: 38638 - DNA, 519 bp, Oryza sativa
  Clone ID: uC-osroM202004e05a2
ccaaggaaacgtcgttaatttcattaaatgttactggagtaccatgtttcagacaaaaatacacgtataagaataagaaatcaccatgctactaatatattcatgctgctactacatttttgcacgtgacgttcaagccgacaaggctgtagctttcttgcaccggtaggaggtagccgctgcagagacgctatcattccggaccgtcccctttgttcaacgaacaaattgtccggttttactaaataaaattcgtatagcaaacaccatgtggagccatgaaaacaatggcacgatagatgccatgccaggattttgacaggatgacacataccgggcagggaagtgagcagaatcaatgaatgtaacccacacgtctcattattttctttttcatagtgagtagtctgatgtgcctgcgagctatcacggagcaagactacacaatggaacacctaaatagtttcaacgttactccttttcaggtgaccgaaccatagaagggggcaaaccggatga

SEQ ID NO: 38639 - DNA, 434 bp, Oryza sativa
  Clone ID: uC-osroM202004e06a2
cattccgatagatagcaacaagcagttcaaacaccataaccaaagcgaactcaattcatggtaacatcacggacgaagaacacctaacactggatggatggatagagggcttctcgactcgagagagccactggacacgataacgactcgactcgatgataagatgattctgacacggatagctaaggataactggccacgatgggccccaccaatcagttcctccagttcccgccggagtcgccgccgtagccgccgccacggctgccaccgtagccgccgccgccgccgacacggccgccgccgtagccgccgccgccaccgtagccgccctcacggcgcccgtagccgtcgccgacaccttcttcgtagccgccgcctccacgaccgccggcgtagccgccaccgccgccgccgtagcccccgtctccgcc

SEQ ID NO: 38640 - DNA, 416 bp, Oryza sativa
  Clone ID: uC-osroM202004e07a2
atgcaactccttttttccatatcatttatagaaagatcagcaatacaaacacaaccatccggacaagaggatggtaacatctggaagagaagtagagagctcttagctctaaattatcactccagttagaggaagacatagccacagctaatacattacacaagtgacactgcaaggcaaagtgttgggctcatatacgagcaactatggagcatacaaggcctaatggaggaaatccctcataggatcatcatggggaattctcttcatgcgggaagcctccatgtcttccggggggacctcatcattccatttcacattggacttcctattcctttcatccatctcctttttcctcctcgcaccctccttttttagggcttcatcaagcagctttttgtcaagaacaatatcat

SEQ ID NO: 38641 - DNA, 353 bp, Oryza sativa
  Clone ID: uC-osroM202004e08a2
aaaagggaaaaaaaaaaggcccaaaaaagggggaaagggaaaaaaaaaaaaacccggggggggaaaaaaaaaccggaaaaaaaaaaaaaaaaaccccccggggggggaaaaaccccaaaaagggggggggccaaaaaaagggaaaaccccaaacccccaaaaaaaaaaaaagggggaaaggccaaaaggaaaaaaaaggttaaaaaaaccggggcccaaggaaaggggggccaaaaaaaaaccagggggttaaaaaccccccccaaaattgggtcccgggggggggccccccaaaggggggaaggtgggggaaaaccaaaaaaaaaccgcccccttaaaaccaaaaggcgggg

SEQ ID NO: 38642 - DNA, 466 bp, Oryza sativa
  Clone ID: uC-osroM202004e08b1
gttggtgatccgcacgaaccttgtgaagaagtggggggagttctaactttgagatgggtgagaacaaggaagactacaacaagttctacgaggccttctccaagaatctcaagcttggcatccatgaggactccaccaacaggaccaagattgctgagctcctgaggcatcactccaccaagagtggtgatgagttgaccagcctcaaggactacgtaacccggatgaaggagggccagagtgagatctattacatcactggtgagagcaagaaggctgttgagaactcccccttccttgagaagctgaagaagaagggatatgaggtcctgtacatggttgatgccattgatgagtacgctgttggacagcttaaggagtttgagggcaagaagctcgtctcttgcaccaaggaaggtctgaagcttgatgagagtgaggacgagaagaagcggcaggaggaact

SEQ ID NO: 38643 - DNA, 497 bp, Oryza sativa
  Clone ID: uC-osroM202004e09a2
aaaagacactgaaaggtctcattttattcagagcattttgttcagcagcactcctaccaaccaacgctattcaaatcagagatgaatagctggtgggtctcacaatcagatcaagccattctcatacagttcagccaactccaacatctcaaaactatagctgcctctgcaccaaaatcttaacatttatacagtaacaggcacaacaacgaaatggcaggtaaatttctcctcaatttgccatcgaaggcatcagtttttcagtaccctctgtgattagcacactaaaaaaaagcatgtctggctttgatttattttgttttggtctacacgatgatgctatcatggggacaaaaaaaaagaaggcctggggaaaatccatcaggcttgtatagaactccccatctgttcaatggtgaatggcaatcaatcgcggtacgctgccatgaagccctcatggaatgccttgaagcgggagatgatcgcggggatcttct

SEQ ID NO: 38644 - DNA, 505 bp, Oryza sativa
  unsure (1)..(505): unsure at all n locations
  Clone ID: uC-osroM202004e10a2
aaacacagaacaggctaagttattattttccatacgccatacaagatagatagaaaggttactacgatttccaagctacgcctacatcagacatccatcacagtacatatgaacaactctaattaactcctaaactcgcaagccaagccagtgggcaatcaggacaagcaagaaaaccttgacaggagacacctttgcgccaccgagatttactctagggagtcaatgatgcggtcgacgagcgcttccatgagcctccgctgcgaatcgaggtgccggagtgccatctccatgcgcatctgctgcgtcttcctcgccgcctccatccgcctctgctccgcccgcaggaaaccctccccgatcgccctcagcgccttcaccacgtcgctctccccgtcatcctccgcatcggcatcggcatcgccatcaggcagcctcctcttcttgggaggcggtgaggagggagcggncaggagaggcggccgccaggctggcggccgccggg

SEQ ID NO: 38645 - DNA, 508 bp, Oryza sativa
  unsure (1)..(508): unsure at all n locations
  Clone ID: uC-osroM202004e10b1
tttaacctccgccccacaccaccaccaccgcctccgccttcgcctccgcctcctcctcaccaccgttgcgatggcttcttcttcccccaccaacgccgcggccgccgcccgccgcgtgccgccgccgtgctggacccccgacgagaccctcgcgctcgcccgcgcctacaccgcgcgacgcctcgcggtgggacgggcgcacctgacctccgccgactgggcggccgtcgccgacgcggccaccccgaccaagaccgcgcgccagtgccgccacaaggtcgagaagctccgccgccgcctccgatctaagcgccgccgcccctgcccgctcctcgacgcgatcgatctcctcgacgggccttccccttccgcgtccccgtcgcaatccccctccccgccgccggcagcctcgccgacgactttnctaccgctgcctactccccgccttccaagaagaggaggctgcctgatggcgatgtcgatgccgatgcggaggatgaccgggaga

SEQ ID NO: 38646 - DNA, 470 bp, Oryza sativa
  Clone ID: uC-osroM202004e11a2
gtaaaatagcagcaatgcatttatcatattatatatgtagctacaaactacatatagcaagctataagtatgtacagcaatgatggcaggtaatattgccatatcaattttcctgctatggtatgtacaccagagaacgagaacaatttacatgatttgggatggtggagcatctgaaataatgcacagttcttcagacttcacctacggttcaagcactactgcccccaatcgatcatcaaactacaggggcaagagaaaaagataacttgggtatattgcaggagctgagaatatttgctaagttttcttcacctatgatttaagcactaaaacccctatgggtggaactccaggggttggagggaatgctggtgcaagcctgcacagcaacctttgccatcgcttaagcagagatgccagcatttgcagatgtttgccaaggaacgcatatgcttcattccatactg

SEQ ID NO: 38647 - DNA, 447 bp, Oryza sativa
  Clone ID: uC-osroM202004e12a2
ctaaaaattctgtgtgtattgtattgaatgtcgctccacatgagagcagaaatgcctacctagctacttctctattgctcaatcactgtggctcggtacaaaccatttcttttactatacaaaaatgaagctaaaatcattggaagcacacttaagtatctgctgagtatggtctgggatcaccataactagttcccttgaactcatagcccatctttgtatcaatctcttcacaaggtatatagctaaccaaattctccatcaaatggccaggtcccttaagcctctgaatcatgctgtcgaaggggttggttctcgttgttctggctgtcaagcggcatgtactgggacatgatggccatgatctccgagtccatgtacgacctgagtctgtacttgtagaacacatagccggtaatccccacgccgggtacgcacgacgccacc

SEQ ID NO: 38648 - DNA, 398 bp, Oryza sativa
  Clone ID: uC-osroM202004f01a2
atcaaacaaaaaatgcatgatctattgctcttgcattgaaactaaaagcaaattgtttagggaactacatcccaaaatggaataagcgctgatatataagatttaagattcggatttggtgctctcgtctataattgtcagagagaccccctcacggtatcctcaactcaaatttcgtctttctcagaaaagcaactctttgtatcagtcaaaaatttgcagtattattttccagacaaagcacaaagcagctctcaggctgcgattggtggcgcgcgcggagtttatatgtcgaggagcaatctccgtgggtcttcaaccacgtccttgatgcggcgcaggaagtagacagcttctctgccgtcgatcagcctgtggtcatatgtcagcgcaaggta

SEQ ID NO: 38649 - DNA, 236 bp, Oryza sativa
  Clone ID: uC-osroM202004f01b1
cttgcaaagaaggctactgaggtggggactcttaattgatgagatggcaggaggaacatttaccatttttaacggtggttgttacagaagccttatcagtacacctattatcaaccccccacagtgctgctattcttggaatgcactccattgtacaacgccctgtggtcgtggacggtaacattctttcgaggccaatgatgtaccttgcgctgacatatgaacacaggctgatc

SEQ ID NO: 38650 - DNA, 470 bp, Oryza sativa
  Clone ID: uC-osroM202004f02a2
acacacgccggactctccccttctctctgtctcgctccttcgttcgctcgctttatcccccccgaataaaggcgagaagccgcagcggcggacgaagaagagggcagatagaaatggcggcggagacgttcctcttcacctccgagtccgtgaacgagggtcacccggacaagctgtgcgaccaggtgtcggacgcggtgctcgacgcgtgcctcgcccaggaccccgacagcaaggtggcgtgcgagacgtgcaccaagaccaacatggtgatggtgttcggcgagatcaccaccaaggccaccgtcgactacgagaagatcgtccgcgacacctgccgcggcatcggcttcgtgtccgacgacgtcggcctcgacgccgaccgctgcaaggtgctcgtcaacatcgagcagcagtcgcccgacatcgggcaaggggtgcacggtcacttcaccaagcgccccgaggag

SEQ ID NO: 38651 - DNA, 232 bp, Oryza sativa
  Clone ID: uC-osroM202004f02b1
ttttagatcgcgagcgggcggccttttttttggggggtttttatagatggtggctgggtatagaaagaaacagtattactacatgcggatacacaacaacctgagaaaagacaagtacaagcataagtcgttgacgaaactggagagctttctagaatatcaggtggctctgaaaaatgaaaaaaggataaaacggcctatatatctgaatactaaaactgtggctgtttca

SEQ ID NO: 38652 - DNA, 355 bp, Oryza sativa
  Clone ID: uC-osroM202004f03a2
agcaccaagaggccccgaaaaaaagagggcagattcattcattcactcggtggcattaaaatttccaactctcccgctgagttgaaaagcaggaaatacttgatccaacccccccatgggccatcaccatgagccttgaacaaaacccctagcttatctcaggagaaaagggaaagtagcagtactaattaccggccccccctacatttgattccggcacaaactttttttttctcgagggacagcaaacgagcgatctgccctaccgggatcaatggcacgggccacataccggaggggcaaccaagaacaccgggcccccaccaggttactggcccccattgccggactgggg

SEQ ID NO: 38653 - DNA, 493 bp, Oryza sativa
  Clone ID: uC-osroM202004f04a2
atcaacaggttagtgccttcaaaggccaccaacattgctcccagattcagaacagcctcatgcatatacagcgtcacaaataaacgggtccatcaaatagctgatagacccacataaaaggttacaagtctagcaaacctggcaatttatgttacatatgctctgcaccaagggagatgctatgtcaagacactaggctatattacattgtcgaagttattgtgcacaaatacgactgcagcgcaggcattttcgaagaggttccatgttgatgcaacccatgacaattagaatgatgggggccatgccaataagattagaccccataagtatagctggagctgttagaacttgaaggccaaatatgccgttgataaaatatggttacccttcttcaagctccatcatttgagctccaatagaagtcacttttttcagttgagtaaccgtatgggagatgaggcccataaacaacattgccattcaaatacgt

SEQ ID NO: 38654 - DNA, 131 bp, Oryza sativa
  Clone ID: uC-osroM202004f04b1
cttttctcctctcctctccccgtcgaagaggaggaggagattttcgaagagcatctccctcgccgcgaactcgcgaaccggcgcgcgcgggtgaggaggaggaggggatggggaggttttcttcttttttt

SEQ ID NO: 38655 - DNA, 416 bp, Oryza sativa
  Clone ID: uC-osroM202004f05a2
acattacatgatacacatttttgaatgtttccttttggcacaaatttgtaccaaattatgaatgttgtttacaagaggggggtaatgatataatatcatgtctgcaaaagaacacatcaatttaaaattcgcaacaactaagcacatgggggctgcacctccagtatcctttcctgtgaaaatggggctccaaggtgacacacgttatggtgttagcgtatactgctctggggaaaataatgttctttgccagaattctccccagaatgcgccgaaagaattccctcccagtatctacgggcaactcaacaggcgctcgagatctgtatgcccttgatttgtgctttgagacactccgattcctcaccagttatattcaccattctagctgggttttggacaacttcagacattgg

SEQ ID NO: 38656 - DNA, 434 bp, Oryza sativa
  Clone ID: uC-osroM202004f06a2
gacaataatttggcatgttttcaactaggaaaactcgtcttgctcgatcccccaacaaaaaaggcataagcatctgccaccgattttacacactcagaaacctcacctgacgcctaataacatgtaaacggtgtccatacgttaaatttatttaaacgcaacagcatccgaaagcacctaatatgtccatagttccccactgcttatcatcatcatctagtcttagccaccaccagaaccgtacttcttaccaaagacgaccacctgcagcttgtcatatccagcaagcacaccagcaccagcaacagcacgcagaatgttagcaccagcgcccttgaagagtgacttcgcaccctccttcgcaacaatctgcttgaacgcatccaaggagctgttgtacttgacagcctcaccagatgtcatcatcatccgac

SEQ ID NO: 38657 - DNA, 386 bp, Oryza sativa
  Clone ID: uC-osroM202004f07a2
ggggaataggggaatagtcattcgcccatcaggatagtagacaatgggatggtttcacgttggccaaatttacaatgtacagtatgtaaatttacaatggtttcaggttggccaaatttacaatctactagcatactcatcatgcttgctcatgctgcacaatggccaacatctcacttgcaccagattgccctgctcgcatcctcatgctgataatgaaggcaatgagcgtacaaaagccagcacacatgatactgaaacctttgaatttgaatggcgctgtttctgaaaggacccatgctgttagaggggtaaaaattagtggagctaatatgctggcaaacgagcttatgcccgatatacagccttgagcaattccctggtca

SEQ ID NO: 38658 - DNA, 418 bp, Oryza sativa
  Clone ID: uC-osroM202004f07b1
gtttgagacgccaggatgaaggacttggctggggtggggctctagttcgtggcggcgttcatgttccacttcgcctcctacatggtcatcccggcgatcaccgacgtgacgatggacgccgtctgccccggccgcgacgagtgctccgtcgtcatctacctcagcggcttccagagcgccatcacagggatgggggctcttgtggtgactcccatcgtggggaatttgtcggacaaatacggcaggaaggcgctgatgacactgacggtgaccgtggccattctgccgttgtttatactggcctgcaaccgctccaaggtgtacttctacgagtactacgtcgttaaggtcctcgccggcatctttctgcagggcagcaagcattgccttttgctcgcctacgtggcccaccaaagtc

SEQ ID NO: 38659 - DNA, 429 bp, Oryza sativa
  Clone ID: uC-osroM202004f08a2
tttttttttttttttttttttttttttttttttttttttttttttttttttttttttttttttttttttttttttttttttttttttttttttttcccccaaaaaaaaagggccccaatgggtaaaaaagggggaaaaaaaggggcgcaaggggccccttaaaggggccccaaaaggggaaccaaaaaagggggggggggcctttccgggaaaaaacgcctaaaaaaaaagggaaaagggtaaaaaaaaacccccggggttgggggggccttttaagggggtttgggccccacccaaaattaaaatttttttaacccaaaagggggcaccccaagaaaaaacgcttttttggccggacccggggggggccaaaggggggggggggggttttaaaaacccggggcaaacccaatttttggggcccccggc

SEQ ID NO: 38660 - DNA, 420 bp, Oryza sativa
  unsure (1)..(420): unsure at all n locations
  Clone ID: uC-osroM202004f08b1
ttttgctccgtcgcctcctctctctctctctccgcgccccttcgctttttaggggtgttgttcgcgccgccccggtgagaggtagacgggtctccccggcgagatgggccacgtcgacgcataggccgacgccgccgtcgcgcgcgacgcgaagaagaagagggggaaccggtcggcggcgaagctgatgcagtgcaagcttgacgcgcgccgcgagcagtggctttcgcaagtcaaggatggaaaggaggctaaggcatcgacttcgccgacaggtacagagccaaatgctgggtccatgaccgttccttcngcacaccctccgctccctcgccgtcngttagatgtgaggtcgaagggaggggatccagaagaggacagggaggagaggggtgctcccccgcctgaggttggcagcag

SEQ ID NO: 38661 - DNA, 443 bp, Oryza sativa
  Clone ID: uC-osroM202004f09a2
aaaaaaaataccagatatccaattgatactagactcgagcataaattgatgaaaaaatatataactacatacaggcccaactgcaatctggacataccaaggacaagaattactggttcacataaaacacaagagatctgaaaacacacttcagaggaacatagcaggaaaatcctttttagcgactacagctagtaggatgcttcactggaaattgataaaacaagtgttgcatcttaactaggactatgcaacacacaatctcctctgccttagagtatggttccatggctcacttggccatcatgaccttcacaaactcctcatagtttatctgaccatcaccatcaacatcagcctcacggatcatcttatccacctcctcgtcagttagcttctcgccaagatttgtcatcacatggcggagctcagcagcggagatg

SEQ ID NO: 38662 - DNA, 270 bp, Oryza sativa
  Clone ID: uC-osroM202004f10a2
atgaaaaacgccacatgttacatttcttcctttttttttcctctttgtgtaatattgtactaatgctgacccaaaatatagcaacttaatacaatgtgagatatttcctagtacgatgaattcgtacctgagaactacccgaatttcgtcctatttatactagtttgctatattttggtacagagatagtaagaaataatttaacgagcacacgtgcccctcacgttccaatcatccgctgaacggactgtacaccttgagagcgtcgat

SEQ ID NO: 38663 - DNA, 475 bp, Oryza sativa
  Clone ID: uC-osroM202004f11a2
caaggcaaaaacagataaactccactttaactttggcaaaaagaagtggttgctcagtttggtgccgacagaggtttattaacagtagaccaaaatgtttctaggggaaatcaagccaaaataattccacttcaaaaggatttggggttcccaacttcagacccctgaaatatgtcatgagcaccgctcatcttgtgccagcaaaaaataaacttgatgttggtatactacaaatagttaattatttgacagatgcttttacagctttctcagccgcatcatcaagatcctctgcagtgattaaggtcattccactttcctttagaatcctcttcccttggtcaacattggtgccttccaaccgaacaacaacaggcaccttcaggtcaacctgttttgctgcattcactattccacttgctatcacatcacatttcatgataccaccaaaaatgttcactagaatagccttcac

SEQ ID NO: 38664 - DNA, 224 bp, Oryza sativa
  Clone ID: uC-osroM202004f12a2
gcgagacaatgggagaggatcggctatcatgctttggcacatgacagcggatcggcagccctagctcctcagatgttggttaacagcatgaggatgccgacaaacggaggagtgtaaccctacataaatgaacttgaaaaggactgtaggcacacgaacattataagaatctgcatagtgacgaaagcaccagttcatggttccgtaggacagattacccatgc

SEQ ID NO: 38665 - DNA, 152 bp, Oryza sativa
  Clone ID: uC-osroM202004g01a2
ggggaggaaattatagaggattaatcaacaacacgacaagacaaaacacgacgcacattacgaggacatgtcaacatcaatgcatgcatgcatgcgatgacttgacactgtcacacactgacacaacttactagcctaaagctagcagtagt

SEQ ID NO: 38666 - DNA, 395 bp, Oryza sativa
  Clone ID: uC-osroM202004g02a2
acgtaacaatacgctatgcccaagacaagtcaatactacaacatctgtggcgagtacagaggtacaaaagtcaggcaccgtaagcctttcgattaaaaaccaaactgaaacacgcacgattttttaacaccccacgaaaaacaatctgatagctagctcctttggtggtggaacctaaagagctttatcttcccaaaacatccacatcattatctgtcatgactatatagtttcgatacgtaaaaaggcagcgttcactcagggatatccgccatgtcttcctttcatttaagcccggccaagatgcttcaagccttgttggcaatgttgttggaaagccagtcaagcccctcatacaacccctcaccagaggtagcacatgtgctctggatgta

SEQ ID NO: 38667 - DNA, 409 bp, Oryza sativa
  Clone ID: uC-osroM202004g02b1
cgacccacagcgcgcgccttttctgctctgcacctgcgatccatacgcgcccgcgaggtttaaagagccaggcggcttctctgggagagcaggggagagaaggagaggaggaaatactccccctcacctgcgtgagcagatcctatctccagctgtagcggagatggtgctcacgttcacgaaactgttcaggcgtctcttcggcgagatggagatgaggattctcatggtcggcctagctctccgcggtaaaaccaccatcctctacaagctcaagctcggcgagatcttcacccctatgcccaccattcattttaatgtcgaaactgttgagtacaagaacattagcttcaccgtttgggaatgttgtggttacgactagatcaggcctcctttggaggccctattt

SEQ ID NO: 38668 - DNA, 133 bp, Oryza sativa
  Clone ID: uC-osroM202004g03a2
gccgccttgatgcgctgcaggtcgttcggccggtccggcttgtggccgacggagagggggacggggacgccggcgcggcagaggacggtacgggagtcgtcggagttgtcgactacgactcggttaggaccta

SEQ ID NO: 38669 - DNA, 498 bp, Oryza sativa
  Clone ID: uC-osroM202004g04a2
gcatagaaacagtaatatgctaatcataattgtgaacaatgaaacgacagtcctaaaaagagcagagcgacagaacctctgcacacatagaccagttttacatgcaagtatcttgaggacataacttgctgctccaaaattcaaatttatgcagccaactcgccagcttctagtttatagtagaagatatcgtacaaccagaacgatagtcatcaagggctgaatagactatatgcaaaacatgcatatcggatatggaggtaagacagcatactgaaatcttacaaggaagacacaaaggagttgatttatttcttctcatcttctggcttgtctgatttgtcttccttcttctcttgctcgccctgcccatgcaatgatgccagcaaatctttcacagaggggtcattggggtcaacaccagggagagagttaaggatggatgtaacaaatgatctgtcttcaaacaccttgctcatatcagactgactagacccg

SEQ ID NO: 38670 - DNA, 519 bp, Oryza sativa
  Clone ID: uC-osroM202004g05a2
agtagtaggagattaatcattccaaagtagtagtcagcaataccacgacacgaacaaaacaaggtcgatctcttgtcagaatcggcgtccgttttacaagggtcagcgcagcgcagccaaccaaaactcccacaatcccctcccaaaaccgaaccgtttctgtgacctgaactggatcctgtgtccccccaagctttgtacttgtacttgcttttggtgctcttttgtgactcaccattgtcctagctaagctagctaccatcctgtcctccccttgactcgtttgactcccttccaatccccctcctcccaaattctacttcaagaaatacagaaaagaaaagaaaaatcaaagagtcctgactttgcaaacagtgtaccagctctgtcttcttctcccctcttcttaacatggctggttgtcaggagcaggaatttacatgcatgcaactcgattacagcccaagcatgatgtagtagacgagggtgataggcacagcgatgagcatgcccaagatg

SEQ ID NO: 38671 - DNA, 511 bp, Oryza sativa
  Clone ID: uC-osroM202004g06a2
aaaaaagcaagcattgccaaaatgcttttattcatatatagacttacaaagatcacaacaaaggttccaatgataaatatccatgttctctccaccctgggctgctccttacattaaaagaatggagatagctatggacctccttatccaaattaagcgtagcacattgaccataaaatttaacaacagttcctcccaccctacaagcgactcagcagcaagcagcaaccaaatattaccgaaaatttgaagcatttcacatcttagcagcacgcgcgatcttgaaccactcggtgtggaaggagccgggcatgtcgaccctctcgtaggtgtgagccccgaaatagtccctctgtgcctgcaccaggttggcaggcagcctgtccctccggtaggagtcgaagtacgcgagactcgccgacatgcctggggtgctgacgccatttgtgatggcaaggcagaccaccctgcgccatgccgtttgcctgtccatgatcttctgagcgaactc

SEQ ID NO: 38672 - DNA, 356 bp, Oryza sativa
  Clone ID: uC-osroM202004g08a2
agagattcaaagataagcgatgttactttgtttttaccaacatttacatacaagcggtacaacacatattgccagaaaccacttggttttccagccataatttttgacaattaatgacgcgcgcgcgcacacacaatgctggattcacagggtcacacagccatgagccatcaaactggaagggctctgtttgttcatcacatagtcacagatcgccttggcctttagcagttgcaggggttgcacttgcagctggaaccacagctgcagccatgggcaccctcaccagattcagctgctttgccaactccctcaaattgccccttctcaggtgcaacaccgaggacaggggttgt

SEQ ID NO: 38673 - DNA, 410 bp, Oryza sativa
  Clone ID: uC-osroM202004g08b1
gtcctgaagagtttacaagtgacccagaagagcgagatgtttaagcggtggaaggcgcaactgtggttcctgcggatgcagcggtggctgcggaaagatgtaccctgacctggctgagaagatcaccatcaccactactactacaaccactgtcctcggtgttgcacctgagaaggggcaatttgagggagttggtaaagcaactgaatctggtgagggtgcccatggctgcaactgtggttccagctgcaagtgcaaccccttgtaactgctaaagggccagggcgacctgtgactatttgatgaacaaacagaagcccttccagtctgatggctcatggctgtgtgaacccttgaaatcagcattgtgtgtgcgccccgcccgtcatgaattgtcaaaaattatggct

SEQ ID NO: 38674 - DNA, 473 bp, Oryza sativa
  Clone ID: uC-osroM202004g09a2
aacactataacatgggattatattaggagagagacaaatacaatacgtttcaccggagaccagccaagttgagaaagcagtggcaggctgtatcaggagacgccatagccatacagtatttttcttggagcatcattattgctacaaatcatcatgtgatcgcagcaaacaagtacaataccactgaccttacatgcaaggcaagatgcaattgtttctactcaccttcacgtcatagcagaaagcaccaaacaagatcactgaacactctactgtaaccagcagatgtagccgacaggcgaaagagagtgattttcttcaatgggatggcaaactaattcgtgatcctttgccatttcatatcgaccgaataaatgccggtaggtcattcgcgtacgggctccagtgtttgatatgaaactgaacagaggtcatgccactgctaacaaaagaatcttgcacagtgatgacct

SEQ ID NO: 38675 - DNA, 486 bp, Oryza sativa
  Clone ID: uC-osroM202004g10a2
acaggcaaacaaaactcataataatttacacgcaaaagactctaattacacagcaagaaaagaaaataaattggagcattgccaacacactgctcgatggttttttttgtttgtatgtcctggatctcctgttctatacacttcctatacgcccaaaaagtaaaaaaaatctgtaacaaattcattctcttaatcctatctgctcccaagtcccaaaccaaaatcctgatcgatgaaacctaacaaagaccagcaaagctgtgatgaactgctgtgatatgtacaaacaaacggcgaaaatctcaattcagcagcccatgcccttgatcaccaccggccatcgtcgccgtcgccggctgcgtgccgtcgtagttgagcagcgcgaacttgacgttgagcccgatcttgccgccgtccttgacgagcttggcggcggtgaccagccagtgcccccgcacgtcgtgggggcccttcaccacctccgac

SEQ ID NO: 38676 - DNA, 163 bp, Oryza sativa
  Clone ID: uC-osroM202004g10b1
ctattcttcttcttcctcctcttctcctcctctcctcgccgaggacgcatcggaattcaggtggaggcaaggattgcatgagctaaggtgaggtgtgtccggcgtcgcgttcgcgtgcgaggtggtggtggtggtggctgtagtgtggaggtggtgtgtcttg

SEQ ID NO: 38677 - DNA, 429 bp, Oryza sativa
  Clone ID: uC-osroM202004g11a2
gagagaggacagcattgatttcgatctcttgataattcacaaatataaatatacatcagaggaagttaattcatggataagcaacagtcatgtgacatcctggcggtgacaagataaaccctacaacgggacagaaatgtacttcttctacaagtaattattattactcaatgtaatcacatttaactcacaacagattataccctctcgcttctacatgcatatacaattaccgacatgaaatatttctaagtattatatatatcctgtattcatgtgcaaggcataggttcttgatcatattgctttcgacgcttacgaaagaaacaacacgttgcttgtcttgccaatgcaggtgatatttactttaagtgctagcctcattcataaggtggcaacctttggactgtattaagtttattttgctgc

SEQ ID NO: 38678 - DNA, 496 bp, Oryza sativa
  Clone ID: uC-osroM202004g12a2
cagaaaaataaaacccgttttctataatatatgggcaggataatgtacgccaactccaaatgatatcaacaactgttagttccaaaatgtatctccatcaaaatatgatgcaaaagcaagttgaacgcaataatgcaggtttaagcaatttggtcctaataaaaaatatatatctagacagcctgtacattactctgctgtttacattttgttccctttccagacaaataatattttcggtaccatgagtacttcgtgtatatggcattttaagcgatatttttgttgaattgtgtttgatgaaacagtggcactagtcataatatgttgcaacatattaacatgttggtgaaatcaaattattgcataactatatatttttggaggatagacccctaccattgatgtcatgatggcttgttggtgctcttaataatgtagtagtactagtttttttttaaaagataataatactaccttcgtccaaaataagtgc

SEQ ID NO: 38679 - DNA, 437 bp, Oryza sativa
  Clone ID: uC-osroM202004g12b1
tttattcctcctcccaactcttgcttccgttgtgcgtgctttttaatgccgacagggctacacctgaatagctcatcctcacctgatcagctgaacctgtttgagagaaagaagttagttggccatctcgccctcgctagaaaaaggaaaaaaaagaaggaaaggagaaggaggagagagcttgctttgctgctgggttgttgctaatggtgttctactacaaggcgaggccggacgccggcgactacaccatctacatgggcgccgacaagaacgagaacgaggagctcatcaagtacggcctccccgaggacgtctggttccacgtggacaaggtatcctcggcgcacgtctatttgaggctcaagaaaggcgagtcgatagatagcatctgcgacggtctgctggaggactgtgcacagcttgtaaaggcttat

SEQ ID NO: 38680 - DNA, 257 bp, Oryza sativa
  Clone ID: uC-osroM202004h01a2
gtaagaaagaattgcattacttttggggtctgcgatactataagcaacagagttttgtaccagtctaaaagcagccttcttttactcttgccacataaacatattcagtttaactacacttttagcaccctgtgtggatgtcatgtgatgagaggcaggaccgactgacttgttcactcacgggattattcaagctgccaggctctttgaagctatctcgtacacattctctgatagcccattggctgacacgatca

SEQ ID NO: 38681 - DNA, 284 bp, Oryza sativa
  Clone ID: uC-osroM202004h01b1
ctttcttcgcaagttgcagattctacttggtcgggggggcagtctaaggcgaactgctggcgatcgatcgctcgctcgctcgcggggacgcgacgaggtctcgcattggacaagaccagccacgccttccttgtcgctatatagtgcaaggcttgccagcaagaggacaacttgttcccgtgcaaccgagccggcgtcttcacaaccgagaaccagagattgatcttccaaaggagaaattcctgaaagaatacaaaaagccccgattactttattttgactcc

SEQ ID NO: 38682 - DNA, 276 bp, Oryza sativa
  Clone ID: uC-osroM202004h02a2
gggcccaacactttatcacaaaaggcatggccgttcggcccctcggttacccaaaaagcagccaagggcgccttgattaccaaagccggcccaaaaatttggggggtggccttcccaagggagtttccgagagggagagagccccccaggtcgggcccttatttaggtatcgttcctttgccattgccaggcgtaaaaaggttttagttattttgggacctccaggctgagggtctttttggggggattggcctttttctccaaggtcccaagcgg

SEQ ID NO: 38683 - DNA, 403 bp, Oryza sativa
  Clone ID: uC-osroM202004h03a2
aatgtgtaaacaaatgcctcctttctttaattagaggcaaacccatccgaattacaagataaattaattaattttagttacgcaacaacaacttataataaatcatcggaaagaatcaattgcagcactaatccattccaagatttaatcggcttctcatgtcgttcatgcgtcgaagctgatctcccactcgtcgtcttcctccccgaccttgaggaaatgcgatcctcggtcgatcaccttcgtgccgtcctccctcgcccggctcaggtgctcgcacgggttgatctccatcgtcaaccttgccttcttccccgccctgacatgctgactgctgaacccgaccaggtgcctcgccggccgggttgcccccggcgttgcgttcggccaccggacgaacacc

SEQ ID NO: 38684 - DNA, 150 bp, Oryza sativa
  Clone ID: uC-osroM202004h03b1
cacgttgagctagccatggcggccgccgccggcgggcttctgttactgacggccgggggattgctcctgctggtcgagggcggcgagccgccgtactcgtgcgggccgcggtcgccgtcgtcggggtacgcgttctgcgacgcgaggctg

SEQ ID NO: 38685 - DNA, 327 bp, Oryza sativa
  Clone ID: uC-osroM202004h05a2
gggttcccagtctcgaccttgaagatcgtggagtttctggttcttcaatttgattccgaacgactgtcccactgatagacgtgtcttcatacgaggagaatctactgggaggcttggaactgtggttagtagctgcagggtacacctgcgatgctcttggcgagcgcagtacaacagtttcagacccacttatagattggtcattatcttctgtagaactctctagtcttccatattcactttgtgcatctttctgcgacgggttttgtgagatcgactctttagaccccgtccattatgtacttccaatgattttctggtttcagc

SEQ ID NO: 38686 - DNA, 487 bp, Oryza sativa
  Clone ID: uC-osroM202004h05b1
tttgtttgttttgacttcagacggcggtaagatcttgggaaacttggttttgccaccttgtaagaaggaacctcgccaaagggcttacggtaggggcagccaaggaaggtgtattagccattttcttgttacttggaggttcagagggaggttcagatttctttgcgaaaactgatgtcgccgtctcttgaagactttgcagcgaggactccttcgagctccctagccgatggagcattctgccaatcagcacctcacaagatccaggtagctctttttcgagatgcatcaaggaatcaaggaatgtatgaacaactggtccgttaaacttgtcaccagtagcctcttttagagaaggaattatcaatgacgagagtgcaggtgaagatacagaaccagaagcttgaggagctgattgtcatcatgtatctggcgtggattgcgaccttttttcatgtcagcattcttacttggggcatcatgactg

SEQ ID NO: 38687 - DNA, 266 bp, Oryza sativa
  Clone ID: uC-osroM202004h06a2
aacgatcgatttattggactgatgtatatatgaacacacagattgacctaggagtttctcggtcatcgatcaaggacatatacgtggtcagcgcgacaacacttggccggtatgatcgaagtcgataagacgataaccgagacacagcctacacacgacacaacatgatcctcccccagagacccatgatctgggacacatgcactaacgatgcatgtctgcatacatgaagcttgtggaggctaattcgatattattagcacacg

SEQ ID NO: 38688 - DNA, 302 bp, Oryza sativa
  Clone ID: uC-osroM202004h07a2
cgccccaacccaaagggaacattgggggggcggggtgttccttttcccaaggggccccccccaaaacggggggtccaatggggggggcaatttttttattaaaacccggaaggggccgccccccctgaaaaaaaaaaaaacaacattgtttttttagaggcttgtcaaaaaaagaaatcccgggggcccaaaggggccctttttaaacccccgcttttccaggaaaaatgcctggtttaaaaacaagcccccaaaaaaaaaattggaagggttaaaggaggcccttaaaaaaaaaaggtaaa

SEQ ID NO: 38689 - DNA, 61 bp, Oryza sativa
  Clone ID: uC-osroM202004h08b1
tataaaaaaaaaaaaaaaaaaaaaaaaaaaaaaagaaaatttaaaaaaaaaaaggccgaaa

SEQ ID NO: 38690 - DNA, 365 bp, Oryza sativa
  Clone ID: uC-osroM202004h09a2
gccacacaatgaatagaatatccgtggtacgaaatactggttacatgtcgagaatcctcagagtccagggctgcatgacactgaagcagcacatccctagtcacctagatgggtagccattcactggtacaacaatcctacaaacaaaccatttgttcttccatctgcgcaaactacttataagttttacactgagaagaaaaaaggcggcatctaccagtcctagtaatcacatccaaattgagaaacgtagacagtatgacgcctacaataatacaacatggggacaaagagggggtgcacgataaaatccaccgatcaatggttactctagttaacctcgggattattatcataccacccat

SEQ ID NO: 38691 - DNA, 537 bp, Oryza sativa
  Clone ID: uC-osroM202004h10a2
ggtgggaggaggagggcagcaacctccgcctgccgtcggagcgcgccgtggcggctggcgcggcggcggacgacgctgccgaggccgccgagggcaccaggtgggccgtcctcatcgccggctccaacggctactacaactaccgccaccaggcggatgtctgccatgcctaccagatcatgaagaggggcgggctcaaggacgagaacatcatcgtcttcatgtacgatgacatcgcgcacaacccggagaatccgaggcctggtgtcatcatcaaccatccccagggtggcgatgtctatgctggggtcccgaaggattacactgggaaggaggttaatgtcaaaaacttgtttgctgttctgctcggtaacaaaactgctgtcaaaggtgggagtggcaaagtcctggacagtggccccaacgatcatattttcattttttacagtgaccatgggggtcctggtgttcttgggatgccaacctatccatacctctacggagaagatcctgagatggtctgaagaagaagcatgc

SEQ ID NO: 38692 - DNA, 473 bp, Oryza sativa
  Clone ID: uC-osroM202004h10b1
aataaaatagcggcaatgcatttatcatattatatatgtagctacaaactacatatagcaagctataagtatgtacagcaatgatggcaggtaatattgccatatcaattttcctgctatggtatgtacaccagagaacgagaacaatttagatgatttgggatggtggagcatctgaaataatgcacagttcttcagacttcacctacggttcaagcactactgcccccaatcgatcatcaaactacaggggcaagagaaaaagataacttgggtatattgcaggagctgagaatatttgctaagttttcttcacctatgatttaagcactaaaacccctatgggtggaactccaggggttggagggaatgctggtgcaagcctgcgcagcaacctttgccatcgcttcagcagagatgccaacattgcagatgtttgaaaggaacgcatatgcttaattcatactgcgcta

SEQ ID NO: 38693 - DNA, 482 bp, Oryza sativa
  Clone ID: uC-osroM202004h11a2
gggacagtacaaatggatgccatatttttatacatacaaagtgctaaacacgctaagaaaacaaaccgaagttttctcatgatgctatctagtagttttctggaattcatccagtctcctactacagttattaacacctgaaaaaggctgtgaattttcattctacacctgcaacagctttgtagccgtgtcgagatcatgacaaggctatccaaccatcagcctttctacttggaaggaaacaattctatgttatgcgaggaaggtgtttgaaggtactaatcgagattgaaaataaatacctccataacacccgcataccgattccgtacatactgtcccctacacaatctggacacaggctggtgtgtcggaccttggacctgcgatcgtccgggagacgtacagtttcttaacaggtgtttcatccggaagcgaattcaaggtgcatgacctttcaggatcgttcatgatctccacac

SEQ ID NO: 38694 - DNA, 466 bp, Oryza sativa
  Clone ID: uC-osroM202005a01b1
tttcattaccgcagctgcacccgcatccgcacggcaccatcagtgcgcaccaagaaagaaacacggagaaaagaaagatcgccatggcgccgagaacgtcggacaagactatgtcaccggcggccgcggccaccggactcgcgcttggcgtgggcggtgtcgccggagccgccgccgtgggcaccggccagcacttccgtggcgtgaggaagcggccgtggggccgttacgcggcggagatccgcgacccggccaagaagagccgcgtgtggctcggcacgttcgacacggccgaggaggccgcgcgcgcctacgacgccgtggcgcgcgagtaccgcggtgccaaggccaagaccaactttccctaccctaaccgcgcgcccgccgccggtgtgaacagcggcagcagcaacagcagcaccgtcgagtcgttcggagcgaccggcatgcgcccataaggccatgc

SEQ ID NO: 38695 - DNA, 420 bp, Oryza sativa
  Clone ID: uC-osroM202005a02b1
ttctatttggcactgcaggcatcccaatatcgggacgattcaattaaaatcctgtgcggctcgaccacatcacgccctcgaggagtcgtgggtctctctcgcgaccgacttaccacgcgttatccctacgcgtccgtctcccccctttatttttatcgcgcccgccaccgaaaagacgaaaaaaatctcccaattccccaaccctaacgccgatctcgcctccaccccccaaatcccgaatccgtcgcctcttcgttcgtcgtcgagctcgctcgctcgtccaaccctagcgcgccagatctacccgtccccgagcagccgccatggcggagaccctcgacatgacgctcgacgacatcatcaagaacaacaagaaggccaaccccttcttcggccgtggacgccgcggatctgccgctg

SEQ ID NO: 38696 - DNA, 483 bp, Oryza sativa
  unsure (1)..(483): unsure at all n locations
  Clone ID: uC-osroM202005a03b1
gaaaatgtagaaaagtttttcgcagccgcgggggccggccaattaaccaacccgaccggtcaacgcggatcgcctctcgagcaccaaaccctacccggatcgccagcgcagccactcaccaagccttcccccccaccctgcttctgctgctcgcgccgggattcttggctcgtctgctcttcgcggtcggtgtcgcgccatcagcaaccatggagggcgagaggagggcggtgaggacggtgcgggtgcggaacatctcagatctggcaggggagcgggaggtgcgggagttcttctccttctccggcgaaatcgagcacgtcgacatcagatgcgatggggtggcgacggggaggacggcctacgtcacgttcaaggatcccaaagccctagagatcgcgctgctgctgtcgggagcaacaattgtggatccggntggcaacataacccctgcctgagactacatctacatccctgttactg

SEQ ID NO: 38697 - DNA, 460 bp, Oryza sativa
  Clone ID: uC-osroM202005a09b1
tcgttcctcgcgacctcgaaaccctagcctggtggggcctcttaaatcggtcacggggagcggccccacccccccgcagccatgggctccccggagggctccacgtgggtcttcgactggcctctgatggacgacctcgccgccgccgccggcttcgacgccgcccccgccggaggcttttactggacgacgcccgctcctccgcaggcggggctacagtcgccggcgccgccgcagtagcccgtcgcccctgccaccgcggtttcgaacgcctgtgctgaaatcaatggctctgtggactgtgaacatggcaaagaacagccaacaaataaacgtccgagatcagaaagtggcactcgaccaagctccaaagcatgcagggaaaaagtaagaagggacaagttgaacagaggttcttggaacttggtgcttgcctggaaccagggaagaaaccccaaat

SEQ ID NO: 38698 - DNA, 356 bp, Oryza sativa
  Clone ID: uC-osroM202005a10b1
tcggtcagtgcatgcatcatctgatcagagggccggttcgcgtgcggcttctcgcagcgatccgccatggctggaccttcgatgaatcagctcgtgcacggacacagatcactagaaaagatcatcaatttgagttgaaaataccactcctaaattagtactagattgttaattatacatttttctctccattgcttctttggatagagaagtggcgtggaaacgttcaaagatccaatttttcttcccctccgttgaaaaactggagcggggctgtacttgtaccggcactgtattcaaatattcatgtgattattcgtatccttcaaacgagctcctctgataactaaaacaca

SEQ ID NO: 38699 - DNA, 435 bp, Oryza sativa
  Clone ID: uC-osroM202005a11b1
tcgctaaaatatccggccgactcgccggaggggaggagtgagaaggcatcgccggccgccggcggagattccgacgacccagcaatcgtgcgatggcgtgctgccgggccctcgcgctccgctcgctcctcgtccccgaccacccccgcgccgccggtcgcgccacctccgctgctgctccggcggcggggacccgggccagcccccgcaggaggccgtgctcgaggccatctccaaggtagccaggtctaaaggaagggttgcactcacaacaaacatggtccttggtggcactgtgacagatgatgcaagtgatgaatggcttgttctggatcagaagggaaattcataccccacatatagaggatttacagcaattgggactggaggtgatgattttgtccagtcaatggttgttgcggttgaatctgttct

SEQ ID NO: 38700 - DNA, 499 bp, Oryza sativa
  Clone ID: uC-osroM202005b03b1
gttctctaagcaaaaactgtggggatgttgtttaccagcaaatcattgagcgagacatattaagtgaaatggttaagatagtaaagaaaaagccagatttaaatgttcgggagaaaatattgagtttgattgacacatggcaagtggcttttggaggtgcatctggcagatatccccagtatcacgctgcttaccaagaactcaggaatgctggtgttgattttccacctcgtgaggagaacacggttccactgtttacacctcctcaaactcaaccattgaggcaaccacatctatatccacctccaggtcaaagctatgaagatgcagcgatacaagcttctcttcaatctagcgccccttctgcacctgccttgagtctaagtgagattcagagtgctcgaggaattgtggatgtgttggatgagatgttaaatgctttggaccacaggcaccctgagggtgtgagggagaagtcattgttgccttgttgggcagt

SEQ ID NO: 38701 - DNA, 525 bp, Oryza sativa
  Clone ID: uC-osroM202005b05b1
gtttggttctcacctccctcctcctccgcggcatccccaatcgaccagctggctcccctgcctcctccgcgattttgatcctaatcacccatgtctgctgaagtcagcgaggaatatccttatttcctctcctgctacttctggttcatatattgcataaaattccgagatttcacttgatacaagtggatcacctggagttttgtgctaatacttcctatcatgtgaatcagttgtagttagcataattggcaagactcaagttttctctcatctgggttcagaaacatttgtcggttgagtgctcgatctaaactctgcttgagtcttgccgaagattgtttctcaacaatcacgtcttctgttctctctgaggttggaccaatctcccttttggtctgatcaacctcctgatctcccttaagtgaaccgtcctgctgtgttcacgcaatacaatcttctgaagtcctctcttgttccttctgtgctcaaacatcaaaagcagctctctcctagttctcttga

SEQ ID NO: 38702 - DNA, 424 bp, Oryza sativa
  Clone ID: uC-osroM202005b06b1
ttttggtaatcaagatagcgctatatgagtatatttcacttgcaaaatacaacaacggaatcagaaagctgccagccaaggccatgaacgctgcaggcgccacggcattgcagcagcaatctcacacgattacaacacggataaatacagcaagctcaaaaaggaaaaaaaaaacacggacggagaaacaacgtaatctgctgatgagcgtacgagaagccttcaggatcctgaattcctccctttcttatttcggtgcacgtatcgtctcttcctggatcttgtcgcgttcgcgggtggactggttcgatcagcagatgggcaggggctcgccgttccactccttgaggcactcgagcatcgggtcgatgagcttgcgctcgctgatggccaggaacaccttgttgcactcctcgccggggga

SEQ ID NO: 38703 - DNA, 83 bp, Oryza sativa
  Clone ID: uC-osroM202005b07b1
ttttctttacttcgacgttaagatcataacggggggcgttttatatcctgacgggggttctcaatgctctaaacgagaacaat

SEQ ID NO: 38704 - DNA, 525 bp, Oryza sativa
  Clone ID: uC-osroM202005b10b1
tcggtcaactgcttccgcgacgccaggtcgcagcggccgagcacgtactgcaaccccggcgcgctggccgccgtgctgccgccggcgcaggggaccggcggcgagcaggggtcgggcgggaagggcggccaggtggggatggcccttggcatcgtcggcggcgtcgaggccggtgcggcgctgatcgcgctggtgatgatggccgtgctgaggagggcgaggaggcagaatccggaggtgagcgtcttgcccaagtcgccgctggcgtcgacgccggcggagaagaagaaggcggcggcggacggcggcaaggcgccggccaaggtgacacagaggattgttactcctgctgaaaagaggcatgcatcacaagctgcaagggtgaatacactagaagtaccagcctaccgtgtgtatacacttgaggagctccaagaagcaaccaacaactttggttcatccaacttgatcaagagttctactggtgttaagcattacaacggtcagctttaagatggttctaga

SEQ ID NO: 38705 - DNA, 531 bp, Oryza sativa
  Clone ID: uC-osroM202005b11b1
tcgtttgagggaagaagcgcgccttgtcgaggagcgggatcctgtacgacgcggtgggggaggagcgggtgctggacgccgacaagtacgccatcatgcaccgcgtcgacatcaacgcgcgcgacctgcgcatcctcgacccgctgctctcctacccatccaccatcctcggccgcgagcgcgccatcgtcctcaatctcgagcatatcaaggcgatcattactgctgaagaggttttgctccgggatccattagatgataatgtgattcctgtagtagaggagctccggagacgacttgcaccttcaagtgccactcaacatgatgtggaaggtgctgaagaagatgaatctccctttgaattccgcgcactggaggttactctggaagccatttgcagttttcttggtgcacgcactactgagttggagagtgctgcttacccagctttggatgaactgacatccaagattagcagccgcaacttggatagggtgcggaagttaaaaagtggtatgacccgattgaatg

SEQ ID NO: 38706 - DNA, 538 bp, Oryza sativa
  Clone ID: uC-osroM202005b12b1
tcgccggccgttgctttctcctccgttcatccaccacaggcgaccggcctgacgtcagcctgccgccgtggaagcctaggaggttctctcgtgcgcgccccccctccgctccgccggttcgttctggtggagtggacttggcgtggcggtggagtggggggatccatcgggggcttgcagtgattcccttcttccttcggctttcctagcgcctccgccggcctagccgaccgcctcgagagccgccgtacacctccgcttcgcgccgccggaccccgtaaggagcccccgcaccgtcgacctcgggaacccgccgcctcgcgcacctgggtgttaggattggagtacttcaaatgacaagggtcatccatgactctggagaaggcatgcagaaggaggcacttgctatggtatcttctgatgttaactttcccaagggccatttttcagactacaagattgggccaacaaccaaatattgatccagagagatcatgaggctgtccctttgaggagatcgtgcgaaggaacagcacag

SEQ ID NO: 38707 - DNA, 540 bp, Oryza sativa
  Clone ID: uC-osroM202005c04b1
ttaatttttcttgtgactgatggatctgttgaggatgaacggtatatttgccgcactgtgaaagaacagctcgcaactagaggatctaagtcccccaggatttctacttttggactaggctcttattgcaaccactatttcctgaggatgttggcatccattggcaaggggcattatgatgctgcatttgatacaggatcaattgagggtcggatggttcagtggtttcagaaagcttcaagcacaatagtgataaatatttccattgatgccactaagtacattcgagaatttgaagtggattctgaatatattcaagatatttctgcaaaatgcccactatgtgtgtctgggagataccaaggcaagcttccagagacacttactgccaagggttacttggctgacatgagcgaaatatcgattgaattgagggtccaacatgtaaaggatatttctcttgacaaagtgttagcaaagcagcagatggatcttctcacagcaaaagcatggttttatgaacacaatcaactagagatg

SEQ ID NO: 38708 - DNA, 534 bp, Oryza sativa
  Clone ID: uC-osroM202005c06b1
ttaagtttttctgttcaggctgctggttgggaacccggacgttttattactatccatgcgacaccgaagtcaaaggcgcctgctcgcatcctgggttccaagccaggtgtatttgttgctgcttcccatcctttctttgatcccttggtggacatggacccaaggcttgttgttgcaatgctggacctgccccgggatgctgatgttagcgctctggttttaaggtttggcggggagtgtgaattggtttggctgaatgacaagaatgctgtggctgtcttcaatgatccagctagagcagcgacagctctgaggcggctggattatggttctgcttaccagggtgctgctgtgtttttgccaagcagcagcgctcagccaggcaatgtctgggttgcagggcagaaagatggagtggcggctaccaagagcagtgccaatccatggaagaaggccactgcctctgagcctgatccatccctaggagactggacaggtgtgcttggtcaagcttcaggatcagtatggaggccg

SEQ ID NO: 38709 - DNA, 451 bp, Oryza sativa
  Clone ID: uC-osroM202005c09b1
tcggtcagctccagccactgctcccatggcgaccgttcctacgccgagcgaggcccacggcggcgcgacgccgacggccgccgacgtggagatggtggaggcgagcgagctccgtcggcggggcaagcccagcggcgaccgtgcgacggggccgtcccgagacggggccgccgcggcggcggaggaggcggcggcgccgtcggtggagcgcgtgttcgcggacaggcccgtgccgtcgtggcgggagcagctgacggtgcgcgcgttcgtggtgagcttcttcctggtcatcatgttcagcgtcatcgtgatgaagctgaacctcaccaccggcatcatcccgtcgctcaacgtctccgccggcctcctcggcttcttcttcgtccgcctctggacggcggccatcgagagggtggggcttctccggcagccgttcacgcgccaggagaac

SEQ ID NO: 38710 - DNA, 496 bp, Oryza sativa
  Clone ID: uC-osroM202005c10b1
tcggtatcagcttgcctaggaagcaaggaatgtaggcatggcttctgtttcgccgctactgcttctcctcttgtgcagctaccactctgtagttgctcatgcaggagatggacagagttacaaggttcttgagctgaattctgaggccgtctgctccgagcgaaatgcgatttcgtcgtcgttgagtggaaccacggtggcgttgaaccaccggcacgggccatgctcgccggtgccgtcgtccaagaagaggccgaccgaagaggagctgctcaaacgcgaccagctccgagccgagcacatccagcggaagttcgccatgaacgccgccgtcgatggcgccggcgatctccagcagtcgaaggtgtcgtcgtccgtgccgaccaagctgggctcctccctggacacgctggagtacgtcatctcccgtgggctcggcacgccggccgtgacgcagacggtgaccatcgacaccggcagcgacgtgtcgtgggtg

SEQ ID NO: 38711 - DNA, 514 bp, Oryza sativa
  Clone ID: uC-osroM202005c12b1
tcgtttctaatcatggatgtgccagtgaacaaatggagattgtgatcgcctcaatctcggtgaaggtcacttggtcggctatggagttctagaagggtacttagcgtttggacattttttttttatttgttactccctcagttctatattgtaagactttctagcatgttcatattcatctagatagatagatagtgtgaagctagtgttgctagtgttgagtgtaggcatgtgtgtgtttcagcccaacagggcccattacaccaatgcatatgtatagtagaagagagaggaaatagtgtgaagcttctggagaaaaacaatcacctagcaacatggtatcagagggcgaccgcgtcgaggctaaaccctagctagcggcgcgccggtttgtggtgctgcagcttggagcaacggagtggtggcgttgacagcggagacggcgacagctgctacagaggatctcgacgcatccggcgtgaaggagggagcagggtgtgcgctcgctggttga

SEQ ID NO: 38712 - DNA, 347 bp, Oryza sativa
  Clone ID: uC-osroM202005d01b1
ttcctttcgatctccattcgtttttgagttcggcgtttgctcttcctctctttgactcatgggcaagattaagatcggaatcaatgggttcggccgcatcggcaggctggtggccagggtggcgctgcagagcgaggatgtcgagcttgttgtcgtcaacgatcccttcattaccaccgagtacatgacatacatgttcaagtatgacaccgctcacggcccgtggaagcatcatgaggtcaagggcaaggactcccagaccctcatcttttgcacgaaaagaaggtgcggtgttcggctgcaggaacccctgagagatcccatgggctgcggctggagctgaatac

SEQ ID NO: 38713 - DNA, 439 bp, Oryza sativa
  Clone ID: uC-osroM202005d04b1
ttcttttccagtttggtgcacctgtccgcgacgcatctgccgtagcttcgcagcagcagcagcatcatgggccacgccgccgcagccgccgcggcggcgcacgtgccgctgggcgcgatcaccgtcgacgacctcctcgccgcgggggtggcgggtggtgcggcggcggagctgcacgaggcggtccggcgcgcggtgggcgcgcgcggcggggacggggatgcggcggcggtgtggggggagctctgcagggtcgtgctccgcccgggcgtgcccgtcgcggtgcaccggatgctctactacggatgcttcgccgggttcccctccgtcacgccgccggcctggacccccgacccggaggaggccgtattgaccaatggtggccgcgttctctaggcgtgagggagggagttccttggcgacaagtacaaggatccaa

SEQ ID NO: 38714 - DNA, 489 bp, Oryza sativa
  Clone ID: uC-osroM202005d06b1
ttcatttgttccatcaacataggttatacatgtgcggtcttttttaggaggggagaagggtgttcatttgtgaacagaagctttatacaaggacacagttaaatcagcatgtaaaaactggtgactctgaggtggatggctctgaggttgagcgcagtggttttgcaggacatcctatgtgcgagttctgcagaagttcattttatggagataacgagctttacacacatatgtcccgagaacactattcatgtcacatatgtcaaaggcaacatcctgggcagtatgattatttccggaattatgatgactcggagttgcattttcgtaaagatcatttcctctgtgaagatgaagcatgtttggcgtagaagtttgtagtcttgcagagcgaaacagagctcaagagacatattgctatggagcatggtgggcggatgtctcgtgctcagaggaatgccgcacttcagataccaaccagttttatat

SEQ ID NO: 38715 - DNA, 438 bp, Oryza sativa
  Clone ID: uC-osroM202005d09b1
gtgacgcgagcgcgagagcgaggaggagagcccgagatctcggcggcggcggcggcggcgatggcgctctccgaccgctcccgcgagtcgctcctgccgagcttcctctactcgacggcgggggcgcggccgtacaccgcgggcggcggcggcgccgccttccgcctccccgccgcggcggccccgggaggtgtaggagggggcacaccgatcgagatccaggcgcccagggagaagatcgagatgtactcgccggcgttctacgccgtctgcacggccgggggcatcgccagctgcggactcacccacatggcggtcaccccgctcgacctcgtcaagtgcaaacatgccaattgatccagcaaagtacaagagcatcacatctgggttcggaatattggcttaagagcaaggaagtaggggcttcttcaggggctg

SEQ ID NO: 38716 - DNA, 136 bp, Oryza sativa
  Clone ID: uC-osroM202005d12b1
tgtttttttttaaattttttttccgtttataaccctttttttttgcaaaaaacactccccccattatttaaccacactctcccttcttttcaacccccaccaaaaccccctttaaaatttcaaaatcacttgccct

SEQ ID NO: 38717 - DNA, 285 bp, Oryza sativa
  Clone ID: uC-osroM202005e03b1
tgtgtcgtcttctccccttcttctcctcctcctcctcgattcggagctccacccgcagccatggctaagaactaccccgtcgtgagcgccgagtaccaggaggccgtcgagaaggccaggcagaagctgcgcgccctcatcgtcgagaagagatgcgcccctttcatgctccgccttgcgtggcactcggcggggacgttcgacgtgtcgttgaagaccgggggcccgcttgggacgatgaaaaccccggcggaagttgttgacgccgccaacccggggctggac

SEQ ID NO: 38718 - DNA, 448 bp, Oryza sativa
  unsure (1)..(448): unsure at all n locations
  Clone ID: uC-osroM202005e04b1
atctctcagaaacgcacccattacacggtgggatccaatcaaacacgaaaaagaaaaagcacaaaagaccgacaaacaacgcctgcgacgacggaggcatgtgggggccagagaggggcaccgcgtcactgacgctgggccccaccgccctcgatgacaaactcttttatttagccccacgttacgcgtacccacacacacctacggagtcgagtactaccactccagctcactcaactcatcactcgctacacgcacacgtacgtacaactccggcgagtccccggcggcggtggcgcgcgcgggccatgcatgtactccacggtgtacgacgacggcgagccagccttccccggcatgcactcactcgctggccttcttggcctccggttccgcgaccggngccgccttctccacctttaccttcttggaggtcggagccggagcc

SEQ ID NO: 38719 - DNA, 532 bp, Oryza sativa
  Clone ID: uC-osroM202005e06b1
ttttgctttccctcaggatcggccatggcgaccgccgttgcgtcccaggttgctgtctctgctccggctggctcggatcgcggcttgaggagttctgggatccagggtagcaacaatattagctttagcaacaaatcatgggttggcaccacattggcgtgggagagcaaggccacgcgaccgaggcatgcgaacaaggtgctctgcatgtcagttcagcaagcgagcgaaagcaaggttgctgtcaagcctcttgatttggagagtgctaacgagccgccgctcaacacatacaaaccaaaggagccttacaccgccacaattgtctcggttgagaggatccgaggccccaaggctccaggagagacatgccacattgttattgatcatggtggcaatgtgccttactgggaggggcaaagctatggcattattcctccaggggagaacccgaagaagcctggtgcaccacataatgtccgtctttattcaattgcatctacaaggtatggagattcattcgatgaaggac

SEQ ID NO: 38720 - DNA, 197 bp, Oryza sativa
  Clone ID: uC-osroM202005e07b1
tcgttcctctcatccccttcctcttcctcccggactcccggtctaccccgacgccgcggcgcggctgcttcctctcatcgattccgcctcagatcggggaggaatcgcggcgagatcggccgctccgaatccgatccgcgcacgtggtctcgccggcggggtcaggttggttcgcgggagccgccgtcgtcgccgcc

SEQ ID NO: 38721 - DNA, 112 bp, Oryza sativa
  Clone ID: uC-osroM202005e08b1
tcttcgaaccccgcgcccccattacacgcccgggtaactatccaccgttttcctttctcggagtccgtggtgacaggagcccaccgtcgccatgggtgaggagaagaaggat

SEQ ID NO: 38722 - DNA, 159 bp, Oryza sativa
  Clone ID: uC-osroM202005f01b1
gtgagtttgctttggtcgccggcatggcgctggcggcttttgttgcgagcggcggttactcacacgacgacgagtacgcgaagctggtacgggggatgaacccgcccggggtggtggtggacaacaaggcgtgctactaggcgaccgtgatcctggtcg

SEQ ID NO: 38723 - DNA, 512 bp, Oryza sativa
  unsure (1)..(512): unsure at all n locations
  Clone ID: uC-osroM202005f04b1
tttgtgttgacagcggagaaagcagtgtaatcggggcccgccaccgcagccgcctccacctccaccacctcctctcttcccggcgccaatggccgcgtcgtgaagcgcagcagcagcagcagcagcggagacagcggcagaagctttgcctaaggttgggatcctccctattcgcgcgcgtctttgatttgtcgcgtaaagttgtaatccgtacttcggatggccggctcaatcgccgcctcggcgttcttgccggggtcaccggcgccggcggcggccgcgccgcccaagagcgtcctgagcgagcgcccggacagcctggacgtccgcggcatcgccgcgaagccgggctcgtcgtcgtcggccgccgtgagggccggcaagacgcgcgcccacgccgccatccccaaggtgaacggcggcagctcggcgctggcggatccggagcacgacacgatgtnctcctnctcctccttccgggggccaggacgttctacaaccagcttcccgac

SEQ ID NO: 38724 - DNA, 450 bp, Oryza sativa
  Clone ID: uC-osroM202005f05b1
tctgctccttcgatggtttctcgcgacggatggcggctactcctcctcctgctcggcttcctgctcgtggcgccgacttgccgcgctcgggaggcgcagccgctgccggtactggaggaagaggaggtggtggcggacgcggcaggagggcgtggtggcgcgggcgctgctgccggtggaggaaacaggcgcgcgccggtgcggcacgagctgtcgctggacttctacgccaagacgtgcccggccgtcgaccagatcgtcggcaacgtcaccgcgccgcggattcgtgacaaccccggcgccggccccgccgtgctccgcctcttctaccacgactgcttcttcgaagggtgcgacgcgtacatactgatcgcgccgacggccaacaacggtggcagtgcgccaagggtggatagggacaggaggtaaaccggaacctgtcgaagaggt

SEQ ID NO: 38725 - DNA, 226 bp, Oryza sativa
  Clone ID: uC-osroM202005f07b1
ttccgctcctagcgccgccgagtcgcggctgaacttaacaagggagggaggggcggcgatctccatctggcgagcagagcaggggaggggatcctcgtgagcatccacattctctttctgattcatctctctcccatcgggacactcgataatttttgcgttcttcgctaaccctagcttctcttttagatctggaagaggctcttctttttaatttcagagcctt

SEQ ID NO: 38726 - DNA, 389 bp, Oryza sativa
  Clone ID: uC-osroM202005f09b1
tcgttctctctctcgcttcctagggtttcgcgccctcttatcccgcggcggcggcgagaagcttccactcgcctcggcggcggcgccggccagaaagatggctggcggttttcgagtactgcatcttgtcaggccctttctggctttcttgccagaagtacagagcgcctgtaggaaaataccattcatagaaaaagtgatcctatacccctatctctctcttcattttcctggtgggcagccagctaccactctatggaatttactcaactacttgagcagaacctttctactggatgcgggttatttttgctttaaaccgtggctctggtatggagctgggtcttaccccaattgtgacatcttggaatggtaatgcaactttttat

SEQ ID NO: 38727 - DNA, 517 bp, Oryza sativa
  Clone ID: uC-osroM202005f11b1
tactgctctctccgttgtttatccattcgctgcaatttgttatctgcaaattaaagttgataactaatcatacaagctagtagcttcagcttgatttcatcttcagttctttctggataacaaatcagaccaactttgtcgatcgatccaaattcagagaaattatctctgagtagtgaattaaaagatggggtctctgatggctggatgggattcacccgttcttggcgatgagaacagagttcttgcgaggaggaacaagtcgctgacgagggaggaggtggaggcgttctggaagcagcacggcggcgagatgatgtcgggctcgccgctcggctcccccgccgccggcggcatggcgcggtcggccccggtgagccgctcgaaggcgcacgcctcgtcgcctcgcggcggccgtatcgacccggcgacttgcgtggagggcttcttcccccacgacgacgccgccggcgccgagagccccagcaagagccacgactggtggacgaggagcaac

SEQ ID NO: 38728 - DNA, 414 bp, Oryza sativa
  Clone ID: uC-osroM202005f12b1
tttcgttaccttctactccggctcttcttcaggatgggatcctttattctcctcgtgcgcaccaccaccaccgtagcaatggcgggcaacgggccgatcaacaaggaggacccgctcaactggggcgcggcggcggccgagatggccggcagccacctcgacgaggtgaagcgcatggtggcgcagttccgcgagccgctggtcaagatccagggcgccaccctccgcgtcggccaggtggccgccgtcgcccaggccaaggacgccgccggcgtcgccgtcgagctcgacgaggaggcccgcccccgcgtcaaggccagcagcgagtggatcctcaactgcatcgcccacggcggcgacatctacggcgtcaccaccggcttcggcggtaccttccaccggcgcaccaaggac

SEQ ID NO: 38729 - DNA, 333 bp, Oryza sativa
  Clone ID: uC-osroM202005g01b1
ttttgatcagtggcaaagcaagtgatctcttgggctgggttcatttatgcattggcaggggcagctgctcgtcacggcaatggcatccaccaacagttggacccacgagatcgagtcgccggtggccgcgccgagcctgttccgcgccgcccgtatggactggcacacccttgcccccaagatcgcctcctacatcagtgtcagcgcccacccactcgacagcgaccgcagcgtttgaagcgtcaggcagttcaacttcaccttagccatgccattcagccacatgaaagagaggctggagtttctggacgtggacaagtgctagtgcaagtt

SEQ ID NO: 38730 - DNA, 181 bp, Oryza sativa
  Clone ID: uC-osroM202005g02b1
ttttgttgttgctccttctcattcataagccaggagctagctagcaagcagcacacacatatatcacaggccatctctctatccctaattaagctatatactccatatagctagctaaacacaagaggagtggaggaaggagaggctagctgatctagctatctgcagtgatttagttaaa

SEQ ID NO: 38731 - DNA, 248 bp, Oryza sativa
  Clone ID: uC-osroM202005g03b1
ctcgtctcgatccaagaagcagagaggagagggattcttgttttcttgatcatccatggcgcggctgcggcgtggtctcgaacacctggagcggcggtacgcgttctacgcggcgtaccactccaacccggcgaacgtgtctttccacgccgtgtgcgtgtggcccattcttcttaccgtgatgtttccgctccggttccgccccccgctgtcgctgctccgattttactgcccgctctgccgccagt

SEQ ID NO: 38732 - DNA, 501 bp, Oryza sativa
  Clone ID: uC-osroM202005g05b1
gaataatatagtgttgtttcttgatacatttttttttgaacgactcgcacgagacggtacgaagttctattgatagagcaggaaaaaattacaagatcacaaccctaaagggtcgtaaccaggaaaaaggaaaaatataccaccacccacacaccgacagcttcaacacacaagaccgggagaaggctaacaccggaccggccgccgctaagcttgaccgactgccgctagaccaacaaagaaacatagatgagatcgcccaaaagaacaccctcacaaccaatacaaagccaactcctagagtgtgcttgcaccaatcgatcgagaggcttcggctaggggataccaaaacgacgtattcaagaagagaagcgatggtaaaccaccgccgccattcgttggggcttaaaggagccaggactgggctttcgcccggcaaccacccttgagggatgagacagcacgacaacaccctcaagagggggaattccatcgttgtcg

SEQ ID NO: 38733 - DNA, 422 bp, Oryza sativa
  Clone ID: uC-osroM202005g06b1
tgtattttatcaatgatcagatcaatgttatcagggggtttctttgaaaggaagagaacttatctggcaaggagggaaaattaacccgtctccggtacattgatcagtagctaaggcaacaacgtgctttccaacagtacggtatgatttcacaaaacgcctggagaccacagaggggactgcctgaaaacttctgttacaattctccgcgctaggctgtttgaacacttacttcatccgtacccaaaagattcccagaagtctatgcttgctaggcagactggcctgactaggattcaagattttgaattgttttataaatgcccgtgtacgtctttggaaaccaatgaatgaaggacatgtacatagaagagattggtgatttagagcaagactccaactttttctttgacaatgtacca

SEQ ID NO: 38734 - DNA, 139 bp, Oryza sativa
  Clone ID: uC-osroM202005g07b1
cctttcggtgagtgagtgagattctcagaaggagggatttttgtattgttttggcacgcacatatctgccacattatatcgttatccctaattaagctatctcctccatatagcaaactaccaaccgactccctcacac

SEQ ID NO: 38735 - DNA, 65 bp, Oryza sativa
  Clone ID: uC-osroM202005g08b1
acacaaggagcgctggtacgggatctactccttacacaacttcgacgtattttacaccgtatatg

SEQ ID NO: 38736 - DNA, 178 bp, Oryza sativa
  Clone ID: uC-osroM202005h02b1
aagcccccggcccggcccgaccggaacgcacaggcgacgctgacccaccgttaattttggacagagcggcgcgcgccccggggagagagatagtgagagagagagagagagccgacaggagcacgcgagaatgtcgccgatgctggcgacgccttcggaccgcacggccgtccttcac

SEQ ID NO: 38737 - DNA, 453 bp, Oryza sativa
  Clone ID: uC-osroM202005h04b1
ttttgtctgaaggaagctaagattattaatcggggggtttctatgacatggctgaggagaagaagcaccaccacctgttccaccacaagaaggacggggaggaggagagctccggcgtggtggactacgacaaggagaagaagcaccacaagcacctcgagcagctcggcggcctcggcgccatcgccgccggcgcctacgctctccacgagaagcaccaggcgaagaaggacacggagaacgcgcacgggcacaaggtgaaggaggaggtggcggcggtggccgcgctgggcgccgcggggttcgcctttcacgagcaccacgagaagaaggacgccaagaagcacgccgcccaccaatactagatcgatcccgatcgaatgaacgcaagaacgaacggtttatatgcttaattacttttttcccataattacatgtatgcatgtggttgat

SEQ ID NO: 38738 - DNA, 491 bp, Oryza sativa
  Clone ID: uC-osroM202005h05b1
ttatacagcaacgacgaactaagccatagctccggtggctcttcgatctctctcaaggtctcaccaaccagccgatcgaagcagaagcagagctacagtataggcgtacgtactccggcgactggttcaggtgatctcgcggcgtacgtctagtagccatgggtaatctggggtggatggtggcggcggcggtggcggcggtggtggcgtcgtgggcgttcgacgcggtggtgaagctggtgtggaggccccgcgccatcaccaggcggctgcgggcgcagggcgtcggcgggccgggataccggtttttctccggcaacctcggcgagatcaggcgtctccgcgacgagggcgccggcgtcgtgctcgacgtctcctcccatgacttcggtcccattgtgcagcccgactttcgcaaatggaaccccctctatgggaagacattcaagtattggttcggagcgcgggctaccatttgcttggcagacctg

SEQ ID NO: 38739 - DNA, 335 bp, Oryza sativa
  Clone ID: uC-osroM202005h06b1
ttttgtgtcagatttcttcaaccagtggctcagtatattttctcaaaaaattacaaaatacagtaggaagggtttattgaagcagcaaagaagaactacaggccgcccacattctccgcctatgcccaaaacttaaacttaggtctggtttagttcccaattttttcttcaaacttttaacttttccatcacattaaacttttctacacacacaaacttccaacttttccgtcacattggttcaatttcaatcaaacttctaattttagcgtgaactaaacacacctttaagcataatttataattcaatttttaataaaaacattaccacttat

SEQ ID NO: 38740 - DNA, 385 bp, Oryza sativa
  Clone ID: uC-osroM202005h07b1
gggcccggaccggaacggacatgtgcgacgctgcccacgcgttcggtagaactagagcccccccttccccctggagcgttgttatgtgaaggagcgtgggaaagccaaaggcacctcgagagtggcggcggcggttggtggccatggcggagctgaagcggctgtcggagagccgcgacctgacgcggatcgagcgcatcggggcgcactcccacatccgggggctggggctggactcctcgctggaggcccgcggctcgtcggaggggatggtcgggcagctccccgcgcggcgcgccgcggggctcatcctgcagctcatccgccaggggaaagaacggcgggcgcgccctgcttcttgccggtcagcccgggaccgggaaga

SEQ ID NO: 38741 - DNA, 339 bp, Oryza sativa
  Clone ID: uC-osroM202005h11b1
gggtggtttttttttttttttctgtgggctttccttctccaaatattttttttccctgaattttcttcttctcgtatagaagacatggaataaaacctctatacaattacatacaccagaagccataggcaaggcaacaaaagaaggggcagagagtgggccccacgttgctgtgggtcatcaaatcttaaaaaaggctggtctgatccggtctgttaaggaggggattcttggcaacctgggtggggcgccaaggcacagtctaggacaaaaaggtagggcttcttggctttttgggtcacttggcatgggctatacacaagagggggaggtgatggt

SEQ ID NO: 38742 - DNA, 55 bp, Oryza sativa
  Clone ID: uC-osroM202005h12b1
tctagatcgcgtgcggtcgcccttttttttttttttttttttgggggggtttttt

SEQ ID NO: 38743 - DNA, 367 bp, Oryza sativa
  Clone ID: uC-osroM202006a02b1
gcctgctcgctgaggatcatctcgtcgtgcctcggtctgtgttaaacaacgccgcgtccgtcacgtccactgtgcgctcggccggcgcctccgtcgccgccttcatcgccccccaggccgaggacgagaaggaccaggtattgtgggctggatttgataaattagagcttcatccatcatctttcaagcatgttttgcttgttggttattcaaatgggttccaagtgcttgatgttgaggatgctgcaaatgtttgcgaaatggtctcaaaacgtgaaggtccaggtacatttttaacaatgccaaccacaccagtttactttgatggtaccgaaggattcagaaacatcaaatccatgcttctggt

SEQ ID NO: 38744 - DNA, 374 bp, Oryza sativa
  Clone ID: uC-osroM202006a04b1
cagttttagttgacaacaacgagcacaagtttattcgtaatgttaagaacaagccggtggtcttctacatggctcgtcttgaccgtgtcaagaacttgactggtctggttgagctgtatggtcgcaaccctcgcctgcaagagctggttaaccttgtggttgtctgtggtgaccatggcaacccatctaaggacaaggaggagcaggctgagttcaagaagatgtttgaccttattgagcaatacaacttgaatggccacatccgctggatctccgcgcagatgaaccgtgtccgcaacggtgagctctaccgttacatctgccacaccaagggtgccttttgtgcagcccgctttctactaggcattcggtct

SEQ ID NO: 38745 - DNA, 389 bp, Oryza sativa
  Clone ID: uC-osroM202006a06b1
cctattatctctcccggtcggatgctcactcgtctgggccaccattaatcgacccttgtcttcccctgccgcctttccgccgccgccgtcgaccggacgctctacaccgacaccggcagaaactgcaccaccgtcaagatggctaggtcggcgctcgacgaggtcaccgacgccggcgccttcgaccggtcgccgttcaccttccggagctctatctccagggacagctccgcccggttccccgccgcgccggggaggtaccacctctacgtttcctacgcgtgcccctgggcgtcacgctggctcgcctaccttaagcctaagggccttgaccacgccataggctttacctatgtgaagaccaactttgagaggaccagggagacgga

SEQ ID NO: 38746 - DNA, 322 bp, Oryza sativa
  Clone ID: uC-osroM202006a10b1
ttgttttttatcaaataattcacgggggttctattacaggtagttaccaacaattgattacaacaacctacatgcacaagtatttgtacatttggagaggtggacaactactacactaacgaggcactggttactagacatcggagacgccggacacaaaaacgacgccggcgagcagcctccggaacctaaaaaaccaacacaaaaagaaaagggtctacacaagaacgaacatataatccatcgcctcgccgccgcgcagaatgcctaaaaccttatcttcgctcgccggcaatggcgggctatggaggagaagagctag

SEQ ID NO: 38747 - DNA, 560 bp, Oryza sativa
  Clone ID: uC-osroM202006b01b1
ctgagacctgatgatttgttatctcgtcgcgtcgcgtcgcgtcgtgtccaggtgctttaaaaataacctcgggagtcaagacacgcggagctttggcacctgcagcgatggcgaccgaccaccgccgcttccccgtcttcctcgccgcggcgctgctcaccctcctcctcctcccggcctccgccgcggccaccgacgtcgagtactgcaggcaggggcgggattatcctgtgaaggtgagcggagtggagatcgtccctgaccccgtcgtcagcgggcagtcggccaccttcaagatctccgcatccacggataaaagcatcactaaggggaagctcgtgatagatgtcaagtacttctttttccatgtccattcagaaagtcacaaccttttgtgaggagaccttttgcccagtaactggtgaattcgtgcttgcgcacgaacagactttaccatcaatcaccccaccacgttcttacactctcaccatgaggctactagatgacggcaaccaggaactgacctgcattttgtttgggttcagcaatcggttcatttc

SEQ ID NO: 38748 - DNA, 452 bp, Oryza sativa
  Clone ID: uC-osroM202006b04b1
tgtgtttttttttaaaatttttcccctttttaaaaaccttttctttttttttttttttcctctttttcttccttcttttcttcccccaaaagcgcccccccctttaaaagaccccattttaccccccccttccttccccatcataattttttttcttgtccccccaaactcaattcccctccccccgtttttccacaccctctcccttaaaaccccctgccttccccaccataatccccttgcaaaacacccccttttccccccctgtgcaaaaaacaaaaagcccccccccaatccccctttccaacacagtccccccctttatacctaatgggacccccccctattccccccaaaaaacccgcggtcgtgtgggtttcccccaaatgtccccccccactttcccaccccctaaccccccctcttttaaatttctcccttcttttttcccc

SEQ ID NO: 38749 - DNA, 506 bp, Oryza sativa
  Clone ID: uC-osroM202006b06b1
gtctttgcaccagattcctgtattttttatacgcatggtctgtcctcatatacctttcattcgttcaatactaatgatgcactgtggaccatttcatatgggagatttgctgaagtggatattggtaagcattgtacagtttgttgtcggcaaacggttctacattgcggcttatagggccctgagacacggctctacaaatatggatgtgttagttgttcttggcaccactgcatcatatgtatactctgtttgtgcactcctatacggagcattcactgggtttcaccctcccatatattttgagacaagtgcaatgataattacatttgtgttgtttgggaagtatcttgaggtgcttgcaaaagggaaaacttctgatgctatcaagaagcttgtagaattggtccctgctactgctcttttgcttctgaaagacaaagaagggaaatatactgaggagagagaaattgatgcgctattagttcaacctggagacatcttaa

SEQ ID NO: 38750 - DNA, 478 bp, Oryza sativa
  Clone ID: uC-osroM202006b07b1
gatgaagaagcaacagcagcagtcaagccaaccgttcctttttagaaagaagcaggcggatgcaacaaaaggaggaggagggaggactccactgttcgcttgtatcgtcttatgggggaagaggatatcagcaacgacagcaagagcagctgcggctgcgaggactgcacggtggaggctccggcggctgcggcgccgaaggagaacgggcgagccgcggacccgcgcctccaggccatctccgacgccatccgcgtcgtcccgcacttccccaagccagggatcatgttcaacgacatcacggcgctgctgctccggcccgccgcgttcaaggacgccgtggacatgttcgtcgagcgctaccgcggcatgcgcatcgtggccgtcgcaggtattgaagccagaggattaatatatggcccagcgatcgcactagcaattggagcaaaattcatacccgtgcgcaaacctaagaaac

SEQ ID NO: 38751 - DNA, 352 bp, Oryza sativa
  unsure (1)..(352): unsure at all n locations
  Clone ID: uC-osroM202006b10b1
ttttctctctacttctctctcaatctagaganagaaaatttataggagaggagggaggataacaaatctgctgtttgtagcagtataccattagatgcatagggagcatggagccaaacagaaaggctgtttcgccattaatggctctcccactcacctctctctctagaaacacatagccaagatcatcatcatcagcaaccatattagtgaattaagaggaaatcaaatcagtatcattccatgaacagcattatcaaatcagtaagagaggggagtttgcaagtggggctagtgttcaaggggccattactaactagagttctatatagagctagaggtcatgcatggg

SEQ ID NO: 38752 - DNA, 347 bp, Oryza sativa
  Clone ID: uC-osroM202006c01b1
tcgccatggccattacgacctcgccggctcatcctcctcctccgccgctatggacaccgtgggcggcgacccctcgcacgggtggcagaaggtcacctaccccaagcgccaccgcaagcagggggcggcggcgctgccctccgcggctgctcccgatctggggttcctgcccaacggcggcggcaaggtcaacgtgttcgaggccgtcgacaggaacgccgagaagcgccaccgcgcgctcctggccgacagggacgcggacgaccccgacgccgcgcggatcgccgccgccacggcctccgcgtactctgacgacgactacaactccgactaggcgcaggcgactc

SEQ ID NO: 38753 - DNA, 487 bp, Oryza sativa
  Clone ID: uC-osroM202006c03b1
ccttacccaccgcgggttggtggagtcgatgcacagcttccggtcgggcgccgacgcggccccgggcgtcatccgcgacgcgctcgccagggcgctggtcttcttctacccgctcgccgggcgcatcgtggagcccgaggccgggtcccccgccatccggtgcaccgccgacggcgtctacttcgccgaggccgccgccgactgcagcctggaggacgtccgcttcctggagcgccccctcctcctccccaaggaggacctcgtcccctaccccggcgacgaccgctggggcgtcgagccccacaacaccatcatgatgatgcagatcaccaaatttacctgcggcgggttcgtgatggggctccggttcaaccacgcgtcggcggacggcatgggcgcggcgcaattcataacgcggtgggcgacatggcgcgggggcttcccgagccgagggtgaagccggtgtgggacagggggaagttcccga

SEQ ID NO: 38754 - DNA, 512 bp, Oryza sativa
  Clone ID: uC-osroM202006c07b1
tgttaaattcatttcagaagaagctttcacttcttttcggaatgcgctcagagagtggatctaagagttcaggtgatggtggaccaactcagagggcatcagcattggctgctctttcatctgcattcaacccatcttcccaaaagaataagggtaatgataggcctaaaagctctgatggtggacccactcagcgcgcttcagcaatggctgccttaacatcagcgttcaatccatcagcaaaacccaaaagcccaccacaacgtgcaggtcaaggttctcagcgagcagctgctgttgctgcgctgtctaatgttttgactgctgagggttcatcttcaaagcccacgcataggtaggtctttcccaatggcaggtgatgcagatacagctgaactaactccgtctgctgcattccctctgtctgaaggagcatcagaatttttcgcttgtaaagatgccccaggagatggggcattatctgagggagggcgaactgagcctgacctatc

SEQ ID NO: 38755 - DNA, 257 bp, Oryza sativa
  Clone ID: uC-osroM202006c08b1
tatcttcgtcctactactctcctcatatcggcgcgtagcttttgaagacgctcgcgggctatccctaattctagcgcggacgactcctagctgcggcgcgcgtgcgcacacgtcgaggcggcttttggggcgcgcggccaggaggtgttcttattccatccttgtctccaaggggaggggcatcttctagaagcttgggctacttaccaaggtcttttttatttctgcttactgttaaacaatatacaaaaggtgag

SEQ ID NO: 38756 - DNA, 271 bp, Oryza sativa
  unsure (1)..(271): unsure at all n locations
  Clone ID: uC-osroM202006c11b1
ctgtgactctagtagcagtcgctctcgtcgtcgggtcttttacaatttctgcgggctaccttcatccacacctnggatcggtggatcgaccgatcgatcgacgggtggtggcacgttgttttcttctccatccatccatccatccactcggtggctatggcgtagggaggaaaatcacgaaaaagagggtcactcggacggattctttcctctctctctctcttttcttcttcttggtctacttctttgatcttcttcttctctgctggtc

SEQ ID NO: 38757 - DNA, 228 bp, Oryza sativa
  Clone ID: uC-osroM202006c12b1
tgtatgttcaattcaatcgagcattacctaatttgcgattttttaacacggtctgggtggataaaccccggccggcaagaagcacggacggcattctttttctgcatcatcatcgccgtcttcgtcttcttcttgttcagtagtgcagctggctcatcatcagcgcccactagggtgaggaccctctcatcggcattaaatcagcatcagcaggaggaggaggaataa

SEQ ID NO: 38758 - DNA, 393 bp, Oryza sativa
  Clone ID: uC-osroM202006d01b1
gttgttttttataattgaacaggggcgcatattataagtgacgaagcggtctcacataaaacagggcacacaggttacaacaacgagggttgtaagcccattaagccccaaacatcagatcaccacaagcaaatgtctcgaagacacacgcacacggcaacaggataactccacactggcagatcatgggatagcagcagttatcaatcagggcttgacacacagaacatcaagcccccagacgacgacgactcctttagtactcgtgaccatcatcgccatcctcatttttgtcggactcagcgccaaccttcttgtagttcttcttcaacgcggggagattctcacgggcctcagagaacttaccctacttcatgccctcacccacgtacc

SEQ ID NO: 38759 - DNA, 313 bp, Oryza sativa
  Clone ID: uC-osroM202006d04b1
gacgcgtggggcttttgtggatgctgctgaggccgatgaattttcagacgttgcatcgaaatcattaagatccttaccttatgattgaccaggacatacctttgtggcttttgaaacgctagaaggtgtccttgctactgggaagatgtgaaatatactgagatttattggtaacgaggctgatccatccacaggtgaagctcatgatgatggccttgaggacgagtaccagcttgaagatctggaaaatacttatggtgatcatatgttgaaggttggagtttctaactacagaaatgcctgggaaaggatg

SEQ ID NO: 38760 - DNA, 430 bp, Oryza sativa
  Clone ID: uC-osroM202006d06b1
ccttcattggttcctgaaattgagtcatggctgcggagctagttagactccacagggtgcgcgaacgcctcggtgccaccttctcgtctcatcccaatgagttgattgcactcttctctaggtatgttaaccagggaaagggaatgctccagcgtcaccagctgcttgcggagttcgatgccttgatcgaagctgacaaagagaaatatgctccctttgaagacattctccgggctgctcaagaagccattgtgctgcccccctgggttggactggccataaggcccaagccttggggctgggactaccattcggtgaatgtaagtgagttggcaagtgaagagctgagtgtttttgagtacttggcattcaaggaacaagcttgtgatggacacacccacagcaactttgttcttgagcttgattttta

SEQ ID NO: 38761 - DNA, 361 bp, Oryza sativa
  Clone ID: uC-osroM202006d08b1
gtgtttttttttaattttcaacgcgaaggcagaagagccataataagtactaacacatgttcgcatatcatgattaaaagcacttcaaatttaggaataacatcaaaccaccggataaaagggtcagattctgaatatcaaaattgcaagattttcttgatacacttcctagtgcaaaataagcttactttaaaatatcatccaaacacagtgcgctaacaatgagctcatggaactagttcatccttctgatgagttcgttgatgtagttctcacggttaccagcatcaccaccctcaacgtagtgggtccttttcttctttagcccacccagtggtgccttcagcttgaatggccagag

SEQ ID NO: 38762 - DNA, 464 bp, Oryza sativa
  Clone ID: uC-osroM202006d09b1
ttatacgtccgcctaaagaaaaacacgcacacgcgtcttctgttatacctcccctgggttccgctccacttcccttccaagcaagaaaaccgaggcttcagcttagctaggaccgaccgatccgatgtgcggcggtgcaatcatctacgactacatcccggcgcgccgccggttgtgcgcctccgacttctggcccgacgccgacgactccgacccccacacccccgctcccgagaaaccgccgcgcgcgaagagggagcggaagaaccagtaccgcgggatcaggcagcggccgtgggggaagtgggcggcggagatccgcgacccggtgaagggggtgcgcgtctggctcggcacctacccgaccgccgaggccgccgcgcgggcctacgaccgcgccgcgcgccggataagggcgccaaggcgaaagtcaacttcccaacgacttttgtgcccgccccgcg

SEQ ID NO: 38763 - DNA, 470 bp, Oryza sativa
  Clone ID: uC-osroM202006e03b1
gtttttctttaggagtttaaatcctttgctgatttgggacgaatataggagccactggcgatggctatctttacttatgggaaagtaaatgggctgttgacaaagcaggatctcaagcgtgcagcgcaccatgtaagtttggctactaagttcatcgtacttaaattcgatatctccaagcaaaagaattgattttgaggcttttcttgatcaaataaatggtctccatggtttttttgttatcttaatgctcacttactaaactgataactcctgctgctcaatacttgattactatcaccattgtgcatccactaagcgattccattccctttttggtttgtgatgtaggtttgtggtgttgacttaactgacagagtagttgacatcattttccatgtgtttgatacaaataatgatgggaaactgagcctggaggaatttgtgagagcattacaaagacgagaaac

SEQ ID NO: 38764 - DNA, 446 bp, Oryza sativa
  unsure (1)..(446): unsure at all n locations
  Clone ID: uC-osroM202006e07b1
tggttttcctaaattcgtccatgtgataccattgtgttatatattaatatcactttaatttgtaacgaacaaatatacagtcaaattgatgagtacatacaatacctacctattaatcgaaaaacggcagcaacattgtaaacaagctacattcaaaatgaagaagaaattacaatagaaacgagcactgtaagtctataaactttgctctcctcttcttggtaagggaacccagacgcatagcctcatgtactaactggacaatattacagtgaactggaagatgtgaggctacgttagggtaccaaataggcaatgtaaaaacgatagtacaatacccagaaaacaaatatcaagccttcattcttcttcttttattctcngttcggcctttttgaaattacaattgtaggtctgcaggataatcaccggtgcttttcagggag

SEQ ID NO: 38765 - DNA, 404 bp, Oryza sativa
  Clone ID: uC-osroM202006e10b1
tctctcgcgtccgctcatttcatccaactatacaggttcaagttgatacaagagggggatactatcaagatgtcgtgcggtggaaggtgcaactgcggttcctgcggatgcggcggtggctgcggaaagatgtaccctgacctggctgagaagatcaccaccaccaccactactgcaaccactgtcctaggtgttgcacctgagaaggggcactctgaggggggtggcaagggagctgaatctggcgagggtgcccatggctgtagctgtggctccagctgcaggtgccaacccctgcaactgctaagggcaaggggatctatggctgaattggcaatgcaccagccctgtctacatgatgaataaataaagagttcctccaggggggtggcttatgcctgtgg

SEQ ID NO: 38766 - DNA, 174 bp, Oryza sativa
  Clone ID: uC-osroM202006e12b1
ttatacttgatcagattagctctcttgctcctggggctgactcactctactatacacgcacatatatacttttttctgggcgtactagtaaggacacctaatcgacatcaatgggtcaccgtagagggtgagaccccgaccaccgtgctggcctaggtggccccagttgaggct

SEQ ID NO: 38767 - DNA, 389 bp, Oryza sativa
  Clone ID: uC-osroM202006f01a1
caccagaaaccaagtagttctgatactctgttgcttgtatctgtggtctgtacacaaaaagaaaagaaaaatcacaaagcaaaagattctgctttcttctatatttacaggtacagccgatacacatgcaaatttgcatttcacatgttcctggcgtgatggacataatccggccaagagtaatctacaagagaaaaacacggatttaatgattgcgcagattactaagatgcccgtgccttttcgttttcatcgagcaatggcctgaggtttgatcttttgacggcagggacatcatgctcactctgttcggtgaaacgatcaacgctacggacaaatatgccaataaaccaaaatatagctgcaatgaaaaggatagatgtcaaggt

SEQ ID NO: 38768 - DNA, 528 bp, Oryza sativa
  Clone ID: uC-osroM202006f04b1
agtgttatttaccatggggctgccttatacgtctcagcatggaggtcagatcctctttgggcctactgacggatatctctacctcatgatgggggatggtggaggaaagggggacccttttaatttctctcagaacaaaaagtcgcttctgggaaaaattatgaggcttgatgttgataatccaccaagacagagtgaaattgctaaccagagcttgtggggtaactactccattccaaaagacaacccatacactgatgacagtgacttagaaccagaagtttgggcattgggtcttagaaacccatggagatgcagctttgattccgcgaggccttcctacttctactgtgccgatgttggtcaggatcaatacgaagaagtagatttgatctccaagggtggaaactatggatggcgtgcatatgaggggccacttgttttcaatccaccttcggcacctggagggaacacttctctcaatttcataaacgccaattcccctatcatgggctacagccattctga

SEQ ID NO: 38769 - DNA, 485 bp, Oryza sativa
  Clone ID: uC-osroM202006f05b1
gtgtacttcgatgaagtcctgtttaagcactttgcagggaaattcaaggatgagtacaagatagatgtttaccagaatgctcgtgcctgcattaggctccgtgtggcttgtgagaagctcaagaaggtgctgagtgctaaccctgagtcaccaatgcacattgaatgcttgatggatgagaaggatgtgagaggttttatcaagagggaagagtttgagaagattagtgcatcaatactggaacgtgttaaggggccactggagaaggctttagcagaagctggtttaacgacagagaatgtccattttgttgaagttgttggttcaggttctcgtgtcccggcaataattaagatactcacagatttctttgggaaagaaccaaggaggacaatgaatgcgagtgaatgtgttgccaggggatgtgcgctggagtgtgctatccttaagtccacttttaagtgcgggagctttaggttaatgat

SEQ ID NO: 38770 - DNA, 518 bp, Oryza sativa
  Clone ID: uC-osroM202006f07b1
tttttttttgcggccattatcaatggctatgtcgagtgttgcatataacatatatttggggatgtgccttcttcacctcttgttgggcttcttcaggacaaaatccataactggagatcgacagctcttaccttgacatctatcctcttcattgcagctatattttggtttattggcatatttgtccgtagcgttgatcgtttcaacgaacagagtgagcatgatgtccctgccgtcgagagatcaaacctcaggccattgctcgatgaaaaccaagaggcacgggcatcttattaatctgcgcaatcattaaatccgtgtttttctcttgtagattactcttggccggattatgtccatcacgccaggaacatgtgaaatgcaaatttgcatgtgtatcggctgtacctgtaaatatagaaaaaagcagaatcttttgctttgtgaattttcttttctttttgtggaccgaccacacatacaagccacagagtatcagaactactttgtttctggtg

SEQ ID NO: 38771 - DNA, 479 bp, Oryza sativa
  Clone ID: uC-osroM202006f12b1
tttgatcttcgtcaagaccctgaccggcaagacgatcaccctggaggtcgagggcggggacacgatcgacaacgtgaaggccaagatccaggacaaggagggcatccccccggaccagcagcgtctcatcttcgccggcaagcagctggaggacggccgcacccttgccgactacaacatccagaaggaatccaccctccaccttgtgcttaggctcaggggaggtatgcagatcttcgtcaagaccctgactggcaagaccatcacacttgaggtcgagtcctcggacacgatcgacaatgtgaaggccaagatccaggacaaggagggcatccccccggaccagcagcgtctcatcttcgctggcaagcagctggaggacgggcgcacccttgccgactacaacatccagaaggagtgcacccttcaccttgtgctcaggctcaggggtggtatgcagatctttgttaagacccttg

SEQ ID NO: 38772 - DNA, 155 bp, Oryza sativa
  Clone ID: uC-osroM202006g01b1
aaagctgacaccctgcagacacctccccaaaatccccgtctcgacccacgcgcgctagtgagctagcgaaactgcaagctagctaagtggcatttttaaaaacgctcggtgcgtctaaaacttacaaggtatcatgtccactaacaatccgatca

SEQ ID NO: 38773 - DNA, 211 bp, Oryza sativa
  unsure (1)..(211): unsure at all n locations
  Clone ID: uC-osroM202006g02a1
nnnanaanaaaaaaaggggaaacatgaacaaggatgggggcacaaaaaggaaaagctacaacatgtcaatcgcatgaaaaagaaaaagggaggaaagacagccgccaaaagccaagccattctttgatacctctgcaacattagatacatgggaaaggaatatacacctcgccggcaaaaaaaaagttaaaaaaaatcaaaacaaaacgac

SEQ ID NO: 38774 - DNA, 482 bp, Oryza sativa
  Clone ID: uC-osroM202006g02b1
ctttgtgtcagcctccattcccttcttctttgtggtctctctttctcttcatgcggctcttctcccacatcggcccatgcccatcgatccatcctcgactacctcgcggtggtgacggctcccagcgcacgaggcgggaggcggcggcgacgacgtctccccgcgcacgcgaggtggcggcggcgacgtctccccgtgcgcgcgaggcgggaggcgatgaccgcgacgacggctcctagaacgcgaggcgcgaggtggcggcaggcggctccccccggacacaaggcacgaggcggggaggcggcagccggcagcagcggcaccccgcgcgcgcgaggcgcgagtcgacggcgacgacaacggcttccccgcgcggcagggacgatgcagatggcgacggctccccgcggcggcgatggctcgtgcgtgaccgtggcgccggagcggcaatgatgactcccacttggacgacgaccacccct

SEQ ID NO: 38775 - DNA, 397 bp, Oryza sativa
  Clone ID: uC-osroM202006g03a1
attattcagatattattccaatgtgtttctggacaagtagcctaaactccgatcagtctcgagaagcctgcccgtgtgtgcaaaatccagaaatcacccaggacaaatttacatgatcccaaccgtatttgaggccattaacattgattaaagtcaaactatggccgttccgactccgaaggcgctatcatagttcctcaccatgttcttcgtcgagggcataccagcaacaacatcttcttcgatgccacattcgtttgtgccccttatgatcttgaagtacccatcattgccccatcctctgttccactggtttgcaagcagccagtaatcctcgccagcatccgtggttccccattcaatcaacttgacagcatgaccacccattatgccacct

SEQ ID NO: 38776 - DNA, 457 bp, Oryza sativa
  Clone ID: uC-osroM202006g04b1
caccaaatccccccaccatggatcaccgcctcctgctcctcggcctcctcctcctctccccggcggtggccgccgcctcagtccccggcgaggaggagccgctgatccggcaggtggtcggcggcggcgacgacaacgagctggagctgaacgcggagcgccacttcgccagcttcgtccagaggttcgggaagtcctaccgtgacgccgacgagcacgcgtaccggctctccgtgttcaaggccaacctccgccgcgcgcgccgccaccagctgctcgacccctccgcggagcacggcgtcaccaagttctccgacctcaccccggccgagttccgccgggcctacctcggcctccgcacgtcgcgccgcgccttcctgcgggggctcggcgggtccgcccacgaggcgcccgttcttcccaccgacgggcttcccgaccgacttcgactggagag

SEQ ID NO: 38777 - DNA, 407 bp, Oryza sativa
  Clone ID: uC-osroM202006g08a1
gcaaggcgtgggaaacctattcattcattctccctgccagaacggttgaatttccacaatggcgttcagtgcacttgtcaaaatttgcatacgttacaaacaaaataaacaggcagcttgattctgcgcactgttacaaacttgagaaaccgtgaattgtttcatcaccattatttctacccactgcaatcattctcctacctatcgattgactttgtcaaagaaagatgaatctaattacttggagatgagtttgatggtgaactctcagttgcagtagcttcgctctctatagtgccgtttgtgtgctccaccaatacatcagcctcaggagccttgagcagggaaggatctaccttctcttttgcagacatatcccttttgagatctttcttagccaagctaga

SEQ ID NO: 38778 - DNA, 300 bp, Oryza sativa
  Clone ID: uC-osroM202006g10b1
ttttcctctcgtctcgatgtcatcgccgccgccgccgccgccgccgtgtcctgctgcggcgtgcgacgacgggtggctctccctgtccgtctcgacggtgtcgggagagagcaatcaaaagcgcctcaagcgaggaggcggaggaggtggtggaggggtcggcggcggagcggtcgaggatgatgggtgtcccctccacgacgaggtcctcctcctcgtgttcgcggaatgttcgctggagacagacgatctcgttcggtgcgccgtcacctgtcaggcggtggcgccgtcttctcaatc

SEQ ID NO: 38779 - DNA, 247 bp, Oryza sativa
  Clone ID: uC-osroM202006g12b1
ataaaagaaaaaaaaaaggaaaatcgtgtctcggctcgtctcggattcgtctcgggggattcccgagcagcttctcgaaaccctcgcggcctcgattccggcgatggcggagcccaacccgcaagtggagagggaggtggaggtggaggaggtgaggaggcctcatctgtggtacttggagcccaggcaggggggggaaggctaagccgagatcggggtagaggggctctactcgcttgtcaaggac

SEQ ID NO: 38780 - DNA, 293 bp, Oryza sativa
  Clone ID: uC-osroM202006h05b1
cttcctcccagccatcggcgacgcgaggacgcgacgctccctaacaaccaccaccggcttcgccgacctcgccgacatgctgtccgcgcgcgccgccgccaccgacgccgccgtcgccgcctacccgctgtggaagcgcggcgagggtggcagcagcgggagcgggagcggatgcacgagctgcagggaggtgcggaggagggccgcggcggcgagggtccgtgcggcggctcccaggagggtggaggcggccgcgatggagtccgcggccggagacccagaagaaggaggag

SEQ ID NO: 38781 - DNA, 294 bp, Oryza sativa
  Clone ID: uC-osroM202006h07b1
tgattatctagccgataggacaaactttaatatagcagccttcattaggaaaagggaactgctacattgcttatgtgggtttacttcagcaacataagttacttcaattctctttacaagaggtggctatcgaaaaccgaaccagataaatctattttatttgggcaacaaatatgttaatgttttcttttatctaaccttgtatattggtttggttgatcaatatgcacgccgcggtggctgcttgacgccagcggcacggttgatcattgtcgtttcagttatggattattt

SEQ ID NO: 38782 - DNA, 144 bp, Oryza sativa
  Clone ID: uC-osroM202006h11b1
tatctaagccagcaattgcatccgagctcacctagcttttttaataacaaccagcggttctatcaattccatctccaagaagcagcggctagcatcagctagtagttgccatggactcttctactctgggctctcccgtgagct

SEQ ID NO: 38783 - DNA, 486 bp, Oryza sativa
  Clone ID: uC-osroM202007a02b1
ttttgatcgccccctccttcatcctccggtgggggtcattaaatcgtcgggggggatctgaaacacccagcagcggaagggcctccaggcgcacgccggagcgattcacaagacgcacctgcgcgatctgatggatgatgccgagcgctgcaaggcaatgacagctgagtatgaaggcatatttctggattactcgaggcagcgtgcaactggcgagaccatggagaagctgtttaaatcggcagaggcggcaaagctcaaggagaagattgagacgatgtttagtggtgacaagataaatagcacagagaacagatctgtgcttcatgcagctctaagggctccaagagacgaagtaatacaaagtgatggggtcaatgtgggtcccgaagtttggggtgtcaaagataaaatcaagcagttttcagaaacttttaggagtggatcatgagttgtggcaactggtaaagcattgacacatgctgt

SEQ ID NO: 38784 - DNA, 104 bp, Oryza sativa
  Clone ID: uC-osroM202007a03a1
gggggccaaataatatacggaaattaaccaacacgccatataccacacgcgcacttacatacagtgctacgtacacgtacgcacacatgccgtggctgcatcac

SEQ ID NO: 38785 - DNA, 396 bp, Oryza sativa
  Clone ID: uC-osroM202007a04a1
ttttttggttttttaaaattttgtgtttttttattttttttttttttttttttttttttttttttttttttttttttttttttttttttcccccaaaaaatttaaaaaattttttaataaaaaaaaaaggcccaatttttaaggccaggggggatcccatggttacccaaaaccggtttaaaaggggcaaaaggcttctccttaaaaaaaaaccggaaggcgggggcccccccgggtggacccaacaagcaatgtgcatgcaggcacttttgggcctgtaaaaaaaaaaaatctttaaaattggtcacttcctttaaatttaaaaggagaaaacacgtaaccgcccccctttctttcaaacccagggaaaacccgggggcggttaattaccaatgg

SEQ ID NO: 38786 - DNA, 318 bp, Oryza sativa
  Clone ID: uC-osroM202007a05a1
ggcgcctcctcatagctgtcgtttggagtacacggtgtacagcaccccggtgttcgccccggtgagcgccgcggtctcggcgccgccgggttaccagccgggtggcgcctccggtggcaatggcgcggcggcgctggcggactccggcggggagcccgtggccaagaagaagcgcgggcggccgaggaagtacggccccgacgggtccatgtcgctggggttggtgacctcgccgacggccgccgcgtcgacgccggtggcgcatggcgttccagggccgttctcgccgacccagcctaagccgtcggcgagcttttt

SEQ ID NO: 38787 - DNA, 370 bp, Oryza sativa
  Clone ID: uC-osroM202007a05b1
gttctagatcgcgagcggttgcccttttttttttttttttttttttgttgttttttttaactagaggcggtgataataacaataatactttgataccattgcatattggacatttggataacatgatcatatgtctctcaagataccactacctacctaatacataataaatccagggtgaaacctacacgacagttacacttaccaggtacaaattttcccctaattaaacttcagatttacactacatcataggagctagttatacaatacgcgagagaacggtcatttctcttttggggactataatgcaaatgatggacaaagtctatcagagactcaaagtccacgtttggcgaaggatgaaatg

SEQ ID NO: 38788 - DNA, 348 bp, Oryza sativa
  Clone ID: uC-osroM202007a06a1
ggaaaaatgactggggggggatattgaataggggaagaaattctacaattcgcctgaccaatcaataccaagcagtgggagaaaaggaagatcatacgggcaactataacagggatatctcgcaccaatattaacacccacaggtcacacctcaactctcgaaccgatgcttaacgaacgaatcccagattggatgtagagaaagaacaaccataaccatgtacagcaaaaggggaatcggatggaaaaaccacaacctcattgcatctactacctcctgatgctagcaaccaacagtgacgccttctttcggaggggtagaggggacacccacagccacaccctctt

SEQ ID NO: 38789 - DNA, 439 bp, Oryza sativa
  Clone ID: uC-osroM202007a07a1
ttttgggttttataggatcagggggttctattaccacaactttttaaggatggaatcgagtagcaatactttcaccccaaaatacagtttagcgacaatatcttagaaaagccgcttgctttgccgccatggctggcaagctgagcagagcagctaacacaaagaacacgagatcactataaaccaaacggcaacgaacgaagaaaatacagggtcttttttggctgaagatacacgaagcggttcggtttcttttatttttaggctcctctcctcctcgatgatgggtgtatggcaatggcaatggcgatgggatcttggcttagttgatgggaaggggctcgccgttccactccttgagggagtccagcatggggtcgatgagcttgccctgggtgatggtgaggaacacttttgtgaactcctcgccgggggactt

SEQ ID NO: 38790 - DNA, 406 bp, Oryza sativa
  unsure (1)..(406): unsure at all n locations
  Clone ID: uC-osroM202007a08a1
tttttggttttttgatttttggtggtttttaatttttttttttttttttttttttttttttttttttttttttcggggaaacaacccgggaaaaaacaagccccattggggaatgcaacgcaaatgcaacggaaggcaaggtgttcttgggggctggggcttttaatcctagggggggctagtttttaaatgcgccccaaaagggggggggaaaaaagaaagggaagcaaaaaaactgtccatgttaatggggggggggncacttccactcttgggtgtcaaacgggtgggaccctttttgggcaacgtaggggattttcccgcctgggaattacacccggcctgccagtccccaagttaaagggccctccctgggggcccaaacccatttcccgggggacccccc

SEQ ID NO: 38791 - DNA, 470 bp, Oryza sativa
  Clone ID: uC-osroM202007a09a1
tttttggttttttaaagttgggggtggtaaatacccaatatgagcacaactatataacttaataagcacattacagcacacacatggccaaggcagttatttgaatcagtctccaacatacttcaaatcatagaccacaccatacagcaaacatagtataaacattgtcatagagaggacagctgatagcagcttgtaatattctagcattactttggtagcatccctctacaaaacatagcagacatcaccagctcttcatcttggccatacacattcaacatggtttgctagtgacagaccacactgaccagaacatttcgtctcctcagtaggcaccagctgccatgagcagctcatcaagggtccagatgccctcgttgcttgccccggcttgtgtagcatcattttgcagaaggtggtccattgattcatctgagctgctttcaacataagggaatgggaaatac

SEQ ID NO: 38792 - DNA, 340 bp, Oryza sativa
  Clone ID: uC-osroM202007a10a1
tttgggactttaaaatcttggggttgttaaactacaaatgatcaccaacagaattcaatccgcagctaccttttgttttcctaagctggaatcctactttctagtttctacccatacgacaccaactcggttcttttgctacctcttaatctggttacagagcaatctataatgcataattaactacaaataaaccaccaatggaataaatcagcacctacaacctcaaacaatgtcacagctcttcttccattgctgctatatcccaagagttggtatgtgagcatgctgctgctccattgcccccatttgatgggcaggcaccccagacatcatatca

SEQ ID NO: 38793 - DNA, 462 bp, Oryza sativa
  unsure (1)..(462): unsure at all n locations
  Clone ID: uC-osroM202007a11a1
tttggggtcggttcacaaccgggggaaactttattgaagatactgtcacattgcgaaactgtcgctggctgtgaaatgctacatgtgtacagcactaatcatctgctgatcggattgtcttcatcatacaatacagtgctcaataatagtaatcccacaaacctgtgcatggttcctttacatgagagccgagagcctctgcctcactcggtcgaggctcaagaccaaagggcaacagagctattccgccaccgtttcagaaagtctgcgatgcagtgttctgaaagatcaactcctagaacacggatatcaagtcctcaatttgatccaagtgaaaatgcttcttcttcagcctcctgcggcgagtgttgcttgcccaatactggttgtgaaacacccacattgtccgcaagtacatgctttccatcatngtttttattccactggtagatagcatgagtc

SEQ ID NO: 38794 - DNA, 247 bp, Oryza sativa
  Clone ID: uC-osroM202007a12a1
tttttgtttttttaagacaggcgtgataaaaacattacaccaattaacctttgtaacttgaacatcataattttccagcaccaagggcttaatatgtacagtattgactacaagtgcctgtattgcacaagtacatgtattttaaccaaaaattgattcaataattaaacacaatgaagtagctactggtatctagcaagaggatcttgattaacaactaggtgagaactgaccctttcataacatg

SEQ ID NO: 38795 - DNA, 424 bp, Oryza sativa
  Clone ID: uC-osroM202007a12b1
tcttttctatgctcgaatgtttggtctagctgggggctttgttatatgtttgcagggtatgtatactggagatgatgattatatattagagttcttcctgccaccaaattgcaggaacgaagatgatcaaaatgccttgttggagtccatattagctcgaatgaagaagtgccttcgtaccctaaaggtagttggcaacggagacaccaatgaagtttgtctgcaaataagtaatgtgctaataattgagactgaagatttgaagacaaatgtgcactttgagaattctgaaggttgctttcgtgaatcgcctgaaagtaatggaagccaaagagtccacgaggttgataatgatggcaacaaagtttcaatcatgtcagagagacatctgctagctgatgacaactctcataacatgggcatc

SEQ ID NO: 38796 - DNA, 368 bp, Oryza sativa
  Clone ID: uC-osroM202007b01a1
tttttgggtaaaactgctgacaagggtatattctttggatgctcagaacatgatcaagatcttattttccttgacacaaatcaataataataatactaataataatacaaagaaacactctcatttggggaaaaaaaagagagaaaaattaagtactagtactactatttctcatctctattgacctaggaagaaagcttctgctcttcttccctcctctgttctttcatggcaacagctaaagaacagagggtggtcaccatgaactgcttctctagtgttcatcagctatgtgaggatcggatcgggttggattggattggattggattgggttgagtttggtcaccattgatcttggttctgttc

SEQ ID NO: 38797 - DNA, 482 bp, Oryza sativa
  Clone ID: uC-osroM202007b02a1
ggttgttgcagtcaccagatccctttcaaggtcaaaaggaatagggtccaatattacacctttgacatactcaaatccccgtagcttgttctttgctgcaacagattgcagctctttcaggatatgctctttaaggccttcagacttgcatatttcagcaaaagaacccttgcagccatttgattctgcccacttcatggtgttctcttcatgtggattaactactgccactaacattgatctgaagctgtccccatatacccagacatcttcaacggttggagggaaaacatatactttctccaggtattcaactgcaacatactccccttgtgacaacttgaatatatttttctttcggtcaattaccttcaggattccatctgagttcatctctccaatgtcacctgtgtgaaaccatccatcagccatgaccttattcgtgagctcaggatttttatagtatccggtgaagaagtttc

SEQ ID NO: 38798 - DNA, 481 bp, Oryza sativa
  Clone ID: uC-osroM202007b03a1
gggacgatgaatcatatcaccagggcacgaatggcttgtgtccactggtcgaattcattcaccaaggagatgatccgctctagggtcgaagcaggtggcacagtctgttatttcggaggtaccctactactcacttctaggtacaaaaaagaacgaagcacgggggatttaaaatggcaaagaaagaaaaggtcgtgcgccagcccagcatcaaatattaagggcaatgaggtgctcctgtacaagacgcagaaatgagaattctcaaccttgaaggaccttcaatggatctaactgcccactacagtaactggaaggaacagctgatagtgcaagtcttcctttccactcttcacctggcttcagagtaataggcttctcaacagctgcaggctccacacaaagcatgtgtttgtattctccatctccaaaatcttgcatagcttttgccttcttgtcccaagggttccaaacaacagca

SEQ ID NO: 38799 - DNA, 194 bp, Oryza sativa
  Clone ID: uC-osroM202007b04a1
ggggaaaaaaaggcccccccttttttttcaaagggaaaaaaaaaatttcaaaaaggggtccccaaacaattaccacggccccccaggagagggtctctttgtaaaaaatttgggggttagacccccccaagagagaggggcggaaaatactaaagaatataagtgggggggtgaaaccccacggggggggcggg

SEQ ID NO: 38800 - DNA, 377 bp, Oryza sativa
  Clone ID: uC-osroM202007b05a1
gacaaagcatatcaatttactagaccatttcagaacaaacgggtacatatggacaggacagtaaatgttggaaaaccaaacaaaatataagcacttatagggcccacgaaaaggaacaatctgggactagcctccacaaaggggttttttccttcacaggcacccacactaggtgtggtagggggactatatgttatataatatgtaagaccggcactaggggattgttcagatatccaggtgccaaaacgctcaagccttgttggcaatgttgttggaaagccagtcaagacccttatacaaccctttaccagatgtagcacaagggctttggatgtaccaatgcctctggcgcagggaatgcaaaccaagcttgt

SEQ ID NO: 38801 - DNA, 478 bp, Oryza sativa
  Clone ID: uC-osroM202007b06a1
gtaggttaaaatccagcggattcataaagcatactgctgtcccacaggaaactgtttcataaaactaacatatcatacggactcgatggtccattaaaccagacacaagtagacatcagcaccacaaatacttgacgaacagaggctcgggacgaccaggcacatcggcagctccaccaaactggctgattactgaccaccacggaggcggagcaccaggtggagggtggactccttctggatgttgtagtcggcgagggtgcgttcattcttcagctggttggcagcgaagatcagacgctgctggtctgggggaatcccctccttgttctggatcttggccttcacattatcaatggtgtcggagctctcaacctccaaagtgagggggtttccagtcaaggtgttcacgaagatctggataccaccacggagacgaagcaccagggggaggggagactccttttggatgttgtag

SEQ ID NO: 38802 - DNA, 495 bp, Oryza sativa
  Clone ID: uC-osroM202007b06b1
acgcctgttttttcaagactctgaccggccagactatgagccttgttgaggaatcttatgtgcccaccaacaacctcaggggcaagatccaggacaaagagggcatccccccagaccagcagcgtgtcatcttcgacggcaagcagctggaggatggcaggacccttgctgactacaacatccagaaggagtccaccctccaccttgtcctccgcctccgtggtggcatgcagatctttgtcaagacactgaccggcaagaccatcaccctcgaggtggaatcttctgacaccatcgacaacgtcaaggccaagatccaggacaaggagggcattcccccggaccagcagcgtctcatctttgccggcaagcagcttgaggacggcaggacccttgctgactacaacatccagaaggagtcaacgcttcaccttgtcctccgtctcaagggaggcatgctaatcttcgtgaagactctgaccggcaagaccatca

SEQ ID NO: 38803 - DNA, 492 bp, Oryza sativa
  Clone ID: uC-osroM202007b07a1
gcatcatcgtggaggtgttcaagacgcagggcgccgaggtcggcgacggcaccacctcggtggccgtcttcgccggcgagctgctgcgccaggcgcaggagctggtggagcagaagatccacccgcagaccatcatccgcggctggcgcaaggccgtcaaggtggcctacgacgcgctgcaccagtccagcaaggacaacagcgccaacccggagctgttccgccgcgacctggtcaacatcgccgccaccaccctcagctccaagatcctcaacgtggacaaggagtacttcgccgagctggcggtctcggccgtgctgcgcctgcgcggcagcaccgacctgcagaacatccagatcctgaagaaggtgggcggatccatgcgcgactcgtacctggacgagggcttcatcctggacaagtccatcggcgtgggccagcccaagggcattgagaatgtgggtattatggtggccaacacggccatggaca

SEQ ID NO: 38804 - DNA, 447 bp, Oryza sativa
  Clone ID: uC-osroM202007b07b1
agcgggcgaaggccgatcccgcgcgcggaaggtggcgaagctgggggagcgcacaagccgaacaaaggcgaaaaagacacgggaaaagcacgccgcacgcagtcgggccgccacccgccgccgccgccgccctctgggcccgccgtctcaactagtgtgtgcgctggcgcggggccgcgcggatgatgtcgtcgacgcggaggatgacctcggcggcctcgtggccggagaccagcacctggctcttgcacttgaacgactcggtgatgcggaggtccaccatgtcgcccaccacgccgcgctccatgtccaggcccgcggtgctgcggccctcgtagtgcgcggcgcggaggcgggtcaccagctcggagctgtcgaagccggcgttgtcggcgatgatgggggggatggcgcgcaaggccttggagaaagcctcgatggccagcg

SEQ ID NO: 38805 - DNA, 468 bp, Oryza sativa
  Clone ID: uC-osroM202007b08a1
cacggtactgcttttctaggttcacaagtcatcattagcagtaggcactcttgaagttgaggcgaccaaatataaggattcttcaaattaaccatccaagttgaccacagcataacataacatggattgaataactagaggtactaagatgaagtatcaaaattcaacaactccaaaactaagatatatggggaatacactctagtcttcctcctcgccctcgttctcagcaatgttgaagtatctgagctcatagacattgcggtccttgttagccgcaataacacgtagccagtcccgcacattgggcttcttcaagtacttcttggtcaagtacttcagatacctcttggagaaggccccgtcggaggtgacggggaccttggtcttgtcgcgcgtgacggtgacggagtcgccgaggttcccggccttgccgccggcgaccttgatgcgctcctgcaggaactt

SEQ ID NO: 38806 - DNA, 501 bp, Oryza sativa
  Clone ID: uC-osroM202007b09a1
gtcttctacatgctatggaggtcagtggtttattacttctgtattcatcccttggtgatgctgaagggctaacaaaattaacatctatggctaaagaacaagggaagaacaatgttgctttcctttgtttcttcatgcttggaaaactggaagaatgtcttcaattgttaatcgaaagtaatcgtataccagaagcagcattgatgtcgagatcttatcttccgagcaaagtccctgagattgtaacattatggaaaaaggatctccaaaaggtaaaccccaaagcggcagaatcattggcagatcccaacgagtacccaaacttgtttgaagactggcaaattgctctcaatgtagaagctaatgttgcgcccaaaaggggtatttatgcaccagctaaggagtacattatccatgctgagaggcctaacgagactctggtggaagctttcaaaaatatgcgtatacatcaagaggaggtgctgccagatgaaaatggag

SEQ ID NO: 38807 - DNA, 333 bp, Oryza sativa
  Clone ID: uC-osroM202007b10a1
atgacttcaggcctccgcatgtttgaggaactccaagatgttgattaccttgtaagttgttcataattataggtatgaacaggtagtttgaatatttggctacattcttttgttgcttgatgctttgtgtaattttggcaggcaagaagctgtagcagagccatgaaggctgttggtgttgttgaggcatcctgtgaggctatatttcaacttgtgatgagcatggataccacccgttatgagtgggactgcagcttccagtatggtagtctagtggaggaggtagatggtcacactgcaattctgtaccataggctacagctggattggttc

SEQ ID NO: 38808 - DNA, 394 bp, Oryza sativa
  Clone ID: uC-osroM202007b11a1
tttttgtttttttaattttttggtgtgcatcctcaaccaatataccattatatagtatctgggtctgtcttgctcacagcaacaatttatcatgtacagaatatgctatgcaattgttcctagttgctagctggggaacacacaattcctaggaagatcaccagtcccgttcacaatcacaactacttagaccacatcctgaaggaataaattcatcatccagcaatcgggtgattcataccaccacgctttgaagagaggcaaactggagtgcagcttttcttgattgctccaagggaactgtctcagttcagttcagggatgcggttggtatatccaactccctgaaatttttgcgtatggtccataggatctcagcgcatcgcctaatgct

SEQ ID NO: 38809 - DNA, 524 bp, Oryza sativa
  Clone ID: uC-osroM202007b12a1
tttttgtttgatccaaacagggcgtatattattatagcagagtggtgtcacagttcaaagtgcttctaagcgaaacgagcagaataattcaatttccaaggctggtagatctggattacaatttggcgtgacatagctcagaagcacagccaaaagcagatgaaccatcatcggttcatttatcagttgccagaacacaccgcaggcagccaccttcatgcagcaggtcaaacgccttgttgatgtcagtcaggttcatgctgtgagtaacgtactcgtccaccttgatttccttgttcaagtacttctcaacgagccatggaacttggcttcggctcttgaaaccgccgaaagctgttcccttccagacacggccagtgacgagctggaatggccgggtagagatttcttgcccagaagcagctacaccaacgatgacagaggttccccagcccttgtggcagcactccaatgcagaccttataacagaaacatttccaatgcattcaaagctgtagtccaca

SEQ ID NO: 38810 - DNA, 459 bp, Oryza sativa
  Clone ID: uC-osroM202007c01a1
ggacagtaacatgaacaggagatgggggtagtatatatactcaaccaacgttagtacgttacacaaccaacctcttgttcagctaggtatatggaaccaaccccattttattattgttggcctagacagttaagtcaaccatcaccacagaaaaaattcaaggtacaagagaaaaggggaaagaggcaactcatgcgctaagttacagaatgacacaaggacaggcaaaaaacatcaggaagtccagcatcaatgtgattctttggcggcctcaatctctgatgtgctttcgaccatcacaatcacagggctacagctgaaatactgagagctacgagtttagagcaaccgcgctctgcgactctacagtcttcaggacttcctctcccattcgcttgcatccgaccaaggtcgttccaggagaatatatgtccccagttcggaacccgttgtttagtg

SEQ ID NO: 38811 - DNA, 479 bp, Oryza sativa
  unsure (1)..(479): unsure at all n locations
  Clone ID: uC-osroM202007c02a1
tttttgggtttttttttttttttttttttgaggaagcgcggcaataaaacattgcattgaattctgaacgataaacaccaggaaccggcgtttatttgaggcaagcactgcccaaaatctcgcaaaagtactgaaaccttagacatagtacacatccatggcaaacatggatgccaaatgacaactacagaaaattatcaaattcgaatgcagctgacggcttctcctgctgaagatgcatattttcccctccattacttggatgggctctttccatcgacagccaatgggacggcgctggccaggctgcggtatttcagagcatagaacatctcaatgtaacggcgagtctcgcgcctttcaaggttgcttacgtacttccagaatccgtatacaccagtcaaggtcatcagcctttcagagtacagcttccaggtgtacttttngtaaatcctttgcagacctccctgtgaaatatt

SEQ ID NO: 38812 - DNA, 394 bp, Oryza sativa
  Clone ID: uC-osroM202007c04b1
ttttctcgctcttccccctccgccgccaccgtggagccttttaaacaccttgggggctccataacccggcccaccatgtcccagaagacccattgccttccttcctgatccccccagccaagctgaacacactcagccagggcaagactgactacagggccaggattaggctcaccaaccaagataagaacaagtacaacacaccgaagtaccgctttgttgtgagatttacaaacaaagatatcacagctcaaattgtctatgctaccattgcgggtgatatcgtgatggctgctgcctactcccatgagctgcctcgttatgctcttcaacttcgcttcaccaactatgcaaaacattactgcacttgcttgtttttggctcgccgtatgct

SEQ ID NO: 38813 - DNA, 390 bp, Oryza sativa
  Clone ID: uC-osroM202007c05a1
ggagactgaatggagcaatggctttgtacatctcaaaagttactgtaaggtgtaagccaagccatttccacatttacaaattgtttgtcactacgctgtaactagcagtagcacaactaggaatcaaccacgctaattaacaaaggaaaaattactgaaacaacgaagatatattacatttacattgtctaagctacaccctcaaactttgcctttgtatatcatcaccatttctgaaaaaagttcagaactggatcagcttatatcagctatatatagctctagctctagctaagctagaacgggttccacgcctgcgacgccatggcgctctgctgcacgtagccggaggactcctcctccatccagccaagatggaacccctccgac

SEQ ID NO: 38814 - DNA, 412 bp, Oryza sativa
  Clone ID: uC-osroM202007c06a1
gggtaataaagaaattaggtttattgtttccatatactaaaagaataccaccaccacctggccgggcccacttccagcctctctttctctcactctctgtgactcttgtctttttgtctccgtatacatacatctcccagcatgtacagtacaatcatacaccacacccccaccccccgggccccacctgtaagcccccctctcttccttgcagtaatgtataatacataattaattaccacaggtaattaaaaaactaaatcaaataaacaccatcttttttctggacaaaactaaaaagaaagaaaaggagagagaggagggggcaaaaagaggaaaaaaaaaggttaaaagaaaagaagacccaaaaactttcaaattttggcgggccgctccgccaaatgcatgcaca

SEQ ID NO: 38815 - DNA, 119 bp, Oryza sativa
  Clone ID: uC-osroM202007c07a1
ttttggtctttataaaggggggggtaataacactgatgataaaaccacatgtggaaaggaggacgatgatccacaggatgggacaagtacttttggtacggccattattggaggattac

SEQ ID NO: 38816 - DNA, 472 bp, Oryza sativa
  Clone ID: uC-osroM202007c07b1
ccttactactgtggcatcggtgctgacggggcttttgggcgtgatattggggactcccactacaaggcttgcctctatgccggcatcaacatcagtggaatcaacggcgaggtcatgccaggacagtgggagttccaagttggcccgtctgtcggcatttctgccggtgatcaggtgtgggttgctcgctacattcttgagaggatcaccgagatcgccggagtcgtcgtctcatttgaccccaagcccatcccgggagactggaacggtgctggtgctcacaccaactacagcaccaagtcgatgaggaacgatggtggctacgagatcatcaagtccgccattgagaagctcatgctcaggcacaaggagcacatctccgcctactgcgagggcaacgagcgccagctcaccggcaggcacgagaccgtcgacatcaacaccttcagctgtggagttgccaaccgcggcg

SEQ ID NO: 38817 - DNA, 475 bp, Oryza sativa
  Clone ID: uC-osroM202007c08b1
ttttgggtgattctaaaataatcaatgaactgagaaatccttattgatgagcaacacgatggatggatccttctgttgaaaactgagtgcaacagttgaaaactgaacggcagggcagaaacatgagcataatagatggatcttcccagcacagttacatgatcatgacatacctagttgggatactaaaggagtttgatggctatttttaatgaaaatgaagatccactgcaatgctaacatcacacagaataagaaggcactggatggagggccaagaaatgaagtccaaagcctacatatgctgttaagacttgaataactatcaaatatcaatagcaaattttaaatcagaatttgcacctcgatgcttcttcaaactgacgatcagctggctagaagatagaataatcatatgacggtgcagattttgcaaggaggaaatcaactttaaaatgaaagtgacccctccagc

SEQ ID NO: 38818 - DNA, 187 bp, Oryza sativa
  Clone ID: uC-osroM202007c09a1
gttaaaaaaatttctcataaaattgttgtcatatgttgtcatagtacatggggcaatgcctcgatgacaggatgaatcgctcctcgttggaataatcgaggtagcaaattgcaaattcgcaaccaataatctgtacaaatccgcatttgggagaaaccggaacgaaaaaaaaaaaaaaagggcggcc

SEQ ID NO: 38819 - DNA, 503 bp, Oryza sativa
  Clone ID: uC-osroM202007c10a1
gtatcaatatccaaacgggagcttctcacataaataagataaccgatagctcaaggttgagaatcaaaaaccgaaagaaataggttctttgagcagagtgcagaacataaacaaaaatgcctgttgcaaattgcaagactacaggtaaacttaaatgccataaggagtttgtttggcagcataagatgaaactactgtgataaggctactctctcactcgtcatcctcttcctcgtcatcatcatcagcaccagctgaggagttgagagcattcaatctttcgacgagactggccttcctctgctcgtaggttagcttcttgaggttgtatctcttgtgggtagccggttccttcttggtcgatttggccatggtaggatcagcgcggatggcagcatggaccttcttgtacagtgattccatgccatcagcgtcaattcccttcttgaggtactcactaaagtgggcttggaatttctcaggttcctcctcagccatagacc

SEQ ID NO: 38820 - DNA, 421 bp, Oryza sativa
  Clone ID: uC-osroM202007c11a1
tttttgtttttttttttttttatggacaccccaatttcgtacaaaatggaatcaatgcattacacacagtaacatcatcagtaggagcaaatgctcatgaacaaaaactaatctcgtgtacaacaaagaagtactaaaataaccccctcctaatgaacaacttctacaccttgagactcttgaggatcataggcagcccatactttggccgaagcgtgatcacgtcggttggcacgtggacgtacttgggtgatagagtaaaggagaacctctgtaggatcattgcaattacggccttggcctcgatcatggcgaagttctgcccaatgcatgccctcggcccactggagaaggagagcaacgcgttgggatattttcccgcctttgacaccccattcttgaacctttccggcttgaatat

SEQ ID NO: 38821 - DNA, 443 bp, Oryza sativa
  Clone ID: uC-osroM202007d01a1
tttttgggtttttttttttttttggtttttttttttttttttttttttaccccgaaaaaaaatggtgggtttattaattttttgaacagtttttaatagcgcacaggagcaatccacaaaagcacaagtgacagcccactgggtttcccggttggcccatgggacaccagttttacaaccacaacacgggtacccgacgataaatagcgtccacgggatatggcatgccgagttgacatgaactcgttaaactttaggttttctagaatcatactactagggacacaagggggccatgtaataacacatattctgcctggctgaagaccaaagctaatccaacctcccgggggggtactggtttttagcaccaaccgaagaaatgtccatcctggggttacgggttttatttgggggcttttcggtcgaaattacatgttggc

SEQ ID NO: 38822 - DNA, 367 bp, Oryza sativa
  Clone ID: uC-osroM202007d01b1
tttcctctcgccccaagactcccgcatctgatgggactcttttaacacaccgtgggcttcaaacaacctccgtcgtcgctgtgtgtaccactaccaccgtaaaaagccaggcggcgaggaccgatccgccggaagaggaagaggaggtactggtgtgccctaccaaaacagactcgcaacacatgcccatcaacatcatcctataccagtacctctacaacaaggagctacatgttcccaaaagcttgtcaaaggtggaatcaaccccccaatgatgaccatcctcttcaatcactgctaatgctacagctgataaaggtgacaaaaactccatgaacgacccactcaagcgggtaatgccatccca

SEQ ID NO: 38823 - DNA, 471 bp, Oryza sativa
  Clone ID: uC-osroM202007d02a1
accatcaaatccttctattatttattccattgatattgctatgtacatcaataaaggcgtgtctacaatgttcatatggagcttccatgtacaattctcacttgagtaaaggggggcacatattaaaaatgaaacctctccttatcctcaggagagctcctggagaacccagtacacctacattacatgagctatatgcacaaaaggaaaataattatatacaatttaccctcgggcaaagggttaaatagattccacggcgtgccactcttgcggatatcttgtcatgatgatggttctatcaacttcaagaatggtaccatatgccatgttggttgagccaatcacaaattgacaggttccccttgaatcagcgtgtagtgagacaccgtagtattcaagatgatttgtaacacttctgccgtagaccgatctgctgcatgttgggtcctcgcctgatccatcacagat

SEQ ID NO: 38824 - DNA, 344 bp, Oryza sativa
  Clone ID: uC-osroM202007d03a1
accacaactttttaaggatggaatcgagtagcaatactttcaccccaaaatacagtttagcgacaatatcttagaaaagccgcttgctttgccgccatggctggcaagctgagcagagcagctaacacaaagaacacgagatcactataaaccaaacggcaacgaacgaagaaaatacagggtcttttttgtctgaagatacacgaagcggttcgatttcttttatttttagtctcctctactcctcgatgatgggtgtatggcaatggcaatggcgatgggatcttggcttagttgatgggaaggggctcgccgtttcactccttgaggcagttgagcatggg

SEQ ID NO: 38825 - DNA, 280 bp, Oryza sativa
  Clone ID: uC-osroM202007d03b1
tcctcgggggctccaccaccacaccagcactgtggcgcaacacgccgctcaacacagaggacaccctctaatctggcgcgcgggcggccccgatatgccctacacacatctacacgaggaaaagcatatgggggcacatccccgagaccctgttcaaaagacacagggccacactctacgtctgacacatgtgccccgcgtccccaagcacaaacacaccacacagtgtgccgcgtagagtctacaagagaaggccccccccctgttcaaggcacacaag

SEQ ID NO: 38826 - DNA, 272 bp, Oryza sativa
  Clone ID: uC-osroM202007d04a1
gactctggcaatatgttatctccattttctgtagaacgataggagtccatttacatatgacatctttacatcccgggaagatgaaggggaacaaaaaatgagggggtaactttgaatttggctatatcataacattgtcaacaaatgaaacgaatagcttacatcatgatgcacgctttgaagaaaaaggcatctgatactgtacagttgatcacaatcatctttggggtggtcttgagaatggagtctgtgtggaggtatatgttgaggat

SEQ ID NO: 38827 - DNA, 133 bp, Oryza sativa
  Clone ID: uC-osroM202007d06a1
ccccttccttaactttgaaccctttttgtcgccccacctagattctacattgaggctttaaatgtcgagggtttccaccccattggctgacctaatctacactacctgcttcacactcactgcccgttttaca

SEQ ID NO: 38828 - DNA, 475 bp, Oryza sativa
  Clone ID: uC-osroM202007d08a1
tttttgttatagaatggtcaatgtatatgcacagcaaatgaattagtcttggggttatgtatgcatgcaggtacacccacgacaacaaaattaaaaactataccaacaagaagaatttgcttgagcatatctgctcaaaaattacaacgcatatgccagtggtcagactagtatgtatgtcatgaatttgtcacctctgactaattaataactagatatacaatttaagatgatcttattacttatgagtcaccatgtcttcttttgatttgattagcgagtacgtcaggtatacatttttttctgccctttaccttttacgctttgatttaagggttgatgtctgtgagttgttgtgccagttacgctttctctgattgatgaaccagttgttgatttgcttgagctgcaggccagtctttttaacaagctttgccttatcattctccgtggggtatggccacttggagtgttg

SEQ ID NO: 38829 - DNA, 474 bp, Oryza sativa
  Clone ID: uC-osroM202007d08b1
ttttggacacaccttctctctcatcgaggtgggttaatatattcttctgggtgctttagcatccaagctccagtttcaccgagctaaggtagggggaagggaattgaattgaaggttcttgggtgctttcttttccagttacctcccaccttaggaaccctcgaaaagacccctcaccatctcctttgtgtccttgctaaccaactccccattaaatccctctccgcgcgccttctcgctggccattagagctagctagcgagagctctagctacagctatacatacgtgtacccaacggccacggtcacccgcgcgagcgagcacgctcaccaaccgatcgagcccaacaagctcgctcgctcttggtgcgcgcgcgcgcggcgagttcgatcgatcggtgtatacgcgtatcgtgctgtgtatgcaaggcggtgatcacggaggcatggagatgggcgtggggtcgttcacc

SEQ ID NO: 38830 - DNA, 473 bp, Oryza sativa
  Clone ID: uC-osroM202007d09a1
gttctagatcgcgagggccgcccttttttttttttttttttttagttacaagaggatgtaaattaaatatgctttgtgtctgaggttgcatttacacacttggcgtgcagttaaaggggttcatctatgtaatattagtgaatcataaaatattttcgaattcaatttttgtacagtcctacaaatgccatacatagagtgacatttttgggtgggtcgatcaagaagcagcagtgctccctttgtatcgcatggcgcagaagacaaagaagagcaggtcgaggagcaagagagcagccatgagccagaagaagtagtcgaggtgtcccttgttgaggtcgtcggggatccatccggggtcgccgccgcgcgtggtggcggaggcgacgacggtgaggaggaacgcgctgaggtagttcccggcggcgatggcgagctggccgagcgcggggcacatgctcctcatggagcgc

SEQ ID NO: 38831 - DNA, 331 bp, Oryza sativa
  Clone ID: uC-osroM202007d10a1
ctaaaaaataattttcccaggggccggggaaaagggaaaaagaaaaaatcgggacccacaaaaaacgggggggcaccactaaaaaaaaaaacggaacaaactaccaccccaaatcccaagggacaggactcccgggggcccaccccaaggcaccaacggaggaaggccaaaacccggaaaaaaccccccccagggggggaggggaaaaaaaaaacggcaaccgggggagggcaggggaggacggacacaacaacccgtgggggagccggtccggccccggccggaagcccaacctccccagggggccggaacccgggatggccgggggggc

SEQ ID NO: 38832 - DNA, 509 bp, Oryza sativa
  Clone ID: uC-osroM202007d12a1
tttttgataaaaccaaccacatgatatagtaaacattggcttcagagttcagatccacaaggttcacagccactatagcaagtacagataaggtagaagctaagtaacttgttccagcctcatatagcagttacagatagatagtttcactgccaaatagtacttgagacttcagcatctaagctagacacagcacatactaacatactaacatagctatatagcgcaactagaagcgcccgacagacacatgccgcttcttggatgtccagaatgtttattccatttgtccttatatatacaggcaccagttgctacaccccaaacccctcagtagaactcggccgacacgggcatgtcatcgaagctccaaaggtccatgctactggccacatcctgagatccatcagagctcagaagggtgtcaatcgactcatccgaaccaccatcgatcagaaatttcatgtacggctccaggtcagcaagatcaatgctagcattccccatca

SEQ ID NO: 38833 - DNA, 468 bp, Oryza sativa
  Clone ID: uC-osroM202007d12b1
tacgcactgtctctcgttcgcgcaaagcgggctgcttttatccgctttgggggcaccatagcctagcccaccatgtgcggcggcgccatcctctccgacctcatcccgccgccgcggcgggtcaccgccggcgacctctggctggagaagaccaagaagcagcagcagcagaagaagaagaacaagggcgcgaggaggctgccactgcgccaagaggaggaggatgatttcgaggccgacttcgaggagttcgaggtggattccgcgagtgggaggtggagtccgacgccgacgaggccaagccgctcgccgcgccccggagcggcttcgctaaaggtggattgaaaaacactactgctgctggtgctgatgggcctgcagcaaggtctgctaaaaggaagagaaagaaccaatcaggggtatccgccagcggccatggggcaaatgggctgcggaaatcagagatcc

SEQ ID NO: 38834 - DNA, 325 bp, Oryza sativa
  Clone ID: uC-osroM202007e01a1
gggacaataatgttgaacataccattaacccagataaaaatagtccgacaaggcaacatagtatttggaaataataacattaacctagcatctaacaagcacccccaatcaacgatggtaactagtagtagcaaatgtcacaagggatatctatatagctcaaacatgcagagaggtggcttaggcagcaacctcctcgtcctcctcttcctcctcatagtcctcttcctcagcggtggcatcctggtactgctggtattcagctaccaggtcgttcatgttgctctcagcctcggggaactccatctcgtccattccctcacca

SEQ ID NO: 38835 - DNA, 386 bp, Oryza sativa
  Clone ID: uC-osroM202007e01b1
acacgcgcgtttatacgccgcctcctccttctcctcctaggggcatttttactcgccggggggggcttaaacagcggagaggcgacatgaggtagatcctgaacatccagagaggccaatgcgggtaccatatcggggacaagctatgggaggtgatcttcgaccagcaccgaatccaacacacctgcgagtactcccttgactacaacctacagctggaacgagtcaacgcctactacaacgaggtcagagtacaccattacttgccccactgcatgctaatggtcctttagcccgagaccatggactcctgcctctcagaacattattggcagaccttacagcaatggatctcgttcttcggacttttcgaagaccagcacaac

SEQ ID NO: 38836 - DNA, 127 bp, Oryza sativa
  Clone ID: uC-osroM202007e02a1
agtagagaagggggacgtactacatagatgaactagtattagacgaagttttggacttgtggtttactaggaacatagaaaacatcatgatggaggatgacgttgcaaagcatgagagttcaaaatt

SEQ ID NO: 38837 - DNA, 62 bp, Oryza sativa
  Clone ID: uC-osroM202007e03a1
gggtaaatacccattattttttaataaggtagacccccaaacaacgcggttggataattgag

SEQ ID NO: 38838 - DNA, 470 bp, Oryza sativa
  Clone ID: uC-osroM202007e03b1
ctccctcttccgccgcctttcttggggaaggaaggagaaagcaaggggggggtctttaactccgcctgggatgggacactgttgctagctggtgatggctgagcaggctaatcaaccgactgtccttcagaagttcggtggccagttccaccttgggtccagcttttctgaaggtgtacgggctctcaacatctgcccatctgtctcatcctatgacaggcgctttaccacacggagctacatgacccagggccttgtcaatggtggcatcaacgtcccaatgatgtcgtcctctccaatttttgctaatgctccagctgagaaaggtggcaaaaacttcatgattgatttcctcatgggcggagtgtcagccgcagtttcaaagactgctgctgctccgattgagcgtgtgaagctgcttatccagaaccaggatgaaatgatcaaggctggcaggctctcagagccct

SEQ ID NO: 38839 - DNA, 68 bp, Oryza sativa
  Clone ID: uC-osroM202007e04a1
acaaaaaaaaaaaacaaaaaaaaaaaaacacaacaacgaaaaaaaaaaaggaaaaaaaaaaaacacaa

SEQ ID NO: 38840 - DNA, 488 bp, Oryza sativa
  Clone ID: uC-osroM202007e04b1
tcatcgatgaccgtcgacgtcgttgccgatgaggccgcctccgacgcagcggcggcgcaacagcaggaggagctgccgccggggcacggccaaacggtgtgtgtcaccggcgccgccgggtacatcgcgtcgtggctcgtcaagctgctgctggagaggggctacaccgcgaagggcacagtgagaaacccagatgacccgaagaacgcccacctgaaggcgctggacggcgccgacgagaggctggtcctctgcaaggccgacctcctcgactacgactccatccgcgccgccgccgacggctgccacggcgtgttccacaccgcctcccccgtcaccgatgaccctgagcagatggtggagccggcggtgcggtggacggagtacgtgataaaggcggcggcggaggccggcacggtgcgtcgggtggtgttcacgtcgtccatggcgccgtcaccatggaccccaaccgcggccccgacgtggtc

SEQ ID NO: 38841 - DNA, 501 bp, Oryza sativa
  unsure (1)..(501): unsure at all n locations
  Clone ID: uC-osroM202007e05a1
gatgttcaagtagatggtcatcgtgcttattcaactatcaacatgtgcacaggtatcttacaatataaataattgtacaccaaaaagaatgccttcatcgagcaccggaggtcaaacaggaagctacaaaaagcagcagcagtgtcgatgcagaaggaaaatatgatgattctgaaacgtaattcacatctacaacctcacgcgaagcaaaataaattgccccaactcgcttcgaatatctggtgatattttattgtttacacgaatgtgatcctcaatttacagcacttcacctagcttcatcttctaggttgcggaatccggttgtgaggtcatcatacaatttctggaattttgcgactaggacatcttcaccctctgcagggtcctcaaacttttgagatactaggcgataaaatagatcacccatacgatgctttatgacactgtatgttattttttgtccatcagcattagctgcacgctccacagnctgatttg

SEQ ID NO: 38842 - DNA, 410 bp, Oryza sativa
  Clone ID: uC-osroM202007e05b1
ttcatgatcgagcgagagagccggctccctcttggcttcttctgtcccccccgggatctgaccagcggggacgaccccatgacaccaggccggcgacgccgtcgctgcccccaccatcgccggctacgaccaccatgtggtacgatcgcatcacgacctatcatggactgcccacaaggagagggagcccgtgatcgtccgcaaggattctggacctgagggcgaggatgaaggaatggagggcgctgccatggatgaacttgaccgagtcggcaatgacaaccccaggggggaaaccactcggctggaggatgattcaaccaccattcaaggttatgaggaaacagctgggttgatggtcaatgatccagagccgagaacaagaaagcctcttgcagatggaaagagac

SEQ ID NO: 38843 - DNA, 462 bp, Oryza sativa
  unsure (1)..(462): unsure at all n locations
  Clone ID: uC-osroM202007e06a1
acacattcgttgggtttttctgagattttatttagaatccaaacgcccccattccttctcgttgctccttgatgaaagcctcgtagaactggaagataatggttaccgacaacaaaataccagttccagtaccaatggcgcccatgaagtcagcaatgacggaaagggcaccgatgcacataccaccaaaggcagcagcagtgggaatgtaacggttgaggacatggatcaatgcagaatcacggtgtcctttcatgaccatttggttgtcacgaagctgtttggcaacgtcacgcgccgacgctccagagacttcgatccaagtcttactgaaaagagcacaggcagtgaggatgaaagtcaagtagaagacagcatggaaaggatcatagatgatttcgccgaacgaggagggtggggaaatgcagctagcaatccccccacccggaatattttctnagg

SEQ ID NO: 38844 - DNA, 366 bp, Oryza sativa
  Clone ID: uC-osroM202007e06b1
tacactcttcattttcttggtgtgctgccaaattccgatctatggagtgcagagtgccaagtcatcggaccctccctactggatgcgtgccattttggcctccaaccagggtactaccatggagctagcgatcagtcccactgttacgcctggtctgatcatgcagagtattgcccgttctagaatcatctagggggactacaatgccaaggaaagacgcgcacttttctctggcgcccaaaagctgatcggccttccgatcaccacctgtgaagctataacttatagctgtagtgtaatgctcggtgacctaggatctatcggcgctgctaatgctgttatgatcattgaccaagtcttctgcgc

SEQ ID NO: 38845 - DNA, 439 bp, Oryza sativa
  unsure (1)..(439): unsure at all n locations
  Clone ID: uC-osroM202007e07a1
ttttgggttttttttttttgggcttaatttaattttcttttgtccggaactagtgacagtgcattaggagttcattcaggaaaagacaaaacacatactgcagtatcatacctagatgcatccaacttccaattctctgagccagcaaagatagggcatgttctaattcaaaactgcaaacaaactatagccgactcaaccaaagatagggcatgttctaattcaaaactgcaaacaaactgtagccgactcaaccaccaaacatatgagaggcagtaagggttgaagatccatggatctgttcaggcgatggtaacattaacttttccggccacttggtccagatcacgccttccctgggaggtgatgagtttttcgtccttggggttgacattgatgatgnccattttttgcagctgctgaaggaagttgcgtgaga

SEQ ID NO: 38846 - DNA, 477 bp, Oryza sativa
  Clone ID: uC-osroM202007e07b1
tttttcagccgaccctcactccctcctctgtggtctcttttaaacccacggggggggctgcagcggcggcggcaggatggcggattcaaccgcgaggacagtgaaggacgtgaaccctcatgagttcgtcaaggcctactccgcccacctcaagcgctccggcaagatggagctccctgagtgggctgacatcacgaagactgcgaggttcaaggagctccctccttatgatccggactggtactacacgagggctgcctccattgcaaggaagatctacctgaggcagggtattggtgcaggtggcttccagaagatctatggcggccgtcagaggaatggctcacgtcccccggacttttgcaagagcagcggaactatctcacgcaacattcttcagcaggtgcagaagataggcatcatcgatgtcgaccccaagggcagaagactcatcacctcccacggaaggcatgatct

SEQ ID NO: 38847 - DNA, 457 bp, Oryza sativa
  Clone ID: uC-osroM202007e08a1
aaaaatgaccataatttctgaattgagaagcccccataaaatttgtatggataacatcatgcaggattgaacgaggaactcatgatcatttaatgtacagaaaacctgatgaagttacaacatttcctaaagcagaaggattaagaacctgtatcacagtcaaaactggaattcttggggtatgccgaataagagctaaagggcttctctgatctgaaaagtcttcaaaatagctctagctttatcatattcattcagttctaccaatatgtctttcaaacgacgagccagcccacgtgtctcttcctcacttatgcctgacatgtgtcgcctttccaacttgtttcctagttctaccacgagatctatgaaaggctgcaacttttggcttggtgaagaccacactcctttaagtaatgcagatatccgttcagccctagcaattgcataatgggca

SEQ ID NO: 38848 - DNA, 462 bp, Oryza sativa
  unsure (1)..(462): unsure at all n locations
  Clone ID: uC-osroM202007e09a1
ttttggtataaattccgttattggtcagtattcactgccaaagtgccaaggcagagttacacgtacgttgctgaatcttgagcagctgtgcttattaccacaaaactatatgctggccgtacgttcccatgcatgcatgcggttttgcatttgacatgagcagctagcttattccaaatccaaatgtaatattagtatatcactcttgtctagtggaatctaattttgtaggacggcgacttgttggggttgaacagcccgaagtgcctctcggtctcagccccggtcttctggttctcgttgaacatggcgaacacgtacgtctccaacgccacccctggtctcttcggagtgcctccttggacatggctgataagcttctggttgtacgtctgcgcgttgctcacgctggncccgaacccaccggccgacggccacccggtcttcgacaccaccacgccg

SEQ ID NO: 38849 - DNA, 444 bp, Oryza sativa
  Clone ID: uC-osroM202007e09b1
ctccctcttccgccttttcgcttggggaaggaaggagaaagcagtggatcttttaagactccgtgggctaaggcacattggtgctagttggcgacggctgagcaggctaatcaaccgactgtccttcaaaagttcgggggccagatccaccttggctccagcttttctgaaggtgtacggtctcgcaacatatgcccatctgtctcatcctatgacaggcgctttaccacaaggagctacatgacccagggccttgccaatggtggcatcaacgttccaatgatgtcatcctctacaatttttgctaatgctccatctgatacaggtggcaaaaactccatgattgatttcctcatgggtggagtgtcagccgcagcttcaaagactgctgctgctccctttgagcgtgcgaagctgcttatccagaaccaggatgaaatgatc

SEQ ID NO: 38850 - DNA, 201 bp, Oryza sativa
  Clone ID: uC-osroM202007e10a1
tttttggttttttaatttttttttgttttttttttttttttatttttatattttataaaaaaaaaaaaaataataaaaaacaaaaaaaaaaaaaaaaaaaaaaaaaaaacaaaaacaaaaaaaaacagagaaaaaaaaaaaaagaaacaaaacaaaagcaaaaaagaaaaaggaaaaagaagaaccaacaacaaccaacag

SEQ ID NO: 38851 - DNA, 510 bp, Oryza sativa
  Clone ID: uC-osroM202007e11a1
tttttgtttttttttttgaacaaagaaccatatcatcagttacaattgtcttccaagcaaagaataacacattaacaactagcacacttcctctaccactatgtcatcatcatcatgcatccaaggggggcaaagcaccgaattaacagtgtcactgaaacatgaacaagaaagaaacaagaaagaagaacaaatccctttcacaaacacaacctccacagcaattttccaatctttccttcccacaagcccatttaatcatcatcataccctcccccttccctcgccggaatcggcaaccgcactcatgccttcccctttctccatgcccagcctcttctcgtcttccattcccttcagatgcccagcagccttcagcgccccgatgttgctcacattaccaaagatcagaacaatgatgccgaggaagctgcctaggaacgcagcagcaaacgatcctccagcacgcccaggcccagcggatgcagcagcgaagccaatcatagcaca

SEQ ID NO: 38852 - DNA, 459 bp, Oryza sativa
  unsure (1)..(459): unsure at all n locations
  Clone ID: uC-osroM202007e12a1
ggctaattgctactgttcattataatgactgcatgatgataacggtctcagccattttggtagcttcaaggccaaaagatgaacacaataaaatggctcgataacatgaaataacagtagaaaaggatgcatctctgcaacttaacagtattactgggaactacatttcaactaggatggaaaattctgtcaacccaaacaaaactcaaattttgaagatagaaatgtatttaagcatttgcagcagcctgagcagcagcatctcgcttcctctgttcctcgatgatgctgagcttgatacccttgcccttagggagagacacccatggcttgttgcccttgccgatggtgaacacattgcccagacgggtggcgaaggcatggcccaatgcgtcctccacatggatggtctcaaaactgcccttgggcttctccctggtnttaattactccaacacga

SEQ ID NO: 38853 - DNA, 443 bp, Oryza sativa
  Clone ID: uC-osroM202007f01a1
aaagaatacctgggggaacccactaacaacttgatttatctccaatcaggcttgaacaaaaatcgaaaattcaaacgcttaaaagccttaaagagaaccatttaatctgtgactacaaggccgcacagatgataaggttttaggaaaatacataacatacattaacaggagacaacactggtattgtgttgctgcctggttatgcatgcagcatctcaccacaatccaggtcagtagtattcatgttaccacaattcacttcaggagtattacttatgaccacaatccactttagtagtattcgattaccgtgatgaacgaaaccatgtcaatagaggcgtgataggagactgcagagatggactacctattgtgtcctgcagaggttgtttctgcattccggcctccattaccagatccttgggttaaatgatagctctgaa

SEQ ID NO: 38854 - DNA, 231 bp, Oryza sativa
  Clone ID: uC-osroM202007f02a1
ggaccaaaaggcaaagctgggagcgccagaacattttaatacaacagcttttgggcgaaatgctacaggagctttttcctcccttgcaaaaagaaacccaaaccttatttacaacggaacacacacaccggacacagagggctcgatcgatcgaagcagacgagacgacgatggggaactactactagggaagggacaacccctagggtatacagggaaacagggcggggg

SEQ ID NO: 38855 - DNA, 490 bp, Oryza sativa
  Clone ID: uC-osroM202007f02b1
cccgccccggaatccccggggacgccaccacgcgcgtttctttatcgcattgcgagttatccccgcgagccaccttaaaatggtggaggtggagctactaaacttcctcgaccagggccggctcgggaaggtgacctcctccaccaagactacctcctcccaggagaccagatcaacctccccgagagccagccagctccactgcaccgaaggcgacgtgaggcggtaccaagacgaagagcacgctgccgccctaccggggcttggccaagagacctagtagtcgccccaggccaagaaggcttgtacgccggaccgaccaacccatgacaaaagagccagaaaagccatgaccgcaaatgcggttcatccaacttaattcatgcggtcacacatagacccaactgaacacaacggatctcaaggtgcatctgcgtcccagaaaattgatcatggttccatgctctatgcaagattagaataggagtct

SEQ ID NO: 38856 - DNA, 101 bp, Oryza sativa
  Clone ID: uC-osroM202007f03a1
accatgtatttattgttttctttttttcaatggagggacagaaggggaaaaaaaggaacaaaaggaaagccaaaatactcgggacaaacaaaaaacccccc

SEQ ID NO: 38857 - DNA, 501 bp, Oryza sativa
  Clone ID: uC-osroM202007f03b1
ccccgccggagtttccggggcgacgccaccacgcgcgttttgtggctgctgtgctctctactgatgtggatatggtcaggcagagaaatcttcacacagaggggagcgtcagagtgcatcatagagaatgcacggaagatgcctcggggtatacactctcctctatctgcaatcagaggattacatcagcaaattaccagcaccaactcgaaatgagtcgggccttcaacacaagcaacagatggaaaaagcgggggctctctgtcgtgccgatagtgcatatattcgcatctcggccaacgcctgggaaagagtctattcttaatgagggatccgctgctgttgaagttggaggcactgaactcggccaagggctttggacaaaagtgaagcagatggcaacgttcggtcttggacacgctttggactgatataaagcaagaaccgtgggagagagtgagaattattcaagcagatacacttagtgtgatacagggaggg

SEQ ID NO: 38858 - DNA, 480 bp, Oryza sativa
  Clone ID: uC-osroM202007f04a1
gttgggaaatgccaatttactatacatttcctttgtgggcagtatttatccttgtcaacagtatttgaactaattacaatgtagggaggcccctaaagtccaacaaaaagaaactatttgaaattacaggcagcaggagcatcatagtcggcaatgcagtaggttcgagatgcccaggacactaaaatttatcctgctgctgaaacgatcatgtacaccaatccaaaatgcaagaccgactaacctcctgcctccagttactttcaacaacagatcaactggccatgcatcatgcgttatcgcaagctcttccatgtctatccatgaatcactgtttgtatcctcttcacagataaatattgaacggggaccctatgggtcttcagattttagttatttgggaatttacagagggtacctttttgaatatatacatacatgctgagaggggcatggccacggagagggactgtgggaaga

SEQ ID NO: 38859 - DNA, 470 bp, Oryza sativa
  Clone ID: uC-osroM202007f05a1
ccaggggtgactcaatcaaaaccgaaatttatcttttacccatccattcgatccataaacttatgcggggaccgatcgatcagttggcgagaacgttctagtgacgggttcataaaaactaatccgcaaggcaagcctcaatgataccggtacccaatttaatttttttcacaacaacttacaccggccgagcatttactgcacttaatagaagtacctgtgatcagggtgggtgatgttctgccacagcttttgacatgatatctactccgccaagttggatccacggatgataggttgatcatacttaatatacctcgcctaataggggctcttcttggcgattgctatctacaggcatggtttaatgttacggttgtaatgaacaaccagagctttatctcatttttgaccgaaaatgcttgggttggttcctaatgcaaggacatggtattaaattgtaaagggga

SEQ ID NO: 38860 - DNA, 497 bp, Oryza sativa
  Clone ID: uC-osroM202007f06a1
gttgataaaaaaaagcatggaatttagcataattaagtacatcaaatgtgataatatcacgaaacaggcagaggctattagcatattacactccatatctacactggtagataataataataataatcgaaaagcaagggtgctactagctccccaagattttcgaaaaaaaaaggcaggcaaacgcacgccacacttacagttacggattgctgtgttcagattaacttgcaccatatttgtttatgtacagaagaatgatgcaatttgcgaaatgatcatcgaattgaagtgaacttaattaatgaagctgttctgcgaggcgcctctgcatcttaatcgtcgccgccgagagagatgatgtctttgagcttgtcgggtgcttctacatcacaagctcggacacccacccgaaatccggcccgtcctcgtccgtcaccggcggtagcaccggcgttacggacgatgccgacgggcttaccttccggaggccgagc

SEQ ID NO: 38861 - DNA, 451 bp, Oryza sativa
  Clone ID: uC-osroM202007f06b1
gtgttcttttgaagtgctgggaggggacaaggaagtgtgagtgagtagtgagcaccatggcgagccgagagcacctcctgctcgacccggcggcgctggccgtctcttgtgctgaccccgctgctgtggagatcccgcccgagctcctctccgcgctgggtgagtacctgtccgccaggcgtagcgacggggaggccgtggccgacgccgatgcggaggctgatgatgagttcatgatgtacgagttcaaggtgcggcggtgcgcgcggtcgcggagccacgactggacggcgtgcccgtacgcgcaccctgtcgaggccgcgaggctgcgtgacccgagtcgcgtggcgtacacgggcgagccgtgcccggacttccgccgcctgccggtcgccgtgtgcccgaggggcatcacgtgcccgttcgcgcacggcacgttcgagctcttgct

SEQ ID NO: 38862 - DNA, 493 bp, Oryza sativa
  Clone ID: uC-osroM202007f07a1
ttttgttttgctgaagaattagaaaagatttcattaacttttctcataattcaatcaattagtggtagtagtacaatcaatataccaattatcaagctgttaatccaccaaccagcagatttggtgaattggtacatataagaatgccgtccaagaaaaagcagacggccatttttttgttgctttgttcctttgttcatatcatggaatcaaactgaattaatccaaaccaaatttgctgctactactactactgctaatcatactagtaattaggtaccaaatcaaggcaattaatcccctccttttgagtgattaattataattaattaattaaccaaatcaccacctggtaaaaacactgtcttgaccaatcaaagcttgatactttcacaagtttgtcatggcgatggatggattgtttctagaagagctctttggtgacgagcggcgcggcggcgttccacgtgctttggcttgtccggtcggcggc

SEQ ID NO: 38863 - DNA, 383 bp, Oryza sativa
  Clone ID: uC-osroM202007f08a1
ttttgtttttttttttttttttgggtttttttttttttttttttttttttttttttttttttttttttttttttttggaaaagaaggaacgattcccattacaacgggggaggggcaaacaaggttaagggcccacagatttttcaaaggtcaaggggggccttactttagggggcaaaacattttattggggggatgaccagcactgtttaaaggtcctggggggaaaaaattgggcagggggggaaatgaaacggggaaccccaaaccctatttgggactggctctaaagggaagggggggggcccttgaggggaggggaacgggtttccagaacctctaaccattttttaggggaaggggaaagaaaagccaaagcttaa

SEQ ID NO: 38864 - DNA, 385 bp, Oryza sativa
  Clone ID: uC-osroM202007f09a1
tttttgttaatagaagaaagcatccatagctccattggaccatgcatagagagcatacagttttgcaattcagctcagaatggcatatgtaccaagcttgggggggagtagcaagcaatgcacagcaaaatgggaagatatgaacaatcatggccaacgaggggctaacaacagtttagcacagtacaaaaagtaaacacacataacaggaatatgcaatgcaacggaaccggagtatactgacaaaccaatcattaaccagagaactacttattaaccagctactaatagtcttctccatcgtcgttctcgtcgtctgcacccttggggccgacttccttatagtcctttttaagggcaggcaagtcctcacgggctttttgag

SEQ ID NO: 38865 - DNA, 479 bp, Oryza sativa
  unsure (1)..(479): unsure at all n locations
  Clone ID: uC-osroM202007f10a1
gtaaaagggaagtactcgcctctggagagactatggctgtttattctgtcaaaagattttacaacaggagaaacagaaagaggtctcaaagtattatacatggctggccgtccagaagcaaataacgtgtgtataaatattacaacaacaaaggggctaatcctctgcagactgaagtcatcatcatcgcacatgattaaaaaaaatacaatgggacgcatcatctcttagcccgcgagatgggaaaccccctcagaaattgtactaatcgttccaaattcatcagcacacaccgttaattacttactacttgtatttatgtatttatgtatgtatatctcacaacggatacacgtcgaatctttattacttgtgtccttcaccgggagtnccttgatattnttcagcaagcagcagcagggaagcagtagcctcaggcgtcatccttgtctgcaaagatgtcaagaagggagagcgcc

SEQ ID NO: 38866 - DNA, 483 bp, Oryza sativa
  Clone ID: uC-osroM202007f10b1
tagccaagcagcacgagcacacgagaaaacaggagaaaaaaagcagcagcggccatggagggatacgaccgcgagttctaccagttcagcgaccagctgcggctgcagacggcgagcttctccggcctctccctcggcgactccatctggtcctccccctccgaccgccgcaacgagccggccttcgacggcgagtaccaccacttctcctccccctcccccgccaagaacgccatcgccaacatcaacggcgtcgccggaaacctggatggcccgggcctcatcggctccggcaagctcgccttcggcgccaccaaggccgaccgctacatcagcgtcaacctccccgtcgacaacaacaacaacaacaagtcctacggcggcgccgccaagatcaacaacaacaacgtcaacgccttcgggttcaacaagatggggggttacaacaacagcagcaacggcggcggcaactacggcggcaac

SEQ ID NO: 38867 - DNA, 447 bp, Oryza sativa
  Clone ID: uC-osroM202007f11a1
ttttggttttttttttttttttggtgtttttttttttttttttttttttttttttttttttttttttttttttttttttttttttttttttagaaggggaagctggcccccccgaaaaaaaaacagaaaaaaggtgggactgggccctaacggaacagggaacccccccaaaaaaaacaaattttgggaaaccaagaagcaagggaccaacagggccggggccccaaaaaaatagggggggccccgggggaaccggggacaaaaaggggaaaaaccgggaatttacagggggcaaaacaggggaacttccttaggtttcccggggggggaaacccccttttcttgggcaaaaaaattgcccataccgccaccaagggaaaggcactccaggccgggggggaaagggacagcgggggaccctattgaaacggggggtttggagaaaaa

SEQ ID NO: 38868 - DNA, 63 bp, Oryza sativa
  Clone ID: uC-osroM202007f12b1
ttttagaccacaagcggaccgtccagtggaggggagcttaaatacccgtggcggccacgcaac

SEQ ID NO: 38869 - DNA, 502 bp, Oryza sativa
  Clone ID: uC-osroM202007g01a1
gctcgggtggcgcgtggcggccgtcgccactacgggagtgcaaggtgccaaggatgctggtctggagaaagctgccagaagtgcttcccaatcaaaggtggaaaatggctcaccttcagaaatcattttagatgattttgaagacttgagccctctatcagaaaatgatgactccactgttagtatcactgtagtcggagcatctggtgaccttgccaagaagaagatatttcctgcactttttgctctatactatgaagattgtcttccaaagcatttcactatcttcggatatgcacgcagcaagatgacagatgctgaattgagaaacatggtcagcaaaacactgacatgcagaatagataaaagggaaaactgtaatgagaagatggaagagtttttaaagagatgcttctattaattaaggccaatatgattaaaaggagcatttaatggaccttgacaagaagctgaaacaacatgagggttccagagtttctaa

SEQ ID NO: 38870 - DNA, 331 bp, Oryza sativa
  Clone ID: uC-osroM202007g01b1
ttccgggtcgacgccacacgcgcgcttttaggatcgtgagcgaccgacattacatggggctacttttaaaataacgaggggccggaccatgtgccaggattacaagaacgacaacatgctaccaaaaggtgagtatccgacagaattgtttgtgctgtaacgggtacaggccttggaacctaagctaacctactgcctgattttcaatttgttgcactaactgtgctacgcgatgtcacagaacagcaatgtcacctacgaacgggagggaatctagatatgatttgtctcatgcgttatgtgctgggtcaaaaagaacccatttgaggcc

SEQ ID NO: 38871 - DNA, 436 bp, Oryza sativa
  Clone ID: uC-osroM202007g02a1
agcatggcaacagctaaaatgagaactgcttgattcagaatagtgacagcaggttacatatagtggtgtgatgcttcgtttggatctgtacagctactgactgaactacaaactagtgttttctcagggacattattctgctagtagtcagtggctaaattctgcagcatgaacgacctggtcttgccatctggtttcaacccaatgctccgcattttcgtgtatactttcctcgctaatctgatcttgcctcggagacaaagcccgtgaattaccgtgttgcagaccgaggagtctggagcgacctcctgcaatatatgctcaacttgattccaaagagatcctgatatgcaagctcttataacagataaatgtgtgaacgtgtctggtgaacaccctcgatgagtcatacgccggtacacttttagagcaactt

SEQ ID NO: 38872 - DNA, 470 bp, Oryza sativa
  Clone ID: uC-osroM202007g03a1
aaagaatgactcgtgttaaaaagaatggaagaaataatacattgccaagttgatggaagaattacaacagcagagtacaagaccaagatcaaccgatctgtggtaacaaaatcccacacccacaggctgagcgagcctcagacagatcaatatgccaaaatgatcgtgaaacaactgtagataaactataggagtatatttctatgaacaactgagatcctctggatacacaccattcatgcaaatctctcgtcagctctattcttcgagcccatgcatgccatccccctgaatcaaatggttctcgatgcatcaattccgttgtacttcatacctagcatgaaaatatgatgttggcggatgatgatcaacatgcttaatatttttgccctggaggtgctggtggcaaacggtttggtgtgcgtcggctgccagagttaccaccattcacgtccccattttcatagcgt

SEQ ID NO: 38873 - DNA, 494 bp, Oryza sativa
  unsure (1)..(494): unsure at all n locations
  Clone ID: uC-osroM202007g03b1
tttttgtccgggcttcaggggaagtctcagatagtgcaaaatgaacttgcaaggttgggagaacagatggtatcaagcgctgaaggaaccagggctgttgctttggagctttgccgtgaattcgaagacaagtttcttgcccatgttacttctggtgaggggtctggttggaaaattgttgcaagctttgaggggaagtttccagataggatcaaacagtttactttggacaggcattttgatattaacaatgtcaaaaggattgtcctggaagccgatggttatcaaccatatttgatatctccagagaaaggtttaaaatccttaatataaggagtactcgaaatggcaaaggagccatcacggctgcgtgttgaagaggtacaccgtgcattattggacatagtaaatgcttatgcaaatgctacaccatgactnggaagatatcctccattcaaacgcgaggtcgatgatattgcaaccaatgcattgga

SEQ ID NO: 38874 - DNA, 494 bp, Oryza sativa
  Clone ID: uC-osroM202007g04b1
ttcttcaggtcatgtcgttgaccgagaagctgcgagagatggagacgacgaccgagggcagcgccggcgcggccgttgacgtcccgggcttgcctgcggcggccgacgtgaaggtcgccgtcccggacgccgaggaaccggcgctggaggaggcggcggcggcgttcgaggagcagcaggagcagcaggtgaaggccgaggacaggctgagcacgggcagcggcgggagcgcggtggtggacacggacgcgcaactggtggtcgggtgcggccggcagcatctcgccgccgtggacagcagcgtggagtcgtactttccgggcggtgacgagtaccacgactgcgtgatgggccccatggaccacgccgcggtgggcatccagtcggaggaggacgacggcgccggcagcgacgagggctgcagctactacgccgacgacgccggcgttctcttcgccgaccacggtcaccaccaccaccaccaacacgcggac

SEQ ID NO: 38875 - DNA, 93 bp, Oryza sativa
  Clone ID: uC-osroM202007g05a1
attaaaagtgtttttttttttttaattaaaaaattacccccaaagaaaaaaaaggaaaaacccaaaaaaaggtctcggccaaaaaaagaaaag

SEQ ID NO: 38876 - DNA, 565 bp, Oryza sativa
  Clone ID: uC-osroM202007g06a1
cactctattagagctatgacggggcatgcgcgcgcacgctagcgctgggcctctatagcgcgcgcgcctcgttggtcgctgcgtttttatgccaaacccctccgatttgagagaatggcctgacgacttcctgctggttggtgaggcggaggaggcactgtcaagagcagcaagctgacctaatgccgcttgaccctgggccaatcgacctggctgcaacgatcggaggtttcctatcccctcgtgaaggagtcaaatcacgtatccttgcgccggatggcttggggataattttcgtagtgagttcataatagcgcctcatttgggattcctctggttgattcagttccctttgcaagtttgcgggtttgttcacggatttggttggcttgagatcgatcttcattcattgggagatggatgatgatgactactcctgggtgcggcgcaccaagttctcgcactccattgttaaatccaactctggcagggagcagtttggtgcattccttgatccgtttgacagttccactgcatggaggcagaaaggattcagtggagagct

SEQ ID NO: 38877 - DNA, 401 bp, Oryza sativa
  Clone ID: uC-osroM202007g06b1
caaaaaaaggggccttttaaacccctttggggccaaaattacacgatatacttgttttgagagaaaatttcatgagttacatacatacattggtgaaaacatttaacatttaccagttggcccaaaacacataaacattaccccttggtccaaaatttcgttagtcgtaactttggaaaaaatgcatgaatattagtctttggaccatttacacttttatgcaagtctttggatgaataacacgtcaatattagcccctcggcctaaaaaagcatgagcaataaatatccttcaacccgatcctacaaaattgctacctcaatgcccaaaatgattcatccccacccgccgggaactaagactccattggttggttgcaggcaaaattcctaacccaaaca

SEQ ID NO: 38878 - DNA, 118 bp, Oryza sativa
  Clone ID: uC-osroM202007g07a1
tttggggtgttttaaaattttatgggggtgtttatatttttttattgatttttttttttataaagtctgtcagaagtgcttttttttcccaaagggggaaaaaaggggagaccagaca

SEQ ID NO: 38879 - DNA, 404 bp, Oryza sativa
  Clone ID: uC-osroM202007g08a1
gtcggacaccaccgactgcatggcctggaagagcccgaggtggtcacccccggagccgccgctcccgagcagcagcgacgccagcgaggttcccccggtgagccccagcgccgacgacagcgacggcagcgaccctggctgcggcagcgccagcgacgacgcgggcgaagtcccagctgcaccgccgccagccgacgagacggccgccgccgccccgcctccaggcccgcccctccccacgccgccaccaggcgccgcgccgccgctcctcgaccgcttgttcttccggcacccgccgccgacggggacgttccgcagcgtgccgccgcgcgtccagtagcgcttgcacgccttgcagaagtgccgcggctgcgacagcgagtagttgttggagtagcagaact

SEQ ID NO: 38880 - DNA, 431 bp, Oryza sativa
  Clone ID: uC-osroM202007g08b1
ccccggcgcgagaatccggggggatcgcacgcgtccgttttctcacccaccctgtggatagggcgcgagtggcggaggagagtggcctgcggtctgtatatctgtgatgtctctcgacttggtgaggcagaggaggagagtggggacctctgcctggaagccaaatactagtagcgcgcgcttgccacgtctggtagggggtgtgagcgaacatttgccgcaggctacgaggggaagttcccagataggatcaaacagcttccttgggacaggcagtttcgatattaacaatggcaaaaggacagggctgggaggcgcgggcagagacccctccacgagacatgcggaagctggatggacagccgtaataaacggcagacgggacatgcgcaaggacccatcacggctgcgtgtcgaagaggaacaccacg

SEQ ID NO: 38881 - DNA, 414 bp, Oryza sativa
  Clone ID: uC-osroM202007g09a1
tttttggtttttttttttttttgtgtttttttttttttttttttgcacaaaaccttttcagctggcacaagtttcaattacaggaaggaagggcaggcgatgcataaaacagctgcaaagcttgactttttttggagcaacagtttacacaggggctggaaccacaaacattactaggaataagctccaaaaattccaggggggaggaaaagaaggccctccattttttttctttaaacccccatgaaaggaaggaataaccaagggtctttacaggaagatttccagggagggttcgtcctaaaaaagcatgccggtggaacaaaccacaaatccttacccttttctttccttggtcccaccacccggaatttataccatgcatacagacagatttcaacaaacctggttggt

SEQ ID NO: 38882 - DNA, 526 bp, Oryza sativa
  Clone ID: uC-osroM202007g09b1
cggaactctcccgggggcagcccacatgcttgtttcatgtttctattgaaaccgttctcttgagtgagttgtccttaaagggggatttatacttactgaagattcaacaattaaggattgggatcacactgttcatgatgctgacacatattatcaggcattgaagataataagtctgcgtggttgggaaccccgcttgctaccctatgctgttgattgtggaactaaatctcattcagatgcaaactcttactctacattgacccaaccagggctaataaataactcaatggaagatcggcttgttgtttatgcacctaatgaagatgatggctcaacagtaattgcagatgctcgccaagcatatcagcattacgatccattatcagttgctttagattgtcaattttgaggagctcgcgttgccttgtggcctttttcacttgttgaacgacctgttcaactctgtatgctgatatcagattctagtaagcacgatgagcaaactgaggcgcatgctggcaga

SEQ ID NO: 38883 - DNA, 477 bp, Oryza sativa
  Clone ID: uC-osroM202007g10a1
gaaaaggtatataccattaacttgctgtctgcacaaaggagagcttcatgttgacaaggaacctagtaccaacgtaccatatatacttgaagctccaattttactgacaaaaaacaatattactacaagcagtacaatacaatgacaacaatagcttagactagttacccatgttacagtacgagactttacaaagatctacatgacttgtcatgtacagtacatatgtacctacaaactatccagtaacttagtgcatgcagatgcaggtttggtttacttcaccaaccatatacagggtgctgcacttgaggcggcaggaggcccatgtccacgcagtgttgcttgtcgtagtcgcgcgtaccaggaatcgctcccgttgccagcctgagaacctcgctaccagttaggcagtggtgagcaaacgccaatcctccatccatggcgtccgacagattactctgaattgttcttctc

SEQ ID NO: 38884 - DNA, 314 bp, Oryza sativa
  Clone ID: uC-osroM202007g10b1
tgttagatttgttggataaacgtaaaagcgacttgcaaggattcaagttggatgtatatggaagtggcgaggactcacaagaagtccaatctaccgccaagaaactgaacctgaatctaaacttttttaagggaagggaccatgcagatgactcactccatgggtacaaggtattcatcaacccgagcatcagtgatgtcctgtgcacagcaacagcggaagctctcgcgatggggaagttcgtcatctgcgcggagcatccatcgaacgagttcttcatgatcgttcccgaacttgctgacgtacaggacccc

SEQ ID NO: 38885 - DNA, 494 bp, Oryza sativa
  Clone ID: uC-osroM202007g11a1
tttttgtttttttttttttttttgttttttttttttttttttttttttttttttaagcaaaagggccagccagaaaaatagaaatatgtccctccaaaggtaaaaaaggtagaaccctaaaattggtttttggcaaaaaaagaaaagaaagaaaaggggtatacaacaatgatactttgggacacaaggtgggctgtacaaatctgagcttcccaaggggaaagcttattgccacctgactaacccaaacatgtcacaaaatggggggggggccccgttttgggcggaagatgcccaaataacaacaggtgcaaagatcctttaggccaaagggaggtgaaaccaagggcttggatttcactgaacttccgaaaatatgattggagaaaaaaacaacacgtcgggacgctgtttttgttttgacttagggcacaatcagggaggttttatttgctcatatttttcacctatgctcccacctttttgtttttgga

SEQ ID NO: 38886 - DNA, 445 bp, Oryza sativa
  Clone ID: uC-osroM202007g12a1
ttttgtgttattggttgttacaacttaaaatttagcaaatcctggaataacttcttgcatgggattttaacattcagtagactattaggatcagcatgtgatcataaaatggtcggcccagtaacaagggagcaaaagatacataactttagctggaaacttgggatataaggaaatattcaaacaatacattcgcacagcctccagtagcaccatttattcctcctcctcggcctcctccagccatttaacaaaaggttccagtgctttgacgaaagattgcctgccctttgggtttgaacccttgcggaaccaaaggaggatggtatcttcagctaggacatcttggtcatacagcgttctgattatttcaggaaatagcttcatcagcttagcatcctcatagcactgtgtctgaactttgtatatgagttcgagttcaagc

SEQ ID NO: 38887 - DNA, 437 bp, Oryza sativa
  Clone ID: uC-osroM202007g12b1
ttcttgaactcgaactcatatacaaagttcaggcacagtgctatgaggatgcgaagctgatgaagctatttcctgaaataatcagaacgctgtatgaccacgacgtgctagctgaagataccatcctcctttggttgcgtaggggttcaaacccaaagggcaggcaatctttcgtcaaagcactggaaccttttgttaaatggctggaggaggccgaggaggaggaataaatggtgctactggaggctgtgcgaatgcattgttcgaatatttccttatatcccaagtttccagctaaagttatgtatcttttgctcccttgttactgggccgaccattttatgatcacatgctgatcctaatagtctactgaatgttaaaatcccatgcaagaagttattccaggatttgctaaattttaagctgtaacaaccaat

SEQ ID NO: 38888 - DNA, 357 bp, Oryza sativa
  Clone ID: uC-osroM202007h01a1
ggggggtggaatcgagtagcaatactttcaccccaaaatacagtttagcgacaatatcttagaaaagccgcttgctttgccgccatggctggcaagctgagcagagcagctaacacaaagaacacgagatcactataaaccaaacggcaacgaacgaagaaaatacagggtcttttttgtctgaagatacacgaagcgggtcgttttcttttatttttaggctcctctcctcctcgatgatgggtgtatggcaatggcaatggcgatgggatcttggcttagttgatgggaaggggctcgccgttccacttcttgaggcagtcgagcatgggggcgatgagcttgccctggctgatg

SEQ ID NO: 38889 - DNA, 325 bp, Oryza sativa
  Clone ID: uC-osroM202007h02a1
ccaggggctattactctccttccctctcctctcctctcctctctcgccatctctctctcctccgatctgcgcagccagccggagccaccgccgcctctctgtcgccgcctcgcccgcgggggctccggcgaacgggccgcccgcctcgacctcccctccttcccgtcgccgagctagcctctccacgctgcgcggggccgcctccggcgagcaggctgggcctcgggcctcggggcctcattccaccgccctgcgccttttgggttcgatcgggcttgaaagtgaaggtatggacttcggtgattctagacgcaagcctaatggc

SEQ ID NO: 38890 - DNA, 395 bp, Oryza sativa
  Clone ID: uC-osroM202007h02b1
gctggtcgctctcctgttctctgagggaatcctagaacaacgttctggggtggacatgtgagaaaggactccaggatagaacaccaggagcgggggctcagagctcggattcgaatccggactccctgggttggatgacctagatcgcactcgctggctgacgaagaatgaggatgcactgtgacctatgagggacactgtacttgttggtatgtgcttggattcagcgccatggaccctcatacatgagaccacgtctactttgcctacatgcacgctgcctatgggcaatcagaggctgctgcagcggcggaagcagagtaagcaacatctccaggggaaaagcagttgcggtatgatcctaactccagactacagggcccattgtttctgtc

SEQ ID NO: 38891 - DNA, 389 bp, Oryza sativa
  Clone ID: uC-osroM202007h03a1
aagggtggaatcgagtagcaatactttcaccccaaaatacagtttagcgacaatattttaaaaaagccgtttgctttgccgccatggctggcaagctgagcagagcagctaacacaaagaacacgagatcactataaaccaaacggcaacgaacgaagaaaatacagggtcttttttggctgaagatacacgaagcggttcggtttcttttatttttaggcttctctcctccttgatgatgggtgtatggcaatggcaatggcgatgggatcttggcttagttgatgggaaggggcttgacgttccactccttgggggaaacgcggatggggtcgatgagcttggcttgggggacagccgggaaccccttggtggaattttatgccggg

SEQ ID NO: 38892 - DNA, 391 bp, Oryza sativa
  Clone ID: uC-osroM202007h03b1
tcccggggcgacccacacgcgcgtttctcctccggctcttcttgagtgtcacaggggtgtcttgtagtagggccggcgccaccaccagagcaagggggggcagcgggccgatcaacacggaggacccgctcaactggggcgcggcggcggccgagatggtcggcagccacctctactaggtgaagcacatggtggcgcatttccgtgagccgctggtcaagatccagggggccaccctccgcatcgggcatgtgtgcggcgtcgcccatgccaaggacgccgtcaggcgtggcgaccagctcgacgaggagggccgcccccgggtcaaggccagcagcgagtggatcctcaactgcatcggccacagcggagacatctacagcggcaccac

SEQ ID NO: 38893 - DNA, 82 bp, Oryza sativa
  Clone ID: uC-osroM202007h04a1
attcattccatctaaggctatactacagagtctgatgagaaggggaaatagttcatttgacggaactaaacaaaagttgaac

SEQ ID NO: 38894 - DNA, 326 bp, Oryza sativa
  Clone ID: uC-osroM202007h04b1
accacgcgcgttttttttttggctagcaaagtcttttgcttgttgttcattttaaatatcttgcagggctttactgcccccccacttttccttgctttgtcacgcacaccaaagctcctgccttacccaatctccgttcgccttccctgacccccgttgtagtggcatcagctggctgctctcctgtcgcgtttcctctgctgaattgggacgatcttggcagctcgtaaatccgggtggaatggataagatctgtggagaatagcatgagatctttgatatgaacttcagccctcccaaccagtttccgtcggggacggagccgt

SEQ ID NO: 38895 - DNA, 364 bp, Oryza sativa
  Clone ID: uC-osroM202007h05a1
gctgtgattgtcctttgggatttgattaatgggagcagcccaacattaccaacctgcataattcagaaggaaggggggtaattctcaattctgaccaactacccagccttattttgaatattgtacatgtatgcaaaactataacccaaaagctaagattttgtaaatcatatgcacaagcactggatgaaaaaacgactgatctgagcagctcattcttcgtcctcagtctcctcatcgtcgtcgctgctagcagctctgtacctcgccccgtccccaacattatctccctcttcctcagtctcctcgctatcgtcctcgtacaggacattccttggccactggtgctcttcgacaacactaa

SEQ ID NO: 38896 - DNA, 494 bp, Oryza sativa
  Clone ID: uC-osroM202007h05b1
tttcaccatcccagccgtcctcctcctcctccggcaagcttctaaaccctagccgcaacgcaaaccctccactcctcctctccccttagcccccccctaacgccgccgcaaattaaccgacgtcgacgatgatgcagactgccgggcgccgccgccaccgatgggtcaaggagtgggttccgcaggatctggtcgtcgccggtggcccatgcgcgctctacaaatgggtgcgagaggataggttgtcagctctcaaatccagggacaaggaacaagaagcagaactggcaaaacctgaaccaaccaccgaggttctcttcctgtgcagctatgagggctgcgggaaaacttttgttgatgcaggggctcttaggaaacatgctcatgttcacggggagaggcagtatgcgtgtcactatgccggttgcgacaagaaatttttagacagctctaagctgaagaggcattttcttattcatacaggagagaagaac

SEQ ID NO: 38897 - DNA, 489 bp, Oryza sativa
  unsure (1)..(489): unsure at all n locations
  Clone ID: uC-osroM202007h06a1
tttttggggcaaagtaggagtacggcaatccatcaaaagttatatagtttatcatataggcgcgtacagatgagacaaatattttgtctcttaagtgtaaacagctatagggcagtcgacataggcacacgaacagttggaacgagataaagatcattcttttttcgaatagttgcacccaactcctccatcatgtccaccttggtcggcgagatcccatcaggaagctcccaatcaaagtgatagagaagcgaggctagaacgagctccatgattgcttctgcaaatgccataccagggcacatccttcgcccagctccaaacggtataaattcaaaatctgttcctttgaagtctatatgtccatcctcaaatcgctcgggtctaaatgtntnagcgtcctcccaatacttagggtctctaccgattgcccacacgttaacaagcatagtagtacctatggggatatcgtaccccatgaccttacat

SEQ ID NO: 38898 - DNA, 322 bp, Oryza sativa
  Clone ID: uC-osroM202007h07a1
ttttgggttttttttttaccaggggggaatttaattatatttctccactggccctgccttatcataatgaagaacaggttaatcggataaaccagtccacgagggatggtgtgataatttcttccactaacatttaactgcatcactgatttaatcatacggaggttgctgatgatctgacgacgactgagcgatcgatggtagtacgaaaattttcatttctgcacatccatttcagggcctaattaacaaacggcaacacaatgcaactatatgcaatgcaagcttcgtcaggctccggggactgggactttggccttcg

SEQ ID NO: 38899 - DNA, 505 bp, Oryza sativa
  Clone ID: uC-osroM202007h07b1
ttctccttctccctcccctgttcttggagtcctcgtcagagaacttctgcggtggtctctgagttcgcactccaggttagaattctggtgcggcggctcgagctcgggttcgaattcggatttcctgggttggctgatcttgatcgcactcgcgggaagaagaagaattaggaagcagagtgatctctgatggtcacgggccgagaagggaagagataggagttgctgtcatggagcccgcgacggagaccacggcgacttcgccggctgcggctgccgctgcgcagccggaggcggaggcggaggcggaggcggagtcggcggcgacgccggtggcagtggcggcggcggcggcggcaacctatcagccgccagcgccggtggttccagtcgccgtggcaggtgcggcggcggtgagagggaacgggaagaggaagagggggaggccgaggtagtacggtccggacggtagcctgctcctgccgctgtaggcgaccccgatctc

SEQ ID NO: 38900 - DNA, 236 bp, Oryza sativa
  Clone ID: uC-osroM202007h08a1
tttttgtgcacttaaactgggggggggaaaccatctggtcactttatacaagccgtacatcagctaaaagaagttcacgatgcctcaagggtcaactctatgtcgccggaaaacccgggggggctccaaaaacaaattacgaccgcctacatgagacacaaattaaaattcgtagagattagtgggcccacttactattaaagttaacatttatttggtagagggccccccccccc

SEQ ID NO: 38901 - DNA, 488 bp, Oryza sativa
  Clone ID: uC-osroM202007h08b1
cagcggtgtagagagagagacacagggagagttagagagagagctggagcaactaacaggtcgaggagggtctgcggccatggcgatcctgtctgatgtgtccaccgaggcgctgatcccgatcgtcgccatcatcggtatcgtggttctccatcgcgcagtggttgctggtcgcccgggtcaagctggcgccagtgcagccgatagcgttgaggagcaaggacgggtacggcgactcgctgctcgaggaggaggaagggctgaacgaccacatcgtattgggcaggtgtcttcgtgatacagaacgccatcgctgaatgagcaacatcgttgcttttcaccgaataccaatacgttggcgtcttcatgttgatattcgcgtgagtgatcttcctattgctcggctccgtcgaggaattgagcacaaatacccacccctgcacatacagcatggtcaaggagtgtaatcctgctctgttcaatgccct

SEQ ID NO: 38902 - DNA, 497 bp, Oryza sativa
  Clone ID: uC-osroM202007h09a1
tttgtggttttttagttccccgagggaatacaagcagtacccaggcaaatatatttgtggtaacaaagtttttaaacatcttcgctaaaaaagaaagctcttaaagacttaaacatttggatagatcgagtttcatgacggactaatccggtttaatttgaagcagcaatcagctccagcctccagacagtgtcaagactgtcagttaccatactcaagctgcaatttgctccaccaggttttcaccggactctgccacggtattaccctcagatggcttctccacaattgaagccttggcaacatcatctgcattcttgatgtcttccaggatgcttgagctccactcagaaagctgcttcacacttggcttaataaggcttaggacaggggggcccttggggatgtcttatgatgacagggtcctcaaaggcagcggccagctcctcggaaggcactttgagccaatccttcttttcaatgaaatgcactgattt

SEQ ID NO: 38903 - DNA, 488 bp, Oryza sativa
  Clone ID: uC-osroM202007h10a1
tttttgttggggaaaggcattccaagaacttgtacatgtagcaaacaggttaacgaatagtaatacataccagcaaaggctatactacagagtctgatgagaaggggaaatagtacagctgagggaactaatcaaaagttgaactccacttactccacagaagcaaaagatcctgcctgaaggatggacgttatataattactcctcgctacaaacacaatacattatatagccacaaatcaatggaaacatcagaaactggcctctctttatctaatataccataaggttaaagatcatggggggttcggacccggatggggcccgaaatgggggggggtgcattttccttagcagctgctacattcccgggggaagctgtcttggcagagaccctcttgccatcctttcctccagaccttccgttctggtgaccgctgaccgaaagtctcctattcggaggagtgccattagcactgccatttgat

SEQ ID NO: 38904 - DNA, 431 bp, Oryza sativa
  Clone ID: uC-osroM202007h11a1
acgtcttggaccctatttagcggccccccctttttttttttggtgctataagctctgggggtactataaacaatgaacttatcaatttaatcatcctaaaccccaaatataaaaagggggatttgaggaattattactagctgcccaaaataatttggaatatatatcatcaatacaatgctagaactaagattcttttattctttcctaaatatgatcatgtggtatgggcaaagatgcctgcgcatccagacactcattctgatggactgaccgtgctgagactacgacatgttaacagagtttggccttaacgctccctgaacagactcaatgtctgactgagtacgccatgttcacgtccacttcagcacattcctagcactctgctgcttttctgcagcactcttcagggggggggcatcaatttg

SEQ ID NO: 38905 - DNA, 354 bp, Oryza sativa
  Clone ID: uC-osroM202007h12a1
tttttgttaatttaaataaagtgtgttaagcaagagcagaattaggggataaaccccattacataaccaaggataaaagctgaaagcaaaagagccacccctgagaagggagggttaactgaactacgaaatcaatcttcctgaaataacctaatagcagaaaaaggagcaagtcgatagggatctgcggcgaagccgcgacgactggtaccctgggcctcaaaagatgtgcactccgcttgacaaaccgttaatccccatcagctgccttcacggaaacggcacaagaccgaggtttgttgctgagccgtagatttttggagtgtgcataactggactttagtgaaggtttcc

SEQ ID NO: 38906 - DNA, 302 bp, Oryza sativa
  Clone ID: uC-osroM202008a01b1
gaacaaattcatcaattttatcccccaatcaccaagaatcaacttacagtaatgttgtcatcttctttttacatgagagtttctccaaaatttcttctttttttttcttttttgaaatgtaaaagaaaatatcagaaaagaatagtaggaaagaaagaatgaacacatgtgtacgctccggtgatcggcgaggcgagccaatgcatctcggagctccggggagaaggatcagttcgccggcggcggcgtcttgggcgtcttcggcggagcgccggcgagcccctgctcgatgtcgccgccgc

SEQ ID NO: 38907 - DNA, 531 bp, Oryza sativa
  unsure (1)..(531): unsure at all n locations
  Clone ID: uC-osroM202008a02a1
ggcgccgncaacgctctggcggctgatccgcctagaaagcggtcgccaccatgcgcacgcctcctcctcctccaaccgcctattgcccactctcctccgtcctcctcgcgacggtttccgcggcggccgcctcatcgcctcctcctcctcctcctcctctcagatggcggcgcctgccgatgcaccgggcggatccgcggacgcgttcgaggtgatccgcgctcaccaggaaaaagctgctcgacttcctccggttgaagaaatacggaccattctggaccaaagtgttaggggtgtccttgccacccattctcagggtcatgttggctatccgtctggttcaatggttgattttgcatgtgatcaggatggttcccccatattagcagttagtagtttagcaattcactcaaagaatctctctgaaaatcctaaatgctcgcttctggttgccaaagaccctggggacagaacagatactgtgaatactgtatatggtgatgccacacctgtttcagaccaagaaaaaga

SEQ ID NO: 38908 - DNA, 305 bp, Oryza sativa
  Clone ID: uC-osroM202008a02b1
atgagagatgatggtagctgcatctgcagacttccaaagttccaataagacttaagacaagtaagaaatgtacacacggtggagcgttcagtgtaaataatatacaagtagattggcatctgttcggtgttaagctgtggcattgtgatatatcatgtgtaaaaacatgacatttcctagatcagaaaaaactcatcgaaaaggacatctttatttcatttacaaggacaaagacgtccctttctagaacaggacattcattcagcagaagacgatgaggcttttgcagcttggagcattttcac

SEQ ID NO: 38909 - DNA, 308 bp, Oryza sativa
  Clone ID: uC-osroM202008a03b1
aaaatcagaagaggcatattgcatataattaagttaatttcagtgacaatattacaacagtaaacttctcatgcagaacaaatgctccggccacacagccacttctccgctcatctacaaatttaacactgtttcacaccatgcatgacaaaaaagacacaaaagcttaaattcttgtgttttcctcctcttgcatacatacatacatacatgtacacccataatttaatcaccggttacgttcaaacatacatacacaccaataccgtaaatatcctttggttttattacaccgaattaacccacca

SEQ ID NO: 38910 - DNA, 413 bp, Oryza sativa
  unsure (1)..(413): unsure at all n locations
  Clone ID: uC-osroM202008a05a1
ggggtttctaaaaacagggggggattataangttctcaagagcgaagggcagagcacaagaatgctcatagcagtacaagacttaggttggatcatatgcagcataacaacacaatcctgattgcttgaacattcaacatccaggacacacataataacacaaatccttaaacgggcaaccaactgggcgcaccttagcttattatgaggaccatggacgacaaacctgtgcctagaacaactaccttaaggaggaggcttcatcagtgaagccaccttctgggaagacgggcttgccatcaggtcagtccaccaggccttcacatgcgggtatgcgtccaacacggatgcttggggagtagcccccaagcatacagtgccaggcacatggcttaggtccgcgcactgatgta

SEQ ID NO: 38911 - DNA, 462 bp, Oryza sativa
  Clone ID: uC-osroM202008a06a1
aaataatgggggttcatcaattcagttactaagaaaatagggggtcttttccaatggacaaacagatgaaatgtgcaggctccaccaagctagctacacacctccagctagccttaaacttcaatataatataagggatcaagcaagcaaacgaacaaacaaaagaaattataatattggattagattaactaggtcactactaggaaaccctagctatttttgcgttgatgcgacagctcaagggctcatttctccctccttaaaacatcggaaatgggtcttcatgtcgctggagctaagggcccctttcaatctcttcttagtttagcagagagacgaatccataaccctaaaaaaaataggagaaaaaacacgcaaaaaaaagggggaaaaaacaaagcaggtgaatctctcaagtgcaatggcctgatgcagagcttttgtgctaagtatgaaaaat

SEQ ID NO: 38912 - DNA, 422 bp, Oryza sativa
  Clone ID: uC-osroM202008a07a1
ctggggggaaatcaggggggcaaactggagtccattgggaatcaccaaaaccattttcacacactaattattggccagacacttggatcactaatgatgcatccgccgattgggaatcaaacgatcgaattaatcaggataaagcctttattattcataaaaaatcatgaaaaggccacccctaaaataaaattttttaagagctagggactaaaataatatttggggggggggattacaatggcaataaatatcattatttttgggaataataacacgtaacgacttttacctcggaaccccaaacaagtagcccaccccatgagagcaacctactggtacccttttggcctttacgggggtcggggtgcccggcccaccaggccccgggttttccccccccgccccggtcaaaacccccc

SEQ ID NO: 38913 - DNA, 330 bp, Oryza sativa
  Clone ID: uC-osroM202008a08b1
catcctccctcctcttttttttcccggatcatctctttcagccgatgggagtcggatcttctccaccccgcgcgcgccatgggcaagaagcacgccgtcgccggcagcggtggcgggtggctcgccgtcgtctggaaggtttccgcccctccaaggacgccgccgacaagaagggtggcggcggcggcgatagggaggaggaggcggttgcggaggctgcgcctgaggttcttctgctggagcatttcccggtgggcggtacgttcctcgtcggttgaggggacgggcaatgatcagggtggcacggtggtggggaaaggggagggtgag

SEQ ID NO: 38914 - DNA, 520 bp, Oryza sativa
  Clone ID: uC-osroM202008a09a1
tttttggggctttagagtcaggggcacaccacaccacaccaacacagagcacccaagcacaccactccctcatggtcagtacacgtacggcacgatccgccacggcaccaggctgcagtacttgtcccagtccgccccgtacttcagccggcacgccgcctcatcccgccgctccctgtgcaccagcaggctggcaaagtaggcgctgtagaagtagggcaccacgctgccaaagccgcagggcaggcaccaggccaggcccatgagccagtcccccaggtagttgatgtggcgggccatgccccagtagccgctaatcagcagccgcgtgccccgcacagtgggcatgctctgcaggtgcgccacagaggggtggcccgggtcccgcctgaacgcgtccttctgcccgtttgccccccggaacagcctgtagcccagcagctggacccctatgacacccaccagccccagccctgacagcttctgttgcgggtggtctgccagtagcgagcctgggtgc

SEQ ID NO: 38915 - DNA, 464 bp, Oryza sativa
  Clone ID: uC-osroM202008a10a1
tttggtgtttttttaattttgggggttttttttttttttttgaagatccggggagttttcaatttcattcacaagcctgccaaaatggagcttatagctcagtttacatgcagatgctttcggaggtaaagaggccaaacttggtttttagccccccaaaaccaaaacccaacacatggcaaactagcaattgcatcatcgcactcaatcaggtcatcgttgccagtctactaacttgggcaacgcctatgtgaaggcccaagtagtgaagcttacaccaagaataactagctggagctcacatagggctccaaaatgaggcctggtaactcaagggttcatcatcggggggtacccttcacacggatcattttcaacaggttactggaagctggactcccagaggccagagcagcaagatgcaaaacatagggctctggtggctaattaggtagctacatatt

SEQ ID NO: 38916 - DNA, 351 bp, Oryza sativa
  Clone ID: uC-osroM202008a10b1
tcgcgtttccgccggcccactcgctcactgcgccgccgctcatcggcgcgacgctccggcggccggcgctcgcgggctccgagccggtcgccgcctccctctgctctcctctccgtcgccctctcctcggccgccccctccggtgctccaccgtcgccctccctcgctccggcagctcacgctcgggggctggccgccgtcgccctctccggcagggttcagaattgcatttggtacgatggaagagggcagcaactattatcttgtcaggaagggggagatggtagctgtttacaaatctttaaatgattgccaggctcaaatttgctcatcggtatctggtcctgctgc

SEQ ID NO: 38917 - DNA, 145 bp, Oryza sativa
  Clone ID: uC-osroM202008a12a1
ttgggggttttaaaaaaaggggtcactaaaacttaaggttaaataccaatcgcatatttcattgtgcgtcaactatgcggcctacatattgtttcaccaaaaaccattcctcattgatctggtgcttattggtttgtaatttaga

SEQ ID NO: 38918 - DNA, 503 bp, Oryza sativa
  Clone ID: uC-osroM202008b01a1
tttttggggcaaatatatgcacatgaactgcagatgaaaaccatctggtcactttatacaagccgtacatcagctaaaagaagttcacgatgcctcagggctcaggcagacagaaactgaaaacgacgcagcaagttaaaaacaaattacaaaacctacatgagacaaaattaaatcgtagagatagtgtcccactaccaccaaagcaacattatttgcagaggttcctttttttcagcccacatgatcccgtggtctagttattattcgaaaatctccgtccgtcctcaaattcgatcgaattttaaatctctctctcctagaagagcttgaatagaattcctccgtgcgtggcgaagaatggcgcgaacaccagcgactcgacggccatgagcttgatgaggatgttcagcgacgggcccgacgtgtccttgagcgggtcgccaatggtgtcgccgatcaccgccgccttgggggagtccgatcccttggccccagcgacc

SEQ ID NO: 38919 - DNA, 336 bp, Oryza sativa
  Clone ID: uC-osroM202008b01b1
cctgctctgttcaatgccctgttcagcaccgtctccttcctgcttggagccatcacctcagtggtttctggcttcctcgggatgaagattgcgacttacgcaaatgcgcggaccacccggaggcgaggaagggtgttggcaaggccttcatcaccgcgttccgttcgggagcggtgatgggattcttgctggcatcaaatgggcttctggtgctttacattgccataaacttgttcaagatgtactatggcgatgattgggagggtctctttgagtccatcactggctatggccttggtggatcctcaatggctctgtttggaagggtgggtggag

SEQ ID NO: 38920 - DNA, 514 bp, Oryza sativa
  Clone ID: uC-osroM202008b02a1
ggttacagaaaagcaacatggggagcccattggtatatatatatattctgccattgctccttgctgtaaacaaaaccgatcctcaaaaccattattggggctcttttacttaatgtacatgtcgaaactacaaacctactagccatcacctctattatatttatagccggtgatcatttacaatttcagcaagggaaggtgattcagagtcattgtatttactcggaactggggtgttccgtctggactggcgctttgtcgccacgagaacctgctccgcctctggttcgtcggagatggagaacttctcgtcgtcctcgtcgccttttgaacaccgggtggatgtaggcattcatcaggtatcctttgaggtcgaaccctggctctcttgcgcgttttagggtatccttccgcattgcattctgtaatggatattccacaaaagcaggctcatagcgattcttgcagtatttatagaaataaaaggttacaacagggagaacaaggagcaccg

SEQ ID NO: 38921 - DNA, 346 bp, Oryza sativa
  Clone ID: uC-osroM202008b02b1
catttattgctactattcaagatataggtgtctctgcagctatcaacatactgagtgccatcactttcctgctagcgtttgctttcctgcgactacagcccatcaacgatagggtttacttcccagtggtatctcaaaggtgcaagagagagtccaagtcatgggggtgcatttgtgcggaagtttgtcaatttggacatgcgatcatacttgaaggtcttaagttggatgcctgctgctctcaaaatgccagaggatgagttaattagccatgcaggccttgattcagctgtctatctgcggatcctacttaatagggcttaaaatatttgctccaatcacagtt

SEQ ID NO: 38922 - DNA, 500 bp, Oryza sativa
  Clone ID: uC-osroM202008b03a1
agcagatagaagtaatataacaagaacagtaattcatgtcaataaacgatccggagggacagaagcatgacacagaacaaattcatgtctgcccaaacttcacttattcataatttgtaagtatgaaaccacatgcaaattgatacacagctggagggtaaaggaaatcatagccagccccatagcactccatttttgtgaacaaagtctctactccagttttgcagttggcacaaatacaatattttcacgataaagatcgggtagcactctactgcctcaagctttgcaagatatattgcgcatacaggtccatggagtactgaatggcgtcacgagcagtgttggcaggcaagaatgcatcaacagcaacctccttgttctcattcttcttgtagtcttcaaagaagcgtttaatctcttggaggcggtgaggagacagctcactgatgtcattgtaatgacggtattcaggatcatcagcacatactgctattatc

SEQ ID NO: 38923 - DNA, 456 bp, Oryza sativa
  Clone ID: uC-osroM202008b04a1
tttttggggcgcttaaaggtaaaaggcatccgaaatatcaacaatcgcagaccagcatcaagtaatacagtacccaaaaaggttcccatagcacagacgaaaaaacaaagcgaagacataggaaccgggcggtggcgtacgaggcggtaatacggggataatgtaagacggaaacaccaagcacacaaaaccctgccctagaaccaccaagcaagagccaccttacatgtcgtcagcctcctgctgctcctcgtcctcgtactcgcccttctcatcggcggaggcattctgggactggtggtactcagagacaaggtcgttcatgttgctctctgcctcggtgaactccatctcgtccatgcctttggcagtgtaccagtgcaagaaagccttcctcctgaacatagcagtgaactgctcgctcaccctccggaacatcttctggatggatgttga

SEQ ID NO: 38924 - DNA, 525 bp, Oryza sativa
  Clone ID: uC-osroM202008b06a1
tttttgggggcgcaatatgagcacggctatataacttaataagcacattacagcacacacatggccaaggcagttatttgaatcagtctccaacatacttcaaatcatagaccacaccatacagcaaacatagtataaacattgtcatagagagtacagctgatagcagcttgtaatattctagcattactttggtagcatccctctacaaaacatagcagacatcaccagctcttcatcttggccatacacattcaacatggtttgctagtgacagaccacactgaccagaacatttcgtctcctcagtaggcaccagctgccatgagcagctcatcaaggctccagatgccctcgttgcttgccccgtcttgtgtagcatcattttgcagaaggttgtccattgattcatctgagctgctctcaacataaggtaatggcaaatacttcatctcgggatcgaaggtgggcatgttttgtgcgagattaggcatgccatttccctggggcacggcgataccatag

SEQ ID NO: 38925 - DNA, 446 bp, Oryza sativa
  Clone ID: uC-osroM202008b09a1
ttttgtgtttttttttttttttgggttttttttttttttggggggggaaggtcttacagcggttttacaagggtggtcgactgaacttaaaaagcccaagcagtttgtatctttaataattactaacaccgggtacacaaacaagcgaaactaaattaatcaagggggtacatacatacatacaacaaatcccaccggtttgattaacaacagtaacggggatgataatttaagctggaaacaacaaatcatgcacctggctgactggaaccccccacccttttttacacacactcccttacatgcaaacgatatgaccaagtccaaccaggccagcagcagcagagcagccatggccatctaaggtcagttgctggggttgctccggaaggagcccagcgccttgatggctgccgcccggaggatgtactggtgatacgccggcg

SEQ ID NO: 38926 - DNA, 341 bp, Oryza sativa
  Clone ID: uC-osroM202008b09b1
tatagctaagctagctcagagtgagtagcgtgttgagcttgctgaagggagcggcaatgtcgaaggaggtgagcgaggagccggagcacgtgcggcccaaggactacaccgacccgccgccggccgctgttcgacgtcggcgagctccggctgtggtccttctaccgggcgctcattgcggagttcatcgccacgctcctgttcctatacatcaccgtcgccaccgtcattgggtacaaggtgcagtcgtccgccgaccagtgcggcggcgtcggcaccctcggcatcgcctgggccttcggtggcatgatcttcatcctcgtctactgcaccgccggcat

SEQ ID NO: 38927 - DNA, 449 bp, Oryza sativa
  Clone ID: uC-osroM202008b10a1
ttttggggttttttttttttttaggcagccaaagagatcattgatattttaataagcatcatgcataaaccacgcaggttatcaagtcagttttaaggtccagcacaactcttgcacactagggactatgacacacaaagagcggcagcattacaaggtttgcgacaacataatagttattcagtattcactcatgcaccaacagaaacatcctgcatggtatcaaaagacccagcataggttacgcaaacattttggctttggttgctccaacactatgcttcagggcctaatagtagaacattattttttgccgcgcagctttgttccaagagccctttcaagcttcccgatgatctgttggttcggaatagctttacctggcttgtacttcctggatcacctggggctttttattggtcatctgggcaagctgtgcctgggtcatt

SEQ ID NO: 38928 - DNA, 161 bp, Oryza sativa
  Clone ID: uC-osroM202008b11b1
gggggggtttttttcttgctttgccggatcttctccgtgctgtgctgttgtctccttttttttcggacacaggccaacgttccggggaggcgggggagttgggagcagaggcggcggccgtggcgcggcgccgcgcccggggctggcggagcgaccccggg

SEQ ID NO: 38929 - DNA, 314 bp, Oryza sativa
  Clone ID: uC-osroM202008b12a1
ttttgggtgttttaaagaacgggggtataaacctgaaaaaaaaatttcaactgtggttttctcattgggtgaatcattgtacaaatgaacaaaaggtgagctaagaaatggtttcctttttctttttacagattttttttttctgacgagtaggactatcatacagcgctatggcagaggcttgatttccattgagattggctcgtctccaaccatgccaagaatctggagaccttgcctaagacgctgaggaagaccaggcctgctactaggctttacccctgcacagagactgcgccgtcctcaatggggac

SEQ ID NO: 38930 - DNA, 310 bp, Oryza sativa
  Clone ID: uC-osroM202008b12b1
tcggtcgttgtatgaccagatgctcgcgccgctggttggcgcttgacggtcggcgtggacggcgcacgacggcggcggtggcggcggagaagccgtggtgaggcagatactcaagtgcacgaggtggcgctggaggagacgacggacttcgtcacctgcccgtaccactactactgcgacagctcgtacccgggcgactaccacgccgccgtcggcgtgctcgtcgccgccttcgccgcgtactgcttcctctcgacgctcgcgttcacggtgctcgacctggcgaggagcggcggcggttgctgtggcg

SEQ ID NO: 38931 - DNA, 152 bp, Oryza sativa
  Clone ID: uC-osroM202008c01a1
ttttgtgtgaattaaaaagaatgggctgttcatactgaatcatatatcgagttaccaatggagtgtacatgaatgccaccatgtggcttctgtgagcgggaccacaaaagacacgaacttgcagttgagcctatgatagattgatagtgtta

SEQ ID NO: 38932 - DNA, 338 bp, Oryza sativa
  Clone ID: uC-osroM202008c01b1
gtccttggtccttacactctttttataggggcgtgggtcccacgtctcagggagagtgagagaagctttttttttctacatctgagacgttcgccggagatggcgtctgagctcacgtaccgcggcggcgcgggggccccgctccgcctccgacggcggtgagtactcccccaagccctccaagccgctctcctggttcacccgcgccgtccgttacgccgtcgccgagcaccgtcccgccttcgccctcgccgggatgctcctcgccgacggccttttcttcctatacgccccttccttcgacgccttattcttcggcgtcaccaccaccaccacca

SEQ ID NO: 38933 - DNA, 529 bp, Oryza sativa
  Clone ID: uC-osroM202008c02a1
tgtcggaaagaagggaaatctcccgtggctttgtctcctgccaagacgagtcgcggctgaacaggggaggggccgcgatctccatctggcgggcagagcaggggacgggaggggatcctgatataataccaagataatacacctgcttgtcaaatgatgatgggtttgctagcgtttgagagcaaccaagggctctggaatagtggatattattcccagctgtttgggattggaggagttatggtcactgtcgccattctttggttatcgacaggctactttggaggaattggtgctccttttgccccatatttttggccatatctaggacaacttccaaagaagaaggaacggaaaaggcctgtgagagtgtacatggatggatgctttgacctcatgcactatggccatgcaaatgcattacggcaggccaagttgttgggagatcaacttgtagtgggagttgttagtgatgaggagattgtggcgaacaagggtccacctgtgctttcaatggaagagaggttga

SEQ ID NO: 38934 - DNA, 313 bp, Oryza sativa
  Clone ID: uC-osroM202008c02b1
aaatgaaatagaccacggtcatcgcacagctcattgtctcataagtgtcgtttggtacaattagggagtatgcaactctaatcactccacacatgttaagtaataacatacaagtatacaacaatggtttgctgagcacctgttcagctatgaatattgtcccctccagggacaacaaaagtaaaaagaaaaaaagaatcatgtatgtgaattctggctgttaagtggattttcctgccaaaagggcgacggcagatttttaatttagttccttgagctggttcccatgctgaatggccatcaattataactg

SEQ ID NO: 38935 - DNA, 490 bp, Oryza sativa
  Clone ID: uC-osroM202008c04a1
tcctctattttgggcgccctctgtttattcctgtgggttttttgtatgtgtggcccatggaccaaaattgggttttctttaaatgttatggaccattggacaaaagttacagtttagacccgtgttgtaccatggcctgtataaatgggaggcgggatgccctcttatcccgaattgaaccatgctaattaagagaggaaaaaataacgtgatttaagggacaagcaatgagcattttacccttaccaacatggccatgtcacaatcctaaccaagtgaagtgaccaccaggtgcgaggaccccaaaaaaacatcgggttttcctagtttatttacgggcctaaaaccaagtgaccataaccacatgaggaagcatttgatcacaggagttcttagtttgtcgacaacaaatttatgccgatggttcggcccaaccgtcaggtttgtttgtgtccatttgctcggaagaaggctcctgatcctgggcacc

SEQ ID NO: 38936 - DNA, 438 bp, Oryza sativa
  Clone ID: uC-osroM202008c05a1
gtgggttcagccaactccaacatctcaaaactatagctgcctttgcaccaaaatcttaacatttatacagtaacaggcccaacaacgaattggcaggtaaattcctcctaaatttgccatcgaaggcataagtttttaagtaccctctgtgattagcacattaaaaaaaagcatgtctggctttgatttatttagtttgggtctacacgatgatgctatcatggggacaaaaaaaaagaaggcctggggaaaatccatcaggcttgtatagaactccccatctgttaaatggtgaatggcaattcagtcgcggtacgctgccatgaagcccttatggaatgccttgaagcgggagatgatcgcggggaacttttccttctggggaggattgtgcatttgatgggccatgtgccaggaacttggccaaatccagatcca

SEQ ID NO: 38937 - DNA, 469 bp, Oryza sativa
  Clone ID: uC-osroM202008c06a1
ggggatacaggaaaagaatgcgataattaaccccaaaccaaaataacaaaaaaaaaaaaggcaatgcatgcagccctttgtgtcactgcagcgtgggccccacctccctcttgatcctccccttttgacagcgccactccacctaattatttcggtcccttggattctcgatcgcttccttcccacgccaaaaaaagccacacgtctcactgatccctgggccccacctcctccatcccctagtcctagctggcagttgactagccatccatccagaccgtccgatcgatcgatctccgcacgaatctcaaagatcgatcgatcgatcgaccgggcacgaatctcaaagatcgccggagcttagttgggcttccggcagttggagcggacctcgccgttggagccggtgagcgggctgatgttgcccatcttgacgacggcggtgacgaaatctcgggagaaggcgggg

SEQ ID NO: 38938 - DNA, 418 bp, Oryza sativa
  Clone ID: uC-osroM202008c07a1
tttgtggggtttttttaatgtttgggtttttttatttttttttttttcggcaaatttttttcttgattcaggacagggtcgcaccaaaacacttgcccaaacactgaaacacaatctaaacctgaaatgaaatttaaacaaccgcaagaagaaaaaacttcttttccagaaacttttattttcgcgaaaagcagcagttagcaacaccgatcgatcacaaatttattggtgaaatttttgaagaacaccacatcagcttctaccttaattaggtggttgccacttgatccccataatccatgggggggaggtcaagcttagggtgggcgttccttttgttgacaaccctgcagttgagcctgacctcgccctgggtggtcccggttttaaccttgaggccgcccattttaaccatggc

SEQ ID NO: 38939 - DNA, 419 bp, Oryza sativa
  Clone ID: uC-osroM202008c08a1
ttttgggggatggcaaatcctatgaatacaccataggaaaaactgctcatttgaagctataggattatacatagccaagaagcaacgtttttggcctagtcaaaatctggcaaaacatgccatagtatcattgacgacgagcacaagctgcttgtctaatcgtccagctcaatgatcttcacaaccgaggaatctcccaccttctggcagacaacaacgcgatcatgcgactttatcacaccagaaactttaccgtggtcaagagcaaccttcaaaacggattcatttgtagcgttggttgattcagctggatgcctcggatcagcaagcattggaaagaggcctttaactatgagcgattgtcttgcttcaaatgcgccagggaaactccacctcagttgatttggttttagacgagg

SEQ ID NO: 38940 - DNA, 412 bp, Oryza sativa
  Clone ID: uC-osroM202008c10a1
gaactgcgccatgagtggccaaaagcactaatcaaatgttaatctctggcacttcatcatttttcggttaaaaccgttaccaccaaagtgccagaatttgcatcaaaaagacagtgatgctctacttctgttgacaatcttcgtcccccccaaatcagacgcagctgttttcatctcttcttttgagggggtctagtactgcatgagcaactacaggatgcatacaaactttgatcgccgccaaagttgttgtttacaatctttgaattgttttggatctacccaaattacattctttcagggtgatgagttccatggggccagtctttttttcaccgggctttttttcacatcctggccttttccaggatgaacttgccttccttgaacttttcgctcttttcgtatgctt

SEQ ID NO: 38941 - DNA, 342 bp, Oryza sativa
  Clone ID: uC-osroM202008c10b1
tttgttgtgctgctcccgcggcacggcgacgggggaggccccttgtaggcggtgctcaagtgccgccggtgccgcgttgactccgccttcggcgacgccattctctcacgggacttccgcggtcgtcggccgcgcctaccttttcgaccacgtggtgaatatatccttagggcctaatgaggatcggtatctgaatgaccggactgcatacggtgaaagatatctactgtagctgttgccagcaaattctcggctggagatatgagaaagcatacgaagagagcgagaagtacaaggaaggcaagttcattctgaagaaggccaggatgtggaacgaagccc

SEQ ID NO: 38942 - DNA, 391 bp, Oryza sativa
  Clone ID: uC-osroM202008c11a1
ttttggggtagcacatgtcacattcaattttattagctctaactcacataaaaatgcaatttatttgaacacgaataatgtccaaaattagctcttgaaacgaagatcactaccatcactttgcaacttcgcattcatcttccatcatcgataatttctctgttaatctctagggaaggtgtgagaggggatgtctccctctgcccactgagctcatcggcagtagacccggagtagccggtggtgacatggctgctattccttcccctgagctgcaactcaatgatgtagttcggctttggcaccacaattactcaccggaatgtcttcggtgagcattggccccacccttgacattggtggtctttggtgtggtgagccttgggtgcaa

SEQ ID NO: 38943 - DNA, 500 bp, Oryza sativa
  Clone ID: uC-osroM202008c12a1
tttggggtttattaagagtggatgtgtatagggtcggaagtcttgccatccgaatgtttgccccaaaaatgttggggtaaaaaaaagagaagagaaaataggataacctgaaacggagctatgaatatttcgtttcattctatagtttacaactgtttattttactcatcatgctacataaattctgtgtgattcatggcaaaaagaatttcttttatacctacctcaaacagaaggctaaataggcaacaatggttttctctcatcggttgcagtaagatggcttgcatcatcagcagcgccagcagtcatatttacaaaagaagagtcggatgacctatgattctgtgcatcttccggttttaatgctccagctggtttgtcatctttgacctttgccagtggggagaaaaactggtgcatcgaaataaacactattgagatgcctaggagaaagttaactgtcaaggtatgtccaaaaatgcaccatatgctagacc

SEQ ID NO: 38944 - DNA, 396 bp, Oryza sativa
  Clone ID: uC-osroM202008d01a1
tttttggggacttgtatatttggggagtaatatattacatatgaacctatcatgtcaatttttttaaaaattctccataattatttagatgacatgtatgaaacgggtgaatgtccaacgagggtttaaaacggtttcccgtcaacacctgatgcaggagttcactcaatcaaacaagaacaacaagtggcataaaattactcacactgactatatccgatttcttagccggacccacaggccgcccttgatgttcatcggtgccgtcatgttgtacgccggcggcgattccatggtcggagccggcgccgccacctcgacgctgaaccttcgttgaatggctggcggcaccgtctttattggcacgtacgccatcttcttcccgaggcacgccct

SEQ ID NO: 38945 - DNA, 521 bp, Oryza sativa
  Clone ID: uC-osroM202008d02a1
aagtggctgatgctgcgcgggccacagagcttcatgaaagtaatggtaataatgatacatcgaactttcaagaagaaaccacacaatctgacacctatcttggcgatgctatgctaaatgaaaatggcagtagggattaccaacttaacaatagtggtgctgatgatgatgaaattccaaactctccagcgtttgagatggaagatgtcgacaccagagcgttacatgagacttctcacgatgaaaagtatgaggcagaggatgatcaaatgaatggtaggaattccagtccttgtgatgaacatgatgaggacaactgcaactctgtgattgagccatcttatttagatgtgatggagcatgaaaatccctggtaccaaaaatggcatgttgacaccaagcaatcaatgggattttcctcctgaaagttttgtaagattggaaaaagggacaccatcaccagacaggatggtcttacttccagttggagggctccttggactcattcacctaaggaactg

SEQ ID NO: 38946 - DNA, 63 bp, Oryza sativa
  Clone ID: uC-osroM202008d03a1
gaaaccggggaaggcccccttccgaaggctggaaccctattttttggccgccctttttttttt

SEQ ID NO: 38947 - DNA, 100 bp, Oryza sativa
  Clone ID: uC-osroM202008d04a1
tttttgggttcattaaaaggcgggtgattttcaaaaaaaaattcaatacatttatcctcgaacactatctctgattagcattatacaatttaaactcgga

SEQ ID NO: 38948 - DNA, 343 bp, Oryza sativa
  Clone ID: uC-osroM202008d04b1
tgtttttgctgtgggccgggcttagcaattggccagaaggtactgctggatataatgttcacatggctatatatgtgttaccttaataattactgatctatctggagatctaacatgtgtatatagagaccaatagatgcctagctgacattaactgtttgcgatagtttcattcaaacgatcgaactacaggcattgacgtagtacacaaatactgaaagagctagcttgtgcactattgtgaatcttgattaccatataagaactttagactgagaagaatttgtcctatgagtaaaattcaggtgagcgctggacccgaaatacaaactgtaagttaatg

SEQ ID NO: 38949 - DNA, 472 bp, Oryza sativa
  Clone ID: uC-osroM202008d05a1
tttttggaaagcaacaaaaatgctatcatttgctggtcactcttacagacttacacttccccagttttgcagtggtatccacaacagcgaaaggtttcttcacaagggaaaaaacaacacggtgcagttcaacagatggctttacagacaaaaatgcacactccctgttggctctcccaagatttgcaactggctggctggccatgaggtgcttcaacatcaactgccaccttcaggttagcggtgtcggcatgaagtgatatgtacagatggagatctcatctctagctttatacagctgctgctactatcagacttggtagaccattcccaccttcagtgtggaggcatgaggtatggtagcagctttaagatggtccgtgggtgtttctcctcaagaacttgtaaaagagtttatcacgattcgctttatgaactagacccttttttatccgacgcgtgggcgacccgg

SEQ ID NO: 38950 - DNA, 482 bp, Oryza sativa
  Clone ID: uC-osroM202008d08a1
gttagcaagcagcaaatgagcactcagaatccattcaatcaagaaaggcgtgctgtaccacaaaaatggtctgcactatataggaacaaacttcatgccccaggacaactaaggaaacaacagatttgcatcattgcggagctagcagaaacagctagcatgatttctgcacactcggagaactgaacactatcaattatgcaaatatggtacactacagaagacactcagattagctttcacaagagcctcttgtttataaaggaaaaaggaaaacctagaagcacttcatttcgtggtatgacgggcatcaaccaaactgcaacaaaacacccaacctacaaacactctgccctggcagctgatcggacacttcagttaccctacgtggcgtgctatggccaagagacctctatcttgtaatttggagacaggttaacagagtacctaaacttgagaggaaacaagtgcatctgcgtttt

SEQ ID NO: 38951 - DNA, 500 bp, Oryza sativa
  Clone ID: uC-osroM202008d09a1
ttttgggaattgaaaagcaaaggtttttcaaaaccagacacacaaactgatagatagaagcccacacggacagatcataggatagcagcagtaatcaagcattgccaaggcaccaggcaagaaccctgaacctctctagtactcgtcaccctcatcaccctcgtcaccatcgtcgaactcggagccgacctcctcgtagtccttctccagcgcggcgaggtcctcgcgggcctcggagaactccccctcctccatgccctcgccgacgtaccagtggacgaaggcgcgcttggagtacatgaggtcgaacttgatgtcgatgcgggagaacacctcgacgacgctggtggagttggagatcatgcacacggccctctgcaccttggccaggtctccccccgggacgacgctgggcggctggtagttgatgccgtacttgaaccccgtggggcaccagtccacgaactggatggtgcgcttcgtcttgatggtgggcaccg

SEQ ID NO: 38952 - DNA, 447 bp, Oryza sativa
  Clone ID: uC-osroM202008d10a1
gaaagcaacaaaaatgctatcatttgctggtcactcttacagacttacacttccccagtttcgcagtggtatccacaacagcgaaaggtttcttcacaagggaaaaaacaacacggagcagctcaacagaaggctttacagacaaaaatgcacactccctgttggctctcccaagatttgcaactggctggctggccatgaggtgctccaacatcaactgccaccttcaggttagcggtgtcggcatgaagtgatatgtacagatggagatctcatctctagctttatacagctgctgctactatcagacttggtagaccattcccacctccagtgtggaggcatgaggtatggtagcagcataagatggtccgcggctgtttctcctcaagaactcgtagaagaagtttatcaccattcgctttagaaactagacccgctcttctc

SEQ ID NO: 38953 - DNA, 467 bp, Oryza sativa
  Clone ID: uC-osroM202008d11a1
ggttagctggtcatcacagtacacttgtgttcaaaaacttcctacaacgatttctgtacacatgattgctgaagcttaagaatagtccgaaagacctcaaggacacgagatggattttcctccgttcatcagaaacccgaatttttcagtgttgacggcgttctgacgctgggacatggggataagtacactaatcaacacaggaatagctgagaagaaggttcagggggccacaaacaacagcaaactctctctatccaatgcgatttcttgtgagctgtgacatgccgagccaagcacgagacggtcagttcaggctcggcccaggtctgtcgtgtgaggccggctctgtgtcagatactacttgtgaaactgaaggctcgcatctgctgttgatcatgggattcttgggcatggctatctgtgaactgtatttggttagcattgagacaacctgattcatggta

SEQ ID NO: 38954 - DNA, 498 bp, Oryza sativa
  Clone ID: uC-osroM202008e01a1
gagacggcggagggggggaaggccgtgcaggcgctcaagtcggtgtacgcgcactgggtgcccgaggacaggatcatcaccaccaacctctggtccgccgagctctccaagctcgccgcgaacgcgttcctggcgcagaggatctcgtcggtgaacgccatctcggcgctctgcgaggccaccggcgcgaacgtcaccgaggtggcgtacgccgtcggcaaggactcgaggattggccccaaattcctcaacgccagcgttggattcggcggctcctgcttccagaaggacatcctgaatctggtgtacatctgcgaatgcaatggcctccccgaggttgcgaactactggaagcaggtgatcaagatcaacgactaccagaagagccggttcgtgaaccgggtggtgtcgtccatgttcaacacggtgtcgggcaagaagatcgccgtgctggggttcgcgttcaagaaggacaccggcgacacgagggagacgccg

SEQ ID NO: 38955 - DNA, 310 bp, Oryza sativa
  Clone ID: uC-osroM202008e01b1
caagttgaattcctgcagctcgaatcgaggttgagaatcgaatcgatcgattaaaattcacatgaatcttatcatgccacggcgggcatgccttgagccaggcgtcgagcggcttgccgatggagtagacgatgaagccgatctccctgagcttctccgggtcgacgacgttgcggccgtcgaagacgaacgccggcttctgcatgttgtcgtagatcttctggtagtcgagcgtcttgaactcgtcccactcggtgaggatgcagaggccatgggcgttcttggtggccttgtacgcgttccacaccac

SEQ ID NO: 38956 - DNA, 482 bp, Oryza sativa
  Clone ID: uC-osroM202008e04a1
actctagatgtataatcttgaacatttttttcccaaaaggagcaatcacgcaggcaaagtttcaagcttgaatttgaagcctgacaacaggggttagatgaattgcagaaaaggaaaagaagcaaaaacaaatttggggcgattttttctgacgcatttttatacaggttcatttttgcaacaaaaaatggcagaaatgcctgaggactttttcaccaatgcttttttctccaggctatcatattatattagaagaaataatgccgccattttttcgttgtcagcctatggaagagatgcttttaattccttcctgggtgccccaaatgactccacaccaaaacccttgacatatacatttgtaaagagctcaaaagtatcaggcataggacttttctttgcttttccaatggcatcatcgacttcttttctgaatactttctccatggccctgagcccaacaacattgttaggtcatgagc

SEQ ID NO: 38957 - DNA, 409 bp, Oryza sativa
  Clone ID: uC-osroM202008e06a1
atctgcatgccttgcaaactaatgagtcatcttttgaatcatcatcatggggtagttcatatacataaaaaaaaatttacagctcaaattattaccaaatgcattgatcgatcgatcaccaccaatattatgatacaggaaaagaatgcgatatttaaccccaaaccaaaataacaaaaaaaaaaaggcaatgcatgcagccctttgtgtcactgcaacgagggccccacctcccttttgatcctccccttttgacagagccactccacctaattatttcgggcccttggattttcgatcgcttccttcccacgccaaaaaaagccacacgtctaactgatccctgggccccacctcctcccatcccctagtcctagctggcagttgactagccattccatccaggacc

SEQ ID NO: 38958 - DNA, 526 bp, Oryza sativa
  Clone ID: uC-osroM202008e07a1
tttgggttaagaaaaagatgaggcccttcatatattaatgaccgaaggagtaacctccttctttttttcatcaaaccacgtcgaaataacactcatcctttttcagaacaaaagagcagctattataaacatatatatttgactgatgttacatttggtagaaacaaccacggaacagaaacaactggaggaaaacagattttgctacaaggccgtcactctaattttgaatgcaatcacttcaattcagcaaaaatcgctgaaacaaatggagtcagggtggcgttgtgttgcacatcaactgacagatacctcatttccttttggtttcgtatcgctcgtgcatacagtatgtgctgctttggttgttggtaacactgatcaagatatgtggggaaattggccccactttggaattggtttctgttggacaaaaggatttcggatttcctcacaatctgacggtcgatggcttcttcacaacaagtgttagtaacaagaatgcgcccaaagagatgatgagcgc

SEQ ID NO: 38959 - DNA, 490 bp, Oryza sativa
  Clone ID: uC-osroM202008e08a1
tttttgtgttgacatgagtattttattaatactattaagccctgggccgggatgtcacactaggtcccctagcggttttgactctggttttctccgacccggttttctccgacatgacagctaactcagcgtgggacccacacgtcagcctcttcttctcctctcctatccacctttcttcctctttcccctcctctctcaccccctctcttctctgtattatccgcgtcacgaagccggcgggatggagcggggcggcgatgggcggagtggggcgaccggcgacggcgaggcggagtggcggatgcgcaacgccgagagacccgcaggggtggccaacgggcgccatggccacaggcgccggcgcgagggacaccggcggcggggggcgcgcggaggcggcggcgccgtggagggcctcgagctcggtgaagaagcgctaggtcttgccgtcgccgtggccggcgcggccgtccttggtgctcctctt

SEQ ID NO: 38960 - DNA, 508 bp, Oryza sativa
  Clone ID: uC-osroM202008e09a1
ttttggggtgtttagagaacgaaggttcaacgcatatcaaatatgaaataataagacttgctgacacactcgagtaatgaccctctacacattgcaatagatatgaagacatgcatgtgttctcagatctcactcacaaaaaagcaccattcgttatcctaggccttcacgccaagcatataacagtgcaatatgaagatttaatctttcacctagaatttaaactgacgacggatactaaacggtacaaaagtaaacaataataaggtttcacataagccacattaggtcctaagctcattatttaagcaagtcagtgcccactttagtactgcccttcatagcctgggttgccatcaccatagctcttcttggttgccataaccaccggcaccaccaccatacccgccgtcactcttagttccctggaggtctttcattcgcgaagatcacgcggatactccgtcccttcagttccttaccgtccatggcatccatggcacttctt

SEQ ID NO: 38961 - DNA, 291 bp, Oryza sativa
  Clone ID: uC-osroM202008e09b1
tgctaagttagctttgccaatggcgatgatgccaggagtgcttatggatgccatggacggtaaggaacttgagggacggagtatccgcgtgaactttgcgaatgagagacctctagggaaccgaggggcggcgggtatggtggtggtggtggcgagaatggcaaccaaagaggctatggtgatggcaactgaggctatggagggcagtagctaagcgcgtactgacttggttaaaataatgggcttaggacctgatgtggcttatgtgaagccttattattgtttactttt

SEQ ID NO: 38962 - DNA, 532 bp, Oryza sativa
  Clone ID: uC-osroM202008e10a1
ggcgatgaccacgggggcgcggtcgacctgggctccggccaagggcggcaacgagcagggcggcacccgcatcttcgggccctcgcagaagtactcctcccgcgacctcgccgcccacaccaccctcaagcccaggaaagaaggacaacatacccaagaagagttacagaagaggaatctcagggacgaacttgaggagcgtgagaggaagcactactcgtcaaaggacaagtcctatgctgaggagagagataggcggaaaagcacaagcctactcctagaaggttcaaggagagaggctgaggataagatagttcctagagaaatcgatgcagatgattctgatgtggaacccagaagtgatgatgaaagtgatgaggatgatgacgacgatgatgacactgaagctctaatggcagagcttgaaagaatcaagaaagaaagagctggagaaaaccttagaaaggaacgcccacaagcagaagaggaggctaagatgaaggaagctgaactgatgcgggaaacccctgat

SEQ ID NO: 38963 - DNA, 251 bp, Oryza sativa
  Clone ID: uC-osroM202008e10b1
gaatgaaaacatttcataagcttagccaccaagctaataatccacaagcatagattctttccatttttaggggaaaaatgtgccatccagattaagcagatgttacaggtggggcacatatagaccttccactcaaatttcagaaacagaaacacagggatctcagacagagacaggcaggccgagaaggccagggaacaacgtacaacggcagcattacttaatggacctttgcagaaacttacggtgga

SEQ ID NO: 38964 - DNA, 431 bp, Oryza sativa
  Clone ID: uC-osroM202008e11a1
acaagagaatccatttatttagatttttctaggaaaaacatttgctctttgtttaaggcgactagcaatccattgttgtgtgacaatcttaaagttattggcaatgacaggatcactgaaaatagagtacataggtacaatttcataatgtacaggcaccatattatccttaatcgacgcagcaaaagtatcccaatccaaaataggtccatcagtcacagcagataaatcaaattgataatttcccaataatcctgtcttctgcatatacttatatgcggatggatcccattcacctccattcacttggatattcactactgtatttgctttcaccacatcactcactgctttggtggaatagcctcaatccgattttgcctccaaataatcctaggaaacttcaacttgattgttcattgaattgttcg

SEQ ID NO: 38965 - DNA, 474 bp, Oryza sativa
  Clone ID: uC-osroM202008e12a1
tttttgggtccattaaaatcggattattttcaaaaaaaattcgaatacatctttctcgaacaatatcaatattacattagctcattaatctcgaatcaacagctacaaacttacaacaaaaaaatgtattcatgcttgtccgtatcacatgataagtgttacattattaatccaaataataggctaaaattggattatttaggtgacaattaagcataagtagttcttgactcctcatcaatctcctcaagaaaagggtaatctgtatagccaacaacgggatcctgtgtataaaaggtagacctgtcatacctgttcaatggtgcgtcaagctcaaacctcctcggcaagtcagggttagccaagaagagccttccataggcgacgagatcggcatagccatcagccaccaccttgttcccttcctcccggtcatacccgccagcagcgatgaaagtgccattgaactgcttc

SEQ ID NO: 38966 - DNA, 525 bp, Oryza sativa
  Clone ID: uC-osroM202008f01a1
gtgtaaaagtgaagtactcgcctctggagagactatggctgtttattctgtcaaaagattttacaacaggagaaacagaaagaggtctcaaagtattatacatggctggccgtccagaagcaaataacgtgtgtataaatattacaacaacaaaggggctaatcctctgcagactgaagtcatcatcatcgcacatgattaaaaaaaatacaatgggacgcatcatctcttagcccgcgagatgggaaaccccctcagaaattgtactaatcgttccaaattcatcagcacacaccgttaattacttactacttgtatttatgtatttatgtatgtatatctcacaacggatacacgtcgaatctttattacttgtgtccttcaccggcagtcccctgatattcttcaacaagcagcagcagggaagcagtagcctcaggcgtcatccttgtctgcaaagatgtcaagaagggagagcgccttggcgacgctgagctccagcctgaacttggggccgtcgtagtg

SEQ ID NO: 38967 - DNA, 352 bp, Oryza sativa
  Clone ID: uC-osroM202008f01b1
ctttatcacacgagaaaacaagagaaaaaaagcagcagcggccatggagggatacgaccgctagttctaccagttcagcgaccagctgcggctgcagacggcgagcttctccggcctttccctcggcctccatctggtcctccccctccgaccgccgcaacgagccggccttcgacggcgagtaccaccacttttcctccccctcccccgccaagaacgccatcgccaacatcaacggcgtcgccggaaacctggatggcccgggcctcatcggctccggcaagctcgccttcggcgccaccaaggccgaccgctacaacagcgttaacctccccgtcgacaaacaaacaac

SEQ ID NO: 38968 - DNA, 543 bp, Oryza sativa
  Clone ID: uC-osroM202008f02a1
gccgccgagatggcgaaaaccctcaccgtcgacacggacgacgccttcgcggggctcctcgagctcgccgcggacgacgacgcggagggcctgcgccgcgcgctggagcgcgccccgcccgccgccgcggacgaggcgggcctctggtacggccgccgcaaggtcctcgagcaccgcacgccgctgatggtcgcggccacctatggcagcctcgcggtgcttcgcctgctgctgtccctcccgtccgtcgatgtcaatcgccgctgtggctccgacggcaccaccgccctccactgtgcggcgtctggtggctcgccgtcttgtgtggaggccgtcaagctgctgcttgctgctggggctgatgctgatgccacggatgcttccggatatcgtccagctgatgtgatctctgttcctccaaagatgtttgacgccaagattgccctccaagatctttttggatgcccaaaggctgggcatggcgttctccgggtggtgacaagggccgcaaactctatgttgtcacctgtatcatcccctaca

SEQ ID NO: 38969 - DNA, 302 bp, Oryza sativa
  Clone ID: uC-osroM202008f02b1
gcgattgcaaaacaatagcaatgtaagttcaatgacaatattacattattacaaatccaaggattatacaggcctcaagactgaccaaaacaaggccatagtatgatcctcgacaaatggtgaaagggagaaaaagaatactttgggacttgatataccactatagcatgcctggtaaccaaccttatacccatcagtacatcaagtatcaatatcataataaacaaaataaacaccgctaaggtaaagaaaagaattccgaaacaccaaacgagtcttcttttttaacggggttaattaac

SEQ ID NO: 38970 - DNA, 454 bp, Oryza sativa
  Clone ID: uC-osroM202008f03a1
gtaaaaaagcatatatagaatttactttagacttgtattgtacataccaaagggatccctaccgtatacgcgtaatatactcgtactgtatatgtctaccatgtaaaatgtaaaatactatgtaattacatctggtcgccacataccgctgcgctagctcattctacaccgccgtcgtccgagctcacggccgccgctgttacctgtctgacttgtctccggccacacaataaaactgagccggtgaccttaacgcgcgcggccgtgccactcaccacgaggctagtcagaactaccatacagctcatatgctaacacaagaacagaatgggaacaaaacaataagcaagagaagcacggacgggagcctactactactccagccgcagcatgcggcggaggtcgcgcgtcgcggcgtcatcgacggcggatgtgacggcgggctttctgaacg

SEQ ID NO: 38971 - DNA, 342 bp, Oryza sativa
  Clone ID: uC-osroM202008f03b1
cttccaagttctgtactcccaaccttttcctcctcttcttctttcttctcctcgtcctccattgatatggccaccgaggtgctgcgcccgcacaacgtgctcctgccttccccggcgccaggaggatccgtgccaccgccgccacgcaccagaggacggccaacaaccatcagagcgatgcgaggaccaagccgacgacggcgggaagccggagacgtcagggcaggggctcctccgccgccaggaaggcggccgcgaggcctgtagcggtggaggtgtacgccgggccggcgttctccgtgtcccccgagccgagctctgtgccgctgccccagttcccgt

SEQ ID NO: 38972 - DNA, 293 bp, Oryza sativa
  Clone ID: uC-osroM202008f04b1
ctctctctcttatcatgcaacacccacacatgcatatatccatccatccatctatccccttatcacatttaattcttcttcatatataccaatttggcaacagctaatgattctttttttatttgaaactctgaatgaattgatttagatgcatgcatcaatacaaataattgatttctttttatctggagctctgaaattgatttagatatgcatattgataaaacaaaatttgatattcatctgaaactctgaattggttaagatgcctacacataaatgttccattttca

SEQ ID NO: 38973 - DNA, 75 bp, Oryza sativa
  Clone ID: uC-osroM202008f05a1
tttttgagagatcccgcggcgcgcgcgcgcgcgcgtgcttgtggcctctatttttgcgcgccccctttttttttt

SEQ ID NO: 38974 - DNA, 366 bp, Oryza sativa
  Clone ID: uC-osroM202008f06a1
gatgaacacatttatttattaatccatacatatttactttgttctcccaattggcaactaggattacattattttgcttacatttagttgctggagatgacaagctgcagcttgattctggcagcctggctcagaaaagagtgagagcagagagaaccagcccccagacccaattttttccaactaatttgaaccacacttttttaactgcatgtacgcttgttgctcacacatacagctactagctgatctggtgacctttttctcccaagcaagatccaaccacaatgatcatcaatgccatttttcactggatttcccatccattcattcatggattgatcatccctgcagccaatttgagga

SEQ ID NO: 38975 - DNA, 456 bp, Oryza sativa
  Clone ID: uC-osroM202008f07a1
tttttgggacataatgacccctgcgccaccacctaaccccatgcttctcttcagaaacttttacatggcacatcagaaaacgaagaagaaaaaactaatgaagagaagaaaaagaacatcagtaggaaagatacacatatactacctagggctaaattaagaaacagatgcagatcaaactgtattccacacatgattaatgcttggatacacttgcacacttcaccatatattatatatatatatataaatatatatatatcatcagcttcttcatcaccaaattaatgggcaattcgagttcttccccgggccgacatagtagaaggaggtgccccaggcgtcattgacgccggtctgaacatcgaaccaattggactgctcggtgtaggggcccacccccttgggggcctacagctggttgctgctgaccaccacctgcaaggtcttgaagta

SEQ ID NO: 38976 - DNA, 348 bp, Oryza sativa
  Clone ID: uC-osroM202008f07b1
ttcttacccaagccgaatcacaccaatcgccatcgccatcgccatcgccgtgcgtggtcgccggtgccggcggcggagggggagggggaccaagggaaaagagagaaggtgagctgagctgagctgagtgaagtggtgctgaggcgagtgactggggggcaatggcagcggcgtgggtgctggccgcggcggcggcgttggcgctgagggcggcggcggcggagggggcaaggtcgccggcggcgagggtgcaccggcacctcaagaggctcaacaagccggtcgtcaagagcatcgagagcccagatggagacatcatcgactgcgtgcatctctctcaccaaccag

SEQ ID NO: 38977 - DNA, 492 bp, Oryza sativa
  Clone ID: uC-osroM202008f08a1
gataatgaaccaatactccaatagtatctgaagcagctcagatgacaaaccagtatgcaggacagattttattatatgagcactgctatgcagactagctcacttgtatcattcagaaacaacaaaatagaacacagttctatgcagatcttattttccgatcaaacaaggaggatcagacagacgagatggagcagatatacacctcactctgctccaaggagggcaaggagtatatcctcgtagtctctggttgtatctttagcaacagctcgctccaatgggacactgtttctcttctggtaggcctcctttatcagcttcaggtctacctcggcacgagttgttatgatccttgtaagagagttctcgtctgtgcccattcctcctagagccaatcgaatgactttctcaaagtatctgtcagggcaagtgaagcatcttatgatcgcccttagtgtaccaaggaactcgtccttaggatcagcttta

SEQ ID NO: 38978 - DNA, 504 bp, Oryza sativa
  Clone ID: uC-osroM202008f10a1
gttagtcaatgcactatttaatttcggattcaacaaatgaattatgtacagaaaatcaatatggtagctagttatcaccaacatagcgcagcacagcaaagaccgaaagaaagagcagtcaacaacatagattaaaacataatggccatggattcacgatgttcatagccatatacaggtagcaacgacagaaaactagaacggaaaaaaaaaagcagttcttgagtctcatagatggctgccatacatagacagcggatagggaacaggtccaatcaccaaagagtttcaggatgcagccttttgcatctaagctaaacataacgatatgctacccccaaggtgccatgcaggtgcctcccaatctccaatagtatttattccttttttttccctgtgtacatgctccgactagaagacttcgaattcctcaatagaaatcgctaacgggcatgtcatcaaagctccagaggtccatgttgctgacaacattctgggatccat

SEQ ID NO: 38979 - DNA, 341 bp, Oryza sativa
  Clone ID: uC-osroM202008f10b1
ttgtacgcactccaccactgcatcggcggcgagggctcactgttggcgagccatgtgcggcggctccatcatccaccacctgaaggggcacccgcaggggtcgcgccggacgacggaggggccctgcggcccgagaagaagaagcccaggtggtgcggcggtggcaggcgccacttccgggggttcgtggaggaggacgacgaggactttgaggccgacttggaggagttggaggtggactccggggactcggatttggagctcggggaggaggacgactatgacgttgtcgagagcaagcctgccgccttcaaaagggccctctccacagataacttgag

SEQ ID NO: 38980 - DNA, 429 bp, Oryza sativa
  Clone ID: uC-osroM202008f11a1
acagccaggaaaccaaactcagattactggttgccaaccagacagaattttatgcacagagtacaggaaatgctggggggccattctgtaagaggataaatccaggcaatggatgactacccagcagatgactactgtttgttcccccaactaatgtatgagaaaaggcagtacactcatcgactcatcgggggggaggatattgaagatatgttctccaaggccggatgacggattaaccaaggcgaaaaaccgagggaaattcagtgcatgaagtacaagagggagatgatcagattactgacgagatcatgcttcccatcctatgagaacgggggcccgagcaacacggttgacaccgagggtgaaggggcccatgcggaggccggaggggaggctcttgtacatatgctttaaatccctggaccc

SEQ ID NO: 38981 - DNA, 527 bp, Oryza sativa
  Clone ID: uC-osroM202008f12a1
ttttgggtaaatatatagtcaaggcactatttaatttcggattcaacaaatgaattatgtacagaaaatcaatatggtagctagttatcaccaacatagcgcagcacagcaaagaccgaaagaaagagcagtcaacaacatagattaaaacataatggccatggattcacgatgttcatagccatatacaggtagcaacgacagaaaactagaacggaaaaaaaaaagcagttcttgagtctcatagatggctgccatacatagacagcggatagggaacaggtccaatcaccaaagagtttcaggatgcagccttttgcatctaagctaaacataacgatatgctacccccaaggtgccatgcaggtgcctcccaatctccaatagtatttattccttttttttccctgtgtacatgctccgactagaagactttgaattcctcaatagaaatcgctaacgggcatgtcatcaaagctccagaggtccatgttgctgacaacatcctgtgatccatccaggttgag

SEQ ID NO: 38982 - DNA, 443 bp, Oryza sativa
  Clone ID: uC-osroM202008g01a1
ggatcatactgaatgccaggcagcaaactgtatactagtagtataatttatgacctttgttctggttacacaaacagtgacactggtacagtgagagtgggcgggacagcacatgcaaactttgcctcctccttatcccactctcaacctcaagacaccgagcgatgtctatatgacacccaacaaccgacgtctcacctactcaaaacgaactcctgatgacagattaatgaaccatccatgcaaatccatacaataccgagggagagctaatcaatacccgagcagataaaaatggccaaacgatcgatctcaaatgtcgtacgtagaggtatgtatagtagctaatgctgcttctgctgctgctatagtaggcatgaattatgcttgttcttgatcattggcttagctgctgtactggacgaaagaacggtagacggcca

SEQ ID NO: 38983 - DNA, 479 bp, Oryza sativa
  Clone ID: uC-osroM202008g02a1
gccgccctttttttttttttggtaatgtttctggaattgttgatctgcaagtgagggtcagccagagttggtagacactgcacggccactgcctccctctcctcacctaaccccaccacagagcgggatgagccgcaggcaggaccagccttgacgccacccaattgtacccctccctgcactcctgcaacgaacaccggcttcaagccggttggcagtgccaaccgagcagacagcagcagcagcaggcttgcttgcacccaaagctcggcaaagaatttgacagcaaaagctgccgacgcaccctgtgccactcagccacacaagctggagcagcatcacccaggcttggcgtgcttgccactgcccacacacaccacgtgctgtacaacacaacacgtcagcgtcaaagaatcaggtctggacgctttccacagacatgtcgttttgttgcagccccaggcgagcgagcaaaacac

SEQ ID NO: 38984 - DNA, 484 bp, Oryza sativa
  Clone ID: uC-osroM202008g03a1
gtattctctggacccatgcttgaaacaaaccaaaacaagaacaggcagtgtaggtttgaaagaggtaaaattcgacactactgttcttgacctttattcagattttacagcgttcacaaatgtatacaacagttaaatgccaagacttggcatacaggacggagcttttattcatgctgtcctccaccaccggacacgattccaacgaggtgattcggatacgttagatatcctttcgcacggcacagccttctagccagccaagattgaccagagaattttccaaggagtctatttggtctgcatcatgctgcattagccggccaataatcggtgcatggggacctgatttttatttgcttcctgtagtagcaatctgagaagaaattgcagtgagctgtagctttatccttttcggaaaatgatggttataaccgagcttttgctaatgcggcaggtttgaagcttgcgatcccagttattt

SEQ ID NO: 38985 - DNA, 447 bp, Oryza sativa
  Clone ID: uC-osroM202008g04a1
aggtacaaaaaaaacatgacatttcatttgagtaattctcgaaataaattacaattattttaggtgccttaacatgcaacctctgatagctgtttgatgtttatggcagcaattaccgtgggcacacaaacaaaaaatattatttatacacatgcaaacctccatttgcaggtcatcatacatttcgtcaagcaaagcatgttgcgagtgtccatcgtaacataaattatttaagcattatttactcttcgtatatttacaagatgcaccaacggtttgcttcattagtactcgccgatcacagcatcacctgcgctgctgctagccttgcaattggaaccctgaatggggagcaagaaacgtagttcagcccaacctttgcgaaaaatgcaactgaagaaggctcacccccatgttccccacaaatgcccacctctaaatcaggcc

SEQ ID NO: 38986 - DNA, 512 bp, Oryza sativa
  Clone ID: uC-osroM202008g05a1
gacacagaataaggctaacattttgtcacataacaatcaggttacaatcgatgcagtattcgccaggacatggcagttgcatcatagctcagaccacagcatcacaagcatgaacaagcagctacaagttacacaacacccacaggcacaggcacataaccatataactatgctaccccttgttgctaataccgacgctaactagtactcagatgtcatttgttgctcccagaacagcctaaatgggaggtaattctaaccaccagggcaatgccaattaactgatacaatcatacaaatcgaattcttgaatctttcaagatgtaaaccgggtgccattactggctctcgtcctcctcgtcctctgcctcatcctcgtcttctttgttggcggtatcgctaccattcccggtacctctggcggcttcggcggcattgttctcgttgtactggtgttgtggctgctgcggggcagcatggcagtgcctgctgtccttgagcggtaccgaaca

SEQ ID NO: 38987 - DNA, 341 bp, Oryza sativa
  Clone ID: uC-osroM202008g07a1
ttttggggtttttttgtatgtctggttttttttttttttcttttttttttttttttgacaggagcacagttttttttaaaaaagtccccgattcataaagtgtgggagggtcaggagttttgaccggcggggaaatattggggaaaaattactcaaaagagggttaaaacagagggaaaggcattcctaaaccaaagttggaaaggggaaaagctttctgaaggaacgcgggggggcgcgccatccacggaagtccagaccctaccaagggtgggctattttataaacattttgggttatgagccccaaggcccaggtttgcctgccagttcgaaaagggg

SEQ ID NO: 38988 - DNA, 348 bp, Oryza sativa
  Clone ID: uC-osroM202008g07b1
ttttcccccaccacctcgcgctcgcggcggccaccggcgcggcggcggcggcggcgtgccttgccttgcctagctcgctggtgccatggaggtgcgccgcagggcgccgctgccgccgccgcccgagggtgcaggcgggcgacgcgctgccgctgccgatccggcacacgaacctgatattctcggagctgttcgcggcgtcgctggcgtacctgatgcggcggtggcgggagaagatccggtcgtcgacgccgctccacgtggtggggctcgccgagatgctcgccatcttcggcctcgtcggctagctcatctacctcctcagcttgttcggcatcgcctacgtgc

SEQ ID NO: 38989 - DNA, 405 bp, Oryza sativa
  Clone ID: uC-osroM202008g08a1
gggagggcccatttaaaattcaactaataacagatccaatcagaatacaacagaattcaaacaatatttcatttaaaattcaacctaataacaggaaatttgaaaacagaaaacaaagcaattttttaaaacattgaagggaaacactccttggttttgggcctccactcatagcaaaaaggggatggaattacataagggcctttttggtgaggggcaaagggaatttttgggtacaacttaaacatggcttttggagatgggcttataaaaaatttcccaattaccctaatataaggttatcaaccatttagggcccgggatcttaaaatttatttcaaccatttaccggttttgagctgcaaattggaaacttccacacatccaaagaaccaacctggaaaa

SEQ ID NO: 38990 - DNA, 448 bp, Oryza sativa
  Clone ID: uC-osroM202008g09a1
ttttgggatactgaaacgaagagcgaattaatccagatatgttccttgtgatatgtagcatgggcctacaaatgtttcaaatgctaaagaccataatgcttcaatcaattacgatggtttccctttccctttccaattagcaaaaatgagagcaattttcttggatgctatgtctatgaacgcctccttgcgagctgagggttagcagacagcaaaacattagccaacagaagttgacaatattgcgatttctaccacctacaagggcatgcaccacacaccttgaacatgctaagactggcaccatgacgaggggggccttatggacccatgaacttcatgttcttgaggaccagcacggtatttgggaacaataatatctaggcctgatcctgattcatcacagtgtgcttttaaagtagcatcttccggaatccgagtacggagt

SEQ ID NO: 38991 - DNA, 350 bp, Oryza sativa
  Clone ID: uC-osroM202008g09b1
ttatggctgctcctccccctccgcctccgccgccggccgtcgccggcatgggggagtcgctgctcaccgcgctctccatggacaccaccacggcccaccacccgcaccagggccccttcacgttccttccatggacaccgcctcccacgacgacttcgacctcttcctcccgccgccgccggggccgttccgccgctgcctccatgccgcggccgccgccccccctgacatcaacctccccctcgacgccgacccctcccctccgcctccggctctgcagtccggcgccctccacgaccccaacgtcgacatgcttgatgtcggcctcggcggcccgcagctttacgact

SEQ ID NO: 38992 - DNA, 414 bp, Oryza sativa
  Clone ID: uC-osroM202008g10a1
ttcccgccctcgttggccacgtagatcgccatctgctccgccttgacggcttcgagaagcttcggcgagtcgtggaggtacttgaggatccaggtgaggacgctggcggtggtgtcctgcgccgcgaacagcacgccgacgacgttgtcggcgatctggtcgtcggtgagcagcgccaccgcgccggcggtgccgtcgtcgcgcgaccgcatgaggccgccgaggaggtcgtcgccgccgccgccgccgccgccgccgcgcgcccgccgctccgccacgatctcgctcaggatcgcgcgcagccgcttcctcgcctggatcgccttgtggtagagcgtccccgggaagcggttggggaagcagttgtagcctctcttcacgacggagtagttcgtcctcagctcctccctgtgc

SEQ ID NO: 38993 - DNA, 392 bp, Oryza sativa
  Clone ID: uC-osroM202008g11a1
agggaaacacacggcagtatttacacatggaagatgtttacacacaaacacacttctttgggttgtcgctagcccttgataggagccagcaggctagctgacacgtaccggtctctggtagtactaacagagacagcaagctactaggaacagagtaacaagataagatagcaacatactagataattaattacgtattagataaccacaaggaccagcaaacatggcgtgacagagagatcgaccagcctccgatcaatgggattattcagttcagcgatggctgctcctggtctcgtcgctgtacagccagtcgtagacggagggggagttgggctgtgggcggtcgaagaggttggcgccgaggatcttggtggtgagggtgctccccg

SEQ ID NO: 38994 - DNA, 398 bp, Oryza sativa
  Clone ID: uC-osroM202008g12a1
tttttgggtttttattttggaagaaaattcaatgtgtttcgaatcacatatacatgctgttttttttgtatatatatagtgccaccggaaaattcttcgtcatgataccacccacttttttcttttttggctgtgtgactgaccatgcattggattgatgaactgacttgagtgatgacatacgtactgaacacactcgatcacccatggtgtttcttcttttttgtttttgaagatatactctcgaaatgaaaaaaggaacatgaagaaaaaagaaagaagaggaagaatgaacagaagaaatttaaagaaacaatggcgagcgctgttgatcgatcaggtgctagtgcgaccgatcgaatgagctcacgagatgaatggccaaagaaaaggtgaag

SEQ ID NO: 38995 - DNA, 109 bp, Oryza sativa
  Clone ID: uC-osroM202008h01a1
aaaagagggaagggccgcttgggggttggaggaattttcaaatttgaaactttattttacctcaaataaggtctcatttttttcccgtttttttttaacgggagtattg

SEQ ID NO: 38996 - DNA, 356 bp, Oryza sativa
  Clone ID: uC-osroM202008h01b1
ttttcttctactccaccaccaccatctcctctccggtctcgtcttccctggcgcgcgcggccggcgagccggcgagcggcgtcgcggcggtgaacttccttgtcctcgtccccttcccgactccccgccccacctagcctccttccaagtgaggactcctcgcgctcgcgcgcgcgcggccggcgaggggcgacgcagccggggcctccgtcctctcggcagcacgaattgaattggaggcacatttgtaaaaatgggagtttaccttagtacccccaaaaccgagaagctatctgaagatggcgaaaatgataagcttaaatttggactctcatctatgcaaggatggcgtgcaa

SEQ ID NO: 38997 - DNA, 59 bp, Oryza sativa
  Clone ID: uC-osroM202008h02a1
atttatgcggccccactctattttttcagaggtattttaaaatttggcgtttcacaacc

SEQ ID NO: 38998 - DNA, 136 bp, Oryza sativa
  Clone ID: uC-osroM202008h02b1
gcggtcacccaaacgccaatgcacaggggggggttttttagaacaagagcggcgggaaacaaaccgcgaagcaagagagaccgggagaagagcacagaaaagcaaggaccgcaggcaccccatagcccacagacaa

SEQ ID NO: 38999 - DNA, 500 bp, Oryza sativa
  Clone ID: uC-osroM202008h04a1
gggaaaaaatcacaattagtgcacatccattgccttaagatctggttacagcacacgaatacaacatagcatcccaaaagccataattacacttaaaaacacctcacatcatgagcaacactgaacatgacaaaaagatcagctgtaccactaggaggaccagcaaaatatacacaagaacggaaagctgtatcaagaactgttgagtgttgaaaggcttcaaaacaagaccattcacacttccttgagacacaaattactgaaagcttggatagagcaaaaaggctatatggggaaaactttgattcacatgtcggtgtacatcatattgatcttttaaacatgcaagtccatgtacagcgcatataataatcctgcaaccatgtatagattttagttgtcccgattcgcaaaactgaacttgtttttgtggatctttgctggacactggtgagttcaccaaatgctctctcgagtaaaagcagaagcttggatcagat

SEQ ID NO: 39000 - DNA, 496 bp, Oryza sativa
  Clone ID: uC-osroM202008h05a1
cagataaacatcaatatatagcgggcacttgttgcaaaaaacttaacttacaattattccaagtacatatgaccttattacacaattaggtcaaaacaaagaaatccatagcatgtaaaccttggggttcacaaatgaggaattaaggaatggtaacaaaagagggagaacataaatgtgaagcaaaagtcacatccaatcataacatcatcaacacgtacgcttgcgacttgatcaaggagggtgtgaaactatcaaaccgtgtacgtcgtcatcgttgagcacgtacttcaccaggtaattgaatcacgcagctaaacttgtagattaatcagtagttgatgaccctgcagttcttcctgatctgcccctggtacccggtcttcacctggatgcttgccaacttcaccatggccgccttgaacctgtcctcccaccacccggggatgacggcgttgtccaccaccatcttcgccgcttccggcgacgttaggag

SEQ ID NO: 39001 - DNA, 320 bp, Oryza sativa
  Clone ID: uC-osroM202008h05b1
gttatttctctctcttcctgttattagctatagcagcttaattagcttaagcacaaaaggtacagtaagcctaagctagctacacactaagcaagcttattagccatggcttcatcaccaagtctccattggtgacgtgtgccctgctgctgctgctggccgtggcatgccaggctcacccttactggccactggagttggcgtactaccgcgacaagtgcccccaggccgaggccgtcgtcaaggccgtcgtcggggaggccgtccgccagaaccccggcaatggcgccgtcgtcatccgaatgctcttccacgactgc

SEQ ID NO: 39002 - DNA, 495 bp, Oryza sativa
  Clone ID: uC-osroM202008h06a1
cttaaaaaatcatatctaggggtattattttttttcaaagaagtacaagtagtatttactcttgaccactctttgctccgtatatacaccggtttatcattacaccatatttcctccgtcctgagtccctcacaccaaagttgaacaggttgacgtggcaggatcgaacaaagccggaagcaggtatttcctcccgtgtgctccattggcgttgtagctcgctcccgtcgcggggtccaccgccaggttcccggcataaccggggtacgcaccgctgccgtagacccccggacacgccgtcgcggcctccagcggcgcctccttggggccctggtagaacccgtcgccgaacgggttggtcacgacgccggcgaccatgctggcgatgttcatcaccatgccgtccatcccgacgtcgccgctgggcggcaccagcgccggcgtctgaggcccgtacaccggctggtgaacggccacgcgcactggccgggcact

SEQ ID NO: 39003 - DNA, 412 bp, Oryza sativa
  Clone ID: uC-osroM202008h08a1
ttttgggttttttgaatttttggggttttctttttttttgtttttttttttttttttttttatcgaaacaacctgggacattgggaaactggggctgggtgggaaatgctccatgggtgccgcgctaagcatgggcggacgggagtggcttgcggaaacaatccactggtaggcaagtagtaccgccacacaccggggcaggggttctctacatgggggccctggggctctgactgtccttgggaggggctgaaacccaaagggggccggggtgttggcgcccccccataagaaaggtccccatgacgagctttacaaaaatcaacgctcaagcccggggtggagggccccgactggacctcagggaaaccggtttttttcccctctacggtggctagggcggtttgcccaa

SEQ ID NO: 39004 - DNA, 295 bp, Oryza sativa
  Clone ID: uC-osroM202008h09b1
tgggtctgaatatgaatcataaaatcacccatgtaattcataagcttctgcatcacatgatgaacgaaaggaagcatgtaacttttgcctgtcaattgcagctggtacctttgctatctaagaagggaaaacaaaaaaaaaaagaaatataaaacccaaactaactaagagaggataaaaaaaaacaaaggactaaaatgaaaacacaaatctggatcgagtgcctttcatccctgtgagattaccatggagaaaaataggccttttgatggcctggtgggtttttcccagggtg

SEQ ID NO: 39005 - DNA, 484 bp, Oryza sativa
  Clone ID: uC-osroM202008h10a1
tttttggtttttttaaaattttttggtgtttttattttttttttttttttttttttttttttttttttttttttttttttttttttttttttttttttttttttttttttttttttgggggaaaaaaaaaacttgacccccgggcctcccaattgggggggaaggccccttaatttaaacaaagggggttttatattaaaaaaaaaaacctttagggaaaaggtttttaaaaaaaacccccccaaaaaaaaaagtggggggggtttttttgtaaatataaaaaaaaagggctaaaaggcccccccccccccaaaaaaatttaaaacccccggggggtttttttttttaaaaaaaggggttaaaaaagggtaaaaaaaaccttttccctttttttttgaaaaaaaaaaaaaaacgcggtattttttaaaattttaaaaaaaaggggaaaaaaacccttaaaggaaagggggtgttttaaaaattt

SEQ ID NO: 39006 - DNA, 451 bp, Oryza sativa
  Clone ID: uC-osroM202008h11a1
ttttggtgttttttatatttttgtttttttttttttttttttttttttgggaaaaacaaacattaggtactccaaaaagggccaaggttcccaggacctcatttgaaattttgaatagacgcatttgcttcaattagtaaaccaatataaccactgatttcctttggcacaaaacaagggggagcttcaatttatggcccgatttttggtgaaaatttttttacataaacccaacttaacacataccctttttccgaatggtgttaattccaacccacgaaaatttcaaattttttcaccgacccataacaaccgaggcattaaaacttactttttcactttgcaacggcactagggcccaatggggcccgagcatctcgaccctgagagtggtcaacccgttggtagccaaaattaccacctcgtgatgaaccacctttaccaacgcctt

SEQ ID NO: 39007 - DNA, 505 bp, Oryza sativa
  Clone ID: uC-osroM202008h12a1
ttttgggttttttttttttttttgggatcaaaacatttctattaccacaactttttaaggatggaatcgagtagcaatactttcaccccaaaatacagtttagcgacaatatcttagaaaagccgcttgctttgccgccatggctggcaagctgagcagagcagctaacacaaagaacacgagatcactataaaccaaacggcaacgaacgaataaaatacagggtcttttttgtctgaagatacacgaagcggttcgttttcttttatttttagtctcctctcctccttgatgatgggtgtatggcaatggcaatggcgatgggatcttggcttagttgatgggaaggggctcgccgttccactccttgaggcaatcgagcatggggtcgatgagcttgccctggctgatgccgaggaacaccttgttgcacttcttgccgggggacttgagcttttcgccggtgaggaaaacgcaaccgagcttcttgcggcccaaacggtag

SEQ ID NO: 39008 - DNA, 342 bp, Oryza sativa
  unsure (1)..(342): unsure at all n locations
  Clone ID: uC-osroM202008h12b1
tgctcntcttcagtatcgaatcctctcttctcgtcgtgcctatcaccaccaccgtagcaatggcggccaacgggccgatcaacaaggaggacccgctcaactggggcgcggtggtggccgagagccggcagccaccttgacgaggtgaagcgcatggtggtgcagttccgcgagccgctggtcaagatccagggcgccaccctccgcgtcggccaggtggccgtcgtcgcccaggccaaggacgccgccggcgtcgccgtcgagcttgacgaggaggcccgcccccgcgtcaaggccagcagcgagtggatcctcaactgcatcgcccacggtggggacatc

SEQ ID NO: 39009 - DNA, 53 bp, Oryza sativa
  Clone ID: uC-osroM202010a02a1
tttggggtttttttttaaaatggctctatacttatcacacgaaccatataaac

SEQ ID NO: 39010 - DNA, 296 bp, Oryza sativa
  Clone ID: uC-osroM202010a03a1
cttttaaaagatttggggcggcatgcgcgcgcacgcaagcgcgggtcctctttagagggcgccctctgttctccggggtctactactactacagggcgtcgtcgtagtcgtcggaatttcaagttgccttaggggaccacacgggtggcacggggtccgcaccaaacaaggttaaattgggaagggtttggtgtggaactggggctagaaaggaactcttgaaactaaagtgcaaatcacaaatatgccaaaaattggactaagagaaacaagtttctaaatactggacaggaaga

SEQ ID NO: 39011 - DNA, 78 bp, Oryza sativa
  Clone ID: uC-osroM202010a04a1
atcgtttgcggggtttttaatctccgggggagaaaaaagagttattcatttagctgggagttccatactatacaccca

SEQ ID NO: 39012 - DNA, 284 bp, Oryza sativa
  Clone ID: uC-osroM202010a04b1
gtaatatggacaaggccaccatgcttgatgattagggagaacttgaaagagcaaacgggtcactctgcgatgttaacatttagctgagttatttatttactggagtcctatttctctcttgaaccgcgaagagattccggattcgattgtttagtcttctccttcccctgtactgcggtcgtccgaatttatccacgccccgcccgctcgctcgctcgctcgctctgtgagccaacacagacatctcaccttattgcttttctagcgtttttttgctcaaattt

SEQ ID NO: 39013 - DNA, 410 bp, Oryza sativa
  Clone ID: uC-osroM202010a05b1
tttttggtggacaaatactcatttgaccccactaatacagggggcatcatccatctcataattctcagctacacactgagaatttaccgctgattttcctaataaaaatggagtagtaatagtaaattgtactgctgtaattacagcagtatactggtattactactgcacatatgtacagctacgagtcgcagcgtgccagctgcgtctacactgtctgcgcctgcttcgcggtggcgtcttctgcggcgcggccgccggacggcacggcgagccggccgccgtcgccggcggcggcggggaggtcgtcctcgtgcgcctcctcggggcactccatggcgcgcaccagctgcacgaacagcggccagtggtccggcgagaagaactccgcgcccatccgctggtacgtg

SEQ ID NO: 39014 - DNA, 147 bp, Oryza sativa
  Clone ID: uC-osroM202010a06a1
ttgttgtgtttttaaagggaggggactaaataacacctactactaataaaccataacgaaaagaggggaacatacaggctatacatgaaatagcgaacaaaaagacacggaacttgcgatcccataaacaccacgcaactatgtcga

SEQ ID NO: 39015 - DNA, 51 bp, Oryza sativa
  Clone ID: uC-osroM202010a07a1
tgggttttttacaaacatgagcatttatcatatcatgaacaattacagcat

SEQ ID NO: 39016 - DNA, 301 bp, Oryza sativa
  Clone ID: uC-osroM202010a08a1
aaacaaacataataatgtgtccgatcttgctcaattacaacatcatcaacatcaaacacagagaacgaggggtcggagccatacattatcatcttgggaagtgtttggtctgttactggggctagaaaggaactcttcaaactaaagtgcaaattacaaatattccaaaatttggactaagagaatcaagttctaaatactggacaggaagacagttagcttgacatcatgatttgatcgcatgcctgaagggcctggtttgcatagtatcttacatccacattagggtcctcactgagtt

SEQ ID NO: 39017 - DNA, 125 bp, Oryza sativa
  Clone ID: uC-osroM202010a09b1
tgttatgcggccgccctaaccacattctctccgtgttccttttttaaaacacaaggggccaaaacgacaaaacttcatttttttgaatgtttgacaaaaattacaaattcttgaatgcttccctt

SEQ ID NO: 39018 - DNA, 403 bp, Oryza sativa
  Clone ID: uC-osroM202010a10a1
ttgtttttcaaaacccactcatttattggcacaacttcatagctcaaaatacaaccatatcactgtcttttaaaactactctagtacattactcttatgttacagctctgaacacatcacaacttcttagttcacagattgcatatgtgtgtggccagacacatgggcaaaattcagaaagaaaaagaaacatggtttgaacagagacaccaaaactatacactagaagctgcaagggagcacacggacacaaacttggccggacagacatgccaaattcgtttcagttctagccgttgcgctataataaggttcaactgccatcagcaagtgcctgaaccttcttttcgagctcaggtttgttggcgcccacaagcttgtcgacctgcttctcgtttttatg

SEQ ID NO: 39019 - DNA, 549 bp, Oryza sativa
  Clone ID: uC-osroM202010a10b1
tgtttctccactgcccccgcacaaatcaactctactgtccaattcgcggcggcggcggcggatcaaaccctcatttggtgggattttttgctgcgtttaatcaaatcctctctctctcttcgaccgcggggagatccggggttcgattgtttcgtctcctcctccccctctcgtgcgggcgtcggaatcgatccacgccccgcccgctcgctcgctcgctcgctctgtgagcccaagaggacattttgctcagtgctgtgctagctttgttggctcaagttcacaatgggaggttgtgtgggcaagggacgacgacatattgaggaagacaagcttgatttcaaaggtggaaatgttcatgtcataacaagcaaagaggactgggataggaagattgaagaagcaaacacggatgggaaaattgctgtggcaaatttcagtgcttcctggtgtggaccatgtcgtgttattgcacctatttatgctgagatgtcaaagactaatcctcaactcatgttcttgccatagatgttgatgacctaatggatt

SEQ ID NO: 39020 - DNA, 274 bp, Oryza sativa
  Clone ID: uC-osroM202010a11a1
ttgggttttttatttttttggttttttacaagtttcggggatggaaacaaaccacccatttgaacgagctttatcaagatggtagcaaaataaaataagtaatgtggcttaaacccccacttagtttacaggcaccggtgcaacttatacatcgtctctctgaaaagaccaaatccaacgccatgtaaacggagtgacagcccctacttcaccggaaggcaattgataccattgggatccaaaaatgggtggcattatggggctcaaggagaat

SEQ ID NO: 39021 - DNA, 353 bp, Oryza sativa
  unsure (1)..(353): unsure at all n locations
  Clone ID: uC-osroM202010a11b1
gtataaggagcgtctagacaagaangtggtgggtntcttttttaaaagtgggggggggttgaaaaacccccataccggcgccatcttgacgtggtggtggcttgtgaggacgatgatgacaacgactttgacatcccactggtatcaatctacttcccgacaggtgagagacggcactcctactgacatgactactgatctggtcttttcagagagacgatgtataagttgcaccggtgcctgtaaactaagtgggggtttaagccacattactgattttattttgctaccatcttgatagagctcgttcagatgggcggtttgttaccatccccgaaacttgtatacccctc

SEQ ID NO: 39022 - DNA, 294 bp, Oryza sativa
  Clone ID: uC-osroM202010b01a1
accaagggaaagaaaggagaatgtataatagagaagctaattactgtacattatttagtgtacctcttcttcacataactactgtagttaatactacagtgtgtgccttagctttttatatggatcactatctgcctaaacattttctcactgcaataataatagtaaaccaccaattacaagacgaaagaacagtacaatttaggctggttcataaattttgcacaggagtttcttctgatgttggagattctgtttctgcaggcttcagaaactttaggatatccatttttg

SEQ ID NO: 39023 - DNA, 199 bp, Oryza sativa
  Clone ID: uC-osroM202010b01b1
gtttacgtcgtcgtcttcctcggggcctctgtgttcctttataagaggcgtgcggcgtaacaaggggaattcaactgaggtgagaaatgggggcaaaggactccaagccctcatacagctattcttctttatatgatcatgggaattcatcatcgggatataacctggagataccccgcatacccctgcaaatgcatct

SEQ ID NO: 39024 - DNA, 378 bp, Oryza sativa
  Clone ID: uC-osroM202010b02a1
ttttggttttttttttagtccacacaaaacggaacaagtcttatttccaaggcaaattaacaaatgcaaacagatttacaaacggaagaaataaactgcacgctacagacagtatccactaaaattattccgtaaccaaatcaaatgagtttgatcagatggactttgctgatgaaagaaaatgccagaaaattgatgggaagatcgacggcgtgccggcctaccgatcactttgaaccttggcccttgaaggccgtcccacctgcggggaccgtctacgccggaatgccctttggcgaggaccttcggacggccacgggccggtgccgcggcaaaaagcttggcgggcaatggcctgggtgccctggaagctggctg

SEQ ID NO: 39025 - DNA, 350 bp, Oryza sativa
  Clone ID: uC-osroM202010b03a1
gaaatctcacaatgaaactcaacagaagtgttcgatcttaaacatgcatctcatccaacttgctccacactgatcacattacaaattaatcaagaagaaactaaacatggatcgatcatcacccaagtgtcacatcctcgcaacaaaagccttcttccccatctgaaccaaatcagtccttcacaacacatcctcacaagattctgacgatggagtgaccaccatttttatgcgtgttgccgatggcgaaatgggtaattagaactcgctgctggcaacgggggcgtggtcgccgcacatgtagacgtaccggtagacgaggccggcgaggccgccgccgacgagggggc

SEQ ID NO: 39026 - DNA, 315 bp, Oryza sativa
  Clone ID: uC-osroM202010b04a1
gcgcgtcgagtgttcacctcgtgttgtaaactgtttatatagtcatcatcatcatgtatttccagtgtgatttgagtaattaattgacagatttgcttcaagaaaaaaaaaaaaaaaaaaaaaaaaaaaaaaaaaaaaaaaaaaaaaaaaaaaaaaaaaaaaaaaaaaaaattaaaaacaaaaaaaataaaaaaaaaacaaaaaaaaaaaaataaaatactccaaaaaagtaaagggggtgacaccttctccttccaaaccaaaggcggggggtaacccccacattatttgatgcccttacggttaggatttccc

SEQ ID NO: 39027 - DNA, 272 bp, Oryza sativa
  Clone ID: uC-osroM202010b04b1
ctcttttttggttttttttaaaattttttttggtttttttacccttctcttttttcctcttactcattttttctttccccttatattctttccctttttcttccttaccaaccttacctactcaactccccacaaaccaattgttccaaaaaactcccataacccccctaaaacccccataaacaccccccctaaaaaccctccccccacccttgcccccccccccccccccaaaaaacggcccctcttaatacacccccacacaacccccc

SEQ ID NO: 39028 - DNA, 333 bp, Oryza sativa
  Clone ID: uC-osroM202010b05a1
gtccccgacattctttttttcgaccgctccgggaaccggcgagactggtgcctatccttcgccgtttacaagctaacggttcttggcggcaagtcgacgttccaggcctacgaggccttcttccgcagcttcgccgccgccttacatgactaagttgtctcgactgttacgcctccccccccccagcttgggtccccactggctctcctcaatgtacctctgtaaatcacggctgggcagcgataggccgcgcggcggatataggtgacgcgggcgaatatccagtgattacatacaggcgacatggaccatgcggatgaagcgggactcaca

SEQ ID NO: 39029 - DNA, 468 bp, Oryza sativa
  Clone ID: uC-osroM202010b05b1
tttttgggggacatttactcatttgaccgcactaatacagggggcatcatccatctcataattctcagctacacactgagaatttaccgctgattttcctaataaaaatggagtagtaatagtaaattgtactgctgtaattacagcagtatactggtattactactgcacatatgtacagctacgagtcgcagcgtgccagctgcgtctacactgtctgcgcctgcttcgcggtggcgtcttctgcggcgcggccgccggacggcacggcgagccggccgccgtcgccggcggcggcggggaggtcgtcctcgtgcgcctcctcggggcactccatggcgcgcaccagctgcacgaacagcggccagtggttcggcgagaagaactccccgcccatccgctggtacctgaagatggcacggccgcgtgcgcctcgcggcgagcaggccgccccacgccgccggggcg

SEQ ID NO: 39030 - DNA, 366 bp, Oryza sativa
  unsure (1)..(366): unsure at all n locations
  Clone ID: uC-osroM202010b06a1
ttttgggggcgatactacatacacttagtgctaacattaagcaatgttcaattctctcgtaggggagctctatgtcgacctaacttggcatggattgttggaaacctaaacatgtgggccaaagctggtgtagtcaacacttcctttgccttcgtacttcttgaagttttcgatgaacattttcgcaagtttcttggcttgctcatcgtacttttcggggtgagaccaagtgctcttgatatcaaggacatgcggatngacgccatccaaatgggccggaacatcaaacccgaaaactggccgccccccctcaactcagtatgttgaacggacccctcccaaatggcatcgatgcatgtttgagta

SEQ ID NO: 39031 - DNA, 298 bp, Oryza sativa
  Clone ID: uC-osroM202010b08a1
ggagcccaccgtgtccaagtcggcgccggagctggtcccgcccgcggggcccaccccgcgcggcgcgctgccgctgtcgtccatcgacaagaccgccgcggtgcgcgtctcggtggacttcatccaggtgttcccgccggcgaccggcgggcccgcggcggacggccaggaggacgccgtggccaggatgcgcgacgggttcgcgagggcgctcgtgccgtactacccggtggccggccggatcgcggagccggcccccggggacgtgggggtggactgcaccggcgaggggttgtgg

SEQ ID NO: 39032 - DNA, 386 bp, Oryza sativa
  Clone ID: uC-osroM202010b09a1
ggggcactaatgttcatcatttatttgaataaatccaaacttttagcaatttgacaatggccatatttacactcgagaaacattaaaaattgagagtaaaccaacaatattacaaaatacaagactttaagaactgcaaaaaaaagaaaaccttaaatatataaggcgtgcgcattacattgcaagtccacattcgggagaaaaaaagcgtttatctcaggccagtgctcctttgatatcttactttaaggatgtgcgaaaaactaatttaaaaatgaaagagaacatctcgtcaagcttattattaacctgaccggtgactgggttgaccgaaggctatggactggagctgcccatctggacaaattcaaaagaatgagtacccg

SEQ ID NO: 39033 - DNA, 404 bp, Oryza sativa
  unsure (1)..(404): unsure at all n locations
  Clone ID: uC-osroM202010b10a1
agcaacgaatgcctgtgtttattacgatagctccttttgttgcgagtatcttacactcaacatgcacaaaaacgcctagataagagcaattcaagaacttctaatcattccgcacccaacaaattggggcgctctatttaaccttttcttctgcaagggacacaatagaacactatatatactccttgggtatagatattaacaccacaccagccgtgcaaaaggatgctaaatcctgacatattggatgctttacggttaggatttgttggttttcaaagggtacaagcaaagaaagctcaaactgccacgaatgcgacgtctttactcaaagtccgggaattgcttccagggtgtacttctctgatgatggcaggccattctctgggccctgctgngttctt

SEQ ID NO: 39034 - DNA, 412 bp, Oryza sativa
  unsure (1)..(412): unsure at all n locations
  Clone ID: uC-osroM202010b11a1
ttgttttttatatgatcataactatttttatttatattggataaatcatcgaagttacagctcaacggtacatttaaaccaaaaaaaaaaggtgcaatggcaaaaaaaaaatgaagttcacacaattgtctcactaattaaagctatctacagctttctacatgtagaactgattaattggccgtttctcttttcccntgtaatctgtaaatcatttagtnttctatatcctgcaaaaacaaaaatcaggcaaggtatattaatgattcatttgaggtagtgaccatgtcgaaagtcagtgttcacatttcaacagaaatattcaaaatccaagtaaagactaagtgttctaaaatgatgtgcatgtcatcaaggaattactagatagcatgctctataccaactttttgga

SEQ ID NO: 39035 - DNA, 453 bp, Oryza sativa
  unsure (1)..(453): unsure at all n locations
  Clone ID: uC-osroM202010b12a1
ataataataataataatattattaatgccattttatgaacattgcacaagctgctgcagcagcatcaaccaaccaacaaaccaaactataaacttcctctgctccatttctgcctccattttcatggacagcaacatcatatctctgcatttttttttcaccggttgtgtgactgaaaatagagaaaacgtcggcgttggccttagctgcttttgggcgcatcggcggcggcggcggcgacggcgtcggggatgccggcggcgagcctggctctcaagtccttcctgaggatcttgccggaagggttcttgcggatggaatcggtgaagaacacnttgttgatcctcttgtagaacaccacctcttttgcaacgaatttcttgatctcatcctcggtgatttctgagccttctgtccggacaatgaaggcgactggcacttcaccggcaagat

SEQ ID NO: 39036 - DNA, 412 bp, Oryza sativa
  Clone ID: uC-osroM202010b12b1
ttcttgtaaccctagcttagtggattagtttaggtgtttgtcggagattatgggggcggcggcggcggaggaggtggtggtgttccggtcgaagctgccggacatcgagatcgacaacagcatgacgctgcaggagtactgcttcgcgaggatggcggaggtcggggcgcggccgtgcctgatcgacgggcagaccggggagtcgtacacgtacgcggaggtggagtccgcgtcgcggcgcgccgcggcggggctccggcggatgggggtgggcaagggcgacgtggtgatgagccttctccgcaactgccccgagttcgccttctccttcctcggcgcggccaggctgggcgccgccaccacgacggtgaacccgttctacacgccgcacgaggtccacccccaggcggag

SEQ ID NO: 39037 - DNA, 416 bp, Oryza sativa
  Clone ID: uC-osroM202010c01a1
acatcactctgaaatagcttttaatatatatatgtcaccatcctcaaaatgggcattttgttcagttttactgtacaagactaggtaacgagagataccatattttagtgttaatttatgatactttttggtactttacactagagaagtaccatgaggtatcaaaaatttacactaaaataagtggtaccttgcgatacatcctcgaggaacataaaaaatcccttttatttggtatacattaagacatactactactattcaattaaaatcagaaattaatttggtcctgcagcagcaatctcatcagccagatcactaacaccacctttcttgtaatttgcaaataccttgaaatttctcttgacagatctgcccgcttttagaagggtcaacttggatgagccttttgcttc

SEQ ID NO: 39038 - DNA, 118 bp, Oryza sativa
  unsure (1)..(118): unsure at all n locations
  Clone ID: uC-osroM202010c01b1
gtctttaccatctacaatgcncgacaactccggggggaccttttacacgcatggggtggcataatcaactagcatagacttaaatcttaagcggagagaaatggtcatcctgggaaca

SEQ ID NO: 39039 - DNA, 180 bp, Oryza sativa
  Clone ID: uC-osroM202010c02a1
gacaacatcaatatggaatacactgtaaattcaaaaaagtgtaacatgtacataggtataaatgcctctcccttattatacctccgtttgtatcggagaaattccaaaggaattaatttcaaaggattcaattcctaaggaaatatttcactcttaatttcatcacccgtttgcaacaag

SEQ ID NO: 39040 - DNA, 449 bp, Oryza sativa
  Clone ID: uC-osroM202010c03a1
ggctggagcgcgccgacttcgcgagcatgatgaaccccggctcgcgccagatttacctcaccttcccggcggatagcaccttccgcgaggaggacgtctccaactacttcagcatctacggccccgtccacgacgttcgcatcccgtaccagcagaagcgcatgttcggcttcgtcaccttcgtctacccggagacggtgaagctgattctcgccaagggcaacccgcacttcatctgcgacgcccgcgtgctcgtcaagccatacaaggagaagggcaaggtccccgacaagtacaggaagcagcaccagccgggcgagagggtggacttctccagctgcactactccaactggactcgatgccagagaccccttcgacatgcaccagctcggtgcgagaatgctgcagcacttcacagcgcgaatgagatgctgctgaggaggaagc

SEQ ID NO: 39041 - DNA, 94 bp, Oryza sativa
  Clone ID: uC-osroM202010c04a1
aattcaggacagaaatgggctgtatatatatatatatatatgtgtgtgtgtgtgtgtgtgtgggtgacataggttggcgtccgggcttccctga

SEQ ID NO: 39042 - DNA, 395 bp, Oryza sativa
  Clone ID: uC-osroM202010c04b1
attttaaaaacctgccatttttcaatctgccgggggagatattttactctgccgggcgcggcgagggccggccgggtctcgactggcgccggaggcggaagccgtcgggttcttcgatctttctcgcttgccggtttcgactggagatcgtcggtttcgccgcttggatcgagtaatcaatcactccgtactagataccagcatagatattctgtcatgtgactgttcagtgccacttccatgggggcatggggcatgggttacaatcccttgttctgcatcacgatgaaagcaaatgatgtgcctccggtcccggaagataccctcttgttattgattgatccagtttgggatacaatggctgttgctgaacatctatgatctctgcgggcata

SEQ ID NO: 39043 - DNA, 99 bp, Oryza sativa
  Clone ID: uC-osroM202010c05a1
ttttttttttttttttttttttttttttttttttttttttttatttttttttttttttattttttttttggaaaaaaacggagggttttgatccccatg

SEQ ID NO: 39044 - DNA, 216 bp, Oryza sativa
  Clone ID: uC-osroM202010c06a1
tttttgttttttgaaaaaaaacggtcaaacatagcctttttcaagaacccctcaaaatcgggtggtttcacttatattggtaaaatgctagatcaaccgcattccgaacaaattacaatcaaacaaaacccgtatcaaagattgaaaaactgccctgggccagcttgaacattcggtgtcggcacaatagcaacttcttcaactccggcagaatcc

SEQ ID NO: 39045 - DNA, 134 bp, Oryza sativa
  Clone ID: uC-osroM202010c07a1
gacagaaaggtaactgactgtaattaaaggtagtaaaacagattaacgacccacttagccatcagttttggcttcagaatttcagatcctctcatgacatcgacttgcgccatttcggcgtcggcgtcaccgcg

SEQ ID NO: 39046 - DNA, 225 bp, Oryza sativa
  Clone ID: uC-osroM202010c07b1
atgagctgaagctctcgtgcgcggcgcgggcgtgaaggcgtcgtcgtcgtcgcaggggcagagcccgaggacgccgtcgccgcgcgccacctccgccaccgtcgagcacacgcggtcctccttggagccgtggctcgtggtggcggttgtgtgttgcaccttttacgactcgtgcgttaactaccttcagaacttttcgcgcaccgttgtctccgcccagtttat

SEQ ID NO: 39047 - DNA, 136 bp, Oryza sativa
  Clone ID: uC-osroM202010c08a1
tcgtcttctcctttctctcttttctttctctatcctagcgagatctggggcgtcactgacctagcttgttcttgctagctgctgctgctgcttcggcggtggcaggtgtcgtgaggcaatagccgtcatctccggc

SEQ ID NO: 39048 - DNA, 105 bp, Oryza sativa
  Clone ID: uC-osroM202010c08b1
ccctgtactagatcacaagcggccgccctcctctgggggcttttttaaatcccctggggtatactaaaatctcctcttacctatcgaaaaaaatatttccacaaa

SEQ ID NO: 39049 - DNA, 99 bp, Oryza sativa
  Clone ID: uC-osroM202010c09b1
tctatgcctttcccctgcccgcgctgccccggggccacctttaaccctcctgtgggtctcctactcctcgacttacctttcaccaccaccccccccgcg

SEQ ID NO: 39050 - DNA, 385 bp, Oryza sativa
  Clone ID: uC-osroM202010c10a1
gaggggcagcaatggtcatcatttatttgattaaatccaaaatattagcaatatgacaatgaccatatttacacttgagatacatcacaagttgagatttaacctacaatattacaaaatacaagtctttaagtactgcagaaaaaagaaaaccttaaatatcttaggcatgtgcattacattggtagtccacattcgtcagaaaaaaatcatttatatcaggccagagctcctttgatatcttactttcaggttgcgtgaaaatcttatttaaaaataaacgagaactttttttcagctttattattaactgagtcgttgactgtgttgatagaatgttatggactggagctgaccatctggacaaaatcaaaagaatgagtcc

SEQ ID NO: 39051 - DNA, 425 bp, Oryza sativa
  Clone ID: uC-osroM202010c11a1
ggtcttgatggtgaagaagggcaagcgcgaggcaccggtcaccgactttgtgccggccaagacgcagatgaggctcgttgagaacgctgccaatgcagacaccacggccgcctccgagccggagctagttgtcggtgaagctgtcaatgacaatttaccggtggtcgaatctgagtttgaattcagccgcggaaagtatctcatctacatgggcggtggtgagagatgcaagagcatgaaccactacggttggggattcttgtgtgcacttggtgaggcacagtacttgaaccggacacttgttatggaccttaatgtgtgcctcaattcacggtatacttcaagtggcaaggatgaagagagagattttaggctctactttgattttgagcacttgaagcaatcagcatcggtcattgaccaga

SEQ ID NO: 39052 - DNA, 533 bp, Oryza sativa
  Clone ID: uC-osroM202010c11b1
ctagatcgcgagcgggtttcctttttttttttttttgagcaaatttgtgggtaattaattagtacaaactagcaaagtgccgatgcatgaattcaacaaactaatgtgttctgggtgataaaatacaacaacagtgtcctgcagaaacactcatatgaactagctagctacaacaaagccatatgtgcttaagatacacggtagttcaaaaatattatatcaagcacaacatttgagactcagcgcacataattcacgagatgttcatgaggaagcagggcatgtattgacaccattcttgcaatcacgagtaagatcactgaatgtctccaatttcctcttcccccgaaggaacacctcagtgtcaactgcaaccctcatgtatccatcgaattcaacagcattaccattgcttagcttctttgtttaagtgtaccactttgtgttctcatcccataaatccttgaagtcatccaggaagtgtgttcgatacttacccttcattgtgtcaaagaatgatttatcgggttcat

SEQ ID NO: 39053 - DNA, 465 bp, Oryza sativa
  Clone ID: uC-osroM202010c12a1
gcaagggcaaggaggggaagaagggcaagcgcgaggcaccggtcaccgactttgtgccggccaagacgcagatgaggctcgatgagaacgctgccaatgcagacaccacggccgcctccgagccggagctagttgtcggtgaagctgtcaatgacaatttaccggtggtcgaatctgagtctgaattcagccgcggaaagtatctcatctacatgggcggtggtgagagatgcaagagcatgaaccactacgtttggggattcttgtgtgcacttggtgaggcacagtacttgaaccggacacttgttatggaccttaatgtgtgcctcaattcacggtatacttcaagtggcaaggatgaagagagagattttaggctctactttgattttgagcacttgaagcaatcagcatcggtcattgaccagaggcagttctggacagattgggggaagtggcacaaga

SEQ ID NO: 39054 - DNA, 506 bp, Oryza sativa
  Clone ID: uC-osroM202010c12b1
ctagatcgcgagcggttttcctttttttttttttttgagcaaatttctgggttaagcaattagtacaaactagcaaagtgccgatgcatgaattcaacaaactaatgtgttctgggtgataaaatacaacaacagtgtcctgcagaaacactcatatgaactagctagctacaacaaagccatatgtgcttaagatacacggtagttcaaaaatattatatcaagcacaacatttgagactcagcgcacataattcacgagatgttcatgaggaagcagggcatgtattgacaccattcttgcaatcacgagtaagatcactgaatgtctccaatttcctcttcccccgaaggaacacctcagtgtcaactgcaaccctcatgtatccatcgaattcaacagcattaccattgctcagctcctttgtttcagtgtaccactcgctgttctcatcccataaatccttgaagtcatccaggaagtgtgttcgatacttaccctttatt

SEQ ID NO: 39055 - DNA, 442 bp, Oryza sativa
  Clone ID: uC-osroM202010d01a1
gaatcgtaaaattcataaactgtcaacttgaaataagccgatgaacataattcatattagaacagaacactacatagagctgtagaattcaaccggagatagattacattgcttgaaacaacaaactctgcccaaacccaaagcagagcaacactctagcagtgtgcaggaatggcaactcgatcacacactcagagcaacactctacgacgtgaggtaggggatcatgtacgccgacgacgccaatgtcccgatcaccttcgcctccgtgtccgggaagaactcggcgcccgggagcgccgtcacggcgccgccgtccttctcgacggcgaccgggtaggtgagcaggtgtccggggaggtcgccggggagctcctcgccggcgtacagctgccagtgcctgtcggccatcgcgttcactttcggacacactccaagctcc

SEQ ID NO: 39056 - DNA, 339 bp, Oryza sativa
  Clone ID: uC-osroM202010d01b1
acgttttctagccttgtcaagtgcacacagccacggggggaatcttaaagagcaggggtgatggctcacctgctgatgcacggcacgctcgacgccaccatctttgaggccaccaacctcaccaaccccacccgccttaccgggaacgcccccgagggctttctcaagtggtgggaagggctggagaaccggttggagaagaacaccgggcttggcccccgcgggaccaggctgtaccccaccggggacctccgcagggcgcggctcggccggacgccggtgatctaccaccagcccgtgagccccccgtggggacgagggctttcacttttactgggc

SEQ ID NO: 39057 - DNA, 411 bp, Oryza sativa
  Clone ID: uC-osroM202010d02a1
gccacaaagaaggttcacataaacaacacaggtcacagcagcgaaagctacaagcaaaccctgcataatcgaaaagcaaatgtttttcaaaaccagacacacaaactgatagatagaagcccacacggacagatcataggatagcagcagtaatcaagcattgccaaggcaccaggcaagaaccctgaacctctttagtactcgtcaccctcataaccctcgtcaccatcgtcgaactcggagccgacctcctcgaagaccttctccagcgcggcgaggtccttgcgggccttggagaactcccccttcttcatgccctcgccgacgtaccaatggaccaaggcgcgcttggagtacatgaggtcgaacttgatgtcgatgcgggagaacacctctacgacgctggtggga

SEQ ID NO: 39058 - DNA, 307 bp, Oryza sativa
  Clone ID: uC-osroM202010d02b1
gtctatgtactcgcctctctccgcgccctcctggggcgccgctcgcacgccgttcgtgtccgccgccaccgccgccgccatgagggagtgcatctcgatccacatcgggcaggccggtatccaggtcgggaacgcgtgctgggagctctattgcctcgagcatggcatccagcctgatggacagatgccccgtgacaagaccgttgggggaggtgatgatgcctttaacaccctcttcactgagactggtgctgggaaggatgttccccagggctggctttgtcgatctttagcctaccgcgattga

SEQ ID NO: 39059 - DNA, 439 bp, Oryza sativa
  Clone ID: uC-osroM202010d03a1
accaagggaaagaaaggagaatgtataatagagaagctaattactgtacattatttagtgtacctcttcttcacataactactgtagttaatactacagtgtgtgccttagctttttatatggatcactatctgcctaaacatttctcactgcaataataatagtaaaccaccaattacaagacgaaagaacagtacaatttaggctggttcataaattttgcacaggagtttcttctgatgttggagattctgtttctgcaggcttcagaaacttcaggatatccatttttgttttctcagtacagcctgatccttgtggttatatgctgctggcacatagggcagcgcaccaaattctttccgcattcataacaggtctgatgtccacatccaaatgcaagaacctttgatttatccatacagatagcgcacaaaag

SEQ ID NO: 39060 - DNA, 363 bp, Oryza sativa
  Clone ID: uC-osroM202010d03b1
gtttattcgtcgcgtcttcctcggggcctctgggtgcctttaaaagaagcgtggggcgtcccacggggaattcaactgaggtgagaaatgggggcaaaggactccaagccctcatacagctattcttcttcatatgatcatgggaattcatcatctggatataactcgagataccctgcataccctgcaaatgcatcttccagtctgaacacaagggatgctccttctatggagaaccatttgctgtcccaaacgcatgcccagatgcaaaggaagtactccaggattggtgaagactaccgctctctgaatcaagtgacttgagctttggcacacgcagggccttgaatcatcaaatcttat

SEQ ID NO: 39061 - DNA, 195 bp, Oryza sativa
  Clone ID: uC-osroM202010d04a1
ggcccaccgcgccgcgaggcgcggggggccagacaccgggtccccgcgccctcccggataggcgggggcgcgcggagcgttttttggcgggacccccaggcaggcgtgccctcggccggatggcctcgggcgcaacttgggttcaaagacctgatggttcacgggatttttgtatttcacaccaggtattgcatt

SEQ ID NO: 39062 - DNA, 316 bp, Oryza sativa
  Clone ID: uC-osroM202010d05a1
ttttgtttttttttttttttttcacagggttaccattttaccaagtatacattaacacaaaaacactatagaatataatctatagtagcctgtagcctatgtctatgtatacacatgaatgtctgaacgagatgtagctgcacgacattgtgttcacagcataaaggttagatacagttacttatgcaaacggtgaggactttaggctattcctaacaatccacaactatagcgagtactgtggtttcccttaacccttttttgggaaacaagtgaagcttatgggatacaattgtatgatcttccagttatttgc

SEQ ID NO: 39063 - DNA, 378 bp, Oryza sativa
  Clone ID: uC-osroM202010d06a1
ttttgttgattagtaatatacctgctggctgatttattatttaaaaaaaactcctacgaacatgtgggttccagacatgttagacacaaacaatacagccgatcgatgcgatgacctcctcacatcacagtcacagagtcacagttacagatctgctcgctggtcgtggtgatcgggcgcaggcgcagcaggtcgggaagggagaggcagcctgagccttgcaatgaggagcctggccacgttttccgctgcaacggcccccgtctccatggcgctcgctgcgctttcgaatgtattcacgtagtacagctgtttaccgcccagtatttatcggagcaaatacttctggagcttcatagtgcggatacccaggcccag

SEQ ID NO: 39064 - DNA, 439 bp, Oryza sativa
  Clone ID: uC-osroM202010d07a1
gccggtgaggcgaagatgtcgtggcaggcgtacgtcgacgaccacctgatgtgcgagattgacggcaaccacctcaccgccgccgccatcgtcggccacgacggcagcgtctgggcgcagtcccccaacttcccgcagtacaagcctgaggagattactggcatcatgaaggactttgatgaacccggcagtctcgcaccaactggtcttttccttgggggcacaaaatacatggtgatccaaggtgaaccaggggttgtcatccgaggaaagaagggcactggaggcatatgtgtcaagaagactggcctgtcgttgattcttggaatctatgatgagccgatgaccccaggccagtgcaacatgattgtggagaggcttggcgattatctgatcgagcagggttgcttagtcctcaatatgctattttggtaatttg

SEQ ID NO: 39065 - DNA, 298 bp, Oryza sativa
  Clone ID: uC-osroM202010d07b1
ctgtgttctttttttaatttttttgggttttttattttttttttttttttttttcaaaaaaaaggcaataatttttataaaggaaaacccccaggttccattaccagttaattgttcaaatctcaatgaatgtacagcttatttttttttcacacttttccacaaataaaccccaggtaaatttttttaaacactgtttccaaccaacaaaccggggttaaatttttccttccattttattgtaaacccaagcaaaagcaagttttattttttcatccaaataggggggaaatttttt

SEQ ID NO: 39066 - DNA, 433 bp, Oryza sativa
  Clone ID: uC-osroM202010d08a1
acaaagaaccgtaaaatagtatcatcaccatgttcatctagacatagtagaaaacattcacactctcgaaatgctctctatctttcagttttgggttgctatacgtcttcttgttttgcattttttttagtattccatttctgttcagcagagtggcagtggcgcgccattccattccttgaggcattcgagcagcgggtcgatgtgcttgcgctcgttgatggcgacgagcaccttgttcagctcctcgccgggcgaccgcgttttctcgccggtgaggtactcggtgccgaccttctcgcgcacgaaccggtagagcgggtacgagcggcactccttgatccggttggggacgagcggggtgccggtttcgacggcggggcgggcggccttcacctccttgggcagcgcggcgcggacgtgctgctcgaac

SEQ ID NO: 39067 - DNA, 440 bp, Oryza sativa
  Clone ID: uC-osroM202010d09a1
ggttaaatcttcacttgtatcagaaaactttgtttaatgtaactatataggattacacatcaaaagctactagtacaacttgactaaactgtagatcccctgaagcatccggggataagagagcagcctaattaccaatttatcatgacctgattaacaaattaactcttatacatgctagtagtatctcgagcaagcacgttaatgacactgcattcatgcaagtgcaagtgtaattaagctctagtcgatcttgacggaggagtagatgagcctggtgaaccagaagcaggcgtagaagccgattgtgccggtgaggacgaagaaggcggcggaggcgatgagcatgtagccgaagtagagcacgccggagacgaccttggtgatgtcgagcttggtgaagaagtagaaggcggcgtaaaggaagaggtagagcgccc

SEQ ID NO: 39068 - DNA, 336 bp, Oryza sativa
  Clone ID: uC-osroM202010d10a1
aaaaccatcagaaaagaacataacttgaataaagtttggacagaacacttcagttgagagatcccactgaaatcttatacatcaaagatttccaagagttcataaacagaagtttgccagttacaattcggctacaaatttacagcagatattgagataacatgaagagacaggagtactaattatctgaagacttgatatgctacaacgagcagtttacagcgaacaaatgtacttaactagattgtcaatggcgagagtcccagcgacccattgattcgcctggattttcaggggacgcgctggatcccttatcgcggggccttcttccccaac

SEQ ID NO: 39069 - DNA, 362 bp, Oryza sativa
  Clone ID: uC-osroM202010d11a1
actctcagaaacggacccattacacgatgaaaaccaatgaaacacgaaaaaaaaaaagcgcaaaagaccgacaaacaacgcctgcgacgaccgaggcatgtgggggccagagaggggcaccgagtcactgacgctgggccccaccggcctggatgacaaactcttgtatttagccccacgtcaggcgtacccacacacacgtacggaggcgagtactaccactacagctcactcaactaatcactcgctacacgcacacgtacgtgcaactccggcgagacgccggaggtggcggcgcgcgcgggccatgcatgtactccacggtggacgacgacggggagccagcctgccccggcatgcac

SEQ ID NO: 39070 - DNA, 338 bp, Oryza sativa
  Clone ID: uC-osroM202010d11b1
ttctcagtggaggcgacgccggcggccgccgggggccatgtggaagcgccgaaggaggagacaccggcggcgcccgccgaggctgtggccgaggaggcggcgcccgccgaggccgaggtggcggagaccaaggaggcggagccagctgcggccgaaccggcggctgaggaggtgaaggaggccgagcccgagccggccgagccggaggccgagcctgccaaggaggaggtggcgccagagcccgccgccgccgccgaggcggaggccaaggaggccgagccggcggcgcaagtggcctaagaggtgaaggaggaggaggcggcaccggcgccggccgc

SEQ ID NO: 39071 - DNA, 65 bp, Oryza sativa
  Clone ID: uC-osroM202010d12a1
gttcttggttttttttataggtaagggccagaaccaaacaccccacttaaataacgacccaactc
